United States Patent Application Publication US 2022/0096574 A1 - sequence listing, part 11

SEQ ID NO: 52023 - protein, 379 aa, Bacillus canaveralius
  misc_feature (1)..(379): tr|A0A2N5GH42|A0A2N5GH42_9BACI Queuine tRNA-ribosyltran sferase OS=Bacillus canaveralius OX=1403243 GN=tgt PE=3 SV=1
MTAIRYELIKTCKQTGARLGRVHTPHGSFETPVFMPVGTLATVKTMSPEELTEMGAGIILSNTYHLWLRPGHDIIKEAGGLHKFMNWDKAILTDSGGFQVFSLSEFRKIEEEGVHFRNHLNGDKLFLSPEKAMDIQNALGSDIMMAFDECPPYPASFEYMKSSVERTSRWAERCLAAHKRPKDQGLFGIVQGGEYEELRKQSARDLVSLDFPGYAVGGLSVGEPKDVMNTVLEFTTPLLPANKPRYLMGVGSPDSLIDGAIRGIDMFDCVLPTRIARNGTLMTSEGRLVVKNAKYARDFGPLDPECDCYTCRNYSRAYIRHLIRSEETFGIRLTTYHNLYFLLKLMEQVRQAIREDRLGDFKEEFFEKYGFNKPNAKNF

SEQ ID NO: 52024 - protein, 379 aa, Bacillus caseinilyticus
  misc_feature (1)..(379): tr|A0A1H3K6R5|A0A1H3K6R5_9BACI Queuine tRNA-ribosyltran sferase OS=Bacillus caseinilyticus OX=1503961 GN=tgt PE =3 SV=1
MAAITYEHIKTCKQSGARLGIVHTPHGSFETPMFMPVGTLATVKTMSPEDLKDMGAKIILSNTYHLWLRPGNEIIKEAGGLHRFMNWDRPILTDSGGFQVFSLSDMRKITEEGVEFRNHLNGERLFLTPEKCMEIQNDLGPDIMMAFDECPPYPAEYDYLKASVERTSRWAERCLKAHKRPEDQGLFGIVQGGEYEDLRRQSAEDLISLDFPGYAVGGLSVGEPKEVMNRVLEFTTPLLPADKPRYLMGVGSPDSLVDGSIRGIDMFDCVLPTRIARNGTLMTSTGRLVVRNAKYARDYRPLDENCDCHVCQNYSRAYIRHLVKCGETFGFRLTTYHNLYFLLKLMENIRQAIREDRLLDYREEFFEAYGFNKPDAKNF

SEQ ID NO: 52025 - protein, 379 aa, Bacillus cavernae
  misc_feature (1)..(379): tr|A0A3S0TTS5|A0A3S0TTS5_9BACI Queuine tRNA-ribosyltran sferase OS=Bacillus cavernae OX=1674310 GN=tgt PE=3 SV= 1
MTAIRYEHIKTDKQTGARLGIVHTPHGSFETPAFMPVGTLATVKTMSPEDLKTLGAGIILSNTYHLWLRPGHDIIKEAGGLHKFMNWDRAILTDSGGFQVFSLSEFRKIEEEGVHFRNHLNGDKLFLSPEKAMEIQNALGSDIMMAFDECPPFPATFEYMKKSVERTSRWAERCLAAHKRPEDQGLFGIIQGGEFEELRKQSAKDLVSLDFSGYAVGGLSVGEPKDVMNKVLEFTTPLLPADKPRYLMGVGSPDSLIDGAIRGIDMFDCVLPTRIARNGTLMTSTGRLVVKNAKYARDFGPLDENCDCYVCKNYSRAYIRHLIRCEETFGIRLTTYHNLHFLLNLMEQVRQAIREDRLGDFREEFFERYGFNKPGAKNF

SEQ ID NO: 52026 - protein, 379 aa, Bacillus cellulosilyticus
  misc_feature (1)..(379): tr|E6TV73|E6TV73_BACCJ Queuine tRNA-ribosyltransferase OS=Bacillus cellulosilyticus (strain ATCC 21833 / DSM 2 522 / FERM P-1141 / JCM 9156 / N-4) OX=649639 GN=tgt PE =3 SV=1
MAAITYEHIKTCKQSGARLGIVHTPHGSFETPMFMPVGTLATVKTMSPEDLKDMGAKIILSNTYHLWLRPGHDIIKEAGGLHKFMNWDRPILTDSGGFQVFSLSDMRKITEEGVEFKNHLNGERLFLSPEKCMSIQNDLGPDIMMAFDECPPYPAEYDYMKASVERTTRWAERCIKSHARPDEQGLFGIVQGGEYEELRRQSANDLIAMDFPGYAIGGLSVGEPKDVMNRVLEYTTPLLPQDKPRYLMGVGSPDSLVDGAIRGIDMFDCVLPTRIARNGTLMTSEGRLVVRNAKYARDFRPIDENCSCHVCQNYSRAYIRHLVKCSETFGFRLTTYHNLHFLLTLMENVRTAIREDRLLDFREEFFEMYGFNKPNAKNF

SEQ ID NO: 52027 - protein, 379 aa, Bacillus cereus; identical to SEQ ID NO: 52017
  misc_feature (1)..(379): sp|Q817W6|TGT_BACCR Queuine tRNA-ribosyltransferase OS= Bacillus cereus (strain ATCC 14579 / DSM 31 / JCM 2152 / NBRC 15305 / NCIMB 9373 / NRRL B-3711) OX=226900 GN=t gt PE=3 SV=1

SEQ ID NO: 52028 - protein, 379 aa, Bacillus cereus; identical to SEQ ID NO: 51992
  misc_feature (1)..(379): tr|J8J3P4|J8J3P4_BACCE Queuine tRNA-ribosyltransferase OS=Bacillus cereus VD102 OX=1053228 GN=tgt PE=3 SV=1

SEQ ID NO: 52029 - protein, 379 aa, Bacillus circulans
  misc_feature (1)..(379): tr|A0A0J1I8N5|A0A0J1I8N5_BACCI Queuine tRNA-ribosyltran sferase OS=Bacillus circulans OX=1397 GN=tgt PE=3 SV=1
MTAIRYEFIKTCKQTGARLGIVHTPHGSFETPAFMPVGTLATVKTMAPEDLKTMGANIILSNTYHLWLRPGHDIVKEAGGLHKFMNWDKAILTDSGGFQVFSLSDFRKIEEEGVHFRNHLNGDKLFLSPEKAMEIQNALGSDIMMAFDECPPYPAEYDYMKKSVDRTSRWAERCLKAHKRPEDQGLFGIIQGGEYEELRKQSARDLVSLDLPGYAVGGLSVGEPKDVMNRVLEFTTPLMPDNKPRYLMGVGSPDSLIDGAIRGIDMFDCVLPTRIARNGTVMTSEGRLVVKNAKYARDFGPLDPECDCYTCKNYSRAYIRHLIRCDETFGIRLTSYHNLYFLLNLMENVRDAIRNDRLGDFKEEFFERYGFNKPNAKNF

SEQ ID NO: 52030 - protein, 379 aa, Bacillus circulans
  misc_feature (1)..(379): tr|A0A553SKE4|A0A553SKE4_BACCI Queuine tRNA-ribosyltran sferase OS=Bacillus circulans OX=1397 GN=tgt PE=3 SV=1
MTAIRYELIKTCKQTGARLGIVHTPHGSFETPAFMPVGTLATVKTMAPEDLKTMGANIILSNTYHLWLRPGHEIVKEAGGLHKFMNWDKAILTDSGGFQVFSLSDFRKIQEEGVHFRNHLNGDKLFLSPEKAMEIQNALGSDIMMAFDECPPYPAEYDYMKASVERTSRWAERCLKAHGRPEDQGLFGIIQGGEYEELRKQSARDLVSLDFPGYAVGGLSVGEPKDVMNRVLEFTTPLMPDNKPRYLMGVGSPDSLIDGAIRGIDMFDCVLPTRIARNGTCMTSEGRLVVKNAKYARDFGPLDPECDCYTCKNYSRAYIRHLIKCDETFGIRLTSYHNLYFLLNLMENVRQAIREDRLGDFKEEFFERYGFNKPNAKNF

SEQ ID NO: 52031 - protein, 383 aa, Bacillus clausii
  misc_feature (1)..(383): sp|Q5WHR2|TGT_BACSK Queuine tRNA-ribosyltransferase OS= Bacillus clausii (strain KSM-K16) OX=66692 GN=tgt PE=3 SV=1
MTAAITYEHIKTCKQSGARLGRVHTPHGTIETPMFMPVGTLATVKTMSPEDLKAMDAQIILSNTYHLWLRPGEEIIKEAGGLHQFMNWDKPILTDSGGFQVFSLSDLRKITEEGVHFRNHLSGEKLFLSPEKAMQIQHVLGSDIMMAFDECPPYPADHSYMKASVERTSRWAERCLAEHKRSGKDSVQGLFGIIQGGEYEDLRKQSANDLTALDFPGYAVGGLSVGEPKDVMNHVLEFTTPLMPEDKPRYLMGVGSPDSLIDGAIRGIDMFDCVLPTRIARNGTCMTSAGRLVVRNAKYARDFSPLDEKCDCHVCRTYSRAYIRHLIKCEETFGFRLTTYHNLYFLLNLMKQVRQAIMDDCLLDFREQFFEEYGFNKENARNF

SEQ ID NO: 52032 - protein, 383 aa, Bacillus clausii; identical to SEQ ID NO: 52031
  misc_feature (1)..(383): tr|A0A268NYS9|A0A268NYS9_BACCS Queuine tRNA-ribosyltran sferase OS=Bacillus clausii OX=79880 GN=tgt PE=3 SV=1

SEQ ID NO: 52033 - protein, 379 aa, Bacillus coagulans
  misc_feature (1)..(379): tr|A0A412GZT0|A0A412GZT0_BACCO Queuine tRNA-ribosyltran sferase OS=Bacillus coagulans OX=1398 GN=tgt PE=3 SV=1
MAAITYELIKTEKHTGARLGKLHTPHGTYDTPMFMPVGTLATVKTMSPEELKTMGAGTILSNTYHLWLRPGHDIVKEAGGLHKFMNWDQAILTDSGGFQVFSLSKIRDITEEGVHFRNHLNGDKLFLSPEKSMEIQNALGSDIMMAFDECPPYPASYEYMKQSVERTARWAERCLRAHARPGVQGLFGIVQGGAYEDLRLESANALVSLGFPGYAIGGLSVGEPKDVMNRMLAFTTPLLPSDKPRYLMGVGSPDSLIDGAIRGIDMFDCVLPTRIARNGTVMTSTGRLVVKNAQYARDFRPLDEHCDCYTCRHYSRAYIRHLIKCGETFGIRLTTYHNLYFLLKLMENVRQAIREDRLLDFKEEFFEQYGFNRPDAKNF

SEQ ID NO: 52034 - protein, 152 aa, Bacillus coagulans
  misc_feature (1)..(152): tr|A0A150JZQ7|A0A150JZQ7_BACCO tRNA-guanine transglycos ylase OS=Bacillus coagulans OX=1398 GN=B4098_2579 PE=4 SV=1
MNRMLAFTTPLLPSDKPRYLMGVGSPDSLIDGAIRGIDMFDCVLPTRIARNGTVMTSTGRLVVKNAQYARDFRPLDEHCDCYTCRHYSRAYIRHLIKCGETFGIRLTTYHNLYFLLKLMENVRQAIREDRLLDFKEEFFEQYGFNRPDAKNF

SEQ ID NO: 52035 - protein, 379 aa, Bacillus coahuilensis
  misc_feature (1)..(379): tr|A0A147K6Y1|A0A147K6Y1_9BACI Queuine tRNA-ribosyltran sferase OS=Bacillus coahuilensis p1.1.43 OX=1150625 GN= tgt PE=3 SV=1
MTAIRYELIKTCKQTGARLGRVHTPHGSFETPVFMPVGTLATVKTMSPEDLIQLGAGIILSNTYHLWLRPGHEIIKEAGGLHKFMNWDRAILTDSGGFQVFSLSEFRKIEEEGVHFRNHLNGDKLFLSPEKAMEIQNALGSDIMMAFDECPPYPAEYDYMKKSVERTSRWAERCLTAHARPLDQGLFGIVQGGEYEDLRKQSAKDLISLDFPGYAIGGLSVGEPKDVMNRVLEFTTPWLPNDKPRYLMGVGSPDSLIDGAIRGVDMFDCVLPTRIARNGTLMTSNGRLVVKNAKYARDFGPIDENCSCHVCKNYSRAYIRHLIKCEETFGIRLTTYHNLHFLLNLMEQVRQAIREDRLGDFREEFFEQYGFNRPDAKNF

SEQ ID NO: 52036 - protein, 379 aa, Bacillus cohnii
  misc_feature (1)..(379): tr|A0A223KTA8|A0A223KTA8_9BACI Queuine tRNA-ribosyltran sferase OS=Bacillus cohnii OX=33932 GN=tgt PE=3 SV=1
MTAIKYELIKTCKQTGARLGRVHTPHGSFETPVFMPVGTLATVKTMSPEDLKQMGAGIILSNTYHLWLRPGHEIVKEAGGLHKFMNWDRAILTDSGGFQVFSLSEFRKIEEEGVHFRNHLNGDKLFLSPEKAMEIQNALGSDIMMAFDECPPYPATEEYMRRSVERTSRWAERCLTAHKRPEDQGLFGIIQGGEFEHLRKQSAKDLVSLDFPGYAVGGLSVGEPKDVMNRVLEFTTPWMPDNKPRYLMGVGSPDSLIDGAIRGIDMFDCVLPTRIARNGTLMTSEGRLVVKNAKFARDFDPIDPECDCYTCKNYSRAYIRHLIKCDETFGIRLTTYHNLHFLLKLMENVRQAIREDRLGDFREEFFEKYGFNKPGAKNF

SEQ ID NO: 52037 - protein, 379 aa, Bacillus cucumis
  misc_feature (1)..(379): tr|A0A2N5H6Z0|A0A2N5H6Z0_9BACI Queuine tRNA-ribosyltran sferase OS=Bacillus cucumis OX=1740721 GN=tgt PE=3 SV=1
MTAIRYELIKTCKQTGARLGRVHTPHGSFDTPAFMPVGTLATVKTMSPEDLKEMGAGIILSNTYHLWLRPGHEIIREAGGLHKFMNWDRAILTDSGGFQVFSLSEFRKIEEEGVHFRNHMSGEKLFLSPEKAMEIQNALGSDIMMAFDECPPYPATFEYMKKSVERTSRWAERCLNAHQRPEDQGLFGIVQGGEYEELRRQSANDLVSLDFPGYAVGGLSVGEPKDVMNRVLEFTTPMLPSNKPRYLMGVGSPDSLIDGAIRGIDMFDCVLPTRIARNGTLMTSTGRLVVKNAQFARDFGPLDPECDCYTCRNYSRAYIRHLIKCDETFGIRLTSYHNLYFLLRLMEKVRQAIMEDRLGDFREEFFERYGFNKPNAKNF

SEQ ID NO: 52038 - protein, 379 aa, Bacillus cytotoxicus
  misc_feature (1)..(379): sp|A7GT99|TGT_BACCN Queuine tRNA-ribosyltransferase OS= Bacillus cytotoxicus (strain DSM 22905 / CIP 110041 / 3 91-98 / NVH 391-98) OX=315749 GN=tgt PE=3 SV=1
MTAIRYEFIKKCKQTGARLGRVHTPHGSFDTPTFMPVGTLATVKTMSPEELKAMDSGIILSNTYHLWLRPGHEIVREAGGLHKFMNWDRAILTDSGGFQVFSLSDFRRIEEEGVYFRNHLNGDKLFLSPEKAMEIQNALGSDIMMAFDECPPFPATFEYMKKSVERTSRWAERCLNAHQRPEDQGLFGIVQGGEFEELRRQSAKDLVSMDFPGYAVGGLSVGEPKDIMNRVLEFTTPLLPENKPRYLMGVGSPDSLIDGAIRGIDMFDCVLPTRIARNGTCMTSQGRLVVKNAKFARDFGPLDPNCDCYTCKNYSRAYIRHLMKCDETFGIRLTSYHNLHFLLNLMEQVRQAIREDRLGDFREEFFEQYGFNKPNAKNF

SEQ ID NO: 52039 - protein, 379 aa, Bacillus cytotoxicus; identical to SEQ ID NO: 52038
  misc_feature (1)..(379): tr|A0A2S1AE34|A0A2S1AE34_9BACI Queuine tRNA-ribosyltran sferase OS=Bacillus cytotoxicus OX=580165 GN=tgt PE=3 S V=1

SEQ ID NO: 52040 - protein, 379 aa, Bacillus daliensis
  misc_feature (1)..(379): tr|A0A1H0BLM2|A0A1H0BLM2_9BACI Queuine tRNA-ribosyltran sferase OS=Bacillus daliensis OX=745820 GN=tgt PE=3 SV= 1
MPAITYEHIKTCKQSGARLGIVHTPHGSFETPIFMPVGTLATVKTMSPDDLVEMNAQIILSNTYHLWLRPGEDIIEEAGGLHKFMNWDRPILTDSGGFQVFSLSDLRNITEEGVHFRNHLSGEKLFLTPEKSMQIQNSLGPDIMMAFDECPPYPAEHKYMKDSVERTSRWAERCLEAHKRPGDQGLFGIIQGGEHPDLRRQSAEDLVSLDFPGYAIGGLSVGEPKDVMNRVLEETTPFMPDNKPRYLMGVGSADSLIDGAIRGVDMFDCVLPTRIARNGTLMTSSGRLVVRNAKFARDFRPLDENCNCKVCKNYSRAYLRHLIKSNETLGLILCSYHNLHFLITLMDKVRQAIREDRLLDFREQFFEAYGFNKPDAKNF

SEQ ID NO: 52041 - protein, 379 aa, Bacillus deserti
  misc_feature (1)..(379): tr|A0A2N5M951|A0A2N5M951_9BACI Queuine tRNA-ribosyltran sferase OS=Bacillus deserti OX=673318 GN=tgt PE=3 SV=1
MNPIRYEHIKTCKQTGARLGIVHTPHGSFETPVFMPVGTLATVKTMSPEELTAMGAGIILSNTYHLWLRPGNDIVREAGGLHKFMNWDKAILTDSGGFQVFSLSEFRKIEEEGVHFRNHLNGDKLFLSPEKAMHIQNDLGSDIMMAFDECPPFPATHEYMKKSVERTSRWAERCLNAHNRPQDQGLFGIVQGGEYEDLRKMSAKDLTSLDFPGYAVGGLSVGEPKDVMNRVLEFTTPLLPADKPRYLMGVGSPDSLIDGAIRGIDMFDCVLPTRIARNGTLMTSNGRVVIKNAKYARDFGPLDENCSCHVCQNYSRAYIRHLIRCEETLGIRLTTYHNLHFLVNLMEQVRQAIREDRLGDFREEFFERYGFNKPDAKNF

SEQ ID NO: 52042 - protein, 379 aa, Bacillus enclensis
  misc_feature (1)..(379): tr|A0A0V8HMQ0|A0A0V8HMQ0_9BACI Queuine tRNA-ribosyltran sferase OS=Bacillus enclensis OX=1402860 GN=tgt PE=3 SV =1
MTAIKYEHIKTCKQTGARLGRVHTPHGSFETPVFMPVGTLATVKTMSPEDLKSMDAGIILSNTYHLWLRPGHEIIREAGGLHKFMNWDRAILTDSGGFQVFSLSKLRKIEEEGVHFRHHLNGDKLFLSPEKAMEIQNALGSDIMMAFDECPPYPAEYEYMKSSVERTSRWAERCLQAHQRPQDQGLFGIVQGGEYEELRKQSARDLVSLDFPGYAVGGLSVGEPKDVMNRVLEFTTPHLPDDKPRYLMGVGSPDSLIDGAIRGIDMFDCVLPTRIARNGTLMTSEGRLVVKNAKYARDFRPIDENCDCYTCKNYSRAYIRHLIKCDETFGIRLTTYHNLHFLLNLMEQVRQAIREDRLGDFREEFFEQYGFNRPDAKNF

SEQ ID NO: 52043 - protein, 379 aa, Bacillus endophyticus
  misc_feature (1)..(379): tr|A0A329ERF1|A0A329ERF1_9BACI Queuine tRNA-ribosyltran sferase OS=Bacillus endophyticus OX=135735 GN=tgt PE=3 SV=1
MTAIRYEHIKTCKQTGARLGRVHTPHGTFETPTFMPVGTLATVKTMSPEELKQMGAGIILSNTYHLWLRPGHEIVKKAGGLHKFMNWDRPILTDSGGFQVFSLSEFRKIQEEGVHFRNHLSGEKLFLSPEGAMEIQNALGSDIMMAFDECPPYPASYEYMKKSVERTSRWAERCLEAHARPNDQGLFGIVQGGEYEELRKQSAKDLISLDFPGYAIGGLSVGEPKDVMNRVLEFTTPLLPTDKPRYLMGVGSPDSLVDGAIRGVDMFDCVLPTRIARNGTLMTSEGRLVVRNAKFAEDFRPIDENCDCYTCQNYSRAYIRHLIRSNETFGLRLTSYHNLYFLLKLMEQVRQAIREDRLGDFRDEFFEQYGFNKPNAKNF

SEQ ID NO: 52044 - protein, 379 aa, Bacillus endozanthoxylicus
  misc_feature (1)..(379): tr|A0A5J5HVK8|A0A5J5HVK8_9BACI tRNA guanosine(34) trans glycosylase Tgt OS=Bacillus endozanthoxylicus OX=203601 6 GN=tgt PE=4 SV=1
MTAVTYELIKTCKQTGARLGRVHTPHGSFETPVFMPVGTLATVKTMSPEDLKEMGAGIILSNTYHLWLRPGHDIVKEAGGLHKFMNWDRAILTDSGGFQVFSLSEFRKIEEEGVHFRNHLNGDKLFLSPEKAMEIQNALGSDIMMAFDECPPYPAEFDYMKKSVERTSRWAERCLKAHARPNDQGLFGIVQGGEYEELRKQSARDLVSLDFPGYAIGGLSVGEPKDVMNRVLEFTTPLLPTDKPRYLMGVGSPDSLIDGAIRGVDMFDCVLPTRIARNGTLMTSSGRLVVKNAKYAKDFGPIDEHCDCYTCRNYSRAYIRHLIRCDETFGIRLTSYHNLYFLVKLMEQVRQAIREDRLGDFREEFFERYGFNKPNAKNF

SEQ ID NO: 52045 - protein, 379 aa, Bacillus filamentosus
  misc_feature (1)..(379): tr|A0A0H4KPJ3|A0A0H4KPJ3_9BACI Queuine tRNA-ribosyltran sferase OS=Bacillus filamentosus OX=1402861 GN=tgt PE=3 SV=1
MTAIRYEHIKTCKQTGARLGRVHTPHGTFETPTFMPVGTLATVKTMSPEELKQMGAGIILSNTYHLWLRPGHEIVKKAGGLHKFMNWDRPILTDSGGFQVFSLSEFRKIQEEGVHFRNHLSGEKLFLSPEGAMEIQNALGSDIMMAFDECPPYPASYEYMKKSVERTSRWAERCLEAHARPNDQGLFGIVQGGEYEELRKQSAKDLISLDFPGYAIGGLSVGEPKDVMNRVLEFTTPLLPTDKPRYLMGVGSPDSLVDGAIRGVDMFDCVLPTRIARNGTLMTSEGRLVVRNAKFAEDFRPIDENCDCYTCQNYSRAYIRHLIRANETFGLRLTSYHNLYFLLKLMEQVRQAIREDRLGDFRDEFFEQYGFNKPNAKNF

SEQ ID NO: 52046 - protein, 379 aa, Bacillus filamentosus
  misc_feature (1)..(379): tr|A0A1X7CV04|A0A1X7CV04_9BACI Queuine tRNA-ribosyltran sferase OS=Bacillus filamentosus OX=1402861 GN=tgt PE=3 SV=1
MTAIRYEHIKTCKQTGARLGRVHTPHGTFETPTFMPVGTLATVKTMSPEELKQMGAGIILSNTYHLWLRPGHEIVKKAGGLHKFMNWDRPILTDSGGFQVFSLSEFRKIQEEGVHFRNHLSGEKLFLSPEGAMEIQNALGSDIMMAFDECPPYPASYEYMKKSVGRTSRWAERCLEAHARPNDQGLFGIVQGGEYEELRKQSAKDLISLDFPGYAIGGLSVGEPKDVMNRVLEFTTPLLPTDKPRYLMGVGSPDSLVDGAIRGVDMFDCVLPTRIARNGTLMTSEGRLVVRNAKFAEDFRPIDENCDCYTCQNYSRAYIRHLIRANETFGLRLTSYHNLYFLLKLMEQVRQAIREDRLGDFRDEFFEQYGFNKPNAKNF

SEQ ID NO: 52047 - protein, 379 aa, Bacillus firmus
  misc_feature (1)..(379): tr|A0A0J5VEM9|A0A0J5VEM9_BACFI Queuine tRNA-ribosyltran sferase OS=Bacillus firmus OX=1399 GN=tgt PE=3 SV=1
MTAIRYELIKTCKQTGARLGRVHTPHGSFETPVFMPVGTLATVKTMSPEELVEMGAGIILSNTYHLWLRPGQEIVEEAGGLHKFMNWDRAILTDSGGFQVFSLSEFRKIEEEGVHFRNHLNGDKLFLSPEKAMDIQNSLGSDIMMAFDECPPYPASFEYMKKSVERTSRWAERCLKAHKRPNDQGLFGIIQGGEYEELRKQSARDLTSLDFPGYAVGGLSVGEPKDVMNRVLEFTTPLMPSDKPRYLMGVGSPDSLIDGSIRGIDMFDCVLPTRIARNGTLMTSNGRLVVKNAKFARDFGPIDENCDCYTCRNYSRAYIRHLIRCDETFGIRLTTYHNLYFLLKLMEQVRQAIREDRLGDFREEFFERYGFNKPNAKNF

SEQ ID NO: 52048 - protein, 379 aa, Bacillus firmus
  misc_feature (1)..(379): tr|A0A366JYG0|A0A366JYG0_BACFI Queuine tRNA-ribosyltran sferase OS=Bacillus firmus OX=1399 GN=tgt PE=3 SV=1
MTAIRYELIKTCKQTGARLGRVHTPHGSFETPVFMPVGTLATVKTMSPEELVEMGAGIILSNTYHLWLRPGQEIVEEAGGLHKFMNWDRAILTDSGGFQVFSLSEFRKIEEEGVHFRNHLNGDKLFLSPEKAMDIQNSLGSDIMMAFDECPPYPASFEYMKKSVERTSRWAERCLQAHKRPNDQGLFGIIQGGEYEELRKQSARDLTSLDFPGYAVGGLSVGEPKDVMNRVLEFTTPLLPSDKPRYLMGVGSPDSLIDGSIRGIDMFDCVLPTRIARNGTLMTSNGRLVVKNAKFARDFGPIDENCDCYTCRNYSRAYIRHLIRCDETFGIRLTTYHNLYFLLKLMEQVRQAIRDDRLGDFREEFFERYGFNKPNAKNF

SEQ ID NO: 52049 - protein, 379 aa, Bacillus flexus
  misc_feature (1)..(379): tr|A0A4P8X5G0|A0A4P8X5G0_9BACI Queuine tRNA-ribosyltran sferase OS=Bacillus flexus OX=86664 GN=tgt PE=3 SV=1
MTAIRYEHIKTCKQTGARLGIVHTPHGSFETPIFMPVGTLATVKTMSPEDLKAMGAGIILSNTYHLWLRPGHEIVKKAGGLHKFMNWDRPILTDSGGFQVFSLSDLRRIEEEGVHFRNHLNGDKLFLSPEGAMEIQNALGSDIMMAFDECPPYPAEYDYLKRSVERTSRWAERCLEAHSRPQDQGLFGIVQGGEFEDLRRQSASDLVSMDFPGYAVGGLSVGEPKDVMNRVLEFTTPYLPADKPRYLMGVGSPDSLIDGAIRGIDMFDCVLPTRIARNGTLMTSEGRLVVKNAKYAEDFGPIDPNCDCYTCKNYSRAYIRHLIRSNETFGIRLTSYHNLYFLLNLMEQVREAIREDRLGDFRDEFFDKYGFNGPNAKNF

SEQ ID NO: 52050 - protein, 379 aa, Bacillus foraminis
  misc_feature (1)..(379): tr|A0A4R2BDW4|A0A4R2BDW4_9BACI Queuine tRNA-ribosyltran sferase OS=Bacillus foraminis OX=279826 GN=tgt PE=3 SV= 1
MSAIRYELIKTCKQTGARLGRVHTPHGSFETPVFMPVGTLATVKTMSPEELKEMGAGIILSNTYHLWLRPGHEIVREAGGLHKFMNWDRAILTDSGGFQVFSLSEFRKIEEEGVHFRNHLNGDKLFLSPEKAMDIQNALGSDIMMAFDECPPYPASFEYMKSSVERTSRWAERCLAAHNRPNDQGLFGIVQGGEYEELRKQSAKDLVSLDFPGYAVGGLSVGEPKDVMNRVLEFTTPLLPANKPRYLMGVGSPDSLIDGAIRGIDMFDCVLPTRIARNGTLMTSSGRLVVKNAQYARDFGPIDEHCDCYTCRNYSRAYIRHLIKCDETFGIRLTTYHNLYFLVKLMEQVRQAIMEDRLGDFREEFFERYGFNKPDAKNF

SEQ ID NO: 52051 - protein, 379 aa, Bacillus fortis
  misc_feature (1)..(379): tr|A0A443J3J6|A0A443J3J6_9BACI Queuine tRNA-ribosyltran sferase OS=Bacillus fortis OX=254758 GN=tgt PE=3 SV=1
MPAITYELIKTCKQTGARLGMVHTPHGSYETPMFMPVGTLATVKTMSPEELKEMGAGIILSNTYHLWLRPGEDIVEEAGGLHKFMNWDQGILTDSGGFQVFSLSEFRQIEEEGVHFRNHLNGDKLFLSPEKAMSIQNSLGSDIMMAFDECPPYPASHEYMKNSVERTSRWAERCLNAHKRPKDQGLFGIVQGGEYEDLRKQSAKDLVSLDFPGYAIGGLSVGEPKDVMNRMLEFTTPLLPSDKPRYLMGVGSPDSLVDGAIRGVDMFDCVLPTRIARNGTLMTSQGRLVVKNAAYARDFGPLDEDCDCYACRNYSRAYVRHLIKCNETFGIRLTTYHNLYFLLKLMKQVRDAIKEDRLGDFREEFFERYGFNRPDAKNF

SEQ ID NO: 52052 - protein, 379 aa, Bacillus freudenreichii
  misc_feature (1)..(379): tr|A0A3S4RLK5|A0A3S4RLK5_9BACI Queuine tRNA-ribosyltran sferase OS=Bacillus freudenreichii OX=1783501 GN=tgt PE =3 SV=1
MPAITYELIKTCKQTGARLGMIHTPHGSYETPMFMPVGTLATVKTMSPEELKEMGAGIILSNTYHLWLRPGEDIVEEAGGLHRFMNWDQGILTDSGGFQVFSLSEFREIEEEGVHFRNHLNGDKLFLSPEKAMAIQNSLGSDIMMAFDECPPYPASHEYMKNSVERTSRWAERCLKAHKRADVQGLFGIVQGGEYEDLRKQSAKDLISLDFPGYAIGGLSVGEPKDVMNRVLDFTTPLLPSNKPRYLMGVGSPDSLVDGAVRGVDMFDCVLPTRIARNGTLMTSNGRLVVKNAAYARDFGPLDENCDCHVCRNYSRAYIRHLIKCNETFGIRLTTYHNLYFLLKLMKQVREAIKEDRLGDFREEFFERYGFNRPDAKNF

SEQ ID NO: 52053 - protein, 379 aa, Bacillus gaemokensis
  misc_feature (1)..(379): tr|A0A073KIM3|A0A073KIM3_9BACI Queuine tRNA-ribosyltran sferase OS=Bacillus gaemokensis OX=574375 GN=tgt PE=3 S V=1
MTAIRYEFIKTCKQTGARLGRVHTPHGSFDTPTFMPVGTLATVKTMSPEELKAMDSGIILSNTYHLWLRPGHEIVREAGGLHKFMNWDRAILTDSGGFQVFSLSDFRRIEEEGVHFRNHLNGDKLFLSPEKAMEIQNALGSDIMMAFDECPPFPATFEYMKKSVERTSRWAERCLKAHERPQDQGLFGIVQGGEFEELRRQSAKDLVSMDFPGYAIGGLSVGEPKDIMNRVLEFTTPLLPDNKPRYLMGVGSPDSLIDGAIRGVDMFDCVLPTRIARNGTCMTSQGRLVVKNAKFAKDFGPLDPNCDCYTCKNYSRAYIRHLMKCDETFGIRLTSYHNLHFLLNLMEQVRQAIREDRLGDFREEFFEQYGFNKPNAKNF

SEQ ID NO: 52054 - protein, 379 aa, Bacillus galactosidilyticus
  misc_feature (1)..(379): tr|A0A178A3V4|A0A178A3V4_9BACI Queuine tRNA-ribosyltran sferase OS=Bacillus galactosidilyticus OX=217031 GN=tgt PE=3 SV=1
MSAITYELIKTCKQTGARLGILHTPHGSYETPMFMPVGTLATVKTMSPEDLKAMGAGVILSNTYHLWLRPGHDIIKEAGGLHSFMNWDQAILTDSGGFQVFSLSEFRRIEEEGVHFRNHLNGDKLFLSPEKSMEIQNALGSDIMMAFDECPPYPASHDYMKKSVERTSRWAERCLEAHNRTEDQGLFGIIQGGEFEDLRKQSANDLVSLDFPGYAVGGLSVGEPKDVMNRMLEFTTPLLPNNKPRYLMGVGSPDSLIDGSIRGIDMFDCVLPTRIARNGTLMTSNGRLVVKNAAYARDFNPIDENCDCYTCRNYSRAYIRHLIKCDETFGIRLTTYHNLHFLLKLMEQVRQAIREDRLGDFKKEFFERYGFNSPDAKNF

SEQ ID NO: 52055 - protein, 379 aa, Bacillus ginsengihumi
  misc_feature (1)..(379): tr|A0A0A6VF47|A0A0A6VF47_9BACI Queuine tRNA-ribosyltran sferase OS=Bacillus ginsengihumi OX=363870 GN=tgt PE=3 SV=1
MTAIKYELIKTCKQTGARLGMIHTPHGSFETPMFMPVGTLATVKTMSPEDLKTMGAGTILSNTYHLWLRPGHDIVREAGGLHKFMNWDQAILTDSGGFQVFSLSKIRDIVEEGVHFRNHLNGDKLFLSPEKSMEIQNALGSDIMMAFDECPPYPAAYDYMKQSVERTSRWAERCLNAHQRPDVQGLFGIVQGGEFEDLRRQSANDLVSLDFPGYAVGGLSVGEPKEVMNRVLEFTTPLLPSNKPRYLMGVGSPDSLIDGAIRGIDMFDCVLPTRIARNGTVMTSKGRLVVKNAKYARDFRPLDEHCDCYTCRNYTRAYIRHLIKCDETFGMRLTTYHNLYFLLKLMENVRQAIREDRLGDFREEFFEQYGFNRPDAKNF

SEQ ID NO: 52056 - protein, 381 aa, Bacillus glycinifermentans
  misc_feature (1)..(381): tr|A0A0J6ERK5|A0A0J6ERK5_9BACI Queuine tRNA-ribosyltran sferase OS=Bacillus glycinifermentans OX=1664069 GN=tgt PE=3 SV=1
MSQQPIRYEFIKACKQTGARLGKVHTPHGSFETPAFMPVGTLATVKTMSPEELKEMGAGIILSNTYHLWLRPGHEIVKEAGGLHKFMNWDRAILTDSGGFQVFSLSEFRKIEEEGVHFRNHLNGDKLFLSPEKAMEIQNALGSDIMMAFDECPPYPAEYDYMKKSVERTSRWAERCLAAHKRPGDQGLFGIVQGGEYENLRKQSAKDLISLDFPGYAIGGLSVGEPKDVMNRVLEFTTPLLPADKPRYLMGVGSPDSLIDGAIRGVDMFDCVLPTRIARNGTLMTSEGRLVVKNAKYERDFRPIDEHCDCYTCRNYSRAYIRHLIRCNETFGIRLTSYHNLYFLLKLMGQVRDAIREDRLGDFREEFFERYGFNKPNAKSF

SEQ ID NO: 52057 - protein, 378 aa, Bacillus gobiensis
  misc_feature (1)..(378): tr|A0A0M3RB29|A0A0M3RB29_9BACI Queuine tRNA-ribosyltran sferase OS=Bacillus gobiensis OX=1441095 GN=tgt PE=3 SV =1
MPIRYELIKTCKQTGARLGKVHTPHGSFDTPAFMPVGTLATVKTMAPEDLKEMGAGIILSNTYHLWLRPGHDIVKEAGGLHKFMNWDRAILTDSGGFQVFSLSEFRKIEEEGVHFRNHLNGDKLFLSPEKAMDIQNALGSDIMMAFDECPPYPAEHKYMKRSVERTSRWAERCLAAHQRPDEQGLFGIVQGGEYEDLRKQSASDLISLDFPGYAIGGLSVGEPKDVMNRVLDFTVPLLPDHKPRYLMGVGSPDSLIDGAIRGVDMFDCVLPTRIARNGTLMTSKGRLVVKNAKYERDFRPIDEECGCYTCRNYSRAYVRHLLRCNETFGIRLTSYHNLHFLLELMGQVREAIRQDRLQDFRGEFFESYGFNLPNAKSF

SEQ ID NO: 52058 - protein, 379 aa, Bacillus halodurans
  misc_feature (1)..(379): sp|Q9KDI5|TGT_BACHD Queuine tRNA-ribosyltransferase OS= Bacillus halodurans (strain ATCC BAA-125 / DSM 18197 / FERM 7344 / JCM 9153 / C-125) OX=272558 GN=tgt PE=3 SV= 1
MAAVTYELIKTCKQSGARLGKLHTPHGTIETPIFMPVGTLATVKTMSPEELKQLGAQIILSNTYHLWLRPGHDIVKEAGGLHEFMNWDRPILTDSGGFQVFSLSDLRTIEEEGVHFRNHLSGEKLFLSPEGAMEIQNALGSDIMMAFDECPPYPAERDYMRPSVERTSRWAERCLKAHKRPEDQALFGIIQGGEYEDLRRQSAQDITSLDFPGYAIGGVSVGEPKDVMNRVLEFTTPLLPANKPRYLMGVGSPDSLIDGAIRGIDMFDCVLPTRIARNGTCMTSNGRLVVRNAKYARDFRSLDENCDCHVCQTYTRAYIRHLVKCDETFGFRLTTYHNLYFLLKLMKDVRQAILDDRLLDFREEFFEQYGFNQPNAKNF

SEQ ID NO: 52059 - protein, 379 aa, Bacillus halodurans
  misc_feature (1)..(379): tr|A0A4Y7WYI3|A0A4Y7WYI3_BACHO Queuine tRNA-ribosyltran sferase OS=Bacillus halodurans OX=86665 GN=tgt PE=3 SV= 1
MAAVTYELIKTCKQSGARLGKLHTPHGTIETPIFMPVGTLATVKTMSPEELKQLGAQIILSNTYHLWLRPGHDIVKEAGGLHEFMNWDRPILTDSGGFQVFSLSDLRTIEEEGVHFRNHLSGEKLFLSPEGAMEIQNTLGSDIMMAFDECPPYPAERDYMRPSVERTSRWAERCLKAHKRPEDQALFGIIQGGEYEDLRRQSAQDITSLDFPGYAIGGLSVGEPKDVMNRVLEFTTPLLPANKPRYLMGVGSPDSLIDGAIRGIDMFDCVLPTRIARNGTCMTSNGRLVVRNAKYARDFRPLDENCDCHVCQTYTRAYIRHLVKCDETFGFRLTSYHNLYFLLKLMKDVRQAILDDRLLDFREEFFEQYGFNQPNAKNF

SEQ ID NO: 52060 - protein, 381 aa, Bacillus halotolerans
  misc_feature (1)..(381): tr|A0A2S9WMY6|A0A2S9WMY6_9BACI Queuine tRNA-ribosyltran sferase OS=Bacillus halotolerans OX=260554 GN=tgt PE=3 SV=1
MAEQPIRYEFIKECKQTGARLGRVHTPHGSFETPVFMPVGTLATVKTMAPEELKAMDAGIILSNTYHLWLRPGQDIVKEAGGLHKFMNWDRAILTDSGGFQVFSLSKFRNIEEEGVHFRNHLNGDKLFLSPEKAMEIQNALGSDIMMAFDECPPYPAEYDYMKRSVERTSRWAERCLNAHARQDEQGLFGIVQGGEYEDLRTQSAKDLISLDFPGYAIGGLSVGEPKDVMNRVLEFTTPLLPKDKPRYLMGVGSPDALIDGAIRGVDMFDCVLPTRIARNGTVFTAEGRLNMKNAKFERDFRPIDEECDCYTCKNYTRAYIRHLIRCNETFGLRLTTYHNLHFLLHLMEQVRQAIREDRLGDFREEFFERYGYNKPNAKSF

SEQ ID NO: 52061 - protein, 381 aa, Bacillus haynesii
  misc_feature (1)..(381): tr|A0A1R1RGY4|A0A1R1RGY4_9BACI Queuine tRNA-ribosyltran sferase OS=Bacillus haynesii OX=1925021 GN=tgt PE=3 SV= 1
MSQQPIRYEFIKACKQTGARLGRVHTPHGSFETPVFMPVGTLATVKTMAPEELKEMGAGIILSNTYHLWLRPGHDIVKEAGGLHQFMNWDRAILTDSGGFQVFSLSEFRKIEEEGVHFRNHLNGDKLFLSPEKAMEIQNALGSDIMMAFDECPPYPAEYDYMKKSVERTSRWAERCLKAHNRPDEQGLFGIVQGGEYENLRKQSAKDLISLDFPGYAIGGLSVGEPKDVMNRVLEFTTPLLPADKPRYLMGVGSPDSLIDGAIRGVDMFDCVLPTRIARNGTLMTSEGRLVVKNAKYERDFGPIDEQCDCYTCRNYSRAYIRHLIRCNETFGIRLTSYHNLYFLLKLMGQVRDAIREDRLGDFREEFFERYGFNKPNAKSF

SEQ ID NO: 52062 - protein, 381 aa, Bacillus haynesii
  misc_feature (1)..(381): tr|W7RCZ8|W7RCZ8_9BACI Queuine tRNA-ribosyltransferase OS=Bacillus haynesii OX=1925021 GN=tgt PE=3 SV=1
MSQQPIRYEFIKACKQTGARLGRVHTPHGSFETPVFMPVGTLATVKTMAPEELKEMGAGIILSNTYHLWLRPGHDIVKEAGGLHQFMNWDRAILTDSGGFQVFSLSEFRKIEEEGVHFRNHLNGDKLFLSPEKAMEIQNALGSDIMMAFDECPPYPAEYDYMKKSVERTSRWAERCLKAHNRPDEQGLFGIVQGGEYENLRKQSAKDLISLDFPGYAIGGLSVGEPKDVMNRVLEFTTPLLPADKPRYLMGVGSPDSLIDGAIRGVDMFDCVLPTRIARNGTLMTSEGRLVVKNAKYERDFRPIDEQCDCYTCRNYSRAYIRHLIRCNETFGIRLTSYHNLYFLLKLMGQVRDAIREDRLGDFREEFFERYGFNKPNAKSF

SEQ ID NO: 52063 - protein, 379 aa, Bacillus hemicellulosilyticus
  misc_feature (1)..(379): tr|W4QEE9|W4QEE9_9BACI Queuine tRNA-ribosyltransferase OS=Bacillus hemicellulosilyticus JCM 9152 OX=1236971 GN =tgt PE=3 SV=1
MAAITYEHLKTCKQSGARLGRVHTPHGSFETPIFMPVGTLATVKTMSPEDLKEMNAQIILSNTYHLWLRPGHDIVQEAGGLHQFMNWDRPILTDSGGFQVFSLSDLRKIEEEGVHFRNHLNGDKLFLSPEGAMEIQNALGSDIMMAFDECPPYPAEYDYMKESVERTSRWAERCLEGHKRPEAQGLFGIVQGGEYEELRKQSARDLVSLDFPGYAIGGLSVGEPKDVMNRVLEFTTPHLPFDKPRYLMGVGSADSLIDGAIRGIDMFDCVLPTRIARNGTLMTSEGRLVVRNAKYARDFRPLDENCDCHVCKNYTRAYIRHLIKCEETFGFRLTSYHNLYFLLNLMERVRQAIRDDRLLDFREEFFEQYGFNKPNAKNF

SEQ ID NO: 52064 - protein, 379 aa, Bacillus hisashii
  misc_feature (1)..(379): tr|A0A267TQ57|A0A267TQ57_9BACI Queuine tRNA-ribosyltran sferase OS=Bacillus hisashii OX=996558 GN=tgt PE=3 SV=1
MSAIRYELIKTDKQTGARLGILHTPHGSYETPMFMPVGTLATVKTMSPEELKEIGAGVILSNTYHLWLRPGHDIVKEAGGLHQFMNWDQAILTDSGGFQVFSLSEFRKIEEEGVHFRNHLNGDKLFLSPEISMEVQNALGSDIMMAFDECPPYPAEYDYMKKSVERTSRWAERCLKAHKRPKDQGLFGIVQGGEYEELRKQSAEDLVSLDFPGYAVGGLSVGEPKETMNRMLEFTTPLLPADKPRYLMGVGSPDSLIDGAIRGIDMFDCVLPTRIARNGTVMTSSGRLVVKNAKYARDFGPLDEHCDCYTCRNYSRAYIRHLIHTNEILGFRLCTYHNLHFLIQLMERVRQAIREDCLMDFREQFFEQYGFNKPNAKNF

SEQ ID NO: 52065 - protein, 379 aa, Bacillus horikoshii
  misc_feature (1)..(379): tr|A0A1Y0CTR8|A0A1Y0CTR8_9BACI Queuine tRNA-ribosyltran sferase OS=Bacillus horikoshii OX=79883 GN=tgt PE=3 SV= 1
MTAIRYELIKTCKQTGARLGIVHTPHGSFETPVFMPVGTLATVKTMSPEDVKAMGAGIILSNTYHLWLRPGNEIVKEAGGLHKFMNWDRAILTDSGGFQVFSLSDLRKIEEEGVHFRNHMNGDKLFLSPEKAMHIQNDLGSDIMMAFDECPPYPATHEYMKKSVERTSRWAERCLEAHQRPQDQGLFGIVQGGEYEDLRKLSAQDLVSMDFPGYAVGGLSVGEPKDVMNRTLEFTTPWLPTDKPRYLMGVGSPDSLIDGAIRGIDMFDCVLPTRIARNGTLMTSEGRLVVKNAKFARDFGPLDPECDCYTCTNYSRAYIRHLIKCDETLGIRLTTYHNLYFLVKLMENVRQAIREDRLGDFKEEFFEKYGFNKPNAKNF

SEQ ID NO: 52066 - protein, 379 aa, Bacillus horikoshii
  misc_feature (1)..(379): tr|A0A5D4T8M6|A0A5D4T8M6_9BACI Queuine tRNA-ribosyltran sferase OS=Bacillus horikoshii OX=79883 GN=tgt PE=3 SV= 1
MTAIRYELIKTCKQTGARLGIVHTPHGSFETPVFMPVGTLATVKTMSPEDVKAMGAGIILSNTYHLWLRPGNEIVKEAGGLHKFMNWDRAILTDSGGFQVFSLSDLRKIEEEGVHFRNHMNGDKLFLSPEKAMHIQNDLGSDIMMAFDECPPYPATHEYMKKSVERTSRWAERCLEAHQRPQDQGLFGIVQGGEYEDLRKLSAQDLVSMDFPGYAVGGLSVGEPKDVMNRTLEFTTPWLPTDKPRYLMGVGSPDSLIDGAIRGIDMFDCVLPTRIARNGTLMTSEGRLVVKNAKFARDFGPLDPECDCYTCTNYSRAYIRHLIKCDETLGIRLTTYHNLYFLVKLMEDVRQAIREDRLGDFKEEFFEKYGFNKPNAKNF

SEQ ID NO: 52067 - protein, 379 aa, Bacillus horneckiae
  misc_feature (1)..(379): tr|A0A2N0ZAU9|A0A2N0ZAU9_9BACI Queuine tRNA-ribosyltran sferase OS=Bacillus horneckiae OX=549687 GN=tgt PE=3 SV =1
MTAIRYELIKTCKQTGARLGKVHTPHGSFETPVFMPVGTLATVKTMSPEELVQMGAGIILSNTYHLWLRPGHEIVEEAGGLHKFMNWDRAILTDSGGFQVFSLSDFRKIEEEGVHFRNHLNGDKLFLSPEKAMQIQNSLGSDIMMAFDECPPFPATHDYMKQSVERTSRWAERCLEAHQRPNDQGLFGIVQGGEYKDLRAQSAKDLVSLDFPGYAIGGLSVGEPKDIMNRVLEETTPLLPSDKPRYLMGVGSPDSLIDGAIRGVDMFDCVLPTRIARNGTLMTSNGRLVVKNAKFARDFGPIDENCDCYTCRNYSRAYIRHLIKCDETFGIRLTTYHNLYFLLKLMEQVRQAIREDRLGDFREEFFEQYGFNKPDAKNF

SEQ ID NO: 52068 - protein, 380 aa, Bacillus hwajinpoensis
  misc_feature (1)..(380): tr|A0A4U1MIC5|A0A4U1MIC5_9BACI Queuine tRNA-ribosyltran sferase OS=Bacillus hwajinpoensis OX=208199 GN=tgt PE=3 SV=1
MTEPIRYELIKTCKQSGARLGKLHTPHGTFETPMFMPVGTLATVKTMSPEELKEMGAGVILSNTYHLWLRPGHDIVKEAGGLHKFMNWDQPILTDSGGFQVFSLSDLRQIEEKGVHFRNHLSGEKLFLSPEGAMDIQNALGSDIMMAFDECPPYPAEYDYMKSSVERTSRWAERCLTAHARKDVQGLFGIVQGGEYEELRKQSAQDLVSLDFPGYAIGGLSVGEPKDVMNRVLDFTTPHLPSDKPRYLMGVGSPDSLIDGAIRGVDMFDCVLPTRIARNGTLMTSNGRLVVRNAKYARDFGPLDENCDCRVCRNYSRAYIRHLVKANETFGFRLTTYHNLYFLLNLMKQVRQAIMDDRLLDFKEEFFEQYGFNKPNAKNF

SEQ ID NO: 52069 - protein, 379 aa, Bacillus indicus
  misc_feature (1)..(379): tr|A0A084GWX4|A0A084GWX4_BACID Queuine tRNA-ribosyltran sferase OS=Bacillus indicus OX=246786 GN=tgt PE=3 SV=1
MSPIRYELIKTCKQTGARLGRVHTPHGSFETPVFMPVGTLATVKTMSPEELVQMGAGIILSNTYHLWLRPGNEIVKEAGGLHKFMNWDRAILTDSGGFQVFSLSEFRKIEEEGVHFRNHLNGDKLFLSPEKAMQIQNDLGSDIMMAFDECPPFPAEYDYMKKSVERTSRWAERCLTAHERPNDQGLFGIVQGGEYEELRKQSARDLISMDFPGYAVGGLSVGEPKDVMNRVLEFTTPLLPSDKPRYLMGVGSPDSLIDGAVRGIDMFDCVLPTRIARNGTLMTSKGRLVVKNAAFARDYGPIDENCDCYTCRNYSRAYIRHLMKCDETFGIRLTSYHNLHFLLNLMEQVRQAIREDRLGDFRDEFFEQYGFNKPNAKNF

SEQ ID NO: 52070 - protein, 379 aa, Bacillus infantis
  misc_feature (1)..(379): tr|A0A4Q4CCL7|A0A4Q4CCL7_9BACI Queuine tRNA-ribosyltran sferase OS=Bacillus infantis OX=324767 GN=tgt PE=3 SV=1
MTAIRYELIKTCKQTGARLGRVHTPHGSFETPVFMPVGTLATVKTMSPEEVAGMGAGIILSNTYHLWLRPGHDIIKEAGGLHKFMNWNGSILTDSGGFQVFSLSQFRKIEEEGVHFRNHLNGDKLFLSPEKAMEIQNALGSDIMMAFDECPPYPATYEYMKKSVERTSRWAERCLNAHERPNDQGLFGIVQGGEYEELRKQSARDLVSLDFPGYAVGGLSVGEPKDVMNRALEFTTPLLPADKPRYLMGVGSPDSLIDGSIRGIDMFDCVLPTRIARNGTLMTSNGRLVVKNAKFARDFGPIDENCDCYTCRNYSRAYIRHLIKSDETFGIRLTTYHNLYFLVNLMEQVRQAIREDRLGDFREEFFERYGFNKPDAKNF

SEQ ID NO: 52071 - protein, 379 aa, Bacillus infantis; identical to SEQ ID NO: 52070
  misc_feature (1)..(379): tr|U5LG46|U5LG46_9BACI Queuine tRNA-ribosyltransferase OS=Bacillus infantis NRRL B-14911 OX=1367477 GN=tgt PE= 3 SV=1

SEQ ID NO: 52072 - protein, 381 aa, Bacillus intestinalis
  misc_feature (1)..(381): tr|A0A0K6LVS1|A0A0K6LVS1_9BACI Queuine tRNA-ribosyltran sferase OS=Bacillus intestinalis OX=1963032 GN=tgt PE=3 SV=1
MAEQPIRYEFIKECKQTGARLGKVHTPHGSFETPVFMPVGTLATVKTMSPEELKAMDAGIILSNTYHLWLRPGHDIVKEAGGLHKFMNWDRAILTDSGGFQVFSLSKFRNIEEEGVHFRNHLNGDKLFLSPEKAMEIQNALGSDIMMAFDECPPYPAEYDYMKRSVERTSRWAERCLNAHNRQDEQGLFGIVQGGEYEDLRTQSAKDLISLDFPGYAIGGLSVGEPKDVMNRVLEFTTPLLPKDKPRYLMGVGSPDALIDGAIRGVDMFDCVLPTRIARNGTVFTAEGRLNMKNAKFERDFRPIDEECDCYTCKNYTRAYIRHLIRCNETFGLRLTTYHNLHFLLHLMEQVRQAIREDRLGDFREEFFERYGYNKPNAKSF

SEQ ID NO: 52073 - protein, 379 aa, Bacillus kochii
  misc_feature (1)..(379): tr|A0A248TKW5|A0A248TKW5_9BACI Queuine tRNA-ribosyltran sferase OS=Bacillus kochii OX=859143 GN=tgt PE=3 SV=1
MTAIRYELIKTCKQTGARLGRVHTPHGSFETPVFMPVGTLATVKTMSPEDLVNMGAGIILSNTYHLWLRPGHELIKEAGGLHEFMNWDRAILTDSGGFQVFSLSDFRKIEEEGVHFRNHLNGDKLFLSPEKAMQIQNALGSDIMMAFDECPPFPATHEYMKKSVERTSRWAERCLEAHERPNDQGLFGIVQGGEYNDLRAQSAKDLVSLDFPGYAIGGLSVGEPKDIMNRVLEETTPLLPNHKPRYLMGVGSPDSLIDGAIRGVDMFDCVLPTRIARNGTLMTSEGRLVVKNAKYARDFGPLDENCDCYTCRNYSRAYIRHLIKCDETFGIRLTTYHNLYFLLKLMEKVREAIREDRLGDFREEFFEKYGFNKPNAKNF

SEQ ID NO: 52074 - protein, 379 aa, Bacillus koreensis
  misc_feature (1)..(379): tr|A0A0M0L877|A0A0M0L877_9BACI Queuine tRNA-ribosyltran sferase OS=Bacillus koreensis OX=284581 GN=tgt PE=3 SV= 1
MTAIRYELIKTCKQTGARLGIVHTPHGSFETPTFMPVGTLATVKTMSPEELKQMGAKIILSNTYHLWLRPGHDIVKQAGGLHKFMNWDRPILTDSGGFQVFSLSDFRRIEEEGVHFRNHLNGDKLFLSPEKAMEIQNALGSDIMMAFDECPPYPAEYDYMKSSVERTSRWAERCLKAHGRPEDQGLFGIVQGGEYEDLRRQSASDLVSLDFPGYAVGGLSVGEPKDVMNRVLEFTTPFLPTNKPRYLMGVGTPDSLIDGAIRGIDMFDCVLPTRIGRNGTLMTSEGRLVVKNAKYAEDFRPLDENCDCYTCRNYSRAYIRHLIRCDETFGIRLTSYHNLYFLLNLMEQVREAIREDRLGDFREEFFEKYGFNKPNAKNF

SEQ ID NO: 52075 - protein, 220 aa, Bacillus krulwichiae
  misc_feature (1)..(220): tr|A0A1X9M709|A0A1X9M709_9BACI Queuine tRNA-ribosyltran sferase OS=Bacillus krulwichiae OX=199441 GN=tgt_1 PE=3 SV=1
MAAITYEHIKTCKQSGARLGRVHTPHGSFETPIFMPVGTLATVKTMSPEDLYDMNAQIILSNTYHLWLRPGHDIVKEAGGLHKFMNWNRPILTDSGGFQVFSLSDLRKIEEEGVHFRNHLNGDKLFLSPEGAMEIQNALGSDIMMAFDECPPYPAEYDYMKNSVERTSRWAERCLSAHARPEDQGLFGIVQGGEYEDLRKQSAKDLVSLDFPGYAIGGFL

SEQ ID NO: 52076 - protein, 153 aa, Bacillus krulwichiae
  misc_feature (1)..(153): tr|A0A1X9M9C2|A0A1X9M9C2_9BACI Queuine tRNA-ribosyltran sferase OS=Bacillus krulwichiae OX=199441 GN=tgt_2 PE=4 SV=1
MMNRVLEFTTPHLPSDKPRYLMGVGSADSLIDGAIRGVDMFDCVLPTRIARNGTLMTSKGRLVVRNAKYARDFRPLDENCDCHVCKNYSRAYIRHLIKCEETFGFRLTSYHNLYFLLNLMEQVRQAIREDRLLDFREEFFEMYGFNKPNAKNF

SEQ ID NO: 52077 - protein, 379 aa, Bacillus kyonggiensis
  misc_feature (1)..(379): tr|A0A4U1DBU7|A0A4U1DBU7_9BACI Queuine tRNA-ribosyltran sferase OS=Bacillus kyonggiensis OX=1037680 GN=tgt PE=3 SV=1
MTAIRYELIKTCKQTGARLGRVHTPHGSFETPVFMPVGTLATVKTMSPEELVQMGAGIILSNTYHLWLRPGHEIVKEAGGLHKFMNWDRAILTDSGGFQVFSLSEFRKIEEEGVHFRNHLNGDKLFLSPEKAMEIQNALGSDIMMAFDECPPFPATFDYMKKSVERTSRWAERCLNAHQRPNDQGLFGIVQGGEYEELRKQSAKDLVSLDFPGYAVGGLSVGEPKDVMNRVLEFTTPLLPNNKPRYLMGVGSPDSLIDGAIRGIDMFDCVLPSRIARNGTLMTSEGRLVVKNAKFARDFGPIDPNCDCYTCKNYSRAYIRHLIRCDETFGIRLTTYHNLYFLLKLMEQVREAIREDRLGDFREEFFERYGFNKPDAKNF

SEQ ID NO: 52078 - protein, 383 aa, Bacillus lehensis
  misc_feature (1)..(383): tr|A0A4Y7WIC5|A0A4Y7WIC5_9BACI Queuine tRNA-ribosyltran sferase OS=Bacillus lehensis OX=300825 GN=tgt PE=3 SV=1
MTVPITYEHIKTCKQTGARLGRVHTPHGTFETPMFMPVGTMATVKTMSPEDLKAMDAQIILSNTYHLWLRPGQDIIEEAGGLHTFMNWDKPILTDSGGFQVFSLSDLRKIEEEGVHFRNHLSGEKLFLSPEKAMQIQHSLGSDIMMAFDECPPYPADYSYMRQSVERTSRWAERCLTEHHQSGKSSIQGLFGIIQGGEYEELRKQSAKDLTSLDFPGYAVGGLSVGEPKDVMNRVLEFTTPLMPADKPRYLMGVGSPDSLIDGVIRGIDMFDCVLPTRIARNGTCMTSEGRLVVRNAKFARDFRPLDENCDCHVCRTYSRAYIRHLIKCEETFGFRLTTYHNLYFLLQLMKKVRQAIMEDRLQDFRDEFFESYGFNKENAKNF

SEQ ID NO: 52079 - protein, 383 aa, Bacillus lehensis
  misc_feature (1)..(383): tr|A0A060LRS2|A0A060LRS2_9BACI Queuine tRNA-ribosyltran sferase OS=Bacillus lehensis G1 OX=1246626 GN=tgt PE=3 SV=1
MTVPITYEHIKTCKQTGARLGRVHTPHGTFETPMFMPVGTMATVKTMSPEDLKAMDAQIILSNTYHLWLRPGQDIVEEAGGLHTFMNWDKPILTDSGGFQVFSLSDLRKIEEEGVHFRNHLSGEKLFLSPEKAMQIQHSLGSDIMMAFDECPPYPADYSYMRQSVERTSRWAERCLTEHHQSGKSSIQGLFGIIQGGEYEELRKQSAKDLTSLDFPGYAVGGLSVGEPKDVMNRVLEFTTPLMPADKPRYLMGVGSPDSLIDGVIRGIDMFDCVLPTRIARNGTCMTSEGRLVVRNAKFARDFRPLDENCDCHVCRTYSRAYIRHLIKCEETFGFRLTTYHNLYFLLQLMKKVRQAIMEDRLQDFRDEFFESYGFNKENAKNF

SEQ ID NO: 52080 - protein, 379 aa, Bacillus lentus
  misc_feature (1)..(379): tr|A0A2X4VY94|A0A2X4VY94_BACLE Queuine tRNA-ribosyltran sferase OS=Bacillus lentus OX=1467 GN=tgt PE=3 SV=1
MSAIKYELIKTCKQTGARLGMIHTPHGSFETPMFMPVGTLATVKTMSPEDLKTMGAGIILSNTYHLWLRPGHDIVQEAGGLHKFMNWDQAILTDSGGFQVFSLSDFREIKEEGVHFRNHLNGDKLFLSPEKSMEVQNALGADIMMAFDECPPFPATHEYMKKSVERTSRWAERCLKAHNRPEDQGLFGIVQGGEYEDLRKLSASDLISLDFPGYAIGGLSVGEPKDVMNKVLEFTAPLLPANKPRYLMGVGSPDSLIDGAIRGMDMFDCVLPTRIARNGTLMTSEGRLVVKNAKYARDFRPIDENCDCYTCKNYTRAYIRHLLKCDETFGIRLTTYHNLHFLLKLMEQVKNAIREDRLGDFKEEFFERYGFNRPDAKNF

SEQ ID NO: 52081 - protein, 381 aa, Bacillus licheniformis
  misc_feature (1)..(381): sp|Q65GP9|TGT_BACLD Queuine tRNA-ribosyltransferase OS= Bacillus licheniformis (strain ATCC 14580 / DSM 13 / JC M 2505 / NBRC 12200 / NCIMB 9375 / NRRL NRS-1264 / Gibs on 46) OX=279010 GN=tgt PE=3 SV=1
MSQQPIRYEFIKACKQTGARLGRVHTPHGSFETPVFMPVGTLATVKTMSPEELKEMGADIILSNTYHLWLRPGHDIVKEAGGLHQFMNWNRAILTDSGGFQVFSLSEFRKIEEEGVHFRNHLNGDKLFLSPEKAMEIQNALGSDIMMAFDECPPYPAEYDYMKKSVERTSRWAERCLKAHNRPDEQGLFGIVQGGEYENLRKQSAKDLISLDFPGYAIGGLSVGEPKDVMNRVLEFTTPLLPADKPRYLMGVGSPDSLIDGAIRGVDMFDCVLPTRIARNGTLMTSEGRLVVKNAKYERDFRPIDEQCDCYTCRNYSRAYIRHLIRCNETFGIRLTSYHNLYFLLKLMGQVRDAIREDRLGDFREEFFERYGFNKPNAKSF

SEQ ID NO: 52082 - protein, 381 aa, Bacillus licheniformis
  misc_feature (1)..(381): tr|T5HN73|T5HN73_BACLI Queuine tRNA-ribosyltransferase OS=Bacillus licheniformis CG-B52 OX=1368424 GN=tgt PE=3 SV=1
MSQQPIRYEFIKACKQTGARLGRVHTPHGSFETPVFMPVGTLATVKTMSPEELKEMGAGIILSNTYHLWLRPGHDIVKEAGGLHQFMNWNRAILTDSGGFQVFSLSEFRKIEEEGVHFRNHLNGDKLFLSPEKAMEIQNALGSDIMMAFDECPPYPAEYDYMKKSVERTSRWAERCLKAHNRPDEQGLFGIVQGGEYENLRKQSAKDLISLDFPGYAIGGLSVGEPKDVMNRVLEFTTPLLPADKPRYLMGVGSPDSLIDGAIRGVDMFDCVLPTRIARNGTLMTSEGRLVVKNAKYERDFRPIDEQCDCYTCRNYSRAYIRHLIRCNETFGIRLTSYHNLYFLLKLMGQVRDAIREDRLGDFREEFFERYGFNKPNAKSF

SEQ ID NO: 52083 - protein, 359 aa, Bacillus litoralis
  misc_feature (1)..(359): tr|A0A179SV07|A0A179SV07_9BACI Queuine tRNA-ribosyltran sferase OS=Bacillus litoralis OX=152268 GN=tgt PE=3 SV= 1
MVHTPHGSFETPVFMPVGTLATVKTMSPEDLKQMGAGIILSNTYHLWLRPGHEIVKEAGGLHKFMNWDRAILTDSGGFQVFSLSDMRRIEEEGVHFRNHLNGDKLFLSPEKAMHIQNDLGSDIMMAFDECPPYPAEYEYMKKSVERTSRWAERCLEAHNRPNEQGLFGIIQGGEYEELRKQSARDLVSLDFPGYAVGGLSVGEPKDVMNRVLDFTTPLMPANKPRYLMGVGSPDSLIDGAIRGIDMFDCVLPTRIARNGTLMTSEGRLVVKNAKFAKDFGPLDENCDCYTCRNYSRAYIRHLIKCDETFGLRLTSYHNLYFLVNLMEKVREAIREDRLGDFRDEFFEKYGFNKPNAKNF

SEQ ID NO: 52084 - protein, 381 aa, Bacillus litoralis
  misc_feature (1)..(381): tr|A0A5C6VZL0|A0A5C6VZL0_9BACI Queuine tRNA-ribosyltran sferase OS=Bacillus litoralis OX=152268 GN=tgt PE=3 SV= 1
MSTSPIRYELIKTCKQTGARLGIVHTPHGSFETPVFMPVGTLATVKTMSPEDLKQMGAGIILSNTYHLWLRPGNEIVKEAGGLHKFMNWDRSILTDSGGFQVFSLSDFRRIEEEGVHFRNHLNGDKLFLSPEKAMHIQNDLGSDIMMAFDECPPYPAEYDYMKKSVERTSRWAERCLEAHQRPNDQGLFGIIQGGEYEELRKQSARDLVSLDFPGYAVGGLSVGEPKDVMNRVLDFTTPLMPDNKPRYLMGVGSPDSLIDGAIRGIDMFDCVLPTRIARNGTLMTSEGRLVVKNAKFARDFGPLDENCDCYTCKNYSRAYIRHLIKSEETFGLRLTSYHNLYFLVNLMEQVRQAIREDRLGDFRDEFFEKYGFNKPNAKNF

SEQ ID NO: 52085 - protein, 379 aa, Bacillus loiseleuriae
  misc_feature (1)..(379): tr|A0A0K9GWT2|A0A0K9GWT2_9BACI Queuine tRNA-ribosyltran sferase OS=Bacillus loiseleuriae OX=1679170 GN=tgt PE=3 SV=1
MTAIRYEHIKTCKQSGARLGIVHTPHGSYETPAFMPVGTMATVKTMSPEDLKQMGANIILSNTYHLWLRPGHDIIKEAGGLHKFMNWDRAILTDSGGFQVFSLSDFRKIEEEGVHFRNHLNGDKLFLSPEKAMEIQNALGSDIMMAFDECPPFPATEEYMRKSVERTSRWAERCLNAHERPQDQGLFGIVQGGEFEHLRKQSAKDLVSLDFPGYAIGGLSVGEPKDIMNRVLEFTTPLLPSDKPRYLMGVGSPDSLIDGAIRGVDMFDCVLPTRIARNGTLMTSNGRLVVKNAKYARDFGPIDENCDCHVCKNYSRAYIRHLIKCEETFGIRLTTYHNLHFLLNLMEQVRQAIREDRLLDFREEFFEQYGFNKPNARNF

SEQ ID NO: 52086 - protein, 382 aa, Bacillus lonarensis
  misc_feature (1)..(382): tr|A0A1G6JQA0|A0A1G6JQA0_9BACI Queuine tRNA-ribosyltran sferase OS=Bacillus lonarensis OX=1464122 GN=tgt PE=3 S V=1
MAAVTYELIKTCKQSGARLGRVHTPRGSFETPMFMPVGTMATVKTLSPEDLKEVGAEIILSNTYHLWLRPGEDIIRQAGGLHKFMNWNGPILTDSGGFQVFSLSNLRKITEEGVQFRHHLSGEKLFLSPEKAMQIQHALGSDIMMAFDECPPYPAEYEYMKASVERTTRWATRCLETHEQSGQEKAQALFGIVQGGEYEALRKQSANDLTAMDFPGYAIGGLSVGEPKDVMNEVLEFTTPLLPTNKPRYLMGVGSPDSLIDGAVRGIDMFDCVLPTRIARNGTCMTSSGRLVVRNAAYASDFRPLDEQCACHVCRTYSRAYIRHLIKCEETFGFRLTSYHNLYFLLNLMKRVREAIQEDRLLDFRAELFEQYGFNKENARNF

SEQ ID NO: 52087 - protein, 379 aa, Bacillus luciferensis
  misc_feature (1)..(379): tr|A0A1E2VVZ7|A0A1E2VVZ7_9BACI Queuine tRNA-ribosyltran sferase OS=Bacillus luciferensis OX=178774 GN=tgt PE=3 SV=1
MTAIRYEHIKTCKQTGARLGIVHTPHGSFETPAFMPVGTLATVKTMAPEDLKAMGSGIILSNTYHLWLRPGHEIIKKAGGLHKFMNWDRAILTDSGGFQVFSLSQFRKIEEEGVHFRNHLNGDKLFLSPEKAMEIQNALGSDIMMAFDECPPYPAEYDYMKRSVERTSRWAERCLNSHQRPEDQGLFGIVQGGEYEDLRKQSAKDLVSLDFPGYAIGGLSVGEPKDVMNRVLEFTTPFLPTDKPRYLMGVGSPDSLIDGAIRGVDMFDCVLPTRIARNGTCMTSEGRLVIKNAKYAEDYSPLDPNCDCYACKNYTRAYIRHLIRCEETFGMRLTTYHNLHFLLQLMEQVRQAIREDRLGDFREEFFEQYGFNKPNARNF

SEQ ID NO: 52088 - protein, 379 aa, Bacillus luti; identical to SEQ ID NO: 51992
  misc_feature (1)..(379): tr|A0A1J9ZZ40|A0A1J9ZZ40_9BACI Queuine tRNA-ribosyltran sferase OS=Bacillus luti OX=2026191 GN=tgt PE=3 SV=1

SEQ ID NO: 52089 - protein, 379 aa, Bacillus manliponensis
  misc_feature (1)..(379): tr|A0A073JYR8|A0A073JYR8_9BACI Queuine tRNA-ribosyltran sferase OS=Bacillus manliponensis OX=574376 GN=tgt PE=3 SV=1
MTAIRYELIKTCKQTGARLGRVHTPHGSFETPIFMPVGTLATVKTMSPEELKAMNAGIILSNTYHLWLRPGHEIVQEAGGLHKFMNWDRPILTDSGGFQVFSLSEFRRIEEEGVHFRNHLNGDKLFLSPEKAMEIQNALGSDIMMAFDECPPFPATYEYMKKSVERTSRWAERCLKAHARPEDQGLFGIVQGGEFEELRRQSAKDLVSMDFPGYAVGGLSVGEPKDIMNRVLEFTTPLLPDNKPRYLMGVGSPDSLIDGAMRGIDMFDCVLPTRIARNGTCMTSEGRLVVKNAKYAKDFGPLDPKCDCYTCTNYSRAYIRHLMKCDETFGIRLTSYHNLHFLLKLMEQVRQAIREDRLGDFREEFFEQYGFNKPNAKNF

SEQ ID NO: 52090 - protein, 379 aa, Bacillus marisflavi
  misc_feature (1)..(379): tr|A0A5D4RZV3|A0A5D4RZV3_9BACI Queuine tRNA-ribosyltran sferase OS=Bacillus marisflavi OX=189381 GN=tgt PE=3 SV =1
MTAIRYEHIKTCKQTGARLGKVHTPHGTFETPVFMPVGTLATVKTMSPEDLKAMDAGIILSNTYHLWLRPGHEIIREAGGLHKFMNWDRAILTDSGGFQVFSLSKLRKIEEEGVHFRHHLNGDKLFLSPEKAMEIQNALGSDIMMAFDECPPYPAEYDYMKSSVERTSRWAERCLEAHQRPQDQGLFGIVQGGEYEELRKQSARDLTSLDFPGYAVGGLSVGEPKDVMNRVLEFTTPHLPFDKPRYLMGVGSPDSLIDGAIRGIDMFDCVLPTRIARNGTLMTSEGRLVVKNAKYARDFRPIDEKCDCYTCKNYSRAYIRHLIKCDETFGIRLTTYHNLHFLLNLMEQVRQAIREDRLGDFREDFFEQYGFNRPDAKNF

SEQ ID NO: 52091 - protein, 379 aa, Bacillus marisflavi
  misc_feature (1)..(379): tr|A0A0J5TJI0|A0A0J5TJI0_9BACI Queuine tRNA-ribosyltran sferase OS=Bacillus marisflavi OX=189381 GN=tgt PE=3 SV =1
MTAIRYEHIKTCKQTGARLGKVHTPHGTFETPVFMPVGTLATVKTMSPEDLKAMDAGIILSNTYHLWLRPGHEIIREAGGLHKFMNWDRAILTDSGGFQVFSLSKLRKIEEEGVHFRHHLNGDKLFLSPEKAMEIQNALGSDIMMAFDECPPYPAEYEYMKSSVERTSRWAERCLEAHQRPQDQGLFGIVQGGEYEELRKQSARDLTSLDFPGYAVGGLSVGEPKDVMNRVLEFTTPHLPFDKPRYLMGVGSPDSLIDGAIRGIDMFDCVLPTRIARNGTLMTSEGRLVVKNAKYARDFRPIDEKCDCYTCKNYSRAYIRHLIKCDETFGIRLTTYHNLHFLLNLMEQVRQAIREDRLGDFREEFFEQYGFNRPDAKNF

SEQ ID NO: 52092 - protein, 379 aa, Bacillus marmarensis
  misc_feature (1)..(379): tr|U6STP1|U6STP1_9BACI Queuine tRNA-ribosyltransferase OS=Bacillus marmarensis DSM 21297 OX=1188261 GN=tgt PE= 3 SV=1
MAAVTYELIKTCKQSGARLGRVHTPHGTFETPIFMPVGTLATVKTMSPEDLYDMNAQIILSNTYHLWLRPGHDIVKEAGGLHKFMNWDRPILTDSGGFQVFSLSDLRKIEEEGVHFRNHLSGEKLFLSPEGAMDIQNALGSDIMMAFDECPPYPAEYSYMKDSVERTSRWAERCIEAHKRPEDQGLFGIVQGGEYEELRKQSAKDLVSMDFPGYAIGGLSVGEPKDVMNRVLEFTTPWLPDNKPRYLMGVGSPDSLIDGAIRGIDMFDCVLPTRIARNGTCMTSEGRLVVRNAKFARDFRPLDENCDCHVCQNYSRAYIRHLIKCEETFGFRLTTYHNLYFLLNLMEQVRQAIRDDRLLDFREEFFEQYGFNKPNAKNF

SEQ ID NO: 52093 - protein, 379 aa, Bacillus megaterium; identical to SEQ ID NO: 52002
  misc_feature (1)..(379): tr|D5DT32|D5DT32_BACMQ Queuine tRNA-ribosyltransferase OS=Bacillus megaterium (strain ATCC 12872 / QMB1551) OX =545693 GN=tgt PE=3 SV=1

SEQ ID NO: 52094 - protein, 379 aa, Bacillus megaterium; identical to SEQ ID NO: 52002
  misc_feature (1)..(379): tr|A0A109GCQ2|A0A109GCQ2_BACME Queuine tRNA-ribosyltran sferase OS=Bacillus megaterium OX=1404 GN=tgt PE=3 SV=1

SEQ ID NO: 52095 - protein, 379 aa, Bacillus mesonae
  misc_feature (1)..(379): tr|A0A3Q9QX03|A0A3Q9QX03_9BACI Queuine tRNA-ribosyltran sferase OS=Bacillus mesonae OX=1193713 GN=tgt PE=3 SV=1
MTAIRYELIKTCKQTGARLGKVHTPHGSFNTPAFMPVGTLATVKTMAPEELKGMGAGIILSNTYHLWLRPGHEIIKEAGGLHKFMNWDRAILTDSGGFQVFSLSEFRKIEEEGVHFRNHLSGEKLFLSPEKAMEIQNALGSDIMMAFDECPPYPATFEYMKNSVERTSRWAERCLQAHQRPEDQGLFGIVQGGEYEELRKQSAQDLVSLDFPGYAIGGLSVGEPKDIMNRMLEYTTPLLPANKPRYLMGVGSPDSLIDGAIRGVDMFDCVLPTRIARNGTLMTSEGRLVVKNAQYARDFGPLDPECDCYTCKNYSRAYIRHLIRCNETFGIRLTSYHNLYFLLKLMEKVRQAIQEDRLGDFREEFFERYGFNKPNARNF

SEQ ID NO: 52096 - protein, 379 aa, Bacillus methanolicus
  misc_feature (1)..(379): tr|I3EAW4|I3EAW4_BACMM Queuine tRNA-ribosyltransferase OS=Bacillus methanolicus (strain MGA3 / ATCC 53907) OX= 796606 GN=tgt PE=3 SV=1
MTAIRFELIKTDKQTGARLGRVHTPHGSFDTPAFMPVGTLATVKTMAPEDLKEMGAGIILSNTYHLWLRPGHDIVEEAGGLHKFMNWDRAILTDSGGFQVFSLSEFRKIEEEGVYFRNHLNGDKLFLSPEKATEIQNSLGSDIMMVFDECPPFPATFEYMKKSVERTSRWAERCLKAHKRPNDQGLFGIVQGGEYEELRRLSARDLVSLDFPGYAIGGLSVGEPKDVMNRVLEFTTPLLPANKPRYLMGVGSPDSLIDGAIRGIDMFDCVLPTRIARNGTLMTSEGRLVVKNAKYARDFNPLDPNCDCYTCRNYTRAYIRHLIKSEETFGIRLTTYHNLYFLLKLMEQVRQAIREDRLGDFREEFFEKYGFNKPNAKNF

SEQ ID NO: 52097 - protein, 379 aa, Bacillus methanolicus
  misc_feature (1)..(379): tr|I3DXN8|I3DXN8_BACMT Queuine tRNA-ribosyltransferase OS=Bacillus methanolicus PB1 OX=997296 GN=tgt PE=3 SV=1
MTAIRFELIKTDKQTGARLGRVHTPHGSFDTPAFMPVGTLATVKTMSPEELKEMGAGIILSNTYHLWLRPGHEIVKEAGGLHKFMNWDRAILTDSGGFQVFSLSEFRKIEEEGVHFRNHLNGDKLFLSPEKATEIQNALGSDIMMAFDECPSYPASFEYMKESVERTSRWAERCLKAHKRPNDQGLFGIVQGGEYEELRRLSAQDLVSLDFPGYAIGGLSVGEPKDVMNRVLEFTTPLLPANKPRYLMGVGSPDSLIDGAIRGIDMFDCVLPTRIARNGTLMTSEGRLVVKNAKYARDFGPLDPNCGCYTCRNYTRAYIRHLIKSDETFGIRLTTYHNLYFLLKLMEQVRQAIREDRLGDFREEFFEKYGFNKPNAKNF

SEQ ID NO: 52098 - protein, 379 aa, Bacillus mobilis; identical to SEQ ID NO: 51992
  misc_feature (1)..(379): tr|A0A1K0BDM9|A0A1K0BDM9_9BACI Queuine tRNA-ribosyltran sferase OS=Bacillus mobilis OX=2026190 GN=tgt PE=3 SV=1

SEQ ID NO: 52099 - protein, 379 aa, Bacillus muralis
  misc_feature (1)..(379): tr|A0A1B3XRP6|A0A1B3XRP6_9BACI Queuine tRNA-ribosyltran sferase OS=Bacillus muralis OX=264697 GN=tgt PE=3 SV=1
MTAIRYELIKTCKQTGARLGRVHTPHGSFDTPAFMPVGTLATVKTMSPEDLKQMGAGIILSNTYHLWLRPGHEIIKEAGGLHKFMNWDRAILTDSGGFQVFSLSEFRKIEEEGVHFRNHLNGDKLFLSPEKAMEIQNALGSDIMMAFDECPPFPATEEYMKKSVERTSRWAERCLNAHERPNDQGLFGIVQGGEFENLRKQSAKDLVSLDFPGYAIGGLSVGEPKDIMNRVLEFTSPLLPTNKPRYLMGVGSPDSLIDGAIRGVDMFDCVLPTRIARNGTLMTSNGRLVVKNAKYARDFGPIDENCDCHVCKNYSRAYIRHLIKCEETFGIRLTTYHNLHFLLNLMEQVRQAIREDRLGDFREEFFEQYGFNQPNARNF

SEQ ID NO: 52100 - protein, 379 aa, Bacillus mycoides
  misc_feature (1)..(379): tr|A0A1S8G350|A0A1S8G350_BACMY Queuine tRNA-ribosyltran sferase OS=Bacillus mycoides OX=1405 GN=tgt PE=3 SV=1
MTAIRYEFIKTCKQTGARLGRVHTPHGSFDTPTFMPVGTLATVKTMSPEELKAMDSGIILSNTYHLWLRPGHEIIREAGGLHKFMNWDRAILTDSGGFQVFSLSDFRRIEEEGVHFRNHLNGDKLFLSPEKAMEIQNALGSDIMMAFDECPPFPATFEYMKKSVERTSRWAERCLKAHERPQDQGLFGIVQGGEFEELRRQSAKDLVSMDFPGYAVGGLSVGEPKDIMNRVLEFTTPLLPDNKPRYLMGVGSPDSLIDGAIRGIDMFDCVLPTRIARNGTCMTSQGRLVVKNAKFARDFGPLDPNCDCYTCKNYSRAYIRHLMKCDETFGIRLTSYHNLHFLLNLMEQVRQAIREDRLGDFREEFFEQYGFNKPNAKNF

SEQ ID NO: 52101 - protein, 379 aa, Bacillus mycoides; identical to SEQ ID NO: 52011
  misc_feature (1)..(379): sp|A9VIP3|TGT_BACMK Queuine tRNA-ribosyltransferase OS= Bacillus mycoides (strain KBAB4) OX=315730 GN=tgt PE=3 SV=1

SEQ ID NO: 52102 - protein, 381 aa, Bacillus nakamurai
  misc_feature (1)..(381): tr|A0A150F4T9|A0A150F4T9_9BACI Queuine tRNA-ribosyltran sferase OS=Bacillus nakamurai OX=1793963 GN=tgt PE=3 SV =1
MAEQPIRYEFIKECKQTGARLGRVHTPHGSFETPVFMPVGTLATVKTMSPDELKSMDAGIILSNTYHLWLRPGHDIVKEAGGLHQFMNWDRAILTDSGGFQVFSLSKFRNIEEEGVHFRNHLNGDKLFLSPEKAMEIQNALGSDIMMAFDECPPYPAEYDYMKRSVERTSRWAERCLKAHARSDEQGLFGIVQGGEYEDLRTQSAKDLISLDFPGYAIGGLSVGEPKHVMNRVLEFTTPLLPKDKPRYLMGVGSPDALIDGAIRGVDMFDCVLPTRIARNGTVFTNEGRLNMKNAKYERDFRPIDEECSCHTCKNYSRAYIRHLIRCNETFGIRLTTYHNLHFLLHLMEQVRQAIREDRLGDFREEFFERYGYNKPNAKSF

SEQ ID NO: 52103 - protein, 379 aa, Bacillus nanhaiisediminis
  misc_feature (1)..(379): tr|A0A562QHN0|A0A562QHN0_9BACI Queuine tRNA-ribosyltran sferase OS=Bacillus nanhaiisediminis OX=688079 GN=tgt P E=3 SV=1
MAAITYEHIKTCKQSGARLGRVHTPHGTFETPIFMPVGTLATVKTMSPEDLYDMNAQIILSNTYHLWLRPGHEIIREAGGLHKFMNWKRPILTDSGGFQVFSLSDLRKIEEEGVHFRNHLNGDKLFLSPEGAMEIQNALGSDIMMAFDECPPYPAEYDYMKKSVERTSRWAERCLTAHARPNDQGLFGIVQGGEYEDLRRQSAEDLVSLDFPGYAIGGLSVGEPKDVMNRVLEFTTPHLPTDKPRYLMGVGSADSLIDGAIRGIDMFDCVLPTRIARNGTLMTSTGRLVVRNAKYARDFRPLDENCDCHVCQNYSRAYIRHLVKCEETFGFRLTSYHNLYFLLNLMEQVRQAIREDRLLDFREEFFEQYGFNKPNAKNF

SEQ ID NO: 52104 - protein, 379 aa, Bacillus nealsonii
  misc_feature (1)..(379): tr|A0A2N0Z4K7|A0A2N0Z4K7_9BACI Queuine tRNA-ribosyltran sferase OS=Bacillus nealsonii OX=115979 GN=tgt PE=3 SV= 1
MTAIRYELIKTCKQTGARLGIVHTPHGSFETPAFMPVGTLATVKTMAPEDLKSMGANIILSNTYHLWLRPGHEIVKEAGGLHKFMNWDKAILTDSGGFQVFSLSDFRKIEEEGVHFRNHLNGDKLFLSPEKAMEIQNALGSDIMMAFDECPPYPAEYDYMKKSVERTSRWAERCLKAHNRPEDQGLFGIIQGGEYEELRKQSAKDLVSLDFPGYAVGGLSVGEPKDVMNRVLEFTTPLMPDNKPRYLMGVGSPDSLIDGAIRGIDMFDCVLPTRIARNGTVMTSDGRLVVKNAKYARDFGPLDPECDCYTCKNYSRAYIRHLIRCDETFGIRLTSYHNLYFLLNLMENVRQAIREDRLGDFKEEFFERYGFNKPNAKNF

SEQ ID NO: 52105 - protein, 379 aa, Bacillus nealsonii
  misc_feature (1)..(379): tr|R9CEC4|R9CEC4_9BACI Queuine tRNA-ribosyltransferase OS=Bacillus nealsonii AAU1 OX=1202533 GN=tgt PE=3 SV=1
MTAIRYELIKTCKQTGARLGIVHTPHGSFETPAFMPVGTLATVKTMAPEDLKSMGANIILSNTYHLWLRPGHEIVKEAGGLHKFMNWDKAILTDSGGFQVFSLSDFRKIEEEGVHFRNHLNGDKLFLSPEKAMEIQNALGSDIMMAFDECPPYPAEYDYMKRSVERTSRWAERCLKAHNRPEDQGLFGIIQGGEYEELRKQSARDLVSLDFPGYAVGGLSVGEPKDVMNRVLEFTTPLMPDNKPRYLMGVGSPDSLIDGAIRGIDMFDCVLPTRIARNGTVMTSEGRLVVKNAKYARDFGPLDPECDCYTCKNYSRAYIRHLIRCDETFGIRLTSYHNLYFLLNLMENVRDAIKNDRLGDFKEEFFERYGFNKPNAKNF

SEQ ID NO: 52106 - protein, 379 aa, Bacillus notoginsengisoli
  misc_feature (1)..(379): tr|A0A417YTW0|A0A417YTW0_9BACI Queuine tRNA-ribosyltran sferase OS=Bacillus notoginsengisoli OX=1578198 GN=tgt PE=3 SV=1
MAAIRYELIKTCKQTGARLGRVHTPHGSFETPIFMPVGTLATVKTMSPEDLKEMGAKIILSNTYHLWLRPGHEIIREAGGLHQFMNWDRPILTDSGGFQVFSLSKFRKIEEEGVHFRNHLNGDKLFLSPEKAMEIQNALGPDIMMAFDECPPFPATPEYMKNSVERTSRWAERCLKAHKRPEDQGLFGIVQGGEYEEFRKQSARDLVSLDFPGYAIGGLSVGEPKDVMNRVLEFTTPLLPANKPRYLMGVGSPDSLIDGAIRGVDMFDCVLPTRIARNGTLMTSTGRLVVKNAKYERDFGPIDENCSCYTCRNYSRAYIRHLIRCDETFGIRLTSYHNLHFLIELMEQVRQAIREDRLGDFREEYFERYGFNKPDAKNF

SEQ ID NO: 52107 - protein, 379 aa, Bacillus obstructivus
  misc_feature (1)..(379): tr|A0A1L8ZIE7|A0A1L8ZIE7_9BACI Queuine tRNA-ribosyltran sferase OS=Bacillus obstructivus OX=1914540 GN=tgt PE=3 SV=1
MTAIKYELIKTCKQTGARLGKIHTPHGSYDTPMFMPVGTLATVKTMSPEELKQIGSGIILSNTYHLWLRPGHEIVKEAGGLHQFMNWDQAILTDSGGFQVFSLSDFRKIEEEGVYFRNHLNGDKLFLSPEKSMEIQNALGSDIMMAFDECPPFPATHEYMKKSVERTSRWAERCLTAHSRKHDQGLFGIVQGGEYEDLRKLSAKDLTSLDFPGYAVGGLSVGEPKDVMNRVLEFTTPLLPTNKPRYLMGVGSPDSLIDGAIRGIDMFDCVLPTRIGRNGTCMTSTGRLVIKNAKYARDYRPLDENCDCYTCKNYSRAYIRHLIKCDETFGIRLTTYHNLYFLIQLMQQVRQAIKEDRLGDFREEFFEQYGFNRPDAKNF

SEQ ID NO: 52108 - protein, 379 aa, Bacillus oceanisediminis
  misc_feature (1)..(379): tr|A0A1S1YJX5|A0A1S1YJX5_9BACI Queuine tRNA-ribosyltran sferase OS=Bacillus oceanisediminis OX=665099 GN=tgt PE =3 SV=1
MTAIRYELIKTCKQTGARLGRVHTPHGSFETPVFMPVGTLATVKTMSPEELVEMGAGIILSNTYHLWLRPGQEIVEEAGGLHKFMNWDRAILTDSGGFQVFSLSEFRKIEEEGVHFRNHLNGDKLFLSPEKAMDIQNSLGSDIMMAFDECPPYPASFEYMKKSVERTSRWAERCLQAHKRPNDQGLFGIIQGGEYEELRKQSAKDLTSLDFPGYAVGGLSVGEPKDVMNRVLEFTTPLLPSDKPRYLMGVGSPDSLIDGSIRGIDMFDCVLPTRIARNGTLMTSNGRLVVKNAKFARDFGPIDENCDCYTCRNYSRAYIRHLIRCDETFGIRLTTYHNLYFLLKLMEQVRQAIRDDRLGDFREEFFERYGFNKPNAKNF

SEQ ID NO: 52109 - protein, 379 aa, Bacillus oceanisediminis; identical to SEQ ID NO: 52108
  misc_feature (1)..(379): tr|A0A169FX00|A0A169FX00_9BACI Queuine tRNA-ribosyltran sferase OS=Bacillus oceanisediminis 2691 OX=1196031 GN= tgt PE=3 SV=1

SEQ ID NO: 52110 - protein, 379 aa, Bacillus okhensis
  misc_feature (1)..(379): tr|A0A0B0IHD1|A0A0B0IHD1_9BACI Queuine tRNA-ribosyltran sferase OS=Bacillus okhensis OX=333138 GN=tgt PE=3 SV=1
MTAITYEHIKTCKQSGARLGRVHTPHGTFETPIFMPVGTLATVKTMSPEDLYDMNAQIILSNTYHLWLRPGHDIIKEAGGLHKFMNWDSPILTDSGGFQVFSLSDLRKIEEEGVHFRNHLNGDKLFLSPEGAMDIQNALGSDIMMAFDECPPYPAEYDYMKKSVERTSRWAERCIKAHARPNDQGLFGIVQGGEYEDLRRQSAEDLISLDFPGYAIGGLSVGEPKDVMNRVLEFTTPHLPENKPRYLMGVGSADSLIDGAIRGIDMFDCVLPTRIARNGTLMTSTGRLVVRNAKYARDFRPLDENCDCHVCQNYSRAYIRHLIKCEETFGFRLTSYHNLYFLLNLMEQVRQAIREDRLLDFREEFFEQYGFNKPNAKNF

SEQ ID NO: 52111 - protein, 379 aa, Bacillus okuhidensis
  misc_feature (1)..(379): tr|A0A0M0KM70|A0A0M0KM70_9BACI Queuine tRNA-ribosyltran sferase OS=Bacillus okuhidensis OX=136160 GN=tgt PE=3 S V=1
MAAVTYELIKTCKQSGARLGKLHTPHGTIETPIFMPVGTLATVKTMSPEELKQLGAQIILSNTYHLWLRPGHDIVKEAGGLHEFMNWDRPILTDSGGFQVFSLSDLRTIEEEGVHFRNHLSGEKLFLSPEGAMEIQNALGSDIMMAFDECPPYPAERDYMRPSVERTSRWAERCLKAHKRPEDQALFGIIQGGEYEDLRRQSAQDITSLDFPGYAIGGLSVGEPKDVMNRVLEFTTPLLPANKPRYLMGVGSPDSLIDGAIRGIDMFDCVLPTRIARNGTCMTSNGRLVVRNAKYARDFRPLDENCDCHVCQTYTRAYIRHLVKCDETFGFRLTTYHNLYFLLKLMKDVRQAILDDRLLDFREEFFEQYGFNQPNAKNF

SEQ ID NO: 52112 - protein, 380 aa, Bacillus oleivorans
  misc_feature (1)..(380): tr|A0A285CVS1|A0A285CVS1_9BACI Queuine tRNA-ribosyltran sferase OS=Bacillus oleivorans OX=1448271 GN=tgt PE=3 S V=1
MTLPIRYEFIKACKQSGARLGILHTPHGSFETPMFMPVGTLATVKTMSPEDLKEMGAGVILSNTYHLWLRPGEDIVKGAGGLHGFMNWDQGILTDSGGFQVFSLSDMRRIEEEGVHFRNHLNGDRLFLSPEKAMEIQNALGSDIMMAFDECPPYPATFEYMKKSVERTSRWAERCLKAHKRKDVQGLFGIVQGGEYQELRELSAKDLVSLDFPGYAVGGLSVGEPKDVMNRVLEFTTPLLPADKPRYLMGVGSADSLIDGSIRGIDMFDCVLPTRIARNGTLMTSNGRLNIKNAKFERDYGPLDEHCDCYTCRNYSRAYIRHLIKANETFGIRLTTYHNLYFLLNLMKQVRQAIREDRLLDFREEFFEQYGFNRPNAKNF

SEQ ID NO: 52113 - protein, 379 aa, Bacillus pacificus; identical to SEQ ID NO: 51992
  misc_feature (1)..(379): tr|A0A1J9YQ29|A0A1J9YQ29_9BACI Queuine tRNA-ribosyltran sferase OS=Bacillus pacificus OX=2026187 GN=tgt PE=3 SV =1

SEQ ID NO: 52114 - protein, 358 aa, Bacillus paralicheniformis
  misc_feature (1)..(358): tr|A0A1Q8GQH0|A0A1Q8GQH0_9BACI Queuine tRNA-ribosyltran sferase OS=Bacillus paralicheniformis OX=1648923 GN=tgt PE=3 SV=1
MHTPHGSFETPVFMPVGTLATVKTMAPEELKEMGAGIILSNTYHLWLRPGHDIVKEAGGLHQFMNWDRAILTDSGGFQVFSLSEFRKIEEEGVHFRNHLNGDKLFLSPEKAMDIQNALGSDIMMAFDECPPYPAEYDYMKRSVERTSRWAERCLKAHKRPDEQGLFGIVQGGEYENLRKQSAKDLISLDFPGYAIGGLSVGEPKDVMNRVLEFTTPLLPADKPRYLMGVGSPDSLIDGAIRGVDMFDCVLPTRIARNGTLMTSEGRLVVKNAKYERDFRPIDEQCDCYTCRNYSRAYIRHLIRCNETFGIRLTSYHNLYFLLKLMGQVRDAIREDRLGDFREEFFERYGFNKPNAKSF

SEQ ID NO: 52115 - protein, 381 aa, Bacillus paralicheniformis; identical to SEQ ID NO: 51989
  misc_feature (1)..(381): tr|A0A5A9TKM1|A0A5A9TKM1_9BACI Queuine tRNA-ribosyltran sferase OS=Bacillus paralicheniformis OX=1648923 GN=tgt PE=3 SV=1

SEQ ID NO: 52116 - protein, 379 aa, Bacillus paramycoides; identical to SEQ ID NO: 51992
  misc_feature (1)..(379): tr|A0A1J9VWK9|A0A1J9VWK9_9BACI Queuine tRNA-ribosyltran sferase OS=Bacillus paramycoides OX=2026194 GN=tgt PE=3 SV=1

SEQ ID NO: 52117 - protein, 379 aa, Bacillus paranthracis; identical to SEQ ID NO: 51992
  misc_feature (1)..(379): tr|A0A1J9ZQ05|A0A1J9ZQ05_9BACI Queuine tRNA-ribosyltran sferase OS=Bacillus paranthracis OX=2026186 GN=tgt PE=3 SV=1

SEQ ID NO: 52118 - protein, 379 aa, Bacillus persicus
  misc_feature (1)..(379): tr|A0A1H7XE53|A0A1H7XE53_9BACI Queuine tRNA-ribosyltran sferase OS=Bacillus persicus OX=930146 GN=tgt PE=3 SV=1
MSAIRYEFIKTCKQTGARLGRVHTPHGSFDTPAFMPVGTLATVKTMSPEDLKEMGAGIILSNTYHLWLRPGHEIIKEAGGLHKFMNWDRPILTDSGGFQVFSLSEFRKIEEEGVHFRNHLNGDKLFLSPEGAMEIQNALGSDIMMAFDECPPYPATFDYMKASVERTSRWAERCLKAHKRPEDQGLFGIVQGGEYEELRKQSARDLVSLDFPGYAVGGLSVGEPKDVMNRALEFTTPLLPTNKPRYLMGVGSPDSLIDGAIRGIDMFDCVLPTRIARNGTLMTSEGRLVVKNAKYARDFNPIDKNCDCYTCQNYSRAYIRHLIKCEETFGIRLTTYHNLHFLLKLMEQVRQAIMEDRLGDFREEFFERYGFNKPNAKNF

SEQ ID NO: 52119 - protein, 379 aa, Bacillus praedii
  misc_feature (1)..(379): tr|A0A4R1AW33|A0A4R1AW33_9BACI Queuine tRNA-ribosyltran sferase OS=Bacillus praedii OX=1742358 GN=tgt PE=3 SV=1
MTAIRYELIKTCKQTGARLGRVHTPHGSFETPVFMPVGTLATVKTMSPEELVQMGAGIILSNTYHLWLRPGQEIVEEAGGLHKFMNWDRAILTDSGGFQVFSLSEFRKIEEEGVHFRNHLNGDKLFLSPEKAMEIQNSLGSDIMMAFDECPPFPATYEYMQKSVERTSRWAERCLNAHKRPNDQGLFGIVQGGEYEELRKQSAKDLVSLDFPGYAVGGLSVGEPKDVMNRVLEFTTPLLPSNKPRYLMGVGSPDSLIDGAIRGIDMFDCVLPTRIARNGTLMTSEGRLVVKNAKFAKDFGPIDEHCDCYTCRNYSRAYIRHLIRCDETFGIRLTTYHNLYFLLKLMEQVRQAIREDRLGDFREEFFERYGFNKPNAKNF

SEQ ID NO: 52120 - protein, 379 aa, Bacillus pseudofirmus
  misc_feature (1)..(379): tr|A0A1Q9PQE9|A0A1Q9PQE9_BACPF Queuine tRNA-ribosyltran sferase OS=Bacillus pseudofirmus OX=79885 GN=tgt PE=3 S V=1
MAAVTYELIKTCKQSGARLGRVHTPHGTFETPIFMPVGTLATVKTMSPEDLYDMNAQIILSNTYHLWLRPGHDIVKEAGGLHKFMNWDRPILTDSGGFQVFSLSDLRKIEEEGVHFRNHLSGEKLFLSPEGAMDIQNALGSDIMMAFDECPPYPAEYSYMKDSVERTSRWAERCIEAHKRPEDQGLFGIVQGGEYEELRKQSAKDLVSMDFPGYAVGGLSVGEPKDVMNRVLEFTTPWLPDNKPRYLMGVGSPDSLIDGAIRGIDMFDCVLPTRIARNGTCMTSEGRLVVRNAKFARDFRPLDENCDCHVCQNYSRAYIRHLIKCEETFGFRLTTYHNLYFLLNLMEQVRQAIRDDRLLDFREEFFEQYGFNKPNAKNF

SEQ ID NO: 52121 - protein, 379 aa, Bacillus pseudofirmus; identical to SEQ ID NO: 52092
  misc_feature (1)..(379): tr|D3FVV7|D3FVV7_BACPE Queuine tRNA-ribosyltransferase OS=Bacillus pseudofirmus (strain OF4) OX=398511 GN=tgt PE=3 SV=1

SEQ ID NO: 52122 - protein, 379 aa, Bacillus pseudomycoides
  misc_feature (1)..(379): tr|C3BQE9|C3BQE9_9BACI Queuine tRNA-ribosyltransferase OS=Bacillus pseudomycoides DSM 12442 OX=527000 GN=tgt P E=3 SV=1
MTAIRYEFIKTCKQTGARLGRVHTPHGSFDTPTFMPVGTLATVKTMSPEELKAMDSGIILSNTYHLWLRPGHEIVREAGGLHKFMNWDRAILTDSGGFQVFSLSDFRRIEEEGVHFRNHLNGDKLFLSPEKAMEIQNALGSDIMMAFDECPPFPATFEYMKKSVERTSRWAERCLKAHERPQDQGLFGIVQGGEFEELRRQSAKDLVSMDFPGYAVGGLSVGEPKDIMNRVLEFTTPLLPDNKPRYLMGVGSPDSLIDGAIRGIDMFDCVLPTRIARNGTCMTSQGRLVVKNAKFARDFGPLDPNCDCYTCKNYSRAYIRHLMKCDETFGIRLTSYHNLHFLLNLMEQVRQAIREDRLGDFREEFFEQYGFNKPNAKNF

SEQ ID NO: 52123 - protein, 379 aa, Bacillus pseudomycoides; identical to SEQ ID NO: 52122
  misc_feature (1)..(379): tr|A0A2A8B258|A0A2A8B258_9BACI Queuine tRNA-ribosyltran sferase OS=Bacillus pseudomycoides OX=64104 GN=tgt PE=3 SV=1

SEQ ID NO: 52124 - protein, 381 aa, Bacillus pumilus
  misc_feature (1)..(381): sp|A8FFQ9|TGT_BACP2 Queuine tRNA-ribosyltransferase OS= Bacillus pumilus (strain SAFR-032) OX=315750 GN=tgt PE= 3 SV=1
MSQLPIRYEFIKSCKQTGARLGRVHTPHGSFDTPVFMPVGTLATVKTMAPEELKAMEAGIILSNTYHLWLRPGHDIVKEAGGLHKFMNWDRAILTDSGGFQVFSLSEFRKIEEEGVHFRNHLNGDKLFLSPEKAMDIQNALGSDIMMAFDECPPYPAEYDYMKRSVERTSRWAERCLTAHQRPEDQGLFGIIQGGEYEELRKQSAKDLVSLDFPGYAIGGLSVGEPKDVMNRVLEFTTPLLPADKPRYLMGVGSPDSLIDGAIRGVDMFDCVLPTRIARNGTLMTSEGRLVVKNAKYERDFRPIDENCDCYTCKNYTRAYIRHLIKTNETFGIRLTTYHNLHFLLKLMEQVREAIREDRLGDFKEEFFERYGFNEPNAKNF

SEQ ID NO: 52125 - protein, 381 aa, Bacillus pumilus
  misc_feature (1)..(381): tr|A0A2A5ITK9|A0A2A5ITK9_BACPU Queuine tRNA-ribosyltran sferase OS=Bacillus pumilus OX=1408 GN=tgt PE=3 SV=1
MSQLPIRYEFIKSCKQTGARLGRVHTPHGSFETPVFMPVGTLATVKTMAPEELKAMDAGIILSNTYHLWLRPGHDIVKEAGGLHKFMNWDRAILTDSGGFQVFSLSEFRKIEEEGVHFRNHLNGDKLFLSPEKAMEIQNALGSDIMMAFDECPPYPAEYDYMKRSVERTSRWAERCLTAHQRPEDQGLFGIVQGGEYEELRKQSAKDLVSLDFPGYAIGGLSVGEPKDVMNRVLEFTTPFLPADKPRYLMGVGSPDSLIDGAIRGVDMFDCVLPTRIARNGTLMTSEGRLVVKNAKYERDFRPIDENCDCYTCKNYTRAYIRHLIRTNETFGIRLTTYHNLHFLLKLMEQVREAIREDRLGDFKEEFFERYGFNKPNAKNF

SEQ ID NO: 52126 - protein, 381 aa, Bacillus safensis
  misc_feature (1)..(381): tr|A0A5C0WK67|A0A5C0WK67_9BACI Queuine tRNA-ribosyltran sferase OS=Bacillus safensis OX=561879 GN=tgt PE=3 SV=1
MSQLPIRYEFIKSCKQTGARLGRVHTPHGSFETPVFMPVGTLATVKTMAPEELKAMDAGIILSNTYHLWLRPGHDIVKEAGGLHKFMNWDRAILTDSGGFQVFSLSEFRKIEEEGVHFRNHLNGDKLFLSPEKAMDIQNALGSDIMMAFDECPPYPAEYDYMKRSVERTSRWAERCLSAHQRPEDQGLFGIVQGGEYEELRKQSAKDLVSLDFPGYAIGGLSVGEPKDVMNRVLEFTTPFLPADKPRYLMGVGSPDSLIDGAIRGVDMFDCVLPTRIARNGTLMTSEGRLVVKNAKYERDFRPIDENCDCYTCKNYTRAYIRHLIRTNETFGIRLTTYHNLHFLLKLMEQVREAIREDRLGDFKEEFFERYGFNKPNAKNF

SEQ ID NO: 52127 - protein, 381 aa, Bacillus safensis
  misc_feature (1)..(381): tr|A0A1L6ZH57|A0A1L6ZH57_9BACI Queuine tRNA-ribosyltran sferase OS=Bacillus safensis OX=561879 GN=tgt PE=3 SV=1
MSQSPIRYEFIKSCKQTGARLGRVHTPHGSFETPVFMPVGTLATVKTMAPEELKAMDAGIILSNTYHLWLRPGHDIVKEAGGLHKFMNWDRAILTDSGGFQVFSLSEFRKIEEEGVHFRNHLNGDKLFLSPEKAMDIQNALGSDIMMAFDECPPYPAEYDYMKRSVERTSRWAERCLTAHQRPEDQGLFGIVQGGEYEELRKQSAKDLVSLDFPGYAIGGLSVGEPKDVMNRVLEFTTPFLPADKPRYLMGVGSPDSLIDGAIRGVDMFDCVLPTRIARNGTLMTSEGRLVVKNAKYERDFRPIDENCDCYTCKNYTRAYIRHLIRTNETFGIRLTTYHNLHFLLKLMEQVREAIREDRLGDFKEEFFERYGFNKPNAKNF

SEQ ID NO: 52128 - protein, 379 aa, Bacillus salacetis
  misc_feature (1)..(379): tr|A0A3A1R4L9|A0A3A1R4L9_9BACI Queuine tRNA-ribosyltran sferase OS=Bacillus salacetis OX=2315464 GN=tgt PE=3 SV =1
MTAIRYEHIKTCKQTGARLGRVHTPHGSFDTPVFMPVGTLATVKTMSPEDLKSMEAGIILSNTYHLWLRPGHEIIREAGGLHKFMNWDRAILTDSGGFQVFSLSEFRRIEEEGVHFRNHLNGDKLFLSPEKAMEIQNALGSDIMMAFDECPPYPAERDYMKRSVERTSRWAERCLEAHQRPQDQGLFGIVQGGEYEDLRRQSAKDLVSLDFPGYAVGGLSVGEPKDVMNRVLEFTTPLLPDDKPRYLMGVGSPDALIDGAMRGIDMFDCVLPTRIARNGTLMTSKGRLVVKNAKYARDFSPIDENCDCYTCRNYSRAYIRHLIKCDESFGIRLTTYHNLHFLLKLMEQVRQAIREDRLGDFREEFFEAYGYNRPDAKNF

SEQ ID NO: 52129 - protein, 379 aa, Bacillus salarius
  misc_feature (1)..(379): tr|A0A3R9QFE0|A0A3R9QFE0_9BACI Queuine tRNA-ribosyltran sferase OS=Bacillus salarius OX=284579 GN=tgt PE=3 SV=1
MAAITYELIKTCKQSGARLGKIHTPHGSIDTPIFMPVGTLATVKTLSPDELDEMAAQVILSNTYHLWLRPGEDIVEEAGGLHSFMNWDKPILTDSGGYQVFSLSDLRDIKEEGVHFRNHISGEKLFLSPEKAMTIQNALGPDMMMAFDECPPYPAEEAYMKASVERTSRWAERCLEAHQRPNDQALFGIIQGGEYEHLRKQSANDLISLNFPGYAIGGLSVGEPKDVMNHVLDFTTPLLPKDKPRYLMGVGSADSLIDGAIRGVDMFDCVLPTRIARNGACMTSNGRLVVRNAAYARDFGPIDENCNCYTCRNYSRAYIRHLVKAKETFGFRLTSYHNLYFLLNLMEQVREAIREDRLLDFREAFFEQYGFNSPNAKNF

SEQ ID NO: 52130 - protein, 379 aa, Bacillus salarius
  misc_feature (1)..(379): tr|A0A428N7P7|A0A428N7P7_9BACI Queuine tRNA-ribosyltran sferase OS=Bacillus salarius OX=284579 GN=tgt PE=3 SV=1
MAAITYELIKTCKQSGARLGKIHTPHGSIDTPIFMPVGTLATVKTLSPDELDEMAAQVILSNTYHLWLRPGEDIVQEAGGLHSFMNWDKPILTDSGGYQVFSLSDLRNIKEEGVHFRNHISGEKLFLSPEKAMTIQNALGPDMMMAFDECPPYPAEEEYMKASVERTSRWAERCLEAHQRPSDQALFGIVQGGEYEYLRKQSANDLISLDFPGYAIGGLSVGEPKDVMNHVLDFTTPLLPKDKPRYLMGVGSADSLIDGAIRGVDMFDCVLPTRIARNGACMTSNGRLVVRNAAYARDFKPIDENCNCYTCRNYSRAYIRHLVKSNETFGFRLTSYHNLYFLLNLMKQVREAILEDRLLDFREAFFEQYGFNSPNAKNF

SEQ ID NO: 52131 - protein, 380 aa, Bacillus salsus
  misc_feature (1)..(380): tr|A0A1H0V5K4|A0A1H0V5K4_9BACI Queuine tRNA-ribosyltran sferase OS=Bacillus salsus OX=930152 GN=tgt PE=3 SV=1
MTAAVTYELIKTCKQTGARLGKVHTPHGSFDTPAFMPVGTMATVKTMAPEELKEMGSNIILSNTYHLWLRPGHEIIKGAGGLHKFMNWDRAILTDSGGFQVFSLSQFRKIEEEGVHFRNHLNGDKLFLSPEKAMEIQNALGSDIMMAFDECPPYPAEFDYMKKSVERTSRWAERCLQAHARPQDQGLFGIIQGGEYEELRKQSAKDLVSMDFPGYAVGGLSVGEPKDVMNRVLEFTTPLMPSNKPRYLMGVGSPDSLIDGAIRGIDMFDCVLPTRIARNGTLMTSEGRLVVKNAKYAEDYGPIDPNCSCYTCKNYSRAYIRHLIRCEETFGIRLTTYHNLHFLLKLMEQVRQAIMEDRLGDFREEFFEQYGFNKPNAKNF

SEQ ID NO: 52132 - protein, 379 aa, Bacillus selenatarsenatis
  misc_feature (1)..(379): tr|A0A0A8XAU8|A0A0A8XAU8_9BACI Queuine tRNA-ribosyltran sferase OS=Bacillus selenatarsenatis SF-1 OX=1321606 GN =tgt PE=3 SV=1
MSAIRYELIKTCKQTGARLGRVHTPHGSFETPVFMPVGTLATVKTMSPEELVQMGAGIILSNTYHLWLRPGHEIIKEAGGLHKFMNWDRAILTDSGGFQVFSLSEFRKIEEEGVHFRNHLNGDKLFLSPEKAMEIQNALGSDIMMAFDECPPYPAEYDYMKKSVERTSRWAERCLTAHQRPQDQGLFGIVQGGEYEELRKQSAKDLVSMDFPGYAVGGLSVGEPKDVMDRVLEFTTPWLPTDKPRYLMGVGSPDSLIDGAIRGIDMFDCVLPTRIARNGTLMTSEGRLVVKNAKFARDFGPLDPNCDCYTCKNYSRAYIRHLIKTDESFGIRLTSYHNLYFLLKLMEQVRQAIREDRLGDFREEFFEQYGYNKPNAKNF

SEQ ID NO: 52133 - protein, 379 aa, Bacillus selenitireducens
  misc_feature (1)..(379): tr|D6XWZ2|D6XWZ2_BACIE Queuine tRNA-ribosyltransferase OS=Bacillus selenitireducens (strain ATCC 700615 / DSM 15326 / MLS10) OX=439292 GN=tgt PE=3 SV=1
MTAITYEHIKTCKQSGARLGKVHTPHGSFETPIFMPVGTLATVKTMSPEDLLQMNAQIILSNTYHLWLRPGEDIVKEAGGLHQFMNWHRPILTDSGGFQVFSLSDLRNITEEGVHFRNHLSGEKLFLSPEKAMRIQNDLGPDIMMAFDECPPYPAEHAYMKASVERTSRWAERCLEGHKRPEDQGLFGIVQGGEYEDLRKQSAKDLVSLDFPGYAIGGLSVGEPKDVMNRVLEFTTPWLPEDKPRYLMGVGTADSLIDGAIRGVDMFDCVLPTRIARNGTLMTSKGRLVVRNAKFARDFRPLDENCSCYVCQNHSRAYIRHLIKANETLGLRLCSYHNLHFLIDLMEQVRQAIREDRLLDFRESFFEEYGFNRPDAKNF

SEQ ID NO: 52134 - protein, 379 aa, Bacillus shackletonii
  misc_feature (1)..(379): tr|A0A0Q3TIG7|A0A0Q3TIG7_9BACI Queuine tRNA-ribosyltran sferase OS=Bacillus shackletonii OX=157838 GN=tgt PE=3 SV=1
MTAIKYELIKTCKQTGARLGKIHTPHGSYDTPMFMPVGTLATVKTMSPEELKEIGSGVILSNTYHLWLRPGHEIVREAGGLHQFMNWDQAILTDSGGFQVFSLSDFRKIEEEGVHFRNHLNGDKLFLSPEKSMEIQNALGSDIMMAFDECPPFPATHEYMKKSVERTSRWAERCLKSHNRPSDQGLFGIVQGGEYEDLRRLSAADLTSLDFPGYAVGGLSVGEPKDVMNRVLEFTTPLLPANKPRYLMGVGSPDSLIDGAIRGIDMFDCVLPTRIARNGTVMTSEGRLVVKNAKYARDFSPLDKNCDCYACRNYTRAYIRHLIKCDETFGIRLTSYHNLYFLLQLMKEVRQAIKEDRLGDFREEFFEQYGFNRPDAKNF

SEQ ID NO: 52135 - protein, 381 aa, Bacillus siamensis
  misc_feature (1)..(381): tr|A0A268DRZ9|A0A268DRZ9_9BACI Queuine tRNA-ribosyltran sferase OS=Bacillus siamensis OX=659243 GN=tgt PE=3 SV= 1
MAEQPIRYEFIKECKQTGARLGRVHTPHGSFETPVFMPVGTLATVKTMSPDELKSMDAGIILSNTYHLWLRPGHDIVKEAGGLHQFMNWDRAILTDSGGFQVFSLSKFRNIEEEGVHFRNHLNGDKLFLSPEKAMEIQNALGSDIMMAFDECPPYPAEYDYMKRSVERTSRWAERCLEAHGRSDEQGLFGIVQGGEYEDLRTQSAKDLVSLDFPGYAIGGLSVGEPKHVMNRVLEFTTPLLPKDKPRYLMGVGSPDALIDGAIRGVDMFDCVLPTRIARNGTVFTNEGRLNMKNAKYERDFRPIDEECSCHTCKNYSRAYIRHLIRCNETFGIRLTTYHNLHFLLHLMEQVRQAIREDRLGDFREEFFERYGYNKPNAKSF

SEQ ID NO: 52136 - protein, 381 aa, Bacillus siamensis
  misc_feature (1)..(381): tr|A0A2K9K8S1|A0A2K9K8S1_9BACI Queuine tRNA-ribosyltran sferase OS=Bacillus siamensis OX=659243 GN=tgt PE=3 SV= 1
MAEQPIRYEFIKECKQTGARLGRVHTPHGSFETPVFMPVGTLATVKTMSPDELKSMDAGIILSNTYHLWLRPGHDIVKEAGGLHQFMNWDRAILTDSGGFQVFSLSKFRNIEEEGVHFRNHLNGDQLFLSPEKAMEIQNALGSDIMMAFDECPPYPAEYDYMKRSVERTSRWAERCLEAHGRSDEQGLFGIVQGGEYEDLRTQSAKDLVSLDFPGYAIGGLSVGEPKHVMNRVLEFTTPLLPKDKPRYLMGVGSPDALIDGAIRGVDMFDCVLPTRIARNGTVFTNEGRLNMKNAKYERDFRPIDEECSCHTCKNYSRAYIRHLIRCNETFGIRLTTYHNLHFLLHLMEQVRQAIREDRLGDFREEFFERYGYNKPNAKSF

SEQ ID NO: 52137 - protein, 379 aa, Bacillus simplex
  misc_feature (1)..(379): tr|A0A1N6QUS2|A0A1N6QUS2_9BACI Queuine tRNA-ribosyltran sferase OS=Bacillus simplex OX=1478 GN=tgt PE=3 SV=1
MTAIRYELIKTCKQTGARLGRVHTPHGSFETPAFMPVGTMATVKTMSPEDLKQMGAGIILSNTYHLWLRPGHEIIKEAGGLHKFMNWDRAILTDSGGFQVFSLSEFRKIEEEGVHFRNHLNGDKLFLSPEKAMEIQNALGSDIMMAFDECPPFPATEEYMKKSVERTSRWAERCLNAHERPNDQGLFGIVQGGEFENLRKQSAKDLVSLDFPGYAIGGLSVGEPKDIMNRVLEFTSPLLPTDKPRYLMGVGSPDSLIDGALRGIDMFDCVLPTRIARNGTLMTSNGRLVVKNAKYARDFGPIDENCDCHVCKNYSRAYIRHLIKCEETFGIRLTTYHNLHFLLNLMEQVRQAIREDRLGDFREEFFEQYGFNEPNARNF

SEQ ID NO: 52138 - protein, 379 aa, Bacillus simplex
  misc_feature (1)..(379): tr|A0A098FI29|A0A098FI29_9BACI Queuine tRNA-ribosyltran sferase OS=Bacillus simplex OX=1478 GN=tgt PE=3 SV=1
MTAIRYELIKTCKQTGARLGRVHTPHGSFETPAFMPVGTMATVKTMSPEDLKQMGAGIILSNTYHLWLRPGHEIIKEAGGLHKFMNWDRAILTDSGGFQVFSLSEFRKIEEEGVHFRNHLNGDKLFLSPEKAMEIQNALGSDIMMAFDECPPFPATEEYMKKSVERTSRWAERCLNAHERPNDQGLFGIVQGGEFENLRKQSAKDLVSLDFPGYAIGGLSVGEPKDIMNRVLEFTTPLLPSDKPRYLMGVGSPDSLIDGALRGVDMFDCVLPTRIARNGTLMTSNGRLVVKNAKYARDFGPIDENCDCHVCKNYSRAYIRHLIKCEETFGIRLTTYHNLHFLLNLMEQVRQAIREDRLGDFREEFFEQYGFNEPNARNF

SEQ ID NO: 52139 - protein, 379 aa, Bacillus smithii
  misc_feature (1)..(379): tr|G9QQ31|G9QQ31_9BACI Queuine tRNA-ribosyltransferase OS=Bacillus smithii 7_3_47FAA OX=665952 GN=tgt PE=3 SV= 1
MPAIKYELLKTCKQTGARLGRVTTPHGSFETPMFMPVGTLATVKTMSPEELKEMGAKIILSNTYHLWLRPGHDIIQEAGGLHSFMNWDGAILTDSGGFQVFSLSKLRRIEEEGVYFRNHLNGEKLFLSPEKAMEIQNALGSDIMMAFDECPPYPAEFDYMKKSIERTSRWAERCLKAHKRPEDQGLFGIVQGGEYKELRRQSANDLVSLDFPGYAIGGLSVGEPKEVMNEMLEFTTPLLPADKPRYLMGVGSPDSLIDGAIRGIDMFDCVLPTRIARNGTLMTSQGRLVVKNAKYARDFRPIDEQCDCYTCRNYSRAYIRHLIHTNETLGIRLTTYHNLYFLLKLMEKIRQAIREDRLGDFREEFFEQYGFNRPDAKNF

SEQ ID NO: 52140 - protein, 379 aa, Bacillus smithii; identical to SEQ ID NO: 52139
  misc_feature (1)..(379): tr|A0A0H4P4T7|A0A0H4P4T7_9BACI Queuine tRNA-ribosyltran sferase OS=Bacillus smithii OX=1479 GN=tgt PE=3 SV=1

SEQ ID NO: 52141 - protein, 379 aa, Bacillus solani
  misc_feature (1)..(379): tr|A0A0Q3TBR2|A0A0Q3TBR2_9BACI Queuine tRNA-ribosyltran sferase OS=Bacillus solani OX=1637975 GN=tgt PE=3 SV=1
MTAIRYELIKTCKQTGARLGRVHTPHGSFETPVFMPVGTLATVKTMSPEELVEMGAGIILSNTYHLWLRPGQEIVEEAGGLHKFMNWDRAILTDSGGFQVFSLSEFRKIEEEGVHFRNHLNGDKLFLSPEKAMEIQNSLGSDIMMAFDECPPYPATYEYMQKSVERTSRWAERCLQAHKRPKDQGLFGIVQGGEYEELRKQSAKDLVSLDFPGYAVGGLSVGEPKDIMNRVLEFTTPLLPANKPRYLMGVGSPDSLIDGAIRGIDMFDCVLPTRIARNGTLMTSEGRLVVKNAKFARDFGPIDEHCDCYTCRNYSRAYIRHLIRCDETFGIRLTTYHNLYFLLKLMEQVRQAIREDRLGDFREEFFERYGFNKPNAKNF

SEQ ID NO: 52142 - protein, 379 aa, Bacillus solimangrovi
  misc_feature (1)..(379): tr|A0A1E5LBN6|A0A1E5LBN6_9BACI Queuine tRNA-ribosyltran sferase OS=Bacillus solimangrovi OX=1305675 GN=tgt PE=3 SV=1
MTAIRYELIKTCKQTGARLGKVHTPHGSFDTPVFMPVGTLATVKTMSPGELEEMGANIILSNTYHLWLRPGEDIVKGAGGLHKFMNWNGSILTDSGGFQVFSLSDLRKIEEEGVHFRNHLSGEKLFLSPEKAMQIQNALGSDIMMAFDECPPYPAEYDYMKASVERTSRWAERCLTAHERPQDQGLFGIVQGGEYEDLRKLSARDLISLDFPGYAIGGLSVGEPKDVMNRVLEFTTPLLPSEKPRYLMGVGSPDSLIDGAIRGVDMFDCVLPTRIARNGTLMTSEGRLVVRNAKYARDYGPLDPNCDCHVCRNYSRAYIRHLVKCNETYGFRLTTYHNLYFLLKLMKQVREAILEDRLGDFRDEFFEQYGFNKPNAKNF

SEQ ID NO: 52143 - protein, 381 aa, Bacillus sonorensis
  misc_feature (1)..(381): tr|M5P6Q2|M5P6Q2_9BACI Queuine tRNA-ribosyltransferase OS=Bacillus sonorensis L12 OX=1274524 GN=tgt PE=3 SV=1
MSQQPIRYEFIKACKQTGARLGKVHTPHGSFETPAFMPVGTLATVKTMAPEELKEMGAGIILSNTYHLWLRPGHEIVKEAGGLHKFMNWDRAILTDSGGFQVFSLSEFRKIEEEGVHFRNHLNGDKLFLSPEKAMDIQNALGSDIMMAFDECPPYPAEYDYMKKSVERTSRWAERCLAAHKRPDEQGLFGIVQGGEYEDLRKQSAKDLISLDFPGYAIGGLSVGEPKDVMNRVLEFTMPLLPADKPRYLMGVGSPDSLIDGAIRGVDMFDCVLPTRIARNGTLMTSEGRLVVKNAKYERDFRPIDEHCDCYTCRNYSRAYIRHLIRCNETFGIRLTSYHNLYFLLKLMGQVREAIREDRLGDFREEFFERYGFNKPNAKSF

SEQ ID NO: 52144 - protein, 381 aa, [Bacillus] sp.
  misc_feature (1)..(381): tr|A0A150YL32|A0A150YL32_9BACI Queuine tRNA-ribosyltran sferase OS=[Bacillus] sp. KCTC 13219 OX=1811976 GN=tgt PE=3 SV=1
MTQPAIRYELIKTCKQTGARLGIVHTPHGSFETPTFMPVGTQATVKAMSPEELKEMNAGIILSNTYHLWLRPGHDIVKEAGGLHKFMNWDRPILTDSGGFQVFSLSKFRKIEEEGVYFRNHLNGDKLFLSPEKAMEIQNDLGSDIMMAFDECPPYPATYDYMLKSVDRTTRWAKRCKEAHQRPEEQGLFGIIQGGEYEELRRRSAEALVELDFPGYAIGGLSVGEPKEVMNRVLDFTAPLMPENKPRYLMGVGSPDSLIDGAIRGIDMFDCVLPTRIARNGTLMTSEGRMVIKNAKFARDFRPIDENCDCYTCKNYTRAYVRHLLRTEETFGLRLTSYHNLRFLIKLMEDVRQAIREDRLGDFKEEFFEKYGYNLPDAKNF

SEQ ID NO: 52145 - protein, 379 aa, Bacillus sp.
  misc_feature (1)..(379): tr|A0A0Q9GI17|A0A0Q9GI17_9BACI Queuine tRNA-ribosyltran sferase OS=Bacillus sp. Root239 OX=1736499 GN=tgt PE=3 SV=1
MTAIRYEHIKTCKQTGARLGIVHTPHGSFETPIFMPVGTLATVKTMSPEDLKAMGAGIILSNTYHLWLRPGHEIVEKAGGLHKFMNWDRPILTDSGGFQVFSLSDLRRIEEEGVHFRNHLNGDKLFLSPEKAMDIQNALGSDIMMAFDECPPYPAEYDYLKRSVERTSRWAERCLEAHSRPQDQGLFGIVQGGEFEDLRRQSAADLVSMDFPGYAVGGLSVGEPKDVMNRVLEFTTPYLPTDKPRYLMGVGSPDSLIDGAIRGIDMFDCVLPTRIARNGTLMTSEGRLVVKNAKYAEDFGPIDPNCDCYTCQNYSRAYIRHLIRCNETFGIRLTSYHNLYFLLNLMEQVREAIREDRLGDFRDEFFEKYGFNGPDAKNF

SEQ ID NO: 52146 - protein, 379 aa, Bacillus sp.; identical to SEQ ID NO: 51992
  misc_feature (1)..(379): tr|A0A2B4NRG1|A0A2B4NRG1_9BACI Queuine tRNA-ribosyltran sferase OS=Bacillus sp. AFS075960 OX=2034282 GN=tgt PE= 3 SV=1

SEQ ID NO: 52147 - protein, 379 aa, Bacillus sporothermodurans
  misc_feature (1)..(379): tr|A0A2T6EM64|A0A2T6EM64_9BACI Queuine tRNA-ribosyltran sferase OS=Bacillus sporothermodurans OX=46224 GN=tgt P E=3 SV=1
MTAIKYELIKTCKQTGARLGKIHTPHGSYDTPMFMPVGTLATVKTMSPEELKEIGSGIILSNTYHLWLRPGHEIVKEAGGLHKFMNWDQAILTDSGGFQVFSLSHFRKIEEEGVFFRNHLNGDKLFLSPEKSMEIQNALGSDIMMAFDECPPFPATHDYMKKSVERTSRWAERCLSAHSRIEDQGLFGIVQGGEYEDLRKLSAKDLTSLDFPGYAVGGLSVGEPKDVMNRVLEFTTPLLPTNKPRYLMGVGSPDSLIDGAIRGIDMFDCVLPTRIGRNGTCMTSTGRLVVKNAKYARDFRPLDENCNCHTCQNYSRAYIRHLIKCDETFGIRLTTYHNLHFLIQLMQQVRQAIKEDRLGDFREEFFEQYGFNRPDAKNF

SEQ ID NO: 52148 - protein, 379 aa, Bacillus sporothermodurans
  misc_feature (1)..(379): tr|A0A150LFT5|A0A150LFT5_9BACI Queuine tRNA-ribosyltran sferase OS=Bacillus sporothermodurans OX=46224 GN=tgt P E=3 SV=1
MTAIKYELIKTCKQTGARLGKIHTPHGSYDTPMFMPVGTLATVKTMSPEELKEIGSGIILSNTYHLWLRPGHEIVKEAGGLHKFMNWDQAILTDSGGFQVFSLSHFRKIEEEGVFFRNHLNGDKLFLSPEKSMEIQNALGSDIMMAFDECPPFPATHDYMKKSVERTSRWAERCLSAHSRTEDQGLFGIVQGGEYEDLRKLSAKDLTSLDFPGYAVGGLSVGEPKDVMNRVLEFTTPLLPTNKPRYLMGVGSPDSLIDGAIRGIDMFDCVLPTRIGRNGTCMTSTGRLVVKNAKYARDFRPLDENCNCHTCQNYSRAYIRHLIKCDETFGIRLTTYHNLHFLIQLMQQVRQAIKEDRLGDFREEFFEQYGFNRPDAKNF

SEQ ID NO: 52149 - protein, 381 aa, Bacillus stratosphericus; identical to SEQ ID NO: 51990
  misc_feature (1)..(381): tr|M5QYT4|M5QYT4_9BACI Queuine tRNA-ribosyltransferase OS=Bacillus stratosphericus LAMA 585 OX=1236481 GN=tgt PE=3 SV=1

SEQ ID NO: 52150 - protein, 381 aa, Bacillus stratosphericus; identical to SEQ ID NO: 52127
  misc_feature (1)..(381): tr|A0A4Y9JU33|A0A4Y9JU33_9BACI Queuine tRNA-ribosyltran sferase OS=Bacillus stratosphericus OX=293386 GN=tgt PE =3 SV=1

SEQ ID NO: 52151 - protein, 379 aa, Bacillus subterraneus
  misc_feature (1)..(379): tr|A0A0D6Z5U5|A0A0D6Z5U5_9BACI Queuine tRNA-ribosyltran sferase OS=Bacillus subterraneus OX=285983 GN=tgt PE=3 SV=1
MSAIRYELIKTCKQTGARLGRVHTPHGSFETPVFMPVGTLATVKTMSPEELVQMGAGIILSNTYHLWLRPGHDIIEEAGGLHKFMNWDRAILTDSGGFQVFSLSDLRKIEEEGVHFRNHLNGDKLFLSPEKAIQIQNALGSDIMMAFDECPPYPAEYDYLKKSVERTSRWAERCLTAHQRPQDQGLFGIVQGGENEELRKQSATDLVSLDFPGYAIGGLSVGEPKEVMNRVLEFTTPWLPTDKPRYLMGVGSPDSLIDGAIRGIDMFDCVLPTRIARNGTLMTSEGRLVVKNAKFARDFGPLDPNCDCYTCKNYSRAYIRHLIKTDETFGIRLTSYHNLHFLINLMEQVRQAIREDRLGDFRDEFFEQYGFNKPNAKNF

SEQ ID NO: 52152 - protein, 379 aa, Bacillus subterraneus
  misc_feature (1)..(379): tr|A0A3R9FEM7|A0A3R9FEM7_9BACI Queuine tRNA-ribosyltran sferase OS=Bacillus subterraneus OX=285983 GN=tgt PE=3 SV=1
MSAIRYELIKTCKQTGARLGRVHTPHGSFETPVFMPVGTLATVKTMSPEELVEMGAGIILSNTYHLWLRPGHEIVKEAGGLHKFMNWDRAILTDSGGFQVFSLSEFRKIEEEGVHFRNHLNGDKLFLSPEKAMEIQNALGSDIMMAFDECPPYPAEYDYMKKSVERTSRWAERCLTAHKRPQDQGLFGIVQGGEYEDLRKQSARDLVSMDFPGYAVGGLSVGEPKDVMDRVLEFTTPWLPADKPRYLMGVGSPDSLIDGAIRGIDMFDCVLPTRIARNGTLMTSQGRLVVKNAQFARDFEPLDPNCDCYTCRNYSRAYIRHLIKTDESFGIRLTSYHNLYFLIRLMEQVRQAIREDRLGDFREEFFEQYGYNKPNAKNF

SEQ ID NO: 52153 - protein, 381 aa, Bacillus subtilis
  misc_feature (1)..(381): sp|O32053|TGT_BACSU Queuine tRNA-ribosyltransferase OS= Bacillus subtilis (strain 168) OX=224308 GN=tgt PE=3 SV =1
MAEQPIRYEFIKECKQTGARLGKVHTPHGSFETPVFMPVGTLATVKTMSPEELKAMDAGIILSNTYHLWLRPGQDIVKEAGGLHKFMNWDRAILTDSGGFQVFSLSKFRNIEEEGVHFRNHLNGDKLFLSPEKAMEIQNALGSDIMMAFDECPPYPAEYDYMKRSVERTSRWAERCLNAHNRQDEQGLFGIVQGGEYEDLRTQSAKDLISLDFPGYAIGGLSVGEPKDVMNRVLEFTTPLLPKDKPRYLMGVGSPDALIDGAIRGVDMFDCVLPTRIARNGTVFTAEGRLNMKNAKFERDFRPIDEECDCYTCKNYTRAYIRHLIRCNETFGLRLTTYHNLHFLLHLMEQVRQAIREDRLGDFREEFFERYGYNKPNAKSF

SEQ ID NO: 52154 - protein, 381 aa, Bacillus subtilis; identical to SEQ ID NO: 52153
  misc_feature (1)..(381): tr|A0A063XIT5|A0A063XIT5_BACIU Queuine tRNA-ribosyltran sferase OS=Bacillus subtilis OX=1423 GN=tgt PE=3 SV=1

SEQ ID NO: 52155 - protein, 381 aa, Bacillus swezeyi
  misc_feature (1)..(381): tr|A0A5D4QDD9|A0A5D4QDD9_9BACI Queuine tRNA-ribosyltran sferase OS=Bacillus swezeyi OX=1925020 GN=tgt PE=3 SV=1
MSQQPIRYEFIKACKQTGARLGKVHTPHGSFETPVFMPVGTLATVKTMAPEELKEMGAGIILSNTYHLWLRPGHEIVQEAGGLHKFMNWDRAILTDSGGFQVFSLSEFRKIEEEGVHFRNHLNGDKLFLSPEKAMDIQNALGSDIMMAFDECPPYPAEYDYMKRSVERTSRWAERCLAGHKRPDEQGLFGIVQGGEYEDLRKQSAKDLISLDFPGYAIGGLSVGEPKDVMNRVLEFTTPLLPADKPRYLMGVGSPDSLIDGAIRGVDMFDCVLPTRIARNGTLMTSEGRLVVKNAKYERDFRPIDEHCDCYTCRNYSRAYIRHLIRCNETFGIRLTSYHNLYFLLKLMGQVREAIREDRLGDFREEFFERYGFNKPNAKSF

SEQ ID NO: 52156 - protein, 381 aa, Bacillus swezeyi
  misc_feature (1)..(381): tr|A0A1R1Q8T5|A0A1R1Q8T5_9BACI Queuine tRNA-ribosyltran sferase OS=Bacillus swezeyi OX=1925020 GN=tgt PE=3 SV=1
MSQQPIRYEFIKACKQTGARLGKVHTPHGSFETPVFMPVGTLATVKTMAPEELKEMGAGIILSNTYHLWLRPGHEIVKEAGGLHKFMNWDRAILTDSGGFQVFSLSEFRKIEEEGVHFRNHLNGDKLFLSPEKAMDIQNALGSDIMMAFDECPPYPAEYDYMKRSVERTSRWAERCLAAHKRPDEQGLFGIVQGGEYEELRKQSAKDLISLDFPGYAIGGLSVGEPKDVMNRVLEFTTPLLPADKPRYLMGVGSPDSLIDGAIRGVDMFDCVLPTRIARNGTLMTSEGRLVVKNAKYERDFRPIDEHCDCYTCRNYSRAYIRHLIRCNETFGIRLTSYHNLYFLLKLMGQVREAIREDRLGDFREEFFERYGFNKPNAKSF

SEQ ID NO: 52157 - protein, 379 aa, Bacillus taeanensis
  misc_feature (1)..(379): tr|A0A366XW95|A0A366XW95_9BACI Queuine tRNA-ribosyltran sferase OS=Bacillus taeanensis OX=273032 GN=tgt PE=3 SV =1
MTAVKYELIKTCKQSGARLGKLHTPHGVIETPIFMPVGTLATVKTMSPEELKEMGSQIILSNTYHLWLRPGHDIVKEAGGLHKFMNWDRPILTDSGGFQVFSLSDLRKITEEGVHFRNHLSGEKLFLSPEGAMDIQNALGSDIMMAFDECPPYPAEYDYMKSSVERTSRWAERCLEAHQRPEDQALFGIVQGGEYEELRKQSARDLVSLDFPGYAVGGLSVGEPKDVMNRVLDFTTPHLPENKPRYLMGVGSPDSLIDGAIRGIDMFDCVLPTRIARNGTCMTSNGRLVVRNAKFARDFAPLDENCDCHVCKTYSRAYIRHLVKANETFGFRLTTYHNLYFLLKLMEQVRQAIREDRLLDFKEEFFEQYGFNKPNAKNF

SEQ ID NO: 52158 - protein, 381 aa, Bacillus tequilensis
  misc_feature (1)..(381): tr|A0A2X0ZK96|A0A2X0ZK96_9BACI Queuine tRNA-ribosyltran sferase OS=Bacillus tequilensis OX=227866 GN=tgt PE=3 S V=1
MAEQPIRYEFIKECKQTGARLGKVHTPHGSFETPVFMPVGTLATVKTMSPEELKAMDAGIILSNTYHLWLRPGHDIVKEAGGLHKFMNWDRAILTDSGGFQVFSLSKFRNIEEEGVHFRNHLNGDKLFLSPEKAMEIQNALGSDIMMAFDECPPYPAEYDYMKRSVERTSRWAERCLNAHSRQDEQGLFGIVQGGEYEDLRTQSAKDLISLDFPGYAIGGLSVGEPKDVMNRVLEFTTPLLPKDKPRYLMGVGSPDALIDGAIRGVDMFDCVLPTRIARNGTVFTAEGRLNMKNAKFERDFRPIDEECDCYTCKNYTRAYIRHLIRCNETFGLRLTTYHNLHFLLHLMEQVRQAIREDRLGDFREEFFERYGYNKPNAKSF

SEQ ID NO: 52159 - protein, 379 aa, Bacillus terrae
  misc_feature (1)..(379): tr|A0A429X1K6|A0A429X1K6_9BACI Queuine tRNA-ribosyltran sferase OS=Bacillus terrae OX=1914933 GN=tgt PE=3 SV=1
MSAITYELIKTCKQTGARLGMIHTPHGSYETPMFMPVGTLATVKTMSPEELKEMGAGIILSNTYHLWLRPGEDIVEEAGGLHKFMNWDQGILTDSGGFQVFSLSEFRQIEEEGVHFRNHLNGDKLFLSPEKAMSIQNSLGSDIMMAFDECPPYPASQEYMKNSVERTSRWAERCLAAHKRPEKQGLFGIVQGGEYEQLRKQSARDLVSLDFPGYAIGGLSVGEPKDVMNRVLEFTTPLLPSDKPRYLMGVGSPDSLVDGAIRGVDMFDCVLPTRIARNGTLMTSQGRLVVKNAAYARDFGPLDENCDCYACRNYSRAYVRHLIKCNETFGIRLTTYHNLYFLLKLMKQVRDAIKEDRLGDFREEFFERYGFNRPDAKNF

SEQ ID NO: 52160 - protein, 379 aa, Bacillus thermoamylovorans
  misc_feature (1)..(379): tr|A0A090IVN0|A0A090IVN0_9BACI Queuine tRNA-ribosyltran sferase OS=Bacillus thermoamylovorans OX=35841 GN=tgt P E=3 SV=1
MTAISYELIKTDKQTGARLGILHTPHGSYETPMFMPVGTLATVKTMSPEELKEIGAGVILSNTYHLWLRPGHDIVKEAGGLHQFMNWDQAILTDSGGFQVFSLSEFRKIEEEGVHFRNHLNGDKLFLSPEISMEVQNALGSDIMMAFDECPPYPAEYDYMKKSVERTSRWAERCLKAHKRSKDQGLFGIVQGGEYEDLRKQSAEDLVSLDFPGYAVGGLSVGEPKETMNRMLEFTTPLLPADKPRYLMGVGSPDSLIDGAIRGIDMFDCVLPTRIARNGTVMTSTGRLVVKNAKYARDFGPLDDHCDCYACRNYSRAYIRHLIHTNEILGFRLCTYHNLYFLIKLMEQVRQAIREDRLMDFREQFFEQYGFNKPNAKNF

SEQ ID NO: 52161 - protein, 379 aa, Bacillus thermoamylovorans
  misc_feature (1)..(379): tr|A0A0D0FG03|A0A0D0FG03_9BACI Queuine tRNA-ribosyltran sferase OS=Bacillus thermoamylovorans OX=35841 GN=tgt P E=3 SV=1
MTAIRYELIKTDKQTGARLGILHTPHGSYETPMFMPVGTLATVKTMSPEELKEIGAGVILSNTYHLWLRPGHDIVKEAGGLHQFMNWDQAILTDSGGFQVFSLSEFRKIEEEGVHFRNHLNGDKLFLSPEISMEVQNALGSDIMMAFDECPPYPAEYDYMKKSVERTSRWAERCLKAHKRPKDQGLFGIVQGGEYEELRKQSAEDLVSLDFPGYAVGGLSVGEPKETMNRMLEFTTPLLPADKPRYLMGVGSPDSLIDGAIRGIDMFDCVLPTRIARNGTVMTSSGRLVVKNAKYARDFCPLDEHCDCYTCRNYSRAYIRHLIHTNEILGFRLCTYHNLHFLIQLMERVRQAIREDCLMDFREQFFEQYGFNKPNAKNF

SEQ ID NO: 52162 - protein, 379 aa, Bacillus thermocopriae; identical to SEQ ID NO: 51713
  misc_feature (1)..(379): tr|A0A410XLY0|A0A410XLY0_9BACI Queuine tRNA-ribosyltran sferase OS=Bacillus thermocopriae OX=1215031 GN=tgt PE= 3 SV=1

SEQ ID NO: 52163 - protein, 379 aa, Bacillus thermozeamaize
  misc_feature (1)..(379): tr|A0A1Y3PS83|A0A1Y3PS83_9BACI Queuine tRNA-ribosyltran sferase OS=Bacillus thermozeamaize OX=230954 GN=tgt PE= 3 SV=1
MSAIRYELIKTCKQTGARLGRLHTPHGTFETPLFMPVGTQASVKAMSPEELKEIGAGVILSNTYHLFLRPGHELVEKAGGLHRFMNWDRAILTDSGGFQVFSLSKLRDIQEEGVTFRSHLSGEKLFISPEKAIAIQNALGADIIMAFDECAPYPADERYIKDSLERTTRWAERCLKAHQKPGTQALFGIVQGGMYPHLRKESARQLVALDFPGYAVGGLSVGEPKSLMYQILEETVPLLPADRPRYLMGVGSPDALIEGVIRGIDMFDCVLPTRIARNGTVMTSQGRLVIRNAQYAEDFRPLDPDCDCYACRHYTRAYIRHLIKAGEIFGIRLTTYHNLYFLVQLMRVVREAIRHDALLDFRNDFFARYGIEHPDDRGF

SEQ ID NO: 52164 - protein, 379 aa, Bacillus thuringiensis; identical to SEQ ID NO: 51992
  misc_feature (1)..(379): sp|Q6HDA9|TGT_BACHK Queuine tRNA-ribosyltransferase OS= Bacillus thuringiensis subsp. konkukian (strain 97-27) OX=281309 GN=tgt PE=3 SV=1

SEQ ID NO: 52165 - protein, 379 aa, Bacillus thuringiensis; identical to SEQ ID NO: 52017
  misc_feature (1)..(379): tr|A0A0K0SDU9|A0A0K0SDU9_BACT3 Queuine tRNA-ribosyltran sferase OS=Bacillus thuringiensis subsp. indiana OX=180 850 GN=tgt PE=3 SV=1

SEQ ID NO: 52166 - protein, 379 aa, Bacillus timonensis
  misc_feature (1)..(379): tr|A0A4S3PZN8|A0A4S3PZN8_9BACI Queuine tRNA-ribosyltran sferase OS=Bacillus timonensis OX=1033734 GN=tgt PE=3 S V=1
MTAIRYEHIKTCKQTGARLGIVHTPHGSFETPAFMPVGTLATVKTMSPEDLKEMGSGIILSNTYHLWLRPGHDIIKEAGGLHKFMNWDRAILTDSGGFQVFSLSQFREIKEEGVHFRNHLNGDKLFLSPEKSMEIQNALGSDIMMAFDECPPYPASFEYMQKSVERTSRWAERCLKAHNRPQDQGLFGIVQGGEYEELRKQSARDLVSLDFPGYAVGGLSVGEPKDVMNRVLEFTTPLLPTNKPRYLMGVGSPDSLIDGAIRGIDMFDCVLPTRIARNGTLMTSEGRLVVKNAEYARDFRPLDENCDCYTCKNYSRAYIRHLIKTSETFGIRLTTYHNLHFLLKLMEQVRQAIREDRLGDFREEFFERYGFNKPNAKNF

SEQ ID NO: 52167 - protein, 379 aa, Bacillus toyonensis
  misc_feature (1)..(379): tr|A0A2C4VSW5|A0A2C4VSW5_9BACI Queuine tRNA-ribosyltran sferase OS=Bacillus toyonensis OX=155322 GN=tgt PE=3 SV =1
MTAIRYEFIKTCKQTGARLGRVHTPHGSFDTPTFMPVGTLATVKTMSPEELKAMDSGIILSNTYHLWLRPGHEIVREAGGLHKFMNWDRAILTDSGGFQVFSLSDFRRIEEEGVHFRNHLNGDKLFLSPEKAMEIQNALGSDIMMAFDECPPFPATFEYMKKSVERTSRWAERCLKAHERPQDQGLFGIVQGGEFEELRRQSAKDLVSMDFPGYAIGGLSVGEPKDIMNRVLEFTTPLLPDDKPRYLMGVGSPDSLIDGAIRGVDMFDCVLPTRIARNGTCMTSGGRLVVKNAKFARDFGPLDPNCDCYTCKNYSRAYIRHLMKCDETFGIRLTSYHNLHFLLNLMEQVRQAIREDRLGDFREEFFEQYGFNKPNAKNF

SEQ ID NO: 52168 - protein, 379 aa, Bacillus toyonensis; identical to SEQ ID NO: 52011
  misc_feature (1)..(379): tr|A0A1V6LMC5|A0A1V6LMC5_9BACI Queuine tRNA-ribosyltran sferase OS=Bacillus toyonensis OX=155322 GN=tgt PE=3 SV =1

SEQ ID NO: 52169 - protein, 379 aa, Bacillus tropicus; identical to SEQ ID NO: 51992
  misc_feature (1)..(379): tr|A0A4Y6F6A9|A0A4Y6F6A9_9BACI Queuine tRNA-ribosyltran sferase OS=Bacillus tropicus OX=2026188 GN=tgt PE=3 SV= 1

SEQ ID NO: 52170 - protein, 379 aa, Bacillus tropicus
  misc_feature (1)..(379): tr|A0A5C5AC23|A0A5C5AC23_9BACI Queuine tRNA-ribosyltran sferase OS=Bacillus tropicus OX=2026188 GN=tgt PE=3 SV= 1
MTAIRYEFIKTCKQTGARLGRVHTPHGSFDTPTFMPVGTLATVKTMSPEELKAMDSGIILSNTYHLWLRPGHEIVREAGGLHKFMNWDRAILTDSGGFQVFSLSDFRRIEEEGVHFRNHLNGDKLFLSPEKAMEIQNALGSDIMMAFDECPPFPATFEYMKKSVERTSRWAERCLKAHERPQDQGLFGIVQGGEFEELRRQSAKDLVSMDFPGYAIGGLSVGEPKDIMNRVLEFTTPLLPDNKPRYLMGVGSPDSLIDGAIRGVDMFDCVLPTRIARNGTCMTSEGRLVVKNAKFARDFGPLDPNCDCYTCKNYSRAYIRHLMKCDETFGIRLTSYHNLHFLLNLMEQVRQAIREDRLGDFREEFFEQYGFNKPNAKNF

SEQ ID NO: 52171 - protein, 379 aa, Bacillus trypoxylicola
  misc_feature (1)..(379): tr|A0A162E6E2|A0A162E6E2_9BACI Queuine tRNA-ribosyltran sferase OS=Bacillus trypoxylicola OX=519424 GN=tgt PE=3 SV=1
MAAVTYELIKTCKQSGARLGKVHTPHGTIETPIFMPVGTLATVKTMSPEDLYDMNAQIILSNTYHLWLRPGHKIIEEAGGLHSFMNWKRPILTDSGGFQVFSLSDLRKIEEEGVHFRNHLSGEKLFLSPEEAMSIQNSLGSDIMMAFDECPPYPADYDYMKQSVERTSRWAERCLSAHKRPDQQGLFGIVQGGEYEELRKQSAKDLTSLDFPGYAIGGLSVGEPKEVMNRVLEFTTPLLPSDKARYLMGVGSPDSLIDGAIRGIDMFDCVLPTRIARNGTCMTSNGRLVVRNAKYAHDFRPLDENCDCHVCKNYSRAYIRHLVKCEETFGFRLTSYHNLYFLLNLMEQVRQAIREDRLLDFREEFFEQYGFNKPNAKNF

SEQ ID NO: 52172 - protein, 379 aa, Bacillus urumqiensis
  misc_feature (1)..(379): tr|A0A2P6MFC8|A0A2P6MFC8_9BACI Queuine tRNA-ribosyltran sferase OS=Bacillus urumqiensis OX=1548213 GN=tgt PE=3 SV=1
MPAITYEHIKTCRQSGARLGKVHTPHGTFETPIFMPVGTLATVKTMDPEELKEINAQIILSNTYHLWLRPGADIVEEAGGLHKFMNWDRPILTDSGGFQVFSLSDLRNITEEGVQFRNHLSGEKLFLSPEKSMHVQNQLGPDIMMAFDECPPYPASHEYMKASVERTSRWAERCLSAHQRPEDQGLFGIVQGGEYKDLRRQSAEDLVSLDFPGYAIGGLSVGEPKDVMNQVLEDTTPFLPQDKPRYLMGVGSADSLIDGAIRGIDMFDCVLPTRIARNGTLMTSSGRLVVRNAKFARDFRPLDENCSCKVCQNYSRAYIRHLIKCNETLGLRLCSYHNLHFLLQLMEDVRQAIREDRLLDFREAFFEAYGFNKKDAKNF

SEQ ID NO: 52173 - protein, 381 aa, Bacillus vallismortis
  misc_feature (1)..(381): tr|A0A1W6HKB6|A0A1W6HKB6_BACVA Queuine tRNA-ribosyltran sferase OS=Bacillus vallismortis OX=72361 GN=tgt PE=3 S V=1
MAEQPIRYEFIKECKQTGARLGRVHTPHGSFETPVFMPVGTLATVKTMSPDELKSMDAGIILSNTYHLWLRPGHDIVKEAGGLHKFMNWDRAILTDSGGFQVFSLSKFRNIEEEGVHFRNHLNGDKLFLSPEKAMEIQNALGSDIMMAFDECPPYPAEYDYMKRSVERTSRWAERCLEAHGRSDEQGLFGIVQGGEYEDLRTQSAKDLVSLDFPGYAIGGLSVGEPKHVMNRVLEFTTPLLPKDKPRYLMGVGSPDALIDGAIRGVDMFDCVLPTRIARNGTVFTNEGRLNMKNAKYERDFRPIDEECSCHTCQNYSRAYIRHLIRCNETFGIRLTTYHNLHFLLHLMEQVRQAIREDRLGDFREEFFERYGYNKPNAKSF

SEQ ID NO: 52174 - protein, 381 aa, Bacillus vallismortis
  misc_feature (1)..(381): tr|A0A410WEB0|A0A410WEB0_BACVA Queuine tRNA-ribosyltran sferase OS=Bacillus vallismortis OX=72361 GN=tgt PE=3 S V=1
MAEQPIRYEFIKECKQTGARLGKVHTPHGSFETPVFMPVGTLATVKTMSPEELKAMDAGIILSNTYHLWLRPGQDIVKEAGGLHQFMNWDRAILTDSGGFQVFSLSKFRNIEEEGVHFRNHLNGDKLFLSPEKAMEIQNALGSDIMMAFDECPPYPAEYDYMKRSVERTSRWAERCLNAHSRQNEQGLFGIVQGGEYEDLRTQSAKDLISLDFPGYAIGGLSVGEPKDVMNRVLEFTTPLLPKDKPRYLMGVGSPDALIDGAIRGVDMFDCVLPTRIARNGTVFTADGRLNMKNAKFERDFRPIDEECDCYTCKNYTRAYIRHLIRCNETLGLRLTTYHNLHFLLHLMEQVRQAIREDRLGDFREEFFERYGYNKPNAKSF

SEQ ID NO: 52175 - protein, 381 aa, Bacillus velezensis
  misc_feature (1)..(381): sp|A7Z766|TGT_BACVZ Queuine tRNA-ribosyltransferase OS= Bacillus velezensis (strain DSM 23117 / BGSC 10A6 / FZB 42) OX=326423 GN=tgt PE=3 SV=1
MAEQPIRYEFIKECKQTGARLGRVHTPHGSFETPVFMPVGTLATVKTMSPDELKSMDAGIILSNTYHLWLRPGHDIVKEAGGLHKFMNWDRAILTDSGGFQVFSLSKFRNIEEEGVHFRNHLNGDKLFLSPEKAMEIQNALGSDIMMAFDECPPYPAEYDYMKRSVERTSRWAERCLEAHGRSDEQGLFGIVQGGEYEDLRTQSAKDLVSLDFPGYAIGGLSVGEPKHVMNRVLEFTTPLLPKDKPRYLMGVGSPDALIDGAIRGVDMFDCVLPTRIARNGTVFTNEGRLNMKNAKYERDFRPIDEECSCHTCKNYSRAYIRHLIRCNETFGIRLTTYHNLHFLLHLMEQVRQAIREDRLGDFREEFFERYGYNKPNAKSF

SEQ ID NO: 52176 - protein, 381 aa, Bacillus velezensis; identical to SEQ ID NO: 52175
  misc_feature (1)..(381): tr|S6G2C1|S6G2C1_9BACI Queuine tRNA-ribosyltransferase OS=Bacillus velezensis UCMB5033 OX=1338518 GN=tgt PE=3 SV=1

SEQ ID NO: 52177 - protein, 379 aa, Bacillus vietnamensis
  misc_feature (1)..(379): tr|A0A0P6WSX3|A0A0P6WSX3_9BACI Queuine tRNA-ribosyltran sferase OS=Bacillus vietnamensis OX=218284 GN=tgt PE=3 SV=1
MTAITYELIKTCKQTGARLGRVHTPHGSFETPAFMPVGTMATVKTMSPEDLKSMESGIILSNTYHLWLRPGHEIIREAGGLHKFMNWDRAILTDSGGFQVFSLSKLRQIEEEGVHFRHHLNGDKLFLSPEKAMEIQNALGSDIMMAFDECPPYPAEYEYMKSSVERTTRWAERCLEAHQRPQDQGLFGIVQGGEYEELRKQSARDLVSMDFPGYAVGGLSVGEPKDVMNRVLDFTTPHLPSDKPRYLMGVGSPDSLIDGSMRGIDMFDCVLPTRIARNGTLMTSEGRLVVKNAKFARDFRPIDENCDCYTCKNYSRAYIRHLIKCDETFGIRLTTYHNLHFLLKLMEQVRQAIREDRLGDFREEFFEQYGFNRPDAKNF

SEQ ID NO: 52178 - protein, 379 aa, Bacillus vietnamensis
  misc_feature (1)..(379): tr|A0A5D4NZ56|A0A5D4NZ56_9BACI Queuine tRNA-ribosyltran sferase OS=Bacillus vietnamensis OX=218284 GN=tgt PE=3 SV=1
MTAIRYEHFKTCKQTGARLGRVHTPHGSFDTPVFMPVGTLATVKTMSPEDLKAMEAGIILSNTYHLWLRPGHEIIREAGGLHKFMNWDRAILTDSGGFQVFSLSEFRKIEEEGVHFRNHLNGDKLFLSPEKAMEIQNALGSDIMMAFDECPPYPAEHEYMKRSVERTSRWAERCLEAHQRPEDQGLFGIVQGGEYEDLRRQSAKDLVSLDFPGYAVGGLSVGEPKDVMNKVLEFTTPLLPDNKPRYLMGVGSPDALIDGAIRGIDMFDCVLPTRIARNGTLMTSKGRLVVKNAKFARDFNPIDENCDCYTCRNYSRAYIRHLIKSDESFGIRLTTYHNLHFLLKLMEQVRQAIREDRLGDFREEFFEAYGYNRPDAKNF

SEQ ID NO: 52179 - protein, 379 aa, Bacillus vireti
  misc_feature (1)..(379): tr|W1SIS5|W1SIS5_9BACI Queuine tRNA-ribosyltransferase OS=Bacillus vireti LMG 21834 OX=1131730 GN=tgt PE=3 SV= 1
MTAIRYELIKTCKQTGARLGRVHTPHGSFDTPAFMPVGTLATVKTMSPEDLKEMGAGIILSNTYHLWLRPGHEIIKEAGGLHKFMNWDRAILTDSGGFQVFSLSEFRKIEEEGVHFRNHMSGEKLFLSPEKAMEIQNALGSDIMMAFDECPPYPATFDYMKKSVERTSRWAERCLNAHARPEDQGLFGIVQGGEYEELRKQSARDLTSLDFPGYAIGGLSVGEPKDIMNRMLEYTTPLLPSNKPRYLMGVGSPDSLIDGSIRGIDMFDCVLPTRIARNGTLMTSTGRLVVKNAQYARDFGPLDENCDCYTCRNYSRAYIRHLIKCDETFGIRLTSYHNLYFLLRLMEKVRQAIMEDRLGDFREEFFERYGFNKPNAKNF

SEQ ID NO: 52180 - protein, 205 aa, Bacillus wakoensis
  misc_feature (1)..(205): tr|W4Q3K5|W4Q3K5_9BACI Queuine tRNA-ribosyltransferase OS=Bacillus wakoensis JCM 9140 OX=1236970 GN=JCM9140_19 52 PE=3 SV=1
MTAHARPKDQGLFGIVQGGEYEELRKQSAKDLVSLDFPGYAIGGLSVGEPKDVMNRVLEFTTPHLPENKPRYLMGVGSADSLIDGAIRGIDMFDCVLPTRIARNGTLMTSTGRLVVRNAKYARDFRPLDENCDCHVCQNYSRAYIRHLIKCEETFGFRLTSYHNLYFLLNLMEQVRQAIREDRLLDFREEFFEQYGFNKPNAKNF

SEQ ID NO: 52181 - protein, 381 aa, Bacillus weihaiensis
  misc_feature (1)..(381): tr|A0A1L3MPH6|A0A1L3MPH6_9BACI Queuine tRNA-ribosyltran sferase OS=Bacillus weihaiensis OX=1547283 GN=tgt PE=3 SV=1
MSTSPIRYELIKTCKQTGARLGRVHTPHGSFETPVFMPVGTLATVKTMSPEEVKEMGAGIILSNTYHLWLRPGNEIVREAGGLHKFMNWDRAILTDSGGFQVFSLSDFRRIEEEGVHFRNHLNGDKLFLSPEKAMHIQNDLGSDIMMAFDECPPYPADYDYMKKSVERTSRWAERCLEAHQRPNDQGLFGIIQGGEYEELRKQSARDLISLDFPGYAIGGLSVGEPKDVMNRVLEFTAPLMPSNKPRYLMGVGSPDSLIDGAIRGIDMFDCVLPTRIARNGTLMTSEGRLVVKNAKFAKDFGPLDENCDCYTCRNYSRAYIRHLIKSEETFGLRLTSYHNLYFLVNLMEQVRQAIREDRLGDFREEFFEKYGFNKPNAKNF

SEQ ID NO: 52182 - protein, 379 aa, Bacillus wiedmannii; identical to SEQ ID NO: 51992
  misc_feature (1)..(379): tr|A0A1A9PWR0|A0A1A9PWR0_9BACI Queuine tRNA-ribosyltran sferase OS=Bacillus wiedmannii OX=1890302 GN=tgt PE=3 S V=1

SEQ ID NO: 52183 - protein, 379 aa, Bacillus wiedmannii; identical to SEQ ID NO: 52170
  misc_feature (1)..(379): tr|A0A2C4QG11|A0A2C4QG11_9BACI Queuine tRNA-ribosyltran sferase OS=Bacillus wiedmannii OX=1890302 GN=tgt PE=3 S V=1

SEQ ID NO: 52184 - protein, 379 aa, Bacillus wudalianchiensis
  misc_feature (1)..(379): tr|A0A1B9B8K1|A0A1B9B8K1_9BACI Queuine tRNA-ribosyltran sferase OS=Bacillus wudalianchiensis OX=1743143 GN=tgt PE=3 SV=1
MPAIKYELIKTCKQTGARLGRVHTPHGSFETPVFMPVGTLATVKTMSPEELKEMDANIILSNTYHLWLRPGHDIIKEAGGLHKFMNWDRSILTDSGGFQVFSLSDFRKIEEEGVHFRNHLNGDKLFLSPEKAMEIQNALGSDIMMAFDECPPYPAEYDYMKRSVERTSRWAERCLQAHARPQDQGLFGIVQGGEYEELRRQSANDLVSLDFPGYAIGGLSVGEPKDVMNRVLEFTTPLLPAQKPRYLMGVGSPDSLIDGAIRGVDMFDCVLPTRIARNGTLMTSEGRLVVKNAKYARDFGPLDPNCDCYTCRNYSRAYIRHLIRCNETFGIRLTTYHNLYFLIKLMEQVREAIKEDRLGDFRDEFFEAYGFNRPDAKNF

SEQ ID NO: 52185 - protein, 381 aa, Bacillus xiamenensis
  misc_feature (1)..(381): tr|K2N8M1|K2N8M1_9BACI Queuine tRNA-ribosyltransferase OS=Bacillus xiamenensis OX=1178537 GN=tgt PE=3 SV=1
MSQLPIRYEFIKSCKQTGARLGRVHTPHGSFETPVFMPVGTLATVKTMAPEELKAMDAGIILSNTYHLWLRPGHDIVKEAGGLHKFMNWDRAILTDSGGFQVFSLSEFRKIEEEGVHFRNHLNGDKLFLSPEKAMEIQNALGSDIMMAFDECPPYPAEYDYMKRSVERTSRWAERCLTAHQRPEDQGLFGIVQGGEYEELRKQSAKDLVSLDFPGYAIGGLSVGEPKDVMNRVLEFTTPFLPADKPRYLMGVGSPDSLIDGAIRGVDMFDCVLPTRIARNGTLMTSEGRLVVKNAKYERDFRPIDENCDCYTCKNYTRAYIRHLIRTNETFGIRLTTYHNLHFLLKLMEQVREAIREDRLGDFREEFFERYGFNKPNAKNF

SEQ ID NO: 52186 - protein, 379 aa, Bacillus zeae
  misc_feature (1)..(379): tr|A0A398B2Y6|A0A398B2Y6_9BACI Queuine tRNA-ribosyltran sferase OS=Bacillus zeae OX=1917180 GN=tgt PE=3 SV=1
MSAIKYELIKTCKQTGARLGRVHTPHGSFDTPAFMPVGTLATVKTMSPEELKEMGAGIILSNTYHLWLRPGHEIIKEAGGLHKFMNWDRAILTDSGGFQVFSLSEFRKIEEEGVHFRNHMNGDKLFLSPEKAMEIQNALGSDIMMAFDECPPYPAEFDYMKKSVERTSRWAERCLEGHKRPNDQGLFGIIQGGEYEELRKQSAKDLVSLDFPGYAVGGLSVGEPKDVMNRVLEFTTPLLPSSKPRYLMGVGSPDSLIDGAIRGIDMFDCVLPTRIARNGTLMTSNGRLVVKNARYARDFNPIDENCDCHTCRNYSRAYIRHLIKCDETFGIRLTSYHNLYFLLKLMEQVRQAIMEDRLGDFREEFFERYGFNQPGARNF

SEQ ID NO: 52187 - protein, 381 aa, Bacillus zhangzhouensis; identical to SEQ ID NO: 52125
  misc_feature (1)..(381): tr|A0A081LBB0|A0A081LBB0_9BACI Queuine tRNA-ribosyltran sferase OS=Bacillus zhangzhouensis OX=1178540 GN=tgt PE =3 SV=1

SEQ ID NO: 52188 - protein, 374 aa, Unknown
  misc_feature (1)..(374): tr|A0A0J8YW35|A0A0J8YW35_9GAMM Queuine tRNA-ribosyltran sferase OS=bacteria symbiont BFo2 of Frankliniella occi dentalis OX=1628856 GN=tgt PE=3 SV=1
MKFEYIKRDGRARRGRLVFDRGVVETPAFMPVGTYGTVKGMTPEEVKETGAQILLGNTFHLWLRPGQEIMKLHGDLHDFMQWQGPILTDSGGFQVFSLGDIRKITEKGVHFRNPINGDPIFLDPEKSMEIQHDLGSDIVMIFDECTPYPADWDYAKRSVEMSLRWAQRSRDRFDELGNKNALFGIVQGGVYEDLRDISVKGLVEIGFDGYAVGGLAVGEPKADMHRILEHVCPQLPEEKPRYLMGVGKPEDLVEGVRRGIDMFDCVMPTRNARNGHLFVTDGVVKIRNAKHKSDTSPLDAECDCYTCKHYTRAYLYHLDRCNEILGARLNTIHNLRYYQRLMAGLRQAIEDDRLEEFVADFYTKIGKEVPALPF

SEQ ID NO: 52189 - protein, 376 aa, Unknown
  misc_feature (1)..(376): tr|A0A0J8YIT9|A0A0J8YIT9_9GAMM Queuine tRNA-ribosyltran sferase OS=bacteria symbiont BFo1 of Frankliniella occi dentalis OX=1628855 GN=tgt PE=3 SV=1
MKFELDTTDGRARRGRLVFDRGVVETPAFMPVGTYGTVKGMTPEEVQDTGAQIILGNTFHLWLRPGQEIMKLHGDLHDFMQWKGPILTDSGGFQVFSLGDIRKITEKGVHFRNPINGDAIFLDPEKSMEIQYDLGSDIVMIFDECTPYPADWDYAKRSMEMSLRWAQRSRDRFDSLGNKNALFGIIQGSVYEDLRDVSVKGLVEIGFDGYAVGGLAVGEPKEDMHRILEHVCPQLPQDKPRYLMGVGKPQDLVEGVRRGIDMFDCVMPTRNARNGHLFVTDGVVKIRNAKYKDDTSPLDAECDCYTCRNYSRAYLYHLDRCNEILGARLNTIHNLRYYQRLMAGLRQAIEEGKLEHFVTEFYQRTGLAVPPLPSDN

SEQ ID NO: 52190 - protein, 387 aa, Bacteriodetes bacterium
  misc_feature (1)..(387): tr|A0A522F8A1|A0A522F8A1_9BACT Queuine tRNA-ribosyltran sferase OS=Bacteriodetes bacterium OX=2507565 GN=tgt PE =3 SV=1
MIFKIDHTDKETKARAGEITTAHGKIQTPIFMPVGTRGTVKAVHQHELKEEVKAQIILGNTYHLYLKPGMDVIEKAGGLHKFIGWDLPLLTDSGGFQIFSLADERRQSQPGAKPVRKITEEGVKFNADTDGSIHFFSPENTIDIQRTIGADIIMAFDECTPYPCEYEYAKNSMGMTHRWLKRCITQFNKTEGKYGYAQDLFPIVQGSVYKDLRIQSAEFVASQNCEGNAIGGLSVGEAQEEMFGMTEVVCSILPKEKPRYLMGVGKPEQLLECIALGIDMFDCVMPTRNARNGMLFTSQGTISIRNAKYKDDFSPIDPEGTSFVDNAYSRAYLRHLNFADEMLASMIASVHNLAFYARLMREAREQIVAGTFREWKNKMVKQTEQRL

SEQ ID NO: 52191 - protein, 375 aa, Bacteriodetes bacterium
  misc_feature (1)..(375): tr|A0A522FW22|A0A522FW22_9BACT Queuine tRNA-ribosyltran sferase OS=Bacteriodetes bacterium OX=2507565 GN=tgt PE =3 SV=1
MLFELTKQCHESKARAGLLKINGTEIPTPVFMPVGTQGTVKAISQEILNELDARIILSNTYHLYLRPGTEVIEHFRGLHNFINWNKSILTDSGGYQIFSLQDLRKLTEEGVSFSSHIDGSKHFFSPESVVDIQRKLGSDIMMVLDECTPYPATKDIASKSADLSHRWAIRAKDSFIKSKSLYNREQFLFSIGQGSVYPDLRRDYLKKMFDIEFDGYAIGGLSVGEPADLMYEIVDVSTDLLPSNKPRYLMGVGTPENILEAIERGIDMFDCVLPTRNARNGQLFTSKGKINIRNAQYKFSDEPIDNVIGLKSSNSYSLGYLRHLFIAGEILGLQLASKQNIAFYLWLVRTVREKILSGEFITWKKSFLQNYQNSD

SEQ ID NO: 52192 - protein, 386 aa, Bacterioplanes sanyensis
  misc_feature (1)..(386): tr|A0A222FMH1|A0A222FMH1_9GAMM Queuine tRNA-ribosyltran sferase OS=Bacterioplanes sanyensis OX=1249553 GN=tgt P E=3 SV=1
MTRKCHMNFTLLGQDDSSFARRGTLSFPRGDVQTPAFMPVGTYGTVKGVTTDQVEELGAEIILGNTFHLMLRPGTEIIQQHGDLHDFIGWDKPILTDSGGFQVFSLGDMRKITEEGVTFRSPVNGEKVLMTPESSMQVQRELGSDIVMIFDECTPYPATEKEAADSMRMSLRWAKRSKEAHGDSTAALFGIIQGGMYEALRDESLEGLTAIGFDGYAVGGLSVGEPKPDMMRVLRHTAPKMPADKPRYLMGVGKPEDLVEGVRRGIDMFDCVMPTRNARNSHLFTSTGVLKIRNAANRTDTGPVDPECDCYTCKNYSRAYLHHLDRCKEILGATLNSIHNLHYYQTLMAGLRRALEEGTFADFVDEFYAKRGLPTPALDVPDQAPE

SEQ ID NO: 52193 - protein, 400 aa, Bacteriovorax sp.
  misc_feature (1)..(400): tr|A0A1J5KNJ4|A0A1J5KNJ4_9PROT Queuine tRNA-ribosyltran sferase OS=Bacteriovorax sp. MedPE-SWde OX=1860085 GN=t gt PE=3 SV=1
MRIQDQVKEHFSFELVHVDKKTGARAGVIKTPHGDIPTPVFMPVGTHGAVKALTPNFLEDLDTKIILSNTYHLHLSPGSKIVEKAGGLHKFMHWNRPILTDSGGFQVFSLQGKSIKEEGAEFKDHKGKTIMLSPETSIQIQQELGSDIMMAFDECIPYPATRDYTKTSIDRTHRWLDRCIETWTNPKQALFGIIQGSTYDDYRKECIDELVKRDLPGYAIGGVSVGEGHDLMEKIVKYAAPKMPADKPRYVMGVGNPEDLLMIWENGADMSDCIIPTKFGRGGTLFTNRGKIRIKHKNYRRDFFPIEPNCKCYCCKNFTRAYVKHLFDSNEILGQILATMHNIEFYKSMAEGAREAILEDRYSEWKEAFLANYTKDEDKSPKGPKGSKGKDDKKKSRRNK

SEQ ID NO: 52194 - protein, 371 aa, Bacteriovorax sp.
  misc_feature (1)..(371): tr|T0STT5|T0STT5_9PROT Queuine tRNA-ribosyltransferase OS=Bacteriovorax sp. BSW11_IV OX=1353529 GN=tgt_2 PE=3 SV=1
MTMYKEVAKSGKARAGVITTAHGEIETPIFMPVGTRASVKCMWQHELEEVGAQIILGNTYHLYLKPGHELVEKVGGGLHGFMNWKKPILTDSGGYQVFSLSDINKLTEEGVTFQSHIDGSYHLITPEKSMEIQKALGSDIVMAFDECPALPASKERLRESMELTLRWAKRCKDVELKPHQHLFGIIQGGLHKDLRTECMERLKEIDFPGYALGGLSVGEKNDEMVEFLNDFVHTMPDDKPRYLMGVGKPLDVLNGIRAGLDMFDCVLPTRNARNGQFLTSHGPLSIKKEKFKEDTLPPDPDCSCKVCQNYSRSYIRHLFNVGEYLAGQLISFHNLHFYLTMVKEARQAIIDDRFEEYYAEFKTKYTSEKWK

SEQ ID NO: 52195 - protein, 392 aa, Bacteriovorax stolpii
  misc_feature (1)..(392): tr|A0A2K9NR68|A0A2K9NR68_9PROT Queuine tRNA-ribosyltran sferase OS=Bacteriovorax stolpii OX=960 GN=tgt PE=3 SV= 1
MSADKPRIQDQVKEHFKFKLEHVDKHSKARAGVITTPHGDIPTPVFMPVGTHGAIKALQPQVLEDMDTKIILSNTYHLHLTPGSDLVKKAGGLHKFMNWPRPILTDSGGFQVFSLQKKSIKEEGAEFKDQKGQKILLSPETSITIQQNLGSDIMMAFDECIPYPATREYTKNSMDRTHRWLDRCIETWNNPKQALFGIIQGSTYNDLRKECVDELVKRDLPGYAIGGVSVGEGAEWMEKIVSFTAPLMPVDKPRYAMGIGNPEDLIMLWENGIDMSDCIIPTKFARGGTLFTSRGKIRIRHRNYRRDFYPIDHSCSCYTCKNFSRAYIKHLFDSNEILGQVLATTHNIAYYKSLAEGARKAILEDRFLDFKKEFFANYKKDDSKDDDMGGED

SEQ ID NO: 52196 - protein, 375 aa, Bacteriovorax stolpii
  misc_feature (1)..(375): tr|A0A2K9NUK2|A0A2K9NUK2_9PROT Queuine tRNA-ribosyltran sferase OS=Bacteriovorax stolpii OX=960 GN=tgt PE=3 SV= 1
MTTEKKIFKKIAQSKKARAGVITTAHGEIETPIFMPVGTRASVKTMWQEELEEMNAQIILGNTYHLYLRPGHELIEKVGAGLHGFMKWDRAILTDSGGYQVFSLSSMNKVTEEGVTFQSHLDGSRHLISPEKSMEIQRALGSDIVMNFDECPALPATKDRLRESMELTLRWAKRCRDYQLKDHQNLFGIIQGGLHHDLRTECMERLKEMNFEGFALGGLSVGEKNEEMVSFLDNFVHTMPEDKPRYLMGVGKPLDILNGIRAGIDMFDCVLPTRNARNGQFLTKGGPLNIKKERFKEDLLPPDPECNCKVCRKYSRAYIRHLFTVGEYLAGNMITYHNLYFYLQMTRDAREAIKADKFDEFYSSFYNSYTSNMWN

SEQ ID NO: 52197 - protein, 401 aa, Unknown
  misc_feature (1)..(401): tr|A0A4Q5NET1|A0A4Q5NET1_9BACT Queuine tRNA-ribosyltran sferase OS=bacterium OX=1869227 GN=tgt PE=3 SV=1
MKKALEFEIHDRLPGALARTGTITTPHGTIQTPAFIPVGTKATLKALTPEQLSATGAQAVLANAYHLYLRPGHDIIDQAGGLHAFMHWDKPTFTDSGGFQVMSLGVGFKKIIDMDGKTDERPLGKKEKLAWIDNDGVRFKSHLDGSIHKFTPELSMQIQHGIGADITFAFDELTTLHHDYEYQVESLHERTHPWAVRSLAEHQRLNEKRTHRPPQALFGVVQGANYEDLRRECSRFLGSMDFDGYGLGGAFTKENIGEITGWMCQELPENKPRHMLGISEPDDIFDCIENGADTFDCVSPARVGRNGALYTKFGRVNVTRAQYATDFTPFDVDCDCYTCQNFTSAYLHHLFKSGELLSNTLATIHNERFIIRLVDDIRRSISDGTFYDFKQVFLNNYYSTK

SEQ ID NO: 52198 - protein, 375 aa, Unknown
  misc_feature (1)..(375): tr|A0A522WLD6|A0A522WLD6_9BACT Queuine tRNA-ribosyltran sferase OS=bacterium OX=1869227 GN=tgt PE=3 SV=1
MSFSFTLIKKDITGARLGMVSTPHGAFQTPVFMPVGTRAAVKAMTPEGLRDAGAEIILANTYHLYLRPGHEIIKELGGLHCFMNWDGTILTDSGGFQVFSLGKLRKIDETGVVFNSHLDGARCVLTPESAIEVQQALGADIIMPLDECPPYPASRAYIEESMARTHRWAKRCKGAKTNAAQALFGIVQGGMHADLRKASANALIDMGFDGYALGGLSVGEEKPLMREVVSFSAPLLPESAPRYLMGVGTPEDLVHGVENGIDMFDCVMPTRNARNGTLFTRRGKLVIKNGLYERDSRPVEEGCLCYACRNYSRAYLRHLFMAGEILSSMLNTAHNLYYYCSLMKRMRAAISEGGFNEFKKGFYTDIEAGNMREEP

SEQ ID NO: 52199 - protein, 369 aa, Unknown
  misc_feature (1)..(369): tr|A0A532UFQ6|A0A532UFQ6_9BACT Queuine tRNA-ribosyltran sferase OS=bacterium (candidate division B38) B3_B38 OX =2012999 GN=tgt PE=3 SV=1
MFSFRVINSDRQSRARLGEIATPHGVVQTPVFMPVGTQATVKSLTIKELEELGVEIILSNTYHLYLQPGHKIIEKLGGLHRFTSWNKPILTDSGGFQIFSLGTLQKVKEEGIYFTSHLDGSKHFLSPEMVIDIQKSLGADIITTLDQCIPYPASYEYAREAMEITLQWAKRSRTHFGDKTQALFAIVQGSTYPQLREESLSRLLELDFEGIAIGGLSVGEPKDLMYELLEFMEPLLPADKPRYLMGLGTPQDLFDAVALGYDMFDCVMPTRNARNGCLFTRKGKVMIKNARYADDPRPIDQECTCYTCRHFSRAYLRHLFMAKEILSAILNTHHNLHFYLDIMRKIRQSIKDEKLAELKDSFFSSPESG

SEQ ID NO: 52200 - protein, 401 aa, Unknown
  misc_feature (1)..(401): tr|A0A2H0UTZ9|A0A2H0UTZ9_9BACT Queuine tRNA-ribosyltran sferase OS=bacterium (Candidatus Gribaldobacteria) CG10 _big_fil_rev_8_21_14_0_10_37_21 OX=2014275 GN=tgt PE=3 SV=1
MAFKVLQKSKKSKARLGVIKTPNGVLHTPAFFPVATLANLKTLDSSDIQTLGFEAVLCNTYHLMLKPGSKIVQKMGGLHNFMNFKGIVATDSGGFQVFSLGSGLEHGVGKIAKIFPGKAKAKKTANWKELSSFLESKRKKKSLLKIKEEGVYFQNYLSGEELFLSPEISIQIQQELAADIIFAFDECTSPLHDKDYTRLALERTHRWALRCLEQQQKANGKKRMAKQMLFGIIQGGEYKDLREKSAKFIGSLDFDGFGIGGSLGKTKNKMYQILDWTIPLLPENKPRHLLGIGHLEDFEKAIKKGVDLFDCVYPTRVARHGVAILSKTQNINLQKSIFLQDKNPLSKDCLCPTCQNYSRAYVSHLIRAKEITGMRLLTLHNLYFFKNFIENTRKCIKLGKI

SEQ ID NO: 52201 - protein, 395 aa, Unknown
  misc_feature (1)..(395): tr|A0A2H0UXV5|A0A2H0UXV5_9BACT Queuine tRNA-ribosyltran sferase OS=bacterium (Candidatus Gribaldobacteria) CG10 _big_fil_rev_8_21_14_0_10_41_12 OX=2014277 GN=tgt PE=3 SV=1
MQFKVIQQSKKSLARLGVIKTAHGDLHTPAFFPVATQAVIKTLTSDNIKQIGFEGILANTYHLYLRPGEKIVNKMGGLHKFMNFNGVMATDSGGFQVFSLGAGIAHGVGKIAKIFPGPQQSKPSTPLFNSCDRRNRNMVRITEEGVYFRSHLDGSQHFLSPEKSMQIQQDLGADITFAFDECTSPLAGQEYTKKAMERTHRWAKRCLRAAQITKNKSLITKQGLFGIIQGGEYKKLREQSAKFIGGLDFNGFGIGGSLGKTKSKMYEILNWTIPLLPQEKPRHLLGIGYLEDFERAIKAGVDLFDCVYPTRFARHGIALTAKKKLNLNQNKFLIDKNPLDKTCTCPTCQNHTRSYICHLFRAKEITGQQLLTMHNLWFFKQFIDKIRQKIAMDKI

SEQ ID NO: 52202 - protein, 377 aa, Unknown
  misc_feature (1)..(377): tr|A0A3A9A783|A0A3A9A783_9BACT Queuine tRNA-ribosyltran sferase OS=bacterium 0.1xD8-71 OX=2320099 GN=tgt PE=3 S V=1
MYKIIKQEGSAKRAAFTTVHGTIQTPVFMNVGTVAAIKGAVSTEDLEGIGTQVELSNTYHLHVRPGDQIIRKMGGLHKFMSWNKPILTDSGGFQVFSLAGLRKIKEEGVYFHSHIDGRKIFMGPEESMQIQSNLASTIAMAFDECPSSVAERRYVEDSVARTTRWLMRCKKEMERLNGLADTINHNQLLFGINQGAVFDDIRIEHARRISELDCDGYAIGGLAVGESHEQMYHVIEETVPYLPKDKPTYLMGVGTPANILEAVERGVDFFDCVYPTRNGRHGHLYTNQGKINLFNAKHELDERPIEEGCMCPACRRYSRAYIRHLLKAKEMLGMRLCVLHNLYFYNTMMEEIRNALEAGEFASYKRHKLEGMKALQS

SEQ ID NO: 52203 - protein, 376 aa, Unknown
  misc_feature (1)..(376): tr|A0A3A9AR85|A0A3A9AR85_9BACT Queuine tRNA-ribosyltran sferase OS=bacterium 0.1xD8-82 OX=2320100 GN=tgt PE=3 S V=1
MFRLLKQEGRAKRGEFTTVHGIIQTPVFMNVGTVAAIKGAVSTEDLERIHTQVELSNTYHLHVRPGDKIIKQLGGLHKFMSWDRPILTDSGGFQVFSLAGLRRIKEEGVYFHSHIDGRKIFMGPEESMQIQSNLASTIAMAFDECPPSLAERSYVQASVARTSRWLERCKKEMDRLNSLEDTINKKQLLFGINQGAVYADIRIEHAKQIAGLGLDGYAIGGLAVGESHEEMYHIIEETVPFLPEDKPVYLMGVGTPANILEGVERGIDFFDCVYPSRNGRHGHLYTNHGKINLFNAKYEMDDRPIEEGCGCPACRRYSRAYIRHLLKAKEMLGMRLCVLHNLYFYNTMMEEIRDALDAGEFAAYKQRKLAGMISSR

SEQ ID NO: 52204 - protein, 380 aa, Unknown
  misc_feature (1)..(380): tr|A0A3A8U0P4|A0A3A8U0P4_9BACT Queuine tRNA-ribosyltran sferase OS=bacterium 1XD21-70 OX=2320103 GN=tgt PE=3 SV =1
MRYQLITVDGRAKRAEVQTVHGTIQTPVFMNVGTAAAIKGAVSTDDLRQIGTQVELSNTYHLHVRTGDKLIRRFGGLHRFMNWDRPILTDSGGFQVFSLAGLRKIKEEGVYFNSHIDGHKIFMGPEESMQIQSNLGSTIAMAFDECPPSRAEYDYIKQSVERTTRWLERCKREMARLNSLPDTINREQLLFGINQGGVAEDIRIEHAKTIARMGLDGYAIGGLAVGESHEEMYHILDVTVLHLPQDKPTYLMGVGTPANILEAVDRGVDFFDCVYPSRNGRHSHVYTNQGKLNLLNQKYELDPRPIEEGCRCPACRSYSRAYIRHLFKAKEMLGMRLCVLHNLYFYNTMMEEIRDAIEEHRYAEYKAKKLSGMEAGTRDD

SEQ ID NO: 52205 - protein, 379 aa, Unknown
  misc_feature (1)..(379): tr|A0A3A9G1S5|A0A3A9G1S5_9BACT Queuine tRNA-ribosyltran sferase OS=bacterium 1XD42-44 OX=2320106 GN=tgt PE=3 SV =1
MTPITYELKKTCKQTGARLGRVHTPHGSFDTPAFMPVGTLATVKTMSPEELTEMNANIILSNTYHLWLRPGQDIIKEAGGLHRFMNWDGTILTDSGGFQVFSLSEMRNITEQGVYFRSHLNGEKLFLSPEKAINIQNDLGSDIMMALDECPPYPADHAYMKSSVERTSRWAERCLDAHQRKGEQGLFGIIQGGEYEDLRKQSANDLISLDFPGYAIGGLSVGEPKDVMNRVLEFTTPLMPDDKPRYLMGVGSPDSLIDGAVRGVDMFDCVLPTRIARNGTCMTSNGRLVVRNAKYARDFSPIDENCDCHACKNYTRAYIRHLIKCNETFGFRLTTYHNLYFLLKLMEQVRKAISEDRLGSFREEFFEQYGFNKPNAKNF

SEQ ID NO: 52206 - protein, 380 aa, Unknown
  misc_feature (1)..(380): tr|A0A3A9FGA8|A0A3A9FGA8_9BACT Queuine tRNA-ribosyltran sferase OS=bacterium 1XD42-54 OX=2320110 GN=tgt PE=3 SV =1
MYRIITRDGLAKRAEFTTVHGTVQTPLFMNVGTAAAIKGAVATTDLKEIGTQVELSNTYHLHVRPGDHIVKQMGGLHKFMNWDRPILTDSGGFQVFSLASLRKIKEEGVYFQSHIDGRKIFMGPEQSMQIQSNLASTIAMAFDECPSSVADRQYVQNSVDRTTRWLVRCKDEMKRLNALEDTINPHQLLFGINQGAIYDDIRIEHAKRISELDLDGYAVGGLAVGETHEEMYRILDSVVPYLPADKPTYLMGVGTPINILEAVERGVDFFDCVYPSRNGRHGHVYTNDGKLNLFNAKYELDQRPIEEGCGCPACRSYSRGYIRHLLKAKEMLGMRLCVLHNLYFYNHLMEEIRAAIEAGNYSQFKKAKIERYTQNQEKNA

SEQ ID NO: 52207 - protein, 377 aa, Unknown
  misc_feature (1)..(377): tr|A0A3A8YSP6|A0A3A8YSP6_9BACT Queuine tRNA-ribosyltran sferase OS=bacterium 1xD42-67 OX=2320107 GN=tgt PE=3 SV =1
MFELLKQEGRARRGIFTCTHGVVQTPVFMNVGTQGAIKGAVSAHDLKEIGCQVELSNTYHLHLRPGDAVIRQMGGLHKFMGWNGPMLTDSGGFQVFSLSGLRKISEEGVTFASHIDGRRIFMGPEESMQIQSNLGSDIAMAFDECVENPSPYEYVKASCERTARWLERCVAKHDKLNSLSDTVDPQQQLFGIDQGGTYADLRVWHMKEIAKLDCDGYAIGGLAVGEPTQVMYDIIDAVEPFMPKDKPRYLMGVGTPSNIIEGVARGIDFFDCVMPARNARHGKLYTWQGTINIKNEKYKLDPRPIDPTCDCPACRSFSRAYLRHLLTAGEMLAMRLAVLHNLHFYNELMARIRESIDSGTFEDFRTKYSGLLDRPAL

SEQ ID NO: 52208 - protein, 376 aa, Unknown
  misc_feature (1)..(376): tr|A0A3A9G2K4|A0A3A9G2K4_9BACT Queuine tRNA-ribosyltran sferase OS=bacterium 1XD42-8 OX=2320102 GN=tgt PE=3 SV= 1
MYTLLKQEGKARRGCFQTVHGTVQTPAFMNVGTSAAIKGGISSIDLVDLKCQVELCNTYHLHVRPGDDVIYQMGGLHQFMNWHKPILTDSGGFQVFSLAQLRKIKEEGVTFACHLDGKRIFMGPEESMRIQSHLASTIAMAFDECIENPAPYDYVERSIARTTRWLIRCKAEMERLNHLEETINPKQMLFGINQGSTYHDLRIQHMQEIAALGLDGYAIGGLAVGETAQEMYDTIEAVEPYMPLEKPRYLMGVGTPVNILEAVRRGIDLFDCVMPSRNARHGTVFTWDGIRILHNEKYKTDSEPLDPHCNCPVCRNYSRAYLRHLFRTHEMLGMRLGVTHNLYFYNTLMEKIRDALDAGTFESFYQEMVPILGQRI

SEQ ID NO: 52209 - protein, 378 aa, Unknown
  misc_feature (1)..(378): tr|A0A3A9EMJ9|A0A3A9EMJ9_9BACT Queuine tRNA-ribosyltran sferase OS=bacterium 1XD42-8 OX=2320102 GN=tgt PE=3 SV= 1
MSYRLLKREGTAKRGELYTVHGVIQTPVFMNVGTAGAIKGGVSSADLKNIKTQVELSNTYHLHLRPGDKVIKKLGGLHKFMNWAQPILTDSGGFQVFSLSSLRKIKEEGVYFSSHIDGRKIFMGPEESMSIQSNLASTIAMAFDECPSSKADRAYVQQSADRTVRWLKRCREHLCQLNQKEDTINKKQMLFGINQGGIFKDIRIEHGKKISQFDLDGYAIGGLAVGETHEEMYEIIETVVPYLPLEKPTYLMGVGTPENILEAVERGVDFFDCVYPSRNGRHGHVYTNEGKRNLYNAKYELDDRPIEEGCGCPACKDYTRAYIRHLLKAKEILGMRLCVLHNLYFYNTMMEEIRQSLDEGRFGIYKKQKLEHMRMGGN

SEQ ID NO: 52210 - protein, 382 aa, Unknown
  misc_feature (1)..(382): tr|A0A3A8ZZZ6|A0A3A8ZZZ6_9BACT Queuine tRNA-ribosyltran sferase OS=bacterium 1xD42-87 OX=2320113 GN=tgt PE=3 SV =1
MYRILKREGRAKRAEFTTVHGVIQTPVFMNVGTVAAIKGAVSTEDLEQIGTQVELSNTYHLHVRPGDRVIRELGGLHKFMSWNKPILTDSGGFQVFSLAGLRRIKEEGVYFHSHIDGRKIFMGPEESMRIQSNLASTIAMAFDECPASTAERKYVEDSVARTTRWLARCKREMERLNSLDDTINKKQLLFAINQGAVFDDIRIEHAKQIAELGCDGYALGGLAVGESHEQMYHVIEETVPWLPADKPTYLMGVGTPANILEAVERGVDFFDCVYPTRNGRHGHLYTNRGKINLFNAKYELDERPIDEGCPCPACRRYSRAYIRHLLKAKEMLGMRLCVLHNLYFYNTMMTEIRDALDEGRFAEYKRNKLHGMQKAGAENGNA

SEQ ID NO: 52211 - protein, 377 aa, Unknown
  misc_feature (1)..(377): tr|A0A3A8YVP4|A0A3A8YVP4_9BACT Queuine tRNA-ribosyltran sferase OS=bacterium 1xD8-6 OX=2320116 GN=tgt PE=3 SV=1
MYRILCRDGNAKRAELSTVHGVVQTPVFMNVGTVGAMKGAVSTQDLQGIKTQVVLCNTYHLHVRPGDMVVKKLGGLHKFMVWDKPILTDSGGFQVFSLAGLRKIKEEGVYFNSHIDGRKIFMGPEESMQIQSHIASTVAMAFDECPPHPATRKYMQDSVDRTTRWLERCKKEMNRLNQLEDTINPEQMLFGINQGGTFSDIRVEHAKRIAEMDLDGYALGGLAVGESHEEMYDIIEKTVPYLPEDKPVYLMGVGTPENILEAVERGVDFFDCVYPARNGRHGHAYTNHGKMNLLNAKYELDDKPLDDTCGCPVCRTYSRAYIRHLLKAKEMLGLRLMVTHNLYFYNTLMEEIRDAIEKGCFQQYKRNKLEQLKEETK

SEQ ID NO: 52212 - protein, 376 aa, Unknown
  misc_feature (1)..(376): tr|A0A3A9EYY1|A0A3A9EYY1_9BACT Queuine tRNA-ribosyltran sferase OS=bacterium 1XD8-76 OX=2320115 GN=tgt PE=3 SV= 1
MYKVLKKEGRAKRAQLSTVHGVVQTPVFMNVGTAAAIKGAVATSDLEEIGTQIELSNTYHLHVRPGDELIKSVGGLHKFMSWERPILTDSGGFQVFSLAKLRKITEEGVAFHSHIDGRKIFMGPEESMQIQSNLGSTIAMAFDECPSSKADRLYVQNSVDRTTRWLVRCQAKMRELNAGEGTVNPSQLLFGINQGAIFDDIRIEHAKRIAELDLDGYAVGGLAVGETHEEMYHILEETVPYLPEDKPTYLMGVGTPANILESVDRGVDFFDCVYPSRNGRHGHLYTNYGKINLFNQKYERDMRPIEKGCGCPACRRYSRAYIRHLLKAKEMLGMRLCVLHNLYFYNTMMTEIREALDEGRFAAYKRAKLERMAQGQ

SEQ ID NO: 52213 - protein, 378 aa, Unknown
  misc_feature (1)..(378): tr|A0A4Q2B8N3|A0A4Q2B8N3_9BACT Queuine tRNA-ribosyltran sferase OS=bacterium 1XD8-92 OX=2320884 GN=tgt PE=3 SV= 1
MYRLLKQEGRAKRGEFHTVHGIIQTPVFMNVGTAAAIKGAVSTEDLEGIKTQVELSNTYHLHVRPGDEIVKKMGGLHKFMSWDKPILTDSGGFQVFSLASLRKIKEEGVYFHSHVDGRKIFMGPEESMRIQSNLASTIAMAFDECPSSRADRSYVQASVERTTRWLGRCKKEMGRLNGLEDTINRHQMLFAINQGAVFADIRIEHAKRIAEMELDGYAVGGLAVGESHEEMYYILEETVPHLPLEKPTYLMGVGTPANILEGVERGVDFFDCVYPSRNGRHGHLYTNNGKINLFNAKYETDGRPIEEGCGCPACRRYSRAYIRHLLKAKEMLGMRLCVLHNLYFYNTMMEEIRDALDKGCFAAYKKNKLEKMRNLQKE

SEQ ID NO: 52214 - protein, 377 aa, Unknown
  misc_feature (1)..(377): tr|A0A4Q2BRA2|A0A4Q2BRA2_9BACT Queuine tRNA-ribosyltran sferase OS=bacterium 1XD8-92 OX=2320884 GN=tgt PE=3 SV= 1
MFRILKKEGNAKRGEFTTVHGIINTPVFMNVGTVAAIKGAVSTEDLEQIRTQVELSNTYHLHVRPGEQIIKQLGGLHKFMSWDKPILTDSGGFQVFSLAKLRRIKEEGVYFNSHIDGRKIFMGPEQSMQIQSALASTIAMAFDECPSSLAERAYVQASVERTTRWLERCKAEMARLNGLEDTINRNQLLFGINQGAVFADIRIEHAKQIAQLSLDGYAIGGLAVGESHEEMYYIIEETVPHLPGDKPVYLMGVGTPANILEGVERGIDFFDCVYPSRNGRHGHLYTNHGKINLFNAKYELDERPIEEGCNCPACRRYSRAYIRHLLKAKEMLGMRLCVLHNLYFYNTMMEEIRDALDNDEFAAYKKRKLEGMMQGEE

SEQ ID NO: 52215 - protein, 387 aa, Unknown
  misc_feature (1)..(387): tr|A0A0S4M779|A0A0S4M779_9BACT Queuine tRNA-ribosyltran sferase OS=bacterium 2013Arg42i OX=1561003 GN=tgt PE=3 SV=1
MATIFRSTVLYQHKRLPARIMEVVTPHGKFETPTFMPVGTRAAINGIQQKDLQNTDTTIILGGNTYHMLNSPGMDAIRICGGMHEFMNWNGPMLTDSGGFQVFSISKKSPKKCRIDDTGARFQQNDGKIINLSPKTSILTQKIIGADIIMAFDECTTHSDNREESLRALNRTHRWLSESRETHEYQPFSEYGNHQAFFGIIQGGYFRDLREQSTQFILDMETDGIAIGGEVIGSDMNATEEIISWIMPQLPTNKVRYTMGVGLNPCDLIAVVKRGIDMFDCVAPTRNARHGALYHGHPKIKDDWVTFDTKNIAEGRLLIKKGEYARDERPILEDCSCTTCRNYSRSYLHYLFKSKQTMYNTLSGIHNIHVMQNVCRKMREIIKQNSY

SEQ ID NO: 52216 - protein, 376 aa, Unknown
  misc_feature (1)..(376): tr|A0A0N0CZ12|A0A0N0CZ12_9BACT Queuine tRNA-ribosyltran sferase OS=bacterium 336/3 OX=1664068 GN=tgt PE=3 SV=1
MKFELLHTDSQTKARLGKIETDHGVIETPIFMPVGTAGTVKAVHTRELHNDIQAQIILGNTYHLYLRPGLDVLKQAGGLHKFNGWNKPILTDSGGYQVYSLAENRKITEEGVKFKSHIDGSYHFFSPESVMDIERIIGADIMMAFDECPPYPCDYTYAKKSMHLTHRWLERCCKRVDETEGLYGYSQTLFPIVQGSVFKDLRKESAEFIASMGREGNAIGGLSVGEPAEMMYEMTEFVCDILPKDKPRYLMGVGTPANILEGIALGIDMFDCVMPTRNARNGMLFTTQGIINIRNEKWKTDFTPIDETLGGEVSGFYSKAYLRHLMISKEILAAQIASIHNLRFYLWLVAQAKEQIRLGTFKAWKDKMVVDLMRKL

SEQ ID NO: 52217 - protein, 389 aa, Unknown
  misc_feature (1)..(389): tr|A0A1H8LPW7|A0A1H8LPW7_9BACT Queuine tRNA-ribosyltran sferase OS=bacterium A37T11 OX=1855384 GN=tgt PE=3 SV=1
MRIHHNKIAETGQMKFTLQAKDRMSNARAGMMETAHGVIKTPIFMPVGTAGTVKAVHQHELKEAVKAQIILGNTYHLYLRPGLDVLKNAGGLHRFISWDRPLLTDSGGYQVYSLSEVRKIKEEGVTFRSHIDGSKHLFTPENVMDIQRVIGADIIMAFDECTPYPCEYEYARKSLDMTHRWLKRCCGRFDATEGIYGYDQALFPIVQGSVYPDLRKRSAETIAAFGREGNAIGGLSVGEPAEEMYAMTELVCGILPAEKPRYLMGVGTPINLLENIALGIDMFDCVMPTRNARNGMLFTREGIINIKNKKWEADFSPIDETSDLATDQFYSKAYLRHLIHSKEILGAQIATLHNLHFYLWLVGEAREKILDGTFYAWKKEMVKKLGQKI

SEQ ID NO: 52218 - protein, 376 aa, Unknown
  misc_feature (1)..(376): tr|A0A1H9QHZ4|A0A1H9QHZ4_9BACT Queuine tRNA-ribosyltran sferase OS=bacterium A52C2 OX=1855383 GN=tgt PE=3 SV=1
MTEFTFALHATDGDARTGAIHTPRGLIRTPAFMPVGTQATVKTMYPGQVRELGADIVLGNTYHLMLRPTAERVARLGGLHEFMRWPHPILTDSGGFQVMSLAQLRKLDEKGVTFRSHLDGSKHHLTPERSIEIQQLLGSDIVMQLDECVGLPSERAEIERAMRLSLRWAERSKQAFGTRPGHALFGIVQGGDQPDLRLESAKGLTELGFEGYAVGGLAVGEPQAVMLDMLDVTCPALPTSRPRYLMGVGTPDDILQSVKRGIDMFDCVMPTRAGRHGLAFTRRGKINLKNARHADDHRPLHEESACPASRDYSRAYLHHLVRTGEALGAMLLTWNNLAYYQELMAGIRASISEGRFEDFMAETREGWAQGDIARLD

SEQ ID NO: 52219 - protein, 372 aa, Unknown
  misc_feature (1)..(372): tr|A0A1V6BZZ3|A0A1V6BZZ3_9BACT Queuine tRNA-ribosyltran sferase OS=bacterium ADurb.Bin132 OX=1866923 GN=tgt PE= 3 SV=1
MSCYKLEASSGRARAGVLKTAHGEIKTPVFMPVGTQATVKALTPEQVKEIGFGLILCNTYHLMLQPGEDLVGEAGGLHKFMNWDGSILTDSGGFQVMSQASLREITREGVHFKSYLDGSAHFLTPESAIGIQEKLGSDIAMVLDICTPYPIAQQKARHYTEITHEWAKRSLEARSKPDQLVFGITQGGFELPDRAWSCDAITSMDFDGFAVGSLSVGEPLELAGEILDVVVPRMPKDRPRYLMGVGDPAGIIQGIASGIDMFDCVLPTRLGRNSAVMTKEGTLSISKSRFAKDFRPIEDDCDCYTCRNYTRAYLRHLFKAKEMLAATLASIHNLHFLKRVVDGARNAIIDGTFDQYASRWLNWREDDSTGQD

SEQ ID NO: 52220 - protein, 674 aa, Unknown
  misc_feature (1)..(674): tr|A0A1V6A165|A0A1V6A165_9BACT Queuine tRNA-ribosyltran sferase OS=bacterium ADurb.Bin157 OX=1866935 GN=tgt_2 P E=3 SV=1
MTRLNFNITTKSKKSSARAASFKTLHSEVKTPVFMPVGTRATVKGQTIETLEENGAQVLLANTYHLLLRPGPEVFKKFGGIHNFMNWKGSVLTDSGGFQIFSLHNSREMNEEGAYFKSYIDGQSFMLTPELSIETQKAIGSDIMMVLDHCIPSTAGYDEAKQAMELTHRWAIRSLNARKDSPQSMFGIVQGACHHDLRRESASFLRNQPFDGFAIGGLAVGEPREKCWEFTHCAAQELPENLPRYLMGVGTPIDLLESVNSGVDMFDCIMPSQLGHRGTVFASEGKLQLRRTAYKFDDSKLDPKCDCYTCRSYSKAYLHHLIKSGEPLGWFLLTTHNLAFYHKLMRDMREQIINGTFEEFYKYKREELLRGEDEKIPEQPKRSNFIPKKSSVLGDYSVVENKSGHPCIKQNSSGEIMHSVNNPAEEADLLYIKQSKLYEQIIDITSEKPLTIWDVGLGAGTNAMAAISCFEKAFIEAKGAVRPVHIVSFEIDLDPIKLASTHNKYFVHLRHSAPFKLLQNNIWEHESELLKWTLCEGDFIEKLHEQPIPDIIFYDPFSPKTDGAMWTFSTFKKIHEYCAKSNTSLYTYSNSTAVRATLLTGGFFVGYGVGTGPKTETTVAFTNFETAKRAPNKLLGAEWQARWQRSGSPFPLSLNEKEKTFFTQAIENHPQLKI

SEQ ID NO: 52221 - protein, 381 aa, Unknown
  misc_feature (1)..(381): tr|A0A1V6AED3|A0A1V6AED3_9BACT Queuine tRNA-ribosyltran sferase OS=bacterium ADurb.Bin157 OX=1866935 GN=tgt_1 P E=3 SV=1
MNKNDFKFEVDYKSEECWGRVGRINTRRGEIKTPVFMPVGTVGTVKTLSPEDLRTAGASIILGNTYHLLLRPGTDVLDKFGGLHKMMAWDRPMLTDSGGFQVFSLNKLNKITDDGVEFASHIDGKKYWISPEESMRIQRSIGSDIMMVFDECCPYPADEKRAKSALERSVAWAKRCRIDHPPMRNGQALFGIVQGSMYLPLRLDSIKRTEELGFEGMAVGGLSVGEPKDIMLDVLDKMMPHMPQYLPRYLMGVGTPEDLFYGVERGIDMFDCVHPTRIARHATVFSKTGRISLLNAKWQTDESPIDATCSCYACKTFSKGYMRHLFKAKEILGLRMASLHNITFMINLMDEIRKSLLEKRFNAFKNEFFSSYFSKEDKSGS

SEQ ID NO: 52222 - protein, 433 aa, Unknown
  misc_feature (1)..(433): tr|A0A1V5WQ51|A0A1V5WQ51_9BACT Queuine tRNA-ribosyltran sferase OS=bacterium ADurb.Bin212 OX=1866924 GN=tgt PE= 3 SV=1
MKFDLIKNTSDGVRIGKLSTVHGEINTPFFMPVGTVGSVKGVSPHELKELGAQIVLSNTYHLYLRPGEKLIKNMGGLHEFMRWDGPILTDSGGYQVFSLNENKFKSKNLKFKIKEGKSLVKITEDGVEFTSHLDGSKHFFTPEKVVDIQLDLGVDILMPLDVCPSGKASKEEIKEAVELTLRWAKRSKLHFDKKIAKLLNYSIVSFQKDEEKRNNNLTIKQFNNNHQLPALFGIVQGGLDKELRKFCAEELVKLNFDGYAVGGLAVDHETRDMWRTVKLMGQILPIDKPRYLMGVGTPNDIHHAICLGMDMFDCVLPTRLARHGSVFVHKNGISNSKFPISNEISNIKSQNINSNLTIEQFSNNYHLINLLNSKYRTDGGVIEEDCQCPACKGGFSRAYISHLIRNNEMLGMRLATLHNLQKYLDLVKIFDKH

SEQ ID NO: 52223 - protein, 370 aa, Unknown
  misc_feature (1)..(370): tr|A0A1V5VC88|A0A1V5VC88_9BACT Queuine tRNA-ribosyltran sferase OS=bacterium ADurb.Bin236 OX=1866925 GN=tgt PE= 3 SV=1
MKFKIEGTEGAARAGAVELPRGSFLTPAFMPVGTQATVKGLSPDELRELGFRVILSNAYHLYLRPGHELVESMGGLHKFMAWDGLALTDSGGYQIFSLKGMIKLTDEGVTFKSHLDGSSHFIRPEDSMMIQRAIGADMVMALDECPPGDSDRKKLEAAVARTAAWLRRCRSVPLKSHQTLIPIIQGGTDREMRRRSAELTLEMDFDAHALGGLSVGEERGAMLDTVEFATPLLPYDKPRYLMGVGMPMDILDAVERGIDMFDCVLPTRMGRNAAAFTSRGRINLRNAAHARDDSPIDPECDGACCRNFSRAYVRHLFMSGEIMAARITSFHNLAFYARMMALARKAILENRFASFKRDFEAKLNDGGVNE

SEQ ID NO: 52224 - protein, 386 aa, Unknown
  misc_feature (1)..(386): tr|A0A1V5UEY9|A0A1V5UEY9_9BACT Queuine tRNA-ribosyltran sferase OS=bacterium ADurb.Bin243 OX=1866936 GN=tgt PE= 3 SV=1
MSVHKNDHFEILKKDNKGLGARAGVLKTWRGDIKTPVFMPVGTCATVKAQTTRDLKHAGAQIILANTYHLFIRPGHELIRDAGGLHEFMKWDRPILTDSGGYQVFSLSGTRKITDEKVVFKSFKDGAKMEFSPEKVIRIQQAFGSTIMMVLDECVKYPETEKKAEIAVERTFRWAKRSYAEYLKIMEETGGAHKDMVFGIVQGSTYQDLRKRSVEQITSIPFHGYAIGGLSVGEPNELMYDMLEYLKDLMPQEKPRYLMGVGEVEDIIEGIKNGVDMFDCVIPTRLGRHGVLMTPYGKILIKNAAFRKDFTPPMSNCSCYTCSNFTRAYLHHLFRSEEILSPILNSIHNVHFLIRLAALCREAILEGRYTEFYADYKNGNLVKYQF

SEQ ID NO: 52225 - protein, 380 aa, Unknown
  misc_feature (1)..(380): tr|A0A1V5T310|A0A1V5T310_9BACT Queuine tRNA-ribosyltran sferase OS=bacterium ADurb.Bin270 OX=1866926 GN=tgt PE= 3 SV=1
MFKFSETKKSAGTKGRTGIFTTSHGSVITPVFMPVGTLGTVKGITPAELEETGAQIVLSNTYHLFLRPGHELIKSLGGLHKFMSWEKPILTDSGGYQIFSLADLRHKFTEEGVTFQSHLDGGARHFLSPELSIEIQEALGSDIMMVLDECTPYPADEKTTRRSMELSLRWAKRSLDTRKSENALFGIVQGGTHPHLRKEYIEKLLEILPSPSSDRGFDGFSIGGLSVGEPIPLMYEMTELCTSLLPDDRPKYLMGVGTPEDLIEGIDRGIDMFDCVMPTRHARNGSIFTSKGNLNIMNACYTSDPTPMEDGCRCYACRNYSRAYLRHLFICKEMLGPRLATLHNLQFYIDLIGQASLALKEDRYPEFKKKFLTNRKELLC

SEQ ID NO: 52226 - protein, 374 aa, Unknown
  misc_feature (1)..(374): tr|A0A1V5PMF7|A0A1V5PMF7_9BACT Queuine tRNA-ribosyltran sferase OS=bacterium ADurb.Bin363 OX=1866927 GN=tgt PE= 3 SV=1
METLHQFKFELLYKSQENNSRLGKVHTPHGIIETPVFMPVGTQATVKTMTSKELLDLKVSIILGNTYHLYLEPGLEVISSARGLHSFMNWHGPILTDSGGFQVFSLQALRDITDEGIVFRSHINGSPHFFTPQKVIEIQMTLNSDIIMPLDECIPWPCEYKDADKALIRTTKWAKISKETLPVDSHQTLFGIVQGGMYPDLRKRSAIELQEIDFKGYSIGGLSVGEPKDIMLHILEETTPVLPEDKPRYLMGVGTPEDFFYCVERGVDMFDCVFPTRIARNGSAFTSNGKINIKNERFSKDQNPLDFDCKCYTCQHHTKSYIRHLFKADEILGPRLMTYHNLYFVLNLMEKIRNSIREGNFNSFKKSFLEKYLS

SEQ ID NO: 52227 - protein, 380 aa, Unknown
  misc_feature (1)..(380): tr|A0A1V5NH54|A0A1V5NH54_9BACT Queuine tRNA-ribosyltran sferase OS=bacterium ADurb.Bin400 OX=1866928 GN=tgt PE= 3 SV=1
MRFKLHQKLESGVRIGEIQTPHGSIKTPFFMPVGTVGSVKSVLPRELDEIGAQIVLSNTYHLYLRPGEQLISQFGGLHEFMRWSKPILTDSGGYQVFSLGDRGKEKDSLVKISADGVEFKSHLDGSKHFFTPEKVIQIQLDLGVDILMPLDVCPSGKADREEVRKATELTIEWARRAKEYFDSKVGHLTAGRRPGLHGIVQGGLDPELRRYCAAKLIEIGFDGYSVGGLAVDLETRDMWGIVRLMGEILPEDKPRYLMGVGTPDDIVKLIHLGMDMFDCVLPTRLARHGSVYLRNRGEGLSPDRKNYDLVNIKNAQYRADKNVLDNECGCPACAGGFSRGYISHLLRSNEITGLRLATLHNLFTYLELTREYQGTGEMRS

SEQ ID NO: 52228 - protein, 386 aa, Unknown
  misc_feature (1)..(386): tr|A0A1V5LLA1|A0A1V5LLA1_9BACT Queuine tRNA-ribosyltran sferase OS=bacterium ADurb.Bin429 OX=1866930 GN=tgt_1 P E=3 SV=1
MFSFRVEKTCPVTGARAGVLTTPHGIIETPVFMPVGTQGTVKALSQQELISFDARIILGNTYHLYLRPGPDLLREAGGLHRFMGWNRAILTDSGGFQVFSLPDLRKLSEEGVVFRSHIDGSSHLFTPEKVVEIERAIGSDIMMPLDECIPYPSEREYTARSCGVTIRWAQRSREAFAATDDGSQALFAICQGGVYEDLRVSCAEKLVAMDFPGYAVGGLAVGEPKKELFDTVALSTAILPAHKPRYLMGVGFPDDIVEAVSRGIDMFDCVMPTRNARNGTIFTRYGDLKLRNARHKTDHQPIDTTCTCYACAGTSGVSWDHGGREGFSRAYLHHLDRCGEMLGPMLATVHNLHYYLNLMQEVRNALDTGTFAAFRAQFKAERARGV

SEQ ID NO: 52229 - protein, 165 aa, Unknown
  misc_feature (1)..(165): tr|A0A1V5LKB7|A0A1V5LKB7_9BACT Queuine tRNA-ribosyltran sferase OS=bacterium ADurb.Bin429 OX=1866930 GN=tgt_2 P E=4 SV=1
MAMDFPGYSIGGLSVGEPKELMWAMLDVTTPALPVDRPRYLMGVGMPADLVRGVALGVDMFDCVLPTRMGRNGTVFTWDGRLNLRNAQYERDPGPLDPACPCAICRTFSRAYLRHLLKAGEILAIRSLTYHNLSFYQQLVARMHEEITAGTFSAWADGFLAGYRE

SEQ ID NO: 52230 - protein, 252 aa, Unknown
  misc_feature (1)..(252): tr|A0A1V5LD57|A0A1V5LD57_9BACT Queuine tRNA-ribosyltran sferase OS=bacterium ADurb.Bin431 OX=1866931 GN=tgt PE= 3 SV=1
MEIQRDLGSNIMMVLDECAPYPCDYRYALKAHQLTIDWARRSRDAFSEIGERHGFIQHQFAIVQGSVYADLRRQSAEALIEMDFPGYAIGGLSVGEPKQAMFEITGLVTALLPGNKPRYLMGVGKPEDLLEGIELGVDMFDCIMPTRNGRNGTAFTSGGQIVIKNAKFREQFAPLDEACNCYTCRTFTRAYLRHLFSAQEVLVLRLISLHNLHFYLGLMGRARQAILQGRYLEFKKDFLAHYHSNRHHAESS

SEQ ID NO: 52231 - protein, 381 aa, Unknown
  misc_feature (1)..(381): tr|A0A1V5KT62|A0A1V5KT62_9BACT Queuine tRNA-ribosyltran sferase OS=bacterium ADurb.Bin478 OX=1866932 GN=tgt PE= 3 SV=1
MFFRLLKTDRHSSARAGILHTGHGAIRTPVFMPVGTQASVKALSPLELQQIRSQIILGNTYHLYLRPGEELVRRAGGLQAFSSWRRPILTDSGGYQIFSLSELNKITSEGVHFRSHLDGSRHFFSPEKVVDIQRDLGSDIMMVLDECAPYPCDYAYAAKAHRLTLDWAQRSLAAFRQSRPRFDHAQYLFAIVQGSVYEDLRRESVHRLVDMDFPGYAIGGLSVGEPKQAMYEMTELCCRSLPPNKPRYLMGVGKPEDLLEGIERGIDMFDCIMPTRNGRNGTAFTSRGQIVIKNAKFREAFQPLDPECDCYTCRTFTRAYLRHLFQAEELLVLRLISLHNVYFYIRLMEAARQAIWQGRFRAFKKKTLEKLTSGRTNYVKI

SEQ ID NO: 52232 - protein, 380 aa, Unknown
  misc_feature (1)..(380): tr|A0A4Z0JPE9|A0A4Z0JPE9_9BACT Queuine tRNA-ribosyltran sferase OS=bacterium BCRC 81127 OX=2487723 GN=tgt PE=3 SV=1
MESAIKYTLLKKEKHTGARLGLLETPHGTFETPMFMPVGTEASVKNMAPEDLEKIGASIILANTYHLWLRPGEEIVQEAGGLHKFMNWDKGILTDSGGFQVFSLAKMRDITEAGVHFRNHLNGRQEFLSPEKAIKIENYLGPDIMMSLDECPPFFESYDYIKKSVERTSRWAERGLKAHRNPDWQALFGIVQGAGFEDLRKQSAKDLVSMDFPGYSIGGLSVGESKGEMNRVLDFTTPLLPENKPRYLMGVGTADSLIDGVIRGIDMFDCVLPTRIARNGTCMTSHGRLVVKNAKYAHDFTPLDDNCDCYVCRNYTKAYIRHLINANELFGIHLTSYHNLYFLLNLMKGVRQAIRDDNLLEFREHVFEDYGFNKKNAKNF

SEQ ID NO: 52233 - protein, 381 aa, Unknown
  misc_feature (1)..(381): tr|A0A4Z0J9C6|A0A4Z0J9C6_9BACT Queuine tRNA-ribosyltran sferase OS=bacterium BCRC 81129 OX=2487722 GN=tgt PE=3 SV=1
MEPAIKYRLIKTEKHTGARLGELITPHGTFQTPMFMPVGTQAAMKGAISPEELDEMGSQVILANTYHLWLQPGPDLVQEAGGLHKFMNWDKGILTDSGGFQVFSLAKHRKLTEEGVHFRNEINGDRLFLSPEKAIDIENKLGPDIMMSLDECPPFFESYDYVKHSVERTSRWAERGLKAHANPDTQGLFGIVQGAGFEDLRRQSAKDLVSLDFPGYSIGGLSVGESKAEMNRILAFTTPLLPENKPRYLMGVGTADSLIDGVMRGVDMFDCVLPTRIARKGTCMTSHGRVVVKNAVYTHDFGPIDDECDCYVCRHYTRAYLRHLFKADEDFGRRLTSYHNLYFLHHLMKRVRQAILDDNLLDLREEVFEKYGYNAEHPKNF

SEQ ID NO: 52234 - protein, 381 aa, Unknown
  misc_feature (1)..(381): tr|A0A2N5Z9J4|A0A2N5Z9J4_9BACT Queuine tRNA-ribosyltran sferase OS=bacterium BM706 OX=2053465 GN=tgt PE=3 SV=1
MKLINRRKKMRIEILKRSQKTKARLTKITTPHSVIETPVFMPVGTKATVKTMSPEELYASDAYIILSNTYHLMLRPGADIVEKAGGLHKFMNYDRSILTDSGGFQVFSLSNLNKIDEDGVVFREHIGGNYIKMTPESSIEIQNKLGADIIMAFDECAPYPCKEDYVISAMKRTHNWAKRSLESHKKKDSQALFGIVQGGMYKKWRKESAEFLASLDFPGYSIGGLSVGEPMELMKEILDHTTDFMPLEKPRYLMGVGSPMELVDGALLGVDMFDCVLPTRLARHGVLLTDHGRMNIKNSRFKEDFTPIDENCDCYTCRNYSRAYLNHLFRSQEMFGLRLNSIHNIHYLIDLMKRLREAIRNEDEVSFRDSLAEKWGDGKYS

SEQ ID NO: 52235 - protein, 370 aa, Unknown
  misc_feature (1)..(370): tr|A0A2H6K3S6|A0A2H6K3S6_9BACT Queuine tRNA-ribosyltran sferase OS=bacterium BMS3Abin01 OX=2005709 GN=tgt PE=3 SV=1
MPEFFRYELDAIDGGARAGRLHTPHGVIETPCFMPVGTRATVKALSPRDLEEAGAQVVLANAYHLYFRPGAEAVAARGGLHRFMSWERPILTDSGGFQVFSLEGTTRISGDGVEFRSLYDGSSHFFTPELAVRVQEKLGADIIMCFDECVRAGAAGGYLREAVERTAEWAARCRRAHTRPDQLLMGIIQGGVDHALRRESVERTRELDFGGYAIGGLSVGEERQRMLETMTFTAGLLPRERPRYFMGLGDPSGMLEAIGAGIDMFDCVLPTRDGRNGGALTSSGRLNMRNAAYAEEDGPLEPGCGCYACSNFSRAYIRHLVTQKEILGLQLLSLHNVAFLLNLARQAREAIIAGRFRKFREGVPDLYRAK

SEQ ID NO: 52236 - protein, 377 aa, Unknown
  misc_feature (1)..(377): tr|A0A2H6EH49|A0A2H6EH49_9BACT Queuine tRNA-ribosyltran sferase OS=bacterium BMS3Abin03 OX=2005711 GN=tgt PE=3 SV=1
MLKFTIDAKNPDGKARAGQFETAHGIVETPMFMPVGTQGTVKAVNQRFLEQDIKAQIVLSNTYHLFLRPGVEILEKAGGLHKFMNWEKPILTDSGGYQVFSLSDLRKLKPDGVEFSSHLDGSKHFFTPEKVMQIQRSIGSDIMMVLDECTPFPCEYDYAVNSTKLTSDWAALNKEAFEKTKPLYGHEQYLFGIIQGSVYKDLREQSANDLIKLDFDGYAIGGLAVGEPTETMYGMTDFTTGFMPEDKPRYLMGVGRPENILESIDRGIDLFDCVMPTRNARHAILFTWNGVLSLRNAKYKDDFNKVDDECNCYTCRNFSRAYLRHLFIGGEILALELASVHNLHFYLELVTEAKKQILNGSFKEWKTKTINKISIKN

SEQ ID NO: 52237 - protein, 382 aa, Unknown
  misc_feature (1)..(382): tr|A0A2H6EN91|A0A2H6EN91_9BACT Queuine tRNA-ribosyltran sferase OS=bacterium BMS3Abin04 OX=2005712 GN=tgt PE=3 SV=1
MNFTLEVKDINSKARAGTILTDHGEIPTPVFMPVGTQGTVKAVTQKVLKEEIQSPIILANTYHLYLRPGTEILEKAGGLHKFMNWDRSILTDSGGFQIYSLSELRKLKSDGVIFRSHLDGSQHLFTPGKVIGIERAIGSDIMMPLDECTPYPCDYDYAKKSKELTSQWAILNKEAFEKTEPLYGHKQSLFGIVQGSIYKDLREGSAKDLMELDFDGYSIGGLAVGEPAEKMYEIVDFTTGILPNEKPRYLMGVGRPENILEAVERGVDMFDCVMPTRNARNAYLFTGKGIVSIRNARYKDDFSSLDENCGCYTCQNFTKAYLRHLFIAKEILALELATIHNLSFYRDLVTTARIKILEGSFSLWKNKIIDKLSVNINSLKEE

SEQ ID NO: 52238 - protein, 389 aa, Unknown
  misc_feature (1)..(389): tr|A0A2H6EWD8|A0A2H6EWD8_9BACT Queuine tRNA-ribosyltran sferase OS=bacterium BMS3Abin05 OX=2005713 GN=tgt PE=3 SV=1
MGSFFERITEDPETGARAGILHTNHGDVETPIFMPVGTQGTVKTQSPQELLDNRVQIILGNAYHLYLRPGGELIRNAGGLHKFMSWEQAILTDSGGYQVFSMSDLRRLSSEGVRFQSHVDGSQHLFTPENVTDIQRDLGPDIMMVLDECTPYPCSFEYAQKSHELTIEWAKRSKDRFGNTKALFGYKQFQFGINQGSTYLDLRFKNLEELLKLEFDGYAIGGLAVGEPKSELYKIAGLVASQMPKDKPRYLMGVGKPEDLVEVIALGIDMFDCVMPTRNARNGTVFTWGGRMVIKNASYKSDFRPIDPNCTCTTCRNFSRAYIRHLFSVGEVLALRLATAHNIHFYMELVQKARQAILEKHYKAFKEAFYSDYKVIETESYSKPIKRRK

SEQ ID NO: 52239 - protein, 372 aa, Unknown
  misc_feature (1)..(372): tr|A0A2H6FCC7|A0A2H6FCC7_9BACT Queuine tRNA-ribosyltran sferase OS=bacterium BMS3Abin07 OX=2005715 GN=tgt PE=3 SV=1
MEFNIISRDDNARAGIIKTGRGGINTPAFMPVGTNGTVKALGPDDLKSIGAEIMLCNTYHLYLRPGHETIKKLGGLHRFINWDRPILTDSGGFQVYSLSKLRKIEKEGVRFQSHLDGSTHFIGPKEAMEIQKALNADIVMTFDECTPYPAGYDYALKSLELTTEWAKICKSLYSGEQALYGIIQGSTYRDLRERSAEEIISIGFDGYAIGGVSVGEPKDLMYGAIDICTPLMPDNAPRYLMGIGDIHDILHAVSHGIDMFDCVMPTRNARNGTLFTSRGRISIKRTEFREDPNPPDPECGCYTCRNFSNAYLRHLFLNREILSMRLNTIHNLTFYMDFFRSMRESIKDGQFKRFYRRWMSINFGSSGNSVEE

SEQ ID NO: 52240 - protein, 404 aa, Unknown
  misc_feature (1)..(404): tr|A0A2H6FVE1|A0A2H6FVE1_9BACT Queuine tRNA-ribosyltran sferase OS=bacterium BMS3Abin10 OX=2005718 GN=tgt PE=3 SV=1
MSEGAQVTSQGSGTIYRSIKTDNNARLGQIYTQHGIINTPAFIPVGTNATVKTMTPEELGVIGAEIILSNSYHLYLRPGHKVIKEIGGLHKFMNWSGPILTDSGGFQVFSLSPLRKITGDGVTFRSHLDGSEHFITPEIVMEIQGALGSDIAMAFDECTPYPASREYTLKSLELTTRWARRCIEAMKLRKWEDKNLSTSQLPNVPTSKPFKQALFGIVQGGTYSDLRKQSADELTAMDFDGFALGGLSVGEPKELMYEMIKFTTPLLPADKPRYLMGIGDLLDVLEAVSAGIDMFDCVMPTRNARNGTLFTSRGRISIKREEFKTDSSPLDPECQCHTCKNYSKAYLRHLFMSREILSMRLNTMHNLHFYLEFFRKMRDSINTGEFDNFRKEQTAVLQNNFNGD

SEQ ID NO: 52241 - protein, 371 aa, Unknown
  misc_feature (1)..(371): tr|A0A2H6G0Q6|A0A2H6G0Q6_9BACT Queuine tRNA-ribosyltran sferase OS=bacterium BMS3Abin11 OX=2005719 GN=tgt PE=3 SV=1
MKFDIHQTDGRARASRLVFPRGSVDTPAFLPVGTYGAVKSMTAEELMAGGAQIILGNTFHLMLRPGEDIIREHDGLHRFIHWEKPILTDSGGFQVWSLGKMRKISEEGVRFRSPVDGAEVFLDPERSIDFQHVLGSDIVMIFDECTPYPSTEDETAISMRLSLRWAERCKTAHGEHPSALFGIVQGGMFPDLRQESVEGLKDIGFDGYAIGGLSVGEPTEQMLKVLDGLNPYMPTEKPRYLMGVGRPEDIVEAVSRGIDMFDCVMPTRNARNGWLFAANGNVKIRNAKYAKDTRPVDEECACYTCRYYSRSYLRHLQACNEILGARLATIHNLHYYQQLMNGLRESIANRALRRFIENFYRKRGTQPPDVA

SEQ ID NO: 52242 - protein, 371 aa, Unknown
  misc_feature (1)..(371): tr|A0A2H6H488|A0A2H6H488_9BACT Queuine tRNA-ribosyltran sferase OS=bacterium BMS3Bbin01 OX=2005724 GN=tgt PE=3 SV=1
MRFEIGAIDGTARTGSLATSHGVVRTPAFMPVGTRGTVKMVDTRDLAEAGVQMVLANTYHLMLRPGEHVVCDLGGLHSFMGWDAPILTDSGGYQIFSLDANVTEEGVEFRSSYDGSRVELTPEDAVGIQENLGSDIAMILDVLIGLPAPREDVRYAMERTLRWSARAVRVHEREDQALFGIVQGGTDPELRKKSAAMTASLGFDGFGIGGLSVGEPEADRNHAIEVVVAELPEDRVRYTMGLGDTKGMLDGVVRGVDLFDCVWPTRLARHGKVLTSIGDYSIRRAEFKRSDGPLDPNCDCRTCRAHSRGYLRHLFLTGEPTGLRLLTLHNLAYTASLMAQVRESIESGELESFRRATLAARVSTQSEDSLA

SEQ ID NO: 52243 - protein, 368 aa, Unknown
  misc_feature (1)..(368): tr|A0A2H6HG81|A0A2H6HG81_9BACT Queuine tRNA-ribosyltran sferase OS=bacterium BMS3Bbin02 OX=2005725 GN=tgt PE=3 SV=1
MNPVTWTVQGTSDSARCGVMNTPHGAVATPAFMPVGTRGTVKGIDRDDLAACGADIMLSNTYHLMLRPGEQVVKELGGLHDFAAWSRPILTDSGGFQIFSLSSKVTEDGVAFRSTYDGSHLMLTPERAIQVQEDLGSDIAMVLDVLVGLPAERAVLDDALERTLRWTERAVGAKRRADRALFGIVQGGVDAELRRRSARGTASLGVAGFGIGGLSVGESAAERNAAIEATVPELPSDKVRYVMGLGDTEGMLDAITRGIDLFDCVLPTRLARHGKVLSRDGDYSIKRTEWTSSSDPLMEGCLCFACQTYTRGYIRHLFNTKELLGLRLATVHNLTYTLTLIADARQAILDNRYSAFAASVKSRRVRDF

SEQ ID NO: 52244 - protein, 379 aa, Unknown
  misc_feature (1)..(379): tr|A0A2H6IBL7|A0A2H6IBL7_9BACT Queuine tRNA-ribosyltran sferase OS=bacterium BMS3Bbin07 OX=2005730 GN=tgt PE=3 SV=1
MKFSVIASDGNSRAGIIETERGLVLTPQFMPVGTLGTVKSISPEELGSAGAEVMLCNTYHLYLRPGHETIKRLGGVQKFISWPGPVLTDSGGFQVYSLSRLRIITQDGVEFRSHIDGSLHFIGPEKAMEIQQALGADIIMAFDECTPFPSTYDYALNSLRLTTAWAKRCRSVHPEGSPQALFGIFQGSTYRDLRLKSLEEIVGIGFDGYAAGGLSVGEPKELMYEIIHATGPVMPDVKPRYLMGIGDLLDVLEAVEAGYDIFDCVMPTRNARNGTLFTSTGRISIKRAEFKEDPSPLDPECSCYTCRNFSRAYLRHMYLSREILSMRLNTIHNLSFYLRFFRLMRDSIVMGKFAEFKRKWRDTLERNFVTLQSQTFRSS

SEQ ID NO: 52245 - protein, 367 aa, Unknown
  misc_feature (1)..(367): tr|A0A2H6ITQ8|A0A2H6ITQ8_9BACT Queuine tRNA-ribosyltran sferase OS=bacterium BMS3Bbin09 OX=2005732 GN=tgt PE=3 SV=1
MNFEIIHKDGNARLGQITTQRGVINTPAFMPVGTNAAVKAMGPEEMKGLGADIILSNTYHLFLRPGHKVIKEVGGLHKFMNWDGPILTDSGGFQVFSLSPLRNIKNEGVEFRSHIDGSLHFLTPELVMEIQGSLGSDIAMIFDECTPYPATKEYALNSLKLTSKWAKRCLDARNEAQALFGIVQGGMYKDLRKQSADELIAMDFDGYALGGLSVGEPKELMYEMINYSTSLLPEQKPHYLMGIGDLMDVLEAVATGIDMFDCVMPTRNARNGTLFTSRGRVSIKREEFKKDSSPLDPDCDCYTCRNYSKSYLRHLYMSKEILSMRLHTTHNLHFFMEFFRKMREAIGNEEFEKFRKEWTPVLQKNFN

SEQ ID NO: 52246 - protein, 380 aa, Unknown
  misc_feature (1)..(380): tr|A0A2H6IZL2|A0A2H6IZL2_9BACT Queuine tRNA-ribosyltran sferase OS=bacterium BMS3Bbin10 OX=2005733 GN=tgt PE=3 SV=1
MSKDFTFHLAATDGAARLGEISCPRGRIRTPAFMPVGTAGTVKAMLPQTVREAGADIVLGNTYHLMLRPGAEQVAALGGLHAFMNWEGPVLTDSGGFQVMSLAKLRKITEAGVTFQSHIDGSTHELTPERSIEIQCLLGADIQMVFDECTPFPCEKGEARASMELSMRWAERSKTAFAKKGKGGQGLFGIVQGGIYPDLREASVEALKQIGFEGYAVGGLAVGEGQERMLETLKVTLPRLPEDKPRYLMGVGTPQDLIHCVARGIDMFDCVMPTRSGRHGQAFTWAGRINLRNAGFADDPRPLDAASSCPAARDYSRAYLHHLVKSREYLAPMLLSWANVHFYQELMAAMRAAIGEGRFEAFARETLARLGANGGSSIQG

SEQ ID NO: 52247 - protein, 375 aa, Unknown
  misc_feature (1)..(375): tr|A0A2H6JAL2|A0A2H6JAL2_9BACT Queuine tRNA-ribosyltran sferase OS=bacterium BMS3Bbin12 OX=2005735 GN=tgt PE=3 SV=1
MTGAMRFEVLAADGAARRARMVFARGSVETPAFMPVGTRGTVKAMTPEEVGGLGYELILANTFHLMLRPGMEVIGLHDGLHRFMNWPGPILTDSGGFQVYSLAGMRRIAEKGVTFRSPVDGARVFLGPEESMAVQRGLDSDIVMVFDECTPYPATEDQARESMELSRRWALRSRLAHGDRSASLFGIVQGGMYPQLRAASLAGLMEIGFDGYALGGLSVGEPKEERLKILAEVLPRMPAGAPRYLMGVGTPEDIVDAVCRGVDLFDCVLPTRNARNGFLFVRGGILRLRNSRYRNDTAPPDETCDCYTCRHYSRAYLRHLDRCNEMLGARLNTLHNLHYYARLLSGLREAVAVGRLAAFVREFHAARVQNGENVS

SEQ ID NO: 52248 - protein, 377 aa, Unknown
  misc_feature (1)..(377): tr|A0A2H6JSK4|A0A2H6JSK4_9BACT Queuine tRNA-ribosyltran sferase OS=bacterium BMS3Bbin14 OX=2005737 GN=tgt PE=3 SV=1
MRHQTTSPFTLLNRADECRARCGEVTTLHGSFKTPVFMPVGTQGSVKAVTPENLEELGAQIILGNAYHLFLRPGHQLIKRFGGLHTFMHWNRPILTDSGGFQIFSLRKLANISEAGAEFRSHLDGSRRFLSPEDAVQVQEALGADIMMALDTCIPWPADREETAEATALTRRWAARSRAAQPDNGQLLFGIVQGGMYPDLRQQAAAQLVEIGFDGYALGGLSVGEPKELMLEMIEATVASLPPDYPVYLMGVGTPEDLVEGVYRGVDMFDCVMPTRNARNGMLFTSRGRLVIKNACYREDQRPVEEQCACYTCRNYTRAYLRHLFMSREILAYQLNSIHNLHYYCSLMTAMRRAIEEQRFTAFRRAFYAQRDEKPSC

SEQ ID NO: 52249 - protein, 379 aa, Unknown
  misc_feature (1)..(379): tr|A0A117SBY6|A0A117SBY6_9BACT Queuine tRNA-ribosyltran sferase OS=bacterium BRH_c32 OX=1734400 GN=tgt PE=3 SV= 1
MDFQLLKTDTNSKARLGKITTSHGEIETPIFMPVGTQGTVKAVTPKALKEDVKAQIILGNTYHLYLRPGTEILEKAGGLHKFMGWDRPILTDSGGFQVFSLSELRKLKADGVEFKSHLDGSKHFFSPEKVIKIQRSIGSDFMMPLDECTPFPCEYDYAKKSQELTSKWAVLNKEAFEKSEPLYGHKQYLFGIIQGSVYKDLREKSAADLIALNFDAYAIGGLAVGEPMEQMYELVDFTTDLMPVEKPRYLMGVGRPENILEAIERGVDMFDCVMPTRNARNAYLFTSIGVVSMRNAGYKEDFSPLDPNCSCYTCQNFTKSYLRHLFNAKEILAYELASIHNLTFYLDLVRQAREKIKEGTFSEWKKEIINKLMYNINSI

SEQ ID NO: 52250 - protein, 378 aa, Unknown
  misc_feature (1)..(378): tr|A0A3A9C957|A0A3A9C957_9BACT Queuine tRNA-ribosyltran sferase OS=bacterium C-53 OX=2320109 GN=tgt PE=3 SV=1
MYRILKQEGNAKRAEFETVHGTIQTPVFMNVGTVAAIKGAVSTEDLEQIKTQVELSNTYHLHVRPGDEVIKKLGGLHKFMVWDKPILTDSGGFQVFSLAGLRKIKEEGVSFHSHVDGRRIFMGPEESMRIQSNLASTIAMAFDECPSSKADRKYVQDSVDRTARWLVRCKQEMDRLNQLEDTINKKQMLFGINQGAVFADIRIDHAKRISELDLDGYALGGLAVGETHEEMYHIIEETVPHLPQNKPTYLMGVGTPINILEGVERGIDFFDCVYPTRNGRHGHLYTNHGKINLFNAKYELSDQPIEEGCQCPACRRYSRAYIRHLLKAKEMLGMRLCVLHNLYFYNTMMEEIREALDQGCFASYKKKKIEGILSGETD

SEQ ID NO: 52251 - protein, 412 aa, Unknown
  misc_feature (1)..(412): tr|A0A2M7UTM8|A0A2M7UTM8_9BACT Queuine tRNA-ribosyltran sferase OS=bacterium CG_4_10_14_0_2_um_filter_48_144 OX =1975563 GN=tgt PE=3 SV=1
MRRPKRQLSTLFHHLLQIWKAIPRFQEKASLKRLRNNPSMFRRIKKSVKSRARFGRLATPHGALATPFFMPVATRGSLKSLDAQGTRDARTEIVLSNTYHLLNRPGYALLEKCGGLHAFMGWNGPILTDSGGYQVFSLARHRKIAALSVSFKDPQTGKTVILTPYNVLKMQRAIGSDIMMVLDVCPPYPSEKEVIQEAIRTTTAWAKSSIMAYRKLGLYRRKERPLLFAITQGGVYDDLRAQHAQTLAKMPFDGYAIGGLAVGEPREKMYHILTNVVQLLPEDKPRYLMGVGKPQDIMRAVQEGVDMFDCVIPTREARHGRIYVFRKRERITATSAEWYETYAIRHARHQKRLVPIDPTCGCFTCGTTTIAYMHHLFRVHDPLAERLATIHNIYFYNELMRLIRRAIRTNDL

SEQ ID NO: 52252 - protein, 396 aa, Unknown
  misc_feature (1)..(396): tr|A0A2M7YV44|A0A2M7YV44_9BACT Queuine tRNA-ribosyltran sferase OS=bacterium CG_4_9_14_3_um_filter_65_15 OX=197 5567 GN=tgt PE=3 SV=1
MGDLGLATPFSFQVEGRCSGTSARLGRLQCGHGEIRTPVFMPVGTVGSVKAVTFEQVWDTGARLILGNTYHLYLRPGHRLIEELGGLHKFASWEGALLTDSAGFQVFSLSDLNRITDDGVEFRSHLDGSRHFFSPELSMEIQLALGSDIVMAFDQCAPYGADEKEVARAVDRTTDWLRRCREVLPGRLTRNGWERALFGIMQGGVFPELRRRSAEMITELDLPGYAIGGLSVGEPSEALYEVTALAAQLLPDDRPRYLMGVGFPDDILEAVTAGVDMFDCVLPTRMARTGTVLTRDGRLVVKNLAYAADTAPLDAGCGCPVCRRHSRAYIRHLFQAREMLGPTLATIHNLHFYQELMAGIREAIAEDRFAAFADRAISRWREGERVRIDQNGRSRS

SEQ ID NO: 52253 - protein, 448 aa, Unknown
  misc_feature (1)..(448): tr|A0A1J4SBH6|A0A1J4SBH6_9BACT Queuine tRNA-ribosyltran sferase OS=bacterium CG1_02_42_9 OX=1805399 GN=tgt PE=3 SV=1
MKFEILIKDRQSNARAGTISLPHGKVETPSFVPVGTQASVKALSSQELKEIGVKIFFGNTYHLFLRPGAQVIQKLGGIHKFMGWDGPIMTDSGGFQVFSLGLGKLKLKIEKEKLKIAGRYETPYENASPVCAGKLDPSVPIRRLRMTFKESKTGKNQFLAEFAEEGVRFKSHLDGSEHFLTPEKSIQIQKQLGADIILAFDDCTPYPVTYEYARLSMERTHRWAERSLGEFERLRAESGLDHACRRPQSLGSGQSLYGVIQGSTFEDLRKKSARFIDALGTEGIAIGGMAVGESKKLMYKTLEWTIPELEEEKPRHLLGVGEVDDIFEAVERGVDTLDCVTPTRLARHKNLFVHPKIAALEKSKSRFNLIITNAKYAADKSPVDPLCQCVVCQNYSRAYLHHLYKSNEILGVRLGTYHNLYFLVSLMKQIREAIADNRFQRLKQEWLV

SEQ ID NO: 52254 - protein, 369 aa, Unknown
  misc_feature (1)..(369): tr|A0A1L9GU00|A0A1L9GU00_9BACT Queuine tRNA-ribosyltran sferase OS=bacterium CG10_37_50 OX=1911686 GN=tgt PE=3 SV=1
  misc_feature (90)..(92): Xaa can be any naturally occurring amino acid
MAEKSFKFKITKEIPGALGRVGTITTPHGEIQTPAFVVVGTKATVKALTPEQIKDLGTQVVLANTYHLFLEPGEKIVAEAGGLHKFMNWXXXLAKIDDDGVTFRSHLDGSELRLTPERSIEIQHQIGADIIFAFDECTAPSASLDYQKEALERTHQWAQRSLKEHQRLNVQARQNFSEKNLGGQALYGIVQGGRHQDLREQSAKFIASLDFDGFGIGGSFDKADMGTAVHWVNSILPVNKPRHLLGIGAVEDLFIGIENGADTFDCVTPTREARNGSLYTLTGRINILNAKFRTDFSPLDPTCACYTCQNFTRAYLAHLFRAKEMLASTLASIHNLYFFVNLVKNIRQSIIEEKFFEFKEQFLSNYHHD

SEQ ID NO: 52255 - protein, 376 aa, Unknown
  misc_feature (1)..(376): tr|A0A1L9GWL5|A0A1L9GWL5_9BACT Queuine tRNA-ribosyltran sferase OS=bacterium CG10_46_32 OX=1911907 GN=tgt PE=3 SV=1
MFQIKKQSKRSLARTGVLKTPHGSIQTPFFMPIATKGAVKSLTGDDIRRLKAQIILSNTYHQLLRPGLSILKKAGGLHTFMDWSGPLLTDSGGFQVFSLAKIRKILLDGVRFRSHIDGTEFLFTPKKALEIQEVIGSDIRMILDVCPPYPCTRKEAEKAVDLTTAWAAVSLRGAKRRGNLNGALLFAIVQGSVHRDLRIKSARELVGMNFDGYAIGGLAVGEPFEKALEVLSYVVPELPQNKPRYVMGMGYPEQIVEAVKKGIDMFDCVIPTREARHGRLYFWKNNRHPERSSSGAEGSSFKYTSTSITNARFAKDFSPINAASHIKELKVYTKAYVHHLFRTQEPLAIRLATLNNVDFYLELMRRMRSEISSGKM

SEQ ID NO: 52256 - protein, 433 aa, Unknown
  misc_feature (1)..(433): tr|A0A1L9H1D9|A0A1L9H1D9_9BACT Queuine tRNA-ribosyltran sferase OS=bacterium CG10_49_38 OX=1911687 GN=tgt PE=3 SV=1
MAEFNFKIEKKIAGRLGRAGTIMTPHGDISTPAFITVGTKATVKALSPEQVMASGSPAALANTYHLLLEPGAEAVARAGGLHRYMNWPGPLITDSGGFQVFSLGAAYDEGGINKFLKPGLPSRTAPKRPSEEGPREPKPAKIDEDGVTFRSPLDGAEHRLTPESSIQIQHQLGADIIFAFDECTAPTADYVYQKEAMNRTHRWAERSLAEHERLTQAKTRENASKKVLGPLQASLEARLFDKHFPESYSALFGIVQGGRFQDLREASAKFIASLPFAGFGIGGSFDKTDMGTAVGWVNAILPTDKPRHLLGIGEPEDMFEAVAQGADTFDCVTPTRLARHATLLTATGRLNILNAAHRDDPTSIEADCDCYACQNYSRAYLAHLFRAGEIFGATLATIHNLRFMNRLSEQMRAAILAERFLEFKAEWLAKYQR

SEQ ID NO: 52257 - protein, 380 aa, Unknown
  misc_feature (1)..(380): tr|A0A2H0TAG7|A0A2H0TAG7_9BACT Queuine tRNA-ribosyltran sferase OS=bacterium CG10_big_fil_rev_8_21_14_0_10_33_1 8 OX=1975569 GN=tgt PE=3 SV=1
MLEFRITKKDKNTKARIGELSTQHGVIKTPIFMPVGTCATVKTVSSEELKDLNAEIILSNTYHLYLRPGNQLIKEMGGLHKFMNWDRPILTDSGGYQVFSLGSGSKAENLVKIQKEGVEFKSYLDGSRHFFTPEKVIDIQLDLGSDIIMPLDYCPSAEASKIEIEHAVNITSNWFEKAWKHFQKKTTKLKNKPALFAIIQGGPYEDLRKKSFDFLSQFGVQGFSIGGVANAGESKLKQQKALEYTLPLIQEDKPRYLMGVGEPEDLLEAIERGIDMFDCVVPTRMARNGAVWTKKGRIDLNLAKYKLDPKPIDKCSCKTCQNYSRAYIRHLLKEKEVLGIRLTTMHNLHFIISLMADARKAIQEQKFPQFKKDFFSEFKN

SEQ ID NO: 52258 - protein, 379 aa, Unknown
  misc_feature (1)..(379): tr|A0A1J5DAW1|A0A1J5DAW1_9BACT Queuine tRNA-ribosyltran sferase OS=bacterium CG2_30_54_10 OX=1805403 GN=tgt PE= 3 SV=1
MTEPVFRFSIEKSSRECLARAGIIHTRAGDVPTPVYMPVGTCGTVKTLSPAEVKELGGSIILGNTYHLYLRPGTEVLDKFGGLHRFMAWDRPMLSDSGGFQVFSMKKLNRISDEGVMFSSHLDGSKHWLTPEESMRIQRSIGAEIMMVFDECCPFPADAATAGSAVERSVRWAGRCRDDHPPMRAGQALFGIVQGSTFPDLRLESLRRTAEIGFEGLAIGGLSVGESKEEMIGILDRLMPEMPKDVPRYLMGVGSPEDLFRGVERGIDMFDCVLATRIARHGSVFTRGGRVDLTALPWRLSEDPIDRSCSCYACRTFSRGYLRHLFKAKEILALRMASLHNLTFLVNMMSEIREAIFQDRFLALKLEFLGGYLNQKEKK

SEQ ID NO: 52259 - protein, 683 aa, Unknown
  misc_feature (1)..(683): tr|A0A1J5DA94|A0A1J5DA94_9BACT Queuine tRNA-ribosyltran sferase OS=bacterium CG2_30_54_10 OX=1805403 GN=tgt PE= 3 SV=1
MSCLNFTIERVSSGSKARAGKFQTPHGLVQTPLFMPVGTSATVKGQTVESLKAAGTNVLLANTYHLLLRPGLEVFRKFGGIHRFMNWDRPVLTDSGGFQIFSLPDSREMNESGARFQSYIDGKTFLLSPESSIEMQEAIGSDIMMALDQCIASTAPFDQAKAAMELTHRWAERSLRARTNSSALFGIIQGACHSELRKQSAGFLSDLSFDGLAIGGLAVGEAPTERYEFTGLVTDNLPHNLPRYLMGVGTPIDILEAVHRGVDMFDCIIPSQFAHRGVAFTSRGKLQCRRTVHKFSEQPIDAQCDCQACKSYSRAYIHHLVKADESLGCYLLTCHNLTFYHRLMNQIRESILNDDFLSFYERMRPALVRIDEDNPGRPPKKARVYRPSRLGDYEVCSFPEGFSSIRQISSGEVMHSVNRPSDEANKLYVEQSHLASRLLNDQNLEGDLVVWDVGLGAAYNAMATLNCFEKIYAGKRENPLRPLRPLRMVSFESDLDPLKLACKDTFRFPHLRHGAPHQILERGKWEHPSGLFSWELLEGDFLHFFESAKVPGLIFYDPFSYKTNSALWTSETFSRIFSCCFSSNTELYTYSSSTAVRVSLLSANFYVAEGVGTGPKADTTIAFTMAKGAEIHPSSPRLLGFDWLIRWRRSESKFPPGLSIEDKTRLEKRIENHPQFAIVPTLR

SEQ ID NO: 52260 - protein, 381 aa, Unknown
  misc_feature (1)..(381): tr|A0A3A9B9W2|A0A3A9B9W2_9BACT Queuine tRNA-ribosyltran sferase OS=bacterium D16-34 OX=2320120 GN=tgt PE=3 SV=1
MALFDCTLDAQSGHARALSFETAHGTFQTPMFMPVGTSATVKGITPDQLHALGAQVVLANTYHLSMRPGAELVAEAGGIHSFMNYSGPMLTDSGGFQVFSLADTVKLDNDGLTFRSIYDGAKIRWTPEENMRIQELIGADIAMQLDQCAPYPATKEFVSSAVDLSAKWAKRCLVAHKRPDQTLFGIVQGGMHLDLRLESIARLRAIEDENVSAGGRRFGGFGIGGYSVGEDHEVMFETLGQVARALPKDRPRYLMGVGNPTTLVRAVGEGVDMFDCVLPTRTARMGTAFSSTGRMNLRNAKYAHDFTPLDHACTCSTCQNFTRAYLRHLVKQNEMLGAILLSVHNLHFLIDLMRRARQAVLADTYDEFLQAWMNSSAAQDY

SEQ ID NO: 52261 - protein, 375 aa, Unknown
  misc_feature (1)..(375): tr|A0A3A9D274|A0A3A9D274_9BACT Queuine tRNA-ribosyltran sferase OS=bacterium D16-50 OX=2320112 GN=tgt PE=3 SV=1
MYRILKQEGRAKRAELATVHGTIQTPVFMNVGTAAAIKGAVATSDLEQIKTQVELSNTYHLHVRPGDTVVKQLGGLHKFMSWNKPILTDSGGFQVFSLAGLRKIKEEGVYFNSHIDGRKIFMGPEESMQIQSNLASTIAMAFDECAPSKAERSYVQASVDRTARWLERCKNEMKRLNGLEDTINPRQLLFGINQGAVYADIRIQHAKQISELELDGYAVGGLAVGETHEEMYYILDEVVPFLPKDKPTYLMGVGTPANILEGVERGVDFFDCVYPTRNGRHGHLYTNHGKINLFNAQYELDQRPIEEGCGCPACARYSRAYIRHLLKAKEMLGMRLCVLHNLYFYNTMMEEIRAALEEGRFAEYKRQKLAGMAAR

SEQ ID NO: 52262 - protein, 377 aa, Unknown
  misc_feature (1)..(377): tr|A0A3A9C2D1|A0A3A9C2D1_9BACT Queuine tRNA-ribosyltran sferase OS=bacterium D16-54 OX=2320104 GN=tgt PE=3 SV=1
MRYQLIATDGRAKRAEVQTVHGTIQTPVFMNVGTVAAIKGAVSTDDLRQIGTQVELSNTYHLHVRTGDKLIRQFGGLHRFMNWDRPILTDSGGFQVFSLAGLRRIREEGVYFNSHIDGRKIFMGPEESMQIQSNLGSTIAMAFDECPSSRADSEYIKSSVERTTRWLERCKKEMARLNSLSDTINREQLLFGINQGGVVESIRIEHAKTIADMDLDGYAVGGLAVGESHEEMYRILDVTVPHLPQNKPTYLMGVGTPANILEAVDRGVDFFDCVYPSRNGRHSHVYTNQGKLNLLNQKYELDSRPIEEGCQCPACRSYSRAYIRHLFKAKEMLGMRLCVLHNLYFYNTMMKEIRDAIEKHRYADYKARKLSGMEAES

SEQ ID NO: 52263 - protein, 377 aa, Unknown
  misc_feature (1)..(377): tr|A0A3A8WJD7|A0A3A8WJD7_9BACT Queuine tRNA-ribosyltran sferase OS=bacterium D16-59 OX=2320098 GN=tgt PE=3 SV=1
MYQVLCKDGRAKRGELKTVHGTIQTPVFMNVGTVGAMKGAVSTQDLQSMKTQVVLCNTYHLHVRPGDNIVNQLGGIHKFMVWDKPVLTDSGGFQVFSLAGLRKIKEEGVYFNSHIDGKKIFMGPEESMRIQSNLASTIAMAFDECPPYPAARKYMQDSVDRTTRWLGRCKAEMARLNGSGNALNPKQLLFGINQGGTFDDIRIEHAKQITELELDGYALGGLAVGETHELMYHVIEETVPYLPEDKPVYLMGVGTPENILEAVERGVDFFDCVYPARNGRHGHAYTNHGKMNLFNARYETDDKPIDETCDCPVCRTYSRAYIRHLLKAKETLGLRLMVTHNLYFYNTLMEEIRDAIEKGCYKEYKRKKTEMFKEETK

SEQ ID NO: 52264 - protein, 381 aa, Unknown
  misc_feature (1)..(381): tr|A0A3A9B6N4|A0A3A9B6N4_9BACT Queuine tRNA-ribosyltran sferase OS=bacterium D16-63 OX=2320119 GN=tgt PE=3 SV=1
MALFDCTCEARSGHARALSYETVHGTFRTPMFMPVGTSATVKGVLPEQLHELGAQVVLANTYHLAMRPGADVVAEAGGIHAFSGYDGPMLTDSGGFQVFSLADTVRLDDDGVTFQSIYDGAKVRWTPEENMRIQELIGADIAMQLDQCAPYPAERSFVAKAVDYSSAWAERCLAAHQRPDQTLFGIVQGGMHLDLRLESVRRLRAIEDASLAAGGRHFGGFGIGGYSVGESHEVMFETLGEVARACPEDRPRYLMGVGNPTTIVRAIGQGVDMFDCVLPTRTARMGTAFSSTGRMNMRNAQYARDFGPLDPQCSCPTCRQFSRAYIRHLVKQNEMTGGVLLSIHNLHFLLELARRAREAVLAGAYGEFEAAWMASPGARDY

SEQ ID NO: 52265 - protein, 405 aa, Unknown
  misc_feature (1)..(405): tr|A0A2G6NX38|A0A2G6NX38_9BACT Queuine tRNA-ribosyltran sferase OS=bacterium DOLJORAL78_65_58 OX=2044882 GN=tgt PE=3 SV=1
MNTHPLDTPFRFERDKTATDCAGRRGRLVTGHGVIETPVFMPVGTVGSVKAVTFENVWATGARIILGNTYHLYLRPGHELIARLGGLHKFQGWDGALLTDSAGFQVFSLGDLTRITEDGVHFRSHLDGSRHFFSPEVSMEAQLNIGADIIMAFDQCAAYGVSRDEVTAALERTTRWLHRCRDVTGGRTFRKGYERVLFGIMQGGVHEDLRRRSAEEIVALDLPGYAVGGLSVGEPTTAMREITELSAGLLPADKPRYLMGVGFPDDIVAGVAAGIDMFDCVLPTRMARTGTVLTRDGRLVIRNQDQAEDSRPIDAECGCPVCARHSRAYIRHLFSAKELLGPSLASIHNLHFYQELMLGVRRALEEDRFAAFAAEVTRRWQEGEAARLEGVRRRVPGGRQKKRPS

SEQ ID NO: 52266 - protein, 382 aa, Unknown
  misc_feature (1)..(382): tr|A0A2G6F9P3|A0A2G6F9P3_9BACT Queuine tRNA-ribosyltran sferase OS=bacterium DOLZORAL124_38_8 OX=2044884 GN=tgt PE=3 SV=1
MTKNYELQAKCGKARAGVLKTRRGEVQTPFFMSVATRATIKGGVDMQDLEAIQAPVVLCNTYHLHLRPGSEVVAKHGGLHDFMKCDKPMLTDSGGFQVFSIKRKKITEDGVFFNSHIDGQRFYLDAEKSIEIQHNLGADMIMAFDECPPNVPNWHKIRKAVEKTTAWAKRSLEYHWSKFSKDLGPTERPQIFGIVQGGSFSDLRQKSLEEITALDFDGFALGGLAVGETHEQMYKVLDEMAVQLPADKPRYLMGVGTPENLLEAIERGIDMFDCVLPARNARHGTVYTWDGKLKIGNAQYREDMRVLDENSDSPICKRGFTRSYLHHLHRVEEDLAKRYLTMHNLHFFHDLMREARKHIVAGDYSEWKNQLLEKWNGKEIQP

SEQ ID NO: 52267 - protein, 405 aa, Unknown; identical to SEQ ID NO: 52265
  misc_feature (1)..(405): tr|A0A2G6FZ53|A0A2G6FZ53_9BACT Queuine tRNA-ribosyltran sferase OS=bacterium DOLZORAL124_64_63 OX=2044883 GN=tg t PE=3 SV=1

SEQ ID NO: 52268 - protein, 366 aa, Escarpia laminata
  misc_feature (1)..(366): tr|A0A497U5Q3|A0A497U5Q3_9BACT Queuine tRNA-ribosyltran sferase OS=bacterium endosymbiont of Escarpia laminata OX=1221601 GN=tgt PE=3 SV=1
MQFETFHSDGAARRGRLTFARGTVETPAFMPVGTYGTVKAMTPEELTGMGAEIILGNTFHLMLRPGTKVIRAHGDLHGFTHWQGPILTDSGGFQVFSLGKMRKITEKGVAFRSPVNGSKVFMGPEESMQIQRELGSDIVMIFDECTPYPATEEEARVSMELSLRWAGRSRVAHGDNPSALFGIVQGGVFEHLREASLNGLTDIGFDGYAVGGLSVGEPPEDRWRVLDFLSGKLPQDKPRYLMGVGTPEDIVEAVRRGIDMFDCVMPTRNARNGHLFTHQGVVRIRNAVHEYDTGPVDPLCDCYTCKNYSRAYLRHLEKCKEILGARLNTIHNLFYYQTLMRDLRDAIEAGQLERFVSDFYALRSGV

SEQ ID NO: 52269 - protein, 366 aa, Escarpia laminata
  misc_feature (1)..(366): tr|A0A497TQ00|A0A497TQ00_9BACT Queuine tRNA-ribosyltran sferase OS=bacterium endosymbiont of Escarpia laminata OX=1221601 GN=tgt PE=3 SV=1
MQFETFHSDGAARRGRLTFARGTVETPAFMPVGTYGTVKAMTPEELTGMGAEIILGNTFHLMLRPGTKVIRAHGDLHGFTHWQGPILTDSGGFQVFSLGKMRKITEKGVAFRSPVNGSKVFMGPEESMQIQRELGSDIVMIFDECTPYPATEEEARVSMELSLRWAGRSRVAHGDNPSALFGIVQGGVFEHLREASLNGLTDIGFDGYAVGGLSVGEPPEDRWRVLDFLSGKLPQDKPRYLMGVGTPEDIVEAVRRGIDMFDCVMPTRNARNGHLFTHQGVVRIRNAVHEYDAGPVDPLCDCYTCKNYSRAYLRHLDKCNEILGARLNTIHNLFYYQTLMRDLRDAIEAGQLERFVSDFYALRSGV

SEQ ID NO: 52270 - protein, 376 aa, Unknown
  misc_feature (1)..(376): tr|A0A132HRZ2|A0A132HRZ2_9BACT Queuine tRNA-ribosyltran sferase OS=bacterium F083 OX=1768114 GN=tgt PE=3 SV=1
MSFEINATDRGCRARAGVIHTCHGDIATPVFMPVGTVGSVKAVHQHELRDDINAQIILGNTYHLYLRPGLGTLQAGGGLHRFMGWERPILTDSGGFQVFSLADNRKIREEGCTFRSHIDGSKHLFTPENVMDIQRVIGADIMMAFDECCPGDADRRYARQSMELTHRWLDRCIARYNSTEPCYGHHQALFPIVQGCQYEDLRRESAAYIAERATEGCAIGGLAVGEPTEVMYEMVALCCDILPADQPRYLMGVGTPANILEAIERGVDMFDCVMPTRNGRNGMLFTAHGTINIKNKKWETCFEPIDPESPAECDRVYTLAYLHHLMRAEEILALQICSIHNLAFYLWLVRTARRHILDGDYARWKSAILPDLMRRI

SEQ ID NO: 52271 - protein, 380 aa, Unknown
  misc_feature (1)..(380): tr|A0A202DN99|A0A202DN99_9BACT Queuine tRNA-ribosyltran sferase OS=bacterium F11 OX=1932698 GN=tgt PE=3 SV=1
MTPFSVEHRDPKSKARAGRLITPHGVIETPVFMPVGTQATVKTMSSDEIENMGYRILLANTYHLFLRPGLETLQKLGGLHQFMSWPGAILTDSGGYQVFSLATRCQLSEEGVVFSSHVDGKRQKLTPEITTEFQFNIGSDIAMCLDDCPPYPSLKRDAKESMEQTLRWAKRCKMTYETWLEAHQANPLLFGITQGASFTDLREESTQKTVEIGFPGYAIGGLGVGEPKEMTWSLLEASLRPLPEKAPHYLMGFGQPEDFWEGVQRGVDMFDCVLPTRNGRNGQAFTSRGRLQITNAPFREDTQPLDPHCSCLTCQRYSRGYLFHLFRAGELLGPRLITLHNLFYMISLLRTIRKSIIDGHFQEEKEKFLETYKSSENAIC

SEQ ID NO: 52272 - protein, 350 aa, Unknown
  misc_feature (1)..(350): tr|A0A3D8UN11|A0A3D8UN11_9BACT Queuine tRNA-ribosyltran sferase (Fragment) OS=bacterium HD9-500m-PIT-SAG08 OX=2 283597 GN=DZA33_00950 PE=3 SV=1
LIETHRGKIETPVFMPVGTQATVKACTIDDIKKTGSQIILSNTYHLMIRPGVKRIEDAGGLHKFMNCDLPILTDSGGFQVMSLSKLNKIDKEKGAIFNSHIDGKKFYLSPEESIKIQLGLNSDIVMVMDECPKKTNDYQTIDKSMNLSLYWAERSKKAFGHNPQKALFGIVQGGLFKDLRQKSLKGLLEIGFDGYALGGLAVGETQDEMFTVLDDIKEHLPDDKPHYLMGVGTPNDILGAVKRGVDMFDCVLPTRSGRTGLAFTWQGRVNIKNNKYQNDNTPLDPECKNLNLNKYSKNYLNHLFNTNEILGSMLLTLHNINFYQELMRSIRENIQNDTFDTFHDKYIDKL

SEQ ID NO: 52273 - protein, 380 aa, Unknown
  misc_feature (1)..(380): tr|A0A2H5VPF8|A0A2H5VPF8_9BACT Queuine tRNA-ribosyltran sferase OS=bacterium HR08 OX=2035403 GN=tgt PE=3 SV=1
MVIFQLIAEDPATRARAGVLHTAHGPVETPVFMPVGTQATVKALTQEMLEELDARIVLANTYHLFLRPGEHVIRELGGLHRFMAWDRAILTDSGGYQVLSLAPLRTVREEGVHFQSHLDGSRHLLTPERAIEIQVALGSDILMVLDECVGNPAEWAEAERAVRLTTAWARRSKARFEQLREEGLLTPAALFGIIQGSLYRDLRRRSVEELLEIGFDGYAIGGLSVGEEKPAMLDMVEYVAELMPRERPRYLMGVGTPTDLVEGVRRGVDMFDCVLPTRNARNGQVFTSRGPLNIKNAAYARDPRPLDEECACRVCRRYSRAYIRHLYASGEILSAILCTYHNLHFYLDTMRKIRQAIALGNFAEFAQEFSRRYREGRSAS

SEQ ID NO: 52274 - protein, 375 aa, Unknown
  misc_feature (1)..(375): tr|A0A2H5VT35|A0A2H5VT35_9BACT Queuine tRNA-ribosyltran sferase OS=bacterium HR09 OX=2035404 GN=tgt PE=3 SV=1
MGRSGTFRVVAREGFARAGELQTPHGIVRTPAFMPVGTAGSVKGLAPWELARLAPEMVLANTYHLLLRPGVEVVAELGGLHRFMGWSGPILTDSGGFQVFSLAQLRRVSEEGVLFRSHIDGTEFVLTPESCMEAQKRLGVDVAMALDVCPALPAPRESLEHAVELTTLWARRCRQALAPGELPLLFGIVQGGLELDLRRQALEALLPLDFDGYALGGFSVGEPPEAMWQAVGVLAPELPEDRPRYLMGVGTVRDILEAVAAGVDLFDCVIPTRNARNGLLHTSRGPVVVKHARYRSCPEPPDPQCSCPTCQTCSLAYLRHLYMAREAAYVVLATVHNLHFYLTLMRQVRSAIIDGRFAELRQGISADLAAAVEVS

SEQ ID NO: 52275 - protein, 380 aa, Unknown
  misc_feature (1)..(380): tr|A0A2H5VZL1|A0A2H5VZL1_9BACT Queuine tRNA-ribosyltran sferase OS=bacterium HR10 OX=2035405 GN=tgt PE=3 SV=1
MVTFQLIAEDRATRARAGVLHTAHGPVETPVFMPVGTQATVKALTQEMLEELDARIVLANTYHLFLRPGEHVIRELGGLHRFMAWDRAILTDSGGYQVLSLAPLRTVREEGVHFRSHLDGSRHVLTPERAIEIQVALGSDILMVLDECVGNPAERVEAERAVRLTTAWARRSKARFEQLRAEGLLTPAALFGIIQGSLYADLRRRSMEELLEIGFDGYAIGGLSVGEEKSAMLDMVEYVAELMPRQHPRYLMGVGTPADLIESVRRGVDMFDCVLPTRNARNGQVFTSRGPLNIKNAAYARDPRPLDEECACRVCRRYSRAYIRHLYASGEILSAILCTYHNLHFYLDTMRKIRQAIVLGNFAEFAQEFLRRYQEGRSAS

SEQ ID NO: 52276 - protein, 395 aa, Unknown
  misc_feature (1)..(395): tr|A0A2H5W506|A0A2H5W506_9BACT Queuine tRNA-ribosyltran sferase OS=bacterium HR11 OX=2035406 GN=tgt PE=3 SV=1
MRHRHGRHLPGPPSHVDDVTGNRFRILYEDPSSSARIGLYETDHGPVETPCFAPVGTYGAVKAVPHETLEAMGFRLILANTYHLYLRPGPETIRALGGLHRFVAWPHAILTDSGGYQVFSLARLRKVTDEGVTFQSHLDGSLHVLTPERAVEIQEALGSDIAMVLDECPPYGCERSDLEQAVRRTVAWARRSRAVHRRPDQSLWGITQGSTDPQLRRICTEQILEIGFDGYAIGGLAVGEPKAEMYAAIADAAALLPRDHIRYLMGVGLPQDVVYAVMQGVDLMDCVVPTRHARNGYLFTREGPLHIKNSRYQTDPTPPDPTCDCPVCRRYSRAYLRHLFMVREVLFTVLNTVHNLYFYRRLFREIRTAIQEGSLPSLYRFYEDRYGPKTLSAEA

SEQ ID NO: 52277 - protein, 358 aa, Unknown
  misc_feature (1)..(358): tr|A0A2H5WM18|A0A2H5WM18_9BACT Queuine tRNA-ribosyltran sferase OS=bacterium HR14 OX=2035409 GN=tgt PE=3 SV=1
MGIQFEIVQTSTRSHARLGRLTTPHGVIETPVFMPVGTQATVKTLSQDELEQLGYRLILGNTYHLYLRPGAERIARMGGLHRFMSWSGAILTDSGGFQVFSLTSLRQIDMEGVTFRSHLDGSEHRFTPELSIRVQSLLGSDIMMAFDECPPYPASREEVALAVERTYRWAIRSRAAWEEAQPAGALFGIVQGGVYEDLRLMSLQQITELNLPGYAIGGVSVGEPVEEMRRITALVAPRLPAEKPRYLMGVGTPDDILHAVQAGVDMFDCVLPTRLGRHGAVFTQNGRHNLRNARFAECMEPIDPTCDCWVCQRYTLAYLHHLFRAGEMLGYRLASYHNLAFYARLMAQIRQRIREGTL

SEQ ID NO: 52278 - protein, 371 aa, Unknown
  misc_feature (1)..(371): tr|A0A2H5WU30|A0A2H5WU30_9BACT Queuine tRNA-ribosyltran sferase OS=bacterium HR15 OX=2035410 GN=tgt PE=3 SV=1
MTHNLRFEIVAVSKGSQARAGRLHTAHGVIETPAFMPIGTQASVKTLSQEELEQLGYRLILANTYHLYLRPGAERIARLGGLHAFMSWRGAILTDSGGYQVFSLAPLRQIDDEGVTFRSHIDGSLHRLTPERAIEVQQLLGSDIMMALDECPPYPAEYDTVAHAVERTYRWAIRCKQAWQAKETTRLCPSDGGALFGIVQGGIYEDLRKVSIDQITSLDLPGYAIGGVSVGEPVERMRAIVEFTTPRLPPDRPRYLMGVGTPEDIRHAVACGVDLFDCVLPTRLGRHGAVFTSRGRLNLRNARFAECTEPIDPECDCTVCQRYSLAYIHHLFRAGEMLGYRLASYHNLAYYARWMQTLRKEIMAGGCIRQG

SEQ ID NO: 52279 - protein, 381 aa, Unknown
  misc_feature (1)..(381): tr|A0A2H5X2N5|A0A2H5X2N5_9BACT Queuine tRNA-ribosyltran sferase OS=bacterium HR16 OX=2035411 GN=tgt PE=3 SV=1
MRPSPALQFKIVARDPRSQARCGILRLPHGEVETPVFMPVGTQGTVKAMTQEELERLDFRIILCNTYHLYLRPGHERIARAGGLHRFIAWNRNILTDSGGFQVFSLQGLRRVYEDGVEFQSHIDGSIHYFTPERAVEVQHALGADIIMAFDECPPNPCTYEQAKAAMERTHRWAMRCLESHHTEQALFGIVQGSVYEDLREQSARFISELGFPGVAIGGVAVGEEKAEIHRIVAFTTPLLPDGKPRYLMGVGEPDDILQAVASGVDMFDCVLPTRLARNAAMMTRRGRVNLRNAHFADHFGAVDPECDCPVCQRYPAAYIHHLFKAKEILAARLATYHNLYFYQRLMEDIRRAIREGNLEQFTREFLQKYMPEESRLSREE

SEQ ID NO: 52280 - protein, 377 aa, Unknown
  misc_feature (1)..(377): tr|A0A2H5XEG6|A0A2H5XEG6_9BACT Queuine tRNA-ribosyltran sferase OS=bacterium HR17 OX=2035412 GN=tgt PE=3 SV=1
MAAQHFRVLARDPNTRARLGELHLAHGTVATPVFMPIATQGTVKMLTADDLEALGAQMLLANAYHLHLRPGETLIAQLGGLHRFMGWQRPILTDSGGFQVFSLSTLREVTDEGVRFRSHHDGTDHFLHPETSIRIQEALGSDIAMVFDDVVAYPCPREQAQAAMERSLRWAERCRKAHRRPDQLLFAITHGGVYADLRRWCTERLVAMDFPGYAIGGLSVGEPKEQMFGMVALSTELLPDDKPRYLMGVGTPADIARAVALGVDMFDCVLPTRLGRTGTAFTAQGRLNLRNARYATALEPLDPTCDCVTCRRYSRAYLRHLFKAGEATGPRLLTYHNLHFYLRLMDRLRAAIVAGTVHQIVDEMTRLFPDEPSEREA

SEQ ID NO: 52281 - protein, 376 aa, Unknown
  misc_feature (1)..(376): tr|A0A2H5XLR8|A0A2H5XLR8_9BACT Queuine tRNA-ribosyltran sferase OS=bacterium HR18 OX=2035413 GN=tgt PE=3 SV=1
MRFVLERVDTATRARAGRLETPHGTVETPMFMPVGTVGSVKTLGPRELRQDIGAQIILGNTYHLYLRPGLEVLRQAGGLHRFMGWDGPILTDSGGYQVFSLAPLRKLSDEGVVFQSHLDGSRHLFTPENVIDFQRIIGADIMMVLDECPPADVSLEAARRAHELTLRWAARSQQRFSATEPLYGYPQALFGIVQGGVFPALRRASAQALVEMDFPGYAIGGLSVGEPAEVMYEMVEIVTELLPLDRPRYLMGVGTPANLLENIARGIDLFDCVLPTRNGRNGMLFTTEGILNIRNRKWQMDFSPIDPGLEGYVSQTFTKAYLRHLFQAGEILGLQIATLQNLSFYLWLMRAARQAILENRYQSWMNEVLPRISQRL

SEQ ID NO: 52282 - protein, 388 aa, Unknown
  misc_feature (1)..(388): tr|A0A2H5XVG8|A0A2H5XVG8_9BACT Queuine tRNA-ribosyltran sferase OS=bacterium HR20 OX=2035415 GN=tgt PE=3 SV=1
MLARSEWFELVATDPASKARAGLLRTEHGVVETPVFMPVATQGAIKALDHRIARELSYRMLLANTYHLYLRPGTDVLRAAGGLHRFMRWHGALLTDSGGFQVYSLGSIRRIRDDGVEFRSHIDGSRHLFTPESVIAHQRAIGADIMMAFDECIGYPATYQQATAAMQRSICWERQCLESHREQEFLYGYRQQLFSIIQGSIYLDLRQRCIEELCALPFDGYAIGGLAVGEPVSVMYEVVDHATDLLPADKARYLMGVGTPQNILRAIELGVDMFDCVMPTRNARNGTLFTTRGRINIRNQRFKFSDEPLDPAWEALGVEPFSLGYVRHLFVSGEILGLTIATMQNLAFYRWLVRTAREKILAGSFRQWAKSFLEQFYPETTLEGERST

SEQ ID NO: 52283 - protein, 387 aa, Unknown
  misc_feature (1)..(387): tr|A0A2H5Y288|A0A2H5Y288_9BACT Queuine tRNA-ribosyltran sferase OS=bacterium HR21 OX=2035416 GN=tgt PE=3 SV=1
MEPLDPHGMTFQVVATAPDCSARAGLLWTAHGVVETPAFMPVGTQGSIKALDHRRAQELGAQILLCNAYHLYLRPGIAVIEHFGGLHRFLGWFKPILTDSGGYQIFSLQQLRRISTEGVEFRSHIDGSLHFFTPERVIELQRVLGSDIMMVLDECPPYPAEHSMLEEAVRRTLLWAQRSLAAFRATGSRYGYRQLLFGIAQGGTSTALRRQCLEELCQWDFDGFAIGGLSVGEPTEAMYEMVALSTELMPPERPRYLMGVGTPENILTAIEYGVDLFDCVLPTRNARNGQLFTTRGKINIRNARWRFSDEPIDPALDHPVSRTVTLGYLRHLFLAGEITALVLATEHNLAFYHWLLATARRKIQDGSFRHWKRSFLERIRQTAVESS

SEQ ID NO: 52284 - protein, 380 aa, Unknown
  misc_feature (1)..(380): tr|A0A2H5Y5K4|A0A2H5Y5K4_9BACT Queuine tRNA-ribosyltran sferase OS=bacterium HR22 OX=2035417 GN=tgt PE=3 SV=1
MPPEGFRFVVLARDGRARAGFLDTPHGRIPTPCFAPVGTQGAVKTIPAWDLEDLGAHLILANTYHLYLRPGDERIARLGGLHRFMGWNGPILTDSGGFQIFSLQGLREVDEDGVTFRSHLDGSLHRFTPEKAIRIQENLGADLIMCLDECPPPMDYDYNVKALERTHRWAERCRAAHARTDQALFGIVQGGVFEDLRTRSARFLVSLDFPGYAIGGLSVGEPKPLTYRTLELMDALLPEEKPRYLMGVGTLVDFVEAVARGVDLFDCVMPTRVARHGTAITRDGRLNLRNAIYAEDPRPIDEACGCPTCRRFSRAYLRHLFNVGEPLAMYLTTLHNLYTMFRFMEEMRQAILEGRFADFRAAVLEAQATLPMDPEPGVEG

SEQ ID NO: 52285 - protein, 393 aa, Unknown
  misc_feature (1)..(393): tr|A0A2H5YDS5|A0A2H5YDS5_9BACT Queuine tRNA-ribosyltran sferase OS=bacterium HR23 OX=2035418 GN=tgt PE=3 SV=1
MDTFSFRLEATCGTARAALLTTPHGTIPTPAFMPVATQASVKALTPAEARACGSHILLCNAYHLALRPGVEVVEAFGGLHAFMGWDGPLLTDSGGFQVYSLGDLRKVTEEGILFQSHLDGSTHWLTPETAIRNQEGLGADLITCLDECLPYGAPRDALEQAVARTQRWAERCLHARRRADQALFAIVQGGHDLALRRASAEGLVALNCEGYAVGGLSVGEAKDLFLSLAQFTALLLPTHKPRYLMGVGAPDDLVRCIGMGYDLFDCVLPTRAGRTGGIYTHRGRVDITSARWRVERGPLEEGCDCFTCAHFSAGYVHHLFRAQELLAYRLASLHNLRFYQRLVAQARQAILEGRFPAWQEAFLHTYRPTNEEARLAQHQKRLQSRSLREETWH

SEQ ID NO: 52286 - protein, 402 aa, Unknown
  misc_feature (1)..(402): tr|A0A2H5YPR9|A0A2H5YPR9_9BACT Queuine tRNA-ribosyltran sferase OS=bacterium HR26 OX=2035421 GN=tgt PE=3 SV=1
MEHFTILARDAQTRARAGVLRTRRGDVHTPAFMPVGTQASVKSLTPDEIRATGSEIILANTYHLMLRPGLEIIQAAGGLHAFMGWPHPILTDSGGFQVYSLASLREVTERGVRFRSHIDGSLHELTPESVIALQLGFGSDIIMPLDDVVGYDSDLECQREAADRTHRWLLRALDYFRAVVDADDPARPWLFGIVQGGFDLDLRRRSCDFVAGLPLDGCAIGGLSVGEPKPVMLAFLEEVARLLPEDKPRYLMGVGSPEDLWVAVAAGIDLFDCVHPTRVARHGALYTPEGRVDITSSRYRAHFGPVDERCDCLACTQFTAAYLNHLFRARELLAYRLATIHNLRFIQREMERIRRAIKEGRFVIELEEFLARYRPADQEAAAVQRRRRAEAKRLEEVRDVDE

SEQ ID NO: 52287 - protein, 391 aa, Unknown
  misc_feature (1)..(391): tr|A0A2H5Z843|A0A2H5Z843_9BACT Queuine tRNA-ribosyltran sferase OS=bacterium HR28 OX=2035423 GN=tgt PE=3 SV=1
MQSFMIVRRESTTYARLGLLRTRRGIVHTPAFMPVGTQATVKSLTPEEIRATGSEIILANTYHLFLRPGPQVLEAVGGLHIFMGWDGPILTDSGGFQVYSLAKLRQVTERGVIFRSHIDGSLCELTPESVIDLQFIFGSDIVMPLDDVVGYGEPEQRQRDAMERTHRWLRRSIERFQERTANMSAEERPLLFGIAQGGFDATRRQQSAATIAALPVDGFAIGGLSVGEPKPLLEAMLAASLQALPEDRPRYLMGVGAPEDLWRAVALGVDLFDCVLPTRLARHGALFTSSGRIDITSARFKFLTAPVDETCDCYTCRHFSAAYLHHLFRAKELLAYRLATIHNLRFIQNLMQKMRAAIAEGTFAAAWEQFLAAYQSTENAREEAVLLEGEE

SEQ ID NO: 52288 - protein, 390 aa, Unknown
  misc_feature (1)..(390): tr|A0A2H5ZDN7|A0A2H5ZDN7_9BACT Queuine tRNA-ribosyltran sferase OS=bacterium HR29 OX=2035424 GN=tgt PE=3 SV=1
MIAFEVLAGPGEPVAPRRGRLLTPRGCVETPAFMPVGTLATVKALLPEEVEAAGAEMILVNAYHLYLRPGHRLIERFGGIHRFMGWSRPILSDSGGFQVFSLARLVRVDDAGVRFRSHIDGSEHFYTPELAVEVQQALGVDIAMPLDHVVPGGSPEPDARDAAERTLRWFERCRRAAGDLPLFAIVQGGVYPELRRWHARALAALDAPGYAIGGLSVGEPKTEMWRTLELTCAELPASKPRYLMGVGSPEDIVEAVARGVDMFDCVLPTRLGRNGGLFTDDGRVNIRSARFAEAEGPVDPDCDCLTCRRFPAAYLHHLFRNEELLGYRLATIHNLRYLARLIGRIRAAIEQGRFLAFAAEFLARYRPADEAVRLAQREKWLERKARASGP

SEQ ID NO: 52289 - protein, 384 aa, Unknown
  misc_feature (1)..(384): tr|A0A2H5ZLB8|A0A2H5ZLB8_9BACT Queuine tRNA-ribosyltran sferase OS=bacterium HR30 OX=2035425 GN=tgt PE=3 SV=1
MMQVSPSKIGIPESTDHFQIRGEDGGARCGVMTTAHGQVVTPAFMPVATQGSVKGLTPRDLRGLGTQILLANTYHLTLRPGVDVIQDLGGLHRFMGWDGPILTDSGGYQVYSLAPLRKITDEGVLFRSHIDGQTVFFTPESVIQIQKALGVDIAMVLDECPPAGAPRNQVETATRRSLSWAVRSRALSDSSGTLVFGIVQGGTFTDLRRWHCRELVALDFPGYAVGGLSVGEERGVTLEVAAVTAEELPRDRPRYLMGVGYPEDLIRFVAMGYDLFDCVLPTRNARNGLLFTSNGRLNIRLARFQRDENPPDPLCSCYTCSNFSRAYLRHLSLAKEISAAILATTHNLYFYQRLMRDMQTAIIRHSFAPWAEATIARLEQECQP

SEQ ID NO: 52290 - protein, 374 aa, Unknown
  misc_feature (1)..(374): tr|A0A2H6A1B7|A0A2H6A1B7_9BACT Queuine tRNA-ribosyltran sferase OS=bacterium HR33 OX=2035428 GN=tgt PE=3 SV=1
MFEFIVEGVNGEARAGRLKLPHGTVRTPCFMPVGTQGTVRALSPFDLKAAGAEMVLANTYHLHVRPGEETIAALGGLHRFMAWDRPLLTDSGGFQVFSLEVLRRVDEEGVEFRSPVDGQVRRLTPELAVEIQWTLGSDIAMVLDHVVPGTASRSEAEDAWERTRRWTERAVRRHLELAGRSPGRQTLWPIVQGATYPDLRRAAVAQILDVADWNGIAVGGLAVGEPKEAMYQVLEGMLPSLPAQLPRYLMGVGFPEDLLRSIALGMDLFDCVAPTRNGRNGSAFTPEGPLNIRNAAFRRDSRPLDETCDCETCRTYSRGYLRHLFMAEELLGLRLLSLHNVRFLIRLAETARDRILAGTFDTWHRDWLARYEGK

SEQ ID NO: 52291 - protein, 378 aa, Unknown
  misc_feature (1)..(378): tr|A0A2H6A954|A0A2H6A954_9BACT Queuine tRNA-ribosyltran sferase OS=bacterium HR35 OX=2035430 GN=tgt PE=3 SV=1
MFEVIKFSKKSKARLGIIKTFHGEIKTPAFVPVATKGTIKALPQIFFKEIGIQLAFVNTYHLVNHPGAEIIDKAGGIHKYANLNLPLMSDSGGFQVFSLAQKKRVKLRNDEETILVKIEEDRVVFRSNFNNKELEFTPEKSIDYQIKIGADLVMAFDECITYPTTYDYAKKATQRTHSWLLRCLDYFSKNKKNYQYIYGIIQGSVFEDLRKESAKFVINQPVDGIAVGGVSVGESKEEMRLAVNWISDYLPKDKPVHLLGVGRIDDIIDLVVYGIDTFDCSEPTRIARTGWLYQINDENNLKDFLTIIDIEKNIYKENFEKVDQKCNCYVCQNFTKAYLHHLFKEKEILASVLATYHNLYLMERFFEKIREEIANDKL

SEQ ID NO: 52292 - protein, 370 aa, Unknown
  misc_feature (1)..(370): tr|A0A2H6ABS5|A0A2H6ABS5_9BACT Queuine tRNA-ribosyltran sferase OS=bacterium HR36 OX=2035431 GN=tgt PE=3 SV=1
MDAVCFEVLATSGKARLGRMKTPHGIVDTPAFMPVGTQATVKGLLPEQLHQAGVQMLLANTYHLALRPGAELIALLGGLHQFMAWEGPILTDSGGYQVFSLAAIRRISDHGVEFRSHLDGSLLELTPERAVEIQELLGSDIAMCLDECPPYDASDSVLREAVRRTVHWAERCRKAQRRPDQALFGIVQGGLDLGLRRECVRALLALDFPGYALGGFSVGEPPELMYPIMTQTADWLPEHKPRYLMGVGRPQDILEAVAAGVDLFDCVLPTRNGRNAQAFARTGVLRLRNAVHRTDPRPLEDDCPCVACRQFSRAYLHHLFHADEMLGPILVSLHNITFYQRLMGEIRQAIAQGRFAEYRAARLAQCQAGN

SEQ ID NO: 52293 - protein, 367 aa, Unknown
  misc_feature (1)..(367): tr|A0A2H6AM25|A0A2H6AM25_9BACT Queuine tRNA-ribosyltran sferase OS=bacterium HR37 OX=2035432 GN=tgt PE=3 SV=1
MFKFEVIKKDKDTGARIGKIYTDHGIITTPAFMPVATRASVKGMTPDEVRDLGFEIVVVNAYHMYLRPGHITVKELGGLHRFMAWDNPILTDSGGFQVLSLSKVRKVKEEGILFRSHIDGSEHFLTPAKSIEIQEALGADIMMCLDECPPHDAPYEYIKRSTDLTTKWARLSKEARSNPEKPLFGIVQGGVFPELREKSALELLEIGFDGYAIGGLGIGESKEETYEIAEFTASYLPYDKPRYLMGLGMPEDIVEAVSMGIDLFDCVLPTRNARNGSLFTNRGKVVIKNAKYEKDDTPVDENCGCYTCTRFSKAYLRHLYQASEILASRLLTLHNLYYYGWLMKKIREAIENGGFSSFRSRFYSKEG

SEQ ID NO: 52294 - protein, 345 aa, Unknown
  misc_feature (1)..(345): tr|A0A2H6AR18|A0A2H6AR18_9BACT Queuine tRNA-ribosyltran sferase OS=bacterium HR38 OX=2035433 GN=tgt PE=3 SV=1
MKGLLPKDLKAIGSQVLLANTYHLLLRPGPERVQALGGLHRFAGWDGPWLTDSGGFQVMSLGHLRRIDEEGVVFQSHLDGSLIRLTPERSIAIQEALGADFIMAFDECPPYPSSPEYLKASLERTLRWLERSLKAKTRPDQALFGIAQGGTDAGLRALSTRETLRFDLPGYAIGGLAVGETKEEMFPMVALSTEILPEAKPRYLMGVGHPEDLVAAMGLGVDLFDSVYPTRTGRFGSALVPEGRINLKNAQYLEDKRPLEEGCDCYACQTFSRAYIAHLVRAEEMLGGILLSLHNLRFLHRLTERAREAIRQGSYGAFAREFAERRFGKEIPPWFREAMAAGGHW

SEQ ID NO: 52295 - protein, 376 aa, Unknown
  misc_feature (1)..(376): tr|A0A2H6B263|A0A2H6B263_9BACT Queuine tRNA-ribosyltran sferase OS=bacterium HR40 OX=2035435 GN=tgt PE=3 SV=1
MTIGFEVLARDGAARRGRLTTAHGTVETPAFMPVGTAATVKALTVDMLHATGTEMVLANSYHLMLRPGAERVARLGGLHRFMRWEKPILTDSGGYQVMSLASLRSLDERGVRFRSHLDGSLHELTPERAIEIQQLLDADIAMQLDECLKLPAPPEEVRRAMELSLRWAERSRRSFTERPGYGLFGIVQGGTDEGLRRRSAEALVGIGFDGYAIGGLAVGEPQAEMFATLEATVPFLPEDRPRYLMGVGKPLDILGAVLRGVDMFDCVLPTRSGRTGQAFTRFGPVNLRNARHADDPRPLDGESLCPAARDYSRAYLHHLVRANEILASILLTWNNVWFYQELMRNIRRAIEEGRLGAFAAAFAADWQRGDIPPWRG

SEQ ID NO: 52296 - protein, 376 aa, Unknown
  misc_feature (1)..(376): tr|A0A3L7ZXV5|A0A3L7ZXV5_9BACT Queuine tRNA-ribosyltran sferase OS=bacterium J10(2018) OX=2320122 GN=tgt PE=3 S V=1
MDFKLQATDKSSGARAGLITTDHGVIETPIFMPVGTAGTVKAVHQHELTDDINAQIILGNTYHLYLRPGTDILKAAGGLHKFNGWEKPILTDSGGFQVFSLSANRKLKEEGAYFRSHIDGSKHLFTPENVVDIQRVIGADIMMALDECPSGTADYDYAKKSLGLTLRWLQRGWDRYKSTEGLYGHSQAYFPIVQGCTYPDLRRESAKFVADLGADGNAIGGLAVGEPAEVMYDMIEVVNDILPVDKPRYLMGVGTPANILEAIERGVDMMDCVMPTRNGRNGMLFTAHGIMNMRNKKWADDFSPLQEDGPSYVDRFYSKAYVRHLFASQEILGMQIASIHNLAFYLWLVKEARRHILAGDFKPWKDEMVKRVTQRL

SEQ ID NO: 52297 - protein, 376 aa, Unknown
  misc_feature (1)..(376): tr|A0A4S1ID57|A0A4S1ID57_9BACT Queuine tRNA-ribosyltran sferase OS=bacterium M00.F.Ca.ET.141.01.1.1 OX=2563898 GN=tgt PE=3 SV=1
MTETFTFKVLATDGKARRGLIDMPRGEIRTPAFMPVGTGGTVKAMYMDQVRGVGADIILGNTYHLMLRPGAERVARLGGLHEFARWPHPILTDSGGFQVMSLSKLRKLTEKGVTFRSHIDGAPYEMSPERSIEIQGLLDSDIQMQLDECTALPAELKEIERAMELSLRWAERCKTAFGDQPGKAMFGIVQGGDNAALRVRSAQALSAMDLKGYAVGGLAVGEPQAVMLDMLDITCPELPDNKPRYLMGVGTPDDILKSVARGIDMFDCVMPTRAGRHGLAYTRRGKVNLRNARHADDPRPLDEESDCPAARDYSRAYLHHLVRSQEALGAMLLTWNNLSYYQKLMQDIRAAIEIGAFELRSGEISEGWAKGDLPVL

SEQ ID NO: 52298 - protein, 376 aa, Unknown
  misc_feature (1)..(376): tr|A0A4S1HYC3|A0A4S1HYC3_9BACT Queuine tRNA-ribosyltran sferase OS=bacterium M00.F.Ca.ET.141.01.1.1 OX=2563898 GN=tgt PE=3 SV=1
MSRLQFQLKTRDGRARRGRLTFPRGTVETPAFMPVGTYGSVKGILPDQVRALGAEIILGNTFHLYLRPGLDIIADHGGLHGFCRWDGPILTDSGGFQVFSLAHRRKITEQGVTFASPTDGARVFLGPEESMKIQKVLDSDIVMIFDECTPYPATEDVARRSMELSLRWAQRSRNAHDELGNDAALFGIVQGGVHTDLRSRSADALQAIGFDGYAIGGLAVGEPEHERNAMLDHLDPELPGDRPRYLMGVGRPEDLVEGVARGVDMFDCVMPTRNARNGHYFTSFGTVRIRNSQYARDMDPIEPGCGCVACTGGYTRSYLRHLDRCNEMLAPMLGTLHNLFYYEKLMADIRAAIEAGTFLAFRESFYAARGAVAPPL

SEQ ID NO: 52299 - protein, 376 aa, Unknown
  misc_feature (1)..(376): tr|A0A4V3NUS8|A0A4V3NUS8_9BACT Queuine tRNA-ribosyltran sferase OS=bacterium M00.F.Ca.ET.146.01.1.1 OX=2563899 GN=tgt PE=3 SV=1
MAETFSFKVLASDGKARRGLVSMPRGEIRTPAFMPVGTGGTVKAMYMDQVRGVGADIILGNTYHLMLRPGAERVARLGGLHEFARWPHPILTDSGGFQVMSLSKLRKLTEQGVTFRSHIDGAPYEMSPERSIEIQGLLDSDIQMQLDECTALPAKPKEIERAMELSLRWAERCKTAFGDQPGKAMFGIVQGGDSAPMRVRSAQALKAMDLKGYAVGGLAVGEPQSVMLEMLDITCPELPANKPRYLMGVGTPDDILKSVARGIDMFDCVMPTRAGRHGLAYTRRGKVNLRNARHADDPRPLDEESDCPAARDYSRAYLHHLVRSQESLGAMLLTWNNLSYYQKLMQDIRAAIEAQAFEARAAEITEGWARGDIPAI

SEQ ID NO: 52300 - protein, 376 aa, Unknown
  misc_feature (1)..(376): tr|A0A4S1BJ98|A0A4S1BJ98_9BACT Queuine tRNA-ribosyltran sferase OS=bacterium M00.F.Ca.ET.152.01.1.1 OX=2563900 GN=tgt PE=3 SV=1
MAETFTFKVLAADGKARRGLIDMPRGEIRTPAFMPVGTGGTVKAMYMDQVRGVGADIILGNTYHLMLRPGAERVARLGGLHEFARWPQPILTDSGGFQVMSLSKLRKLTEKGVTFRSHIDGAPYEMSPERSIEIQGLLDSDIQMQLDECTALPAPLKEIERAMELSLRWAERCRTAFGDQPGKAMFGIVQGGDNPALRVRSAQALSAMDLKGYAVGGLAVGEPQAVMLDMLDITCPELPADRPRYLMGVGTPDDILKSVARGIDMFDCVMPTRAGRHGLAYTKRGKVNLRNARHADDPRPLDEESDCPAARDYSRAYLHHLVRSQEALGAMLLTWNNLSYYQKLMQDIRAAIEAGSFEARGAEISEGWARGDIPAL

SEQ ID NO: 52301 - protein, 391 aa, Unknown
  misc_feature (1)..(391): tr|A0A4S0YBP0|A0A4S0YBP0_9BACT Queuine tRNA-ribosyltran sferase OS=bacterium M00.F.Ca.ET.155.01.1.1 OX=2563901 GN=tgt PE=3 SV=1
MTTGHPSPQPADGLQFELLGTDGLARRGRVTLNHGVVETPIFMPVGTYGTVKAVQPRELEEMHAQIILGNTFHLWLRPGLETIAAHGGLHGFMGWKKPILTDSGGFQVFSLGELRKITEDGVTFASPINGDKLFLSPEVSMQIQKVLNSDIVMQFDECTPYATNNVPTSRQEAADSMRMSMRWAQRSIDEFRRLGNPNALFGIVQGGMFEDLRDESLAGLAEKDFHGLAIGGLSVGEPKEDMMRVLNHIGPKLPANKPHYLMGVGTPEDLVAGVAAGVDMFDCVMPTRNARNGWLFTRFGDIKIRNATHKNSRRPLDEQCGCYTCRNFTRGYLHHLHRVGEILGAQLNTIHNLHYYLELMQEMRDAIDAKMFEAFRKRFHENRARGIDEAP

SEQ ID NO: 52302 - protein, 376 aa, Unknown; identical to SEQ ID NO: 52299
  misc_feature (1)..(376): tr|A0A4S0ZLH9|A0A4S0ZLH9_9BACT Queuine tRNA-ribosyltran sferase OS=bacterium M00.F.Ca.ET.156.01.1.1 OX=2563902 GN=tgt PE=3 SV=1

SEQ ID NO: 52303 - protein, 376 aa, Unknown
  misc_feature (1)..(376): tr|A0A4S0ZSG6|A0A4S0ZSG6_9BACT Queuine tRNA-ribosyltran sferase OS=bacterium M00.F.Ca.ET.156.01.1.1 OX=2563902 GN=tgt PE=3 SV=1
MAETFTFKVLATDGKARRGLIDMPRGEIRTPAFMPVGTGGTVKAMYMDQVRGVGADIILGNTYHLMLRPGAERVARLGGLHEFARWPHPILTDSGGFQVMSLSKLRKLTEKGVTFRSHIDGAAYEMSPERSIEIQGLLDSDIQMQLDECTALPAELKEIERAMDLSLRWAERCKTAFGDQPGKAMFGIVQGGDNAALRVRSAQALSAMNLKGYAVGGLAVGEPQAVMLDMLDITCPELPDKKPRYLMGVGTPDDILKSVARGIDMFDCVMPTRAGRHGLAYTRRGKVNLRNARHADDPRPLDEESDCPAARDYSRAYLHHLVRSQEALGAMLLTWNNLSYYQKLMQDIRAAIESGTFELRSGEISEGWAKGDLPVL

SEQ ID NO: 52304 - protein, 376 aa, Unknown
  misc_feature (1)..(376): tr|A0A4S0WY91|A0A4S0WY91_9BACT Queuine tRNA-ribosyltran sferase OS=bacterium M00.F.Ca.ET.157.01.1.1 OX=2563903 GN=tgt PE=3 SV=1
MAETFSFKVLASDGKARRGLVSMPRGEIRTPAFMPVGTGGTVKAMYMDQVRGVGADIILGNTYHLMLRPGAERVARLGGLHEFARWPHPILTDSGGFQVMSLSKLRKLTEQGVTFRSHIDGAPYEMSPERSIEIQGLLDSDIQMQLDECTALPAKPKEIERAMELSLRWAERCKTAFGDQPGKAMFGIVQGGDSAPMRVRSAQALKAMDLKGYAVGGLAVGEPQSVMLEMLDITCPELPADKPRYLMGVGTPDDILKSVARGIDMFDCVMPTRAGRHGLAYTRRGKVNLRNARHADDPRPLDEESDCPAARDYSRAYLHHLVRSQESLGAMLLTWNNLSYYQKLMQDIRAAIEAQAFEASAAEITEGWARGDIPAI

SEQ ID NO: 52305 - protein, 376 aa, Unknown; identical to SEQ ID NO: 52304
  misc_feature (1)..(376): tr|A0A4S0WCC7|A0A4S0WCC7_9BACT Queuine tRNA-ribosyltran sferase OS=bacterium M00.F.Ca.ET.159.01.1.1 OX=2563904 GN=tgt PE=3 SV=1

SEQ ID NO: 52306 - protein, 376 aa, Unknown; identical to SEQ ID NO: 52300
  misc_feature (1)..(376): tr|A0A4S2K0C0|A0A4S2K0C0_9BACT Queuine tRNA-ribosyltran sferase OS=bacterium M00.F.Ca.ET.162.01.1.1 OX=2563905 GN=tgt PE=3 SV=1

SEQ ID NO: 52307 - protein, 376 aa, Unknown; identical to SEQ ID NO: 52298
  misc_feature (1)..(376): tr|A0A4S0ZC26|A0A4S0ZC26_9BACT Queuine tRNA-ribosyltran sferase OS=bacterium M00.F.Ca.ET.163.01.1.1 OX=2563906 GN=tgt PE=3 SV=1

SEQ ID NO: 52308 - protein, 376 aa, Unknown; identical to SEQ ID NO: 52299
  misc_feature (1)..(376): tr|A0A4S0YQH2|A0A4S0YQH2_9BACT Queuine tRNA-ribosyltran sferase OS=bacterium M00.F.Ca.ET.163.01.1.1 OX=2563906 GN=tgt PE=3 SV=1

SEQ ID NO: 52309 - protein, 376 aa, Unknown
  misc_feature (1)..(376): tr|A0A4S1HA55|A0A4S1HA55_9BACT Queuine tRNA-ribosyltran sferase OS=bacterium M00.F.Ca.ET.168.01.1.1 OX=2563907 GN=tgt PE=3 SV=1
MHDKFTFTLKATSDGARLGEVAMPRGVIRTPAFMPVGTVGTVKAMYLDQVRELGADIILGNTYHLMLRPGPERVARLGGLHELIRWPHPILTDSGGFQVMSLSGLRKLDEKGVTFKSHVDGSLHHMSPERSIEIQGLLDSDIQMQLDECIALPAERKEIERAMEMSLRWAERCRVAFGDQPGKAMFGIVQGGDQPDLRIRSAEGLKQLDLKGYAVGGLAVGEPQNVMLGMLDITLPVLPTEKPRYLMGVGTPDDILKSVARGIDMFDCVMPTRSGRHGLAFTRRGKVNIRNARHAEDMRPLDEQSNCPASRDYSRAYLHHLVRANEALGGMLLSWHNLAYYQELMQGIRKSIEEGCFADFYAETIEMWARGDIDPV

SEQ ID NO: 52310 - protein, 376 aa, Unknown; identical to SEQ ID NO: 52298
  misc_feature (1)..(376): tr|A0A4S0R2L1|A0A4S0R2L1_9BACT Queuine tRNA-ribosyltran sferase OS=bacterium M00.F.Ca.ET.177.01.1.1 OX=2563908 GN=tgt PE=3 SV=1

SEQ ID NO: 52311 - protein, 376 aa, Unknown
  misc_feature (1)..(376): tr|A0A4S0R239|A0A4S0R239_9BACT Queuine tRNA-ribosyltran sferase OS=bacterium M00.F.Ca.ET.177.01.1.1 OX=2563908 GN=tgt PE=3 SV=1
MAETFSFKLTATDGRARRGLISMPRGEIRTPAFMPVGTGGTVKAMYMDQVRGVGADIILGNTYHLMLRPGAERIAKLGGLHEFARWPHPILTDSGGFQVMSLSKLRKLTEKGVTFRSHIDGAPYEMSPERSIEIQGLLDSDIQMQLDECTALPAKPTEIERAMELSLRWAERCKTAFGDQPGKAMFGIVQGGDSAVMRVRSAQALKAMDLKGYAVGGLAVGEPQAVMLEMLEITCPELPADRPRYLMGVGTPDDILKSVARGIDMFDCVMPTRAGRHGLAYTRRGKINLRNARHADDPRPLDEESDCPAARDYSRAYLHHLVRSQESLGAMLLTWNNLSYYQRLMQDIRAAIEAQAFEARAAEISEGWARGDIAAI

SEQ ID NO: 52312 - protein, 376 aa, Unknown; identical to SEQ ID NO: 52309
  misc_feature (1)..(376): tr|A0A4S0N219|A0A4S0N219_9BACT Queuine tRNA-ribosyltran sferase OS=bacterium M00.F.Ca.ET.179.01.1.1 OX=2563909 GN=tgt PE=3 SV=1

SEQ ID NO: 52313 - protein, 379 aa, Unknown
  misc_feature (1)..(379): tr|A0A4V3MFI6|A0A4V3MFI6_9BACT Queuine tRNA-ribosyltran sferase OS=bacterium M00.F.Ca.ET.180.01.1.1 OX=2563910 GN=tgt PE=3 SV=1
MPAVTYEHIKTCKQSGARLGIVHTPHGSFETPMFMPVGTKATVKTMSPEELHQMEAKIILGNTYHLWLQPGNDIIKKSGGLHQFMNWNGPILTDSGGFQVFSLSNLRKITEEGVEFRHHTNGSKLFLSPEKSMQIQNDLGSDIMMAFDECPPMPAEYKYVKDSIERTSRWAARCLQAHQRPEDQALFGIIQGGEYKDLRQQSAEELVALDFPGYAIGGLSVGEPKPVMYDMVSHTQQFMPKDKPRYLMGVGSPDALIECSIRGMDMFDCVLPTRIARNGTCMTSHGRVTIKNAKYAEDLGPLDDNCDCYTCKNYSRAYIRHLIKAEETFGIRLTTYHNLHFLLKLMENIRQAIRDDRLLDFKEEFFEQYGLNVENPKNF

SEQ ID NO: 52314 - protein, 391 aa, Unknown; identical to SEQ ID NO: 52301
  misc_feature (1)..(391): tr|A0A4S0ISX3|A0A4S0ISX3_9BACT Queuine tRNA-ribosyltran sferase OS=bacterium M00.F.Ca.ET.191.01.1.1 OX=2563911 GN=tgt PE=3 SV=1

SEQ ID NO: 52315 - protein, 376 aa, Unknown; identical to SEQ ID NO: 52309
  misc_feature (1)..(376): tr|A0A4S0GRP5|A0A4S0GRP5_9BACT Queuine tRNA-ribosyltran sferase OS=bacterium M00.F.Ca.ET.194.01.1.1 OX=2563912 GN=tgt PE=3 SV=1

SEQ ID NO: 52316 - protein, 376 aa, Unknown; identical to SEQ ID NO: 52303
  misc_feature (1)..(376): tr|A0A4V3LP40|A0A4V3LP40_9BACT Queuine tRNA-ribosyltran sferase OS=bacterium M00.F.Ca.ET.199.01.1.1 OX=2563913 GN=tgt PE=3 SV=1

SEQ ID NO: 52317 - protein, 376 aa, Unknown; identical to SEQ ID NO: 52298
  misc_feature (1)..(376): tr|A0A4S0FBP3|A0A4S0FBP3_9BACT Queuine tRNA-ribosyltran sferase OS=bacterium M00.F.Ca.ET.199.01.1.1 OX=2563913 GN=tgt PE=3 SV=1

SEQ ID NO: 52318 - protein, 376 aa, Unknown; identical to SEQ ID NO: 52300
  misc_feature (1)..(376): tr|A0A4R9ZKZ2|A0A4R9ZKZ2_9BACT Queuine tRNA-ribosyltran sferase OS=bacterium M00.F.Ca.ET.205.01.1.1 OX=2563914 GN=tgt PE=3 SV=1

SEQ ID NO: 52319 - protein, 376 aa, Unknown; identical to SEQ ID NO: 52299
  misc_feature (1)..(376): tr|A0A4R9UGA3|A0A4R9UGA3_9BACT Queuine tRNA-ribosyltran sferase OS=bacterium M00.F.Ca.ET.221.01.1.1 OX=2563915 GN=tgt PE=3 SV=1

SEQ ID NO: 52320 - protein, 376 aa, Unknown; identical to SEQ ID NO: 52299
  misc_feature (1)..(376): tr|A0A4R9UWR4|A0A4R9UWR4_9BACT Queuine tRNA-ribosyltran sferase OS=bacterium M00.F.Ca.ET.222.01.1.1 OX=2563916 GN=tgt PE=3 SV=1

SEQ ID NO: 52321 - protein, 376 aa, Unknown; identical to SEQ ID NO: 52299
  misc_feature (1)..(376): tr|A0A4R9TVX4|A0A4R9TVX4_9BACT Queuine tRNA-ribosyltran sferase OS=bacterium M00.F.Ca.ET.227.01.1.1 OX=2563917 GN=tgt PE=3 SV=1

SEQ ID NO: 52322 - protein, 391 aa, Unknown; identical to SEQ ID NO: 52301
  misc_feature (1)..(391): tr|A0A4R9RD40|A0A4R9RD40_9BACT Queuine tRNA-ribosyltran sferase OS=bacterium M00.F.Ca.ET.228.01.1.1 OX=2563918 GN=tgt PE=3 SV=1

SEQ ID NO: 52323 - protein, 379 aa, Unknown; identical to SEQ ID NO: 52313
  misc_feature (1)..(379): tr|A0A4R9ST31|A0A4R9ST31_9BACT Queuine tRNA-ribosyltran sferase OS=bacterium M00.F.Ca.ET.229.01.1.1 OX=2563919 GN=tgt PE=3 SV=1

SEQ ID NO: 52324 - protein, 376 aa, Unknown
  misc_feature (1)..(376): tr|A0A4R9S1U0|A0A4R9S1U0_9BACT Queuine tRNA-ribosyltran sferase OS=bacterium M00.F.Ca.ET.230.01.1.1 OX=2563920 GN=tgt PE=3 SV=1
MAETFSFKVLASDGKARRGLVSMPRGEIRTPAFMPVGTGGTVKAMYMDQVRGVGADIILGNTYHLMLRPGAERVARLGGLHEFARWPHPILTDSGGFQVMSLSKLRKLTEQGVTFRSHIDGAPYEMSPERSIEIQGLLDSDIQMQLDECTALPAKPKEIERAMELSLRWAERCKTAFGDQPGKAMFGIVQGGDSAPMRVRSAQALKAMDLKGYAVGGLAVGEPQSVMLEMLDITCPELPADKPRYLMGVGTPDDILKSVARGIDMFDCVMPTRAGRHGLAYTRRGKVNLRNARHADDPRPLDEESDCPAARDYSRAYLHHLVRSQESLGAMLLTWNNLSYYQKLMQDIRAAIEAQAFEARAAEITEGWARGDIPAI

SEQ ID NO: 52325 - protein, 378 aa, Unknown
  misc_feature (1)..(378): tr|A0A4R9RZ72|A0A4R9RZ72_9BACT Queuine tRNA-ribosyltran sferase OS=bacterium M00.F.Ca.ET.230.01.1.1 OX=2563920 GN=tgt PE=3 SV=1
MQFTLHKTATGESRARRGTVHLAHGDVQTPAFMPVGTYGTVKGMLPRDIHEIGAEIILGNTFHLWLRPTTDVIDKFGGLHDFIGWNKPILTDSGGFQVFSLGAMRKIVEEGVHFRSPIDGAKVFLSPEISMQIQYSLNSDIVMQFDECTPYPATPSEADTSLELSLRWGERCKNAHEKLGNQNALFGIIQGSMYRNLREKSLEGLLAIGFDSYAIGGLSVGEPKEEMMAVLDYLPDDMPADKPRYLMGVGKPEDIVEAVRRGVDMFDCVMPTRNARNGHYFTTFGAVKIKNAVHRFDQSPLDSECDCYTCQNFSRAYLHHLFKCNEMLSAQLGTIHNLRYYQRLMTDIRQSIEDDKFDAFVDTFYQQQNLPKPDLHLT

SEQ ID NO: 52326 - protein, 391 aa, Unknown
  misc_feature (1)..(391): tr|A0A5J4E255|A0A5J4E255_9BACT Queuine tRNA-ribosyltran sferase OS=bacterium MnTg02 OX=2080452 GN=tgt PE=4 SV=1
MSAEPESRNAVSKPIHFHLEATDQAARLGAISTSHGVIRTPAFMPVGTAATVKAMFPECVKATGTDVLLGNTYHLMLRPGAERVARLGGLHQFMNWNGPILTDSGGFQVMSLAKLRKISEQGVIFQSHIDGATHELTPERSIEIQVLLGADIVMAFDECTPFPCKREEAQESMELSMRWAERSKTAFGSQTHHALYGIVQGGIHPDLRERSAKALLDIGFDGYAVGGLAVGEGQEMMLKTLEQTVPCLPADKPRYLMGVGTPDDILSAVERGIDMFDCVMPTRSGRHGQAFTWEGRVNLRNAVHADDPRPLDAASACPAANSYSRAYLHHLVKSGEYLAAMLLTWANVHFYQDFMQAIRTAIAENRFQDFARETRARLGSQDEDRGGAPVI

SEQ ID NO: 52327 - protein, 371 aa, Unknown
  misc_feature (1)..(371): tr|A0A5J4EBG2|A0A5J4EBG2_9BACT Queuine tRNA-ribosyltran sferase OS=bacterium MnTg04 OX=2080454 GN=tgt PE=4 SV=1
MKFELLAADGDARLGRMSFARGIVDTPAFMPVGTYGAVKTMTAEELTDLGTQIILGNTFHLMLRPGAAVIEKHGGLHRFMHWDGPILTDSGGFQVWSLAPLRKITPQGVRFRSPVDGGEIFLSPEKSMEVQHALAADIVMVFDECTPHPASFGQAQASMELSLGWAEKCRRRFDELKKSSADEALFGIVQGGMYPDLRQVSLAGLTRLDFDGYALGGLSVGESEEQRSMVLETTVPLMPADKPRYLMGVGTPADIVRAVARGIDMFDCVMPTRHARNGYLFSSEGVLKIRNARFREDDAPIDPACDCYTCKHYSRGYLRHLDACGEMLGARLNTIHNLHFYQQLMTRIRTLIGEGRFADFARKFPAGVQAV

SEQ ID NO: 52328 - protein, 384 aa, Unknown
  misc_feature (1)..(384): tr|A0A4S1M983|A0A4S1M983_9BACT Queuine tRNA-ribosyltran sferase OS=bacterium NHP-B OX=2491344 GN=tgt PE=3 SV=1
MDLYPHFRFDITHQSTKSGARVGTLTTPHGTLSTPAFIFCATKASLKGVSTAALREAGVPIILSNTYHLMLQPGAELIQRLGGLHKFMNWSGPLLTDSGGFQIFSLGHGHVTDEIKGRARAPKKNCLRICEDGVTFTSYRDGQKHHLTPEKSIDIQQKLGADLIVSFDECTPYHVSEAYTEKSMRLSTRWGKRCLDFFTQHNHHTQALYSVIQGGIYPHLRQESADFANQHAFFGHAIGGSLGASTAQMNEVVDMTTSYLDKKRPIHLLGIGKLHDIETHIQRGIDTFDCVHPTRLARHGGALMCPHTHGKDHLNIKNAQYRTDDTPLDKQCPCPTCKHYSRAYLHHLFKAGEILGPIALTQHNVAFMVSWMERLKGEILANRI

SEQ ID NO: 52329 - protein, 358 aa, Unknown
  misc_feature (1)..(358): tr|A0A132H4M3|A0A132H4M3_9BACT Queuine tRNA-ribosyltran sferase OS=bacterium P201 OX=1768112 GN=tgt PE=3 SV=1
MSTDHGPIETPIFMPVGTAGTVKACHLRDVRDEVKAQIILGNTYHLYLRPGLDVLEAAGGLHKFNGWDRPILTDSGGFQVFSLTGIRKMKEEGVTFQSHIDGSRHLFTPENVMDIQRSIGADIMMAFDECTPGTADYHYAKPSMERTHRWLDRCIDRFNATQPKYGFEQALFPIVQGCVYRDLREQSAEYIASKNAAGNAIGGLAVGEPTEVMYEMIELVNAILPKDRPRYLMGVGTPANILESISRGVDMFDCVMPTRNGRNGMIFTSEGIINLKNEKWKYDFSPVDPNGETFVDAQYTRAYLRHLFVAGEILGPMIASLHNIGFYLWLVRESRKHIIAGDFAEWRDVMLKKVTTRL

SEQ ID NO: 52330 - protein, 374 aa, Unknown
  misc_feature (1)..(374): tr|A0A4Q2RDS0|A0A4Q2RDS0_9BACT Queuine tRNA-ribosyltran sferase OS=bacterium RmlP001 OX=2316527 GN=tgt PE=3 SV= 1
MTADFRYELLGQDGAARTGLIHTGRGPIRTPAFMPVGTAGTVKAMYMDQVRDLGADIVLGNTYHLMVRPGAERVAELGGLHGFSTWAGPILTDSGGFQVMSLAKLRKLDETGVTFQSHIDGSKHRLTPERSMEIQALLGSDIQMQLDECVRLPAPDAEVERAMLLSLRWAERSLQAFDARPGRACFGIVQGGTVPALRVESAKRLAAMPFGGLAIGGLAVGEPQADMLATIEAVEPHLPAGKPRYLMGVGTPDDLVEAVRRGVDMFDCVMPTRAGRHGLAYTRFGKVNLRNARHAADPRPLDAASDCPAARDYSRAYLHHLVKSDEILGMMLLTWVNLSYYQALMAGLRAAIAARSLDGFVAETKAGWAAGLGD

SEQ ID NO: 52331 - protein, 380 aa, Unknown
  misc_feature (1)..(380): tr|A0A4Q2U9N4|A0A4Q2U9N4_9BACT Queuine tRNA-ribosyltran sferase OS=bacterium RmlP026 OX=2316528 GN=tgt PE=3 SV= 1
MTADTRQDLPFRYEHLGQDGAARTGLIHTGRGTIRTPAFMPVGTAGTVKAMYMGQVRELGADIVLGNTYHLMVRPGAERVAELGGLHRFSTWSGPMLTDSGGFQVMSLAKLRKLDETGVTFQSHIDGSKHALTPERSMEIQALLGSDIQMQLDECVRLPAPDAEVERAMLLSLRWAERSLKAFEAKPGRACFGIVQGGTVAALRVESAKQLAAMPFGGIAIGGLAVGEPQADMLAAIETVEPHLPADKPRYLMGVGTPDDLVEAVRRGVDMFDCVMPTRAGRHGLAYTRFGKVNLRNARHAADPRPLDEASDCPAARDYSRAYLHHLVKSDEILGMMLLTWVNLSYYQSLMAGLRAAIAARRLDDVVAETKAGWDRGLGD

SEQ ID NO: 52332 - protein, 394 aa, Unknown
  misc_feature (1)..(394): tr|A0A177PX31|A0A177PX31_9BACT Queuine tRNA-ribosyltran sferase OS=bacterium SCGC AG-212-C10 OX=1799370 GN=tgt PE=3 SV=1
MPGVTFSFRLTSTPSGPVAPRTGVITTARGEIQTPVIMPVGTLATVKSLSPQDVAATNAEILLVNAYHLYLRPGHDLVARLGGVHRFMDWPGPILSDSGGFQVFSLARLGKVSEEGVRFRSHIDGSEHFYTPELAMAVQRSLGVDIAMPLDHVLPGTAELGPAEEAAQRTLRWYERCRQSAGGTATFAIIQGGTHTALRRWHARELRALDPPGFSIGGLSVGESKQDMWAMTEAVTSELPVDKPRYLMGVGSPEDLVNGVMRGVDMFDCVLATRLGRNGSLFTDDGRLNLRNARYREDPGAADPGCDCVACRRFTLAYLHHLFRNEELLGYRLASIHNIRYLVRLMERMRGAIRERTAEAFARTFLERYRVVDHTVRGEQKDKWLQQSAFEPGS

SEQ ID NO: 52333 - protein, 371 aa, Unknown
  misc_feature (1)..(371): tr|A0A0S8JGH8|A0A0S8JGH8_9BACT Queuine tRNA-ribosyltran sferase OS=bacterium SM23_57 OX=1703763 GN=tgt PE=3 SV= 1
MKQVFSFERQATQDRARACTFRTPHGDFQTPVFAPVGTQASVKSLTPRHLHEIQSSLILANTYHLYLRPGVDVVAEMGGLHDFMGWQKPILTDSGGFQVFSLAGINHIDDDGVTFKSHIDGSIHRLTPEKAITIQEKLGADIIMAFDECAEPYDRSYNLLAMERTHTWAQRCLEAKSRSDQALFGIVQGGIFPDLREESATYIGNQYFDGIAIGGLSVGETKDEMHAVLEVVDSILPEDKPRYLMGVGTPEDIVNSVMRGIDIFDCVLPTRLARHKAAFTTGGRINLSKAEHIKSTLPIDKSCTCYTCQNFTRAYLRHLILAKEMLASTLLSIHNLHTLINLTKEIRKSIIEGRFDKFVQEFFQKPKSDQV

SEQ ID NO: 52334 - protein, 377 aa, Unknown
  misc_feature (1)..(377): tr|A0A3R7VES2|A0A3R7VES2_9BACT Queuine tRNA-ribosyltran sferase OS=bacterium TMED144 OX=1986778 GN=tgt PE=3 SV= 1
  misc_feature (103)..(103): Xaa can be any naturally occurring amino acid
  misc_feature (238)..(238): Xaa can be any naturally occurring amino acid
MQFNLLNQDPKSSARLGSVSTHHSTFETPIFMPVGTQASVKTIDPEYLHKSGTEIILSNTYHLYLRPGQELINQAGGLHNFMGWNKSILTDSGGFQVFSLAKXNKITDEGVEFQSHLDGSKHFLTPELSMRIQRNLGSDILMSFDHCPPSSHDKKNIELSVSRTTKWTKNCIDYLSENDPLYDWDQSFFPIVQGGIFPDLRKRSALELIPMAKCGIAIGGLAVGEEKSAMFEMISLLXEILPIDQPRYLMGVGRPTDLIKAISLGVDMFDCVMPTRNARNGQLFTSDGIINIENAKYKNSMIEVDKNCDCYTCKNFSRAYLRHLFNVKEMLGLRLATIHNLSYYANLMKKTKEEIKNNNFSNWSNDYISKMVYHNGM

SEQ ID NO: 52335 - protein, 377 aa, Unknown
  misc_feature (1)..(377): tr|A0A1Z9KN29|A0A1Z9KN29_9BACT Queuine tRNA-ribosyltran sferase OS=bacterium TMED181 OX=1986654 GN=tgt PE=3 SV= 1
MTAGFDFQVEARCESARAGVLTTPRGQVQTPVFMPVGTQGTVKGVTPDQLTDCGTQIVLSNTYHLAVRPGVDTVRTLGGLHQVMGWDRPILTDSGGFQVFSLGHRNRISEQGVEFRNHIDGSPLLLTPESVLDIQAGLGSTIAMILDECPAGGVSRDEVARAVVRTHRWALRAHEHRQRLDLREPMAVFGIMQGGTHEDLRRESAEQLLEIPFDAYAVGGVSVGEGREALLSTIGLSAPLLPFDRPRYLMGVGGLEEFIVAVDRGIDMFDCVIPTRNARNASLFLSDGTHLNMKNARHRQDPGPIEEGCDCLACRRFSRGTLHHLYQRKEILAYTLGSLHNIRVFHRFLENAREAILSGHWLSFRDEFLGALSSRSG

SEQ ID NO: 52336 - protein, 377 aa, Unknown
  misc_feature (1)..(377): tr|A0A1Z9LZ06|A0A1Z9LZ06_9BACT Queuine tRNA-ribosyltran sferase OS=bacterium TMED198 OX=1986779 GN=tgt PE=3 SV= 1
MKQSIFTILSKCSNTSAREGVVKTDNGDIHTPVFMPVGTYGAVKTLSYKNLEQISSSIILGNTYHLYIRPGNEIIAKHGGLHKFINWKKPILTDSGGFQVFSLRGKRKISEEGVTFQSHLDGSSHLFTPESVVETQRILGSDFMMMLDVCPPGDADFKTWEKALNITTRWAKRGMDHFNKTKDLYGHSQVLVPIIQGGTNKDLRIKSANELLALDSPLYAIGGLAVGEPKEEMLNSIEVVNDIIPKEKPRYLMGVGTPTDLVQAVARGVDMFDCVMPSRNARNGQLFTRNGKVNIRNSKYKNDTNPIDIESKSDLSLNYSKGYLHHLFKIEEMLGYTIATLHNLSFYLDLMSKIRSQINNGTFSYWSKEFISNYEGK

SEQ ID NO: 52337 - protein, 360 aa, Unknown
  misc_feature (1)..(360): tr|A0A424SBI7|A0A424SBI7_9BACT Queuine tRNA-ribosyltran sferase OS=bacterium TMED221 OX=1986656 GN=tgt PE=3 SV= 1
MSNLNFKIINTDGNARAGILNVNNKNVLTPTFMPVATKGALKSTPHEMLDKTTVLLANTYHLYLRPGAEIINDLGGLHRFMNWDNLILTDSGGFQGWSLPTKKVESGIQFKNVYDGSSFLMTPELSIKTQNLLGSDIAMIFDYVVDIDANNYLQNEAIQTTEHWAKIAKQVHNNNNQALFGIVQGGLVEEYREKSALSMVNLDFDGYAIGGLALGESREDRKSIVNFTTDFLPLEKPRYVMGLGDTLGLIDLISEGIDMFDCVWPARLARHGKLITGNTYINIKNQKFASDPRPIDDYCPCFTCKNYSRAFLKHLLKNEQTTAWLYLTIHNLIQTEIMLDEARKSILESDFENFKKRYIK

SEQ ID NO: 52338 - protein, 377 aa, Unknown
  misc_feature (1)..(377): tr|A0A1Z9RWB4|A0A1Z9RWB4_9BACT Queuine tRNA-ribosyltran sferase OS=bacterium TMED250 OX=1986657 GN=tgt PE=3 SV= 1
  misc_feature (59)..(59): Xaa can be any naturally occurring amino acid
MKFSILAKDSNSSGRYGEISTDHSTFKTPVFMPVGTSAAVKTIDPKLLKNQDIGIILSXTYHLYIRPGHEIIRSAGGLHKFMNWDNSILTDSGGFQVFSLAKLNKISDDGVKFQSHIDGSTHFFSPELSMDIQRFLGTDIIMAFDECPPANVEKSVVSSAVDRTHDWIKKCKAHLKKSKPLYSWSQTLFPIVQGGIYPDLRKKSLEQLTSYADCGIAIGGLAVGEDKTAMLDVIEFMDDYLPKDQPRYLMGVGRPTDLIKAIQRGIDMFDCVIPTRNARNGQLFTSDGIVNIGNGEYKKSFEQIDKKCNCYTCTNFSKAYLRHLFNIGEVLGLRLATIHNLHYYNNLMLTVRDKIQSNIFHDWSKSYLKEMEYHDGM

SEQ ID NO: 52339 - protein, 378 aa, Unknown
  misc_feature (1)..(378): tr|A0A1Z9SN09|A0A1Z9SN09_9BACT Queuine tRNA-ribosyltran sferase OS=bacterium TMED264 OX=1986658 GN=tgt PE=3 SV= 1
MLKFSIHKIDSQCRARTGSINNDHGKIETPVFMPVGTVGAVKTFSPEELECFNSEIILGNTYHLFLRPGIEVIHKAGGLHAFTSWQRPILTDSGGFQVFSLAKLNKISDDGVEFQSHIDGSRHFLSPEISMKIQRNLGADIIMAFDECPPGNSNLNILKNAVNRTSSWMKRCSKWLQDNPPFYKYGQTIFPILQGGIDKELRKQSIDELLPYAKCGIAIGGLAVGEEKQAMMDTIEHCTEFLPTFQPRYLMGVGKPTDIIKAVKRGVDMFDCVMPTRNGRNGHIFTSNGVINIRNQKYKEDLSPLDSNSSHKWGKQFSKAYVRHLFNINEVLGIRIASTLNLAYYQNLMLIIRKEINNSTFNDWSQIILREMRNMKGM

SEQ ID NO: 52340 - protein, 377 aa, Unknown
  misc_feature (1)..(377): tr|A0A424SIK0|A0A424SIK0_9BACT Queuine tRNA-ribosyltran sferase OS=bacterium TMED46 OX=1986782 GN=tgt PE=3 SV=1
  misc_feature (54)..(54): Xaa can be any naturally occurring amino acid
  misc_feature (103)..(103): Xaa can be any naturally occurring amino acid
  misc_feature (108)..(108): Xaa can be any naturally occurring amino acid
  misc_feature (122)..(122): Xaa can be any naturally occurring amino acid
MKFSLKKTDPNSNARTGILYTGHGEIETPVFMPVGTVGAVKTFTPEELKDINSXIILGNTYHLYLRPGTPIIERAGGLHSFISWDRPILTDSGGFQVFSLARXNKISXEGVAFQSHLDGSKXLFTPEISMKIQRDLGSDIIMAFDECPPGKSSLETVKNAVRRTTDWMSRCHKWLSKNPERYSHEQAIFPIIQGGTHHSLRLQSAEQLISYSTIGMAIGGLAVGEEKDAMLDTVEYCDSILPKDQARYLMGVGKPSDILAAVNRGVDMFDCVMPTRNGRNGHIFTSKGVINIRNEKFKEDLGPVDNESSHPWGQKFSRSYVRHLFNINEVLGLRIASTLNLVYYHDLMKRIKNEIVKGNFNNWSKETLNKMKDMKGM

SEQ ID NO: 52341 - protein, 375 aa, Unknown
  misc_feature (1)..(375): tr|A0A1Z8L1H5|A0A1Z8L1H5_9BACT Queuine tRNA-ribosyltran sferase OS=bacterium TMED6 OX=1986783 GN=tgt PE=3 SV=1
MSIFNIKHQSKKSSARTGILKTAHGTINTPFFMPIATYGAVKTQSSSDIKKLPSDILLSNTYHLYIRPGTDILEKAGGLHKFMNWNDIILTDSGGYQVYSLQGMRKITDDGVTFQSHLDGSKHHFTPEKVVDIQRSIGSDIMMMLDVCPPGDANKKEWVEALNLTTKWAMRAKKYYDQTKPLYGHHQIISPIVQGGTDLNLRKQSAMELIDINCDMYAIGGLAVGEPKEEMLKVVNYMDTILPKEKPRYLMGVGTPADLVENILNGVDMFDCVMPTRNARNSQLFTFNGKVNIKNSKYKDDFSPIDGNDFSLMSTQYSKAYLHHLFKTNEILGLRIATQHNLKFYMHLMNEIRKKINADCFEGWAKDFLCRYNNE

SEQ ID NO: 52342 - protein, 377 aa, Unknown
  misc_feature (1)..(377): tr|A0A1Z8ZAY2|A0A1Z8ZAY2_9BACT Queuine tRNA-ribosyltran sferase OS=bacterium TMED80 OX=1986784 GN=tgt PE=3 SV=1
  misc_feature (135)..(135): Xaa can be any naturally occurring amino acid
  misc_feature (146)..(146): Xaa can be any naturally occurring amino acid
  misc_feature (180)..(180): Xaa can be any naturally occurring amino acid
  misc_feature (225)..(225): Xaa can be any naturally occurring amino acid
  misc_feature (232)..(232): Xaa can be any naturally occurring amino acid
  misc_feature (236)..(236): Xaa can be any naturally occurring amino acid
MNFSITTQDKKTSARTGLIKTEHGDIQTPVFMPVGTIGAVKTFSPHELEGLGADIILGNTYHLYLRPGTEVINHAGGLHKFSNWTRPILTDSGGFQVFSLANLNKINDDGVEFQSHLDGSYHTITPEISMQIQRXLGSDIIMAFDXCPPGKSELDEVTKAVKRTNEWFIRCKNYLKDNPXLYKHSQTLFPIIQGGINHKMREMSIEGLVPQADFGIAIGGLAVGXEKNAMFXTIEXCDSLLPKDRPRYLMGVGRPTDIVKAIRRGVDMFDCVMPTRNGRNGQIFTSNGTINITNEKYKDDHSFIDENSNHAFGRMFTKAYIRHLFGVKEILGLRIASTLNLSFYISLIKKIQEVIHLGEFDSWSTSWLNEMKYHRGM

SEQ ID NO: 52343 - protein, 380 aa, Unknown
  misc_feature (1)..(380): tr|A0A1Z9AXH9|A0A1Z9AXH9_9BACT Queuine tRNA-ribosyltran sferase OS=bacterium TMED88 OX=1986661 GN=tgt PE=3 SV=1
MKASGFLLRIENTEGEARTGTLTTPHGRVSTPAFMPVATFGAVRGISAADLQSVGAQILLSNTYHLHERPGEETVASLGGLHGFTGWSGPWLTDSGGYQVTSLSDRMKIDEDGVIFASPLDGKKRRLSPEGVIQIQESLGSDIAMVLDECLPALQKDSPEENRTRMEAAMMRSLRWAERAARARRSEAQAVFGIVQGGIDETLRQQSAEELTRIGFDGAAHGGLGLGESRAQRMEAVRVAHSVLPSDQPRYLMGLGRPIDLIDGIACGIDLFDCVVPTRNGRHGLLFTSQGILSLKNAVYRSDERPIDPNCDCPACVGHSRGYLRHLFKCGEALAPRLAALHNLRFYLSLLEQSRQAISEGGFAAFRSEMATRLEHRLAD

SEQ ID NO: 52344 - protein, 379 aa, Unknown
  misc_feature (1)..(379): tr|A0A1Z9BCK6|A0A1Z9BCK6_9BACT Queuine tRNA-ribosyltran sferase OS=bacterium TMED88 OX=1986661 GN=tgt PE=3 SV=1
MSFDYALEATSGQARAGRFNTPHGPIQTPTFMPVGTHGAIKAMTPDQVQATGAQVVLANTYHLALRPGEGLVEKLGGLHAFMQWPGPILTDSGGFQVFSLPSAQINDRGVRFTNEVNGDTMDLTPERAMEIQNTLGADIIMAFDECTPYPATRKLAATGVRRTLMWMERCLAAHQRADQALFPIVQGSTFPELREECAKELVAMDSPGYAIGGVSVGEGHELLCEVTRHAAPLLPDNKPRYLMGVGLPEDLIACVGFGIDMFDCVIPTRYARSATVFTARGRIRLTHRRYRRDTYPIDPSCECYACQDGRFSRAYLHHLFNANEVLSAILCSIHNVHFYTQLMTSARNAILAGRYPEFASRFLEGYQRDSKKPSKARGR

SEQ ID NO: 52345 - protein, 143 aa, Unknown
  misc_feature (1)..(143): tr|A0A355TP28|A0A355TP28_9BACT tRNA guanosine(34) trans glycosylase Tgt (Fragment) OS=bacterium UBP9_UBA11836 O X=2060920 GN=tgt PE=4 SV=1
MRYELGTEARLGRIDTPHGSIETPEFLPVGTLATVKGLMPKQLEELGVQGMLSNTYHLFLRPGSDIVEEMGGLHKFMNWKRPVMTDSGGFQAFSLGAARQLGIGKIGVFPGNGADISLKKGDAYKPLAHIDEDGVVFRSFLDG

SEQ ID NO: 52346 - protein, 182 aa, Unknown
  misc_feature (1)..(182): tr|A0A355TPQ1|A0A355TPQ1_9BACT tRNA guanosine(34) trans glycosylase Tgt (Fragment) OS=bacterium UBP9_UBA11836 O X=2060920 GN=tgt PE=4 SV=1
FLDGSKHRLNPEISIRIQEQLGADIILAFDECTSPAASYEYTAMSLERTHRWAVRSLEARRDTPQALYGIVQGGEWQDLREKSVEFISSLPFQGFDIGGSLGKSKHDMHKVLDWTIPGLPHNKPRHLLGIGEVDDLFEGVQRGIDTFDCVIPTRFARTSNLFVPYDVPGANKRGTLVLRNAE

SEQ ID NO: 52347 - protein, 394 aa, Unknown
  misc_feature (1)..(394): tr|A0A0A1PVK1|A0A0A1PVK1_9BACT Queuine tRNA-ribosyltran sferase OS=bacterium YEK0313 OX=1522316 GN=tgt PE=3 SV= 1
MSHRPDLATPDAASGERAAFAFRIDGRDGAARTGLITTPRGAIRTPAFMPVGTQGTVKGMYMDQVRALGADVILGNTYHLMLRPGAERIAALGGLHRFGGWTGPILTDSGGFQVMSLSKLRKLDERGVTFASHIDGSRFDLTPERSVEIQGLLGSDIQMQLDECVALPNERAAIDRAMRLSIRWAERSKRAFESQPAGRALFGIVQGGDQPDLRVESAKALAGMDFPGYSIGGLAVGEPQAVMLAMIEEVMPHLPDGKPHYLMGVGTPDDLLASVARGIDMFDCVMPTRNGRHGQAFTRFGKLNFRNARHADDPRPVDETSSCPAARDYSRAYLHHLVRTEEMLGAMLVTWINLAYYQDLMAGARAAIAAGRFADYAAEVREGWKRGDIAPHAG

SEQ ID NO: 52348 - protein, 376 aa, Bacteroidaceae bacterium
  misc_feature (1)..(376): tr|A0A5C6HPI6|A0A5C6HPI6_9BACT Queuine tRNA-ribosyltran sferase OS=Bacteroidaceae bacterium HV4-6-C5C OX=260030 9 GN=tgt PE=3 SV=1
MTFELQYTDSKSNARAGLISTDHGQIQTPIFMPVGTAGSVKGVHQTELKEDIKAQIILGNTYHLYLRPGLDVIENAGGLHKFNGFDRPMLTDSGGFQVFSLSSIRKLREEGAEFRSHIDGSKHVFTPEKVMDIERTIGADIMMAFDECPPGTSDYQYAKKSLGLTHRWLDRCIKRFNETEPKYGYHQALFPIVQGCVYPDLRKQSAEFVASKEAEGNAIGGLAVGEPVEKMYEMIEVVNEILPKDKPRYLMGVGTPVNILEGIERGVDMFDCVMPTRNGRNGMLFTKDGIINMRNKKWEMDFSPIEADGASIVDTLYNKAYLRHLFHAQELLAMQIASIHNLAFYLWLVGEARKHIIAGDFSVWKPMMVKRVSTRL

SEQ ID NO: 52349 - protein, 376 aa, Bacteroidales bacterium
  misc_feature (1)..(376): tr|U5Q718|U5Q718_9BACT Queuine tRNA-ribosyltransferase OS=Bacteroidales bacterium CF OX=1400053 GN=tgt PE=3 SV =1
MRYEKIARDQESSASCGLLHTDHGVIETPIFMPVGTAGTVKAVYHRDLKEDIKAQIILGNTYHLYLRPGTDIINKAGGLHKFISWDRPILTDSGGYQVFSLAENRKLTHDGCTFRSHIDGSKHLFTPENVVEIQRLIGADIIMALDECPPGDSDHKYAKSSLQLTKQWLERGVVHFDKTEPLYGYSQSFFPIVQGCVYPDLRVEAAEHAVSLDREGYAIGGLSVGEPTEQMYQMLEVLDPILPKDKPRYLMGVGTPANILEGIARGVDMFDCVMPTRNARNGMLFTSGGIINIRNKKWADDFSPIDENGTSFVDKCYSRSYLRHLFISSEILGAQIASEHNLAFYLWLVDQARLHIKAGDFVTWKNSMVKKLETRL

SEQ ID NO: 52350 - protein, 376 aa, Bacteroidales bacterium
  misc_feature (1)..(376): tr|A0A4S4H8K0|A0A4S4H8K0_9BACT Queuine tRNA-ribosyltran sferase OS=Bacteroidales bacterium OX=2030927 GN=tgt PE =3 SV=1
MDFKIEATAPHTNARAGEITTDHGKIPTPIFMPVGTVGSVKAVHMRELRDDIDAKIILGNTYHLYLRPGLDILRNAGGLHKFNGWERPILTDSGGFQVFSLSSNRKLKEEGAWFRSHIDGSKHLFTPEGVVDIQRVIGADIMMALDECTPGTADLDYAKKSLALTQRWLERGWKRYKETEGLYGYRQAYFPIVQGCVYPELRREAAKHIADLGAEGNAIGGLAVGEPTEKMYEMIEVVNDILPTDKPRYLMGVGTPANILEAIDRGVDMMDCVMPTRNGRNGMLFTRNGIMNMRNKKWADDYSPLDEGGAAWVDEVYSKAYVRHLFVSQELLAMQIASVHNLAFYLWLVKEARRHIIAGDFKSWKTEMVERVTRRL

SEQ ID NO: 52351 - protein, 376 aa, Bacteroides acidifaciens
  misc_feature (1)..(376): tr|A0A4Y9GTG3|A0A4Y9GTG3_9BACE Queuine tRNA-ribosyltran sferase OS=Bacteroides acidifaciens OX=85831 GN=tgt PE= 3 SV=1
MTFDLQYTDTKSNARTGLITTDHGQIQTPIFMPVGTLGTVKGVHQTELKEDIQAQIILGNTYHLYLRPGLEVIEKAGGLHRFNGFDRPMLTDSGGFQVFSLAGIRKLREEGAEFRSHIDGSKHIFTPEKVMDIERTIGADIMMAFDECPPGDSDYAYAKKSLGLTHRWLDRCIKRFNETEPKYGYNQSLFPIVQGCVYTDLRKQSAEFVASKGADGNAIGGLAVGEPVDKMYEMIEVVNEILPKDKPRYLMGVGTPVNILEGIERGVDMFDCVMPTRNGRNGMLFTKDGIINMRNKKWEMDFSPIEADGASSVDTLYTKAYLRHLFHAQELLAMQIASIHNLAFYLWLVGEARKHIIAGDFSTWKPMMVKRVSTRL

SEQ ID NO: 52352 - protein, 376 aa, Bacteroides acidifaciens
  misc_feature (1)..(376): tr|A0A3L7Z8R5|A0A3L7Z8R5_9BACE Queuine tRNA-ribosyltran sferase OS=Bacteroides acidifaciens OX=85831 GN=tgt PE= 3 SV=1
MTFDLQYTDTKSNARAGLITTDHGQIQTPIFMPVGTLGTVKGVHQTELKEDIQAQIILGNTYHLYLRPGLEVIEKAGGLHRFNGFDRPMLTDSGGFQVFSLAGIRKLREEGAEFRSHIDGSKHIFTPEKVMDIERTIGADIMMAFDECPPGDSDYAYAKKSLGLTHRWLDRCIKRFNETEPKYGYNQSLFPIVQGCVYTDLRKQSAEFVASKGADGNAIGGLAVGEPVDKMYEMIEVVNEILPKDKPRYLMGVGTPVNILEGIERGVDMFDCVMPTRNGRNGMLFTKDGIINMRNKKWEMDFSPIEADGASSVDTLYTKAYLRHLFHAQELLAMQIASIHNLAFYLWLVGEARKHIIAGDFSTWKPMMVKRVSTRL

SEQ ID NO: 52353 - protein, 376 aa, Bacteroides caccae
  misc_feature (1)..(376): tr|R5UWU9|R5UWU9_9BACE Queuine tRNA-ribosyltransferase OS=Bacteroides caccae CAG:21 OX=1263037 GN=tgt PE=3 SV= 1
MTFELQYTDTKSNARAGLITTDHGQIQTPIFMPVGTLGTVKGVHLTELKEDIRAQIILGNTYHLYLRPGLEVIEKAGGLHRFNGFDRPMLTDSGGFQVFSLAGIRKLREEGAEFRSHIDGSKHIFTPEKVMDIERTIGADIMMAFDECPPGDSDYAYAKKSLGLTHRWLDRCIQRFNETEPKYGYNQSLFPIVQGCVYPDLRKQSAEFVASKGADGNAIGGLAVGEPVDKMYEMIEIVNEILPKDKPRYLMGVGTPVNILEGIERGVDMFDCVMPTRNGRNGMLFTKDGIINMRNKKWEMDFSPIEVDGASSVDTLYSKAYLRHLFHAQELLAMQIASIHNLAFYLWLVGEARKHIIAGDFSTWKPMMVKRVSTRL

SEQ ID NO: 52354 - protein, 376 aa, Bacteroides caccae; identical to SEQ ID NO: 52353
  misc_feature (1)..(376): tr|A0A174LCJ2|A0A174LCJ2_9BACE Queuine tRNA-ribosyltran sferase OS=Bacteroides caccae OX=47678 GN=tgt PE=3 SV=1

SEQ ID NO: 52355 - protein, 376 aa, Bacteroides caecimuri
  misc_feature (1)..(376): tr|A0A4S2CF67|A0A4S2CF67_9BACE Queuine tRNA-ribosyltran sferase OS=Bacteroides caecimuri OX=2516958 GN=tgt PE=3 SV=1
MTFELQYTDTKSNARAGLITTDHGQIQTPIFMPVGTLGTVKGVHLTELKEDIQAQIILGNTYHLYLRPGLDVIEKAGGLHRFNGFDRPMLTDSGGFQVFSLAGIRKLREEGAEFRSHIDGSKHIFTPEKVMDIERTIGADIMMAFDECPPGDSDYEYAKKSLGLTHRWLDRCIQRFNETEPKYGYKQALFPIVQGCVYPDLRKQSAEFIASKGAEGNAIGGLAVGEPVDKMYEMIEIVNEILPKDKPRYLMGVGTPVNILEGIERGVDMFDCVMPTRNGRNGMLFTKDGIINMRNKKWETDFSPIEADGASSVDTLYSKAYLRHLFHAQELLAMQIASIHNLAFYLWLAGEARKHIIAGDFSTWKPMMVKRVSTRL

SEQ ID NO: 52356 - protein, 376 aa, Bacteroides caecimuris
  misc_feature (1)..(376): tr|A0A1C7GZ40|A0A1C7GZ40_9BACE Queuine tRNA-ribosyltran sferase OS=Bacteroides caecimuris OX=1796613 GN=tgt PE= 3 SV=1
MTFELQYTDTKSNARAGLITTDHGQIQTPIFMPVGTLGTVKGVHLTELKEDIQAQIILGNTYHLYLRPGLDVIEKAGGLHRFNGFDRPMLTDSGGFQVFSLAGIRKLREEGAEFRSHIDGNKHIFTPEKVIDIERTIGADIMMAFDECPPGDSDYEYAKKSLGLTHRWLDRCIQRFNETEPKYGYKQALFPIVQGCVYPDLRKQSAEFIASKGAEGNAIGGLAVGEPVDKMYEMIEIVNEILPKDKPRYLMGVGTPVNILEGIERGVDMFDCVMPTRNGRNGMLFTKDGIINMRNKKWETDFSPIEADGASSVDTLYSKAYLRHLFHAQELLAMQIASIHNLAFYLWLAGEARKHIIAGDFSTWKPMMVKRVSTRL

SEQ ID NO: 52357 - protein, 376 aa, Bacteroides caecimuris; identical to SEQ ID NO: 52355
  misc_feature (1)..(376): tr|A0A3A9B9U0|A0A3A9B9U0_9BACE Queuine tRNA-ribosyltran sferase OS=Bacteroides caecimuris OX=1796613 GN=tgt PE= 3 SV=1

SEQ ID NO: 52358 - protein, 376 aa, Bacteroides cellulosilyticus
  misc_feature (1)..(376): tr|E2NKI6|E2NKI6_9BACE Queuine tRNA-ribosyltransferase OS=Bacteroides cellulosilyticus DSM 14838 OX=537012 GN= tgt PE=3 SV=1
MTFDLQYTDSKSNARAGLITTDHGQIETPIFMPVGTVGTVKGVHVTELKEDIKAQIILGNTYHLYLRPGLDVLEKAGGLHKFNGFDRPMLTDSGGFQVFSLSGIRKLREEGAEFRSHIDGSKHIFTPEKVMDIERTIGADIMMAFDECPPGDSDYAYAKKSLGLTHRWLDRCIQRFNETEPKYGYQQSLFPIVQGCVYPDLRKQSAEYIASKGADGNAIGGLAVGEPVDKMYEMIELVNEILPKDKPRYLMGVGTPVNILEGIERGVDMFDCVMPTRNGRNGMLFTKDGIINMRNKKWETDFSPIEADGASAVDTLYSKAYLRHLFHAQELLAMQIASIHNLAFYLWLVGEARKHIIAGDFSTWKPMMVKRVSTRL

SEQ ID NO: 52359 - protein, 376 aa, Bacteroides cellulosilyticus; identical to SEQ ID NO: 52358
  misc_feature (1)..(376): tr|A0A0P0G6F9|A0A0P0G6F9_9BACE Queuine tRNA-ribosyltran sferase OS=Bacteroides cellulosilyticus OX=246787 GN=tg t PE=3 SV=1

SEQ ID NO: 52360 - protein, 376 aa, Bacteroides clarus
  misc_feature (1)..(376): tr|A0A1Y4JVN8|A0A1Y4JVN8_9BACE Queuine tRNA-ribosyltran sferase OS=Bacteroides clarus OX=626929 GN=tgt PE=3 SV= 1
MTFELQYTDSKTNARAGLITTDHGQIETPIFMPVGTLGTVKGVHLTELKEDIKAQIILGNTYHLYLRPGLDVIEKAGGLHKFNGFDRPMLTDSGGFQVFSLAGIRKLREEGAEFRSHIDGSKHVFTPERVMDIERTIGADIMMAFDECTPGDAEYAYAKKSMEMTHRWLNRCITRFNETEPKYGYHQALFPIVQGCVYPDLRKRSAEFIASKGAEGNAIGGLAVGEPTEKMYEMIELVNEILPKDKPRYLMGVGTPVNILEGIERGVDMFDCVMPTRNGRNGMLFTKDGIINMRNKKWETDFSPIEADGASYVDTLYSKAYLRHLFHAQELLAMQIASIHNLAFYLWLAGEARKHIIAGDFSTWKPMMVQRVSTRL

SEQ ID NO: 52361 - protein, 376 aa, Bacteroides clarus
  misc_feature (1)..(376): tr|A0A412N043|A0A412N043_9BACE Queuine tRNA-ribosyltran sferase OS=Bacteroides clarus OX=626929 GN=tgt PE=3 SV= 1
MTFELQYTDSKTNARAGLITTDHGQIETPIFMPVGTLGTVKGVHLTELKEDIKAQIILGNTYHLYLRPGLDVIEKAGGLHKFNGFDRPMLTDSGGFQVFSLAGIRKLREEGAEFRSHIDGSKHVFTPERVMDIERTIGADIMMAFDECTPGDAEYAYAKKSMEMTHRWLDRCITRFNETEPKYGYHQALFPIVQGCVYPDLRKRSAEFIASKGAEGNAIGGLAVGEPTEKMYEMIELVNEILPKDKPRYLMGVGTPVNILEGIERGVDMFDCVMPTRNGRNGMLFTKDGIINMRNKKWETDFSPIEADGASYVDTLYSKAYLRHLFHAQELLAMQIASIHNLAFYLWLAGEARKHIIAGDFSTWKPMMVQRVLTRL

SEQ ID NO: 52362 - protein, 371 aa, [Bacteroides] coagulans
  misc_feature (1)..(371): tr|A0A2U1E2G9|A0A2U1E2G9_9FIRM Queuine tRNA-ribosyltran sferase OS=[Bacteroides] coagulans OX=46507 GN=tgt PE=3 SV=1
MSFEFEVLKKDDRTKARVGVLKTPHGDIPTPIFMPVGTRATVKTLSNNELLDLNTKIILSNTYHLFLRPGDELIKKAGGLHKFMNWKLPILTDSGGFQVFSLTENRQITEEGVHFRSHIDGSKVFLSPEKSISVQENLGSDIMMAFDECAPYPADYDYIKHSMDRTLRWLERCVNAKTRDDQALFGIVQGGMYKDLRKLSAIETCKFDLKGYAVGGLSVGEPIEVLKEMLDTCTDYMPEDKPRYHMGVGSPDYLFESVERGIDMADCVLPTRIARNGAAFTKYGRINLKNAKFTEDFTPIEEDCDCYACRNHTKAYIRHLVMNGEILGGRLLSLHNVRFLLKLMENIRKSVIDGNFLEYKEEFYKNYGYLD

SEQ ID NO: 52363 - protein, 376 aa, Bacteroides coprocola
  misc_feature (1)..(376): tr|A0A412GD66|A0A412GD66_9BACE Queuine tRNA-ribosyltran sferase OS=Bacteroides coprocola OX=310298 GN=tgt PE=3 SV=1
MKFELQYTDPRSNARAGLITTDHGQIETPIFMPVGTLGSVKAVHLHELKEDIKAQIILGNTYHLYLRPGLDTLEKAGGLHKFNGFDRPMLTDSGGFQVFSLAGIRKMREEGVEFRSHIDGSKHLFTPERVMDIERTIGADIMMAFDECTPGTADYNYAKKSMELTHRWLDRCITRFNETEPKYGYQQSLFPIVQGCVYPDLRRRSAEYIASKNADGNAIGGLAVGEPTEKMYEMIEVVNEILPTDKPRYLMGVGTPVNILEGIERGVDMFDCVMPTRNGRNGMLFTKDGIMNMRNKKWENDFSPIEADGASYVDTMYSRAYLRHLFHAQELLALQIASIHNLAFYLWLVGEARKHIIAGDFSTWKPAMVKRISTRL

SEQ ID NO: 52364 - protein, 376 aa, Bacteroides coprocola; identical to SEQ ID NO: 52363
  misc_feature (1)..(376): tr|R6C2Z6|R6C2Z6_9BACE Queuine tRNA-ribosyltransferase OS=Bacteroides coprocola CAG:162 OX=1263040 GN=tgt PE=3 SV=1

SEQ ID NO: 52365 - protein, 376 aa, Bacteroides coprophilus
  misc_feature (1)..(376): tr|R6TCP7|R6TCP7_9BACE Queuine tRNA-ribosyltransferase OS=Bacteroides coprophilus CAG:333 OX=1263041 GN=tgt PE =3 SV=1
MTFELQYTDPRSNARAGLITTDHGQIETPIFMPVGTLGTVKGVHLHELKDDIKAQIILGNTYHLYLRPGLDIIEGAGGLHKFNGFDRPMLTDSGGFQVFSLSGIRKMREEGVEFRSHIDGSKHLFTPERVMDIERTIGADIMMAFDECTPGTADYEYARKSMEMTHRWLDRCLTRFNETEPKYGYNQSLFPIVQGCVYPDLRKRSAEYIASKNADGNAIGGLAVGEPTEKMYEMIEVVNEILPTDRPRYLMGVGTPINILEGIERGVDMFDCVMPTRNGRNGMLFTKDGIMNMRNKKWENDYSPIEADGASYVDTMYSRAYLRHLFHAQELLAMQIASIHNLAFYLWLVGEARKHIIAGDFSTWKPAMVKRLSTRL

SEQ ID NO: 52366 - protein, 394 aa, Bacteroides coprophilus
  misc_feature (1)..(394): tr|S0F753|S0F753_9BACE Queuine tRNA-ribosyltransferase OS=Bacteroides coprophilus DSM 18228 = JCM 13818 OX=547 042 GN=tgt PE=3 SV=1
MPLTLPKLKKKKTPKNSNMTFELQYTDPRSNARAGLITTDHGQIETPIFMPVGTLGTVKGVHLHELKDDIKAQIILGNTYHLYLRPGLDIIEGAGGLHKFNGFDRPMLTDSGGFQVFSLSGIRKMREEGVEFRSHIDGSKHLFTPERVMDIERTIGADIMMAFDECTPGTADYEYARKSMEMTHRWLDRCLTRFNETEPKYGYNQSLFPIVQGCVYPDLRKRSAEYIASKNADGNAIGGLAVGEPTEKMYEMIEVVNEILPTDRPRYLMGVGTPINILEGIERGVDMFDCVMPTRNGRNGMLFTKDGIMNMRNKKWENDYSPIEADGASYVDTMYSRAYLRHLFHAQELLAMQIASIHNLAFYLWLVGEARKHIIAGDFSTWKPAMVKRLSTRL

SEQ ID NO: 52367 - protein, 376 aa, Bacteroides coprosuis
  misc_feature (1)..(376): tr|F3ZPG9|F3ZPG9_9BACE Queuine tRNA-ribosyltransferase OS=Bacteroides coprosuis DSM 18011 OX=679937 GN=tgt PE= 3 SV=1
MKFDLQYTDPKTNARAGLITTAHGQIQTPIFMPVGTIGSVKGVQVSHLKEDIKAQIILGNTYHLYLRPGLEVLERAGGLHKFNSFDRPMLTDSGGFQVFSLSGIRKITEEGVEFRSHIDGSKHFFSPERVMDIERTIGADIMMAFDECPPGTATYEYAKNSMGLTHRWLDRCIKRFNETEDKYGYEQTLFPIVQGCVYPDLRKQSAEFIASKEADGNAIGGLAVGEPVEKMYEMIELVNEILPKAKPRYLMGVGTPMNILEGIERGVDMFDCVMPTRNGRNGMLFTKDGIINMKNKKWEFDFSPIEANGASFVDTLYTKAYLRHLFHAKELLAMEIASIHNLAFYLWLVGEARKHIIAGDFSTWKPMMVKRLSTRL

SEQ ID NO: 52368 - protein, 376 aa, Bacteroides dorei
  misc_feature (1)..(376): tr|A0A076IQJ2|A0A076IQJ2_9BACE Queuine tRNA-ribosyltran sferase OS=Bacteroides dorei OX=357276 GN=tgt PE=3 SV=1
MTFDLQYTDPKSNARAGLITTDHGQIETPIFMPVGTLGTVKGVHLHELKEDIKAQIILGNTYHLYLRPGLDIIERAGGLHKFNGFDRPMLTDSGGFQVFSLSGIRKMREEGVEFRSHIDGSKHLFTPERVMDIERTIGADIMMAFDECTPGTADYEYAKKSMQLTHRWLDRCIKHFNETVPKYGYQQSLFPIVQGCVYPDLRKQSAEYIASKGADGNAIGGLAVGEPTEKMYEMIEVVNEILPKDKPRYLMGVGTPVNILEGIERGVDMFDCVMPTRNGRNGMLFTKNGIMNMRNKKWEDDYSPIEAEGASYVDTMYSRAYLRHLFHAQELLAMQIASIHNLAFYLWLAGEARKHIIAGDFSTWKPMMVKRLSTRL

SEQ ID NO: 52369 - protein, 376 aa, Bacteroides dorei
  misc_feature (1)..(376): tr|A0A0K2HM43|A0A0K2HM43_9BACE Queuine tRNA-ribosyltran sferase OS=Bacteroides dorei OX=357276 GN=tgt PE=3 SV=1
MTFDLQYTDPKSNARAGLITTDHGQIETPIFMPVGTLGTVKGVHLHELKEDIKAQIILGNTYHLYLRPGLDIIERAGGLHKFNGFDRPMLTDSGGFQVFSLSGIRKMREEGVEFRSHIDGSKHLFTPERVMDIERTIGADIMMAFDECTPGTADYEYAKKSMQLTHRWLDRCIKHFNETDPKYGYQQSLFPIVQGCVYPDLRKQSAEYIASKGADGNAIGGLAVGEPTEKMYEMIEVVNEILPKDKPRYLMGVGTPVNILEGIERGVDMFDCVMPTRNGRNGMLFTKNGIMNMRNKKWEDDYSPIEAEGASYVDTMYSRAYLRHLFHAQELLAMQIASIHNLAFYLWLAGEARKHIIAGDFSTWKPMMVKRLSTRL

SEQ ID NO: 52370 - protein, 376 aa, Bacteroides eggerthii
  misc_feature (1)..(376): tr|R5K1B1|R5K1B1_9BACE Queuine tRNA-ribosyltransferase OS=Bacteroides eggerthii CAG:109 OX=1263043 GN=tgt PE=3 SV=1
MTFELQYTDSKTNARAGLITTDHGQIETPIFMPVGTLGTVKGVHLTELKEDIKAQIILGNTYHLYLRPGLDVIEKAGGLHKFNGFDRPMLTDSGGFQVFSLSGIRKLREEGAEFRSHIDGSKHIFTPEKVMDIERTIGADIMMAFDECTPGDAEYAYAKKSMEMTHRWLDRCIKRFNETDPKYGYHQALFPIVQGCVYPDLRKRSAEFIASKGAEGNAIGGLAVGEPTEKMYEMIELVNEILPKEKPRYLMGVGTPVNILEGIERGVDMFDCVMPTRNGRNGMLFTKDGIINMRNKKWETDFSPIEADGASYVDTLYSKAYLRHLFHAQELLAMQIASIHNLAFYLWLVGEARKHIIAGDFSTWKPMMVQRVSTRL

SEQ ID NO: 52371 - protein, 376 aa, Bacteroides eggerthii; identical to SEQ ID NO: 52370
  misc_feature (1)..(376): tr|A0A380YMQ5|A0A380YMQ5_9BACE Queuine tRNA-ribosyltran sferase OS=Bacteroides eggerthii OX=28111 GN=tgt PE=3 S V=1

SEQ ID NO: 52372 - protein, 376 aa, Bacteroides faecichinchillae
  misc_feature (1)..(376): tr|A0A1M5CRX2|A0A1M5CRX2_9BACE Queuine tRNA-ribosyltran sferase OS=Bacteroides faecichinchillae OX=871325 GN=tg t PE=3 SV=1
MTFELQYTDTKSNARTGLITTDHGQIQTPIFMPVGTLGTVKGVHLTELKEDIQAQIILGNTYHLYLRPGLDVIEKAGGLHRFNGFDRPMLTDSGGFQVFSLAGIRKLREEGAEFRSHIDGSKHIFTPEKVMDIERTIGADIMMAFDECPPGDSDYEYAKKSLGLTHRWLDRCIQRFNETEPKYGYKQSLFPIVQGCVYPDLRKQSAEFIASKNADGNAIGGLAVGEPVDKMYEMIEIVNEILPKDKPRYLMGVGTPVNILEGIERGVDMFDCVMPTRNGRNGMLFTKDGIINMRNKKWETDFSPIEIDGASIVDTLYSKAYLRHLFHAQELLAMQIASIHNLAFYLWLVGEARKHIIAGDFSTWKPMMVKKVSSRL

SEQ ID NO: 52373 - protein, 376 aa, Bacteroides faecis
  misc_feature (1)..(376): tr|A0A1H2ZF47|A0A1H2ZF47_9BACE Queuine tRNA-ribosyltran sferase OS=Bacteroides faecis MAJ27 OX=1077285 GN=tgt P E=3 SV=1
MTFELQYTDTKSNARAGLITTDHGQIQTPIFMPVGTLGTVKGVHLTELKEDIQAQIILGNTYHLYLRPGLDVIEKAGGLHRFNGFDRPMLTDSGGFQVFSLAGIRKLREEGAEFRSHIDGSKHIFTPEKVMDIERTIGADIMMAFDECPPGDSDYAYAKKSLGLTHRWLDRCIQRFNETEPKYGYHQSLFPIVQGCVYQDLRKQSAEFVASKGADGNAIGGLAVGEPVDKMYEMIEVVNEILPKDKPRYLMGVGTPVNILEGIERGVDMFDCVMPTRNGRNGMLFTKDGIINMRNKKWETDFSPIEADGASAVDTLYSKAYLRHLFHAQELLAMQIASIHNLAFYLWLVGEARKHIIAGDFSTWKPMMVKRVSTRL

SEQ ID NO: 52374 - protein, 376 aa, Bacteroides faecis
  misc_feature (1)..(376): tr|R6V3D7|R6V3D7_9BACE Queuine tRNA-ribosyltransferase OS=Bacteroides faecis CAG:32 OX=1263044 GN=tgt PE=3 SV= 1
MTFELQYTDTKSNARAGLITTDHGQIQTPIFMPVGTLGTVKGVHLTELKEDIQAQIILGNTYHLYLRPGLDVIEKAGGLHRFNGFDRPMLTDSGGFQVFSLAGIRKLREEGAEFRSHIDGSKHIFTPEKVMDIERTIGADIMMAFDECPPGDSDYAYAKKSLGLTHRWLDRCIQRFNETEPKYGYHQSLFPIVQGCVYQDLRKQSAEFVASKGADGNAIGGLAVGEPVDKMYEMIEVVNEILPKDKPRYLMGVGTPVNILEGIERGVDMFDCVMPTRNGRNGMLFTKDGIINMRNKKWETDFSPIEADGASAVDTLYSKAYLRHLFHAQELLAMQIASIHNLAFYLWLAGEARKHIIAGDFSTWKPMMVKRVSTRL

SEQ ID NO: 52375 - protein, 376 aa, Bacteroides finegoldii
  misc_feature (1)..(376): tr|R6RU02|R6RU02_9BACE Queuine tRNA-ribosyltransferase OS=Bacteroides finegoldii CAG:203 OX=1263045 GN=tgt PE= 3 SV=1
MTFELQYTDTKSNARAGLITTEHGQIQTPIFMPVGTLGTVKGVHLTELKEDIQAQIILGNTYHLYLRPGLDVIEKAGGLHRFNGFDRPMLTDSGGFQVFSLAGIRKLREEGAEFRSHIDGSKHIFTPEKVMDIERTIGADIMMAFDECPPGDSDYAYAKKSLGLTHRWLDRCIQRFNETEPKYGYNQSLFPIVQGCVYPDLRKQSAEFVASKGADGNAIGGLAVGEPVDKMYEMIEIVNEILPKDKPRYLMGVGTPVNILEGIERGVDMFDCVMPTRNGRNGMLFTKDGIINMRNKKWETDFSPIEADGASYVDTLYSKAYLRHLFHAQELLAMQIASIHNLAFYLWLAGEARKHIIAGDFSTWKPMMVRKVSTRL

SEQ ID NO: 52376 - protein, 376 aa, Bacteroides finegoldii
  misc_feature (1)..(376): tr|K5DH66|K5DH66_9BACE Queuine tRNA-ribosyltransferase OS=Bacteroides finegoldii CL09T03C10 OX=997888 GN=tgt P E=3 SV=1
MTFELQYTDTKSNARAGLITTDHGQIQTPIFMPVGTLGTVKGVHLTELKEDIRAQIILGNTYHLYLRPGLDVIEKAGGLHRFNGFDRPMLTDSGGFQVFSLAGIRKLREEGAEFRSHIDGSKHIFTPEKVMDIERTIGADIMMAFDECPPGDSDYAYAKKSLGLTHRWLDRCIQRFNETEPKYGYNQSLFPIVQGCVYPDLRKQSAEFVASKGADGNAIGGLAVGEPVDKMYEMIEIVNEILPKDKPRYLMGVGTPVNILEGIERGVDMFDCVMPTRNGRNGMLFTKDGIINMRNKKWETDFSPIEADGASYVDTLYSKAYLRHLFHAQELLAMQIASIHNLAFYLWLAGEARKHIIAGDFSTWKPMMVRKVSTRL

SEQ ID NO: 52377 - protein, 376 aa, Bacteroides fluxus
  misc_feature (1)..(376): tr|F3PU77|F3PU77_9BACE Queuine tRNA-ribosyltransferase OS=Bacteroides fluxus YIT 12057 OX=763034 GN=tgt PE=3 S V=1
MTFELQYTDSKTNARAGLITTDHGQIETPIFMPVGTVGTVKGVHLPELKEDIKAQIILGNTYHLYLRPGLEVIEKAGGLHKFNGFDRPMLTDSGGFQVFSLSGIRKLREEGAEFRSHIDGSKHIFTPEKVMDIERTIGADIMMAFDECPPGDSDYEYAKKSLGLTHRWLDRCIKRFNETEPKYGYQQSLFPIVQGCVYRDLREQSAEFVASKGADGNAIGGLAVGEPVDKMYEMIELVNGILPKDKPRYLMGVGTPVNILEGIERGVDMFDCVMPTRNGRNGMIFTKDGIINMRNKKWEMDFSPIEADGASYVDTMYSKAYLRHLFHAQELLAMQIASIHNLAFYLWLAGEARKHIIAGDFSTWKPMMVKRVSTRL

SEQ ID NO: 52378 - protein, 376 aa, Bacteroides fragilis
  misc_feature (1)..(376): tr|A0A015S5F2|A0A015S5F2_BACFG Queuine tRNA-ribosyltran sferase OS=Bacteroides fragilis str. 3986 N(B)19 OX=133 9289 GN=tgt PE=3 SV=1
MTFELQYTDAKSNARAGLITTDHGQIQTPIFMPVGTIGSVKGVHQTELKEDIQAQIILGNTYHLYLRPGLDVLERAGGLHKFNGFDRPMLTDSGGFQVFSLSGIRKLREEGAEFRSHIDGSKHIFTPEKVMDIERIIGADIMMAFDECPPGDSDYAYAKKSLGLTHRWLDRCIQRFNETEPKYGYSQSLFPIVQGCVYPDLRKQSAEYIASKDADGNAIGGLAVGEPVDKMYEMIELVNEILPKDKPRYLMGVGTPVNILEGIERGVDMFDCVMPTRNGRNGMLFTKDGIMNMRNKKWEADFSPIEADGASYVDTLYSKAYLRHLFHAQELLAMQIASIHNLAFYLWLVGEARKHIIAGDFSTWKPMMVKRVSTRL

SEQ ID NO: 52379 - protein, 376 aa, Bacteroides fragilis
  misc_feature (1)..(376): tr|A0A081UE67|A0A081UE67_BACFG Queuine tRNA-ribosyltran sferase OS=Bacteroides fragilis OX=817 GN=tgt PE=3 SV=1
MTFELQYTDAKSNARAGLITTAHGQIQTPIFMPVGTIGSVKGVHQTELKEDIQAQIILGNTYHLYLRPGLEVLEKAGGLHKFNGFDRPMLTDSGGFQVFSLSGIRKLREEGAEFRSHIDGSKHIFTPEKVMDIERIIGADIMMAFDECPPGDSDYEYAKKSLGLTHRWLDRCIQRFNETEPKYGYNQSLFPIVQGCVYPDLRKQSAEYIASKGADGNAIGGLAVGEPVDKMYEMIELVNEILPKDKPRYLMGVGTPVNILEGIERGVDMFDCVMPTRNGRNGMLFTKDGIMNMRNKKWEADFSPIEADGASYVDTLYSKAYLRHLFHAQELLAMQIASIHNLAFYLWLVGEARKHIIAGDFSTWKPMMVKRVSTRL

SEQ ID NO: 52380 - protein, 376 aa, Bacteroides graminisolvens
  misc_feature (1)..(376): tr|A0A351M5E9|A0A351M5E9_9BACE Queuine tRNA-ribosyltran sferase OS=Bacteroides graminisolvens OX=477666 GN=tgt PE=3 SV=1
MKFELQYTDSKSNARAGLITTDHGQIETPIFMPVGTLGSVKGVHQTELKEDIKAQIILGNTYHLYLRPGLDVLEKAGGLHKFNGFDRPMLTDSGGFQVFSLAGIRKLREEGAEFRSHIDGSKHVFTPEKVMDIERIIGADIMMAFDECPPGDSDYEYAKKSMGLTHRWLDRCIKRFNETEPKYGYSQSLFPIVQGCVYPDLRKQSAEFIASKNADGNAIGGLAVGEPVDKMYEMIELVNEILPTDKPRYLMGVGTPVNILEGIERGVDMFDCVMPTRNGRNGMIFTKDGIMNMRNKKWETDFSPIEADGASYVDTLYSKAYLRHLFHAQELLAMQIASIHNLAFYLWLAGEARKHIIAGDFSIWKPMMVKRVSTRL

SEQ ID NO: 52381 - protein, 376 aa, Bacteroides graminisolvens
  misc_feature (1)..(376): tr|A0A3D2SD64|A0A3D2SD64_9BACE Queuine tRNA-ribosyltran sferase OS=Bacteroides graminisolvens OX=477666 GN=tgt PE=3 SV=1
MKFELQYTDSKSNARTGLITTDHGQIETPIFMPVGTLGSVKGVHQTELKEDIKAQIILGNTYHLYLRPGLDVLEKAGGLHKFNGFDRPMLTDSGGFQVFSLAGIRKLREEGAEFRSHIDGSKHVFTPEKVMDIERIIGADIMMAFDECPPGDSDYEYAKKSMGLTHRWLDRCIKRFNETEPKYGYSQSLFPIVQGCVYPDLRKQSAEFIASKNADGNAIGGLAVGEPVDKMYEMIELVNEILPTDKPRYLMGVGTPVNILEGIERGVDMFDCVMPTRNGRNGMIFTKDGIMNMRNKKWETDFSPIEADGASYVDTLYSKAYLRHLFHAQELLAMQIASIHNLAFYLWLAGEARKHIIAGDFSIWKPMMVKRVSTRL

SEQ ID NO: 52382 - protein, 376 aa, Bacteroides helcogenes
  misc_feature (1)..(376): tr|E6STP4|E6STP4_BACT6 Queuine tRNA-ribosyltransferase OS=Bacteroides helcogenes (strain ATCC 35417 / DSM 2061 3 / JCM 6297 / P 36-108) OX=693979 GN=tgt PE=3 SV=1
MTFELQYTDSKTNARAGLITTDHGQIETPIFMPVGTVGTVKGVHLPELKEDIKTQIILGNTYHLYLRPGLEVIERAGGLHKFNGFDRPMLTDSGGFQVFSLSGIRKLREEGAEFRSHIDGSKHIFTPEKVMDIERTIGADIMMAFDECPPGNSDYEYAKKSLGLTHRWLDRCIKRFNETEPKYGYRQSLFPIVQGCVYRDLREQSAEFVASKNADGNAIGGLAVGEPVDKMYEMIELVNGILPKDKPRYLMGVGTPVNILEGIERGVDMFDCVMPTRNGRNGMLFTKDGIINMRNKKWEMDYSPVEANGASYVDTIYSKAYLRHLFHAQELLAMQIASIHNLAFYLWLVGEARKHIIAGDFSTWKPMMVKRVSTRL

SEQ ID NO: 52383 - protein, 376 aa, Bacteroides heparinolyticus
  misc_feature (1)..(376): tr|A0A2R3MQ13|A0A2R3MQ13_9BACE Queuine tRNA-ribosyltran sferase OS=Bacteroides heparinolyticus OX=28113 GN=tgt PE=3 SV=1
MTFELQYTDSKTNARAGLITTDHGQIETPIFMPVGTVGSVKGVHIPELKDDIKAQIILGNTYHLYLRPGLEVIEKAGGLHKFNGFDRPMLTDSGGFQVFSLSGIRKLREEGAEFRSHIDGSKHIFTPEKVMDIERTIGADIMMAFDECPPGDSDYEYAKKSLGLTHRWLDRCIKRFNETEPKYGYRQSLFPIVQGCVYKDLRTQSAEFVASKDADGNAIGGLAVGEPVDKMYEMIELVNGILPKDKPRYLMGVGTPVNILEGIERGVDMFDCVMPTRNGRNGMLFTKDGIINMRNKKWETDFSPIETDGASYVDTLYSKAYLRHLFHAQELLAMQIASIHNLAFYLWLVGEARKHIIAGDFATWKPMMVKRVSTRL

SEQ ID NO: 52384 - protein, 376 aa, Bacteroides heparinolyticus
  misc_feature (1)..(376): tr|A0A3P1ZVL1|A0A3P1ZVL1_9BACE Queuine tRNA-ribosyltran sferase OS=Bacteroides heparinolyticus OX=28113 GN=tgt PE=3 SV=1
MTFELQYTDSKTNARAGLITTDHGQIETPIFMPVGTVGTVKGVHIPELKDDIKAQIILGNTYHLYLRPGLEVIEKAGGLHKFNGFDRPMLTDSGGFQVFSLSGIRKLREEGAEFRSHIDGSKHIFTPEKVMDIERTIGADIMMAFDECPPGDSDYEYAKKSLGLTHRWLDRCIKRFNETEPKYGYRQSLFPIVQGCVYKDLRTQSAEFVASKDADGNAIGGLAVGEPVDKMYEMIELVNGILPKDKPRYLMGVGTPVNILEGIERGVDMFDCVMPTRNGRNGMLFTKDGIINMRNKKWETDFSPIETDGASYVDTLYSKAYLRHLFHAQELLAMQIASIHNLAFYLWLVGEARKHIIAGDFATWKPMMVKRVSTRL

SEQ ID NO: 52385 - protein, 376 aa, Bacteroides intestinalis
  misc_feature (1)..(376): tr|A0A139KN08|A0A139KN08_9BACE Queuine tRNA-ribosyltran sferase OS=Bacteroides intestinalis OX=329854 GN=tgt PE =3 SV=1
MTFDLQYTDSKSNARAGLITTDHGQIETPIFMPVGTVGTVKGVHVTELKEDVKAQIILGNTYHLYLRPGLDVLEKAGGLHKFNGFDRPMLTDSGGFQVFSLSGIRKLREEGAEFRSHIDGSKHIFTPEKVMDIERTIGADIMMAFDECPPGDSDYAYAKKSLGLTHRWLDRCIQRFNETEPKYGYQQSLFPIVQGCVYPDLRKQSAEYIASKGADGNAIGGLAVGEPVDKMYEMIELVNEILPKDKPRYLMGVGTPVNILEGIERGVDMFDCVMPTRNGRNGMLFTKDGIINMRNKKWETDFSPIEADGASAVDTLYSKAYLRHLFHAQELLAMQIASIHNLAFYLWLVGEARKHIIAGDFSTWKPMMVKRVSTRL

SEQ ID NO: 52386 - protein, 376 aa, Bacteroides intestinalis
  misc_feature (1)..(376): tr|A0A3E4L1D6|A0A3E4L1D6_9BACE Queuine tRNA-ribosyltran sferase OS=Bacteroides intestinalis OX=329854 GN=tgt PE =3 SV=1
MTFDLQYTDSKSNARAGLITTDHGQIATPIFMPVGTVGTVKGVHVTELKEDIEAQIILGNTYHLYLRPGLDVLEKAGGLHKFNGFDRPMLTDSGGFQVFSLSGIRKLREEGAEFRSHIDGSKHIFTPEKVMDIERTIGADIMMAFDECPPGDSDYAYAKKSLGLTHRWLDRCIQRFNETEPKYGYQQSLFPIVQGCVYPDLRKESAEFIASKGADGNAIGGLAVGEPVDKMYEMIELVNEILPKDKPRYLMGVGTPVNILEGIERGVDMFDCVMPTRNGRNGMLFTKDGIINMRNKKWETDFSPIEADGASAVDTLYSKAYLRHLFHAQELLAMQIASIHNLAFYLWLVGEARKHIIAGDFSTWKPMMVKRVSTRL

SEQ ID NO: 52387 - protein, 376 aa, Bacteroides luti
  misc_feature (1)..(376): tr|A0A1M4SWK1|A0A1M4SWK1_9BACE Queuine tRNA-ribosyltran sferase OS=Bacteroides luti OX=1297750 GN=tgt PE=3 SV=1
MTFDLQYTDSKSNARAGLITTDHGQIETPIFMPVGTIGSVKAVHQTELIQDIKAQIILGNTYHLYLRPGLDVLEKAGGLHKFNSFDRPMLTDSGGFQVFSLSGIRKLREEGAEFRSHIDGSKHIFTPEKVMDIERIIGADIMMAFDECPPGDSDYAYAKKSLGLTHRWLDRCLKRFNETEPKYGYNQSLFPIVQGCVYPDLRKQSAEFIASKECDGNAIGGLAVGEPVEKMYEMIELVNEILPKEKPRYLMGVGTPVNILEGIERGVDMFDCVMPTRNGRNGMLFTKNGIMNMRNKKWETDFSPIEADGASYVDTLYSRAYLRHLFHAQELLAMQIASIHNLAFYLWLVGEARKHIIAGDFSTWKPMMVNRISTRL

SEQ ID NO: 52388 - protein, 376 aa, Bacteroides massiliensis
  misc_feature (1)..(376): tr|U6RL58|U6RL58_9BACE Queuine tRNA-ribosyltransferase OS=Bacteroides massiliensis B84634 = Timone 84634 = DSM 17679 = JCM 13223 OX=1121098 GN=tgt PE=3 SV=1
MTFDLQYTDPKSNARAGIITTDHGQIETPIFMPVGTLGTVKGVHLHELKDDIKAQIILGNTYHLYLRPGLDIIERAGGLHKFNGFDRPMLTDSGGFQVFSLSGIRKMREEGVEFRSHIDGSKHMFTPEKVMDIERTIGADIMMAFDECTPGTADYEYAKKSMQLTHRWLDRCLKRFNETEPKYGYKQSLFPIVQGCVYPDLRKQAAEFIASKGADGNAIGGLAVGEPTEKMYEMIEVVNEILPKDKPRYLMGVGTPINILEGIERGVDMFDCVMPTRNGRNGMLFTKDGIMNMRNKKWEDDYSPIEADGASYVDTMYSRAYLRHLFHAQELLAMQIASIHNLAFYLWLVGEARKHIIAGDFSTWKPMMVKRLSTRL

SEQ ID NO: 52389 - protein, 376 aa, Bacteroides nordii
  misc_feature (1)..(376): tr|A0A413VLN0|A0A413VLN0_9BACE Queuine tRNA-ribosyltran sferase OS=Bacteroides nordii OX=291645 GN=tgt PE=3 SV= 1
MTFELQYTDAKSNARAGLITTDHGQIQTPIFMPVGTLGTVKGVHLTELKEDIEAQIILGNTYHLYLRPGLEVIEKAGGLHKFNGFDRPMLTDSGGFQVFSLAGIRKLCEEGAEFRSHIDGSKHVFTPEKVMDIERTIGADIMMAFDECPPGDSDYAYAKKSLGLTHRWLDRCIQRFNETEPKYGYNQSLFPIVQGCVYTDLRKQSAEFVASKGADGNAIGGLAVGEPVDKMYEMIEVVNDILPKDKPRYLMGVGTPVNILEGIERGVDMFDCVMPTRNGRNGMLFTKDGIINMRNKKWEMDFSPIEADGASCVDTLYSKAYLRHLFHAQELLAMQIASIHNLAFYLWLVGEARKHIIAGDFSTWKPMMVKRVSTRL

SEQ ID NO: 52390 - protein, 376 aa, Bacteroides nordii
  misc_feature (1)..(376): tr|I9GSK0|I9GSK0_9BACE Queuine tRNA-ribosyltransferase OS=Bacteroides nordii CL02T12C05 OX=997884 GN=tgt PE=3 SV=1
MTFELQYTDAKSNARAGLITTDHGQIQTPIFMPVGTLGTVKGVHLTELKEDIEAQIILGNTYHLYLRPGLEVIEKAGGLHKFNGFDRPMLTDSGGFQVFSLAGIRKLREEGAEFRSHIDGSKHVFTPEKVMDIERTIGADIMMAFDECPPGDSDYAYAKKSLGLTHRWLDRCIQRFNETEPKYGYNQSLFPIVQGCVYTDLRKQSAEFVASKGADGNAIGGLAVGEPVDKMYEMIEVVNDILPKDKPRYLMGVGTPVNILEGIERGVDMFDCVMPTRNGRNGMLFTKDGIINMRNKKWEMDFSPIEADGASCVDTLYSKAYLRHLFHAQELLAMQIASIHNLAFYLWLVGEARKHIIAGDFSTWKPMMVKRVSTRL

SEQ ID NO: 52391 - protein, 376 aa, Bacteroides oleiciplenus
  misc_feature (1)..(376): tr|K9ENR0|K9ENR0_9BACE Queuine tRNA-ribosyltransferase OS=Bacteroides oleiciplenus YIT 12058 OX=742727 GN=tgt PE=3 SV=1
MTFDLQYTDSKSNARAGLITTDHGQIETPIFMPVGTVGTVKGVHVTELKEDIEAQIILGNTYHLYLRPGLDVLEKAGGLHKFNGFDRPMLTDSGGFQVFSLSGIRKLREEGAEFRSHIDGSKHIFTPEKVMDIERTIGADIMMAFDECPPGDSDYAYAKKSLGLTHRWLDRCIQRFNETEPKYGYSQSLFPIVQGCVYPDLRKQSAEFIASKGADGNAIGGLAVGEPVDKMYEMIELVNEILPKDKPRYLMGVGTPVNILEGIERGVDMFDCVMPTRNGRNGMLFTKDGIINMRNKKWEADFSPLEADGASVVDTLYTKAYLRHLFHAQELLAMQIASIHNLAFYLWLVGEARKHIIAGDFSTWKPMMVKRVSTRL

SEQ ID NO: 52392 - protein, 376 aa, Bacteroides oleiciplenus
  misc_feature (1)..(376): tr|A0A1Q6G4X7|A0A1Q6G4X7_9BACE Queuine tRNA-ribosyltran sferase OS=Bacteroides oleiciplenus OX=626931 GN=tgt PE =3 SV=1
MTFDLQYTDSKSNARAGLITTDHGQIETPIFMPVGTVGTVKGVHVTELKEDIKAQIILGNTYHLYLRPGLDVLEKAGGLHKFNGFDRPMLTDSGGFQVFSLSGIRKLREEGAEFRSHIDGSKHIFTPEKVMDIERTIGADIMMAFDECPPGDSDYAYAKKSLGLTHRWLDRCIQRFNETEPKYGYNQSLFPIVQGCVYPDLRKQSAEFIASKGADGNAIGGLAVGEPVDKMYEMIELVNEILPKDKPRYLMGVGTPVNILEGIERGVDMFDCVMPTRNGRNGMLFTKDGIINMRNKKWETDFSPIEADGASSVDTLYSKAYLRHLFHAQELLAMQIASIHNLAFYLWLVGEARKHIIAGDFSTWKPMMVKRVSTRL

SEQ ID NO: 52393 - protein, 376 aa, Bacteroides ovatus
  misc_feature (1)..(376): tr|A7LXK6|A7LXK6_BACO1 Queuine tRNA-ribosyltransferase OS=Bacteroides ovatus (strain ATCC 8483 / DSM 1896 / JC M 5824 / NCTC 11153) OX=411476 GN=tgt PE=3 SV=1
MTFELQYTDTKSNARAGLITTDHGQIQTPIFMPVGTLGTVKGVHLTELKEDIQAQIILGNTYHLYLRPGLDVIEKAGGLHRFNGFDRPMLTDSGGFQVFSLAGIRKLREEGAEFRSHIDGSKHIFTPEKVMDIERTIGADIMMAFDECPPGDSDYEYAKKSLGLTHRWLDRCIQRFNETEPKYGYNQSLFPIVQGCVYPDLRKQSAEFVASKGADGNAIGGLAVGEPVDKMYEMIEIVNEILPKDKPRYLMGVGTPVNILEGIERGVDMFDCVMPTRNGRNGMLFTKDGIINMRNKKWETDFSPIEADGASCVDTLYSKAYLRHLFHAQELLAMQIASIHNLAFYLWLAGEARKHIIAGDFSTWKPMMVKRVSTRL

SEQ ID NO: 52394 - protein, 376 aa, Bacteroides ovatus
  misc_feature (1)..(376): tr|A0A413EKI9|A0A413EKI9_BACOV Queuine tRNA-ribosyltran sferase OS=Bacteroides ovatus OX=28116 GN=tgt PE=3 SV=1
MTFELQYTDTKSNARAGLITTDHGQIQTPIFMPVGTLGTVKGVHLTELKEDIQAQIILGNTYHLYLRPGLDVIEKAGGLHRFNGFDRPMLTDSGGFQVFSLAGIRKLREEGAEFRSHIDGSKHIFTPEKVMDIERTIGADIMMAFDECPPGDSDYEYAKKSLGLTHRWLDRCIQRFNETEPKYGYNQSLFPIVQGCVYPDLRKQSAEFVASKGADGNAIGGLAVGEPVDKMYEMIEIVNEILPKDKPRYLMGVGTPVNILEGVERGVDMFDCVMPTRNGRNGMLFTKDGIINMRNKKWETDFSPIEADGASCVDTLYSKAYLRHLFHAQELLAMQIASIHNLAFYLWLAGEARKHIIAGDFSTWKPMMVKRVSTRL

SEQ ID NO: 52395 - protein, 383 aa, [Bacteroides] pectinophilus
  misc_feature (1)..(383): tr|B7AQ83|B7AQ83_9FIRM Queuine tRNA-ribosyltransferase OS=[Bacteroides] pectinophilus ATCC 43243 OX=483218 GN= tgt PE=3 SV=1
MSEYRLLKTDGAAKRGEFHTVHGVIQTPVFMNVGTAAAIKGAVATTDLQEIGTQVELSNTYHLHVRPGDEIVKKMGGLHKFMNWDKPILTDSGGFQVFSLAGLRKIKEEGVTFNSHIDGRKIFMGPEESMQIQSNLGSTIAMAFDECAPSKSSRQYMQDSVDRTTRWLKRCVKEMDRLNSLPDTINKEQILFGINQGATYADIRIEHAKRIADLDLAGYAIGGLAVGETHEEMYDIIEHVVPYLPQNKPTYLMGVGTPANILEAVERGVDFFDCVYPSRNGRHGHVYTKFGKINLFNAKYECDAEPIEEGCRCPACRNYSRSYIRHLLKAKEMLGMRLCVLHNLYFYNHLMEDIRGAIDEGRYSEFKKERIELLKTYDNLNGN

SEQ ID NO: 52396 - protein, 383 aa, Bacteroides pectinophilus; identical to SEQ ID NO: 52395
  misc_feature (1)..(383): tr|R7A461|R7A461_9BACE Queuine tRNA-ribosyltransferase OS=Bacteroides pectinophilus CAG:437 OX=1263051 GN=tgt PE=3 SV=1

SEQ ID NO: 52397 - protein, 376 aa, Bacteroides plebeius
  misc_feature (1)..(376): tr|R5W2B1|R5W2B1_9BACE Queuine tRNA-ribosyltransferase OS=Bacteroides plebeius CAG:211 OX=1263052 GN=tgt PE=3 SV=1
MKFELQYTDPKSNARAGLITTDHGQIETPIFMPVGTLGTVKGVHLHELKNDIKAQIILGNTYHLYLRPGLDIIEGAGGLHKFNGFDRPMLTDSGGFQVFSLSGIRKLREEGVEFRSHIDGSKHLFTPERVMDIERTIGADIMMAFDECAPGTSDYNYAKKSMELTHRWLDRCCARFNETEPKYGYNQSLFPIVQGCVYPDLRRQSAEYIASKNADGNAIGGLAVGEPTEKMYEMIEVVNEILPKDKPRYLMGVGTPVNILEGIERGVDMFDCVMPTRNGRNGMLFTKDGIMNMRNKKWENDYSPIEADGASYVDTMYSRAYLRHLFHAQELLAMQIASIHNLAFYLWLVGEARKHIIAGDFSTWKPAMVKRLSTRL

SEQ ID NO: 52398 - protein, 376 aa, Bacteroides plebeius
  misc_feature (1)..(376): tr|A0A415T5D9|A0A415T5D9_9BACE Queuine tRNA-ribosyltran sferase OS=Bacteroides plebeius OX=310297 GN=tgt PE=3 S V=1
MKFELQYTDPKSNARAGLITTDHGQIETPIFMPVGTLGTVKGVHLHELKNDIKAQIILGNTYHLYLRPGLDIIEGAGGLHKFNGFDRPMLTDSGGFQVFSLSGIRKLREEGVEFRSHIDGSKHLFTPERVMDIERTIGADIMMAFDECAPGTSDYNYAKKSMELTHRWLDRCCARFNETEPKYGYNQSLFPIVQGCVYPDLRRQSAEYIASKNADGNAIGGLAVGEPTEKMYEMIEVVNEILPKDKPRYLMGVGTPVNILEGIERGVDMFDCVMPTRNGRNGMLFTKDGIMNMCNKKWENDYSPIEADGASYVDTMYSRAYLRHLFHAQELLAMQIASIHNLAFYLWLVGEARKHIIAGDFSTWKPAMVKRLSTRL

SEQ ID NO: 52399 - protein, 376 aa, Bacteroides pyogenes
  misc_feature (1)..(376): tr|A0A5D3EER4|A0A5D3EER4_9BACE Queuine tRNA-ribosyltran sferase OS=Bacteroides pyogenes OX=310300 GN=tgt PE=3 S V=1
MTFELQHTDAKSNARAGLITTDHGQIQTPIFMPVGTLGSVKGVHLTELKEDIKAQIILGNTYHLYLRPGLDVIEKAGGLHRFNGFDRPMLTDSGGFQVFSLAGIRKLREEGAEFRSHIDGSKHVFTPEKVMDIERTIGADIMMAFDECPPGDSDYEYAKKSLGLTHRWLDRCIQRFNETEPKYGYRQSLFPIVQGCVYPDLRKQSAEFIASKEADGNAIGGLAVGEPVDKMYEMIELVNGILPKDKPRYLMGVGTPVNILEGIERGVDMFDCVMPTRNGRNGMLFTKDGIINMRNKKWETDFSPIEADGASVVDTLYSKAYLRHLFHAQELLAMQIASIHNLAFYLWLAGEARKHIIAGDFSTWKPMMVNKVSTRL

SEQ ID NO: 52400 - protein, 376 aa, Bacteroides pyogenes
  misc_feature (1)..(376): tr|A0A5D3FHT9|A0A5D3FHT9_9BACE Queuine tRNA-ribosyltran sferase OS=Bacteroides pyogenes OX=310300 GN=tgt PE=3 S V=1
MTFELQHTDAKSNARAGLITTDHGQIQTPIFMPVGTLGSVKGVHLTELKEDIKAQIILGNTYHLYLRPGLDVIEKAGGLHRFNGFDRPMLTDSGGFQVFSLAGIRKLREEGAEFRSHIDGSKHVFTPEKVMDIERTIGADIMMAFDECPPGDSDYEYAKKSLGLTHRWLDRCIQRFNETEPKYGYRQSLFPIVQGCVYPDLRKQSAEFIASKEADGNAIGGLAVGEPVDKMYEMIELVNGILPKDKPRYLMGVGTPVNILEGIERGVDMFDCVMPTRNGRNGMLFTKDGIINMRNKKWETDFSPIEADGASVVDTLYSKAYLRHLFHAQELLAMQIASIHNLAFYLWLAGEARKHIIAGDFSTWKSIMVNKVSTRL

SEQ ID NO: 52401 - protein, 376 aa, Bacteroides reticulotermitis
  misc_feature (1)..(376): tr|W4UUW5|W4UUW5_9BACE Queuine tRNA-ribosyltransferase OS=Bacteroides reticulotermitis JCM 10512 OX=1445607 GN =tgt PE=3 SV=1
MTFELQHTDTKSNARAGLITTDHGQIETPIFMPVGTLGSVKGVHLTELKEDIQAQIILGNTYHLYLRPGLEVIEKAGGLHKFNGFDRPMLTDSGGFQVFSLAGIRKLSEEGAEFRSHIDGSKHLFTPEKVMDIERTIGADIMMAFDECPPGDSDYAYAKKSLGLTHRWLDRCIQRFNETEPKYGYKQSLFPIVQGCIYPDLRKESAEFIASKNADGNAIGGLAVGEPVEQMYEMIELVNEILPKEKPRYLMGVGTPVNLLEGIERGVDMFDCVMPTRNGRNGMLFTKDGIMNMRNKKWEMDYSPIEADGASYVDTMYSKAYLRHLFHAQELLAMQIASIHNLAFYLWLVGEARKHIIAGDFSTWKPRMVKQVSTRL

SEQ ID NO: 52402 - protein, 376 aa, Bacteroides salanitronis
  misc_feature (1)..(376): tr|F0QZZ4|F0QZZ4_BACSH Queuine tRNA-ribosyltransferase OS=Bacteroides salanitronis (strain DSM 18170 / JCM 135 67 / BL78) OX=667015 GN=tgt PE=3 SV=1
MKFELQHTDPKSNARAGLITTDHGQIETPIFMPVGTLGSVKAVHLHELKEDIKAQIILGNTYHLYLRPGLEVLEAAGGLHKFNGFDRPMLTDSGGFQVFSLSGIRKLKEEGVEFRSHIDGSKHLFTPERVMDIERTIGADIIMAFDECTPGTAEYDYAKKSMELTHRWLDRCMARFNETEPKYGYNQSLFPIVQGCVYPDLRKRSAEYIASKNADGNAIGGLAVGEPTEKMYEMIEVVNEILPADKPRYLMGVGTPVNILEGIERGVDMFDCVMPTRNGRNGMLFTKDGIMNMRNKKWEKDYSPIEADGASYVDTMYSRAYLRHLFHAQELLALQIASIHNLAFYLWLVGEARKHIIAGDFTTWKPAMVKRISTRL

SEQ ID NO: 52403 - protein, 376 aa, Bacteroides salyersiae
  misc_feature (1)..(376): tr|I9HM37|I9HM37_9BACE Queuine tRNA-ribosyltransferase OS=Bacteroides salyersiae CL02T12C01 OX=997887 GN=tgt P E=3 SV=1
MTFELQYTDAKSNARAGLITTDHGQIQTPIFMPVGTLGTVKGVHLTELKEDIQAQIILGNTYHLYLRPGLDVIERAGGLHKFNGFDRPMLTDSGGFQVFSLAGIRKLREEGAEFRSHIDGSKHIFTPEKVMDIERTIGADIMMAFDECPPGDSDYAYAKKSLGLTHRWLDRCIQRFNETEPKYGYNQSLFPIVQGCVYTDLRKQSAEFVASKNADGNAIGGLAVGEPVDKMYEMIEVVNDILPKDKPRYLMGVGTPVNILEGIERGVDMFDCVMPTRNGRNGMLFTKDGIMNMRNKKWETDFSPIEADGASCVDTLYSKAYLRHLFHAQELLAMQIASIHNLAFYLWLVGEARKHIIAGDFSTWKPMMVKRVSTRL

SEQ ID NO: 52404 - protein, 376 aa, Bacteroides salyersiae; identical to SEQ ID NO: 52403
  misc_feature (1)..(376): tr|A0A4Q5FKV7|A0A4Q5FKV7_9BACE Queuine tRNA-ribosyltran sferase OS=Bacteroides salyersiae OX=291644 GN=tgt PE=3 SV=1

SEQ ID NO: 52405 - protein, 376 aa, Bacteroides sartorii
  misc_feature (1)..(376): tr|R9I875|R9I875_9BACE Queuine tRNA-ribosyltransferase OS=Bacteroides sartorii OX=671267 GN=tgt PE=3 SV=1
MTFDLQYTDPKSNARAGLITTDHGQIETPIFMPVGTLGTVKGVHLHELKEDIKAQIILGNTYHLYLRPGLDIIERAGGLHKFNGFDRPMLTDSGGFQVFSLSGIRKMREEGVEFRSHIDGSKHLFTPERVMDIERTIGADIMMAFDECTPGTADYEYAKKSMQLTHRWLDRCIKHFNETDPKYGYQQSLFPIVQGCVYPDLRKQSAEYIASKGADGNAIGGLAVGEPTEKMYEMIEVVNEILPKDKPRYLMGVGTPVNILEGIERGVDMFDCVMPTRNGRNGMLFTKDGIMNMRNKKWEDDYAPIEAEGASYVDTMYSRAYLRHLFHAQELLAMQIASIHNLAFYLWLAGEARKHIIEGDFSTWKPMMVKRLSTRL

SEQ ID NO: 52406 - protein, 376 aa, Bacteroides sartorii
  misc_feature (1)..(376): tr|A0A4S2FIC5|A0A4S2FIC5_9BACE Queuine tRNA-ribosyltran sferase OS=Bacteroides sartorii OX=671267 GN=tgt PE=3 S V=1
MTFDLQYTDPKSNARAGLITTDHGQIETPIFMPVGTLGTVKGVHLHELKEDIKAQIILGNTYHLYLRPGLDIIERAGGLHKFNGFDRPMLTDSGGFQVFSLSGIRKMREEGVEFRSHIDGSKHLFTPERVMDIERTIGADIMMAFDECTPGTADYEYAKKSMQLTHRWLDRCIKHFNETDPKYGYQQSLFPIVQGCVYPDLRKQSAEYIASKGADGNAIGGLAVGEPTEKMYEMIEVVNEILPKDKPRYLMGVGTPVNILEGIERGVDMFDCVMPTRNGRNGMLFTKDGIMNMRNKKWEDDYAPIEAEGASYVDTMYSRAYLRHLFHAQELLAMQIASIHNLAFYLWLAGEARKHIIEGDFSTWKQMMVKRLSTRL

SEQ ID NO: 52407 - protein, 376 aa, Bacteroides sp.
  misc_feature (1)..(376): tr|A0A285TCY7|A0A285TCY7_9BACE Queuine tRNA-ribosyltran sferase OS=Bacteroides sp. AR29 OX=93975 GN=tgt PE=3 SV =1
MTFELQYTDSKTNARAGLITTDHGQIETPIFMPVGTVGTVKGVHLPELKEDIKAQIILGNTYHLYLRPGLEVIEKAGGLHKFNGFDRPMLTDSGGFQVFSLSGIRKLREEGAEFRSHIDGSKHIFTPEKVMDIERTIGADIMMAFDECPPGDSDYEYAKKSLGLTHRWLDRCIKRFNETEPKYGYQQSLFPIVQGCVYRDLREQSAEFVASKGADGNAIGGLAVGEPVDKMYEMIELVNGILPKDKPRYLMGVGTPVNILEGIERGVDMFDCVMPTRNGRNGMLFTKDGIMNMRNKKWEMDFSPIEADGASYVDTMYSKAYLRHLFHAQELLAMQIASIHNLAFYLWLAGEARKHIIAGDFATWKPMMVKRVSTRL

SEQ ID NO: 52408 - protein, 376 aa, Bacteroides sp.
  misc_feature (1)..(376): tr|A0A4P6RLK2|A0A4P6RLK2_9BACE Queuine tRNA-ribosyltran sferase OS=Bacteroides sp. A1C1 OX=2528203 GN=tgt PE=3 SV=1
MTFELQYTDSKTNARAGLITTDHGQIETPIFMPVGTVGTVKGVHLPELKEDIKAQIILGNTYHLYLRPGLEVIEKAGGLHKFNGFDRPMLTDSGGFQVFSLSGIRKLREEGAEFRSHIDGSKHIFTPEKVMDIERTIGADIMMAFDECPPGNSDYEYAKKSLGLTHRWLDRCIKRFNETEPKYGYQQSLFPIVQGCVYRDLREQSAEFVASKGADGNAIGGLAVGEPVDKMYEMIELVNGILPKDKPRYLMGVGTPVNILEGIERGVDMFDCVMPTRNGRNGMLFTKDGIMNMRNKKWEMDFSPIEADGASYVDTMYSKAYLRHLFHAQELLAMQIASIHNLAFYLWLAGEARKHIIAGDFATWKPMMVKRVSTRL

SEQ ID NO: 52409 - protein, 376 aa, Bacteroides stercorirosoris; identical to SEQ ID NO: 52392
  misc_feature (1)..(376): tr|A0A1M6FXG5|A0A1M6FXG5_9BACE Queuine tRNA-ribosyltran sferase OS=Bacteroides stercorirosoris OX=871324 GN=tgt PE=3 SV=1

SEQ ID NO: 52410 - protein, 376 aa, Bacteroides stercoris
  misc_feature (1)..(376): tr|A0A413B9V5|A0A413B9V5_BACSE Queuine tRNA-ribosyltran sferase OS=Bacteroides stercoris OX=46506 GN=tgt PE=3 S V=1
MTFELQYTDSKTNARAGLITTDHGQIETPIFMPVGTLGTVKGVHLTELKEDIKAQIILGNTYHLYLRPGLDVIEKAGGLHKFNGFDRPMLTDSGGFQVFSLAGIRKLREEGAEFRSHIDGSKHIFTPERVMDIERTIGADIMMAFDECTPGDAEYAYAKKSMEMTHRWLDRCITRFNETEPKYGYHQALFPIVQGCVYSDLRKRSAEFIASKGAEGNAIGGLAVGEPTEKMYEMIELVNEILPKDKPRYLMGVGTPVNILEGIERGVDMFDCVMPTRNGRNGMLFTKDGIINMRNKKWETDFSPIEADGASYVDTLYSKAYLRHLFHAQELLAMQIASIHNLAFYLWLAGEARKHIIAGDFSTWKPMMVQRVSTRL

SEQ ID NO: 52411 - protein, 376 aa, Bacteroides stercoris
  misc_feature (1)..(376): tr|B0NPL2|B0NPL2_BACSE Queuine tRNA-ribosyltransferase OS=Bacteroides stercoris ATCC 43183 OX=449673 GN=tgt PE =3 SV=1
MTFELQYTDSKTNARAGLITTDHGQIETPIFMPVGTLGTVKGVHLTELKEDIKAQIILGNTYHLYLRPGLDVIEKAGGLHKFNDFDRPMLTDSGGFQVFSLAGIRKLREEGAEFRSHIDGSKHIFTPERVMDIERTIGADIMMAFDECTPGDAEYAYAKKSMEMTHRWLDRCITRFNETEPKYGYHQALFPIVQGCVYPDLRKRSAEFIASKGAEGNAIGGLAVGEPTEKMYEMIELVNEILPKDKPRYLMGVGTPVNILEGIERGVDMFDCVMPTRNGRNGMLFTKDGIINMRNKKWETDFSPIEADGASYVDTLYSKAYLRHLFHAQELLAMQIASIHNLAFYLWLAGEARKHIIAGDFSTWKPMMVQRVSTRL

SEQ ID NO: 52412 - protein, 376 aa, Bacteroides thetaiotaomicron
  misc_feature (1)..(376): tr|R9HDJ0|R9HDJ0_BACT4 Queuine tRNA-ribosyltransferase OS=Bacteroides thetaiotaomicron dnLKV9 OX=1235785 GN=tg t PE=3 SV=1
MTFELQYTDTKSNARAGLITTDHGQIQTPIFMPVGTLGTVKGVHVTELKEDIQAQIILGNTYHLYLRPGLDVIEKAGGLHRFNGFDRPMLTDSGGFQVFSLAGIRKLREEGAEFRSHIDGSKHIFTPEKVMDIERTIGADIMMAFDECPPGDSDYAYAKKSLGLTHRWLDRCIQRFNETEPKYGYNQSLFPIVQGCVYQDLRKQSAEFVASKGADGNAIGGLAVGEPVDKMYEMIEVVNEILPKDKPRYLMGVGTPVNILEGIERGVDMFDCVMPTRNGRNGMLFTKDGIINMRNKKWETDFSPIEADGASAVDTLYSKAYLRHLFHAQELLAMQIASIHNLAFYLWLVGEARKHIIAGDFSTWKPMMVKRVSTRL

SEQ ID NO: 52413 - protein, 376 aa, Bacteroides thetaiotaomicron; identical to SEQ ID NO: 52412
  misc_feature (1)..(376): tr|A0A0P0FNC9|A0A0P0FNC9_BACT4 Queuine tRNA-ribosyltran sferase OS=Bacteroides thetaiotaomicron OX=818 GN=tgt P E=3 SV=1

SEQ ID NO: 52414 - protein, 376 aa, Bacteroides uniformis; identical to SEQ ID NO: 52407
  misc_feature (1)..(376): tr|A7UZB8|A7UZB8_BACUC Queuine tRNA-ribosyltransferase OS=Bacteroides uniformis (strain ATCC 8492 / DSM 6597 / CIP 103695 / JCM 5828 / NCTC 13054 / VPI 0061) OX=4114 79 GN=tgt PE=3 SV=1

SEQ ID NO: 52415 - protein, 376 aa, Bacteroides uniformis
  misc_feature (1)..(376): tr|A0A174N790|A0A174N790_BACUN Queuine tRNA-ribosyltran sferase OS=Bacteroides uniformis OX=820 GN=tgt PE=3 SV= 1
MTFELQYTDSKTNARAGLITTDHGQIETPIFMPVGTVGTVKGVHLPELREDIKAQIILGNTYHLYLRPGLEVIEKAGGLHKFNGFDRPMLTDSGGFQVFSLSGIRKLREEGAEFRSHIDGSKHIFTPEKVMDIERTIGADIMMAFDECPPGDSDYEYAKKSLGLTHRWLDRCIKRFNETEPKYGYQQSLFPIVQGCVYRDLREQSAEFVASKGADGNAIGGLAVGEPVDKMYEMIELVNGILPKDKPRYLMGVGTPVNILEGIERGVDMFDCVMPTRNGRNGMLFTKDGIMNMRNKKWEMDFSPIEADGASYVDTMYSKAYLRHLFHAQELLAMQIASIHNLAFYLWLAGEARKHIIAGDFATWKPMMVKRVSTRL

SEQ ID NO: 52416 - protein, 376 aa, Bacteroides vulgatus; identical to SEQ ID NO: 52369
  misc_feature (1)..(376): tr|A0A069SPZ2|A0A069SPZ2_BACVU Queuine tRNA-ribosyltran sferase OS=Bacteroides vulgatus str. 3975 RP4 OX=133935 2 GN=tgt PE=3 SV=1

SEQ ID NO: 52417 - protein, 376 aa, Bacteroides vulgatus; identical to SEQ ID NO: 52369
  misc_feature (1)..(376): tr|A0A174Q0G0|A0A174Q0G0_BACVU Queuine tRNA-ribosyltran sferase OS=Bacteroides vulgatus OX=821 GN=tgt PE=3 SV=1

SEQ ID NO: 52418 - protein, 376 aa, Bacteroides xylanisolvens
  misc_feature (1)..(376): tr|D6D6Y4|D6D6Y4_9BACE Queuine tRNA-ribosyltransferase OS=Bacteroides xylanisolvens XB1A OX=657309 GN=tgt PE=3 SV=1
MTFELQYTDTKSNARAGLITTDHGQIQTPIFMPVGTLGTVKGVHLTELKEDIQAQIILGNTYHLYLRPGLDVIEKAGGLHRFNGFDRPMLTDSGGFQVFSLAGIRKLREEGAEFRSHIDGSKHVFTPEKVMDIERTIGADIMMAFDECPPGDSDYEYAKKSLGLTHRWLDRCIQRFNETEPKYGYNQALFPIVQGCVYPDLRKQSAEFIASKGADGNAIGGLAVGEPVDKMYEMIEIVNEILPKDKPRYLMGVGTPVNILEGIERGVDMFDCVMPTRNGRNGMLFTKDGIINMRNKKWETDFSPIEADGASSVDTLYSKAYLRHLFHAQELLAMQIASIHNLAFYLWLAGEARKHIIAGDFSTWKPMMVKRVSTRL

SEQ ID NO: 52419 - protein, 376 aa, Bacteroides xylanisolvens; identical to SEQ ID NO: 52418
  misc_feature (1)..(376): tr|I9AGJ4|I9AGJ4_9BACE Queuine tRNA-ribosyltransferase OS=Bacteroides xylanisolvens CL03T12C04 OX=997892 GN=tg t PE=3 SV=1

SEQ ID NO: 52420 - protein, 380 aa, Bacteroides xylanolyticus
  misc_feature (1)..(380): tr|A0A2S6HZJ4|A0A2S6HZJ4_9BACE Queuine tRNA-ribosyltran sferase OS=Bacteroides xylanolyticus OX=384636 GN=tgt P E=3 SV=1
MNYKIIAKDGRAKRAEVTTVHGTIQTPVFMNVGTVAAIKGAVSTDDLREIKTQVELSNTYHLHVRTGDRLIKEFGGLHQFMNWDRPILTDSGGFQVFSLTGLRKIKEEGVYFQSHIDGHKIFMGPEESMQIQSNLASTIAMAFDECPPHPATREYMQNSVDRTTRWLERCRKEMARLNELPDTINKDQLLFGINQGGTFEDIRIAHAKTISAMDLDGYALGGLAVGESHSEMYRILDETVPYLPENKPTYLMGVGTPANILEGVDRGVDFFDCVYPSRNGRHGHVYTNHGKLNLFNSKFELDHKPIEEGCQCPACRSYSRAYIRHLLKAKEMLGMRLCVLHNLYFYNTMMEEIREAIENHRYGEYKERKLSGMMAGGSEA

SEQ ID NO: 52421 - protein, 376 aa, Bacteroides zoogleoformans
  misc_feature (1)..(376): tr|A0A562V628|A0A562V628_9BACE Queuine tRNA-ribosyltran sferase OS=Bacteroides zoogleoformans OX=28119 GN=tgt P E=3 SV=1
MTFELQYTDSKTNARAGLLTTDHGQIATPIFMPVGTVGTVKGVHIPELKDDIKAQIILGNTYHLYLRPGLEVIEKAGGLHKFNGFDRPMLTDSGGFQVFSLSDIRKLREEGAEFRSHIDGSKHIFTPEKVMDIERTIGADIMMAFDECPPGNSDYEYAKRSLGLTHRWLDRCIKRFNETEPKYGYRQSLFPIVQGCVYRDLRTQSAEFVASKEADGNAIGGLAVGEPVDKMYEMIELVNGILPKDKPRYLMGVGTPVNILEGIERGVDMFDCVMPTRNGRNGMLFTKDGIINMRNKKWETDFSPIEADGASYVDALYSKAYLRHLFHAQELLAMQIASIHNLAFYLWLVGEARKHIIAGDFATWKPMMVKRVSTRL

SEQ ID NO: 52422 - protein, 376 aa, Bacteroidetes bacterium
  misc_feature (1)..(376): tr|A0A1F3NG29|A0A1F3NG29_9BACT Queuine tRNA-ribosyltran sferase OS=Bacteroidetes bacterium RBG_13_43_22 OX=1797 356 GN=tgt PE=3 SV=1
MMFRIYSRDKESKARAGILTTQHGEIPTPIFMPVGTGGTVKGILQRDLVGEIDAKIILGNTYHLYLRPGTAIIKAAGGLHKFMSWELPILTDSGGYQVFSLSGNRKLNDNGAVFKSHIDGSEHIFTPENTIDIQRIIGSDIMMVLDECAPFPCDHKYAKKSVALTHHWLDRAVESFRNTEPLWGFEQVLFPIVQGGIFDDLRKISAEKIAEAGMAGNAIGGLSVGEPPEEMYRTIEIVNDILPDDKPRYLMGVGTPVNILEAIERGVDMFDCVMPTRNGRNGMLFTSEGIINIKNNKWSDDFSPIDPAGPSSVSLEYSRAYLRHLIISGEILGSQISSIHNLAFYLSLVKEAREQIIKGNFRKWKETKIKILSERL

SEQ ID NO: 52423 - protein, 376 aa, Bacteroidetes bacterium
  misc_feature (1)..(376): tr|A0A1J5M009|A0A1J5M009_9BACT Queuine tRNA-ribosyltran sferase OS=Bacteroidetes bacterium MedPE-SWsnd-G1 OX=18 60094 GN=tgt PE=3 SV=1
MKFDLKGKDLQSKARAGVVTTDHGKIETPIFMPVGTVGTVKGVHQTELKEQINPDIILGNTYHLYLRPKTDILKQAGGLHKFMNWDRPILTDSGGYQVYSLSGRRKIKEEGVKFKSHIDGSYHFFSPEYAMDIQRDIGGDIIMAFDECTPYPCDYNYAKRSMHMTHRWLKRCISHLEKTPMTYDYNQTFFPIVQGSTYTDLRKQSAEFIASVEAEGNAIGGLSVGEPAEEMYEMTDVVCSILPEDKPRYLMGVGTPINILENIALGVDMFDCVMPTRNARNGMLFTAHGSINIKNKKWENDFSPIDEMGITEVDTYYSKAYLRHLFAAKELLGKQIATIHNLGFYMWLVREARKHILAGDFVVWKNKMVNQMSNRL

SEQ ID NO: 52424 - protein, 376 aa, Bacteroidetes oral
  misc_feature (1)..(376): tr|D7JDJ9|D7JDJ9_9BACT Queuine tRNA-ribosyltransferase OS=Bacteroidetes oral taxon 274 str. F0058 OX=575590 GN =tgt PE=3 SV=1
MIFDLEHKDTQTRARAGRITTEHGEIQTPIFMPVGTVGSVKAVHMQELRRDIDAQIILGNTYHLFMRPGLEIIEQAGGLHRFNGWDRPILTDSGGYQVFSLAGTRKIKEEGVTFQSHIDGSRHLFTPENVVDIQRTIGADIVMAFDECTPGNADYDYARLSMERTHRWLARGYGHFLETEPKYGYSQTFFPIVQGCVYEDLRRQSAEFVRGFDAEGYAIGGLAVGEPTEKMYEMVELVNGILPEDRPRYLMGVGTPANILENIARGVDMFDCVMPTRNGRNGMIFTEEGIINFKNRKWATDFSPIQEGTGCFVDEQYTKAYLRHLFVAGELLAMQIASIHNLAFYLRLVRQARQRIVDGTFGDWYKEMAVKTMRRL

SEQ ID NO: 52425 - protein, 376 aa, Bacteroidetes sp.
  misc_feature (1)..(376): tr|A0A3N0ZFW9|A0A3N0ZFW9_9BACT Queuine tRNA-ribosyltran sferase OS=Bacteroidetes/Chlorobi group bacterium Naka2 016 OX=2382229 GN=tgt PE=3 SV=1
MKTFFRVEKIADDCKARAGFLKLNGIEIPTPVFMPVGTYGTVKAMLPSSLYELDYKLILGNTYHLYLRPGLDVIKHFEGLHNFINWKNCILTDSGGYQVFSLQSFRKLSEEGVEFSSHIDGSKHFFTPESVVQHQRVLGSDIMMILDDCVEYPADYGRVEESVERTYNWAVRSLKEFANSEPLWGRKQFIFGIVQGGTFPDLRRRSLGGLLSLQFDGYAIGGLSVGEPEEKMYEITSLCTDLLPIDKPRYLMGVGTPQNILECIELGVDMFDCVLPTRNGRNGQIFTTRGKINIRNAKYKFSKEPIDPGLNNEISQNFTIGYLRHLFIADEILGLQLATYQNLAFYKWLVATAREKILSGLFRYWKNNLILNFKEN

SEQ ID NO: 52426 - protein, 377 aa, Bacteroidetes sp.
  misc_feature (1)..(377): tr|A0A3N0ZPE2|A0A3N0ZPE2_9BACT Queuine tRNA-ribosyltran sferase OS=Bacteroidetes/Chlorobi group bacterium MS-B_ bin-24 OX=2382228 GN=tgt PE=3 SV=1
MTEAFFKVVGTSSECKARAGVLNLNGIEIPTPVFMPVGTYGTVKALMHITVSELGYNLILGNTYHLYLRPGTEVIEHFGGLHSFIHWNKGILTDSGGYQIFSLQSFRKFTDEGVEFRSHLDGSKHFFTPEKVIEIQRIFGSDIVMVLDDCTEYPVEYSQAEESLNRTIQWAKRSKESFESTSPRWNRMQYLFGIIQGATFPELRRKSIEELISLQFDGYAIGGLSVGEPENLMYEITDFCTNLLPTEKPRYLMGVGTPSNILNCIELGIDMFDCVLPTRNARNGQIFTTRGKINIRNAKYRFSKESIDPGLDNEISKEFSLGYLRHLFIAEEILGLTLATYQNLAFYKWLVSTAREKILSDDFRQGKNKLILNFEKE

SEQ ID NO: 52427 - protein, 376 aa, Bacteroidia bacterium
  misc_feature (1)..(376): tr|A0A1Q3QHC0|A0A1Q3QHC0_9BACT Queuine tRNA-ribosyltran sferase OS=Bacteroidia bacterium 43-41 OX=1895720 GN=tg t PE=3 SV=1
MKFELQHTDSSSSARAGLITTDHGQIETPVFMPVGTVGSVKAVQMTELKDDIKAQIILGNTYHLYLRPGLEIMQLAGGLHKFNSWDRPILTDSGGFQVFSLAENRKLNEEGAEFRSHIDGSKHFFTPEKAVDIQRIIGADIMMAFDECTPGDADYGYAEKSLDLTERWLKRCIGRFNETECPYGYKQTLFPIVQGCVYPDLRRRAAEYVASFEADGNAIGGLAVGEPTEKMYEMVELVNEILPKDKPRYLMGVGTPANLLEAIERGVDMFDCIMPTRNGRNGQIFTKNGILNMRNERWKDDFSPIEEEGASYVDTLYSKAYLRHLINMNEILGLQIASVHNLAFYTWLMREARKHIIEGDFTAWKRIMAERTMQRL

SEQ ID NO: 52428 - protein, 356 aa, Bacteroidia bacterium
  misc_feature (1)..(356): tr|A0A524NSQ5|A0A524NSQ5_9BACT Queuine tRNA-ribosyltran sferase (Fragment) OS=Bacteroidia bacterium OX=2044936 GN=tgt PE=3 SV=1
TDHSEIPTPVFMPVGTAGSVKGVHQRELLSDIEAPIILGNTYHLYLRPGLEVLQGAGGLHKFMNWDRSILTDSGGYQVFSLAANRKLKPEGAHFSSHIDGSKHLFTPENIVDIQRIIGADIMMAFDECTPWPCDHKYAKDSLKLTHDWFERGLKQFHATEPLYGHSQAFFPIVQGSVYKDLRRESAEFVAERNAEGNAIGGLSVGEPAEEMYAMLEVVNGVLPADKPRYLMGVGTPVNILEAISRGVDMFDCVMPTRNGRNGMLFTAEGIINMRNRKWMEDYSPIDPAAYCFVDTQYSRAYLRHLIISGEMLGAQIASLHNLAFYLWLVRKAFEEIKSGTFTAWKEKMIPVLSTRL

SEQ ID NO: 52429 - protein, 399 aa, Baekduia soli
  misc_feature (1)..(399): tr|A0A5B8U4L0|A0A5B8U4L0_9ACTN Queuine tRNA-ribosyltran sferase OS=Baekduia soli OX=496014 GN=tgt PE=3 SV=1
MPAPLQILARDPGSRARAGILSTGHGDVRTPAFVPLATKATVKGLVPAEVRDLGYDMVLGNTYHLFLDPGHDRIERFGGLHEFMRWDQPIITDSGGFQVFSMGHGTVADEIKGRAAHGGQRHGKTLEITEDGVRFRSHIDGSQRFLAPETSMEIQASLRSDIALVFDECTPFNVTRDYTARSTERTHRWLQRCLDWHGRHGPEGQLVYGIVQGGVHEDLRKASAETIAASGADGIAIGGSLGADKPQMYEVVDWATSVLGGAAETAPRHLLGIGDIDDLIRGVELGIDTFDCAMPTRLGRHGVALIPAPDRRWRVDLTASRWRDSDEPIFDGCPCPTCAAGNTRGYLRYLVANRELTGLRLLVVHNLAFVRRLMTRLRDAVLEGRLAEEAAALRGGAAP

SEQ ID NO: 52430 - protein, 378 aa, Baia soyae
  misc_feature (1)..(378): tr|A0A4R2S064|A0A4R2S064_9BACL Queuine tRNA-ribosyltran sferase OS=Baia soyae OX=1544746 GN=tgt PE=3 SV=1
MAVRYELLKQCKQSGARLGRLHTPHGVIETPIFMPVGTLATVKTMSPEELKEMDAQIILSNTYHLFIRPGHEIVKEAGGLHKFMNWDRPILTDSGGFQVFSLGDLRKITEEGVQFRSHLSGEKLFLSPEKAMEIQNALGADIIMAFDECPPYPAEYEYVKNSTERTYRWLKRCKEAHGRPEDQALFGIVQGGEYRELREESARQLVDLDLPGYAVGGLSVGEPHEMMFEILGYTTPLLPKDKPRYLMGVGSPEALIQGAILGIDMFDCVLPTRIARNGTTMTSEGRLVVRNAKFTRDFGPLDPNCDCYTCRNYSRAYLRHLIKADETFGLRLTTYHNLYFLLNLMHQVRQAIMEDRLLDFRDEFMMKYYGTLNPVQKF

SEQ ID NO: 52431 - protein, 372 aa, Balnearium lithotrophicum
  misc_feature (1)..(372): tr|A0A521DY41|A0A521DY41_9BACT Queuine tRNA-ribosyltran sferase OS=Balnearium lithotrophicum OX=223788 GN=tgt P E=3 SV=1
MEFSVVREDGRARFGILKGTHGVTETPCFMPVGTLGAVKGVTWEDIKRMGYHLVLSNVYHLYLRPGLEIIKEAGGIHKFTGWNELILTDSGGFQVFSLGKLMKLTEEGVFFKSHIDGSEHFFTPEFVVKFEEEIGVDIGMVLDECTPYPATYEYAEHSMERTVRWAERSINSRTTDKTALFGIVQGGVYDDLRLRCVEKLVKLPFDGYAIGGLSVGEPKEEMYRITKLVAPQLPKDKPRYLMGVGTPLDILEAVESGVDMFDCVMPTRNARNGTLFTSYGKVNIKKAKYKNDFTPLDPECDCYTCKNFTKAYLRHLYVTGNVNSVILNTIHNLHFYEKLMEKIRDSIKEEKFSEFKVDFLRKFKGDKSQISR

SEQ ID NO: 52432 - protein, 376 aa, Balneola sp.
  misc_feature (1)..(376): tr|A0A2D7AEX9|A0A2D7AEX9_9BACT Queuine tRNA-ribosyltran sferase OS=Balneola sp. OX=2024824 GN=tgt PE=3 SV=1
  misc_feature (136)..(136): Xaa can be any naturally occurring amino acid
  misc_feature (141)..(141): Xaa can be any naturally occurring amino acid
  misc_feature (322)..(322): Xaa can be any naturally occurring amino acid
MLFQLHTTCSTSKARLGSLTTDHGVIETPIFMPVGTLGTVKGVSQDRLKDPIQAQIILGNTYHLYLRPGTEVIQASGGLHGFMNWDRPILTDSGGYQIFSLSDIRTLDEEGAHFKSHLDGSKHLFTPENVVDIQRXLGSDXMMILDECPPYPSDYAYAKNSMELTHRWAKRGRKQFLETQALYGHRQFQFGIVQGGTYKDLRIASAEFMAEQNFEGIAIGGLSVGEPIPLLYEMTDVNTDVMPKEKARYLMGVGTPANLLESIARGVDMFDCVMPTRNARNGTIFTREGKVNLRNSKWKNHHSPLDPDFPSDLCQKYHMSYXHHLLKSNELFGMTLASEHNLQFYLWLMKEVREHIKNDTFASWYPHMVTQLESKI

SEQ ID NO: 52433 - protein, 375 aa, Balneola sp.
  misc_feature (1)..(375): tr|A0A2D9FQN4|A0A2D9FQN4_9BACT Queuine tRNA-ribosyltran sferase OS=Balneola sp. OX=2024824 GN=tgt PE=3 SV=1
MYSLKSTASTTKARLGELQTDHGKIETPIFMPVGTLATVKAVSQDVLKQQVKAQIILGNTYHLYLRPGLDIMKGAGGLHEFMKWDRPILTDSGGYQIFSLSDIRELDEEGAHFRSHIDGSKHTFTPENVVDIQRILGSDIMMLLDECPPYPSSYEYAKNSMELTHRWAKRGRKAFLETEPLYGHKQAQFGIVQGGTYKDLRIESTKFMADQDFEGIAIGGLSVGEPIEMMYEFTDLNTDYLPKDKARYLMGVGTPANLLEGVARGVDMFDCVMPTRNARNGTIFTRNGRVNIKNAQWKDHHDFLDADFSSDLCSKYTMAYVHHLFRNDELFGLELASIHNLTFYLWLMEEVRARIANDTFGEWYPGMVKQLEQRI

SEQ ID NO: 52434 - protein, 375 aa, Balneolaceae bacterium; identical to SEQ ID NO: 52433
  misc_feature (1)..(375): tr|A0A356X267|A0A356X267_9BACT Queuine tRNA-ribosyltran sferase OS=Balneolaceae bacterium OX=2053516 GN=tgt PE= 3 SV=1

SEQ ID NO: 52435 - protein, 108 aa, Balneolaceae bacterium
  misc_feature (1)..(108): tr|A0A3D1GBH2|A0A3D1GBH2_9BACT tRNA guanosine(34) trans glycosylase Tgt (Fragment) OS=Balneolaceae bacterium OX =2053516 GN=tgt PE=4 SV=1
MFDCVMPTRNARNGMIFTRHGKVNIRNAKWKDHHEVLDADFPSDLANTYTMSYVHHLIKANEIFGLTLASLHNLTFYLWLMEQIRKHIKNDTFAEWYPKMVKQVDQKI

SEQ ID NO: 52436 - protein, 376 aa, Barnesiella intestinihominis
  misc_feature (1)..(376): tr|K0X403|K0X403_9BACT Queuine tRNA-ribosyltransferase OS=Barnesiella intestinihominis YIT 11860 OX=742726 GN= tgt PE=3 SV=1
MDFELVHTDECTHARAGVITTDHGKIQTPIFMPVGTVASVKAVHQRELRDDIKAQIILGNTYHLYLRPGLDILRQAGGLHRFNGWERPILTDSGGFQVFSLSDRRKLTEEGAHFRSHIDGSKHLFTPENVVDTQRIIGADIMMALDECTPGDADYDYAKKSLALTRRWLDRGWKHFCETEGLYGYKQTFFPIVQGCVYPDLRIEAAKHVADLGADGNAIGGLAVGEPTEKMYEMIEVVNEVLPQDKPRYLMGVGTPANILEGIERGVDMFDCVMPTRNGRNGMLFTRNGIMNMRNKKWADDFSPLDPEGTSYVDTCYSKAYLRHLFISEEILAMQIASIHNLAFYVWLTQEARRQILAGTFKSWKDEMICRVTTRL

SEQ ID NO: 52437 - protein, 376 aa, Barnesiella sp.
  misc_feature (1)..(376): tr|A0A1Y4GUV7|A0A1Y4GUV7_9BACT Queuine tRNA-ribosyltran sferase OS=Barnesiella sp. An22 OX=1965590 GN=tgt PE=3 SV=1
MDFELIHTDERSSARAGVITTDHGTILTPIFMPVGTVASVKAVHQRELRDDIKAQIILGNTYHLYLRPGLDILHKAGGLHKFNGWERPILTDSGGFQVFSLSDRRKLTEEGAHFRSHIDGSKHLFTPENVVDTQRIIGSDIMMALDECTPGDADYDYAKKSLALTRRWLDRGWKHFCETEGLYGYRQTFFPIVQGCVYRDLRTEAAKHVADLGADGNAIGGLAVGEPTEKMYEMIEVVNDILPQDKPRYLMGVGTPANILEGIERGVDMFDCVMPTRNGRNGMLFTRNGIMNMRNKKWADDFSPIDPEGTSFVDTCYSKAYLRHLFISEEILAMQIASIHNLAFYVWLTQEARRQILAGTFKPWKDEMVRRVTTRL

SEQ ID NO: 52438 - protein, 376 aa, Barnesiella sp.
  misc_feature (1)..(376): tr|A0A4Y9J4C8|A0A4Y9J4C8_9BACT Queuine tRNA-ribosyltran sferase OS=Barnesiella sp. WM24 OX=2558278 GN=tgt PE=3 SV=1
MDFKLIATDKASNARAGLITTDHGEIETPIFMPVGTAGTVKAVHQRELADDIHAQIILGNTYHLYLRPGTDIIHKAGGLHKFNGWNKPILTDSGGFQVFSLSSNRKLKEEGAWFRSHIDGSKHLFTPENVVDIQRIIGSDIMMALDECPPGTSDYDYAKKSLGLTLRWLKRGWDRYKSTEGLYGHSQAYFPIVQGCTYPDLRRESAKFVADLGADGNAIGGLAVGEPAEVMYDMIEVVNEILPSDKPRYLMGVGTPANILEAIDRGVDMMDCVMPTRNGRNGMLFTAHGIMNMRNKKWADDFSPLQEDGPSYVDRFYTKAYVRHLFVADEILAMQIASIHNLAFYLWLVGEARRHIIAGDFKSWKTEMVERVTRRL

SEQ ID NO: 52439 - protein, 376 aa, Barnesiella viscericola
  misc_feature (1)..(376): tr|W0ERC6|W0ERC6_9BACT Queuine tRNA-ribosyltransferase OS=Barnesiella viscericola DSM 18177 OX=880074 GN=tgt P E=3 SV=1
MNFELIHTDERSHARAGVITTDHGTILTPIFMPVGTVASVKAVHQRELRDDIKAQIILGNTYHLYLRPGLDILHKAGGLHKFNGWERPILTDSGGFQVFSLSDRRKLTEEGAHFRSHIDGSKHLFTPENVVDTQRIIGSDIMMALDECTPGDADYDYAKKSLALTRRWLDRGWKHFCETEGLYGYRQTFFPIVQGCVYRDLRTEAAKHVADLGADGNAIGGLAVGEPTEKMYEMIEVVNDILPQDKPRYLMGVGTPANILEGIERGVDMFDCVMPTRNGRNGMLFTRNGIMNMRNKKWADDFSPIDPEGTSYVDTCYSKAYLRHLFISEEILAMQIASIHNLAFYVWLTQEARRQILAGTFKPWKDEMVRRVTTRL

SEQ ID NO: 52440 - protein, 372 aa, Bartonella alsatica
  misc_feature (1)..(372): tr|J1IX53|J1IX53_9RHIZ Queuine tRNA-ribosyltransferase OS=Bartonella alsatica IBS 382 OX=1094551 GN=tgt PE=3 S V=1
MIKTFHYRKIAQDGYARRGEIITGRGCIRTPAFMPVGTAGTVKAMYMDQLRALGADIILGNTYHLMLRPGAERVARLGGLHEFSRWPGPILTDSGGFQVMSLAGIRKITEQGVIFRSYINGTYYEMSPERSIEIQGLLNSDIQMQLDQCIALPASEKEIESAMELSLRWAQRCKTAFGKQPDKALFGIVQGGDNMKLRERSAQALKEMDLKGYAIGGLAVGEPQSVMIAVLDATCPMLPEDKPRYLMGVGTPDDILKSVARGIDMFDCVMPTRAGRHGLAFTRFGRVNLRNARYAEDRHPLDPQSLCPAAYDYSCAYLHHLIKSGESLGGMLLTWNNLFYYQQLMQEIRDAIEEGCYADFCAETRALWTQGR

SEQ ID NO: 52441 - protein, 377 aa, Bartonella ancashensis
  misc_feature (1)..(377): tr|A0A0M5KSN7|A0A0M5KSN7_9RHIZ Queuine tRNA-ribosyltran sferase OS=Bartonella ancashensis OX=1318743 GN=tgt PE= 3 SV=1
MTKVFHYKKIAQDGNARLGEIITGRGRIRTPAFMPVGTAGSVKAMYMDQLRDLGTDVILGNTYHLMLRPGAERVARLGGLHEFARWPEPILTDSGGFQVMSLSGICKITEKGAIFRSYISGAYYEMSPERSIEIQGLLDSDIQMQLDQCIALPAKEKEIEAAMELSLRWAQRCKTAFGNQAEKAMFGIVQGGDNIRLREYSAQALKEMNLKGYAIGGLAVGEPQNVMIDVLDATCPILPQDKPRYLMGVGTPDDILKSVARGIDMFDCVMPTRAGRHGLAFTRFGKINLRNARYAEDSRPLDIQSSCPATRDYSRAYLHHLIKSGESLGGMLLTWNNLAYYQQLMQDIRAAIEAKYYASFCDQTTFLWKHGCEVSTQ

SEQ ID NO: 52442 - protein, 375 aa, Bartonella apis
  misc_feature (1)..(375): tr|A0A1U9MC15|A0A1U9MC15_9RHIZ Queuine tRNA-ribosyltran sferase OS=Bartonella apis OX=1686310 GN=tgt PE=3 SV=1
MSETFTFKKITEDGHARRGEITMPRGKVRTPAFMPVGTAGSVKAMYMEQVEELGADIILGNTYHLMLRPGAERIARLGGLHVFARWPKPILTDSGGFQVMSLAGLRKLTEKGVTFQSHIDGARYELTPERSIEIQCLLDSDIQMQLDQCVALPASFKEMEKAMELSLRWAERCKTAFGDQPGKAMFGIVQGGDNASLRERSAHALKDLDLKGYSIGGLAVGEPQNVMMDMLDVTCSILPQDKPRYLMGVGTPDDILKSVAHGVDMFDCVMPTRAGRHGLAFTRFGKINLRNAKHAEDPRPLDPQSSCPAARDYSRAYLHHLVKAGEPLAGMVITWNNLAFYQQLMQGIRDAIEAHRYADFVAEVTEEWNRGDRAD

SEQ ID NO: 52443 - protein, 375 aa, Bartonella apis
  misc_feature (1)..(375): tr|A0A1R0F6T2|A0A1R0F6T2_9RHIZ Queuine tRNA-ribosyltran sferase OS=Bartonella apis OX=1686310 GN=tgt PE=3 SV=1
MSETFTFKKITEDGHARRGEITMPRGKVRTPAFMPVGTAGSVKAMYMEQVEELGADIILGNTYHLMLRPGAERIARLGGLHVFARWPKPILTDSGGFQVMSLAGLRKLTEKGVTFQSHIDGARYELTPERSIEIQCLLDSDIQMQLDQCVALPASFKEMEKAMELSLRWAERCKTAFGNQPGKAMFGIVQGGDNASLRERSANALKDLDLKGYSIGGLAVGEPQNVMMDMLDVTCSILPEDKPRYLMGVGTPDDILKSVAHGVDMFDCVMPTRAGRHGLAFTRFGKINLRNAKHAEDPRPLDPQSPCPAARDYSRAYLHHLVKAGEPLAGMVITWNNLAFYQQLMQGIRDAIEAHRYADFVAEFTEEWNRGDSAD

SEQ ID NO: 52444 - protein, 373 aa, Bartonella australis
  misc_feature (1)..(373): tr|M1NYU8|M1NYU8_BARAA Queuine tRNA-ribosyltransferase OS=Bartonella australis (strain Aust/NH1) OX=1094489 GN =tgt PE=3 SV=1
MMIKTFHYNKISQDGCARRGEIITARGCIRTPAFMPVGTAGTVKAMYMDQLSTLGADIILGNTYHLMLRPGAERVARLGGLHEFIRWPGPILTDSGGFQVMSLAGICKITEKSVIFRSYINGAYYEMSPERSIEIQGLLDSDIQMQLDQCIALPASEREMEMAMELSLSWAQRCKTAFGDQPNKAMFGIVQGGDNMKLRERSAQALKEMDLKGYAIGGLAVGEPQNIMINVLDVVCSILPEDKPRYLMGVGTPDDILKSVARGIDMFDCVMPTRAGRHGLAFTRFGRINLRNARYAEDPLPLDLQSLCPAARDYSCAYLHHLIKSGESLGGMLLTWNNLFYYQQLMQGIRASIEAECYADFCAETSALWAQGR

SEQ ID NO: 52445 - protein, 378 aa, Bartonella bacilliformis
  misc_feature (1)..(378): tr|A0A072R1J2|A0A072R1J2_BARBA Queuine tRNA-ribosyltran sferase OS=Bartonella bacilliformis Ver097 OX=1293911 G N=tgt PE=3 SV=1
MMIKTFNYKKIAQDGCARRGEIITGRGCIRTPAFMPVGTAATVKAMYMDQLRDLGTDIILGNTYHLMLRPGAERVARLGGLHEFAHWPEPILTDSGGFQVMSLAGICKVTEQGVIFRSYLNGAQYEMSPERSIEIQGLLDSDIQMQLDQCIALPAKEREIEAAMELSLRWAQRCKTAFGHQPEKAMFGIVQGGDNMKLRERSVLALKEMDLKGYAIGGLAVGEPQDVMITVLDATCPLLPEDKPRYLMGVGTPDDILKSVARGIDMFDCVMPTRAGRHGLAFTRFGRINLRNARYAEDLRPLDPQSPCPAARDYSCAYLHHLIKSGESLGGMLLTWNNLSYYQQLMQGIRDAIEAGCYADFCAETTSAWMQGDKILTN

SEQ ID NO: 52446 - protein, 377 aa, Bartonella bacilliformis
  misc_feature (1)..(377): tr|A1UST6|A1UST6_BARBK Queuine tRNA-ribosyltransferase OS=Bartonella bacilliformis (strain ATCC 35685 / NCTC 1 2138 / KC583) OX=360095 GN=tgt PE=3 SV=1
MIKTFHYRKIAQDGCARRGEIITGRGRIRTPAFMPVGTAATVKAMYMDQLRDLGTDIILGNTYHLMLRPGAERVARLGGLHEFARWPEPILTDSGGFQVMSLAGICKVTEQSVIFRSYLNGAQYEMSPERSIEIQGLLDSDIQMQLDQCIALPAKEREIEAAMELSLRWAQRCKTAFGHQPEKAMFGIVQGGDNMKLRERSALALKEMDLKGYAIGGLAVGEPQDVMITVLDATCPLLPEDKPRYLMGVGTPDDILKSVARGIDMFDCVMPTRAGRHGLAFTRFGRINLRNARYAEDSCPLDPQSPCPAARDYSCAYLHHLIKSGESLGGMLLTWNNLSYYQQLMQGIRDAIEAGCYADFCAETTSAWMQGDKILEN

SEQ ID NO: 52447 - protein, 372 aa, Bartonella birtlesii
  misc_feature (1)..(372): tr|J0YS38|J0YS38_9RHIZ Queuine tRNA-ribosyltransferase OS=Bartonella birtlesii LL-WM9 OX=1094552 GN=tgt PE=3 S V=1
MIKTFHYRKIAQDGYARRGEIITGRGCVRTPAFMPVGTAGTVKAMYMDQIRSLGADIILGNTYHLMLRPGAERVARLGGLHEFSRWSGPILTDSGGFQVMSLAGIRKITEKSVLFRSYINGAYYEMSPERSIEIQGLLNADIQMQLDQCIALPASEKEIEAAMERSLRWAKRCKIAFGNQPEKALFGIVQGGDNIKLRERSAQALKEMDLKGYAIGGLAVGEPQNVMTTVLDATCPILPEDKPRYLMGVGTPDDILQSVARGIDMFDCVMPTRAGRHGLAFTRFGRINLRNARYAEDRYPLDSQSLCPAANDYSCAYLHHLIKSDESLGGMLLTWNNLFYYQQLMQGIRDAIEERRYADFCTETRALWAQGR

SEQ ID NO: 52448 - protein, 374 aa, Bartonella bovis
  misc_feature (1)..(374): tr|N6VRM7|N6VRM7_9RHIZ Queuine tRNA-ribosyltransferase OS=Bartonella bovis m02 OX=1094492 GN=tgt PE=3 SV=1
MIKTFHYNKIAQNGQARLGEIITGRGRIRTPAFMPVGTAGTVKAMYMDQLRSIGADVILGNTYHLMLRPGAERVARLGGLHEFSCWPEPILTDSGGFQVMSLSGICKITEKCVIFRSHINGAYYEMSPERSIEIQGLLDSDIQMQLDQCIALPASEKEIEAAMELSLRWAQRCKTAFGNQPDKAMFGIVQGGDNMKLRERSVQALKEMDLKGYAIGGLAVGESQDVMVAVLDTTCSILPENKPRYLMGVGTPDDILKSVARGIDMFDCVLPTRAGRHGLAFTRFGRVNLRNSCYAEDSRPLDPQSPCPAARDYSRAYLHHLVKSNEALGGMLLTWNNLSYYQQLMQGIRASIKTGCYADFCAETSALWKKSKKH

SEQ ID NO: 52449 - protein, 377 aa, Bartonella bovis
  misc_feature (1)..(377): tr|N6UIZ7|N6UIZ7_9RHIZ Queuine tRNA-ribosyltransferase OS=Bartonella bovis 91-4 OX=1094491 GN=tgt PE=3 SV=1
MIKMFHYNKIAQDGQARLGEIITGRGRIRTPAFMPVGTAGTVKAMYMDQLRSIGADVILGNTYHLMLRPGAERVARLGGLHEFARWPEPILTDSGGFQVMSLSGICKITEKCVIFRSHINGAYYEMSPERSIEIQGLLDSDIQMQLDQCIALPASEKKIEAAMELSLRWAQRCKTAFGNQPDKAMFGIVQGGDNMRLRERSVQALKEMDLKGYAIGGLAVGESQDIMMAVLDTTCSILPENKPRYLMGVGTPDDILKSVARGIDMFDCVLPTRAGRHGLAFTRFGRVNLRNARYAEDSRPLDPQSPCPAARDYSRAYLHHLVKSNEALGGMLLTWNNLSYYQQLMQGIRASIKTGCYADFCAETSALWKQSKKALAH

SEQ ID NO: 52450 - protein, 372 aa, Bartonella clarridgeiae
  misc_feature (1)..(372): tr|E6YHK4|E6YHK4_BARC7 Queuine tRNA-ribosyltransferase OS=Bartonella clarridgeiae (strain CIP 104772 / 73) OX= 696125 GN=tgt PE=3 SV=1
MIKAFHYKKISQDGYARQGEIITGRGRIRTPAFMPVGTAGTIKAMYMDQLRALGTDIILGNTYHLMLRPGAERVARLGGLHEFARWPEPILTDSGGFQVMSLSGICKITEQGVIFRSHINGAHYEMSPERSIEIQGLLDSDIQMQLDQCIALPTSEREMEAAMELSLRWAQRCKKVFGDQPEKAMFGIVQGGDNMKLRERSAQALKEMDLKGYAIGGLAVGEPQDVMTTVLDVTCSILPQDKPRYLMGVGTPDDILKSVARGVDMFDCVMPTRAGRHGLAFTRFGKINLRNARYAEDPNPLDPQSPCSAARDYSCAYLHHLVKSGESLGGMLLTWNNLFYYQQLMQGVRDAIKAGRYADFCADVATLWMQGR

SEQ ID NO: 52451 - protein, 372 aa, Bartonella doshiae
  misc_feature (1)..(372): tr|A0A380ZEZ1|A0A380ZEZ1_BARDO Queuine tRNA-ribosyltran sferase OS=Bartonella doshiae OX=33044 GN=tgt PE=3 SV=1
MIKTFHYKKIAQDKYARRGEIITGRGSIRTPAFMPVGTAGTVKAMYMDQLRDLGADIILGNTYHLMLRPGAERVARLGGLHEFIRWSRPILTDSGGFQVMSLAGIRKITEKGVIFRSYINGAYYDMSPERSIEIQGLLNSDIQMQLDQCIALPASEKETEAAMELSLRWAERCKKAFGDQPEKALFGIVQGGDNMKLRERSAQALKEMDLKGYAIGGLAVGEPQSVMTAVLDATCPILPEDKPRYLMGVGTPDDILKSVARGIDMFDCVMPTRAGRHGLAFTRFGKINLRNARYAEDPYPLDPQSLCPAASDYSCAYLHHLIKSRESLGGMLLTWNNLFYYQQLMQGIRDSIEAGCYSDFCSETCALWMQGR

SEQ ID NO: 52452 - protein, 372 aa, Bartonella elizabethae
  misc_feature (1)..(372): tr|J1K9T2|J1K9T2_BAREL Queuine tRNA-ribosyltransferase OS=Bartonella elizabethae F9251 = ATCC 49927 OX=1094555 GN=tgt PE=3 SV=1
MIKTFHYRKIAQDGWARRGEIITGRGCVRTPAFMPVGTAGTIKAMYMDQIRDLGADIILGNTYHLMLRPGAERVARLGGLHEFSRWNGPILTDSGGFQVMSLASIRKINEQGVIFRSYINGAYYEMSPERSIEIQGLLDADIQMQLDQCIALPATEKEMEEAMELSLRWAQRCKTAFGEQPDKALFGIVQGGDNMKLRERSAQALKEMDLKGYAIGGLAVGEPQSVMTAVLDTTCPILPEDKPRYLMGVGTPDDILQSVARGIDMFDCVMPTRAGRHGLAFTRFGRINLRNARYAEDPHPLDPQSLCPAANDYSCAYLHHLIKSGESLGGMLLTWNNLFYYQQLMQGIRDAIEEGCYADFCAETRALWAQGR

SEQ ID NO: 52453 - protein, 372 aa, Bartonella grahamii
  misc_feature (1)..(372): tr|C6AE67|C6AE67_BARGA Queuine tRNA-ribosyltransferase OS=Bartonella grahamii (strain as4aup) OX=634504 GN=tgt PE=3 SV=1
MIKTFHYRKIAQDGYARRGEIITGRGCVRTPAFMPVGTAGTVKAMYMDQIRDLGADIILGNTYHLMLRPGAERVARLGGLHEFSRWSGPILTDSGGFQVMSLAGIRKITEQGVIFRSYINGSYYEMSPERSIEIQELLGADIQMQLDQCIALPATEKEMEEAMELSLRWAQRCKTAFGDQPDKALFGIVQGGDNMKLRERSAQALKEMDLKGYAIGGLAVGEPQSVMTAVLDTTCPILPEDKPRYLMGVGTPDDILQSVARGVDMFDCVMPTRAGRHGLAFTRFGRINLRNARYAEDPHPLDPQSLCPAAHDYSCAYLHHLIKSGESLGGMLLTWNNLFYYQQLMQGIRDAIEEGCYADFCAETRALWAQGR

SEQ ID NO: 52454 - protein, 372 aa, Bartonella grahamii; identical to SEQ ID NO: 52453
  misc_feature (1)..(372): tr|A0A336N9A5|A0A336N9A5_BARGR Queuine tRNA-ribosyltran sferase OS=Bartonella grahamii OX=33045 GN=tgt PE=3 SV= 1

SEQ ID NO: 52455 - protein, 372 aa, Bartonella henselae
  misc_feature (1)..(372): tr|X5LN02|X5LN02_BARHN Queuine tRNA-ribosyltransferase OS=Bartonella henselae OX=38323 GN=tgt PE=3 SV=1
MIKTFHYRKIAQDGSARRGEIITGRGCIRTPAFMPVGTAGTVKAMYMDQIRALGADIILGNTYHLMLRPGAECVARLGGLHHFSRWHGPILTDSGGFQVMSLAGIRKITEQSVIFRSYINGAYYEMSPERSIEIQGLLNSDIQMQLDQCIALPASEKEVESAMELSLRWAQRCKTAFGDQPDKALFGIVQGGDNMKMRERSAQALKEMGLKGYAIGGLAVGEPQNVMTAVLDVTCPILPEDKPRYLMGVGTPDDILQSVARGIDMFDCVMPTRAGRHGLAFTRFGRINLRNARYAEDPHPLDPQSLCPAANDYSCAYLHHLIRSGESLGGMLLTWNNLFYYQQLMQGIRDAIEEGCYADFCAETRALWTKGR

SEQ ID NO: 52456 - protein, 372 aa, Bartonella henselae; identical to SEQ ID NO: 52455
  misc_feature (1)..(372): tr|A0A0R4J8M4|A0A0R4J8M4_BARHE Queuine tRNA-ribosyltran sferase OS=Bartonella henselae (strain ATCC 49882 / DSM 28221 / Houston 1) OX=283166 GN=tgt PE=3 SV=1

SEQ ID NO: 52457 - protein, 375 aa, Bartonella koehlerae
  misc_feature (1)..(375): tr|A0A067W6S0|A0A067W6S0_9RHIZ Queuine tRNA-ribosyltran sferase OS=Bartonella koehlerae C-29 OX=1134510 GN=tgt PE=3 SV=1
MRVLIKIFHYRKIAQDGCARRGEIITGRGCIRTPAFMPVGTTGTVKAMYMDQIRALGADVILGNTYHLMLRPGAECVARLGGLHHFSRWHGPILTDSGGFQVMSLAGIRKITEQSVIFRSYINGAYYEMSPERSIEIQGLLNSDIQMQLDQCIALPASEKEIESAMELSLRWAQRCKTAFGDQPGKALFGIVQGGDNMKMREQSAQALKEMDLKGYAIGGLAVGEPQSVMTAVLDATCPILPEDKPRYLMGVGTPDDILQSVARGIDMFDCVMPTRAGRHGLAFTRFGRINLRNARYAEDSHPLDSQSLCPAANDYSCAYLHHLVKSGESLGGMLLTWNNLFYYQQLMHGIRDAIGKGCYADFCAETRALWKKGR

SEQ ID NO: 52458 - protein, 375 aa, Bartonella melophagi
  misc_feature (1)..(375): tr|J0R3C0|J0R3C0_9RHIZ Queuine tRNA-ribosyltransferase OS=Bartonella melophagi K-2C OX=1094557 GN=tgt PE=3 SV= 1
MMIKTFHYNKIAQDGQARLGEIITGRGRIRTPAFMPVGTAGTVKAMYMDQLRALGVDVILGNTYHLMLRPGAERIARLGGLHKFARWPEPILTDSGGFQVMSLSGICKITEKCVIFRSHINGAYYEMSPERSIEIQGLIDSDIQMQLDQCIALPASEKEIEAAMELSLRWAQRCKTAFGNQPDKAMFGIVQGGDNMKLRERSVQALKEMDLKGYAIGGLAVGESQDVMMAVLDATCCILPENKPRYLMGVGTPDDILKSVARGIDMFDCVLPTRAGRHGLAFTRFGKMNLHNARYAEDSRPLDPQSPCPAARDYSRAYLHHLVKSNEALGGMLLTWNNLSYYQQLMQDIRTSIKAGCYADFCAETSALWKQGNKR

SEQ ID NO: 52459 - protein, 372 aa, Bartonella rattimassiliensis
  misc_feature (1)..(372): tr|J0QKG8|J0QKG8_9RHIZ Queuine tRNA-ribosyltransferase OS=Bartonella rattimassiliensis 15908 OX=1094556 GN=tgt PE=3 SV=1
MKKTFHYRKIAQDGYARRGEIITGRGCVRTPAFMPVGTAGTVKAMYMEQMRDLGADIILGNTYHLMLRPGAERVARLGGLHKFSRWSGPILTDSGGFQVMSLAGIRKITEQGVIFRSYINGAYYEMSPERSIEIQGLLGADIQMQLDQCIALPATEKEMEEAMELSLRWAQRCKTAFGDQSDKALFGIVQGGDNIKLRERSAQALKEMDLKGYAIGGLAVGEPQSVMIAMLDAICPILPEDKPRYLMGVGTPDDILQSVACGIDMFDCVMPTRAGRHGLAFTRFGRINLRNAHYAEDPHPLDPQSLCPAANDYSCAYLHHLIKSGESLGGMLLTWNNLFYYQQLMQGIRDAIEEGCYADFCAETRALWEQGR

SEQ ID NO: 52460 - protein, 372 aa, Bartonella rochalimae
  misc_feature (1)..(372): tr|E6YLH8|E6YLH8_9RHIZ Queuine tRNA-ribosyltransferase OS=Bartonella rochalimae ATCC BAA-1498 OX=685782 GN=tgt PE=3 SV=1
MIKAFHYEKKSQDGYARQGEIITGRGRIRTPAFMPVGTVGTVKAMYMDQLHALGADIILGNTYHLMLRPGAERVARLGGLHKFIRWSGPILTDSGGFQVMSLSGICKITEQGVIFRSHINGAYYDMSPERSIEIQGLLDSDIQMQLDQCIALPASEREIEAAMELSLRWAQRCKKVFGDQPEKAMFGIVQGGDNMKLRERSAQALKEMDLKGYAIGGLAVGEPQDVMTAVLDVTCSILPEDKPRYLMGVGTPDDILKSVARGVDMFDCVMPTRAGRHGLAFTRFGRINLRNARYAEDPNPLDPQSPCSAARDYSCAYLHHLIKSGESLGGMLLTWNNLFYYQQLMQGIRDAIQAGRYADFCSDTVALWMQGR

SEQ ID NO: 52461 - protein, 373 aa, Bartonella rochalimae
  misc_feature (1)..(373): tr|A0A067WEE0|A0A067WEE0_9RHIZ Queuine tRNA-ribosyltran sferase OS=Bartonella rochalimae ATCC BAA-1498 OX=68578 2 GN=tgt PE=3 SV=1
MMIKAFHYEKKSQDGYARQGEIITGRGRIRTPAFMPVGTVGTVKAMYMDQLHALGADIILGNTYHLMLRPGAERVARLGGLHKFIRWSGPILTDSGGFQVMSLSGICKITEQGVIFRSHINGAYYDMSPERSIEIQGLLDSDIQMQLDQCIALPASEREIEAAMELSLRWAQRCKKVFGDQPEKAMFGIVQGGDNMKLRERSAQALKEMDLKGYAIGGLAVGEPQDVMTAVLDVTCSILPEDKPRYLMGVGTPDDILKSVARGVDMFDCVMPTRAGRHGLAFTRFGRINLRNARYAEDPNPLDPQSPCSAARDYSCAYLHHLIKSGESLGGMLLTWNNLFYYQQLMQGIRDAIQAGRYADFCSDTVALWMQGR

SEQ ID NO: 52462 - protein, 378 aa, Bartonella schoenbuchensis
  misc_feature (1)..(378): tr|A0A1S6XQN1|A0A1S6XQN1_BARSR Queuine tRNA-ribosyltran sferase OS=Bartonella schoenbuchensis (strain DSM 13525 / NCTC 13165 / R1) OX=687861 GN=tgt PE=3 SV=1
MMIKTFHYNKIAQDGQARLGEIITRRGRIRTPAFMPVGTVGTVKAMYMDQIRDLGADVILGNTYHLMLRPGAERVARLGGLHEFARWPEPILTDSGGFQVMSLSGICKITEKCVIFRSHINGAYYEMSPERSIEIQGLLDSDIQMQLDQCIALPASEKEIEAAMELSLRWAQRCKTAFGDQPDKAMFGIVQGGDNMKLRERSVQALKEMDLKGYAIGGLAVGETQDIMMAVLDATCSLLPENKPRYLMGVGTPDDILKSVARGIDMFDCVLPTRAGRHGLAFTRFGRINLRNARYAEDSRPLDPQSPCPAARDYSRAYLHHLVKSNEALGGMLLTWNNLSYYQQLMQGIRTSIKAGCYADFCAETSALWEQSNKALAH

SEQ ID NO: 52463 - protein, 378 aa, Bartonella schoenbuchensis; identical to SEQ ID NO: 52462
  misc_feature (1)..(378): tr|A0A024LR50|A0A024LR50_9RHIZ Queuine tRNA-ribosyltran sferase OS=Bartonella schoenbuchensis OX=165694 GN=tgt PE=3 SV=1

SEQ ID NO: 52464 - protein, 372 aa, Bartonella sp.
  misc_feature (1)..(372): tr|A0A5B9CWL2|A0A5B9CWL2_9RHIZ Queuine tRNA-ribosyltran sferase OS=Bartonella sp. 'Tel Aviv' OX=2133959 GN=tgt PE=3 SV=1
MIKTFHYRKIAQDGWARRGEIITGRGCVRTPAFMPVGTAGTIKAMYMDQIRDLGADIILGNTYHLMLRPGAERVARLGGLHEFSRWNGPILTDSGGFQVMSLASIRKINEQGVIFRSYINGAYYEMSPERSIEIQGLLDADIQMQLDQCIALPATEKEMEEAMELSLRWAQRCKTAFGEQPDKALFGIVQGGDNMKLRERSAQALKEMDLKGYAIGGLAVGEPQSVMIAVLDTTCPILPEGKPRYLMGVGTPDDILQSVARGIDMFDCVMPTRAGRHGLAFTRFGRINLRNARYAEDPYPLDPQSLCPAANDYSCAYLHHLIKSGESLGGMLLTWNNLFYYQQLMQGIRDAIEEGCYADFCAETRALWAQGR

SEQ ID NO: 52465 - protein, 229 aa, Bartonella sp.
  misc_feature (1)..(229): tr|A0A1S6WUD1|A0A1S6WUD1_9RHIZ Queuine tRNA-ribosyltran sferase OS=Bartonella sp. WD16.2 OX=1933904 GN=BWD162_0 08000 PE=4 SV=1
MGEIITGRGRIRTPAFMPVGTVGTVKAMYMDQLRDLGADVILGNTYHLMLRPGAERIARLGGLHEFARWPEPILTDSGGFQVMSLSGICKITEKCVIFRSHINGAYYEMSPERSIEIQGLLDSDIQMQLDQCIALPASEKEIEAAMELSLRWAQRCKTAFGNQSDKAMFGIVQGGDNMKLRERSVQTLKEMDLKGYAIGGLAVGETQDVMMAVLDATCSILPENKHAIS

SEQ ID NO: 52466 - protein, 375 aa, Bartonella tamiae
  misc_feature (1)..(375): tr|J1JVG8|J1JVG8_9RHIZ Queuine tRNA-ribosyltransferase OS=Bartonella tamiae Th239 OX=1094558 GN=tgt PE=3 SV=1
MIKDFQFKKIAQDGQARRGEITMPRGKIRTPAFMPVGTAGTVKAMYMDQLESLGADIILGNTYHLMLRPGAERVARLGGLHEFTRWQKPILTDSGGFQVMSLGGLVKLNEKNVTFQSHIDGAYYEMSPERSIEIQGLLDSDIQMQLDQCIALPASENAMENAMQLSLRWAERCKNAFGEQRGKALFGIVQGGDNIRLREQSAKALTDMDLKGYAIGGLAVGEPQDVMLAMLEVTCPLLPIEKPRYLMGVGTPDDILKSVARGIDMFDCVMPTRAGRHGLAYTRFGKINLRNACHAEDTRPLDPQSECPAAREYSRAYLHHLIKSGEPLGGMLLTWNNLAYYQYLMQSIREAIEAQKFNDFCIETMRVWEKGDVSL

SEQ ID NO: 52467 - protein, 372 aa, Bartonella taylorii
  misc_feature (1)..(372): tr|J1A356|J1A356_BARTA Queuine tRNA-ribosyltransferase OS=Bartonella taylorii 8TBB OX=1094560 GN=tgt PE=3 SV=1
MIKTFHYRKIAQDGCARRGEIITDRGCIRTPAFMPVGTAGTVKAMYMDQIRALGADIILGNTYHLMLRPGAERVARLGGLHEFSRWSGPILTDSGGFQVMSLAGIRKITEQGVIFRSYVNGAYYEMSPERSIEIQELLNADIQMQLDQCIALPASEKEIEAAMELSLRWAQRCKTAFGDHPGKALFGIVQGGDNMKLRERSAQALKEMDLKGYAIGGLAVGEPQSVMTSVLDATCPILPEDKPRYLMGVGTPDDILQSVARGIDMFDCVMPTRAGRHGLAFTRFGRINLRNARYTEDPYPLDSQSLCPAANDYSCAYLHHLIKSGESLGGMLLTWNNLFYYQQLMQGIRDAIEEGCYADFCAETRALWMQGR

SEQ ID NO: 52468 - protein, 372 aa, Bartonella tribocorum
  misc_feature (1)..(372): tr|A9IVS9|A9IVS9_BART1 Queuine tRNA-ribosyltransferase OS=Bartonella tribocorum (strain CIP 105476 / IBS 506) OX=382640 GN=tgt PE=3 SV=1
MIKTFHYRKIAQDGYARRGEIITGRGCVRTPAFMPVGTAGTVKAMYMDQIRELGADIILGNTYHLMLRPGAERVARLGGLHEFSRWNGPILTDSGGFQVMSLAGIRKITEQGVIFRSYINGAYYEMSPERSIEIQGLLDADVQMQLDQCIALPATEKEIEEAMELSLRWAQRCKTAFGNQPDKALFGIVQGGDNMKLRERSAQALKEMNLKGYAIGGLAVGEPQSVMTAVLDVTCPILPEDKPRYLMGVGTPDDILQSVARGVDMFDCVMPTRAGRHGLAFTRFGRINLRNARYAEDPHPLDPQSLCPAANDYSCAYLHHLIKSDESLGGMLLTWNNLFYYQQLMQGIRDAIEEGCYADFCAETRALWAQGR

SEQ ID NO: 52469 - protein, 372 aa, Bartonella tribocorum
  misc_feature (1)..(372): tr|A0A2M6UT79|A0A2M6UT79_9RHIZ Queuine tRNA-ribosyltran sferase OS=Bartonella tribocorum OX=85701 GN=tgt PE=3 S V=1
MIKTFHYRKIAQDGYARRGEIITGRGCVRTPAFMPVGTAGTVKAMYMDQIRDLGADIILGNTYHLMLRPGAERVARLGGLHEFSRWNGPILTDSGGFQVMSLAGIRKITEKGVIFRSYINGAYYEMSPERSIEIQGLLNADIQMQLDQCIALPATEKEMEEAMELSLRWAQRCKKAFGDQPDKALFGIVQGGDNMKLRERSAQALREMDLKGYAIGGLAVGEPQSVMTAVLDATCPILPEDKPRYLMGVGTPDDILQSVARGVDMFDCVMPTRAGRHGLAFTRFGRINLRNARYAEDPHPLDPQSLCPAANDYSCAYLHHLIKSGESLGGMLLTWNNLFYYQQLMQGIRDAIEEGCYADFCAETRALWAQGR

SEQ ID NO: 52470 - protein, 372 aa, Bartonella vinsonii
  misc_feature (1)..(372): tr|J0QXT6|J0QXT6_BARVI Queuine tRNA-ribosyltransferase OS=Bartonella vinsonii subsp. arupensis OK-94-513 OX=10 94562 GN=tgt PE=3 SV=1
MIKTFHYRKIAQDGCARRGEIITGRGCVRTPAFMPVGTAGTVKAMYMDQIRALGADIILGNTYHLMLRPGAERVARLGGLHEFSRWSGPILTDSGGFQVMSLAGIRKITEQGVIFRSYINGAYYEMSPERSIEIQGLLNADIQMQLDQCIALPASEKEMEAAMELSLRWAQRCKKAFGDQPDKALFGIVQGGDNMKLRERSAHALKEMDLKGYAIGGLAVGEPQSVMTAVLDATCPILPEDKPRYLMGVGTPDDILQSVARGIDMFDCVMPTRAGRHGLAFTRFGRINLRNARYAEDPYPLDPQSLCPATCDYSCAYLHHLIRSGESLGGMLLTWNNLYYYQQLMQGIRDAIEEGCYADFCAETRALWKQGR

SEQ ID NO: 52471 - protein, 372 aa, Bartonella vinsonii
  misc_feature (1)..(372): tr|A0A3S5AV24|A0A3S5AV24_BARVI Queuine tRNA-ribosyltran sferase OS=Bartonella vinsonii OX=33047 GN=tgt PE=3 SV= 1
MIKTFHYRKIAQDGYARRGEIITGRGCVRTPAFMPVGTAGTVKAMYMDQIRALGADIILGNTYHLMLRPGAERVARLGGLHEFSRWSGPILTDSGGFQVMSLAGIRKITEQGVIFRSYINGAYYEMSPERSIEIQGLLNADIQMQLDQCIALPASEKEIEAAMELSLRWAQRCKTAFGDQPDKALFGIVQGGDNMKLRERSAHALKEMDLKGYAIGGLAVGEPQSVMTAVLDTTCPILPEDKPRYLMGVGTPDDILQSVARGIDMFDCVMPTRAGRHGLAFTRFGRINLRNARYAEDPHPLDPQSLCPAACDYSCAYLHHLIRSGESLGGMLLTWNNLYYYQQLMQGIRDAIEEGCYTDFCAETRALWNQGR

SEQ ID NO: 52472 - protein, 380 aa, Bartonella washoeensis
  misc_feature (1)..(380): tr|J0PWR3|J0PWR3_9RHIZ Queuine tRNA-ribosyltransferase OS=Bartonella washoeensis Sb944nv OX=1094563 GN=tgt PE= 3 SV=1
MESKKTRVMIKTFHYRKIAQDGCARCGEIITVRGCVRTPAFMPVGTAGTVKAMYMDQIRALGADIILGNTYHLMLRPGAERVARLGGLHEFSRWSGPILTDSGGFQVMSLAGIRKITEQGVIFRSYLNGAYYEMSPERSIEIQGLLNADIQMQLDQCIALPASEKEMEAAMELSLRWAQRCKTAFGDQPDKALFGIVQGGDNMKLRERSAQVLKEMDLKGYAIGGLAVGEPQSVMTAVLDATCPILPEDKPRYLMGVGTPDDILKSVARGIDMFDCVMPTRAGRHGLAFTRFGRINLRNARYAEDPHPLDPQSLCPAASDYSCAYLHHLIKSGESLGGMLLTWNNLFYYQYLMQGIRDAIKEGCYADFCAETRALWLQGR

SEQ ID NO: 52473 - protein, 372 aa, Bartonella washoeensis
  misc_feature (1)..(372): tr|J0QLH1|J0QLH1_9RHIZ Queuine tRNA-ribosyltransferase OS=Bartonella washoeensis 085-0475 OX=1094564 GN=tgt PE =3 SV=1
MIKTFHYRKIAQDGCARCGEIITVRGCVRTPAFMPVGTAGTVKAMYMDQIRALGADIILGNTYHLMLRPGAERVARLGGLHEFSRWSGPILTDSGGFQVMSLAGIRQITEQGVIFRSYLNGAYYEMSPERSIEIQGLLNADIQMQLDQCIALPASEKEMEAAMELSLRWAQRCKTAFGDQPDKALFGIVQGGDNMKLRERSAQVLKEMDLKGYAIGGLAVGEPQSVMTAVLDATCPILPEDKPRYLMGVGTPDDILKSVACGIDMFDCVMPTRAGRHGLAFTRFGRINLRNARYAEDPHPLDPQSLCPAASDYSCAYLHHLIKSGESLGGMLLTWNNLFYYQYLMQGIRDAIKEGCYADFCAETRALWLQGR

SEQ ID NO: 52474 - protein, 380 aa, Basilea psittacipulmonis
  misc_feature (1)..(380): tr|A0A077DGK6|A0A077DGK6_9BURK Queuine tRNA-ribosyltran sferase OS=Basilea psittacipulmonis DSM 24701 OX=107268 5 GN=tgt PE=3 SV=1
MDKKFKFEVLKTSGKARRASLTLNHGTVQTPMFMPVGTYGSVKAMLPHELKEIGSQVILGNTFHLWLRPGTEVIKKHGGLHGFMQYDGPILTDSGGFQVFSLSAIRSKIKEEGVRFSSPIDGAKLFLTPEESMRIQTDLNSDIVMVFDECTPYEINGQPATHEQAAQSMRMSLRWAKRSRDTFDALDNPNALFGIVQGGMYEDLRMESLEGLKNIGFDGYAIGGLSVGEPKEDMIRILDQIAYRLPENAPRYLMGVGTPEDLVDGVSRGIDMFDCVMPSRNARNGTLFTRFGDVKLRNARYKDDTRPLDPTCHCHTCQHFSRAYLHHLQKANEITGARLNTLHNLAFYLQIMKEMREALENDRFEEWKAQFRKDRATGVA

SEQ ID NO: 52475 - protein, 367 aa, Bathymodiolus azoricus
  misc_feature (1)..(367): tr|A0A1H6J6M4|A0A1H6J6M4_9GAMM Queuine tRNA-ribosyltran sferase OS=Bathymodiolus azoricus thioautotrophic gill symbiont OX=235205 GN=tgt PE=3 SV=1
MKFKLKNTNDKARRGTMIFARGTVETPAFMPVGTYGTVKAMTPEEVEGIGAQIILGNTFHLSITPGTDVIKAHGDLHDFMHWQGPILTDSGGFQVFSLGDMRKISEAGVDFRSPKDGAKIFMGPEESIKIQSDLGSDIVMIFDECTPYPADKVTAEQSMQLSLRWAQRSKDAHQALGNENALFGIVQGGMYEDLRQQSAKKLIEIDFDGYAIGGLSVGEPKEEMMKVLDFLPEQLPDDKPRYLMGVGTPSDLVEAVERGIDMFDCVMPTRNARNGYLFTSSGIVKIRNAQYKLDTKPLDKRCGCYTCQNYSRSYLHHLQRKNEILGARLNTIHNLYYYQDLMKGMREAIEKGVFAEFKQLFYKMQNE

SEQ ID NO: 52476 - protein, 382 aa, Bathymodiolus azoricus
  misc_feature (1)..(382): tr|A0A1H6M2F3|A0A1H6M2F3_9GAMM Queuine tRNA-ribosyltran sferase OS=Bathymodiolus azoricus thioautotrophic gill symbiont OX=235205 GN=tgt PE=3 SV=1
MEYTRNFGRYNQRMQMKFKLKNTNDKARRGTMIFARGTVETPAFMPVGTYGTVKAMTPEEVEGIGAQIILGNTFHLSITPGTDVIKAHGDLHDFMHWQGPILTDSGGFQVFSLGDMRKISEAGVDFRSPKDGAKIFMGPEESIKIQSDLGSDIVMIFDECTPYPADKVTAEQSMQLSLRWAQRSKDAHQALGNENALFGIVQGGMYEDLRQQSAKKLIEIDFDGYAIGGLSVGEPKEEMMKVLDFLPEQLPDDKPRYLMGVGTPSDLVEAVERGIDMFDCVMPTRNARNGYLFTSSGIVKIRNAQYKLDTKPLDKRCGCYTCQNYSRSYLHHLQRKNEILGARLNTIHNLYYYQDLMKGMREAIEKGVFAEFKQLFYKMQNE

SEQ ID NO: 52477 - protein, 367 aa, Bathymodiolus brooksi
  misc_feature (1)..(367): tr|A0A482YTZ8|A0A482YTZ8_9BACT Queuine tRNA-ribosyltran sferase OS=Bathymodiolus brooksi thiotrophic gill symbi ont OX=1052209 GN=tgt PE=3 SV=1
MKFKLKNTDQKARRGTLTFERGAVETPAFMPVGTYGTVKAMTPEEVEEIGAQIILGNTFHLAITPGTDVIKAHGDLHDFMHWQGPILTDSGGFQVFSLGDMRKISEAGVDFRSPKDGAKIFMGPEESIKIQFDLGADIVMIFDECTPYPADKATADQSMQLSLRWAQRSKDAHQALGNKNALFGIVQGGMYEDLRCESASALINIDFDGFAIGGLSVGEPKEEMIKVLDYLPEQLPSDKPRYLMGVGTPSDLVEAVERGIDMFDCVMPTRNARNGYLFTSNGIVKIRNAQYKLDIKPLDERCDCYTCQNYSRSYLHHLQRKNEILGARLNTIHNLHYYQDLMQQMRAAIENNAFVEFKQSFYTMQNA

SEQ ID NO: 52478 - protein, 367 aa, Bathymodiolus heckerae
  misc_feature (1)..(367): tr|A0A483A2A7|A0A483A2A7_9BACT Queuine tRNA-ribosyltran sferase OS=Bathymodiolus heckerae thiotrophic gill symb iont OX=1052212 GN=tgt PE=3 SV=1
MKFELKNTNQKARRGTLIFERGVVETPAFMPVGTYGTVKAMTPEEVEETGAQILLGNTFHLSITPGTEVIKAHGDLHDFMHWQGPILTDSGGFQVFSLGEMRKISEAGVDFRSPKDGAKIFMGPEESIKIQSDLGSDIVMIFDECTPYPADKITADQSMQLSLRWAQRSKNTHQEVNNKSALFGIVQGGMHEDLRHQSAAALINIGFDGYAIGGLSVGEPKEEMIKVLDYLPAQLPDDKPRYLMGVGTPSDLVEAVERGIDMFDCVMPTRNARNGYLFTSSGVVKIRNAQYKLDIKSVDARCGCYTCQNYSRSYLHHLQRKNEILGARLNTLHNLYYYQDLMQQMRTAIENNTFLAFKQSFYEMQDA

SEQ ID NO: 52479 - protein, 374 aa, Bathymodiolus heckerae
  misc_feature (1)..(374): tr|A0A482YQD5|A0A482YQD5_9BACT Queuine tRNA-ribosyltran sferase OS=Bathymodiolus heckerae thiotrophic gill symb iont OX=1052212 GN=tgt PE=3 SV=1
MKFELKNTDNKARCGTMVFERGEVQTPAFMPVGTYGTVKAMTPEEVIDLGAQIILGNTFHLAITPGTDVIEAHGDLHNFMHWQGPILTDSGGFQVFSLGAMRKISEEGVEFRSPKNGDKIFMGPEESLQIQYKLGSDIVMIFDECTPYPADKSTADQSMRLSLRWAKRSKSEHTKLNNPNALFGIVQGGMFKELRQESAKALIEIGFDGYAIGGLSVGEPKEEMIKVLDYLPSQLPADKPRYLMGVGTPSDLVEAVERGVDMFDCVMPTRNARNGYLFTSAGIVKIRNAQYKLDVSKLDDRCGCYTCQNYTKSYLYHLQRKNEILSARLNTTHNLYYYQDLMSQMRAAIENNRFAEFKQQFYLVHKGKTYKLGL

SEQ ID NO: 52480 - protein, 370 aa, Bathymodiolus platifrons
  misc_feature (1)..(370): tr|A0A1Z5H8M2|A0A1Z5H8M2_9GAMM Queuine tRNA-ribosyltran sferase OS=Bathymodiolus platifrons methanotrophic gill symbiont OX=113268 GN=tgt PE=3 SV=1
MQFDLLNNDGYARRGRLTFDRGVIETPIFMPVGTYGTVKSLTPDELTGIGAQIILGNTFHLMLRPTTEVIKAHGDLHDFMNWHGPILTDSGGFQVFSLGELRKITEAGVTFKSPIDGRKIFMGPEESMQVQRDLGSDIVMIFDECTPYPATVQEAADSMRLSLRWAERSKKAHGDNASALFGIVQGGMYEHLRHESIAGLIDIGFDGYAIGGLSVGEPKDEMMATLDVVHSKLPVDKPRYLMGVGTPEDLIEAVRRGIDMFDCVMPTRNARNGHIFTSTGVIKIRNSQYQLDTRPLDESCACYTCQNYSRSYLRHLDKCHEILGARLNTIHNLYYYLKLMQDVREAIEGKVFEEYVKSFYELRGKAVPAT

SEQ ID NO: 52481 - protein, 367 aa, Bathymodiolus thermophilus
  misc_feature (1)..(367): tr|A0A3G3IK54|A0A3G3IK54_9GAMM Queuine tRNA-ribosyltran sferase OS=Bathymodiolus thermophilus thioautotrophic g ill symbiont OX=2360 GN=tgt PE=3 SV=1
MKFKLKNTDQKARRGTLIFERGTVETPAFMPVGTYGTVKAMTPEEVKEVGAQIILGNTFHLAITPGTDVIKAHGDLHDFMHWQGPILTDSGGFQVFSLGDMRKISEAGVDFRSPKDGAKIFMGPEESIKIQFDLGADIVMIFDECTPYPADKATADQSMQLSLRWAQRSKDAHQALGNKNALFGIVQGGMYEDLRCESASALIDIDFDGFAIGGLSVGEPKEEMIKVLDYLPEQLPNDKPRYLMGVGTPSDLVEAVERGIDMFDCVMPTRNARNGYLFTSNGIVKIRNAQYKLDIKPLDERCGCYTCQNYSRSYLHHLQRKNEILGARLNTIHNLHYYQDLMQQMRTAIENNTFAEFKQSFYAMQNA

SEQ ID NO: 52482 - protein, 367 aa, Bathymodiolus thermophilus
  misc_feature (1)..(367): tr|A0A1J5U602|A0A1J5U602_9GAMM Queuine tRNA-ribosyltran sferase OS=Bathymodiolus thermophilus thioautotrophic g ill symbiont OX=2360 GN=tgt PE=3 SV=1
MKFKLKNTDQKARRGALIFERGTVETPAFMPVGTYGTVKAMTPEEVKEVGAQIILGNTFHLAITPGTDVIKAHGDLHDFMHWQGPILTDSGGFQVFSLGDMRKISEAGVDFRSPKDGAKIFMGPEESIKIQFDLGADIVMIFDECTPYPADKATADQSMQLSLRWAQRSKDAHQALGNKNALFGIVQGGMYEDLRCESASALIDIDFDGFAIGGLSVGEPKEEMIKVLDYLPEQLPNDKPRYLMGVGTPSDLVEAVERGIDMFDCVMPTRNARNGYLFTSNGIVKIRNAQYKLDIKPLDERCGCYTCQNYSRSYLHHLQRKNEILGARLNTIHNLHYYQDLMQQMRTAIENNTFAEFKQSFYAMQNA

SEQ ID NO: 52483 - protein, 375 aa, Bauldia litoralis
  misc_feature (1)..(375): tr|A0A1G6B595|A0A1G6B595_9RHIZ Queuine tRNA-ribosyltran sferase OS=Bauldia litoralis OX=665467 GN=tgt PE=3 SV=1
MTDFGMTIAATDGAARTGELTTARGVIRTPAFMPVGTAGTVKGMYPEQVRGLGADIILGNTYHLMLRPGAERVAGLGGLHVFSNWPYPILTDSGGFQVMSLSGLRKLDEEGVTFQSHLDGSTHRLTPERSLEIQGLLDSDIRMQLDECVRLPAPRQEVERAMRMSLRWAERSKAAFGATKERALFGIVQGGDQPDLRIASAEALADIGFHGYAIGGLAVGEPQDVMLAMLDTTVPALPLDHPRYLMGVGQPDDIVEAVRRGVDMFDCVLPTRAGRHGVAYTRFGRINMKNARHADDRRPIDETMDWVPARDYSRAYLHHLIKSGELLGAMLLTWNNLAYYQHLMAGVRAAIAAGRFDDFVAETKDGWARGDLPPA

SEQ ID NO: 52484 - protein, 370 aa, Baumannia cicadellinicola
  misc_feature (1)..(370): sp|Q1LSP0|TGT_BAUCH Queuine tRNA-ribosyltransferase OS= Baumannia cicadellinicola subsp. Homalodisca coagulata OX=374463 GN=tgt PE=3 SV=1
MKYQLLKNCAGARRGRIQFDRGVVETPAFMPVGTYGTVKSLTTEEVKDTGTQMILCNAFHLWLRSEQEIIKLHGDLHHFMHWYGPIITDSGGFQIFSISNLNKITEAGVYFRHPINGSAIFLSPEKSMEIQYDLGSDIVMVLDECTPYPVQWDEAKKSMVMSLRWSERSHKRFHELKNNNALFGIIQGGMYKDLRDLSVKKLIEIGFDGYAIGGLSVGEPKENMHHILAHICPQLPEDKPRYLMGVGKPEDLIEGWRRGIDMFDCVIPTRNARNGHLFVTNGVVKIRNAKYKYDITSLDIYCDCYTCCNYSRAYLHHLSRCNEILGARLNTIHNLRYYQRLMADLRDAIDTGTSQYFIEEFYNKTRNSYY

SEQ ID NO: 52485 - protein, 381 aa, Bavariicoccus seileri
  misc_feature (1)..(381): tr|A0A3D4S2U6|A0A3D4S2U6_9ENTE Queuine tRNA-ribosyltran sferase OS=Bavariicoccus seileri OX=549685 GN=tgt PE=3 SV=1
MSNKPISYTLTKTDKQTGARLGELHTPHGTFQTPMFMPVGTQATVKAVSPEELKQMGAGVILSNTYHLWLRPGPDIVAEAGGLHRFMNWDQGILTDSGGYQVFSLSDNRHIVEEGVHFRNHLNGSKMFLSPEKAIEIQTKLGADIIMSLDECPPFDETHDYMAKSIARTTRWAERGLIAHGDNPKQGLFGILQGGGYKDLRIQHAHDMLSLDFSGYSIGGLSVGEPKEKMYEVLNYLTPLMPSHKPRYLMGVGSPDALIEGVINGIDMFDCVLPTRIARNGTCMTSSGRLVVKNAKYERDFAPIDAECDCYTCKNYSRAYVRHLFKADETFGLRLTTIHNLHFLLHLMEQIREAIKNDCLLDFKEEFYEKYGLNAENAKNF

SEQ ID NO: 52486 - protein, 383 aa, Bdellovibrio bacteriovorus
  misc_feature (1)..(383): tr|Q6MKZ0|Q6MKZ0_BDEBA Queuine tRNA-ribosyltransferase OS=Bdellovibrio bacteriovorus (strain ATCC 15356 / DSM 50701 / NCIB 9529 / HD100) OX=264462 GN=tgt PE=3 SV=1
MDGHNSTATDATMKLGEFKVHATDGHARRATLMTAHGPVQTPVFMAVGTKATVKAMTPEELKDCGTQVVLGNTYHLHLRPGEKTIARMGGLHKFMNWHGPILTDSGGFQVFSLSQLRNMTEEGVEFRSHLDGAKHFISPEKSMEIQMDLGSDIIMAFDECLKYPATDEEIEKSMALTYRWLLRSQAAMTRKESLLFGIVQGGLSLKHRLKSMEQICSVDLPGYALGGFSVGEPMHLMHALLPDVAPRMPANKPRYLMGVGTPTDLIIAIDSGVDMFDCVMPTRVARNGTIYTWNGKVSIKRSEYKEDPSALDPECDCYTCKNYSKSYLRHMFMSGEILGSRLNTIHNIHFYMKVMEKAREAIAQGRWAEYRDFCLTRFAKKDS

SEQ ID NO: 52487 - protein, 371 aa, Bdellovibrio bacteriovorus
  misc_feature (1)..(371): tr|A0A162GAL8|A0A162GAL8_BDEBC Queuine tRNA-ribosyltran sferase OS=Bdellovibrio bacteriovorus OX=959 GN=tgt PE= 3 SV=1
MTLGEFKVHQTAGNARRATLMTAHGPVQTPVFMAVGTKATVKAMTPEELKECGTQVVLGNTYHLHLRPGEKTIAKMGGLHKFMNWHGPILTDSGGFQVFSLSQLRNMSEEGVEFRSHLDGAKHFISPEKSMEIQMDLGSDIIMAFDECLQYPATEEEIDKSMALTYRWLLRSRDAMVRKESLLFGIVQGGLSLNHRLKSMEQICSVDLPGYALGGFSVGEPIHLMHELLPDVAPKMPANKPRYLMGVGTPTDLIIAIDSGIDMFDCVMPTRVARNGTIFTWRGKVSIKRSEYREDSSPLDPECDCYTCRNYTKAYLRHLFLSGEILGSRLNTIHNIYFYMKLMERARKAIEEGRWEEFRNDCLTRFAKKDS

SEQ ID NO: 52488 - protein, 380 aa, Bdellovibrio exovorus
  misc_feature (1)..(380): tr|M4VR40|M4VR40_9PROT Queuine tRNA-ribosyltransferase OS=Bdellovibrio exovorus JSS OX=1184267 GN=tgt PE=3 SV= 1
MSTAQPVLKLGEFKLHKKSGKARRATFMTAHGSFETPTFMAVGTKATVKAMTPEELKDCGTQVVLGNTYHLHLRPGEKLIKKMGGLHKFMNWNGPILTDSGGFQVFSLSGLRKMSEEGVEFSSHLDGAKYFISPEKSMEIQMDLGSDIIMAFDECLQYPATNDEIKRSMDLTHRWLLRSHKAMTRDQSLLFGIVQGGLSLEHRKYSLQQVTSVDLPGYALGGFSVGEPIHLMHELLPDIAPLMPENKPRYLMGVGTPLDLIISIDAGVDMFDCVLPTRVARNGTLYTWQGRMSIKRQEYKEDAGPLDPECDCYTCKNYSRAYLRHLFLSGEILGSRLNTIHNLHFYMTVMAKARKALEEDRWESFRDDCLTRFVRSDKQS

SEQ ID NO: 52489 - protein, 377 aa, Bdellovibrio sp.
  misc_feature (1)..(377): tr|A0A514XNW5|A0A514XNW5_9PROT Queuine tRNA-ribosyltran sferase OS=Bdellovibrio sp. ZAP7 OX=2231053 GN=tgt PE=3 SV=1
MTETKNEMKLGEFTVHKTEGHARRATLMTAHGPVQTPVFMAVGTKATVKAMTPEELKECGTQVVLGNTYHLHLRPGEKTIQKMGGLHKFMNWHGPILTDSGGFQVFSLSKLRNMSEKGVEFRSHLDGAKHFISPEKSMEIQMDLGSDIIMAFDECLQYPATDEQIDKSMALTYRWLLRSKEAMTRKESLLFGIIQGGLSLEHRLKSLEQITSVDLPGYALGGFSVGEPIHLMHELLPHVAPKMPANKPRYLMGVGTPTDLIIAIDSGIDMFDCVMPTRVARNGTIFTWQGKVSIKRSEYKEDPSPLDPECDCYTCTNYSKAYLRHMFLSGEILGSRLNTIHNIHFYMKLMEKAREAIAEGRWAAFRDDCLTRFVKKA

SEQ ID NO: 52490 - protein, 375 aa, Bdellovibrio sp.
  misc_feature (1)..(375): tr|A0A317JLU8|A0A317JLU8_9PROT Queuine tRNA-ribosyltran sferase OS=Bdellovibrio sp. OX=28201 GN=tgt PE=3 SV=1
MIEKASSAFPCGNFTLLAQEGEARRGRLITAHGPIETPVFMAVGTKATVKAMTTHELAELGTQVVLGNTYHLHLRPGEKIIQRQGGLHQFMRWPGPLLTDSGGFQVFSLNQLRRLTEEGVEFRSHLDGAKHFLSPETSMQIQMDLGSDIIMAFDECLEYPASDERIKESMDLTYRWLLRSQAAMTRTESLLFGIVQGGLSLDFRRYSLQQITSVDLPGYALGGFSVGEPMELMHALVKEVAPLMPAQKPRYLMGVGTPLDLILSIDSGIDMFDCVMPTRVARNGTLFTWQGKVSIKRNEYKEDSSPLDPECDCYTCTHYSKAYLRHLFLSGEILGSRLNTIHNLYFYMNLMAKSRAAIEKGKWREFRNFCLKRFL

SEQ ID NO: 52491 - protein, 382 aa, Bdellovibrionaceae bacterium
  misc_feature (1)..(382): tr|A0A2E7G8V7|A0A2E7G8V7_9PROT Queuine tRNA-ribosyltran sferase OS=Bdellovibrionaceae bacterium OX=2026715 GN=t gt PE=3 SV=1
MQKPLHFELEKQTTEGPSQARVGKITLRGHLNQNHEITTPMFMPVGTQGTVKALTPEDLENLGAQIILGNTYHLYLRPGHERVERLGMLHQFMNWKGPILSDSGAFQVFSLAGLNQIDDDGVTFKSHIDGSSHRFTPEHSMEVQRALGTDIVMAFDQCPPYPTTDEDLRKAMDRTHAWAKRGLQVELKPHQARFGIVQGGMVEGYRKESAEILSSMDFDGYAIGGLSIGEPVELLHEMTQITAPLLPQTKPRYLMGVGRPEDLIEGVRSGIDIFDCVMPTRNARNGQLFTSTGKINIKNAQYAEDQRPLDESCQCETCRNYTRAYLHHLFRAGEALSARLNSIHNLSFYISLMNKMRSAIVENRFESWRKSFYTLYHHDKKK

SEQ ID NO: 52492 - protein, 368 aa, Bdellovibrionaceae bacterium
  misc_feature (1)..(368): tr|A0A2E1Q5W9|A0A2E1Q5W9_9PROT Queuine tRNA-ribosyltran sferase OS=Bdellovibrionaceae bacterium OX=2026715 GN=t gt PE=3 SV=1
MIGKFSVDAKSGQARAGTLTTRRGDIQTPVFMPVGTKATVKSMLPEELKDLGAQIVLGNTYHLHLRPGEKTIKSLGGLHKFMNWDRPILTDSGGFQVFSLSQLSKITEEGVTFQSHLDGAKHFLSPETSMQIQMDLGSDIIMAFDECLKYPATKEENIKSMELTIRWLKRSKEAMTDKGALLFGIVQGGLDLELRKKSLEMTLDVDLPGYALGGFSVGEPIHLMHELVPQVAPLLPENKPRYLMGVGTPLDLILSVDAGIDMFDCVMPTRVARNGTLYTWQGKVSIKRAEYREDPSPLDPECGCYTCTNYSKAYLRHLFLSGEILSSRLNTIHNLYFYLDLMKKARRSLLEGRWEEFRDFCLTRFVKP

SEQ ID NO: 52493 - protein, 389 aa, Bdellovibrionales bacterium
  misc_feature (1)..(389): tr|A0A1F3SEA6|A0A1F3SEA6_9PROT Queuine tRNA-ribosyltran sferase OS=Bdellovibrionales bacterium GWA2_49_15 OX=17 97384 GN=tgt PE=3 SV=1
MSIENIQHQNRQHFKFELLHEDKNSRARAGIIHTPHGDIPTPVFMPVGTHAAIKALQPRELLDQDIRILLSNTYHLYLTPGPELIKKAGGLHKFMGWPRAILTDSGGFQVFSLQKKSIKEEGAEFKNLEGKTVLLSPEISILTQESLGSDIMMAFDECIPYPATPAYVEKSIARTHRWLDRCIKAWTRPDCSLFGIIQGGTYDEHRKRCVEEVCSKDLPGYAIGGVSVGEGPELMEKAVSFTAPLMPKDRPRYVMGVGHPQDLLMIWEHGIDMSDCIIPTKYARGGTLYTTRGRVRIRHRNYRRDFYPIDPSCNCYVCKNFSRAYLKHLFDSNEILGAILATTHNIAFYRTMAANARAAILADKFMEFKKDFLNHYGTENRGDEPADED

SEQ ID NO: 52494 - protein, 356 aa, Bdellovibrionales bacterium
  misc_feature (1)..(356): tr|A0A1F3WWJ3|A0A1F3WWJ3_9PROT Queuine tRNA-ribosyltran sferase (Fragment) OS=Bdellovibrionales bacterium RIFOX YB2_FULL_36_6 OX=1797394 GN=A2328_07885 PE=3 SV=1
ATIQTVHGSIHTPIFMPVGTRASVKTMGQHDLEEIGAEIILGNTYHLLLRPGPQLVEQSFGSLHGFMNWQRPILTDSGGFQVYSLSKLSKVTPDGVIFKSHLDGKEYKIGPIESMEIQRSLGADIIMNFDECPSLPATKEKLKQSMDLTLKWAQICRDMKIRDYQKLFGIIQGGLHLDLRGECMEKLINMGFDGLALGGLSVGEKNIEMQNFLTEFVHTMPEPMPRYLMGVGTPLDILNGIKSGIDMFDCVLPTRNARNGQFLTHGGKLSIKKARFIEDKLPPDPKCACKVCKRYSRAYIRHLYTVGEYLAGQLITYHNLYFYMNMVREVRMSILSNSFDEYYNNFYKSYQSCEWE

SEQ ID NO: 52495 - protein, 370 aa, Beggiatoa alba
  misc_feature (1)..(370): tr|I3CC06|I3CC06_9GAMM Queuine tRNA-ribosyltransferase OS=Beggiatoa alba B18LD OX=395493 GN=tgt PE=3 SV=1
MHFELLKTQGLARRARLHFARGVVDTPAFMPVGTYATVKAVTPEQVEATGAQIVLGNTFHLMLRPGTEIIKLHGDLHDFMHWRKPILTDSGGFQVFSLGQIRKITEAGVTFRSPIDGAKVFMGPEESMAVQRDLGSDIVMIFDECTPYPATESQARESMELSLRWAKRSKEAHGDNPSALFGIVQGGMYESLRLESLAGLTEIGFDGYALGGLSVGEPKEEMIRVLTAIAPRLPFDKPHYLMGVGLPVDIVNAVCQGIDMFDCVIPTRNARNGHLFTSKGAIKIRNSRHRHDTRPLDENCDCYTCQNYTRAYLHYLDKAREILGAHLNTIHNLHYYQKLMQGLRAAIEEQRLPAFVRDFYRDTQGNLEDN

SEQ ID NO: 52496 - protein, 370 aa, Beggiatoa leptomitoformis
  misc_feature (1)..(370): tr|A0A2N9YIT4|A0A2N9YIT4_9GAMM Queuine tRNA-ribosyltran sferase OS=Beggiatoa leptomitoformis OX=288004 GN=tgt P E=3 SV=1
MQFELLATDGLARRARLHFSRGVVDTPAFMPVGTYATIKAVTTEQVEATGAQIVLGNTFHLMLRPGTEIINLHGDLHDFMHWRKPILTDSGGFQVFSLGKIRKITEAGVLFRSPIDGAKVFMGPEESMTVQRALGSDIVMIFDECTPYPATESQARTSMELSLRWAKRSKIAHGDNSSALFGIVQGGMYEALRVESLAGLTEIGFDGYALGGLSVGEPKEEMIRVLTEVAPKLPFNKPHYLMGVGLPVDIVNAVCQGIDMFDCVIPTRNARNGHLFTSKGAVKIRNSRHRRDTRPLDENCDCYTCRNYTRAYLHYLDKAREILSSHLNTIHNLHYYQKLMQGLRLAIEEHRLPAFVRDFYRETQGTLDDN

SEQ ID NO: 52497 - protein, 366 aa, Beggiatoa sp.
  misc_feature (1)..(366): tr|A7C2S2|A7C2S2_9GAMM Queuine tRNA-ribosyltransferase OS=Beggiatoa sp. PS OX=422289 GN=tgt PE=3 SV=1
MDFELLATDGLARRARLHFPRGTVETPAFMPVGTYGTVKAMTPEQVRATGADIILGNTFHLMLRPGTKIIAEHGDLHHFMHWDRPILTDSGGFQVFSLGETRTISEEGVTFRSPIDGDKVFLGPEESMAVQRALGADIVMIFDECTPYPATELQARESMELSLRWAARSKQAHSDNSAALFGIVQGGMYEHLRQASLAGLIDISFDGYAIGGLSVGEPKEEMQRILTFLSPQMPPNQPRYLMGVGTPADIVEAVRCGIDMFDCVMPTRNARNGFLFTHFGIVRIRNSQYRNDTNPLDSSCDCYTCQNYSRAYLHHLDKVKEILGSHLNTLHNLHYYQKLMQSLRQAIAEENLEEFVQHFYATQSPK

SEQ ID NO: 52498 - protein, 310 aa, Beggiatoa sp.
  misc_feature (1)..(310): tr|A0A1W9L2Z4|A0A1W9L2Z4_9GAMM Queuine tRNA-ribosyltran sferase (Fragment) OS=Beggiatoa sp. IS2 OX=1934247 GN=B WK79_14480 PE=3 SV=1
HTIGSDIVLSNTFHLLLRPGMTVIAAHGGLHQFMHWDKPILTDSGGFQVFSLGDRRIVTEQGVTFRSPIDGAKVFLSPEESMAVQRTLNSDIVMIFDECTPYPATEEQVRVSMELSLRWAERSKRAHSDNPSALFGIVQGGVYEQLRERSLRELLNIGFAGYALGGLSVGEPKADMLRILRHSVPQLPTDKPRYLMGVGTPADIVTAVRLGVDMFDCVLPTRNARNGYLFTSQGVVRIRNSQYRLDTTSLDPECDCYTCRNFSRAYLHHLDKAHELLGLHLHTLHNVRYYQRLMQKLREAISGQYLFLLN

SEQ ID NO: 52499 - protein, 386 aa, Beijerinckia indica
  misc_feature (1)..(386): tr|B2IHG3|B2IHG3_BEII9 Queuine tRNA-ribosyltransferase OS=Beijerinckia indica subsp. indica (strain ATCC 9039 / DSM 1715 / NCIB 8712) OX=395963 GN=tgt PE=3 SV=1
MSEPAESETAFRFKLLHQDGAARAGVISTPRGEIRTPAFMPVGTAATVKAMQPEAVRALGADIVLSNTYHLMLRPGAERIAALGGLHRFMNWPHPILTDSGGFQVMSLAKLRKLDENGVTFQSHIDGARHVLTPERSMEIQDLLGSDIVMQFDECVRLPCAPGEAERAMRLSLRWGERSKRALAPKSGRALFGIVQGGDDKALRRESATELVSMGFDGYALGGLAVGEPQAVMLDMIETVMPFLPVDKPHYLMGVGTPDDLLQSVKRGIDMFDCVMPTRAGRHGLVFTRHGRINLRNARHADDPAPIDEKSSCAAARIYSRAYLHHLVKASEILGMILMTTINLAYYQELMAGMRAAIAEGRFEDFAAETEALWREGESLSGRASA

SEQ ID NO: 52500 - protein, 376 aa, Beijerinckia sp.
  misc_feature (1)..(376): tr|A0A1H4QQT6|A0A1H4QQT6_9RHIZ Queuine tRNA-ribosyltran sferase OS=Beijerinckia sp. 28-YEA-48 OX=1882748 GN=tgt PE=3 SV=1
MSNGFSFVIAKTQGAARTGRIIMPRGEIRTPAFMPVGTAATVKAMYPQQVRELGADIVLGNVYHLMLRPGAERVAEFGGLHRFMNWPYPILTDSGGFQVMSLAKLRKLDENGVTFQSHIDGSRHLLTPERSMEIQHLLGSNIQMQFDECVKLPASDAETERAMRLSLRWAERSRKAFRGGDGHAAFGIVQGGANKPLRIESARALADMDFHGLAIGGLAVGEPQDVMLDMIETVEPHLPSAKPRYLMGVGTPDDLMKSVARGVDMFDCVMPTRAGRHGQAFTSFGKLNLRNAKYATDQRPLDENSPASAGRDYTRAYLHHLVKSEEILAMMLLTWNNLAYYQQLMAGMREAIATGNLADYCDGVREGWARGTDAEA

SEQ ID NO: 52501 - protein, 387 aa, Beijerinckiaceae bacterium
  misc_feature (1)..(387): tr|A0A4P7F2K7|A0A4P7F2K7_9RHIZ Queuine tRNA-ribosyltran sferase OS=Beijerinckiaceae bacterium OX=1978229 GN=tgt PE=3 SV=1
MTEAFHFKATSQDGDARAGMITTPRGQIRTPAFMPVGTAATVKAMHPEAVKNLGADIVLANTYHLMLRPGAERIAVLGGLHKFMNWPWPILTDSGGFQVMSLAKLRKLDENGVTFQSHMDGARHVLTPERSMEIQDLLGSDIQMQFDECVKLPCEESEARRAMLLSLRWAERSKAAFVAKQGRALFGIVQGGAVEPLRVESAKALTEIGFDGYAVGGLAVGEPQAIMLAMLDCVLPWLPSAAPRYLMGVGTPDDLVESVRRGIDMFDCVMPTRAGRHGLAYTRSGRLNLRNACHAEDPAPVDPLSSCAAARTYSRAYLHHLVKSGEILAMMLLTEINLAYYQDLMADMRGAIAAGQFEPFCAKTKAAWQTEETAENAMRGIIGQAAD

SEQ ID NO: 52502 - protein, 379 aa, Beijerinckiaceae bacterium
  misc_feature (1)..(379): tr|A0A522GHE0|A0A522GHE0_9RHIZ Queuine tRNA-ribosyltran sferase OS=Beijerinckiaceae bacterium OX=1978229 GN=tgt PE=3 SV=1
MTREFYFDIKATDGAARSGVISTPRGEIHTPAFMPVGTAATVKAMHPAAVHALGAEIVLSNTYHLMLRPGAERIAALGGLHSFMNWQHPILTDSGGFQVMSLSKLRKIDENGVVFQSHIDGSRHTLTPERAMEIQRLLGSDIQMQLDECVKLPADERDIERAMILSLRWAERSREAFGTQPGHAVFGIVQGGVSASLRATSAKALTDMDFHGYALGGLAVGEPQESMLATIEATVPYLPSTKPRYLMGVGSPDDLIEAAGRGIDMFDCVMPTRAGRHGLVYSRFGRINLRNAKHADDPRPIDPLAACEPARIYSRAYLHHLVKAGEILAMMLLTEINLSYYQSLMRETRQAIEAGRFADFAAATKAAWTQGETDWSVSQ

SEQ ID NO: 52503 - protein, 376 aa, Belliella baltica
  misc_feature (1)..(376): tr|I3Z1H1|I3Z1H1_BELBD Queuine tRNA-ribosyltransferase OS=Belliella baltica (strain DSM 15883 / CIP 108006 / L MG 21964 / BA134) OX=866536 GN=tgt PE=3 SV=1
MKFTLQHTDPQSKARAGVLKTDHGDIETPIFMPVGTAGSVKAVHQRELTYDIKAQIILGNTYHLYLRPGLGVLEKAGGLHKFNGWEKPILTDSGGYQVFSLAGTRKITEEGVVFKSHIDGSKHIFSPEGVMDIQRSIGADIIMAFDECTPYPCEFEYARKSMDMTHRWLKRCIERFDSTEGKYGYNQTLFPIVQGSVYKDLRKRSAEFIASCDREGNAIGGLSVGEPAEMMYEMTEMVTDILPEDKPRYLMGVGTPANILECIALGVDMFDCVMPTRNARNGMLFTSEGIINIRNEKWKEDFSPLDPVINSYVSSFYSKAYLRHLTISKEILAAQIASIHNLAFYLWLVGQAREKIKSGEFSSWKDQMVKKVSTRL

SEQ ID NO: 52504 - protein, 376 aa, Belliella buryatensis
  misc_feature (1)..(376): tr|A0A239B753|A0A239B753_9BACT Queuine tRNA-ribosyltran sferase OS=Belliella buryatensis OX=1500549 GN=tgt PE=3 SV=1
MKFILEHTDPQSKARAGVVKTDHGDIETPIFMPVGTAGSVKAVHQRELTYDVKAQIILGNTYHLYLRPGLDVLEKAGGLHKFNGWSKPILTDSGGYQVFSLAGTRKITEEGVLFKSHIDGSKHIFSPEGVMDIQRTIGADIIMAFDECTPYPCEFGYARNSMEMTHRWLKRCIERFDSTEGKYGYSQTLFPIVQGSVYKDLRKQSAEFIASCEREGNAIGGLSVGEPAEMMYEMTEMVTDILPKDKPRYLMGVGTPANILECIALGVDMFDCVMPTRNARNGMLFTSEGIINIRNEKWKDDFSPIDLGINSYVSSFYSKAYLRHLTISKEILAAQIASIHNLAFYLWLVGQAREKIKSGEFAAWKDQMVKKVSTRL

SEQ ID NO: 52505 - protein, 376 aa, Belliella pelovolcani
  misc_feature (1)..(376): tr|A0A1N7M544|A0A1N7M544_9BACT Queuine tRNA-ribosyltran sferase OS=Belliella pelovolcani OX=529505 GN=tgt PE=3 SV=1
MKFILEHTDPQSKARAGIVKTDHGDIETPIFMPVGTAGSVKAVHQRELTYDVKAQIILGNTYHLYLRPGLDVLEKAGGLHKFNGWSKPILTDSGGYQVFSLAGTRKITEEGVVFKSHIDGSKHVFSPEGVMDIQRTIGADIIMAFDECTPYPCEFGYARNSMEMTHRWLKRCIERFDSTEGKYGYSQTLFPIVQGSVFKDLRKQSAEFIASCDREGNAIGGLSVGEPAEMMYEMTDMVTDILPKDKPRYLMGVGTPANILEGIALGVDMFDCVMPTRNARNGMLFTSEGIINIRNEKWKDDFSSIDPGINSYVSSFYSKAYLRHLTIAKEILAAQIASIHNLAFYLWLVGQAREKIKTGEFAIWKDQMVKKVSTRL

SEQ ID NO: 52506 - protein, 363 aa, Bellilinea caldifistulae
  misc_feature (1)..(363): tr|A0A0P6XHK7|A0A0P6XHK7_9CHLR Queuine tRNA-ribosyltran sferase OS=Bellilinea caldifistulae OX=360411 GN=AC812_ 11185 PE=3 SV=1
MKLQLPHGHLDFPAFLPDATLAVVRTVDSRDLRACGIPALMMNAFHLMQKPGSSVIQALGGLHRMSNWDRPIFTDSGGFQAYSLIRQNPRFGKMDERGITFQPEGGQRKFLLTPEKSVQLQIGYDSDVVICLDDCTHVEAPRSEQELSVQRTIAWAKRARREYDRLMEQKKLTGGQRPLIFAVIQGGGELDLRRQCADALLEIGFDGYGFGGWPLDSSGSLLSEILEYTRQLVPAQYPLHALGIGHPHNVVTGWQLGYSIFDCAMPTRDARHGRLYTFTNPPGQDGGLNGNWLEYLYINDERHMRSSRPISEWCDCPTCQQYSLGYLRHLFKINDSLFLRLATIHNLRFMTQLTERIRLNSHA

SEQ ID NO: 52507 - protein, 375 aa, Bellilinea caldifistulae
  misc_feature (1)..(375): tr|A0A0P6XYU6|A0A0P6XYU6_9CHLR Queuine tRNA-ribosyltran sferase OS=Bellilinea caldifistulae OX=360411 GN=tgt PE =3 SV=1
MTTFNFQYDLVAKDHNARAGVFHTPHGDLLTPIFAPVGTQATVKAVTPAQLKEIGVTLVLANTYHLYLRPGADLVAEMGGLHHFMRWDSPILTDSGGFQVFSLAGMRKIDEDGVTFKSHIDGSIHRFTPEKAIQVQEQLGADIIMAFDECAPPYDRAYNQQAVARTHRWAERCLAAQTRPDQALFGIVQGGIFPDLREQSARFISSLGFPGHAIGGLSVGETKEEMHRTLELLNQILPEDKPRYLMGVGSPEDLINGIRRGVDIFDCVLPTRLARHQAAMTRQGRLNLMNAAHARDPRPIDEKCHCYTCTHFSRAYLRHLIVAKEMLAATLISIHNIATLVYLVQDARRAILEGTFEQFAEEFLAHYTLPEKAQA

SEQ ID NO: 52508 - protein, 379 aa, Belnapia rosea
  misc_feature (1)..(379): tr|A0A1G6KJC6|A0A1G6KJC6_9PROT Queuine tRNA-ribosyltran sferase OS=Belnapia rosea OX=938405 GN=tgt PE=3 SV=1
MTLHWTSVARDGAARAGVLHTAHGMVETPVFMPVGTAGTVKAMTADAVRATGARMVLGNTYHLMLRPGAERLARLGGLHRFMDWHGPILTDSGGFQVMSLAGLRTMDEEGVTFRSHVDGARHRLTPERSIEIQHLLGADVTMCFDECTPFPATEEEAASSMRLSMRWAARSRAAFRPREGHGLFGIVQGGVHPVLRAESVAALTAIGFEGYAVGGLAVGEGQAAMFATLDCTTPLMPQEAPRYLMGVGTPGDILGAVRRGIDMFDCVIPTRSGRTGRAYTSGGMLNLRNARHAEDPSPLDPACGCPACARHSRAYLHHLIKAEEMLGPMLLTWHNIQYYQDLMRGIRHAICEGRLADHAAALEAGWAATPPPPAEEKDG

SEQ ID NO: 52509 - protein, 371 aa, Bergeriella denitrificans
  misc_feature (1)..(371): tr|A0A378UFM7|A0A378UFM7_BERDE Queuine tRNA-ribosyltran sferase OS=Bergeriella denitrificans OX=494 GN=tgt PE=3 SV=1
MLKFTLHQTDGHARRGTLELNHGTIETPVFMPVGTYGSVKAMTPDNLHDIKAQIILGNTYHLWLRPGLEVIEQFGGLHGFIGWDKPILTDSGGFQVFSLSDMRKLTEEGCTFKSPINGDKLFLSPEISMKIQTVLNSDIVMQLDECTPGEASHEQAKKSLQMSLRWAERSKKVFEDLKNPNALFGIVQGAMYEDLREESLKGLEQFDFPGLAVGGLSVGEPKPEMYRMLRAVGPILPKHKPHYLMGVGTPEDLVYGVAHGIDMFDCVMPTRNARNGWLFTRFGDIKIKNAKHKHDTRPLDESCSCYACRNFSRAYLHHLHRAGEILGAQLNTIHNLHFYQVIMAEMREAIEQGKFADWQAQFHENRARGAD

SEQ ID NO: 52510 - protein, 377 aa, Bergeyella zoohelcum
  misc_feature (1)..(377): tr|A0A380ZS91|A0A380ZS91_9FLAO Queuine tRNA-ribosyltran sferase OS=Bergeyella zoohelcum OX=1015 GN=tgt PE=3 SV= 1
MKKIFNIDKATEGKARAGVITTDHGEIQTPIFMPVGTVASVKTVHQRELREDIKAQIILGNTYHLYLRPGMEVMEAAGGLHQFMNWQKPILTDSGGFQVFSLADSRKITEEGAKFKSHIDGSYHFISPEISMEIQRKIGADILMAFDECTPYPCEYHQAKKSMEMTHRWLKRCMDWCEENPPIYGHQQYLFPIVQGSTYSDLRKISAEVISEADCAGNAIGGLSVGEPEEEMYRITDEVTDILPKEKPRYLMGVGTPWNILESIGLGIDMMDCVMPTRNARNGMLFTWDGVINIRNEKWKKDFSPLDESGTAFVDFEYSKAYLRHLFVAKEYLGKQIASIHNLAFYLDLVTQARKHILAGDFYQWKNAVVPRLRQRR

SEQ ID NO: 52511 - protein, 377 aa, Bergeyella zoohelcum
  misc_feature (1)..(377): tr|K1M1G8|K1M1G8_9FLAO Queuine tRNA-ribosyltransferase OS=Bergeyella zoohelcum ATCC 43767 OX=883096 GN=tgt PE= 3 SV=1
MKKIFNIDKATEGKARAGVITTDHGEIQTPIFMPVGTVASVKTVHQRELREDIKAQIILGNTYHLYLRPGMEVMEAAGGLHQFMNWQKPILTDSGGFQVFSLADSRKITEEGAKFKSHIDGSYHFISPEISMEIQRKIGADILMAFDECTPYPCEYHQAKKSMEMTHRWLKRCMDWCEENPPIYGHQQYLFPIVQGSTYSDLRKISAEVISEADCAGNAIGGLSVGEPEEEMYRITDEVTDILPKEKPRYLMGVGTPWNILESIGLGIDMMDCVMPTRNARNGMLFTWDGVINIRNEKWKKDFSPLDESGTAFVDFEYSKAYLRHLFVAKEYLGKQIASIHNLAFYLDLVTQARKHILAGDFYEWKNTVVPRLRQRR

SEQ ID NO: 52512 - protein, 382 aa, Berkelbacteria bacterium
  misc_feature (1)..(382): tr|A0A0G0K3E5|A0A0G0K3E5_9BACT Queuine tRNA-ribosyltran sferase OS=Berkelbacteria bacterium GW2011_GWB1_38_5 OX =1618336 GN=tgt PE=3 SV=1
MHMFKFKITKKSKKNLARSGVLILPHGKVETPVFMPCATRGSVKGISQAELKQLGYKIILSNTYHLYLRPGDEQIKNLGGLQKFINWKKPILTDSGGYQVFSLGKNFRSYSDEEKLSSLVNVKKDGAWFKSHLDGSKHFFSPEKVIDIQKNLGSDIMMVLDECTEFPASKKRAAESMEMTHLWAQKSIEYWQSFKNSYQALFGIIQGSTYKDLRKKSAEYISSLGFDGLAVGGVSVGEGKRHMYQVMKWIGPLLPADKPHYLMGVGEPEDIIEAVKWGFDMFDCVLPSRLGRHGTVWVTSDWPLDLARGKNKFTKIDLRKTQFRKDKKIIMKGCGCEACKQGYSRAYISHLIREKEMLGMRLASIHNLWIISTLMDKIRKSI

SEQ ID NO: 52513 - protein, 364 aa, Berkelbacteria bacterium
  misc_feature (1)..(364): tr|A0A0G0FG38|A0A0G0FG38_9BACT Queuine tRNA-ribosyltran sferase OS=Berkelbacteria bacterium GW2011_GWA1_36_9 OX =1618331 GN=tgt PE=3 SV=1
MFKFKVTKQSKNSLARTGVLETSHGKIETPVFMPCATRGTVKGISFEELKNLGFKIILGNTYHLYLRPGDTLIKELGGLHKFMNWEESILTDSGGYQVFSLSKNLNLVKLKKEGVVFKSHLDGSKHLFTPEKVIEIQKNLGSDIMMVLDECTAFPATKKQAQESMESTHLWAKKASDYWQEKGNKKQALFGIIQGSVYKDLREESTKFISKLPFDGIAVGGVSVGEGKTHMYNVLKWVGPKLPKDKPHYLMGVGEPEDIIKAVSYGFDMFDCVLPTRLGRHGTIWQTENWKKFTKIDLRKSKYSHDQKIMMEGCKCPACSLGYSRAYISHLVREKEMLGMRLASLHNLFILQELTRKIREGLLF

SEQ ID NO: 52514 - protein, 372 aa, Bermanella marisrubri
  misc_feature (1)..(372): tr|Q1MY62|Q1MY62_9GAMM Queuine tRNA-ribosyltransferase OS=Bermanella marisrubri OX=207949 GN=tgt PE=3 SV=1
MKFDVKTTQGKARRGTLSFPRGDIQTPAFMPVGTYGSVKGMLPRDVKDTGAEIILGNTFHLWLRPGTEIIEQAGDLHDFMQWDKPILTDSGGFQVFSLGKMRKITEHGVTFRSPVNGNKVELTPEKSMEIQKSLGSDIVMIFDECTPYPATEKEAKDSMEMSLRWAKRSKDAHGDSPSALFGIIQGGMYENLRDESLAGLTDIGFDGYAIGGLSVGEPKEDMVRILDHLAHKMPEDKPRYLMGVGKPEDLVEGVRRGVDMFDCVMPTRNARNGHLFTSKGVLKLRNAANKTDHGPIDPECDCYTCQNFSRAYLHHLDKCKEIQGCTLNTIHNLHYYQTVMAGLRQALEEGKLDDFVNEFYAKQGKDVPPLSE

SEQ ID NO: 52515 - protein, 375 aa, Bermanella sp.
  misc_feature (1)..(375): tr|A0A1Y5DM88|A0A1Y5DM88_9GAMM Queuine tRNA-ribosyltran sferase OS=Bermanella sp. 47_1433_sub80_T6 OX=1856278 G N=tgt PE=3 SV=1
MSFMKFDLKLSDGKARRGTLSFPRGEIQTPAFMPVGTYGTVKGMLPRDVKELGAEIILGNTFHLWLRPGSDIIKDLGGLHKFMHWDKPILTDSGGFQVFSLGKMRKITEEGVTFRSPVNGDKVELTPEKSMEIQRNLGSDIVMIFDECTPYPATTKEAKDSMEMSLRWAKRSKDAHGESPSALFGIIQGGMYEDLRDVSLKGLTDIGFDGYAIGGLSVGEPKEDMVRILDHLAHKMPEDKPRYLMGVGKPEDLVEGVRRGIDMFDCVMPTRNARNGHLFIDTGVLKLRNAANKTDSGPADPTCDCHTCQNFSRAYLHHLDKCKEILGCTLNTIHNLHFYQTLMAGLRKALEEGTLSAFVEEFYAKRGLPVPPLAD

SEQ ID NO: 52516 - protein, 372 aa, Bermanella sp.
  misc_feature (1)..(372): tr|A0A2D4RZF0|A0A2D4RZF0_9GAMM Queuine tRNA-ribosyltran sferase OS=Bermanella sp. OX=2024825 GN=tgt PE=3 SV=1
MKFDLKKTDGKARRGTLSFPRGEIQTPAFMPVGTYGSVKGMLPRDVKDTGAEIILGNTFHLWLRPGIDIIKGAGTLHNFMQWDKPILTDSGGFQVFSLGKMRKITEKGVTFRSPVNGDKVELTPEKSMEIQAALGSDIVMIFDECTPYPATHKEAKDSMEMSLRWAQRSKDAHGDSESALFGIIQGGMYEDLRDVSLAGLTDIEFDGYAIGGLSVGEPKEDMVRILDHLAHKMPEDKPRYLMGVGKPEDLVEGVRRGVDMFDCVMPTRNARNSHLFIDTGVLKLRNAANKTDHGPIDETCDCYTCQNFSRAYLHHLDKCKEIQGSTLNTIHNLHFYQTVMAGLRKALEEGTLSDFVEEFYAKRGKPVPEITD

SEQ ID NO: 52517 - protein, 376 aa, Bernardetia litoralis
  misc_feature (1)..(376): tr|I4AN58|I4AN58_BERLS Queuine tRNA-ribosyltransferase OS=Bernardetia litoralis (strain ATCC 23117 / DSM 6794 / NBRC 15988 / NCIMB 1366 / Sio-4) OX=880071 GN=tgt PE= 3 SV=1
MKFELHTTDKNSSARAGTITTAHGQIQTPIFMPVGTLGTVKGVPPEALKDQVKAQIILGNTYHLYLRPNTEVLEAAGGLHKFMTWDRPILTDSGGYQVYSLGQMRKIKEEGVIFKSHIDGSKLNFTPEYVMDIQRTIGADIMMAFDECPPYPSDYDYAKKSMEMTHRWLKRCINRFDSTEGKYGYEQTLFPIVQGSTYKDLRRASAEFVAEQNREGNAIGGLSVGEPAEKMYEFTELVCDILPKDKPRYLMGVGTPANILEGIALGVDMFDCVMPTRNARNGMLFTTKGIINIKNKKWEKDFSVLDDGLDCHVSNTYSKSYLRHLNKANEILGAYIASTHNLAFYLHLVGEARKHILAGDFASWKKEQVEVLMQRL

SEQ ID NO: 52518 - protein, 375 aa, Unknown
  misc_feature (1)..(375): tr|A0A0N1ARS7|A0A0N1ARS7_9PROT Queuine tRNA-ribosyltran sferase OS=beta proteobacterium AAP51 OX=1523421 GN=tgt PE=3 SV=1
MLKFELHKTHGHARRGTLTLNHGTVETPVFMPVGTYGTVKGVLPRSLEEMGAQIILGNTFHLWMRPGLDVIQQFGGLHRFEGWSKPMLTDSGGFQVWSLGEMRKISEEGVKFASPVNGDKLFLTPEVSMQIQTVLNSDIVMQFDECTPYEVKGHLTTEAEARKSMELSLRWAQRSQAEFARLANPNALFGIVQGGMFEHLRQESLDALVAMDLPGYAVGGVSVGEPKEEMLRIMAHTPHRLPAHKPRYLMGVGTPEDLVEGVAQGVDMFDCVMPTRNARNGHLFTRFGDLKVRNARHRDSQAPVDETCTCYTCSNFSRAYLHHLDRCGEMLGPMLASIHNLHYYVNLMREVRQALDEDRFDSWRAQFQADRARGV

SEQ ID NO: 52519 - protein, 377 aa, Unknown
  misc_feature (1)..(377): tr|A0A2T0XRE6|A0A2T0XRE6_9PROT Queuine tRNA-ribosyltran sferase OS=beta proteobacterium MWH-P2sevCIIIb OX=32342 6 GN=tgt PE=3 SV=1
MLKFELLATDGHARRAQMTLNHGVVQTPMFMPVGTYGSVKAMMPHELEEVGSQVILGNTFHLWLRPGTEVIAKHGGLHGFMQWPKPILTDSGGFQVFSLQGMRKITEEGVKFASPIDGSRLFLTPEESMKIQTALNSDIVMVFDECTPYMIKDKPATELEAAVSMRMSLRWAKRSRNAFDDLSNNNALFGIVQGGMFEDLRDESLSGLEEIGFDGYAIGGLSVGEPKEDMLRILTHVAPKLPEQRPRYLMGVGTPEDLVDGVARGIDMFDCVMPTRNARNGWLFTRFGDVKIRNAKYKDDTAPLDPSCGCHTCQHFSLAYLHHLQRANEITGARLNTLHNLHFYLTIMAEMREAIEQGRFKTWREQFDKDRTSKSVQ

SEQ ID NO: 52520 - protein, 252 aa, Betaproteobacteria bacterium
  misc_feature (1)..(252): tr|A0A1F4CG35|A0A1F4CG35_9PROT Queuine tRNA-ribosyltran sferase (Fragment) OS=Betaproteobacteria bacterium RIFC SPLOWO2_12_61_14 OX=1797494 GN=A2W81_03660 PE=3 SV=1
FLTPEESMRIQRVLNSDIAMIFDECTPYPASEREAADSMRLSLRWAERSKRAHEGNSNALFGIVQGGMYENLRDESLRELVNIGFDGYAIGGLSVGEPKEDMLRILAHTAPQLPQDKPRYLMGVGTPEDIVAAVAQGIDMFDCVMPTRNARNGMMFTRHGDIKIKNAQYRLDTRPLDEDCQCYTCRNFSRAYLHHLHRLGEILGARLNTIHNLHYYQQLMGEIRAAVEADAFDAFVARFRQLRSVKMPRASC

SEQ ID NO: 52521 - protein, 367 aa, Betaproteobacteria bacterium
  misc_feature (1)..(367): tr|A0A3N5N394|A0A3N5N394_9PROT Queuine tRNA-ribosyltran sferase OS=Betaproteobacteria bacterium OX=1891241 GN=t gt PE=3 SV=1
MTFVVEATDGAARVGRLDLPHGRVDTPVFMPVGTYGAVKGMSPAALHALGAQIVLGNTFHLWLRPGLEVIERHRGLHRFMGWDRPILTDSGGFQVFSLGTLRSIAEEGVRFQSPINGDRLLLTPEESMRIQRVLNSDIAMIFDECTPYPMDRAGAAASMQLSLRWAERCARAHAGNPNLLFGIVQGGMYEELRDASLRALIGIGFDGYAIGGLSVGEPKSDMLRILAHTAPALPADKPRYLMGVGTPQDILAAVRAGVDMFDCVLPTRNARNGWLYTSRGILKLRNARYRDDLDALDPGCDCYTCRNFTRAYLHHLQRVNEMLGAQLNTLHNLHYYQSLMERIRMAIRGGTLAHLELPGEGAPNGPC

SEQ ID NO: 52522 - protein, 380 aa, Bhargavaea beijingensis
  misc_feature (1)..(380): tr|A0A1G7CK81|A0A1G7CK81_9BACL Queuine tRNA-ribosyltran sferase OS=Bhargavaea beijingensis OX=426756 GN=tgt PE= 3 SV=1
MTPAVTYELIKKDKQTGARLGIVHTPHGSFETPAFMPVGTQATVKTMSPEELKEMKAGIILSNTYHLWLRPGHEIIKEAGGLHKFMNWDRAILTDSGGFQVFSLSDMRKIEEEGVHFRHHLDGSKLFLSPEKAMEIQNALGSDIMMAFDECPPYPASHEYMKASVERTSRWAERCLEAHSRPEDQGLFGIVQGGEFEDLRRQSARDLISLDFPGYAVGGLSVGEPKEVMNQVLDFTTPLLPENKPRYLMGVGSPDALIDGSIRGIDMFDCVLPTRIARNGTLMTSEGRLVVRNAKFARDFRPLDENCDCYVCRNYSRAYIRHLIKAEESFGIRLTSYHNLYFLMDLMEQVRQAIREDRLGDFREEFFEKYGYNKPNAKNF

SEQ ID NO: 52523 - protein, 380 aa, Bhargavaea cecembensis
  misc_feature (1)..(380): tr|M7NF84|M7NF84_9BACL Queuine tRNA-ribosyltransferase OS=Bhargavaea cecembensis DSE10 OX=1235279 GN=tgt PE=3 SV=1
MTPAITYELIKKDKQTGARLGIVHTPHGSFETPAFMPVGTQATVKTMSPEELKEMKAGIILSNTYHLWLRPGHDIIREAGGLHKFMNWDRAILTDSGGFQVFSLSDMRKIEEEGVHFRHHLDGSKLFLSPEKAMEIQNALGSDIMMAFDECPPYPASHEYMKASVERTSRWAERCLEAHARPEDQGLFGIVQGGEFEDLRRQSVQDLTSLDFPGYAVGGLSVGEPKDVMNRVLDFTTPLLPEEKPRYLMGVGSPDALIDGSIRGIDMFDCVLPTRIARNGTLMTSEGRLVVKNAKFARDFRPLDENCDCHVCRNYSRAYIRHLIKAEESFGIRLTSYHNLYFLMNLMEQVRQAIREDRLGDFREEFFEQYGYNKPNAKNF

SEQ ID NO: 52524 - protein, 380 aa, Bhargavaea cecembensis
  misc_feature (1)..(380): tr|A0A163GC93|A0A163GC93_9BACL Queuine tRNA-ribosyltran sferase OS=Bhargavaea cecembensis OX=394098 GN=tgt PE=3 SV=1
MTPAITYELIKKDKQTGARLGIVHTPHGSFETPAFMPVGTQATVKTMSPEDLKEMKSGIILSNTYHLWLRPGHDIIREAGGLHKFMNWDRAILTDSGGFQVFSLSDMRKIEEEGVHFRHHLDGSKLFLSPEKAMEIQNALGSDIMMAFDECPPYPASHEYMKASVERTSRWAERCLEAHSRPGDQGLFGIVQGGEFEDLRRQSAQDLISLDFPGYAVGGLSVGEPKDVMNRVLDFTTPLLPEGKPRYLMGVGSPDALIDGSIRGIDMFDCVLPTRIARNGTLMTSEGRLVVKNAKFARDFRPLDENCDCYVCQNYSRAYIRHLIKAEESFGIRLTSYHNLYFLMNLMEQVRQAIREDRLGDFREEFFEQYGYNKPNAKNF

SEQ ID NO: 52525 - protein, 380 aa, Bhargavaea ginsengi
  misc_feature (1)..(380): tr|A0A1H6XGR0|A0A1H6XGR0_9BACL Queuine tRNA-ribosyltran sferase OS=Bhargavaea ginsengi OX=426757 GN=tgt PE=3 SV =1
MTPAITYELIKKDKQTGARLGIVHTPHGSFETPAFMPVGTQATVKTMSPEELKEMKAGIILSNTYHLWLRPGHEIIREAGGLHKFMNWDRAILTDSGGFQVFSLSDMRKIEEEGVHFRHHLDGSKLFLSPEKAMEIQNALGSDIMMAFDECPPYPASHEYMKASVERTSRWAERCLEAHMRPEDQGLFGIVQGGEYEDLRRQSAQDLVSLDFPGYAVGGLSVGEPKDVMNRVLDFTTPLLPEEKPRYLMGVGSPDALIDGSIRGIDMFDCVLPTRIARNGTLMTSEGRLVVKNAKFARDFRPLDENCDCHVCRNYSRAYIRHLIKAEESFGIRLTSYHNLYFLMNLMEQVRQAIREDRLGDFREEFFEQYGYNKPNAKNF

SEQ ID NO: 52526 - protein, 383 aa, Bibersteinia trehalosi
  misc_feature (1)..(383): tr|A0A3R8SQ98|A0A3R8SQ98_BIBTR Queuine tRNA-ribosyltran sferase OS=Bibersteinia trehalosi OX=47735 GN=tgt PE=3 SV=1
MKYELKKTSGNARRGRLTFSRPKGEFHVETPAFMPVGTYGTVKGMTPEEVAATGAQILLGNTFHLWLRPGQEVMKMHGDLHDFMQWHGPILTDSGGFQVFSLGKLRKIKEEGVHFQNPISGEKIFLSPEKSMEIQYDLGSDIVMIFDECTPYPATFDYAKQSMEMSLRWAKRSRDRFDELQNPNALFGIIQGGVYEELRKISVEKLVEIGFDGYAVGGLAVGEPKEDMHRILEYVCPQIPADKPRYLMGVGKPEDLVEGVRRGIDMFDCVMPTRNARNGHLFVTNGVVKIRNAKYKTDTTPLDPECDCYTCKNYTKAYLYHLDKCNEILGARLNTIHNLRYYQRLMAEIRQAIEDDRFDDFVVEFYQRMGKEVPPLQLGQDNA

SEQ ID NO: 52527 - protein, 383 aa, Bibersteinia trehalosi; identical to SEQ ID NO: 52526
  misc_feature (1)..(383): tr|A0A4V7IA63|A0A4V7IA63_BIBTR Queuine tRNA-ribosyltran sferase OS=Bibersteinia trehalosi USDA-ARS-USMARC-188 O X=1263829 GN=tgt PE=3 SV=1

SEQ ID NO: 52528 - protein, 437 aa, Bifidobacteriaceae bacterium
  misc_feature (1)..(437): tr|A0A3E2BVL2|A0A3E2BVL2_9BIFI Queuine tRNA-ribosyltran sferase OS=Bifidobacteriaceae bacterium GH022 OX=202135 7 GN=tgt PE=3 SV=1
MTNLIEHPRGAEPGKPGDRSEFSFTTKTRLENAADGKGKDGARYGRTGVIRTPHGNICTPAFVPVATQGAMKAVLPESIKDLGGQCMLSNAFHLYERPGEDILDEAGGLAKFMNWDGPTFTDSGGFQVLSLGAGFKKTLAMDVTGMKSDDVIAAGKERMAFVDEDGVTFKSPLNGSIHRFSAEISMGIQHKLGADIMFAFDELTTLMNTRRYQEESVERTFRWAKRCVEEHKRLTQARLGKPYQALYGVVQGANYEDLRRRAAQQIASLDFDGVGIGGAIEKRIIGDTCAWICDAMPENRPRHVLGIAAVDDIFACVENGGDTFDCVAPARCGRNGAIFTRHGRYNVKRAEFKHDQGPLEAGCDCYTCTHYSRMYVSHLLRAKEMNGYTLATIHNERFFVKLLDDIRASIDGGYFEDFRDESLAHYYENGSRANRLA

SEQ ID NO: 52529 - protein, 433 aa, Bifidobacteriaceae bacterium
  misc_feature (1)..(433): tr|A0A3E2C959|A0A3E2C959_9BIFI Queuine tRNA-ribosyltran sferase OS=Bifidobacteriaceae bacterium VN003 OX=202135 8 GN=tgt PE=3 SV=1
MTSLLEHPRGAEPGKPGDRKEFSFTTKTRLSNTAEGKGRDGARYGRTGVIHTPHGDIQTPAFVPVATQAAMKAVLPESIKDLGAQCMLSNAFHLYERPGADVLDEAGGLGKFMNWDKPTFTDSGGFQVLSLGAGFKKTLAMDVTGMKSDDVIAAGKERMAFVDEDGVTFKSPLNGAKHRFSAEISMGIQHKLGADIMFAFDELTTLMNTRRYQEESVERTFRWAKRCVAEHQRLTQERVGKPYQALYGVVQGANYEDLRRHAAEEIASLDFDGVGIGGAIEKRIIGDTCAWICDAMPENRPRHVLGIAAVDDIFACVENGGDTFDCVAPARCGRNGAIFTRHGRYNVKRAEFKHDQRPLEEGCDCYTCTHYSRMYVDHLLRASEMNGFTLATIHNERFFVKLLDNIRASIDGGYFEEFRDETLAHYYEKGAKG

SEQ ID NO: 52530 - protein, 421 aa, Bifidobacterium actinocoloniiforme
  misc_feature (1)..(421): tr|A0A086YWF5|A0A086YWF5_9BIFI Queuine tRNA-ribosyltran sferase OS=Bifidobacterium actinocoloniiforme DSM 22766 OX=1437605 GN=tgt PE=3 SV=1
MSYSSNPGTFGFETTQRLSPTADGLGRDGARYGRTGIIHTPHGDIRTPAFIPVATQAAMKGIPPEQMKDLGAQALLSNAFHLFERPGEDVLDEAGGLGRFMNWSGPTFTDSGGFQVLSLGAGFKKTLAMDVTGLKSDQVIADGKERRAFVDEDGVTFKSPLNGNLHRFSAEISMGIQHKIGADVMFSFDELTTLMNTRSYQEESVERTYRWAQRCVAEHERLTEVRADKPYQALFGVVQGANYEDLRRRAAGQIASLPFDGVGIGGAIEKRLLGQTCAWICDEMPEERPRHVLGIAAVDDIFAGVENGGDTFDCVSPARCGRNGAVFTRDGRWNIMRACMRHDFRPIESDCDCYTCTHYTRAYICHLLHAHELNGLTLASIHNERFFVRLLDEIRASIDGGYFDDYKRETLARFYAHGSKG

SEQ ID NO: 52531 - protein, 471 aa, Bifidobacterium adolescentis
  misc_feature (1)..(471): tr|A0A1X3A4X9|A0A1X3A4X9_BIFAD Queuine tRNA-ribosyltran sferase OS=Bifidobacterium adolescentis OX=1680 GN=tgt PE=3 SV=1
MTSLNEPQTGAVAHETSAANAAAGATHDAAGNTTSAASTENLIKHPRGAEPGKPGRRDAFYFEQKTRLPDAADGKGRGGARYGRTGIIHTPHGDIHTPAFVPVATQAAMKAVLPETMKDLGAQCLLSNAFHLYERPGEQVLDEAGGLAKFMNWNGPTFTDSGGFQVLSLGAGFKKTLAMDVTGMKSDDVIAEGKERLAFVDEDGVTFKSPLNGSLHRFSAEISMGIQHKIGADIMFAFDELTTLMNTRGYQERSVERTYRWAQRCVAEHKRLTEERLGKPYQALYGVVQGANYEDLRRHAAEQIASLDFDGVGIGGAIEKRIIGDTCAWICDAMPESRPRHVLGIAAVDDIFACVENGGDTFDCVAPARCGRNGAIFTRHGRYNIKRAQFKHDFSPLEEGCDCYTCTHYTRAYVDHALRAREFNGFTLATIHNEHFFVKLLDDIRESIDGGYFNEFRDETLAKFYENGSKG

SEQ ID NO: 52532 - protein, 429 aa, Bifidobacterium adolescentis
  misc_feature (1)..(429): tr|A0A1E7Y357|A0A1E7Y357_BIFAD Queuine tRNA-ribosyltran sferase OS=Bifidobacterium adolescentis OX=1680 GN=tgt PE=3 SV=1
MEHPRGAEPGKPGRRDAFYFEQKTRLPDAADGKGRGGARYGRTGIIHTPHGDIHTPAFVPVATQAAMKAVLPETMKDLGAQCLLSNAFHLYERPGEQVLDEAGGLARFMNWNGPTFTDSGGFQVLSLGAGFKKTLAMDVTGMKSDDVIAEGKERLAFVDEDGVTFKSPLNGSLHRFSAEISMGIQHKIGADIMFAFDELTTLMNTRGYQERSVERTYRWAQRCVAEHKRLTEERLGKPYQALYGVVQGANYEDLRRHAAEQIASLDFDGVGIGGAIEKRIIGDTCAWICDAMPESRPRHVLGIAAVDDIFACVENGGDTFDCVAPARCGRNGAIFTRHGRYNIKRAQFKHDFGPLEEGCDCYTCTHYSRAYVDHALRAREFNGFTLATIHNEHFFVKLLDDIRASIDGGYFNEFRDETLAKFYENGSKG

SEQ ID NO: 52533 - protein, 443 aa, Bifidobacterium aemilianum
  misc_feature (1)..(443): tr|A0A366K9G4|A0A366K9G4_9BIFI Queuine tRNA-ribosyltran sferase OS=Bifidobacterium aemilianum OX=2493120 GN=tgt PE=3 SV=1
MSDSSSNTSKQTNLLDHPRGAQTGQPGDRRAFSFETRTRLADSADGKGRNGARWGRTGTIHTPHGDIQTPAFVPVATQAAMKGVLPETIKELGGQCMLSNAFHLFERPGEQVLDEAGGLGRFMNWDRPTFTDSGGFQVLSLGAGFKKTLAMDVTGMKSDQVIAEGKERRAFVDEDGVTFKSPLNGDEHRFSAEISMGIQHQIGADIMFAFDELTTLMNTRSYQEQSVERTYRWAQRCVAEHQRLTAERVGKPYQALYGVVQGANYEDLRRHAAQQIASLDFDGVGIGGAIEKRIIGNTCAWICDEMPEDRPRHVLGIAAVDDIFACVENGGDTFDCVAPARCGRNGAIFTRDGRYNVKRAEHKHDFGPLEEGCDCYTCTHYSRAYVDHLLRAREINGFTLATIHNERFFIKLLDDIRASIDGGYFEDFRDQTLARYYAHGSRG

SEQ ID NO: 52534 - protein, 433 aa, Bifidobacterium angulatum
  misc_feature (1)..(433): tr|C4FCZ4|C4FCZ4_9BIFI Queuine tRNA-ribosyltransferase OS=Bifidobacterium angulatum DSM 20098 = JCM 7096 OX=51 8635 GN=tgt PE=3 SV=1
MTDLVEHPLGAEPGKPGDRSAFSFETITRLPDAADGKGRGGARYGRTGIIHTPHGDIRTPAFVPVGTQAAMKAVLPEQMRDLGAQCLLANAFHLFERPGEDVLDAAGGLAKFMNWNGPTFTDSGGFQVMSLGVGFKKTLAMDVTGMKSDEVIAKGKERMAWVDEDGVTFKSPLNGDQHRFSAEISMGIQHKLGADIMFAFDELTTLMNTRGYQEQSVERTYRWAQRCVAEHKRLTEERLGKPYQALYGVVQGANYEDLRRHAAAQIASLDFDGVGIGGAIEKRIIGDTCAWICDEMPENRPRHVLGIAAVDDIFACVENGGDTFDCVAPARCGRNGAIFTRHGRYNIKRAQFKFDFGPLEEGCDCYTCTHYTRAHVTHLLRAREFNGFTLATIHNERFFVKLLDDIRASIDGGYFEEFRDETLAKFYENGSKG

SEQ ID NO: 52535 - protein, 433 aa, Bifidobacterium angulatum
  misc_feature (1)..(433): tr|A0A126STN6|A0A126STN6_9BIFI Queuine tRNA-ribosyltran sferase OS=Bifidobacterium angulatum OX=1683 GN=tgt PE= 3 SV=1
MTDLVEHPLGAEPGKPGDRSAFSFETITRLPDAADGKGRGGARYGRTGIIHTPHGDIRTPAFVPVGTQAAMKAVLPEQMRDLGAQCLLANAFHLFERPGEDVLDAAGGLAKFMNWNGPTFTDSGGFQVMSLGVGFKKTLAMDVTGMKSDEVIAKGKERMAWVDEDGVTFKSPLNGDQHRFSAEISMGIQHKLGADIMFAFDELTTLMNTRGYQEQSVERTYRWAQRCVAEHKRLTEERLGKPYQALYGVVQGANYEDLRRHAAAQIASLDFDGVGIGGAIEKRIIGDTCAWICDEMPENRPRHVLGIAAVDDIFACVENGGDTFDCVAPARCGRNGAIFTRHGRYNIKRAQFKFDFGPLEEGCDCYTCTHYTRAHVTHLLRAREFNGFTLATIHNERFFVKLLDDIRASIDGGYFEEFRDETLAKFYENGSRG

SEQ ID NO: 52536 - protein, 470 aa, Bifidobacterium animalis
  misc_feature (1)..(470): tr|A0A4V1WK92|A0A4V1WK92_BIFAN Queuine tRNA-ribosyltran sferase OS=Bifidobacterium animalis subsp. lactis OX=30 2911 GN=tgt PE=3 SV=1
MRRAVASVGVRNLFTRTTARLRIAHMTANTESIVQAPAPQLVEHPRGAEPGKPGDRSAFRFEQTTRLPDSPNGKGKGGARYGRTGILHTPHGDIKTPAFVPVATQGAMKAVLPESMTQLGAQCLLSNAFHLYERPGEDVLDEAGGLAKFMNWNGPTFTDSGGFQVLSLGAGFKKTLAMDVKGMKSDDVIAEGKERMAFVDEDGVTFKSPLNGSLHRFSAEISMNIQHKLGADIMFAFDELTTLMNTRRYQENSVERTYRWAQRCVAEHERLTQSRLGKPYQALYGVVQGANYEDLRRHAASQIASLDFDGVGIGGAMEKRIIGDICAWICDEMPESRPRHVLGIAAVDDIFACVENGGDTFDCVAPARCGRNGAIFTRDGRYNIKRAQYKHDFGPLEEGCQCYTCTHYTRAYVDHLLRAHEMNGFTLATIHNECFFVHLLDDIRASIDGGYFDEFRDETLARFYANGSRG

SEQ ID NO: 52537 - protein, 445 aa, Bifidobacterium animalis
  misc_feature (1)..(445): tr|A0A1C7FU72|A0A1C7FU72_9BIFI Queuine tRNA-ribosyltran sferase OS=Bifidobacterium animalis subsp. animalis OX= 302912 GN=tgt PE=3 SV=1
MTANIESIVQAPAPQLVEHPRGAEPGKPGDRSAFRFEQTTRLPDSPNGKGKGGARYGRTGILHTPHGDIKTPAFVPVATQGAMKAVLPESMTQLGAQCLLSNAFHLYERPGEDVLDEAGGLAKFMNWNGPTFTDSGGFQVLSLGAGFKKTLAMDVKGMKSDDVIAEGKERMAFVDEDGVTFKSPLNGSLHRFSAEISMNIQHKLGADIMFAFDELTTLMNTRRYQENSVERTYRWAQRCVAEHERLTQSRLGKPYQALYGVVQGANYEDLRRHAASQIASLDFDGVGIGGAMEKRIIGDICAWICDEMPESRPRHVLGIAAVDDIFACVENGGDTFDCVAPARCGRNGAIFTRDGRYNIKRAQYKHDFGPLEEGCQCYTCTHYTRAYVDHLLRAHEMNGFTLATIHNEYFFVHLLDDIRASIDGGYFDEFRDETLARFYANGSRG

SEQ ID NO: 52538 - protein, 449 aa, Bifidobacterium anseris
  misc_feature (1)..(449): tr|A0A2N5IXG1|A0A2N5IXG1_9BIFI Queuine tRNA-ribosyltran sferase OS=Bifidobacterium anseris OX=2020963 GN=tgt PE =3 SV=1
MTSTSIPADSTITSAPAPQLVEHPRGAEPGEPGDRSAFHFEQITRLPDAADGKGKGGARYGRTGILHTPHGDIRTPAFVPVATQGAMKAVLPESMVELGAQCLLSNAFHLYERPGEDVLDEAGGLAKFMNWNGPTFTDSGGFQVLSLGAGFKKTLAMDVKGMKSDDVIAAGKERMAFVDEDGVTFKSPLNGSLHRFSAEISMNIQHKIGADIMFAFDELTTLMNTRRYQENSVERTYRWAQRCVAEHERLTAQRVGKPYQALYGVVQGANYEDLRRHAAQQIASLDFDGVGIGGAMEKRIIGDICAWICDEMPQSRPRHVLGIAAVDDIFACVENGGDTFDCVAPARCGRNGAIFTRDGRYNIKRAQYKHDFGPLEEGCGCYTCTHYSRAYVDHLLRSHEMNGFTLATIHNEYFFVHLLDDIRASIDGGYFDEFRDETLARFYANGSRG

SEQ ID NO: 52539 - protein, 440 aa, Bifidobacterium aquikefiri
  misc_feature (1)..(440): tr|A0A261GAM2|A0A261GAM2_9BIFI Queuine tRNA-ribosyltran sferase OS=Bifidobacterium aquikefiri OX=1653207 GN=tgt PE=3 SV=1
MLKDMVGLMTKMRKPLGAVEGKPGDRSAFSFETQKRLESRSDGFGKDGARYGRTGIIHTPHGDIQTPTFIPVATQGAMKAVLPEAMKELGAQCLLSNAFHLFERPGDEVLNEAGGLSTFMNWDGPTYTDSGGFQVLSLGAGFKKTLAMDVEGMKSDDIIAKGKERLAFVDEDGVTFKSPLNGEKKRFSAEISMRIQHNIGADMMFSFDELTTLMNTRRYQEQSVERTFRWAKRCVAEHQRLTEERLGKPYQALFGVVQGANYEDLRRLAASQIASLDFDGVGIGGAIEKRLLGQTCAWICDAMPESRPRHVLGIASVDDIFSAVENGGDTFDCVAPARCARNGAVFTHHGRWNIKRAQFKHDFRPIEDGCDCYACRNYSRAYIDHLLRAREMNGYTLATIHNEHFFITLLADIRKSIEGGYFDEFRQETVTRFYENGSRG

SEQ ID NO: 52540 - protein, 432 aa, Bifidobacterium asteroides
  misc_feature (1)..(432): tr|A0A556R7I0|A0A556R7I0_9BIFI Queuine tRNA-ribosyltran sferase OS=Bifidobacterium asteroides OX=1684 GN=tgt PE =3 SV=1
MSLITNPLGATPGRPGDRAAFSFETLNRLPDSPDGLGHNGRRYGRTGIIRTPHGDIHTPAFIPVATQAAMKAVLPEQMRQLGAQVLLANAFHLFERPGPDILDQAGGLARFMNWDGPTYTDSGGFQVLSLGAGFKKTLAMDVTGMKSDQVIAEGKERLAFVDEDGVTFKSPLNGDRHRFSAEISMGIQHRIGADIMFSFDELTTLMNTRTYQEQSVERTFRWAKRCVDEHQRLTQARTGKPYQALFGVVQGANYEDLRRRAARQIASLDFDGVGIGGAIEKRLLGQTCAWICDEMPESRPRHVLGIAAVDDIFAGVENGGDTFDCVSPARCGRNGAVFTRDGRWNIKRAQFKTDFRPIEEDCDCYTCTHYSRAYIDHLLRAHELNGYTLATIHNERFFVRLLDEIRQSIDGGYFDEYKKETLARFYAHGSKG

SEQ ID NO: 52541 - protein, 432 aa, Bifidobacterium asteroides
  misc_feature (1)..(432): tr|A0A318MR29|A0A318MR29_9BIFI Queuine tRNA-ribosyltran sferase OS=Bifidobacterium asteroides OX=1684 GN=tgt PE =3 SV=1
MSLITNPLGATPGRPGDRAAFSFETLNRLPDSPDGLGHNGRRYGRTGIIHTPHGDIHTPAFIPVATQAAMKAVLPEQMRQLGAQVLLANAFHLFERPGPDILDQAGGLARFMNWDGPTYTDSGGFQVLSLGAGFKKTLAMDVTGMKSDQVIAEGKERLAFVDEDGVTFKSPLNGDRHRFSAEISMGIQHRIGADIMFSFDELTTLMNTRTYQEQSVERTFRWAKRCVDEHHRLTQARTGKPYQALFGVVQGANYEDLRRRAARQIASLDFDGVGIGGAIEKRLLGQTCAWICDEMPESRPRHVLGIAAVDDIFAGVENGGDTFDCVSPARCGRNGAVFTRDGRWNIKRAQFKTDFRPIEEDCDCYTCTHYSRAYIDHLLRAHELNGYTLATIHNERFFVRLLDEIRQSIDSGYFDEYKKETLTRFYAHGSKG

SEQ ID NO: 52542 - protein, 433 aa, Bifidobacterium biavatii
  misc_feature (1)..(433): tr|A0A086ZWR5|A0A086ZWR5_9BIFI Queuine tRNA-ribosyltran sferase OS=Bifidobacterium biavatii DSM 23969 OX=143760 8 GN=tgt PE=3 SV=1
MTSLLDHPRGAEPGKPGDRSAFNFETITRLPDAADGKGRGGARYGRTGILHTPHGDIHTPAFVPVATQAAMKAVLPETMREAGAQCMLSNAFHLYERPGEDVLDAAGGLAKFMNWDGPTFTDSGGFQVLSLGAGFKKTLAMDVTGMKSDDVIADGKERLAFVDEDGVTFKSPLNGSLHRFSAEISMGIQHKIGADIMFAFDELTTLMNTRRYQEESVERTYRWAQRCVAEHQRLTEARLGKPYQALYGVVQGANYEDLRRHAAEQIASLDFDGVGIGGAIEKRIIGDTCAWICDAMPESRPRHVLGIAAVDDIFACVENGGDTFDCVAPARCGRNGAIFTRDGRYNVKRAEFKFDFGPLEEGCDCYTCTHYSRAYVDHLLRAREFNGFTLATIHNEHFFIKLLDDIRASIDGGYFDEFRDETLARFYARGSRG

SEQ ID NO: 52543 - protein, 433 aa, Bifidobacterium bifidum
  misc_feature (1)..(433): tr|E4V792|E4V792_BIFBI Queuine tRNA-ribosyltransferase OS=Bifidobacterium bifidum NCIMB 41171 OX=398513 GN=tgt PE=3 SV=1
MTSFLEHPRGAADGRPGDRSAFFFETLTQLPDSADGKGRGGRRYGRAGIIHTPHGDIRTPAFVPVATQAAMKAVLPETMRELGAQCLLSNAFHLFERPGQDVLDAAGGLARFMNWDGPTFTDSGGFQVLSLGAGFKKTLAMDVTGMKSDDVIAAGKERLAFVDEDGVTFKSPLNGDRHRFSAEISMGIQHKIGADIMFAFDELTTLMNTRSYQEASVERTYRWAQRCVAEHQRLTEERLGKPYQALYGVVQGANYEDLRRHAAEQIASLDFDGVGIGGAIEKRIIADTCAWICDAMPESRPRHVLGIASVDDIFACVENGGDTFDCVAPARCARNGAIFTRNGRYNVKRAQHKFDFGPLEEGCDCYTCQHYTRAYVDHLLRAREFNGFTLATIHNERFFVKLLDDIRASIDGGYFDEFRDESLARFYANGPRG

SEQ ID NO: 52544 - protein, 433 aa, Bifidobacterium bifidum
  misc_feature (1)..(433): tr|A0A0H3EAC1|A0A0H3EAC1_BIFBP Queuine tRNA-ribosyltran sferase OS=Bifidobacterium bifidum (strain PRL2010) OX= 702459 GN=tgt PE=3 SV=1
MTSFLEHPRGAADGRPGDRSAFFFETLTQLPDSADGKGRGGRRYGRTGIIHTPHGDIRTPAFVPVATQAAMKAVLPETMRELGAQCLLSNAFHLFERPGQDVLDAAGGLARFMNWDGPTFTDSGGFQVLSLGAGFKKTLAMDVTGMKSDDVIAAGKERLAFVDEDGVTFKSPLNGDRHRFSAEISMGIQHKIGADIMFAFDELTTLMNTRSYQEASVERTYRWAQRCVAEHQRLTEERLGKPYQALYGVVQGANYEDLRRHAAEQIASLDFDGVGIGGAIEKRIIADTCAWICDAMPESRPRHVLGIASVDDIFACVENGGDTFDCVAPARCARNGAIFTRDGRYNVKRAQHKFDFGPLEEGCDCYTCQHYTRAYVDHLLRAREFNGFTLATIHNERFFVKLLDDIRASIDGGYFDEFRDESLARFYANGPRG

SEQ ID NO: 52545 - protein, 504 aa, Bifidobacterium bohemicum
  misc_feature (1)..(504): tr|A0A086ZHH1|A0A086ZHH1_9BIFI Queuine tRNA-ribosyltran sferase OS=Bifidobacterium bohemicum DSM 22767 OX=14376 06 GN=tgt PE=3 SV=1
MSTFDIDRPAAGNDESPSALNEGNTHDVSRESKLSRNTDTVMRRGTPNVASEATLHAQTHSGTNSWNPAPSASGLLEHPLGAVKGKPADRSKFWFEQKTRLADSAKGLGRGGARYGRTGVLHTPHGDIRTPVFVPVATQAAMKGVLPEMMKDMGAQCLLSNAFHLFERPGENILDEAGGLARFENWDGPTFTDSGGFQVLSLGAGFKKTLAMDVTDMKSDDVIAPGRERKAFVDEDGVTFKSPLNGAEHRFSAEISMGIQHKIGADIMFAFDELTTLMNTRGYQEQSVERTFRWAKRCVTEHQRLTEARLGKPYQALYGVVQGANYEDLRRKAASQIASLDFDGVGIGGAIEKRIIGDICAWICDEMPESRPRHVLGIAAVDDIFACAENGGDTFDCVAPARCARNGAIYTRDGRYNIKRVANKRDFGPLEEGCDCYTCTHYSRAYVDHLLRAHEINGATLATIHNERFFIKLLDDIRDSIDGGYFDEFRDETLARYYAHGSKG

SEQ ID NO: 52546 - protein, 478 aa, Bifidobacterium bombi
  misc_feature (1)..(478): tr|A0A086BPI1|A0A086BPI1_9BIFI Queuine tRNA-ribosyltran sferase OS=Bifidobacterium bombi DSM 19703 OX=1341695 G N=tgt PE=3 SV=1
MNTTAATNADAAADARHLQTAAADHSGHPADNDSTIRTASHLAHSASGLLEHPRGARPGLPGDRSEFSFEQHSRLESCAQGKGHDGARYGRTGIIHTPHGDIRTPAFVPVATQSAMKGVLPETMKDLGAQCLLSNAFHLFERPGEEVLDEAGGLARFMNWDGPTFTDSGGFQVLSLGAGFKKTLAMDVTDMKNDDVIAEGKERLAFVDEDGVTFKSPLNGSRHRFSAEISMGIQHKLGADIMFAFDELTTLMNTRGYQEHSVERTFRWARRCVEEHRRLTHERVGKPYQALYGVVQGANYEDLRRRAAREIASLDFDGVGIGGAIEKRLIGDTCAWICDEMPENRPRHVLGIAEVDDIFACVENGGDTFDCVSPARCGRNGAIFTRHGRYNIKRAANKHDFNPLEEGCECYTCTHYTRAYVDHLLRAHEMNGATLATIHNEHFFVKLLDDIRASIDAGYFEELRDETLAHYYENGLMK

SEQ ID NO: 52547 - protein, 433 aa, Bifidobacterium boum
  misc_feature (1)..(433): tr|A0A086ZKV6|A0A086ZKV6_9BIFI Queuine tRNA-ribosyltran sferase OS=Bifidobacterium boum OX=78343 GN=tgt PE=3 SV =1
MTSLLEHPRGAEPGKPGDRSAFWFETITRLPDAANGKGRGGARYGRTGIIHTPHGDIHTPAFVPVATQGAMKAVLPESMKQLGAQCLLSNAFHLFERPGEDVLDAAGGLAKFMNWDGPTFTDSGGFQVLSLGAGFKKTLAMDVTGMKSDDVIAEGKQRLAFVDEDGVTFKSPLNGAKHRFSAEISMGIQHKIGADIMFAFDELTTLMNTRGYQERSVERTFRWAKRCVAEHERLTRERLGKPYQALYGVVQGANYEDLRRHAAEEIASLDFDGVGIGGAIEKRIIGDTCAWICDAMPENRPRHVLGIAAVDDIFACVENGGDTFDCVAPARCGRNGAIFTRDGRYNIKRAANKFDFSPLEEGCDCYTCTHYSRAYVDHLLRAREFNGFTLATIHNEHFFVKLLDDIRASIDGGYFDEFRDETLARFYANGSRG

SEQ ID NO: 52548 - protein, 437 aa, Bifidobacterium breve
  misc_feature (1)..(437): tr|S3AJ70|S3AJ70_BIFBR Queuine tRNA-ribosyltransferase OS=Bifidobacterium breve HPH0326 OX=1203540 GN=tgt PE=3 SV=1
MTSDVLNHPLGAQAGKPGDRSAFHFETITRLPSAANGLGRDGARYGRTGIIHTPHGDIRTPAFVPVGTQAAMKAVLPEQMKELGAQCLLANAFHLFERPGEDVLDAAGGLARFMNWDGPTFTDSGGFQVMSLGVGFKKTLAMDVTGMKSDDIIAKGKERMAWVDEDGVTFKSPLNGDAHRFSAEISMGIQHKIGADIMFAFDELTTLMNTRSYQEDSVERTFRWARRCVEEHQRLTAARLGKPYQALYGVVQGANYEDLRRRAASQIASLDFDGVGIGGAIEKRIIGDTCAWICDAMPESRPRHVLGIASVDDIFACVENGGDTFDCVAPARCARNGAIYTRAGRYNIKRAQHKFDFGPLEEGCDCYTCQHYSRAYVDHLLRAREFNGFTLATIHNEHFFVKLLDDIRASIDGGYFDEFRDEALAHFYGNGERKPGL

SEQ ID NO: 52549 - protein, 437 aa, Bifidobacterium breve; identical to SEQ ID NO: 52548
  misc_feature (1)..(437): tr|A0A0M4M3B3|A0A0M4M3B3_BIFBR Queuine tRNA-ribosyltran sferase OS=Bifidobacterium breve OX=1685 GN=tgt PE=3 SV =1

SEQ ID NO: 52550 - protein, 441 aa, Bifidobacterium callitrichidarum
  misc_feature (1)..(441): tr|A0A2U2ND26|A0A2U2ND26_9BIFI Queuine tRNA-ribosyltran sferase OS=Bifidobacterium callitrichidarum OX=2052941 GN=tgt PE=3 SV=1
MSEPTATGLLDHPRGAEAGKPGDRSAFHFETITRLPSSAEGLGRDGARYGRTGIIHTPHGDIKTPAFVPVGTQAAMKAVLPEQMKDLGAQCLLANAFHLFERPGEDVLDAAGGLARFMNWDGPTFTDSGGFQVMSLGVGFKKTLAMDVTGMKSDDIIAKGKERMAWVDEDGATFKSPLNGDEHRFSAEISMGIQHKLGADIMFAFDELTTLMNTRSYQEDSVERTFRWAKRCVAEHERLTAERLGKPYQALYGVVQGANYEDLRRHAAEQIASLDFDGVGIGGAIEKRIIGNTCAWICDAMPESRPRHVLGIASVDDIFACVENGGDTFDCVAPARCARNGAIYTRTGRYNIKRAQHKFDFGPLEEGCDCYTCQHYSRAYVDHLLRAREFNGFTLATIHNEHFFVKLLDDIRASIDGGYFDEFRDETLAHFYGNGERKPGL

SEQ ID NO: 52551 - protein, 428 aa, Bifidobacterium callitrichos
  misc_feature (1)..(428): tr|A0A2T3GDT3|A0A2T3GDT3_9BIFI Queuine tRNA-ribosyltran sferase OS=Bifidobacterium callitrichos OX=762209 GN=tg t PE=3 SV=1
MDLNLHPIGAAEGRPGDRSAFRFETITRLSDSADGKGRNGARYGRTGIIHTPHGDIRTPAFVPVATQAAMKAVLPESMKDLGAQCLLSNAFHLFERPGEDVLDQAGGLARFMNWHGPTFTDSGGFQVMSLGVGFKKTLAMDVTGMKSDDVIAKGKERMAWVDEDGVTFKSPLNGDQHRFSAEISMGIQHKIGADIMFAFDELTTLMNTRSYQEESVERTFRWAKRCVAEHERLTAERLGKPYQALYGVVQGANYEDLRRHAAEQIASLDFDGVGIGGAIEKRIIGETCAWICDAMPENRPRHVLGIAEMDDIFACVENGGDTFDCVAPARCGRNGAIYTRHGRYNIKRAQHKFDFGPLEEGCDCYTCRNYSRAYVDHLLRAREFTGFTLATIHNERFFVKLLDDIRDSIDGGYFEEFRDESLAHFYGR

SEQ ID NO: 52552 - protein, 457 aa, Bifidobacterium callitrichos
  misc_feature (1)..(457): tr|A0A087A0R3|A0A087A0R3_9BIFI Queuine tRNA-ribosyltran sferase OS=Bifidobacterium callitrichos DSM 23973 OX=14 37609 GN=tgt PE=3 SV=1
MTDISTNITAAEANNGASSVSTTSNGTAAPDLNLHPLGAAPGKPGDRSAFHFETITRLSDAADGKGKGGARYGRTGIIHTPHGDIRTPAFVPVATQAAMKAVLPESMKDLGAQCLLSNAFHLFERPGEDVLDQAGGLGRFMNWHGPTFTDSGGFQVMSLGVGFKKTLAMDVTGMKSDDVIAKGKERMAWVDEDGVTFKSPLNGDQHRFSAEISMGIQHKIGADIMFAFDELTTLMNTRSYQEESVERTFRWAKRCVAEHERLTAERLGKPYQALYGVVQGANYEDLRRHAAEQIASLDFDGVGIGGAIEKRIIGETCAWICDAMPESRPRHVLGIAEMDDIFACVENGGDTFDCVAPARCGRNGAIYTRHGRYNIKRAQHKFDFGPLEEGCDCYTCRNYSRAYVDHLLRAREFTGFTLATIHNERFFVKLLDDIRDAIDGGYFEEFRDESLAHFYGK

SEQ ID NO: 52553 - protein, 455 aa, Bifidobacterium catenulatum
  misc_feature (1)..(455): tr|A0A1V8PT99|A0A1V8PT99_9BIFI Queuine tRNA-ribosyltran sferase OS=Bifidobacterium catenulatum OX=1686 GN=tgt P E=3 SV=1
MTSLIESSTDMAQDTQNTATAVSENLIEHPRGAEPGKPGRRDAFYFEQKNRLPDAADGKGRGGARYGRTGTIHTPHGDIHTPAFVPVATQAAMKAVLPETMKDLGAQCLLSNAFHLYERPGEQVLDEAGGLAKFMNWNGPTFTDSGGFQVLSLGAGFKKTLAMDVTGMKSDDVIAEGKERLAFVDEDGVTFKSPLNGSLHRFSAEISMGIQHKIGADIMFAFDELTTLMNTRGYQERSVERTYRWAQRCVAEHKRLTEERVGKPYQALYGVVQGANYEDLRRHAAEQIASLDFDGVGIGGAIEKRIIGDTCAWICDAMPESRPRHVLGIAAVDDIFACVENGGDTFDCVAPARCGRNGAIFTRDGRYNIKRAQFKHDFGPLEEGCDCYTCTHYSRAYVDHALRAREFNGFTLATIHNEHFFVKLLDDIRASIDGGYFDEFRDEALARFYANGSRG

SEQ ID NO: 52554 - protein, 455 aa, Bifidobacterium catenulatum
  misc_feature (1)..(455): tr|A0A564VYN5|A0A564VYN5_9BIFI Queuine tRNA-ribosyltran sferase OS=Bifidobacterium catenulatum OX=1686 GN=tgt P E=3 SV=1
MTSLTESSIDTAQDTQNAATAVSENLIEHPRGAEPGKPGRRDAFYFEQKTRLPDAADGKGRGGARYGRTGTIHTPHGDIHTPAFVPVATQAAMKAVLPETMKDLGAQCLLSNAFHLYERPGEQVLDEAGGLAKFMNWNGPTFTDSGGFQVLSLGAGFKKTLAMDVTGMKSDDVIAEGKERLAFVDEDGVTFKSPLNGSLHRFSAEISMGIQHKIGADIMFAFDELTTLMNTRGYQERSVERTYRWAQRCVAEHKRLTEERVGKPYQALYGVVQGANYEDLRRHAAEQIASLDFDGVGIGGAIEKRIIGDTCAWICDAMPESRPRHVLGIAAVDDIFACVENGGDTFDCVAPARCGRNGAIFTRDGRYNIKRAQFKHDFGPLEEGCDCYTCTHYSRAYVDHALRAREFNGFTLATIHNEHFFVKLLDDIRASIDGGYFDEFRDETLTRFYANGSRG

SEQ ID NO: 52555 - protein, 444 aa, Bifidobacterium catulorum
  misc_feature (1)..(444): tr|A0A2U2MU24|A0A2U2MU24_9BIFI Queuine tRNA-ribosyltran sferase OS=Bifidobacterium catulorum OX=1630173 GN=tgt PE=3 SV=1
MTDVTDPTINTASDLVEHPRGTAPGKPGDRGAFGFEITRRLDPTADGLGRGGFRHGRSGVIHTPHGDIRTPAFVPVATQATMKAMLPEQLVDLGAQCTLANAFHLFERPGEDIVDAAGGLGKFMNWHGPTFTDSGGFQVMSLGVGFKKTLAMDVTGLKSDDIIAKGKERLAFVDEDGVTFKSPLNGDVHRFSAEISMGIQHKIGADIMFSFDELTTLMNTRSYQEQSVERTFRWAKRCVAEHRRLTAERLGKPYQALFGVVQGANYEDLRRHAARQIASLDFDGVGIGGAIEKNILGNICAWICDEMPELRPRHVLGIAAVDDIFAGVENGGDTFDCVAPARTARNGAIYTRDGRWNVLRAALKRDFRPLEEGCDCYTCTHYSRAYLHHLLKTREMSGCTLATIHNERFFVRLLDDIRASIDGGYFDEFRDATLARFYANGSRG

SEQ ID NO: 52556 - protein, 449 aa, Bifidobacterium choerinum
  misc_feature (1)..(449): tr|A0A2D3D4H2|A0A2D3D4H2_9BIFI Queuine tRNA-ribosyltran sferase OS=Bifidobacterium choerinum OX=35760 GN=tgt PE =3 SV=1
MTSTSIPSDTTITSAPAPQLVEHPRGAEAGKPGDRSAFHFEQITRLPDSSDGKGKGGARYGRTGILHTPHGDIRTPAFVPVATQGAMKAVLPESMVQLGAQCLLSNAFHLYERPGEDVLDEAGGLAKFMNWNGPTFTDSGGFQVLSLGAGFKKTLAMDVKGMKSDDVIAEGKERMAFVDEDGVTFKSPLNGSLHRFSAEISMNIQHKIGADIMFAFDELTTLMNTRRYQENSVERTYRWAQRCVAEHERLTAERVGKPYQALYGVVQGANYEDLRRHAAQQIASLDFDGVGIGGAMEKRIIGNICAWICDEMPESRPRHVLGIAAVDDIFACVENGGDTFDCVAPARCGRNGAIFTRDGRYNIKRAQYKHDFGPLEEGCGCYTCTHYSRAYVDHLLRAHEMNGFTLATIHNEYFFVHLLDDIRASIDGGYFDEFRDETLARFYANGSRG

SEQ ID NO: 52557 - protein, 475 aa, Bifidobacterium choerinum
  misc_feature (1)..(475): tr|A0A087AH05|A0A087AH05_9BIFI Queuine tRNA-ribosyltran sferase OS=Bifidobacterium choerinum OX=35760 GN=tgt PE =3 SV=1
MADDEPRQRQAHDPCRWTTAGPRIAHMTSTSIPSDTTITSAPAPQLVEHPRGAEAGKPGDRSAFHFEQITRLPDSSDGKGKGGARYGRTGILHTPHGDIRTPAFVPVATQGAMKAVLPESMVQLGAQCLLSNAFHLYERPGEDVLDEAGGLAKFMNWNGPTFTDSGGFQVLSLGAGFKKTLAMDVKGMKSDDVIAEGKERMAFVDEDGVTFKSPLNGSLHRFSAEISMNIQHKIGADIMFAFDELTTLMNTRRYQENSVERTYRWAQRCVAEHERLTAERVGKPYQALYGVVQGANYEDLRRHAAQQIASLDFDGVGIGGAMEKRIIGNICAWICDEMPESRPRHVLGIAAVDDIFACVENGGDTFDCVAPARCGRNGAIFTRDGRYNIKRAQYKHDFGPLEEGCGCYTCTHYSRAYVDHLLRAHEMNGFTLATIHNEYFFVHLLDDIRASIDGGYFDEFRDETLARFYANGSRG

SEQ ID NO: 52558 - protein, 483 aa, Bifidobacterium commune
  misc_feature (1)..(483): tr|A0A1C4H6G3|A0A1C4H6G3_9BIFI Queuine tRNA-ribosyltran sferase OS=Bifidobacterium commune OX=1505727 GN=tgt PE =3 SV=1
MDISTDATTNTAKTGKHTTVRTRGSKETPSEATTHARQQSGSGVSQLAPSTSGLLERPRGSEPGKPGDRSQFYFEQHTRLSNTPEGKGRNGARYGRTGVIHTPHGDIHTPAFVPVATQAAMKGVLPETMKELNAQCLLSNAFHLFERPGEDIIDEAGGLARFENWDGPTFTDSGGFQVLSLGAGFKKTLAMDVTGMKSDDVIAKGRERKAFVDEDGVTFKSPLNGNKHRFSAEISMGIQHKIGADIMFAFDELTTLMNTRGYQEQSIERTFRWAKRCIAEHERLTQARLGKPYQALYGVVQGANYEDLRRRAAEQIASLDFDGVGIGGAIEKRLIGDTCAWICDAMPESRPRHVLGIAAVDDIFACVENGGDTFDCVAPARCARNGAIYTRDGRYNIRRAANKRDFGPLEEGCDCYTCTHYTRAYVDHLLRAGEMNGATLATIHNERFFIRLLDDIRASIDGGYFEKLRDETLARYYAHGSKG

SEQ ID NO: 52559 - protein, 432 aa, Bifidobacterium coryneforme
  misc_feature (1)..(432): tr|A0A076JBL8|A0A076JBL8_9BIFI Queuine tRNA-ribosyltran sferase OS=Bifidobacterium coryneforme OX=1687 GN=tgt P E=3 SV=1
MTFLMNPLGAEPGRPGDRSAFSFEAITQLPSAADGLGREGRRYGRTGIIHTPHGDIHTPAFIPVATQAAMKAVLPEQMREMGAQVLLSNAFHLFERPGEDILDQAGGLARFMNWDGPTYTDSGGFQVLSLGAGFKKTLAMDVTGMQSDEVIAEGKERLAFVDEDGVTFKSPLNGDQHRFSAEISMGIQHKIGADVMFAFDELTTLMNTRSYQEKSVERTFRWAKRCVAEHERLTAERTGKPYQALFGVVQGANYEDLRRKAAGQIASLDFDGVGIGGAIEKRLLGQTCAWICDEMPESRPRHVLGIAAVDDIFAGVENGGDTFDCVAPARCGRNGAVFTRDGRWNIKRAQFKNDFRPIEEDCDCYACTNYSRAYINHLLRAREFNGFTLATIHNERFFVRLLDEIRASIDGGYFDDYKKETLARFYANGSRG

SEQ ID NO: 52560 - protein, 449 aa, Bifidobacterium criceti
  misc_feature (1)..(449): tr|A0A2A2EG71|A0A2A2EG71_9BIFI Queuine tRNA-ribosyltran sferase OS=Bifidobacterium criceti OX=1960969 GN=tgt PE =3 SV=1
MTSTSTSADSTITSAPAPQLVERPRGAEPGKPGDRSAFHFEERTRLSDSADGKGKGGARYGRTGILHTPHGDIRTPAFVPVATQGAMKAVLPESMVDLGAQCLLSNAFHLYERPGEDVLDEAGGLAKFMNWNGPTFTDSGGFQVLSLGAGFKKTLAMDVEGMKSDDVIAEGKERMAFVDEDGVTFKSPLNGSLHRFSAEISMNIQHKIGADIMFAFDELTTLMNTRRYQENSVERTYRWAQRCVAEHERLTQTRVGKPYQALYGVVQGANYEDLRRHAAQQIASLDFDGVGIGGAMEKRIIGDICAWICDEMPQSRPRHVLGIAAVDDMFACVENGGDTFDCVAPARCGRNGAIFTRDGRYNIKRAANKRDFSPLEEGCGCYTCTHYTRAYVDHLLRAHEMNGLTLATIHNEYFFVHLLDDIRASIDGGYFDEFRDATLARFYANGSRG

SEQ ID NO: 52561 - protein, 433 aa, Bifidobacterium cuniculi
  misc_feature (1)..(433): tr|A0A087ATE4|A0A087ATE4_9BIFI Queuine tRNA-ribosyltran sferase OS=Bifidobacterium cuniculi OX=1688 GN=tgt PE=3 SV=1
MTSLLEHPRGAAPGQPGDRSAFSFEQHVRLPDSPTGKGRGGARYGRTGIIHTPHGDIKTPAFVPVATQAAMKAVLPEQMTQLGAQCLLSNAFHLFERPGPDVLDKAGGLAKFMNWDGPTFTDSGGFQVMSLGVGFKKTLAMDVTGMKSDDVIAKGHDRLAFVDEDGVTFKSPLNGSLHRFSAEISMGIQHQLGADIMFAFDELTTLMNTRRYQEESVERTFRWAKRCVAEHQRLTAGRLGRPYQALYGVVQGANYEDLRRRASAQISSLDFDGVGIGGAMEKRIIGDICAWICDEMPEERPRHVLGIAAVDDIFACAENGGDTFDCVAPARCGRNGAIFTRDGRYNIKRAANKYDFGPLEEGCTCYTCTHYSRAYVDHLLRSHEMNGFTLATIHNEHFFVTLLDEIRASIDGGYFDEYRGETLARFYANGSRG

SEQ ID NO: 52562 - protein, 438 aa, Bifidobacterium dentium
  misc_feature (1)..(438): tr|D2Q702|D2Q702_BIFDB Queuine tRNA-ribosyltransferase OS=Bifidobacterium dentium (strain ATCC 27534 / DSM 204 36 / JCM 1195 / Bd1) OX=401473 GN=tgt PE=3 SV=1
MTSLTESNLVEHPRGAEPGKPGDRRAFSFEQITRLPDTADGKGRGGARYGRTGIIHTPHGDIHTPAFVPVATQAAMKAVLPETMKDLGAQCLLSNAFHLYERPGEQVLDEAGGLAKFMNWNGPTFTDSGGFQVLSLGAGFKKTLAMDVTGMKSDEVIAEGKERLAFVDEDGVTFKSPLNGSLHRFSAEISMGIQHKIGADIMFAFDELTTLMNTRGYQERSVERTYRWAQRCVAEHQRLTEERLGKPYQALYGVVQGANYEDLRRHAAEQIASLDFDGVGIGGAIEKRIIGDTCAWICDAMPESRPRHVLGIAAVDDIFACVENGGDTFDCVAPARCGRNGAIFTRSGRYNIKRAQFKHDFGPLEEGCTCYTCTHYSRAYVDHALRAREFNGFTLATIHNEHFFVKLLDDIRASIDGGYFDEFRDETLARFYANGSRG

SEQ ID NO: 52563 - protein, 438 aa, Bifidobacterium dentium
  misc_feature (1)..(438): tr|A0A1V8Q7U5|A0A1V8Q7U5_9BIFI Queuine tRNA-ribosyltran sferase OS=Bifidobacterium dentium OX=1689 GN=tgt PE=3 SV=1
MTSLTESNLVEHPRGAEPGKPGDRRAFSFEQITRLPDAADGKGRGGARYGRTGIIHTPHGDIHTPAFVPVATQAAMKAVLPETMKDLGAQCLLSNAFHLYERPGEQVLDEAGGLAKFMNWNGPTFTDSGGFQVLSLGAGFKKTLAMDVTGMKSDEVIAEGKERLAFVDEDGVTFKSPLNGSLHRFSAEISMGIQHKIGADIMFAFDELTTLMNTRGYQERSVERTYRWAQRCVAEHQRLTEERLGKPYQALYGVVQGANYEDLRRHAAEQIASLDFDGVGIGGAIEKRIIGDTCAWICDAMPESRPRHVLGIAAVDDIFACVENGGDTFDCVAPARCGRNGAIFTRSGRYNIKRAQFKHDFGPLEEGCTCYTCTHYSRAYVDHALRAREFNGFTLATIHNEHFFVKLLDDIRASIDGGYFDEFRDETLARFYANGSRG

SEQ ID NO: 52564 - protein, 429 aa, Bifidobacterium eulemuris
  misc_feature (1)..(429): tr|A0A261GFX4|A0A261GFX4_9BIFI Queuine tRNA-ribosyltran sferase OS=Bifidobacterium eulemuris OX=1765219 GN=tgt PE=3 SV=1
MTDFLNHPIGAAAGQPGDRAAFSFETITRLPDAPEGKGRGGARYGRTGIIHTPHGDIRTPAFVPVATQAAMKAVLPETMRQLGAQCLLSNAFHLFERPGEDVLDAAGGLGRFMNWSGPTFTDSGGFQVLSLGSGFKKTLAMDVTGMKSDDVIAAGKERLAFVDEDGVTFKSPLNGDRHRFSAEISMGIQHKIGADIMFAFDELTTLMNTRGYQEESVERTYRWAKRCVAEHERLTAERLGKPYQALYGVVQGANYEDLRRRAAGQIASLDFDGVGIGGALEKRIIGDICAWICDSMPENRPRHVLGIASVDDIFACVENGGDTFDCVAPARCGRNGAIFTRHGRYNVKRAEFKTDFGPLEDGCECYTCRNYSKAYVDHLLRAREFNGFTLATIHNEYFFIKLLDDIRASIDGGYFEEFRDESLAHFYGE

SEQ ID NO: 52565 - protein, 436 aa, Bifidobacterium felsineum
  misc_feature (1)..(436): tr|A0A2M9HLD5|A0A2M9HLD5_9BIFI Queuine tRNA-ribosyltran sferase OS=Bifidobacterium felsineum OX=2045440 GN=tgt PE=3 SV=1
MTSLLEYPRGAQPGQPGDRSAFSFETITRLSSTANGLGRDGARYGRTGIIHTPHGDIKTPAFVPVGTQAAMKAVLPEQMKDLGAQCLLANAFHLFERPGEDVLDAAGGLARFMNWDGPTFTDSGGFQVMSLGVGFKKTLAMDVTGMKSDDIIAKGKERMAWVDEDGVTFKSPLNGDSHRFSAEISMGIQHKLGADIMFAFDELTTLMNTRSYQEDSVERTFRWAKRCVAEHERLTAERLGKPYQALYGVVQGANYEDLRRHAAEQIASLDFDGVGIGGAIEKRIIGDTCAWICDAMPENRPRHVLGIASVDDIFACVENGGDTFDCVAPARCARNGAIFTRNGRYNIKRAQHKFDFGPLEEGCTCYTCQHYSRAYVDHLLRAREFNGFTLATIHNEHFFVKLLDDIRASIDGGYFEEFRDEALAHFYGNGERKPGL

SEQ ID NO: 52566 - protein, 433 aa, Bifidobacterium gallicum
  misc_feature (1)..(433): tr|D1NW53|D1NW53_9BIFI Queuine tRNA-ribosyltransferase OS=Bifidobacterium gallicum DSM 20093 = LMG 11596 OX=56 1180 GN=tgt PE=3 SV=1
MTNLIEHPRGAEPGKPGERSAFRFEQRTRLSDSADGLGRGGARYGRTGVIHTPHGDIQTPAFVPVATQAAMKGVLPEMMRATGAQCLLSNAFHLYERPGQDVLDEAGGLSKFMNWDGPTFTDSGGFQVLSLGAGFKKTLAMDVTGMKSDDVIAEGKERLAFVDEDGVTFKSPLNGSKHRFSAEISMGIQHQIGADIMFAFDELTTLMNTRGYQEKSIERTFRWAKRCVAEHEKLTQERLGKPYQALYGVVQGANYEDLRRRAASQIASLDFDGVGIGGAIEKRIIGNTCAWICDEMPESRPRHVLGIAAVDDIFACVENGGDTFDCVAPARCGRNGAIYTRRGRYNVKRAEFKHDFTPLEEGCDCYTCQHYTKAYVDHLLRARELNGFTLATIHNERFFIRLLDDIRASIDGGYFEEFRDETLAKYYENGSRG

SEQ ID NO: 52567 - protein, 433 aa, Bifidobacterium gallinarum
  misc_feature (1)..(433): tr|A0A4P6DUD2|A0A4P6DUD2_9BIFI Queuine tRNA-ribosyltran sferase OS=Bifidobacterium gallinarum OX=78344 GN=tgt P E=3 SV=1
MISLLEHPRGAEPGKPGDRGAFSFETITRLPGSPDGKGRGGARYGRTGIIHTPHGDIRTPAFVPVATQAAMKAVLPETMKDLGAQCLLSNAFHLYERPGEDVLDAAGGLGRFMNWDGPTFTDSGGFQVLSLGAGFKKTLAMDVTGMKSDDVIAEGKERLAFVDEDGVTFKSPLNGSLHRFSAEISMGIQHKIGADIMFAFDELTTLMNTRGYQERSVERTFRWAQRCVSEHQRLTETRLGKPYQALYGVVQGANYEDLRRRAASQIASLDFDGVGIGGAMEKRIIGDICAWICDEMPENRPRHVLGIAAVDDIFACVENGGDTFDCVAPARCGRNGAIFTRDGRYNVKRAEFKTDFGPLEEGCDCYTCQHYSRAYVDHLLRAREFNGFTLATIHNERFFVKLLDDIRASIDGGYFDEFRDATLARFYANGSRG

SEQ ID NO: 52568 - protein, 433 aa, Bifidobacterium gallinarum
  misc_feature (1)..(433): tr|A0A087AM64|A0A087AM64_9BIFI Queuine tRNA-ribosyltran sferase OS=Bifidobacterium gallinarum OX=78344 GN=tgt P E=3 SV=1
MTSLLDHPRGAEPGKPGDRGAFSFETITRLPDSPDGKGRGGARYGRTGIIHTPHGDIRTPAFVPVATQAAMKAVLPETMKDLGAQCLLSNAFHLYERPGEDVLDAAGGLGRFMNWDGPTFTDSGGFQVLSLGAGFKKTLAMDVTGMKSDDVIAEGKERLAFVDEDGVTFKSPLNGSLHRFSAEISMGIQHKIGADIMFAFDELTTLMNTRGYQERSVERTFRWAQRCVAEHQRLTESRLGKPYQALYGVVQGANYEDLRRRAASQIASLDFDGVGIGGAMEKRIIGDICAWICDEMPENRPRHVLGIAAVDDIFACVENGGDTFDCVAPARCGRNGAIFTRDGRYNVKRAEFKTDFGPLEEGCDCYTCQHYSRAYVDHLLRAREFNGFTLATIHNERFFVKLLDDIRASIDGGYFDEFRDATLTRFYANGSRG

SEQ ID NO: 52569 - protein, 433 aa, Bifidobacterium hapali
  misc_feature (1)..(433): tr|A0A261G0H5|A0A261G0H5_9BIFI Queuine tRNA-ribosyltran sferase OS=Bifidobacterium hapali OX=1630172 GN=tgt PE= 3 SV=1
MTNLVDHPRGAAPGQPGDRNAFSFETITRLPDAPDGKGRGGARYGRTGILHTPHGDIHTPAFVPVATQAAMKAVLPETMRSEGAQCLLSNAFHLYERPGEDVLDAAGGLAKFMNWDGPTFTDSGGFQVLSLGAGFKKTLAMDVTGMKSDDVIANGKERLAFVDEDGVTFKSPLNGARHRFSAEISMGIQHKIGADIMFAFDELTTLMNTRSYQEQSVERTYRWAQRCVAEHQRLTQVRLGKPYQALYGVVQGANYEDLRRHAAEQIASLDFDGVGIGGAIEKRIIGDTCAWICDAMPESRPRHVLGIAAVDDIFACVENGGDTFDCVAPARCGRNGAIFTRDGRYNVKRAEFKFDFGPLEKGCDCYTCTHYSRAYVDHLLRAREFNGFTLATIHNEHFFIKLLDDIRASIDGGYFNEFRDETLARFYAHGSRG

SEQ ID NO: 52570 - protein, 436 aa, Bifidobacterium imperatoris
  misc_feature (1)..(436): tr|A0A2N5IPQ6|A0A2N5IPQ6_9BIFI Queuine tRNA-ribosyltran sferase OS=Bifidobacterium imperatoris OX=2020965 GN=tg t PE=3 SV=1
MTSLLEHPRGAQPGQPGDRSAFSFETITRLSSTANGLGRDGARYGRTGIIHTPHGDIKTPAFVPVGTQAAMKAVLPEQMKDLGAQCLLANAFHLFERPGEDVLDAAGGLARFMNWDGPTFTDSGGFQVMSLGVGFKKTLAMDVTGMKSDDIIAKGKERMAWVDEDGVTFKSPLNGDSHRFSAEISMGIQHKLGADIMFAFDELTTLMNTRSYQEDSVERTFRWAKRCVAEHERLTAERLGKPYQALYGVVQGANYEDLRRHAAEQIASLDFDGVGIGGAIEKRIIGDTCAWICDAMPESRPRHVLGIASVDDIFACVENGGDTFDCVAPARCARNGAIFTRNGRYNIKRAQHKFDFGPLEEGCTCYTCQHYSRAYVDHLLRAREFNGFTLATIHNEHFFVKLLDDIRASIDGGYFEEFRDEALAHFYGNGERKPGL

SEQ ID NO: 52571 - protein, 432 aa, Bifidobacterium indicum
  misc_feature (1)..(432): tr|A0A087VSM3|A0A087VSM3_9BIFI Queuine tRNA-ribosyltran sferase OS=Bifidobacterium indicum LMG 11587 = DSM 2021 4 OX=1341694 GN=tgt PE=3 SV=1
MTFLMNPLGAEPGRPGDRSAFSFEAITQLPSAADGLGREGRRYGRTGIIHTPHGDIHTPAFIPVATQAAMKAVLPEQMREMGAQVLLSNAFHLFERPGEDILDQAGGLARFMNWDGPTYTDSGGFQVLSLGAGFKKTLAMDVTGMQSDEVIAEGKERLAFVDEDGVTFKSPLNGDQHRFSAEISMGIQHKIGADVMFAFDELTTLMNTRSYQEKSVERTFRWAKRCVAEHERLTAERTGKPYQALFGVVQGANYEDLRRKAAGHIASLDFDGVGIGGAIEKRLLGQTCAWICDEMPESRPRHVLGIAAVDDIFAGVENGGDTFDCVAPARCGRNGAVFTRDGRWNIKRAQFKNDFRPIEEDCDCYACTNYSRAYINHLLRAREFNGFTLATIHNERFFVRLLDEIRASIDGGYFDDYKKETLARFYANGSRG

SEQ ID NO: 52572 - protein, 432 aa, Bifidobacterium indicum
  misc_feature (1)..(432): tr|A0A318LZ49|A0A318LZ49_9BIFI Queuine tRNA-ribosyltran sferase OS=Bifidobacterium indicum OX=1691 GN=tgt PE=3 SV=1
MTFLMNPLGAEPGRPGDRSAFSFEAITQLPSAADGLGREGRRYGRTGIIHTPHGDIHTPAFIPVATQAAMKAVLPEQMREMGAQVLLSNAFHLFERPGEDILDQAGGLARFMNWDGPTYTDSGGFQVLSLGAGFKKTLAMDVTGMQSDEVIAEGKERLAFVDEDGVTFKSPLNGDQHRFSAEISMGIQHKIGADVMFAFDELTTLMNTRSYQEKSVERTFRWAKRCVAEHERLTAERTGKPYQALFGVVQGANYEELRRKAAGHIASLDFDGVGIGGAIEKRLLGQTCAWICDEMPESRPRHVLGIAAVDDIFAGVENGGDTFDCVAPARCGRNGAVFTRDGRWNIKRAQFKNDFRPIEEDCDCYACTNYSRAYINHLLRAREFNGFTLATIHNERFFVRLLDEIRASIDGGYFDDYKKETLARFYANGSRG

SEQ ID NO: 52573 - protein, 449 aa, Bifidobacterium italicum
  misc_feature (1)..(449): tr|A0A2A2EL51|A0A2A2EL51_9BIFI Queuine tRNA-ribosyltran sferase OS=Bifidobacterium italicum OX=1960968 GN=tgt P E=3 SV=1
MTSTSIPADSTITSAPAPQLVEHPRGAEPGEPGDRSAFHFEQITRLPDAADGKGKGGARYGRTGILHTPHGDIRTPAFVPVATQGAMKAVLPESMVELGAQCLLSNAFHLYERPGEDVLDEAGGLAKFMNWNGPTFTDSGGFQVLSLGAGFKKTLAMDVKGMKSDDVIAEGKERMAFVDEDGVTFKSPLNGSLHRFSAEISMNIQHKIGADIMFAFDELTTLMNTRRYQENSVERTYRWAQRCVAEHERLTTERVGKPYQALYGVVQGANYEDLRRHAAQQIASLDFDGVGIGGAMEKRIIGDICAWICDEMPQSRPRHVLGIAAVDDIFACVENGGDTFDCVAPARCGRNGAIFTRDGRYNIKRAQFKHDFGPLEEGCSCYTCTHYSRAYVDHLLRSHEMNGFTLATIHNEYFFVHLLDDIRASIDGGYFDEFRDETLARFYANGSRG

SEQ ID NO: 52574 - protein, 437 aa, Bifidobacterium kashiwanohense
  misc_feature (1)..(437): tr|A0A0A7I0A9|A0A0A7I0A9_9BIFI Queuine tRNA-ribosyltran sferase OS=Bifidobacterium kashiwanohense PV20-2 OX=144 7716 GN=tgt PE=3 SV=1
MATPVENLIEHPRGAEPDKPGRRDAFYFEQKTRLPDAADGKGRGGARYGRTGIIHTPHGDIHTPAFVPVATQAAMKAVLPETMKDLGAQCLLSNAFHLYERPGEQVLDEAGGLAKFMNWNGPTFTDSGGFQVLSLGAGFKKTLAMDVTGMKSDDVIAEGKERLAFVDEDGVTFKSPLNGSLHRFSAEISMGIQHKIGADIMFAFDELTTLMNTRGYQERSVERTYRWAQRCVAEHKRLTEERVGKPYQALYGVVQGANYEDLRRHAAEQIASLDFDGVGIGGAIEKRIIGDTCAWICDAMPESRPRHVLGIAAVDDIFACVENGGDTFDCVAPARCGRNGAIFTRHGRYNIKRAQFKHDFGPLEEDCGCYTCTHYSRAYVDHALRAREFNGFTLATIHNEHFFVKLLDDIRASIDGGYFNEFRDETLAKFYENGSKG

SEQ ID NO: 52575 - protein, 429 aa, Bifidobacterium lemurum
  misc_feature (1)..(429): tr|A0A261FQK5|A0A261FQK5_9BIFI Queuine tRNA-ribosyltran sferase OS=Bifidobacterium lemurum OX=1603886 GN=tgt PE =3 SV=1
MTDFLNQPIGAAPGQPGDRTAFSFETITRLPGSPDGKGRGGTRYGRTGIIHTPHGDIRTPAFVPVATQAAMKAVLPETMRQLGAQCLLSNAFHLFERPGEDVLDAAGGLGRFMNWSGPTFTDSGGFQVLSLGSGFKKTLAMDVTGMKSDDVIAEGKERLAFVDEDGVTFKSPLNGDRHRFSAEISMGIQHKIGADIMFAFDELTTLMNTRGYQEQSVERTYRWAQRCVAEHERLTAERLGKPYQALYGVVQGANYEDLRRHAAEQIASLDFDGVGIGGALEKRIIGDICAWICDAMPENRPRHVLGIASVDDIFACVENGGDTFDCVAPARCGRNGAIFTRHGRYNVKRAEFKTDFGPLEDGCECYTCRNYSKAYVDHLLRAREFNGFTLATIHNEYFFIKLLDDIRASIDGGYFEEFRDESLAHFYGA

SEQ ID NO: 52576 - protein, 437 aa, Bifidobacterium longum
  misc_feature (1)..(437): tr|B7GSQ2|B7GSQ2_BIFLS Queuine tRNA-ribosyltransferase OS=Bifidobacterium longum subsp. infantis (strain ATCC 15697 / DSM 20088 / JCM 1222 / NCTC 11817 / S12) OX=391 904 GN=tgt PE=3 SV=1
MTISLLEHPLGAQPGQPGDRSAFHFETITRLPSTASGLGRDGARYGRTGIIHTPHGDIRTPAFVPVSTQAAMKAVLPEQMKELGAQCLLANAFHLFERPGEAVLDAAGGLANFMNWDGPTFTDSGGFQVMSLGVGFKKTLAMDVTGMKSDDIIAKGKERMAWVDEDGVTFKSPLNGDAHRFSAEISMGIQHKIGADIMFAFDELTTLMNTRSYQEDSVERTFRWARRCVDEHQRLTAERLGRPYQALYGVVQGANYEDLRRRAAAQIASLDFDGVGIGGAIEKRLIGDTCAWICDAMPENRPRHVLGIASVDDIFACVENGGDTFDCVAPARCARNGAIYTRSGRYNIKRAQHKFDFGPLEEGCDCYTCRHYSRAYVDHLLRAREFNGFTLATIHNEHFFVKLLDDIRAAIDGGYFDEFRDDAMAHFYGNGERKPGL

SEQ ID NO: 52577 - protein, 437 aa, Bifidobacterium longum
  misc_feature (1)..(437): tr|T2HYZ3|T2HYZ3_BIFLN Queuine tRNA-ribosyltransferase OS=Bifidobacterium longum subsp. longum CECT 7347 OX=12 05679 GN=tgt PE=3 SV=1
MTISLLEHPLGAQPGQPGDRSAFHFETITRLPSTASGLGRDGARYGRTGIIHTPHGDIRTPAFVPVGTQAAMKAVLPEQMKDLGAQCLLANAFHLFERPGEDVLDAAGGLARFMNWDGPTFTDSGGFQVMSLGVGFKKTLAMDVTGMKSDDIIAKGKERMAWVDEDGVTFKSPLNGDAHRFSAEISMGIQHKIGADIMFAFDELTTLMNTRSYQEDSVERTFRWARRCVDEHQRLTADRVGKPYQALYGVVQGANYEDLRRRAASQIASLDFDGVGIGGAIEKRIIGDTCAWICDAMPENRPRHVLGIASVDDIFACVENGGDTFDCVAPARCARNGAIYTRAGRYNIKRAQHKFDFGPLEEGCDCYTCQHYSRAYVDHLLRAREFNGFTLATIHNEHFFVKLLDDIRASIDGGYFDEFRDEALAHFYGNGERRPGL

SEQ ID NO: 52578 - protein, 433 aa, Bifidobacterium magnum
  misc_feature (1)..(433): tr|A0A087BAQ3|A0A087BAQ3_9BIFI Queuine tRNA-ribosyltran sferase OS=Bifidobacterium magnum OX=1692 GN=tgt PE=3 S V=1
MTSLLEHPRGAEPGKPGDRSAFYFEQHTRLSDSPNGLGKNGARYGRTGVIHTPHGDIQTPAFVPVATQAAMKAVLPESMKQLGAQCLLSNAFHLFERPGEDVLDAAGGLAKFMNWDGPTFTDSGGFQVLSLGAGFKKTLAMDVTGLKSDDVIADGKERRAFVDEDGVTFKSPLNGSLHRFSAEISMGIQHKIGADIMFSFDELTTLMNTRQYQEESIERTFRWAKRCVAEHKRLTEERLGKPYQALYGVVQGANYEDLRRRAAAQIASLDFDGVGIGGAIEKRIIGETCAWICDAMPENRPRHVLGIAAVDDIFACVENGGDTFDCVAPARCGRNGAIYTRHGRYNVKRAENKFAFTPLEEGCDCYTCTHYTRAYVDHCLRAREFDGFTLATIHNERFFVKLLDDIRASIDGGYFEEFRDETMAHYYENGSRG

SEQ ID NO: 52579 - protein, 469 aa, Bifidobacterium margollesii
  misc_feature (1)..(469): tr|A0A2N5J8Q7|A0A2N5J8Q7_9BIFI Queuine tRNA-ribosyltran sferase OS=Bifidobacterium margollesii OX=2020964 GN=tg t PE=3 SV=1
MTDATNTTDTTSLVPATSPSLAPSLVSASVAAGSPEAAALVDHPRGAQNGLPGDRSAFGFEVVRRLDPTADGLGRDGFRHGRAGILHTPHGDIQTPAFVPVATQATMKAMLPEQLVDLGAQCTLANAFHLFERPGEDILDEAGGLAKFMNWNGPTFTDSGGFQVLSLGAGFKKTLAMDVTGLKSDDVIAEGKERRAFVDEDGVTFKSPLNGDVHRFSAEISMGIQHKLGADIMFAFDELTTLMNTRSYQEQSVERTYRWAKRCVAEHQRLTAARTGKPYQALFGVVQGANYEDLRRHAARQIASLDFDGVGIGGAIEKRLLGNTCAWICDEMPELRPRHVLGIAAVDDIFAGVENGGDTFDCVAPARTARNGAIYTRDGRWNVLRAALKRDFRPLEEGCDCYTCQHYSRAYLHHLLKAREMSGCTLATIHNERFFVKLIDDIRESIVGGYFDEFKRETLARFYANGSRG

SEQ ID NO: 52580 - protein, 425 aa, Bifidobacterium merycicum
  misc_feature (1)..(425): tr|A0A087BD65|A0A087BD65_9BIFI Queuine tRNA-ribosyltran sferase OS=Bifidobacterium merycicum OX=78345 GN=tgt PE =3 SV=1
MGAEPGKPGDRSAFSFETITRLPNAADGKGRDGARYGRTGIIHTPHGDIRTPAFVPVGTQASMKAVLPEQMRDLGAQCLLANAFHLFERPGEDVLDAAGGLAKFMNWDGPTFTDSGGFQVMSLGVGFKKTLAMDISGMKSDDVIAKGKERMAWVDEEGVTFKSPLNGDQHRFSAEISMGIQHKLGADIMFAFDELTTLMNTRGYQEQSVERTYRWAQRCVAEHKRLTEERLGKPYQALYGVVQGANYEDLRRHAAAQIASLDFDGVGIGGAIEKRIIGDTCAWICDEMPENRPRHVLGIAAVDDIFACVENGGDTFDCVAPARCGRNGAIFTRHGRYNIKRAQFKFDFGPLEEGCDCYTCTHYTRAHVTHLLRAREFNGFTLATIHNERFFVKLLDDIRASIDGGYFEEFRDETLAKFYENGSKG

SEQ ID NO: 52581 - protein, 366 aa, Bifidobacterium minimum
  misc_feature (1)..(366): tr|A0A087BSM9|A0A087BSM9_9BIFI Queuine tRNA-ribosyltran sferase OS=Bifidobacterium minimum OX=1693 GN=BMIN_1294 PE=3 SV=1
MKAVLPETMKELGAQCLLSNAFHLFERPGEGVIDAAGGLGRFMNWDGPTFTDSGGFQVLSLGAGFKKTLAMDVTGMKSDDVIAEGKERLAFVDEDGVTFKSPLNGSTHRFSAEISMGIQHRIGADIMFAFDELTTLMNTRGYQERSVERTFRWARRCVAEHRRLTEERSDKPYQALYGVVQGANYEDLRRHAAEQIASLDFDGVGIGGAIEKRLIGDTCAWIGDAMPESRPRHVLGIASVDDIFECVENGGDTFDCVAPARCARNGAIFTRDGRYNVKRSRFRTDFGPLEEGCDCHACTHYSRAYVAHLLHAREINGFTLATIHNERFFVRLLDDIRASIDAGRFEEFRDETLSRFYAHAGRAFVD

SEQ ID NO: 52582 - protein, 419 aa, Bifidobacterium mongoliense
  misc_feature (1)..(419): tr|A0A423UDN9|A0A423UDN9_9BIFI Queuine tRNA-ribosyltran sferase OS=Bifidobacterium mongoliense OX=518643 GN=tgt PE=3 SV=1
MPGDRRAFSFETKTQLPPSAQGKGRDGTRYGRSGIIHTPHGDIRTPAFVPVATQAAIKGVLPEQMKELGAQCLLSNAFHLFERPGEAVIDEAGGLGRFMNWDGPTFTDSGGFQVLSLGAGFKKTLAMDVKGMKSDDVIAKGKERMAFVDEDGVTFKSPLNGSKHRFSAEISMGIQHKIGADIMFAFDELTTLMNTRAYQERSVERTFRWAQRCVAEHERLTAARVGKPYQALYGVVQGANYEDLRRHAAEQIASLDFDGVGIGGAIEKRVIGDTCAWIADAMPLSRPRHVLGIASVDDIFACVENGGDTFDCVAPARVGRNGAIYTHDGRYNIKRAGFKHDFGPLEEGCDCYTCTHYTRAYVDHLLRARELNGFTLATIHNEHFFITLLDDIRASIDGGYFDEFRDQTLAHFYANGSRG

SEQ ID NO: 52583 - protein, 419 aa, Bifidobacterium mongoliense
  misc_feature (1)..(419): tr|A0A087C228|A0A087C228_9BIFI Queuine tRNA-ribosyltran sferase OS=Bifidobacterium mongoliense DSM 21395 OX=143 7603 GN=tgt PE=3 SV=1
MPGDRRAFSFETTTQLPPSAQGKGRDGTRYGRSGIIHTPHGDIRTPAFVPVATQAAIKGVLPEQMKELGAQCLLSNAFHLFERPGEAVIDEAGGLGRFMNWDGPTFTDSGGFQVLSLGAGFKKTLAMDVKGMKSDDVIAKGKERMAFVDEDGVTFKSPLNGSKHRFSAEISMGIQHKIGADIMFAFDELTTLMNTRAYQERSVERTFRWAQRCVAEHERLTAARVGKPYQALYGVVQGANYEDLRRHAAEQIASLDFDGVGIGGAIEKRVIGDTCAWIADAMPLSRPRHVLGIASVDDIFACVENGGDTFDCVAPARVGRNGAIYTHDGRYNIKRAGFKHDFGPLEEGCDCYTCTHYTRAYVDHLLRARELNGFTLATIHNEHFFITLLDDIRASIDGGYFDEFRDQTLAHFYANGSRG

SEQ ID NO: 52584 - protein, 455 aa, Bifidobacterium moukalabense
  misc_feature (1)..(455): tr|W4N759|W4N759_9BIFI Queuine tRNA-ribosyltransferase OS=Bifidobacterium moukalabense DSM 27321 OX=1435051 GN =tgt PE=3 SV=1
MKFLHPAQSALSPKVKRMTSLTEPNLVEHPRGAEPGKPGDRRAFSFEQTTRLPDAADGKGRGGARYGRTGIIHTPHGDIHTPAFVPVATQAAMKAVLPETMKDLGAQCLLSNAFHLYERPGEQVLDEAGGLAKFMNWNGPTFTDSGGFQVLSLGAGFKKTLAMDVTGMKSDEVIAEGKERLAFVDEDGVTFKSPLNGSLHRFSAEISMGIQHKIGADIMFAFDELTTLMNTRGYQERSVERTYRWAQRCVAEHQRLTEERLGKPYQALYGVVQGANYEDLRRHAAEQIASLDFDGVGIGGAIEKRIIGDTCAWICDAMPESRPRHVLGIAAVDDIFACVENGGDTFDCVAPARCGRNGAIFTRSGRYNIKRAQFKHDFGPLEEGCTCYTCTHYSRAYVDHALRAREFNGFTLATIHNEHFFVKLLDDIRSSIDGGYFDEFRDETLAKFYANGSKG

SEQ ID NO: 52585 - protein, 440 aa, Bifidobacterium myosotis
  misc_feature (1)..(440): tr|A0A261FJB4|A0A261FJB4_9BIFI Queuine tRNA-ribosyltran sferase OS=Bifidobacterium myosotis OX=1630166 GN=tgt P E=3 SV=1
MTTSQTSLLEHPLGAEPGKPGDRGAFHFETITRLPSTANGLGHDGARYGRTGIIHTPHGDIRTPAFVPVGTQAAMKAVLPESMKALGAQCLLANAFHLFERPGEDVLDAAGGLARFMHWDGPTFTDSGGFQVMSLGVGFKKTLAMDVTGMKSDDIIAKGKERMAWVDEDGVTFKSPLNGDSHRFSAEISMGIQHKLGADIMFAFDELTTLMNTRSYQEDSVERTFRWAKRCVAEHERLTAERVGKPYQALYGVVQGANYEDLRRKAAAQIASLDFDGVGIGGAIEKRIIGDTCAWICDAMPESRPRHVLGIASVDDIFACVENGGDTFDCVAPARCARNGAIFTRNGRYNIKRAENKFNFGPLEEGCDCYTCSNYSRAYVDHLLRAREFNGFTLATIHNEHFFVKLLDDIRASIDGGYFDEFRDETLAHFYGNGTRKPGL

SEQ ID NO: 52586 - protein, 462 aa, Bifidobacterium parmae
  misc_feature (1)..(462): tr|A0A2N5J4V3|A0A2N5J4V3_9BIFI Queuine tRNA-ribosyltran sferase OS=Bifidobacterium parmae OX=361854 GN=tgt PE=3 SV=1
MTDNPTNTTVDAVPGGASTNAGTVATTGTPAPAAIDLNEHPRGAAPGKPGDRAAFSFETITRLPDAADGKGKGGARYGRTGIIHTPHGDIRTPAFVPVGTQAAMKAVLPESMRDLGAQCLLANAFHLFERPGEDVLDAAGGLAKFMNWHGPTFTDSGGFQVMSLGVGFKKTLAMDVTGMKSDDIIAEGKERLAWVDEDGVTFKSPLNGDEHRFSAEISMGIQHKIGADIMFAFDELTTLMNTRSYQEESVERTYRWAQRCVAEHQRLTEARLGKPYQALYGVVQGANYEDLRRHAAEQIASLDFDGVGIGGAIEKRIIGETCAWICDAMPENRPRHVLGIASVDDIFACVENGGDTFDCVAPARCARNGAIFTRHGRYNIKRAQHKFDFGPLEEGCDCYTCAHYSRAYVDHLLRAHEFTGFTLATIHNERFFVKLLDDIRASIDGGYFEEFRDESLAHFYGK

SEQ ID NO: 52587 - protein, 443 aa, Bifidobacterium primatium
  misc_feature (1)..(443): tr|A0A2M9HBJ1|A0A2M9HBJ1_9BIFI Queuine tRNA-ribosyltran sferase OS=Bifidobacterium primatium OX=2045438 GN=tgt PE=3 SV=1
MTDVTDPTNTTIDLVEHPRGAAEGRPGDRSAFGFEITRRLDPTADGLGRGGFRHGRSGIIHTPHGDIKTPAFVPVATQATMKAMLPEQLVDLGAQCTLANAFHLFERPGEDIIDAAGGLGKFMNWHGPTFTDSGGFQVMSLGVGFKKTLAMDVTGLKSDDIIAKGKERLAFVDEDGVTFKSPLNGDIHRFSAEISMGIQHKIGADIMFSFDELTTLMNTRSYQEQSVERTFRWAKRCVAEHQRLTAERLGKPYQALFGVVQGANYEDLRRHAAQQIASLDFDGVGIGGAIEKNILGNICAWICDEMPELRPRHVLGIAAVDDIFAGVENGGDTFDCVAPARTARNGAIYTRDGRWNVLRTALKRDFRPLEEGCDCYTCTHYSRAYLHHLLKAREMSGCTLATIHNERFFVKLLDDIRASIDGGYFDEFKRETLARFYANGSRG

SEQ ID NO: 52588 - protein, 434 aa, Bifidobacterium pseudocatenulatum
  misc_feature (1)..(434): tr|A0A395ZNM4|A0A395ZNM4_9BIFI Queuine tRNA-ribosyltran sferase OS=Bifidobacterium pseudocatenulatum OX=28026 G N=tgt PE=3 SV=1
MPENLIEHPRGAEPGKPGRRDAFYFEQKTRLPDAADGKGRGGARYGRTGTIHTPHGDIHTPAFVPVATQAAMKAVLPETMKDLGAQCLLSNAFHLYERPGEQVLDEAGGLAKFMNWNGPTFTDSGGFQVLSLGAGFKKTLAMDVTGMKSDDVIAEGKERLAFVDEDGVTFKSPLNGSLHRFSAEISMGIQHKIGADIMFAFDELTTLMNTRGYQERSVERTYRWAQRCVAEHKRLTEERVGKPYQALYGVVQGANYEDLRRHAAEQIASLDFDGVGIGGAIEKRIIGDTCAWICDAMPESRPRHVLGIAAVDDIFACVENGGDTFDCVAPARCGRNGAIFTRGGRYNIKRAQFKHDFGPLEEGCDCYTCTHYSRAYVDHALRAREFNGFTLATIHNEHFFVKLLDDIRASIDGGYFDEFRDETLARFYANGSRG

SEQ ID NO: 52589 - protein, 455 aa, Bifidobacterium pseudocatenulatum
  misc_feature (1)..(455): tr|A0A173WE78|A0A173WE78_9BIFI Queuine tRNA-ribosyltran sferase OS=Bifidobacterium pseudocatenulatum OX=28026 G N=tgt PE=3 SV=1
MTSLTESSTDTAQDTQNAATAVSENLIEHPRGAEPGKPGRRDAFYFEQKNRLPDAADGKGRGGARYGRTGIIHTPHGDIHTPAFVPVATQAAMKAVLPETMKDLGAQCLLSNAFHLYERPGEQVLDEAGGLAKFMNWNGPTFTDSGGFQVLSLGAGFKKTLAMDVTGMKSDDVIAEGKERLAFVDEDGVTFKSPLNGSLHRFSAEISMGIQHKIGADIMFAFDELTTLMNTRGYQERSVERTYRWAQRCVAEHKRLTEERVGKPYQALYGVVQGANYEDLRRHAAEQIASLDFDGVGIGGAIEKRIIGDTCAWICDAMPESRPRHVLGIAAVDDIFACVENGGDTFDCVAPARCGRNGAIFTRGGRYNIKRAQFKHDFGPLEEGCDCYTCTHYSRAYVDHALRAREFNGFTLATIHNEHFFVKLLDDIRASIDGGYFDEFRDETLARFYANGSRG

SEQ ID NO: 52590 - protein, 433 aa, Bifidobacterium pseudolongum
  misc_feature (1)..(433): tr|A0A0A7I5T2|A0A0A7I5T2_9BIFI Queuine tRNA-ribosyltran sferase OS=Bifidobacterium pseudolongum PV8-2 OX=144771 5 GN=tgt PE=3 SV=1
MTSLLAHPRGAEPGQPGDRSAFSFEQHTRLTDSPTGKGRGGARYGRTGVIHTPHGDIRTPAFVPVATQAAMKAVLPESMVQLGAQCLLSNAFHLYERPGEDVLDEAGGLAKFMNWDGPTFTDSGGFQVLSLGAGFKKTLAMDTTDMKSDDVIAKGKERLAFVDEDGVTFKSPLNGSLHRFSAEISMNIQHKIGADIMFAFDELTTLMNTRRYQENSVERTFRWARRCVDEHKRLTESRVGKPYQALYGVVQGANYEDLRRRAAQQIASLDFDGVGIGGAMEKRIIGDICAWICDEMPQERPRHVLGIAAVDDIFACVENGGDTFDCVAPARCARNGAIFTRDGRYNIKRAQFKHDFGPLEEGCTCYTCTHYSRAYVDHLLRAREMNGFTLATIHNEYFFVHLLDDIRASIDGGYFDEFRDATLARFYANGSRG

SEQ ID NO: 52591 - protein, 447 aa, Bifidobacterium pseudolongum
  misc_feature (1)..(447): tr|A0A2N3QXL4|A0A2N3QXL4_9BIFI Queuine tRNA-ribosyltran sferase OS=Bifidobacterium pseudolongum subsp. globosum OX=1690 GN=tgt PE=3 SV=1
MVDSIYTGPSTVVSMTSLLAHPRGAEPGQPGDRSAFSFEQHTRLTDSPTGKGRGGARYGRTGVIHTPHGDIRTPAFVPVATQAAMKAVLPESMVQLGAQCLLSNAFHLYERPGEDVLDEAGGLAKFMNWDGPTFTDSGGFQVLSLGAGFKKTLAMDTTDMKSDDVIAKGKERLAFVDEDGVTFKSPLNGSLHRFSAEISMNIQHKIGADIMFAFDELTTLMNTRRYQENSVERTFRWARRCVDEHKRLTESRVGKPYQALYGVVQGANYEDLRRRAAQQIASLDFDGVGIGGAMEKRIIGDICAWICDEMPQERPRHVLGIAAVDDIFACVENGGDTFDCVAPARCARNGAIFTRDGRYNIKRAQFKHDFGPLEEGCTCYTCTHYSRAYVDHLLRAREMNGFTLATIHNEYFFVHLLDDIRASIDGGYFDEFRDATLARFYANGSRG

SEQ ID NO: 52592 - protein, 432 aa, Bifidobacterium psychraerophilum
  misc_feature (1)..(432): tr|A0A087CHX7|A0A087CHX7_9BIFI Queuine tRNA-ribosyltran sferase OS=Bifidobacterium psychraerophilum OX=218140 G N=tgt PE=3 SV=1
MTLTLNPLGCEEGKPADRSAFSFETTTRLPDSAAGLGRGGKRYGRTGIIHTPHGDIRTPAFVPVATQSAMKAVLPEQMKDLGAQCLLSNAFHLFERPGEDVLDEAGGLAQFMNWDGPTYTDSGGFQVLSLGAGFKKTLAMDVQGMKSDDVIADGKERMAFVDEDGVTFKSPLNGSLHRFSAEISMRIQHKLGADIMFAFDELTTLMNTRSYQEQSVERTFRWAKRCVAEHQQLTQTRLGKPYQALFGVVQGANYEDLRRLAASQIASLDFDGVGIGGAIEKQLLGQTCAWICDEMPESRPRHVLGIAAVNDIFDAVENGGDTFDCVAPARNGRNGAIFTRDGRWNVKRAEFKHDFRPLEEDCDCYTCRNYSRAYVDHLLRAREFNGFTLATIHNEHFFVKLLDDIRAAIDAGYFDEFKRETLARFYAHGSRG

SEQ ID NO: 52593 - protein, 433 aa, Bifidobacterium pullorum
  misc_feature (1)..(433): tr|A0A087CIG8|A0A087CIG8_9BIFI Queuine tRNA-ribosyltran sferase OS=Bifidobacterium pullorum OX=78448 GN=tgt PE= 3 SV=1
MTSLLDHPRGVEPGKPGDRGAFSFETITRLPDSPDGKGRGGARYGRTGIIHTPHGDIRTPAFVPVATQAAMKAVLPETMKDLGAQCLLSNAFHLYERPGEDVLDAAGGLGRFMNWDGPTFTDSGGFQVLSLGAGFKKTLAMDVTGMKSDDVIAEGKERLAFVDEDGVTFKSPLNGSLHRFSAEISMGIQHKIGADIMFAFDELTTLMNTRGYQERSVERTFRWAQRCVAEHQRLTESRLGKPYQALYGVVQGANYEDLRRRAASQIASLDFDGVGIGGAMEKRIIGDICAWICDEMPENRPRHVLGIAAVDDIFACVENGGDTFDCVAPARCGRNGAIFTRDGRYNVKRAEFKTDFGPLEEGCDCYTCQHYSRAYVDHLLRARELNGFTLATIHNERFFVKLLDDIRASIDGGYFNEFRDATLARFYANGSRG

SEQ ID NO: 52594 - protein, 436 aa, Bifidobacterium reuteri
  misc_feature (1)..(436): tr|A0A5J5E9C0|A0A5J5E9C0_9BIFI tRNA guanosine(34) trans glycosylase Tgt OS=Bifidobacterium reuteri OX=983706 GN =EMO92_03800 PE=4 SV=1
MTSLLEHPLGAEPGQPGDRSAFSFETITRLPSTADGLGRDGARYGRTGIIHTPHGNIRTPAFVPVGTQAAMKAVLPEQMKELGAQCLLANAFHLFERPGEDVLDAAGGLARFMHWDGPTFTDSGGFQVMSLGVGFKKTLAMDVTGMKSDDIIAKGKERMAWVDEDGVTFKSPLNGSAHRFSAEISMGIQHKLGADIMFAFDELTTLMNTRSYQEDSVERTFRWAKRCVAEHERLTAERVGKPYQALYGVVQGANYEDLRRKAAAQIASLDFDGVGIGGAIEKRIIGDTCAWICDAMPENRPRHVLGIASVDDIFACVENGGDTFDCVAPARCARNGAIFTRNGRYNIKRAQHKLDFGPLEEGCDCYTCRNYSRAYVDHLLRAREFNGFTLATIHNEHFFVKLLDDIRASIDGGYFNEFRDEALAHFYGNGSRKPGL

SEQ ID NO: 52595 - protein, 463 aa, Bifidobacterium reuteri
  misc_feature (1)..(463): tr|A0A087CXR9|A0A087CXR9_9BIFI Queuine tRNA-ribosyltran sferase OS=Bifidobacterium reuteri DSM 23975 OX=1437610 GN=tgt PE=3 SV=1
MLRTLPALTIGCQNFFSFPALLLKVNTMTSLLEHPLGAEPGQPGDRSAFSFETITRLPSTADGLGRNGARYGRTGIIHTPHGDIRTPAFVPVGTQAAMKAVLPEQMKELGAQCLLANAFHLFERPGEDVLDAAGGLARFMHWDGPTFTDSGGFQVMSLGVGFKKTLAMDVTGMKSDDIIAKGKERMAWVDEDGVTFKSPLNGSAHRFSAEISMGIQHKLGADIMFAFDELTTLMNTRSYQEDSVERTFRWAKRCVAEHERITAERVGKPYQALYGVVQGANYEDLRRKAAAQIASLDFDGVGIGGAIEKRIIGDTCAWICDAMPENRPRHVLGIASVDDIFACVENGGDTFDCVAPARCARNGAIFTRNGRYNIKRAQHKFDFGPLEEGCDCYTCRNYSRAYVDHLLRAREFNGFTLATIHNEHFFVKLLDDIRASIDGGYFNEFRDEALANFYGNGSRKPGL

SEQ ID NO: 52596 - protein, 462 aa, Bifidobacterium ruminantium
  misc_feature (1)..(462): tr|A0A087CQ54|A0A087CQ54_9BIFI Queuine tRNA-ribosyltran sferase OS=Bifidobacterium ruminantium OX=78346 GN=tgt PE=3 SV=1
MTSLNEPQTSAAAHETAAAGKAAANMAAPAENLIEHPRGAEPGKPGRRDAFYFEQKTRLPDAADGKGRGGARYGRTGIIHTPHGDIHTPAFVPVATQAAMKAVLPETMRDLGAQCLLSNAFHLYERPGEQVLDEAGGLAKFMNWNGPTFTDSGGFQVLSLGAGFKKTLAMDVTGMKSDDVIAEGKERLAFVDEDGVTFKSPLNGSLHRFSAEISMGIQHKIGADIMFAFDELTTLMNTRGYQERSVERTYRWAQRCVAEHKRLTEERVGKPYQALYGVVQGANYEDLRRHAAEQIASLDFDGVGIGGAIEKRIIGDTCAWICDAMPESRPRHVLGIAAVDDIFACVENGGDTFDCVAPARCGRNGAIFTRSGRYNIKRAQFKHDFGPLEEGCDCYTCTHYSRAYVDHALRAREFNGFTLATIHNEHFFVKLLDDIRESIDGGYFNEFRDETLAKFYENGSRG

SEQ ID NO: 52597 - protein, 433 aa, Bifidobacterium saeculare
  misc_feature (1)..(433): tr|A0A087CQP3|A0A087CQP3_9BIFI Queuine tRNA-ribosyltran sferase OS=Bifidobacterium saeculare DSM 6531 = LMG 149 34 OX=1437611 GN=tgt PE=3 SV=1
MISLLEHPRGAEPGKPGDRGAFSFETITRLPGSPDGKGRGGARYGRTGIIHTPHGDIRTPAFVPVATQAAMKAVLPETMKDLGAQCLLSNAFHLYERPGEDVLDAAGGLGRFMNWDGPTFTDSGGFQVLSLGAGFKKTLAMDVTGMKSDDVIAEGKERLAFVDEDGVTFKSPLNGSLHRFSAEISMGIQHKIGADIMFAFDELTTLMNTRGYQERSVERTFRWAQRCVAEHRRLTESRLGKPYQALYGVVQGANYEDLRRRAASQIASLDFDGVGIGGAMEKRIIGDICAWICDEMPENRPRHVLGIAAVDDIFACVENGGDTFDCVAPARCGRNGAIFTRDGRYNVKRAEFKTDFGPLEEGCDCYTCQHYSRAYVDHLLRARELNGFTLATIHNERFFVKLLDDIRASIDGGYFDEFRDATLARFYANGSRG

SEQ ID NO: 52598 - protein, 436 aa, Bifidobacterium saguini
  misc_feature (1)..(436): tr|A0A087D815|A0A087D815_9BIFI Queuine tRNA-ribosyltran sferase OS=Bifidobacterium saguini DSM 23967 OX=1437607 GN=tgt PE=3 SV=1
MTSLLEHPRGAQPGQPGDRSAFSFETITRLSSTANGLGRDGARYGRTGIIHTPHGDIKTPAFVPVGTQAAMKAVLPEQMKDLGAQCLLANAFHLFERPGEDVLDAAGGLARFMNWDGPTFTDSGGFQVMSLGVGFKKTLAMDVTGMKSDDIIAKGKERMAWVDEDGVTFKSPLNGDSHRFSAEISMGIQHKLGADIMFAFDELTTLMNTRSYQEDSVERTFRWAKRCVAEHERLTAERLGKPYQALYGVVQGANYEDLRRHAAEQIASLDFDGVGIGGAIEKRIIGDTCAWICDAMPENRPRHVLGIASVDDIFACVENGGDTFDCVAPARCARNGAIFTRNGRYNIKRAQHKFDFGPLEEGCTCYTCQHYSRAYVDHLLRAREFNGFTLATIHNEHFFVKLLDDIRASIDGGYFEEFRDEALAHFYGNGERKPGL

SEQ ID NO: 52599 - protein, 441 aa, Bifidobacterium scaligerum
  misc_feature (1)..(441): tr|A0A2M9HN45|A0A2M9HN45_9BIFI Queuine tRNA-ribosyltran sferase OS=Bifidobacterium scaligerum OX=2052656 GN=tgt PE=3 SV=1
MSERTATGLLDHPRGAEPGKPGDRSAFSFETVTRLSSTADGLGRDGARYGRTGIIHTPHGDIKTPAFVPVGTQAAMKAVLPEQMKDLGAQCLLANAFHLFERPGEDVLDAAGGLARFMNWGGPTFTDSGGFQVMSLGVGFKKTLAMDVTGMKSDDIIAKGKERLAWVDEDGVTFKSPLNGSSHRFSAEISMGIQHKLGADIMFAFDELTTLMNTRSYQENSVERTFRWAKRCVAEHERLTAERLGKPYQALYGVVQGANYEDLRRHAAEQIASLDFDGVGIGGAIEKRIIGNTCAWICDAMPENRPRHVLGIASVDDIFACVENGGDTFDCVAPARCARNGAIYTRSGRYNIKRAENKFNFEPLEEGCDCYTCRNYSRAYVDHLLRAREFNGFTLATIHNEHFFVKLLDDIRASIDGGYFDEFRDETLAHFYGDGERRPGL

SEQ ID NO: 52600 - protein, 433 aa, Bifidobacterium scardovii
  misc_feature (1)..(433): tr|A0A087DDR6|A0A087DDR6_9BIFI Queuine tRNA-ribosyltran sferase OS=Bifidobacterium scardovii OX=158787 GN=tgt P E=3 SV=1
MTSLLDHPRGARPGQPGDRSAFSFETVTRLPNTADGLGRGGARYGRTGIIHTPHGDIRTPAFVPVATQAAMKAVLPETMRDLGAQCLLSNAFHLYERPGEDVLDAAGGLGRFMNWDGPTFTDSGGFQVLSLGAGFKKTLAMDVTGMKSDDVIAEGKERLAFVDEDGVTFKSPLNGSLHRFSAEISMGIQHKIGADIMFAFDELTTLMNTRSYQEQSVERTYRWAQRCVAEHRRLTEERVGKPYQALYGVVQGANYEDLRRHAAEQIASLDFDGVGIGGAIEKRIIGNTCAWICDAMPENRPRHVLGIAAVDDIFACVENGGDTFDCVAPARCGRNGAIFTRDGRYNVKRAEFKADFGPLEEGCDCYTCTHYSRSYVDHALRAREFNGFTLATIHNERFFVKLLDDIRDSIDGGYFDEFRDATLARFYANGSRG

SEQ ID NO: 52601 - protein, 457 aa, Bifidobacterium simiarum
  misc_feature (1)..(457): tr|A0A2M9HGE4|A0A2M9HGE4_9BIFI Queuine tRNA-ribosyltran sferase OS=Bifidobacterium simiarum OX=2045441 GN=tgt P E=3 SV=1
MTDVSNTPTSSTAPAALVSAGSPEAAALVAHPRGAQPDQPGDRSAFGFEVVRRLDPTADGLGRDGVRHGRAGILHTPHGDIQTPAFVPVATQATMKAMLPEQLVDLGAQCTLANAFHLFERPGEDILDEAGGLAKFMNWNGPTFTDSGGFQVMSLGVGFKKTLAMDVTGLKSDDIIAKGKERLAFVDEDGVTFKSPLNGDIHRFSAEISMGIQHKLGADIMFSFDELTTLMNTRSYQEESVERTYRWAKRCVAEHQRLTAERTGKPYQALFGVVQGANYEDLRRHAAQQIASLDFDGVGIGGAIEKRLLGNTCAWICDEMPELRPRHVLGIAAVDDIFAGVENGGDTFDCVAPARTARNGAIYTRDGRWNVLRTALKHDFRPLEEGCDCYTCTHYSRAYLHHLLKSREMSGCTLATIHNERFFVKLLDDIRASIVGGYFDEFRDETLTRFYANGSRG

SEQ ID NO: 52602 - protein, 442 aa, Bifidobacterium sp.
  misc_feature (1)..(442): tr|A0A430F9C3|A0A430F9C3_9BIFI Queuine tRNA-ribosyltran sferase OS=Bifidobacterium sp. 2028B OX=2306973 GN=tgt PE=3 SV=1
MTDVDATQNPIDLVEHPRGAEPGKPGDRSAFSFEITRRLEPTADGLGRDGFRHGRSGVIHTPHGDIRTPAFVPVATQATMKAMLPEQLKELGAQCTLANAFHLFERPGEDILDEAGGLAKFMNWHGPTFTDSGGFQVLSLGAGFKKTLAMDVKGLKSDDVIAEGKERLAFVDEDGVTFKSPLNGDMHRFSAEISMGIQHKIGADIMFAFDELTTLMNTRRYQEESVERTYRWAQRCVAEHKRLTEARLGKPYQALFGVVQGANYEDLRRRAARQIASLDFDGVGIGGAIEKRLLGNTCAWICDEMPELRPRHVLGIAAVDDIFAGVENGGDTFDCVAPARTARNGAIYTRDGRWNVLRTALKHDFGPLEEGCDCYTCTHYSRAYLHHLLKAREMSGCTLATIHNERFFVRLLDEIRESITGGYFDEYKKETLARFYANGSRG

SEQ ID NO: 52603 - protein, 433 aa, Bifidobacterium sp.
  misc_feature (1)..(433): tr|A0A430FQW9|A0A430FQW9_9BIFI Queuine tRNA-ribosyltran sferase OS=Bifidobacterium sp. 2036B OX=2306976 GN=tgt PE=3 SV=1
MTNLLEHPRGAEPGKPGDRSAFYFEQHTRLEDSADGKGRGGARYGRTGVIHTPHGDIQTPAFVPVGTQAAMKAVLPETMKATGAQCMLSNAFHLFERPGPDVVDEAGGLGKFMNWDGPTFTDSGGFQVLSLGAGFKKTLAMDVTGMKSDDVIAKGKERLAFVDEDGVTFKSPLNGAKHRFSAEISMGIQHQLGADIMFSFDELTTLMNTRGYQEQSVERTFRWAKRCVAEHKRLTEERVGKPYQALYGVVQGANYEDLRRHAAEQIASLDFDGVGIGGAIEKRIIGDTCAWICDAMPESRPRHVLGIAAVDDIFACVENGGDTFDCVAPARCGRNGAIYTRHGRYNIKRAQFKHDFTPLEEGCDCYTCTHYTKAYVDHLLRAREFNGFTLATIHNEHFFIRLLDDIRASIDGGYFEEFRDETLAKYYENGSRG

SEQ ID NO: 52604 - protein, 449 aa, Bifidobacterium stellenboschense
  misc_feature (1)..(449): tr|A0A087DJK9|A0A087DJK9_9BIFI Queuine tRNA-ribosyltran sferase OS=Bifidobacterium stellenboschense OX=762211 G N=tgt PE=3 SV=1
MTDNPTNTTADATANTHAPAAADLNEHPRGAAPGKPGDRAAFSFETITRLPDAADGKGKGGARYGRTGIIHTPHGDIHTPAFVPVGTQAAMKAVLPESMRDLGAQCLLANAFHLFERPGEDVLDAAGGLAKFMNWHGPTFTDSGGFQVMSLGVGFKKTLAMDVTGMKSDDIIAEGKERLAWVDEDGVTFKSPLNGDEHRFSAEISMGIQHKIGADIMFAFDELTTLMNTRSYQEESVERTYRWAQRCVAEHQRLTEARLGKPYQALYGVVQGANYEDLRRHAAEQIASLDFDGVGIGGAIEKRIIGETCAWICDAMPENRPRHVLGIASVDDIFACVENGGDTFDCVAPARCARNGAIFTRQGRYNIKRAQHKFDFGPLEEGCDCYTCAHYSRAYVDHLLRAHEFTGFTLATIHNERFFVKLLDDIRASIDGGYFEEFRDESLAHFYGK

SEQ ID NO: 52605 - protein, 471 aa, Bifidobacterium stercoris
  misc_feature (1)..(471): tr|A0A087DL30|A0A087DL30_BIFAD Queuine tRNA-ribosyltran sferase OS=Bifidobacterium stercoris JCM 15918 OX=14376 12 GN=tgt PE=3 SV=1
MTSLNEPQTGAVAHETSAANAAADATHDAAGNTTSAASAENLIEHPRGAEPGKPGRRDAFYFEQKTRLPDAADGKGRGGARYGRTGIIHTPHGDIHTPAFVPVATQAAMKAVLPETMKDLGAQCLLSNAFHLYERPGEQVLDEAGGLAKFMNWNGPTFTDSGGFQVLSLGAGFKKTLAMDVTGMKSDDVIAEGKERLAFVDEDGVTFKSPLNGSLHRFSAEISMGIQHKIGADIMFAFDELTTLMNTRGYQERSVERTYRWAQRCVAEHKRLTEERLGKPYQALYGVVQGANYEDLRRHAAEQIASLDFDGVGIGGAIEKRIIGDTCAWICDAMPESRPRHVLGIAAVDDIFACVENGGDTFDCVAPARCGRNGAIFTRHGRYNIKRAQFKHDFSPLEEGCDCYTCTHYTRAYVDHALRAREFNGFTLATIHNEHFFVKLLDDIRASIDGGYFNEFRDETLAKFYENGSKG

SEQ ID NO: 52606 - protein, 455 aa, Bifidobacterium subtile
  misc_feature (1)..(455): tr|A0A087E7D2|A0A087E7D2_9BIFI Queuine tRNA-ribosyltran sferase OS=Bifidobacterium subtile OX=77635 GN=tgt PE=3 SV=1
MPDSYRQGRCGMASPTVNDMTSLLEHPRTTRPEHPDQPGDRNTFSFETTTRLPDSADGKGRGGARYGRTGVIHTPHGDIKTPAFVPVATQAAMKAVLPEQMRELGAQCLLSNAFHLFERPGEDVLDEAGGLGRFMNWDGPTFTDSGGFQVLSLGAGFKKTLAMDVKGMKSDDVIAKGKERLAFVDEDGVTFKSPLNGSEHRFSAEISMGIQHKIGADIMFAFDELTTLMNTRGYQERSVERTFRWARRCVAEHQRLTQERIGKPYQALYGVVQGANYEDLRRHAAQQIASLDFDGVGIGGAIEKRVIGDTCAWICDEMPESRPRHVLGIAAVDDIFACVENGGDTFDCVAPARTGRNGAIYTRDGRYNIKRAAFKHDFGPLEEGCDCYACTHYSRAYIDHLLRAHELNGFTLATIHNERFFVKLLDDIRAAIDGGYFDEFRDESLARFYANGSRG

SEQ ID NO: 52607 - protein, 433 aa, Bifidobacterium thermacidophilum
  misc_feature (1)..(433): tr|A0A087E2B4|A0A087E2B4_9BIFI Queuine tRNA-ribosyltran sferase OS=Bifidobacterium thermacidophilum subsp. ther macidophilum OX=79262 GN=tgt PE=3 SV=1
MTSLLEHPRGAEPGKPGDRSAFWFETITRLPDAANGKGRGGARYGRTGIIHTPHGDIHTPAFVPVATQGAMKAVLPESMKQLGAQCLLSNAFHLFERPGEDVLDAAGGLAKFMNWDGPTFTDSGGFQVLSLGAGFKKTLAMDVTGMKSDDVIAEGKERLAFVDEDGVTFKSPLNGAKHRFSAEISMGIQHKIGADIMFAFDELTTLMNTRGYQERSVERTFRWAKRCVAEHERLTRERLGKPYQALYGVVQGANYEDLRRHAAEEIASLDFDGVGIGGAIEKRIIGDTCAWICDAMPESRPRHVLGIAAVDDIFACVENGGDTFDCVAPARCGRNGAIFTRDGRYNIKRAANKFDFEPLEQGCDCYTCTHYSRAYVDHLLRAREFNGFTLATIHNEHFFVKLLDDIRASIDGGYFDEFRDETLARFYANGSRG

SEQ ID NO: 52608 - protein, 433 aa, Bifidobacterium thermacidophilum
  misc_feature (1)..(433): tr|A0A087DYR7|A0A087DYR7_9BIFI Queuine tRNA-ribosyltran sferase OS=Bifidobacterium thermacidophilum subsp. porc inum OX=212365 GN=tgt PE=3 SV=1
MTSLLEHPRGAEPGKPGDRSAFWFETITRLPDAANGKGRGGARYGRTGIIHTPHGDIRTPAFVPVATQGAMKAVLPESMKQLGAQCLLSNAFHLFERPGEDVLDAAGGLAKFMNWDGPTFTDSGGFQVLSLGAGFKKTLAMDVTGMKSDDVIAEGKQRLAFVDEDGVTFKSPLNGAKHRFSAEISMGIQHKIGADIMFAFDELTTLMNTRGYQERSVERTFRWAKRCVAEHERLTRERLGKPYQALYGVVQGANYEDLRRHAAEEIASLDFDGVGIGGAIEKRIIGDTCAWICDAMPESRPRHVLGIAAVDDIFACVENGGDTFDCVAPARCGRNGAIFTRDGRYNIKRAANKFDFEPLEQGCDCYTCTHYSRAYVDHLLRAREFNGFTLATIHNEHFFVKLLDDIRASIDGGYFDEFRDETLARFYANGSRG

SEQ ID NO: 52609 - protein, 433 aa, Bifidobacterium thermophilum
  misc_feature (1)..(433): tr|A0A2N3QPS6|A0A2N3QPS6_9BIFI Queuine tRNA-ribosyltran sferase OS=Bifidobacterium thermophilum OX=33905 GN=tgt PE=3 SV=1
MTSLLEHPRGAEPGKPGDRSAFWFETITRLPDAANGKGRGGARYGRTGIIHTPHGDIHTPAFVPVATQGAMKAVLPESMKQLGAQCLLSNAFHLFERPGEDVLDAAGGLAKFMNWDGPTFTDSGGFQVLSLGAGFKKTLAMDVTGMKSDDVIAEGKQRLAFVDEDGVTFKSPLNGAKHRFSAEISMGIQHKIGADIMFAFDELTTLMNTRGYQERSVERTFRWAKRCVAEHERLTRERLGKPYQALYGVVQGANYEDLRRHAAEEIASLDFDGVGIGGAIEKRIIGDTCAWICDAMPENRPRHVLGIAAVDDIFACVENGGDTFDCVAPARCGRNGAIFTRDGRYNIKRAANKFDFEPLEQGCDCYTCTHYSRAYVDHLLRARELNGFTLATIHNEHFFVKLLDDIRASIDGGYFDEFRDETLARFYANGSRG

SEQ ID NO: 52610 - protein, 433 aa, Bifidobacterium thermophilum; identical to SEQ ID NO: 52609
  misc_feature (1)..(433): tr|M4RDR8|M4RDR8_9BIFI Queuine tRNA-ribosyltransferase OS=Bifidobacterium thermophilum RBL67 OX=1254439 GN=tgt PE=3 SV=1

SEQ ID NO: 52611 - protein, 442 aa, Bifidobacterium tissieri
  misc_feature (1)..(442): tr|A0A261FE09|A0A261FE09_9BIFI Queuine tRNA-ribosyltran sferase OS=Bifidobacterium tissieri OX=1630162 GN=tgt P E=3 SV=1
MTDVDVNQNPIDLVEHPRGAAPGKPGDRSEFSFEITRRLDPTPDGLGRNGFRHGRSGIIHTPHGDIQTPAFVPVATQATMKAMLPEQLKALGAQCTLANAFHLFERPGEDILDEAGGLAKFMNWHGPTFTDSGGFQVLSLGAGFKKTLAMDVKGLKSDDVIAEGKERLAFVDEDGVTFKSPLNGDRHRFSAEISMGIQHKIGADIMFSFDELTTLMNTRRYQVESVERTYRWAQRCVAEHQRLTETRLGKPYQALFGVVQGANYEDLRRHAAQQIASLDFDGVGIGGAIEKRLLGNTCAWICDEMPELRPRHVLGIAAVDDIFAGVENGGDTFDCVAPARTARNGAIYTRDGRWNVLRTALKHDFGPLEEGCDCYTCAHYSRAYLHHLLKAREMSGCTLATIHNERFFVRLLDEIRESITGGYFDEYKKETLARFYANGSRG

SEQ ID NO: 52612 - protein, 452 aa, Bifidobacterium tsurumiense
  misc_feature (1)..(452): tr|A0A087E9I4|A0A087E9I4_9BIFI Queuine tRNA-ribosyltran sferase OS=Bifidobacterium tsurumiense OX=356829 GN=tgt PE=3 SV=1
MTSDSAETTGVQHAHIGTAPAGLIDHPRGAEPGKPGDRGAFSFETITRLPDSADGKGRGGARYGRTGILHTPHGDIRTPAFVPVATQGAMKAVLPETMREAGAQCLLSNAFHLYERPGEEVLNEAGGLAHFMNWDGPTFTDSGGFQVLSLGAGFKKTLAMDVSGMKSDDVIAEGKERMAFVDEDGVTFKSPLNGSLHRFSAEISMRIQHNIGADIMFAFDELTTLMNTRGYQEESVERTFRWAQRCVAEHKRLTEERIGKPYQALYGVVQGANYEDLRRHAAEQIASLDFDGVGIGGAMEKRIIGDICAWICDAMPESRPRHVLGIAAVDDIFACVENGGDTFDCVAPARCGRNGAIFTRDGRYNVKRAEFKHDFRPLEEGCECYTCKDYSRAYVDHLLRAREFNGFTLATIHNEHFFIKLLDDIRASIDGGYFDEFRDATLARFYANGSRG

SEQ ID NO: 52613 - protein, 442 aa, Bifidobacterium vansinderenii
  misc_feature (1)..(442): tr|A0A229W223|A0A229W223_9BIFI Queuine tRNA-ribosyltran sferase OS=Bifidobacterium vansinderenii OX=1984871 GN= tgt PE=3 SV=1
MTDVDATQTPIDLVEHPRGAEPGKPGDRSAFSFEITRRLEPTADGLGRDGFRHGRSGVIHTPHGDIQTPAFVPVATQATMKAMLPEQLKELGAQCTLANAFHLFERPGEDILDEAGGLAKFMNWHGPTFTDSGGFQVLSLGAGFKKTLAMDVKGLKSDDVIAEGKERLAFVDEDGVTFKSPLNGDLHRFSAEISMGIQHKIGADIMFAFDELTTLMNTRRYQEESVERTYRWAQRCVAEHKRLTEARLGKPYQALFGVVQGANYEDLRRHAAQQIASLDFDGVGIGGAIEKRLLGNTCAWICDEMPELRPRHVLGIAAVDDIFAGVENGGDTFDCVAPARTARNGAIYTRDGRWNVLRTALKHDFGPLEEGCDCYTCTHYSRAYLHHLLKAREMSGCTLATIHNERFFVRLLDEIRESITGGYFDEYKKETLARFYANGSRG

SEQ ID NO: 52614 - protein, 433 aa, Bifidobacterium vespertilionis
  misc_feature (1)..(433): tr|A0A5J5DVF6|A0A5J5DVF6_9BIFI tRNA guanosine(34) trans glycosylase Tgt OS=Bifidobacterium vespertilionis OX=25 62524 GN=tgt PE=4 SV=1
MTSLLEHPRGAEPGKPGDRSAFSFETITRLPNTADGLGRDGARYGRTGIIHTPHGDIRTPAFVPVGTQAAMKGVLPEQMKELGAQCLLANAFHLFERPGEDTLDLAGGLARYMNWDGPTYTDSGGFQVLSLGAGFKKTLAMDVTGLKSDDVIAEGKQRLAFVDEDGVTFKSPLNGDEHRFSAEISMGIQHKLGADIMFAFDELTTLMNTRSYQEESVERTFRWARRCVAEHQRLTEARLGKPYQALFGVVQGANYEDLRRRAASQIASLDFDGVGIGGAIEKRILGQTCAWICDEMPEDRPRHVLGIAAVDDIFAAVENGGDTFDCVAPARCARNGAVFTRDGRWNIKRAQFKNDFSPIEADCDCYTCRHYSRSYVDHLLRAREYNGFTLATIHNERFFVRLLDEIRASIDGGYFDDYKRETLARFYANGSRG

SEQ ID NO: 52615 - protein, 421 aa, Bifidobacterium xylocopae
  misc_feature (1)..(421): tr|A0A366KEH3|A0A366KEH3_9BIFI Queuine tRNA-ribosyltran sferase OS=Bifidobacterium xylocopae OX=2493119 GN=tgt PE=3 SV=1
MSDSINPGTFGFETRTRLPSTDDGLGRDGARYGRTGTIHTPHGDIHTPAFIPVATQAAMKAVLPEQVEDLGAQALLSNAFHLFERPGEDVLDEAGGLGRFMAWSGPTFTDSGGFQVLSLGAGFKKTLAMDVTGMKSDQVIAEGKERRAFVDEDGVTFKSPLNGNKHRFSAEISMGIQHKIGADIMFSFDELTTLMNTRSYQEESVERTYRWARRCIAKHEHLTQARSDKPYQALFGVVQGANYEDLRRRAAGQIASLPFDGVGIGGAIEKRLLGQTCAWICDEMPEERPRHVLGIAAVNDIFAGVENGGDTFDCVAPARCGRNGAVFTRDGRWNVMRTAMRRDFRPIEEDCDCYTCTHYTRAYICHLLHAHELNGFTLATIHNERFFVRLLDEIRASIDGGYFDEYKEQTLTRFYAHGSKG

SEQ ID NO: 52616 - protein, 371 aa, Bilophila sp.
  misc_feature (1)..(371): tr|G1V1T3|G1V1T3_9DELT Queuine tRNA-ribosyltransferase OS=Bilophila sp. 4_1_30 OX=693988 GN=tgt PE=3 SV=1
MNTPGTFQIHATDGAARTGVLQTAHGPVNTPIFMPVGTVGSVKAIAPDDLNAIGAEIILGNTYHLYLRPGDELVARRGGLHGFNAWDKPILTDSGGFQVFSLSTLRTIKEEGVTFRSHLDGSKHLFTPEKVVSIQRNLNSDIMMVLDECVPAGADHTYTARSLTMTTRWAKRCRDAYPKGTAGNLLFGIVQGGMFKDLRSESARQLIDLDFEGYAIGGLSVGESKDVMMEMLYHTAPILPSEKPRYLMGVGTPLDIIKGIDAGVDMFDCVLPTRNARNGTLYTSLGKLNIKRREFAEDDGPLDPACNCYTCRTFSRAYLRHLYVSQELLSFRLNSIHNLTYFLDTVRGARAAIREGRWAEYKRRYEELYEV

SEQ ID NO: 52617 - protein, 371 aa, Bilophila wadsworthia
  misc_feature (1)..(371): tr|E5Y7C6|E5Y7C6_BILWA Queuine tRNA-ribosyltransferase OS=Bilophila wadsworthia 3_1_6 OX=563192 GN=tgt PE=3 SV =1
MNTPGTFQIHATDGAARTGVLQTAHGPVNTPIFMPVGTVGSVKAIAPDDLNAIGAEIILGNTYHLYLRPGDELVARRGGLHGFNAWDKPILTDSGGFQVFSLSTLRTIKEEGVTFRSHLDGSKHLFTPEKVVSIQRNLNSDIMMVLDECVPAGADHTYTARSLTMTTRWAKRCRDAYPKGTAGNLLFGIVQGGMFKDLRSESARQLIDLDFEGYAIGGLSVGESKDVMMEMLYHTAPILPSEKPRYLMGVGTPLDIIKGIDAGVDMFDCVLPTRNARNGTLYTSLGKLNIKRREFAEDDGPLDPACSCYTCRTFSRAYLRHLYVSQELLSFRLNSIHNLTYFLDTVRGARAAIREGRWAEYKRRYEELYDV

SEQ ID NO: 52618 - protein, 382 aa, Biostraticola sp.
  misc_feature (1)..(382): tr|A0A4U2UKM3|A0A4U2UKM3_9ENTR Queuine tRNA-ribosyltran sferase OS=Biostraticola sp. BGMRC 2031 OX=2575567 GN=t gt PE=3 SV=1
MKYQLIKTDGPARRGRLLFERGVVETPAFMPVGTYGTVKGMTPEEVAATGAQIILGNTFHLWLRPGQEVMRQHGDLHDFMQWHGPILTDSGGFQVFSLGDIRKITEDGVHFRNPINGDAIFLSPEKSMEIQYDLGSDIVMIFDECTPYPAEYDFARRSMEMSLRWAERSRRRFDELHNPNALFGIIQGSVYEDLRDVSVKRLVEIGFDGYAVGGLAVGEPKADMHRILEHVLPQIPADKPRYLMGVGKPEDLVEGVRRGIDMFDCVMPTRNARNGHLFVTGGVVKIRNAANRNDLSPLDEHCDCYTCRNYSRAYLHHLDRCNEILGARLNTIHNLRYYQRLMAGLRQAIDEGKLERFVEEFYGRAGKAVPPLVVEFNYNEGI

SEQ ID NO: 52619 - protein, 382 aa, Biostraticola tofi
  misc_feature (1)..(382): tr|A0A4R3YPX1|A0A4R3YPX1_9ENTR Queuine tRNA-ribosyltran sferase OS=Biostraticola tofi OX=466109 GN=tgt PE=3 SV= 1
MKYELLNTDGRARRGRLVFDRGVVETPAFMPVGTYGTVKGMTPEEVKDTGAQIILGNTFHLWLRPGQEIMKLHGDLHDFMQWHGPILTDSGGFQVFSLGDIRKIKEEGVHFRNPINGDSIFLSPEKSMEIQYDLGSDIVMIFDECTPYPADWDYAKRSMEMSLRWAARSRQRFDELGNKNALFGIIQGGVYEDLRDVSVKRLVEIGFDGYAVGGLAVGEPKEDMHRILEHVCPQIPADKPRYLMGVGKPEDLVEGVRRGIDMFDCVMPTRNARNGHLFVTDGVVKIRNARYKDDTSTLDDQCDCYTCRNYSRAYLHHLDRCNEILGARLNTIHNLRYYQRLMAGLRQAIDEGKLEHFVEEFYGRIGKPIPPLAVEFTNNEGI

SEQ ID NO: 52620 - protein, 396 aa, Bisgaard taxon
  misc_feature (1)..(396): tr|A0A3A1YAZ6|A0A3A1YAZ6_9PAST Queuine tRNA-ribosyltran sferase OS=Bisgaard taxon 44 str. B96_4 OX=2028576 GN=t gt PE=3 SV=1
MLSFKKFKQQGYARRGEITIHRADGSEFTIQTPAFMPVGTYGTVKSMTPEEVEQIGAEIILGNTFHLWLRPGMEIMRKAGGLHNFMQWNKPILTDSGGFQVFSLGDIRKIKEEGVYFRSPVDGSNVFLSPEISMDVQHALNSDIVMIFDECAPYPSTYDYTLNSMNLSLRWAKRCRDRFDELGNTNALFGIIQGGTYNDLRKASLAGLTDIGFDGYAIGGLAVGEPKEEMHKTLEFITPLIPDNKPRYLMGVGKPEDLVECVRRGVDMFDCVMPTRNARNGHLFTFTGNVRIRNAKYKEDFSPIEEGCDCYTCKNYTRAYLHHLDKCGEILGARLNTFHNLRFYQKLMQRMRDALDAGKFDEFVEKFYADLGQEVPALGEFSDNRYAFVDKADRIE

SEQ ID NO: 52621 - protein, 396 aa, Bisgaard taxon
  misc_feature (1)..(396): tr|A0A3A1YM72|A0A3A1YM72_9PAST Queuine tRNA-ribosyltran sferase OS=Bisgaard taxon 44 str. 111 OX=2028575 GN=tgt PE=3 SV=1
MLSFKKFKQQGYARRGEITITRADGSEHKIQTPAFMPVGTYGTVKSMTPEEVEQIGAEIILGNTFHLWLRPGTEIMNKAGGLHNFMQWHKPILTDSGGFQVFSLGDIRKIKEEGVYFRSPVDGSNVFLSPEISMDVQYSLNSDIVMIFDECAPYPSTYDYTLNSMNLSLRWAKRCRDRFNELGNPNALFGIIQGGVYNDLRKASLAGLTDIGFDGYAIGGLAVGEPKEEMHKTLEFITPLIPDNKPRYLMGVGKPEDLVECVRRGVDMFDCVMPTRNARNGHLFTFTGNVRIRNAKYKDDFSPIEEGCDCYTCKNYTRAYLHHLDKCGEILGARLNTFHNLRFYQRLMQRMRDALDQGTFDEFVAKFYADQGLEVPALGEFSDNRYAFVDKDDRVA

SEQ ID NO: 52622 - protein, 389 aa, Bisgaardia hudsonensis
  misc_feature (1)..(389): tr|A0A4R2N3J1|A0A4R2N3J1_9PAST Queuine tRNA-ribosyltran sferase OS=Bisgaardia hudsonensis OX=109472 GN=tgt PE=3 SV=1
MTMKFTLHTTDGNARRGTMTFNRPQGEFKVETPAFMPVGTYGTVKGMTPEEVRATGAEILLGNTFHLWLRPGQEVMRKHGDLHDFMQWHRPILTDSGGFQVFSLGKIRKITEEGVKFQNPINGEHIFLSPEKSMEIQYDLGSDIVMIFDECAPYPSTFDYTKKSMEMSLRWAKRSRDRFDELGNKNALFGIVQGGTFEELRKISVEGLVNIGFDGYAVGGLAVGEPKEDMHRILESVCPQLPTDKPRYLMGVGKPEDLVEGVRRGIDMFDCVMPTRNARNGHLFVTDGIVKIRNAKYRDDITPLDPECDCYTCKNYTKAYLYHLDKCGEILGARLNTIHNLRYYQRLMAEIRTAIDEGKFEEFVETFYARIGKPIPPLQTEINSQDNSK

SEQ ID NO: 52623 - protein, 376 aa, Bizionia algoritergicola
  misc_feature (1)..(376): tr|A0A5D0QUM2|A0A5D0QUM2_9FLAO Queuine tRNA-ribosyltran sferase OS=Bizionia algoritergicola OX=291187 GN=tgt PE =3 SV=1
MTFDLKATDPKTKARAGKLTTDHGVIETPIFMPVGTVGTVKGVHQRELKDEINPDIILGNTYHLYLRPQTDVLEKAGGIHKFMNWDRNILTDSGGYQVYSLSANRKIKEEGVKFKSHIDGSYHFFTPENVMEIQRTIGADIIMAFDECTPYPCDYRYAKRSMHMTHRWLDRCINHLEKTPLKYGYDQAFFPIVQGSTYKDLRQQSAEYIANAGAVGNAIGGLSVGEPAEEMYGMTEVVTAILPEDKPRYLMGVGTPINILENIALGVDMFDCVMPTRNARNGMLFTAHGSINIKNLKWREDFSPIDEMGITFVDTEYSKAYLRHLFTVNELLGKQIATIHNLGFYMWLVREARKHILAGDFATWKDKMVKQMDNRL

SEQ ID NO: 52624 - protein, 376 aa, Bizionia argentinensis
  misc_feature (1)..(376): tr|G2EGI8|G2EGI8_9FLAO Queuine tRNA-ribosyltransferase OS=Bizionia argentinensis JUB59 OX=1046627 GN=tgt PE=3 SV=1
MTFDLKVTDSQTKARAGKITTDHGVIETPIFMPVGTVASVKGVHQRELKEEINPDVILGNTYHLYLRPQTDVLEKAGGLHKFMNWDRNILTDSGGYQVYSLSANRKIKEEGVKFKSHIDGSYHFFTPENVMEIQRTIGADIIMAFDECTPYPCDYRYAKRSMHMTHRWLDRCINHLEKTPLKYDYDQAFFPIVQGSTYKDLRQQSAEYIANAGAVGNAIGGLSVGEPAEEMYAMTEVVTAILPEDKPRYLMGVGTPINILENIALGVDMFDCVMPTRNARNGMLFTAHGTINIKNLKWREDFSPIDEMGITFVDTEYSKAYLRHLFTVNELLGKQIATIHNLGFYMWLVREARKHILAGDFSTWKDMMVKQMDNRL

SEQ ID NO: 52625 - protein, 376 aa, Bizionia echini
  misc_feature (1)..(376): tr|A0A1I5CE06|A0A1I5CE06_9FLAO Queuine tRNA-ribosyltran sferase OS=Bizionia echini OX=649333 GN=tgt PE=3 SV=1
MTFDLKVTDPNSKARAGKLTTDHGVIETPIFMPVGTVATVKGVHQRDLKAEINPDIILGNTYHLYLRPQTDVLEKAGGIHKFMNWDRNILTDSGGYQVYSLSANRKIKEEGVKFKSHIDGSYHTFTPENVMEIQRSIGADIIMAFDECTPYPCDYRYAKRSMHMTHRWLDRCINHLEKTPLKYGYDQAFFPIVQGSTYKDLRQQSAEYIANAGAVGNAIGGLSVGEPAEEMYGMTEVVTAILPEDKPRYLMGVGTPINILENIALGVDMFDCVMPTRNARNGMLFTAHGSINIKNLKWREDFSPIDEMGITFVDTEYSKAYLRHLFSVNELLGKQIATIHNLGFYMWLVREARKHILAGDFTTWKNKMVKQMDNRL

SEQ ID NO: 52626 - protein, 376 aa, Bizionia myxarmorum
  misc_feature (1)..(376): tr|A0A5D0RDG3|A0A5D0RDG3_9FLAO Queuine tRNA-ribosyltran sferase OS=Bizionia myxarmorum OX=291186 GN=tgt PE=3 SV =1
MTFDLKVTDSKTKARAGKLTTDHGVIETPIFMPVGTVATVKGVHQRELKDEINPDIILANTYHLYLRPQTDVLEKAGGLHKFMNWDRNILTDSGGYQVYSLSANRKIKEEGVRFKSHIDGSYHTFTPEGVMEIQRTIGADIIMAFDECTPYPCDYRYAKRSMHMTHRWLDRCINHLEKTPVKYGFDQAFFPIVQGSTYKDLRQQSAEYIANAGAVGNAIGGLSVGEPAEEMYAMTEVVTAILPEEKPRYLMGVGTPINILENIALGVDMFDCVMPTRNARNGMLFTAHGSINIKNLKWREDFSPIDEMGITFVDTEYSKAYLRHLFTVNELLGKQIATIHNLGFYMWLVREARKHILAGDFALWKDMMVKQMDNRL

SEQ ID NO: 52627 - protein, 376 aa, Bizionia paragorgiae
  misc_feature (1)..(376): tr|A0A1H4D9Y5|A0A1H4D9Y5_9FLAO Queuine tRNA-ribosyltran sferase OS=Bizionia paragorgiae OX=283786 GN=tgt PE=3 S V=1
MTFDLKGKDIQSNARAGVVTTDHGVIETPIFMPVGTVGTVKGVHQRELKEEINPDIILGNTYHLYLRPQIDVLEKAGGLHKFMNWDRNILTDSGGYQVYSLSANRKIKEEGVKFKSHIDGSYHTFTPENVMEIQRSIGADIIMAFDECTPYPCDYNYAKRSMHMTHRWLDRCIKHLDKIPFKYDYSQAFFPIVQGSTYKDLRKQSAEYIANAGAVGNAIGGLSVGEPAEEMYAMTEVVTDILPEDKPRYLMGVGTPINILENIALGVDMFDCVMPTRNARNGMLFTANGTINIKNLKWREDFSPIDEMGITFVDTEYSKAYLRHLFSVNELLAKQIATIHNLGFYMWLVREARKHILAGDFRTWKDKMVKQMDTRL

SEQ ID NO: 52628 - protein, 376 aa, Bizionia saleffrena
  misc_feature (1)..(376): tr|A0A5D0QJW3|A0A5D0QJW3_9FLAO Queuine tRNA-ribosyltran sferase OS=Bizionia saleffrena OX=291189 GN=tgt PE=3 SV =1
MTFDLKGKDTQSNARAGVLTTDHGIIETPIFMPVGTVGTVKGVHQRELKEEVNPDIILGNTYHLYLRPQIDVLEKAGGLHKFMNWDRNILTDSGGYQVYSLSANRKIKEEGVKFKSHIDGSYHFFTPENVMEIQRSIGADIIMAFDECTPYPCDYNYAKRSMHMTHRWLDRCISHLDKTPLKYDYSQAFFPIVQGSTYKDLRKQSAEYIANAGAVGNAIGGLSVGEPAEEMYAMTEVVTAILPEDKPRYLMGVGTPINILENIALGVDMFDCVMPTRNARNGMLFTAHGTINIKNLKWREDFSPIDEMGMTFVDTEYSKAYLRHLFSVNELLAKQIATIHNLGFYMWLVREARKHILAGGFRTWKDKMVKQMDKRL

SEQ ID NO: 52629 - protein, 397 aa, Blastocatellia bacterium
  misc_feature (1)..(397): tr|A0A3D0P5B8|A0A3D0P5B8_9BACT Queuine tRNA-ribosyltran sferase OS=Blastocatellia bacterium OX=2052146 GN=tgt P E=3 SV=1
MTGNSEKAIDWKVDATDGRARAGTLRTRRSVIETPVFMPVGTQGSVKGVRFEWLEDEIDARIILGNTYHLFLRPGPEAIRQLGGLHKFTTWQRSLLTDSGGFQVFSLTDLRKLTEEGVEFRSHLDGSRQFISPEVSMEIQAALGSEIVMAFDECPPGDAGHEKTRESMELTLRWAERSKTRFFELQEAGMDTGRNVAEGLAGRQALFGIVQGAGHHDLRSESLERTVAIGFDGYAIGGLSVGEEKPVMYGVLDHIAHRMPENAPRYLMGVGTPEDLLEAVGHGVDMFDCVMPTRNGRTGGVFTSRGKINIRNAKFALDEAPLDDRCGCSVCRRYSRAYLRHLYQAGEMAAATLISHHNLSFYLDLMRGAREAIREGRYYEFKQEQLAGFAENASRDV

SEQ ID NO: 52630 - protein, 423 aa, Blastocatellia bacterium
  misc_feature (1)..(423): tr|A0A357F252|A0A357F252_9BACT Queuine tRNA-ribosyltran sferase OS=Blastocatellia bacterium OX=2052146 GN=tgt P E=3 SV=1
MEKAIDWKITAQDGDARSGLLTTRRGIIETPVFMPVGTQGSVKGVRFEWLENELDARIILGNTYHLFLRPGIETIRKLGGLHGFTTWRRALLTDSGGFQVFSLSDLRKLTEEGVEFQSHIDGSRHFLSPEVSMEIQAGLGSEIVMVFDECPPGEASHEAARKSLELTSRWAKRSKRRFEELQHIGADTGFIKNPARISAGKSRQNTENDDEFSNIQIGETGESFELSGRQALFGIIQGAGHYDLREESLERTVETGFDGYAIGGLSVGEEKDVMYGVLEFLAPKMPLNAPRYLMGVGSPEDLIEAVSRGVDMFDCVMPTRNGRTGSAFTSRGKLNIRNARFALDELPLDPECSCSVCRRYSRAYLRHLYQAGEMAAATLISHHNLAFYLDMMSRVRQSIKSGVFSEFKREFLGKLGQNEYAAV

SEQ ID NO: 52631 - protein, 376 aa, Blastochloris sp.
  misc_feature (1)..(376): tr|A0A348G0W7|A0A348G0W7_9RHIZ Queuine tRNA-ribosyltran sferase OS=Blastochloris sp. GI OX=2233851 GN=tgt PE=3 SV=1
MTAFSFRVRATDGTARLGEIATPRGVIRTPAFMPVGTQATVKAMYPEQVRALGADIILGNTYHLMLRPGAERVARLGGLHTFMDWPHPILTDSGGFQVMSLASLRKLDEDGVTFRSHLDGSEYRLTPERSIEIQGLLGADIQMQLDECLKLPAAREDIARAMELSLRWAERSRRAFEGQPEGRAIFGIVQGGDQPDLRVESAKALAGMDFHGLAVGGLAVGEPQEVMLAMIETVEPHLPAAKPRYLMGVGTPDDILEAASRGIDMFDCVMPTRAGRHATAFTRFGKINLRNARHAEDTRPLDPDSPSEPLRRWSRAYLHHLVRAEEMLAGMILTAVNIAYYQELMAGIRSAIAEGRLAAFREEVKAGWARGDLPAL

SEQ ID NO: 52632 - protein, 376 aa, Blastochloris viridis
  misc_feature (1)..(376): tr|A0A0H5BDY8|A0A0H5BDY8_BLAVI Queuine tRNA-ribosyltran sferase OS=Blastochloris viridis OX=1079 GN=tgt PE=3 SV =1
MTAFSFRVHATCGTARLGEISTPRGRIRTPAFMPVGTQATVKAMYPEQVRALGADIILGNTYHLMLRPGAERVAKLGGLHAFMDWPHPILTDSGGFQVMSLASLRKLDEGGVTFRSHLDGSEHRLTPERSIEIQSLLGADIQMQLDECLKLPAPREDIARAMELSLRWAERSKKAFEGQPEGRALFGIVQGGDQPDLRVESARALAAMDFHGLAVGGLAVGEPQDVMLAMIETVEPHLPAAKPRYLMGVGTPDDILEAASRGIDMFDCVMPTRAGRHATAFTRFGRINLRNARHAEDTRPLDPDSPSEPLRRWSRAYLHHLVRAEEMLAGMILTAVNIAYYQELMAGIRAAIAEGRLAAFRDEVKAGWAAGDLPAL

SEQ ID NO: 52633 - protein, 380 aa, Blastomonas fulva
  misc_feature (1)..(380): tr|A0A222WX40|A0A222WX40_9SPHN Queuine tRNA-ribosyltran sferase OS=Blastomonas fulva OX=1550728 GN=tgt PE=3 SV= 1
MTQTAPRFAFSISARDGKARTGELAMQRGTIRTPAFMPVGTAATVKGMKPAEVRALGADIILGNTYHLMLRPGAERVARLGGLHRFMDWPHPILTDSGGYQVMSLSALTKTTEEGVAFRSHLDGSRHMLSPERSMEIQRLLGSDIVMAFDELVPTTATREVQAAAMERSMRWARRSREGFDSGTEHAGRAALFGIQQGSLDEGLRRQSADALRDIGFDGYAVGGLAVGEGQEAMFGVLDYAPGQLPDDRPRYLMGVGKPDDLVGAVERGVDMFDCVLPTRSGRNGQAFTWDGPVNIRNARHAEDQAPLDEACGCTACTRFSRAYLHHLVKSGEMLGAMLMTEHNLRFYQDLMAGMRLAISEGRMAAFGEAFRARYYAKGT

SEQ ID NO: 52634 - protein, 380 aa, Blastomonas natatoria
  misc_feature (1)..(380): tr|A0A2V3UTA9|A0A2V3UTA9_9SPHN Queuine tRNA-ribosyltran sferase OS=Blastomonas natatoria OX=34015 GN=tgt PE=3 S V=1
MTETSPRFAFSVTARDGKARLGELAMKRGTIRTPAFMPVGTAATVKGMKPAEVRELGADIILGNTYHLMLRPGAERVARLGGLHKFMDWPRPILTDSGGYQVMSLSALTKVTEEGVAFRSHLDGSKHMLSPERSMEIQRLLGSDIVMAFDELVPATATRDVQAAAMERSMRWARRSREGFDSGGEHAQRAALFGIQQGSLDEQLRQQSADALREIGFDGYAIGGLAVGEGQEAMFGVLDYAPGQLPEDRPRYLMGVGKPDDLVGAVERGVDMFDCVLPTRSGRNGQAFTWDGPVNIRNARHAEDQGPLDEACGCTACTRFSRAYLHHLVKSGEMLGAMLMTEHNLRFYQDLMAAMRAAIGEGRMAQFGNDFRARYYARQG

SEQ ID NO: 52635 - protein, 380 aa, Blastomonas sp.
  misc_feature (1)..(380): tr|W9BZY5|W9BZY5_9SPHN Queuine tRNA-ribosyltransferase OS=Blastomonas sp. CACIA14H2 OX=1419876 GN=tgt PE=3 SV= 1
MTDSPPRFAFSITARDGKARLGELAMKRGTIRTPAFMPVGTAATVKGMKPAEVRELGADIILGNTYHLMLRPGAERVARLGGLHKFMDWPRPILTDSGGYQVMSLSALTKVTEEGVAFRSHLDGSRHMLSPERSMEIQRLLGSDIVMAFDELVPATATRDVQAAAMERSMRWARRSREGFDRGGEHAERAALFGIQQGSLDEQLRKQSADALRDIGFDGYAIGGLAVGEGQEAMFGVLDYAPGQLPDDRPRYLMGVGKPDDLVGAVERGVDMFDCVLPTRSGRNGQAFSWDGPINIRNARHAEDQGPLDEACGCTACTRFSRAYLHHLVKSGEMLGAMLMTEHNLRFYQDLMAAMRAAIGEGRMAQFGEDFRARYYAKGG

SEQ ID NO: 52636 - protein, 380 aa, Blastomonas sp.
  misc_feature (1)..(380): tr|A0A0N1BET1|A0A0N1BET1_9SPHN Queuine tRNA-ribosyltran sferase OS=Blastomonas sp. AAP25 OX=1523416 GN=tgt PE=3 SV=1
MTQTAPRFAFSISARDGKARTGELAMQRGTIRTPAFMPVGTAATVKGMKPAEVRALGADIILGNTYHLMLRPGAERVARLGGLHRFMDWPHPILTDSGGYQVMSLSALTKTTEEGVAFRSHLDGSRHMLSPERSMEIQRLLGSDIVMAFDELVPTTATREVQAAAMERSMRWARRSREGFDSCTEHAGRAALFGIQQGSLDEGLRRQSADALRDIGFDGYAIGGLAVGEGQEAMFGVLDYAPGQLPDDRPRYLMGVGKPDDLVGAVERGVDMFDCVLPTRSGRNGQAFTWDGPVNIRNARHAEDQAPLDEACGCTACTRFSRAYLHHLVKSGEMLGAMLMTEHNLRFYQDLMAGMRLAISEGRMAAFGEAFRARYYAKGT

SEQ ID NO: 52637 - protein, 387 aa, Blastopirellula cremea
  misc_feature (1)..(387): tr|A0A368KM83|A0A368KM83_9PLAN Queuine tRNA-ribosyltran sferase OS=Blastopirellula cremea OX=1031537 GN=tgt PE= 3 SV=1
MEHQDTLSDSTAKTAEADWFRYQLKQQDSTTAARRGEFVTPHGTVQTPAFMPVGTQGTVKGLEIGMVRQTGAEMILGNTYHLSLRPGDDVVAELGGLHKFMGWDGPILTDSGGFQIFSLAQMRKITEKEAIFQSHIDGRKIHLSPERSIEIQENLGSDIAMVLDHVVELPNEPQVIREAMDRSIRWAERCQAAATRKDQAQFAIVQGGLDENMRVECAERLGALNFPGYAMGGLSVGEPPPEMYRILDATCPALPADKPRYLMGVGRPEDLLEGIRRGVDLFDCVMPTRNGRNALAFTDEGTVRLRNAKYQRDPSPLDSKSAPQVAGLSRAYLRHLFMAKEMLGPILLSLHNVAYYQRLMREARQAIEEGRFVAFYEEKMKGWASGS

SEQ ID NO: 52638 - protein, 372 aa, Blastopirellula marina
  misc_feature (1)..(372): tr|A3ZPY0|A3ZPY0_9PLAN Queuine tRNA-ribosyltransferase OS=Blastopirellula marina DSM 3645 OX=314230 GN=tgt PE= 3 SV=1
MSERPFRYDLLQQSGQARRGVFHTPHGLVQTPAFMPVGTQGTVKGLEIGLVRETGAEMILGNTYHLSLRPGEQIVRELGGLHEFSGWRGPILTDSGGFQIFSLAQMAKITEEGAVFRSHIDGSKVSLSPERSIEIQEALGSDVAMVLDHVVALPNEADVIRQACDRSIRWAARCQQAATRDDQAQFAIVQGGLDEKLRIYCAEELGKLEFPGYAIGGLSVGEPPPEMYRILDVTCPVLPTDRPRYLMGVGRPEDLLEGVRRGVDLFDCVMPTRNGRNALAFTDEGTLRLRNAKYQTDKRPISPTSPERVRQHSRGYIRHLFMAKEMLGPILLTLQNLAYYQQLMAGARQAIEEDRFEAFYEQKMNSWRNGDE

SEQ ID NO: 52639 - protein, 375 aa, Blastopirellula marina
  misc_feature (1)..(375): tr|A0A2S8GG06|A0A2S8GG06_9PLAN Queuine tRNA-ribosyltran sferase OS=Blastopirellula marina OX=124 GN=tgt PE=3 SV =1
MTSTTERPFRYEKLQQSGQARRGVFYTPHGPVQTPAFMPVGTQGTVKGLEIGLVRETGAEMILGNTYHLALRPGEQIVRELGGLHAFSGWQGPILTDSGGFQIFSLAQMAKITEEGAVFRSHIDGSKVALSPERSIEIQEALGSDVAMVLDHVVSLPNEEKVIRQACDRSIRWAARCQQAATRPDQAQFAIVQGGLDEKLRVYCAEELGKLEFPGYAIGGLSVGEPPPEMYRILDATCPVLPADRPRYLMGVGRPEDLLEGIRRGVDLFDCVMPTRNGRNALAFTDEGTLRLRNAKYQTDKRPISPTSPDRVRQHSRGYIRHLFMAKEMLGPILLTLQNLAYYQQLMAGARQAIEEDRFEEFYERKMNGWRNGDE

SEQ ID NO: 52640 - protein, 378 aa, Blastopirellula sp.
  misc_feature (1)..(378): tr|A0A2E0AXY4|A0A2E0AXY4_9PLAN Queuine tRNA-ribosyltran sferase OS=Blastopirellula sp. OX=2024826 GN=tgt PE=3 S V=1
MNSPPFRFERLHQDAHCAARRSVFHTPHGSVQLPTFMPVGTLGTVKGLTIDSVRATGAEMILGNTYHLALRPGERVVAELGGLHEFSGWQGPILTDSGGFQLFSLAQLTKIREEGAEFRSHIDGSTLQLSPERAIEIQEALGSDVAMVLDHVIELPSDTDAIRDATERTIRWAARCLASATRPSQTQFGIVQGGLDPALRVACAERLSDMPFGGLAIGGLSVGETPAEMYQIIEVTAPVLPEDKPRYLMGVGRPQDLLEAIRRGIDMFDCVMPTRNGRNALAFTDQGPLRMRNQIHTHDKRPIDENCPCPACRHSRGYIRHLFRAEEMLGPILVSAHNLTYYARLMADARAAIEADHFTDFFHERMRGWGEIHSPSAN

SEQ ID NO: 52641 - protein, 374 aa, Blattabacterium cuenoti
  misc_feature (1)..(374): tr|M4ZTH1|M4ZTH1_9FLAO Queuine tRNA-ribosyltransferase OS=Blattabacterium cuenoti BPAA OX=1229512 GN=tgt PE=3 SV=1
MKFNLIKTDNYSKARIGILETDHGKIETPIFMPVASKGYVKSVPTHELYKMYKIILGNTYHLHFQPGVEVLHKAGGIHSFLNWKGSILTDSGGFQIFSLKKSNKITEDGVLFKSMINGSFHFFSPEKSMKIQRFIGGDIIMAFDDCPPFPCSHTEAKKSLKKTHRWLKKCSSYLEKNPEIYNYKQSFFPIIQGSIYPDLRKSFTEKIALLEAEGYAIGGLSLGEEKEQTHSITDLLTDILPKKKPRYLMGVGSPIDILEGISLGIDMFDCVLPTRNGRHGMLFTWKGIMNIKNKKWEKDYSCLDEFGNSFVDQLYSKSYVRHLFLSRDHLAKEIASIHNLSFYFHLIQEAKIRIMHNEFFYWKKSMIPLLQERL

SEQ ID NO: 52642 - protein, 374 aa, Blattabacterium cuenoti
  misc_feature (1)..(374): tr|A0A224ABE0|A0A224ABE0_9FLAO Queuine tRNA-ribosyltran sferase OS=Blattabacterium cuenoti STAT OX=1457030 GN=t gt PE=3 SV=1
MKFNLIKTDNYSKARIGVLETDHSKIETPIFMPVASKGYVKSVPTHELYKMCEITIGNTYHLYFQPGIEVLHKAGGIHSFLNWKGSILTDSGGFQIFSLKKLNKNTEDGVLFKSMIDGSFHFFSPEKSMKIQRFIGGDIIMAFDDCPSFPCSYTVAKKSLKKTHFWLKKCYSYLQENPEIYNYKQSFFPILQGSIYPDLRRFSAEEISLLEAEGYAIGGLSLGEEKEETYNITDLLTDILPKKKPRYLMGVGYPADLLEGISLGIDMFDCVLPTRNGRHGMLFTWKGIMNIKNKKWEKDYSCLDEFGKTDVDQLYSKSYLRHLFLSKDSLAKEIASIHNLSFYFHLLQEAKIHIMHNKFFYWKKSIIPLLQKRL

SEQ ID NO: 52643 - protein, 374 aa, Blattabacterium sp.
  misc_feature (1)..(374): tr|D0JB65|D0JB65_BLASB Queuine tRNA-ribosyltransferase OS=Blattabacterium sp. subsp. Blattella germanica (stra in Bge) OX=331104 GN=tgt PE=3 SV=1
MKFNLIKTDRFSKARAGILKTDHGKIETPIFMPVASKGYVKSVPIHEIHKISKIILGNTYHLYLKPGIEVFHKAGGIHSFMNWNESILTDSGGFQVFSMRKLNKITENGVVFKSIINGSYHFFSPEKSMEIQRFIGGDIIMAFDDCPPFPCSYQEAKKSIKKTHIWLKKCCSYLQNHPEIYNYKQSFFPILQGSIYPDLRKNSAKEISLLETEGYAIGGLSLGEEKEQTQNIIDLVTDILPKEKPRYLMGVGNPVDILEGISLGIDMFDCVIPTRNGRHGMLFTWKGIMNMKNKKWEKDFSCLDEFGNSYVDQSYSKSYVRHLFLSRDNLAKEIASIHNLSFYSDLIQQARVHIMNNQFFSWKESVIPLLKKRL

SEQ ID NO: 52644 - protein, 375 aa, Blattabacterium sp.
  misc_feature (1)..(375): tr|G7SR24|G7SR24_9FLAO Queuine tRNA-ribosyltransferase OS=Blattabacterium sp. (Mastotermes darwiniensis) str. MADAR OX=1074889 GN=tgt PE=3 SV=1
MKFSLIKTDRFSKARAGIIETDHGKIETPIFMPVASKGSVKSIPKHELYDIGSKIILGNTYHLYFRPGIEVLHHAGGIHSFMNWKESILTDSGGFQVYSMRKSNKKTEDGVIFKSFINGSSHFFSPEKSMEIQRFIGGDMIMAFDDFPPYPCSYKEAKDSLKITHFWLKRCCSYLKSHPEKYNYKQSFFPIVQGSIYTDLRRYSAEEISLLETEGNAIGGLSLGEDKEKTQYITDIVTDILPKDKPRYLMGVGNPVDILEGISLGIDMFDCVIPTRNGRHGTLFTWKGVLNIKNKKWEKDFSCLDELGNSYVDKNYSKSYVRHLFSSKEYLAKQIASIHNLSFYFNLIKVARNHLMKNTFYSWKKSTIPLLQERL

SEQ ID NO: 52645 - protein, 378 aa, Blautia coccoides
  misc_feature (1)..(378): tr|A0A4R2K2J2|A0A4R2K2J2_9FIRM Queuine tRNA-ribosyltran sferase OS=Blautia coccoides OX=1532 GN=tgt PE=3 SV=1
MYKILKQEGMAKRAHFETVHGAVETPVFMNVGTVAAIKGAVATTDLHEIGTQIELSNTYHLHVRPGDQVIKKLGGLHKFMNWDRPILTDSGGFQVFSLSKLRKIKEEGVYFNSHIDGHKIFMGPEESMQIQSNLASTIAMAFDECPSSVADRKYVQDSVDRTTRWLARCKEEMARLNAKEDTINPQQMLFGINQGAVYDDIRIAHAKEIAKMDLDGYAVGGLAVGESHEEMYRILDSVVPYLPADKPTYLMGVGTPANILEGVSRGVDFFDCVYPSRNGRHGHVYTNFGKLNLFNAKYELDSRPIEEGCQCPACRSYSRAYIRHLLKAKEMLGMRLCVLHNLYFYNTMMTEIRQALDEGRYEDYKQQKLERMAAGPKA

SEQ ID NO: 52646 - protein, 385 aa, Blautia hansenii
  misc_feature (1)..(385): tr|C9L819|C9L819_BLAHA Queuine tRNA-ribosyltransferase OS=Blautia hansenii DSM 20583 OX=537007 GN=tgt PE=3 SV= 1
MEKEEKLMYKVLKQEGRAKRARMETVHGTIETPVFMNVGTAAAIKGAVSTMDLQEIKTQVELSNTYHLHVRPGDKVVKQLGGLHKFMNWDKPILTDSGGFQVFSLSKLRKIKEEGVYFNSHVDGRKIFMGPEESMQIQSNLGSTIAMAFDECPSSVASREYVQASVDRTTRWLQRCKDEMARLNSLEDTVNPHQLLFGINQGAIYDDIRIAHAETISKMDLDGYAVGGLAVGETHEEMYRILDSVVPHLPVDKPTYLMGVGTPANILEAVSRGVDFFDCVYPSRNGRHGHVYTNFGKINLFNAKYELDSRPIEEGCQCPACRHYSRAYIRHLLKAKEMLGMRLCVLHNLYFYNTMMEEIRNALDEGCYEEYKQKKLESMAAGPKD

SEQ ID NO: 52647 - protein, 376 aa, Blautia hydrogenotrophica
  misc_feature (1)..(376): tr|C0CIS1|C0CIS1_BLAHS Queuine tRNA-ribosyltransferase OS=Blautia hydrogenotrophica (strain DSM 10507 / JCM 14 656 / S5a33) OX=476272 GN=tgt PE=3 SV=1
MYQILKTEGRAKRAKLTTVHGTIQTPVFMNVGTAAAIKGAVSTVDLHEIGTQVELSNTYHLHVRPGDQVIKKLGGLHKFMNWDRPILTDSGGFQVFSLAGLRKIKEEGVYFQSHVDGRKIFMGPEESMQIQSNLASTIAMAFDECPSSVATREYVQNSVERTTRWLRRCKEEMARLNSLEDTINPHQLLFGINQGAIYEDIRISHAQQISEMNLDGYAVGGLAVGESHEQMYRILDEVVPHLPKEKPTYLMGVGTPANILEAVSRGVDFFDCVYPSRNGRHGHVYTNQGRRNLFNAKYELDDRPIEEGCQCPACRNYSRAYIRHLLKAKEMLGMRLCVLHNLYFYNTMMTEIRDALDAGNFEEYKEKKLAGMEENT

SEQ ID NO: 52648 - protein, 376 aa, Blautia hydrogenotrophica
  misc_feature (1)..(376): tr|A0A173R4I8|A0A173R4I8_9FIRM Queuine tRNA-ribosyltran sferase OS=Blautia hydrogenotrophica OX=53443 GN=tgt PE =3 SV=1
MYQILKTEGRAKRAKLTTVHGTIQTPVFMNVGTAAAIKGAVSTMDLHEIGTQVELSNTYHLHVRPGDQVIKKLGGLHKFMNWDRPILTDSGGFQVFSLAGLRKIKEEGVYFQSHVDGRKIFMGPEESMQIQSNLASTIAMAFDECPSSVATREYVQNSVERTTRWLRRCKEEMARLNSLEDTINPHQLLFGINQGAIYEDIRISHAQQISEMNLDGYAVGGLAVGESHEQMYRILDEVVPHLPKEKPTYLMGVGTPANILEAVSRGVDFFDCVYPSRNGRHGHVYTNQGRRNLFNAKYELDDRPIEEGCQCPACRNYSRAYIRHLLKAKEMLGMRLCVLHNLYFYNTMMTEIRDALDAGNFEEYKKKKLAGMEENT

SEQ ID NO: 52649 - protein, 383 aa, Blautia luti
  misc_feature (1)..(383): tr|A0A564VKI6|A0A564VKI6_9FIRM Queuine tRNA-ribosyltran sferase OS=Blautia luti OX=89014 GN=tgt PE=3 SV=1
MAEYKLITTEGRAKRGEFKTVHGTIQTPVFMNVGTIAAIKGAVSTVDLHEIGTQVELSNTYHLHVRPGDKVVKQLGGLHEFMNWDRPILTDSGGFQVFSLAKLRKIKEEGVYFNSHIDGHKIFMGPEQSMQIQSNLASTIAMAFDECPSSVADRDYVQKSVARTTRWLKRCKDEMARLNSLPDTINKNQLLFGINQGAVYEDIRIEHAQAIAEMDLDGYAVGGLAVGESHEEMYRILDEVVPHLPQNKPTYLMGVGTPANILEGVERGIDFFDCVYPSRNGRHGHVYTNHGKMNLFNAKYELDSKPIDEECQCPTCRHYSRAYIRHLLKAKEMLGMRLCVLHNLYFYNHMMEEIRDALDAGNFAAYKKMRLEGFEEGRINGNR

SEQ ID NO: 52650 - protein, 380 aa, Blautia obeum
  misc_feature (1)..(380): tr|A0A414EH36|A0A414EH36_9FIRM Queuine tRNA-ribosyltran sferase OS=Blautia obeum OX=40520 GN=tgt PE=3 SV=1
MAQYTLMKTEGRAKRAKFETVHGTIQTPVFMNVGTIGAIKGAVSTQDLYEIGTQVELSNTYHLHVRPGDKIVKQLGGLHKFMNWERPILTDSGGFQVFSLAKLRKIKEEGVHFQSHIDGHKIFMGPEESMQIQSNLGSTIAMAFDECPSSVADRDYVQKSVERTTRWLARCKKEMARLNSLPDTINKEQLLFGINQGAVYEDIRIEHAKEIAKMDLDGYAVGGLAVGETHEEMYRILDAVVPYLPQDKPTYLMGVGTPANILEGVDRGIDFFDCVYPSRNGRHGHVYTNHGKMNMFNAKYELDTRPIEDGCGCPACRHYSRAYIRHLLKAKEMLGMRLCVLHNLYFYNHMMEEIRDALDEGRFAEYKKMRLEGFAAGEQK

SEQ ID NO: 52651 - protein, 383 aa, Blautia obeum
  misc_feature (1)..(383): tr|A0A174DZT8|A0A174DZT8_9FIRM Queuine tRNA-ribosyltran sferase OS=Blautia obeum OX=40520 GN=tgt PE=3 SV=1
MAEYKLLKTEGRAKRAEFHTVHGTIQTPVFMNVGTIGAIKGAVSTMDLQQIGTQVELSNTYHLHVRPGDKIVKQLGGLHKFMVWDKPILTDSGGFQVFSLAKLRKIKEEGVYFNSHIDGHKIFMGPEESMQIQSNLASTIAMAFDECPSSVADRDYVQKSVDRTTRWLARCKAEMARLNSLPDTINKEQLLFGINQGAVYEDIRIEHAKAISEMDLDGYAVGGLAVGETHEEMYRILDAVVPYLPQNKPTYLMGVGTPANILEGVERGIDFFDCVYPSRNGRHGHVYTNHGKMNLFNAKYELDTRPIEEGCQCPACQHYSRAYIRHLLKAKEMLGMRLCVLHNLYFYNHMMEEIRDALDAGNFAEYKKMRLEGFEEGKINSKR

SEQ ID NO: 52652 - protein, 378 aa, Blautia producta
  misc_feature (1)..(378): tr|A0A2S4GSB8|A0A2S4GSB8_9FIRM Queuine tRNA-ribosyltran sferase OS=Blautia producta OX=33035 GN=tgt PE=3 SV=1
MYKILKQEGMAKRAHFETVHGSVETPVFMNVGTVAAIKGAVATTDLHEIGTQIELSNTYHLHVRPGDQVVKKLGGLHKFMNWDRPILTDSGGFQVFSLSKLRKIKEEGVYFNSHIDGHKIFMGPEESMQIQSNLASTIAMAFDECPSSVADRKYVQDSVDRTTRWLARCKDEMARLNAKEDTINPQQMLFGINQGAVYDDIRIAHAKEIAKMDLDGYAVGGLAVGESHEEMYRILDSVVPYLPADKPTYLMGVGTPANILEGVSRGVDFFDCVYPSRNGRHGHVYTNFGKLNLFNAKYELDSRPIEEGCQCPACRSYSRAYIRHLLKAKEMLGMRLCVLHNLYFYNTMMTEIRQALDEGHYEDYKQQKLERMAAGPKA

SEQ ID NO: 52653 - protein, 378 aa, Blautia producta; identical to SEQ ID NO: 52645
  misc_feature (1)..(378): tr|A0A4P6M6F8|A0A4P6M6F8_9FIRM Queuine tRNA-ribosyltran sferase OS=Blautia producta OX=33035 GN=tgt PE=3 SV=1

SEQ ID NO: 52654 - protein, 379 aa, Blautia sp.
  misc_feature (1)..(379): tr|A0A417CF46|A0A417CF46_9FIRM Queuine tRNA-ribosyltran sferase OS=Blautia sp. AM42-2 OX=2292976 GN=tgt PE=3 SV =1
MYKILKMEGRAKRAHMETVHGNIETPVFMNVGTAAAIKGAVSTEDLQQIGTQVELSNTYHLHVRPGDEVVKKMGGLHKFMVWDKPILTDSGGFQVFSLAGLRKIKEEGVYFHSHVDGRKIFMGPEESMQIQSNLASTIAMAFDECPSSVADRRYVQNSVDRTARWLQRCKDKMQELNQREDTINKHQLLFGINQGAIYEDIRIDHAKRISEMDLDGYAVGGLAVGETHEEMYHILDEVVPYLPKEKPTYLMGVGTPANILEGVERGVDFFDCVYPSRNGRHGHVYTNHGKMNLFNQKYELDPRPIEEGCQCPACRHYSRAYIRHLLKAKEMLGMRLCVLHNLYFYNNMMTEIRTALDEGNFASYKRAKLAGFEEYDKKE

SEQ ID NO: 52655 - protein, 380 aa, Blautia sp.
  misc_feature (1)..(380): tr|A0A417R7M3|A0A417R7M3_9FIRM Queuine tRNA-ribosyltran sferase OS=Blautia sp. OM07-19 OX=2292985 GN=tgt PE=3 S V=1
MAKYTLMKTEGRAKRAQFETVHGTIQTPVFMNVGTIGAIKGAVSTQDLYEIGTQVELSNTYHLHVRPGDKIVKQLGGLHKFMNWERPILTDSGGFQVFSLAKLRKIKEEGVHFQSHIDGHKIFMGPEESMQIQSNLGSTIAMAFDECPSSVADRDYVQKSVERTTRWLARCKAEMARLNSLPDTINKEQLLFGINQGAVYEDIRIEHAKEIAKMDLDGYAVGGLAVGETHEEMYRILDEVVPYLPQDKPTYLMGVGTPANILESVERGIDFFDCVYPSRNGRHGHVYTNHGKMNMFNAKYELDTRPIEEGCGCPACRHYSRAYIRHLLKAKEMLGMRLCVLHNLYFYNHMMEEIRDALDEGRFADYKKMRLEGFAAGEQK

SEQ ID NO: 52656 - protein, 383 aa, Blautia wexlerae; identical to SEQ ID NO: 52651
  misc_feature (1)..(383): tr|A0A174G526|A0A174G526_9FIRM Queuine tRNA-ribosyltran sferase OS=Blautia wexlerae OX=418240 GN=tgt PE=3 SV=1

SEQ ID NO: 52657 - protein, 370 aa, Blochmannia endosymbiont
  misc_feature (1)..(370): tr|A0A0E3Y740|A0A0E3Y740_9ENTR Queuine tRNA-ribosyltran sferase OS=Blochmannia endosymbiont of Polyrhachis (Hed omyrma) turneri OX=1505596 GN=tgt PE=3 SV=1
MKFQLLKTDGFARLGRFMFSRGLIETPVFMPVGTYGAVRSLTSEEMVNSGVKMISSNAFHLWLRPGEEILRSYNNLHSFMHWPGPILTDSGGFQVFSLGKFCKIMEEGICFCNFINGNMLIFDVKTSMRVQYNLQSDIVMVFDHCISYPCSWDDVKCSMEISLHWALKSREYFDQFNNLNMLFGIIHGGVYTDLRDVSIKHLIEIGFDGYAIGGLAVGESNDIMYGIVDHVCKKIPDDKPRYLMGVGKPADIIECVARGIDMFDCVLPTRNARNGSLFINRSGGVLKIRNACYKYDMNPIDKECDCYTCQYYSRSYLHHLNRCNEVLGLRLNTIHNIYYYQQLMDKLRHAINIGCLKKFIREFYFKLNCV

SEQ ID NO: 52658 - protein, 378 aa, Blochmannia floridanus
  misc_feature (1)..(378): sp|Q7VQB1|TGT_BLOFL Queuine tRNA-ribosyltransferase OS= Blochmannia floridanus OX=203907 GN=tgt PE=3 SV=1
MVFRVLQTDGDARVGKLTCHHGIIETPAFIPVGTYGVVKSVTSQEVAESGAQIILSNTFHLWLRPGLEIIKIHQNLHKFMNWMGPIITDSGGFQVFSLNKLRKITESGVYFKDPVNGSTIFLTPEKSMDIQYHLGSDIVLVFDECVSYPSTWEYIKNSVEISLNWAERSRLHFDKLHNSNMLFAIIQGGMYEELRNRSAQELINIKFDGYAIGGLSVGETPQERFRIVSYVCKIIPFDKPRYLMGVGKPQDLIEAVCLGVDMFDCVIPTRNARNGYLFTNNGVVRIRNAKYESDLDPIEEDCDCYTCQRYYSRSYLHYLDRCNESLGIRLNTIHNLRYYQRLMEEIRQSIRMKKLRKFVEAFNYKFNSVSTNNYLSNI

SEQ ID NO: 52659 - protein, 368 aa, Blochmannia pennsylvanicus
  misc_feature (1)..(368): sp|Q493H3|TGT_BLOPB Queuine tRNA-ribosyltransferase OS= Blochmannia pennsylvanicus (strain BPEN) OX=291272 GN=t gt PE=3 SV=1
MPFQLLQTDGHARLGRLICNQGIVDTPAFMPVGTYGSIKTLTAKEVEASGTQIILSNTFHLWLRPGLDIIKLHGSLHKFMSWNGPIITDSGGFQVFSLSKTRTITRKGVGFKSPIDGHLVFLTPEKSIEIQHDLQSDIVMIFDECISYPNTWDYVKKSVNISLNWAERSRLRFDTLHNSNMLFAIIQGGMYENLRDMSAKELINIGFDGYAIGGLSVGEPKKEMYRILSHICKLIPTNKPRYLMGAGKPEDLLEAVQKGIDMFDCVIPTRNARNGYLFVSDGTIKIRNAQYKKDTSPLDGNCDCYTCQHYSRSYLHHLDCCKEILGVRLNTIHNLRYYQRLMEELRQAIKTKSLQNFIDIFYKRVNRI

SEQ ID NO: 52660 - protein, 368 aa, Blochmannia vafer
  misc_feature (1)..(368): tr|E8Q613|E8Q613_BLOVB Queuine tRNA-ribosyltransferase OS=Blochmannia vafer (strain BVAF) OX=859654 GN=tgt PE= 3 SV=1
MIFQLLQTDGSARFGKLICNHGIINTPTFIPVGTYGVIKTVTPQEIKESGAQIILSNTFHLWLRLGQNIIKIHNNLHNFMNWNGPIITDSGGFQVFSLRKLRKITTAGVHFKNPVNGLSVCLTPEKSIEVQTDLGSDIVLVLDECVSYPNTWNYIKNSINLSLNWAERSRLYFDKLHNSNMLFAIVQGGIYRKLREESAIKLTDMNFDGYAIGGLAVGEPRQKMYDLISHICQILPVNKPRYLMGVGKPKDLVEAVLRGIDMFDCVIPTRNARNGYLFVYGGVVRIRNAKYKTDTGPIEKNCDCYTCKYYSRSYLHYLDKCREVLGMRLNTIHNLRFFQRLMENLRQAIKNKELSKFVNLFYRQIDII

SEQ ID NO: 52661 - protein, 383 aa, Unknown
  misc_feature (1)..(383): tr|A0A1U9VJQ7|A0A1U9VJQ7_9RALS Queuine tRNA-ribosyltran sferase OS=blood disease bacterium A2-HR MARDI OX=19446 48 GN=tgt PE=3 SV=1
MLKFDLLTTDGLARRGRMTLNHGVVETPIFMPVGTYGAVKAMSPVELKDIGAQIILGNTFHLWLRPALEVIDAHKGLHGFVGWDKPMLTDSGGFQVFSLGDLRKITEEGVHFASPINGDRLFLSPEISMQIQRRLNSDIVMQFDECTPYQIDGRPATEAEAAASMRMSLRWAQRSRNEFERENNPNALFGIVQGGMFEPLRDESLAGLQAIDAGAGGQGFGGYAIGGLSVGEPKEDMMRVLQHVAPRLPANKPHYLMGVGTPEDLVAGVAAGIDMFDCVMPTRNARNGWLFTRFGDIKIKNAVHRNDPRPLDETCGCYTCRNFSRAYLHHLQRVGEILGARLNTIHNLHYYLELMADMRAAIESHSFAAFRARFAADRARGAL

SEQ ID NO: 52662 - protein, 383 aa, Unknown; identical to SEQ ID NO: 52661
  misc_feature (1)..(383): tr|G2ZRD2|G2ZRD2_9RALS Queuine tRNA-ribosyltransferase OS=blood disease bacterium R229 OX=741978 GN=tgt PE=3 S V=1

SEQ ID NO: 52663 - protein, 382 aa, Bombella intestini
  misc_feature (1)..(382): tr|A0A1S8GQF5|A0A1S8GQF5_9PROT Queuine tRNA-ribosyltran sferase OS=Bombella intestini OX=1539051 GN=tgt PE=3 SV =1
MHWQKDAQCGQARAGWLHTRHGSVPTPTFMPVGTVGTVKGITMDNVRATGAGIVLGNTYHLMLRPTAERVQRLGGLHRMMDWPGPILTDSGGFQVMSLGPLRKMDEDGVTFRSHIDGSSHRLTPESSTDIQYKLDATITMAFDECPALPATKDVLEASMERSMRWAARSREAFIARPGYGQFGIVQGGTEQDLRERSALALRKIGFEGYAIGGLAVGEGQELMFSTLDYTTPMLPEDQPRYLMGVGTPDDLLGAVMRGCDMFDCVMPSRAGRTARAYTERGTLNLRNARFAEDTRPISPEDDSPMAGRYSRAYLHHLFRANEMLGPMLLTLHNLAYYQRLMRQIRAAIVAGTLEQTAAELRQNWAKGDWSEDEWPMPRYQQG

SEQ ID NO: 52664 - protein, 447 aa, Bombiscardovia coagulans
  misc_feature (1)..(447): tr|A0A261EQC9|A0A261EQC9_9BIFI Queuine tRNA-ribosyltran sferase OS=Bombiscardovia coagulans OX=686666 GN=tgt PE =3 SV=1
MGNYYDIAPELLYKAFAKVENMSAISTDKSNDPRTFSFESNTCLPSQASGLGRDGRRYGRTGTIHTPHGDIHTPAFIPVATQAAMKAVLPEQMKDLGAQALLSNAFHLFERPGEEVLDQAGGLGKFMGWRGPTFTDSGGFQVLSLGAGFKKTLAMDISGMKSDDVIAEGKERLAFVDEDGVTFKSPLNGSEHRFSAEISMGIQHKIGADIMFAFDELTTLMNTRGYQERSVERTFRWAKRCVIEHQRLTAERSNKPYQALYGVVQGANYEDLRRKAARQIASLDFDGVGIGGAIEKRLLGQTCAWICDEMPEDRPRHVLGIAAVDDIFAGVENGGDTFDCVSPARCGRNGAVFTRDGRWNIKRTQFRTDYRPIEEDCNCYACQHYSRAYICHLLHAHELNGYTLATIHNERFFVRLLDEIRAAIDADRFDEYKQETLKRFYANGSKG

SEQ ID NO: 52665 - protein, 378 aa, Bordetella ansorpii
  misc_feature (1)..(378): tr|A0A157LJY5|A0A157LJY5_9BORD Queuine tRNA-ribosyltran sferase OS=Bordetella ansorpii OX=288768 GN=tgt PE=3 SV =1
MTGLRYELLATDGAARRGRITLNHGTVETPIFMPVGTYGSVKAMLPHELKEIGSQIVLGNTFHLWLRPGTEIMQKHGGLHGFMQWDKPILTDSGGFQVFSLQGMRKITEEGVKFASPIDGSRLFLTPEESMRIQRGLNSDIVMVFDECTPYEIDGRPATAEEAARSMRMSLRWARRSRDEFDKLENPNALFGIVQGGMYESLRDESLAGLRDIGFHGYAIGGLSVGEPKEDMLRILAHVAPRLPADAPRYLMGVGTPEDLVEGVANGVDMFDCVMPTRNARNGWLFTRFGDLKIRNARYRDDTRPLDPTCGCHTCQNFSRAYLHHLQRANEITGARLNTLHNLHFYLDLMRQMREAIAEGRFDAWRAQFAADRARGVE

SEQ ID NO: 52666 - protein, 378 aa, Bordetella ansorpii
  misc_feature (1)..(378): tr|A0A157S5L2|A0A157S5L2_9BORD Queuine tRNA-ribosyltran sferase OS=Bordetella ansorpii OX=288768 GN=tgt PE=3 SV =1
MTGLRYELLATDGAARRGRITLNHGTVETPIFMPVGTYGSVKAMLPHELKEIGSQIVLGNTFHLWLRPGTGVMQKHGGLHGFMQWDKPILTDSGGFQVFSLQGMRKITEEGVKFASPIDGARLFLTPEESMRIQRGLNSDIVMVFDECTPYEIDGRPATAEEAARSMRMSLRWARRSRDEFDRLENPNALFGIVQGGMYESLRDESLAGLRDIGFHGYAIGGLSVGEPKEDMLRILAHVAPRLPADAPRYLMGVGTPEDLVEGVASGVDMFDCVMPTRNARNGWLFTRFGDLKIRNARYRDDTRPLDPTCGCHTCQHFSRAYLHHLQRANEITGARLNTLHNLHFYLDLMRQMREAVAEGRFDAWRAQFAADRARGID

SEQ ID NO: 52667 - protein, 378 aa, Bordetella avium
  misc_feature (1)..(378): tr|Q2KWC0|Q2KWC0_BORA1 Queuine tRNA-ribosyltransferase OS=Bordetella avium (strain 197N) OX=360910 GN=tgt PE=3 SV=1
MTGLKYELLATDGGARRGRLTLNHGVVETPIFMPVGTYGSVKAMLPHELKEIGAQIVLGNTFHLWLRPGTAIMEKHGGLHGFMHWDKPILTDSGGFQVFSLQGMRKITEEGVKFASPIDGARLFLTPEESMRIQRSLNSDIVMVFDECTPYEIDGRPATQEEAARSMRMSLRWARRSREEFDRLGNPNALFGIVQGGMYENLRDESLAGLTDIGFHGYAIGGLSVGEPKADMMRILGHVAPRLPQHAPRYLMGVGTPEDLVEGVSRGVDMFDCVMPTRNARNGWLFTRFGDVKIRNAKYRDDTRPLDPSCACHTCGHFSRAYLHHLQRANEITGARLNTLHNLHFYLTIMAEMREAIAAGRFQTWRTQFAADRARGVD

SEQ ID NO: 52668 - protein, 378 aa, Bordetella bronchialis
  misc_feature (1)..(378): tr|A0A193FEU8|A0A193FEU8_9BORD Queuine tRNA-ribosyltran sferase OS=Bordetella bronchialis OX=463025 GN=tgt PE=3 SV=1
MTGLDFQLLATDGAARRGRMTLNHGVVETPIFMPVGTYGSVKAMMPHELAEVGAQIVLGNTFHLWLRPGTDIMEKHGGLHGFMGWDKPILTDSGGFQVFSLQGMRKITEEGVRFASPIDGARLFLTPEESMRIQRALNSDIVMVFDECTPYEIEGRAATEEEAARSMRMSLRWARRSRDAFDQSGNPNALFGIVQGGMYERLRDESLAGLLDIGFHGYAIGGLSVGEPKEDMMRILAHVAPRLPAQAPRYLMGVGTPEDLVAGVAQGVDMFDCVMPTRNARNGWLFTRHGDVKIRNARYRDDTRPLDPTCACHTCRHFTRAYLHHLQRANEITGARLNTLHNLHFYLALMGEMREAIAAGRFEAWREEFAADRARGVD

SEQ ID NO: 52669 - protein, 378 aa, Bordetella bronchiseptica
  misc_feature (1)..(378): tr|A0A0H3LJJ6|A0A0H3LJJ6_BORBR Queuine tRNA-ribosyltran sferase OS=Bordetella bronchiseptica (strain ATCC BAA-5 88 / NCTC 13252 / RB50) OX=257310 GN=tgt PE=3 SV=1
MTGLQFELLATDGGARRGRLTLNHGVVETPIFMPVGTYGSVKAMLPHELKEIGAQIVLGNTFHLWLRPGTAIMEKHGGLHGFMQWDKPILTDSGGFQVFSLQGMRKITEEGVKFASPIDGARLFLTPEESMRIQRSLNSDIVMVFDECTPYEIDGRPASVDEAARSMRMSLRWARRSRDEFDRLGNPNALFGIVQGGMYEALRDESLAGLAEIGFHGYAIGGLSVGEPKEDMMRILAHVTPRLPAQAPRYLMGVGTPEDLVEGVARGVDMFDCVMPTRNARNGWLFTRYGDVKIRNARYRDDTRPLDPSCACHTCGHFSRAYLHHLQRANEITGARLNTLHNLHFYLAIMEEMREAIAAGRFEAWRAQFAADRARGVD

SEQ ID NO: 52670 - protein, 378 aa, Bordetella bronchiseptica; identical to SEQ ID NO: 52669
  misc_feature (1)..(378): tr|A0A5A4MCL7|A0A5A4MCL7_BORBO Queuine tRNA-ribosyltran sferase OS=Bordetella bronchiseptica OX=518 GN=tgt PE=3 SV=1

SEQ ID NO: 52671 - protein, 392 aa, Bordetella flabilis
  misc_feature (1)..(392): tr|A0A193GIF4|A0A193GIF4_9BORD Queuine tRNA-ribosyltran sferase OS=Bordetella flabilis OX=463014 GN=tgt PE=3 SV =1
MTGLHFELLATDGAARRGRITLNHGVVETPIFMPVGTYGSVKAMLPHELDEVGAQIVLGNTFHLWLRPGTDIMEKHGGLHGFMGWNRPILTDSGGFQVFSLQGMRKITEEGVRFASPIDGARLFLTPEESMRIQRALNSDIVMVFDECTPYEIDGRAATEEEAARSMRMSLRWARRSRDAFDGLGNPNALFGIVQGGMYERLRDESLAGLQDIGFHGYAIGGLSVGEPKEDMMRILGHVAPRLPAQAPRYLMGVGTPEDLVAGVAQGIDMFDCVMPTRNARNGWLFTRYGDIKIRNARYRDDTRPLDGSCACHTCRLFTRAYLHHLQRANEITGARLNTLHNLHFYLALMAEMRDAIAAGRFEAWRARFAADRARGVDQGGAGRHGDNPGTP

SEQ ID NO: 52672 - protein, 378 aa, Bordetella genomosp.
  misc_feature (1)..(378): tr|A0A261S3N6|A0A261S3N6_9BORD Queuine tRNA-ribosyltran sferase OS=Bordetella genomosp. 10 OX=1416804 GN=tgt PE =3 SV=1
MNGLNFELLATDGAARRGRITLNHGVVETPIFMPVGTYGSVKAMLPHELKEVGAQIVLGNTFHLWLRPGNEIMRKHGGLHGFMGWDKPILTDSGGFQVFSLQGMRKITEEGVKFASPIDGARLFLTPEESMAIQRALNSDIAMVFDECTPYEIDGRAATQEEAAKSMRMSLRWARRSRDAFDKLENPNALFGIVQGGMYENLRDESLAGLADIGFHGYAIGGLSVGEPKEDMLRILTHVAPRLPVNAPRYLMGVGTPEDLVDGVARGIDMFDCVMPTRNARNGWLFTRYGDVKIRNARYRDDTRPLDPTCRCHTCGHFSRAYLHHLQRANEITGARLNTLHNLHFYLNLMDEMRGAIAAGTFQAWREQFAADRARGVD

SEQ ID NO: 52673 - protein, 378 aa, Bordetella genomosp.
  misc_feature (1)..(378): tr|A0A261TWP6|A0A261TWP6_9BORD Queuine tRNA-ribosyltran sferase OS=Bordetella genomosp. 4 OX=463044 GN=tgt PE=3 SV=1
MTGLNFELLATDGQARRGRVTLNHGVVETPIFMPVGTYGSVKAMLPHELKEIGAQIVLGNTFHLWLRPGTDILDRHGGLHGFMQWDKPILTDSGGFQVFSLQGMRKITEEGVKFASPIDGAKLFLTPEESMRIQRSLNSDIVMVFDECTPYQIDGRPATSEEAARSMRMSLRWARRSREEFDRLENPNALFGIVQGGMYESLREESLAGLTDIGFHGYAIGGLSVGEPKEDMMRILAHVTPRLPTQAPRYLMGVGTPEDLVEGVSRGVDMFDCVMPTRNARNGWLFTRYGDIKIRNAKYRDDTRPLDPSCACHTCAHFSRAYLHHLQRANEITGARLNTLHNLHFYLTIMGEMREAIAAGTFQAWRAKFAADRARGIE

SEQ ID NO: 52674 - protein, 378 aa, Bordetella hinzii
  misc_feature (1)..(378): tr|A0A0H4W211|A0A0H4W211_9BORD Queuine tRNA-ribosyltran sferase OS=Bordetella hinzii OX=103855 GN=tgt PE=3 SV=1
MTGLSFELLATDGGARRGRVTLNHGVVETPIFMPVGTYGSVKAMLPHELKEIGSQIVLGNTFHLWLRPGTGIMEKHGGLHGFMQWDKPILTDSGGFQVFSLQGMRKITEEGVKFASPIDGARLFLTPEESMRIQRSLNSDIVMVFDECTPYEIDGRPATPEEAARSMRMSLRWARRSREEFDRLGNPNALFGIVQGGMYEHLRDESLAGLTDIGFHGYAIGGLSVGEPKEDMMRILGHVAPRLPQHAPRYLMGVGTPEDLVEGVARGVDMFDCVMPTRNARNGWLFTRFGDVKIRNAKYRDDTRPLDPSCACHTCRHFSRAYLHHLQRANEITGARLNTLHNLHFYLTIMGEMREAIAAGRFQAWRAQFAADRARGVD

SEQ ID NO: 52675 - protein, 378 aa, Bordetella holmesii
  misc_feature (1)..(378): tr|A0A158M1X3|A0A158M1X3_9BORD Queuine tRNA-ribosyltran sferase OS=Bordetella holmesii CDC-H585-BH OX=1331206 G N=tgt PE=3 SV=1
MTGLSFELLATDGGARRGRMTLNHGVVETPIFMPVGTYGSVKAMLPHELKEIGSQIVLGNTFHLWLRPGTAIMEKHGGLHGFMQWDKPILTDSGGFQVFSLQGMRKITEEGVKFASPIDGSRLFLTPEESMRIQRSLNSDIVMVFDECTPYEIDGRPATQEEAARSMRMSLRWARRSRDEFDRLENPNALFGIVQGGMYENLRDESLAGLTDVGFHGYAIGGLSVGEPKEDMMRILGHVAPRLPQHAPRYLMGVGTPEDLVEGVSRGVDMFDCVMPTRNARNGWLFTRFGDVKIRNAKYRDDTRPLDPSCACHTCQTFSRAYLHHLQRANEITGARLNTLHNLHFYLTIMGEMREAIAAGRFQTWRAQFAADRARGVD

SEQ ID NO: 52676 - protein, 378 aa, Bordetella parapertussis
  misc_feature (1)..(378): tr|Q7WB61|Q7WB61_BORPA Queuine tRNA-ribosyltransferase OS=Bordetella parapertussis (strain 12822 / ATCC BAA-58 7 / NCTC 13253) OX=257311 GN=tgt PE=3 SV=1
MTGLQFELLATDGGARRGRLTLNHGVVETPIFMPVGTYGSVKAMLPHELKEIGAQIVLGNTFHLWLRPGTAIMEKHGGLHGFMQWDKPILTDSGGFQMFSLQGMRKITEEGVKFASPIDGARLFLTPEESMRIQRSLNSDIVMVFDECTPYEIDGRPASVDEAARSMRMSLRWARRSRDEFDRLGNPNALFGIVQGGMYEALRDESLAGLAEIGFHGYAIGGLSVGEPKEDMMRILAHVTPRLPAQAPRYLMGVGTPEDLVEGVARGVDMFDCVMPTRNARNGWLFTRYGDVKIRNARYRDDTRPLDPSCACHTCGHFSRAYLHHLQRANEITGARLNTLHNLHFYLAIMEEMREAIAAGRFEAWRAQFAADRARGVD

SEQ ID NO: 52677 - protein, 378 aa, Bordetella parapertussis; identical to SEQ ID NO: 52669
  misc_feature (1)..(378): tr|K0M9Z5|K0M9Z5_BORPB Queuine tRNA-ribosyltransferase OS=Bordetella parapertussis (strain Bpp5) OX=1208660 GN =tgt PE=3 SV=1

SEQ ID NO: 52678 - protein, 378 aa, Bordetella pertussis
  misc_feature (1)..(378): tr|A0A0N2ILD7|A0A0N2ILD7_BORPT Queuine tRNA-ribosyltran sferase OS=Bordetella pertussis H921 OX=1331266 GN=tgt PE=3 SV=1
MTGLQFELLATDGGARRGRLTLNHGVVETPIFMSVGTYGSVKAMLPHELEDIGAQIVLGNTFHLWLRPGTAIMEKHGGLHGFMQWDKPILTDSGGFQVFSLQGMRKITEEGVKFASPIDGARLFLTPEESMRIQRSLNSDIVMVFDECTPYEIDGRPASIDEDARSMRMSLRWARRSRDEFDRLGNPNALFGIVQGGMYEALRDESLAGLAEIGFHGYAIGGLSVGEPKEDMMRILAHVTPRLPAQAPRYLMGVGTPEDLVEGVARGVDMFDCVMPTRNARNGWLFTRYGDVKIRNARYRDDTRPLDPSCACHTCGHFSRAYLHHLQRANEITGARLNTLHNLHFYLAIMGEMREAIAAGRFEAWRAQFAADRARGVD

SEQ ID NO: 52679 - protein, 378 aa, Bordetella pertussis; identical to SEQ ID NO: 52678
  misc_feature (1)..(378): tr|A0A171JZ12|A0A171JZ12_BORPT Queuine tRNA-ribosyltran sferase OS=Bordetella pertussis 2356847 OX=1331248 GN=t gt PE=3 SV=1

SEQ ID NO: 52680 - protein, 378 aa, Bordetella petrii
  misc_feature (1)..(378): tr|A9HZX0|A9HZX0_BORPD Queuine tRNA-ribosyltransferase OS=Bordetella petrii (strain ATCC BAA-461 / DSM 12804 / CCUG 43448) OX=340100 GN=tgt PE=3 SV=1
MTGLNFELLATDGAARRGRITLNHGVVETPIFMPVGTYGSVKAMLPHELKDIGAQIVLGNTFHLWLRPGTDILDRHGGLHGFMQWDKPILTDSGGFQVFSLQGMRKITEEGVKFASPIDGARLFLTPEESMRIQRSLNSDIVMVFDECTPYQIDGRPATAEEAARSMRMSLRWARRSREEFDRLGNPNALFGIVQGGMFEALRDESLAGLADIGFHGYAIGGLSVGEPKEDMMRILAHVAPRLPTHAPRYLMGVGTPEDLVEGVARGVDMFDCVMPTRNARNGWLFTRYGDLKIRNAKYRDDTRPLDPTCSCHTCAHFSRAYLHHLQRANEITGARLNTLHNLHFYLAIMGEMREAIAAGTFDAWRARFAADRQRGID

SEQ ID NO: 52681 - protein, 378 aa, Bordetella pseudohinzii
  misc_feature (1)..(378): tr|A0A0J6BZC6|A0A0J6BZC6_9BORD Queuine tRNA-ribosyltran sferase OS=Bordetella pseudohinzii OX=1331258 GN=tgt PE =3 SV=1
MTGLSFELLATDGGARRGRMTLNHGVVETPIFMPVGTYGSVKAMLPHELKEIGSQIVLGNTFHLWLRPGTEIMEKHGGLHGFMQWDKPILTDSGGFQVFSLQGMRKITEEGVKFASPIDGARLFLTPEESMRIQRSLNSDIVMVFDECTPYEIDGRPATPEEAARSMRMSLRWARRSREEFDRLGNPNALFGIVQGGMYEHLRDESLAGLTDIGFHGYAIGGLSVGEPKEDMMRILGHVAPRLPQHAPRYLMGVGTPEDLVEGVARGVDMFDCVMPTRNARNGWLFTRFGDVKIRNAKYRDDTRPLDPSCACHTCRHFSRAYLHHLQRANEITGARLNTLHNLHFYLTIMGEMREAIAAGRFQAWRAQFAADRARGVD

SEQ ID NO: 52682 - protein, 377 aa, Bordetella sp.
  misc_feature (1)..(377): tr|A0A1E3ZA53|A0A1E3ZA53_9BORD Queuine tRNA-ribosyltran sferase OS=Bordetella sp. SCN 67-23 OX=1660091 GN=tgt P E=3 SV=1
MNGLKFELLATDGQARRGRVTLNHGVVETPIFMPVGTYGTVKAMAPYELDEVGAQIVLGNTFHLWLRPGTQIIDAHGGLHGFMQWHKPILTDSGGFQVFSLEGLRKITEEGVRFASPIDGARLMLTPEESMRIQRSLNSDIAMVFDECTPYAIDGRPATTEEAATSMRMSLRWARRSRDEFEALENPNALFGIVQGGMFESLRDESLAGLKDIGFHGYAIGGLSVGEPKEDMLRILAHVAPRLPQDAPRYLMGVGTPEDLVDGVAAGVDMFDCVMPTRNARNGWLFTRYGDVKIRNARYRDDTRPLDETCGCYTCQNFSRSYLHHLFRSNEILGARLNTIHNLHYYLQLMQEMRDAIAGGVFAAWRAEFAANRARGV

SEQ ID NO: 52683 - protein, 378 aa, Bordetella sp.
  misc_feature (1)..(378): tr|A0A3T0NHP1|A0A3T0NHP1_9BORD Queuine tRNA-ribosyltran sferase OS=Bordetella sp. J329 OX=1977852 GN=tgt PE=3 S V=1
MTGLNFELLATDGLARRGRMTLNHGVVETPIFMPVGTYGSVKAMLPHELEEIGAQIVLGNTFHLWLRPGVEIMQKHGGLHGFMQWQRPILTDSGGFQVFSLQGMRKITEEGVRFASPIDGARLFLTPEESMRIQRGLNSDIAMVFDECTPYEIKGRPATVDEAATSMRMSLRWARRSRDAFDQLENPNALFGIVQGGMYESLRDESLAGLTDIGFHGYAIGGLSVGEPKAEMIRILQHVAPCMPQDKPRYLMGVGTPEDLVEGVANGVDMFDCVMPTRNARNGWLFTRHGDVKIRNARYRDDTRPLDMHCACHTCRQFSRAYLHHLQRANEITGARLNTLHNLHFYLQIMQEMRDAIAAGTFQSWREQFAADRARGVD

SEQ ID NO: 52684 - protein, 378 aa, Bordetella trematum
  misc_feature (1)..(378): tr|A0A157Q3B2|A0A157Q3B2_9BORD Queuine tRNA-ribosyltran sferase OS=Bordetella trematum OX=123899 GN=tgt PE=3 SV =1
MTGLNFELLATDGAARRGRLTLNHGEVQTPIFMPVGTYGSVKAMLPQELKDIGAQIVLGNTFHLWLRPGTRIMEQHGGLHGFMQWDKPILTDSGGFQVFSLQGMRKITEEGVKFASPIDGARLFLTPEESMRIQRSLNSDIVMVFDECTPYEIDGRAATQEEAARSMRMSLRWARRSREEFDRLANPNALFGIVQGGMYENLRDESLAGLTDIGFHGYAIGGLSVGEPKEDMMRVLGHVAPRLPANAPRYLMGVGTPEDLVEGVARGVDMFDCVMPTRNARNGWLFTRFGDVKIRNAKYRDDTRPLDPSCRCHTCSTFSRAYLHHLQRANEITGARLNTLHNLHFYLTIMEEMREAIAAGRFDAWRAQFAADRQRGVD

SEQ ID NO: 52685 - protein, 375 aa, Borrelia afzelii
  misc_feature (1)..(375): tr|Q0SM42|Q0SM42_BORAP Queuine tRNA-ribosyltransferase OS=Borrelia afzelii (strain PKo) OX=390236 GN=tgt PE=3 SV=1
MFSVIKNDKHSNARVGFLNLPHGRVDTPCFMPVGTLGAMKGLKHTVLEKLECNLMLANTYHLYLRPGIKTIEKYGGLHNFTTWNKNFLTDSGGFQVFSLSGLRKIDLKGVHFKSHLDGSHHYFTPEGVFAMQETFGSDIIMPLDICSSYGIDYNEANLYTNITTNWARSTFKAYKNKKEGYNGLLFLITQGNFFKDLRKRSINDILELDSPGIAIGGISVGEPREKYLEILEYSSLLIPREKPRYVMGIGTPHYILDAIYHGIDIFDCVNPARIARHGSLLTDNGIMRIGRKEYKDDTSRVEKDCGCTLCTRYSRGYLRHLIKSRELFGIILASEHNIYYMFRLISKIRTAILNDDFLNFRTSYLKKYEEGNFDE

SEQ ID NO: 52686 - protein, 405 aa, Borrelia anserina
  misc_feature (1)..(405): tr|W5SPE6|W5SPE6_BORAN Queuine tRNA-ribosyltransferase OS=Borrelia anserina BA2 OX=1313293 GN=tgt PE=3 SV=1
MQVRYLLFCLLLLILSFIILYVSSGFFGSFMFNILRTDRSSAARVGILELPHGKVTTPCFMPVGTVGTMKALKHDVLDKLGCNLMLANTYHLYLRPGIDVIKEYGSLHSFTTWDKNFLTDSGGFQVFSLSNLRKIEIEGVNFKSHIDGSNHYFTPESVFKMQEIFESDIIMALDICSSYGIDYSEASLYTNITTSWARRTLRAYENRKEGYNGLLFLITQGNFFKDLRKMSTEAILELNSPGIAIGGISVGEPRDKYLEILEYNSSLIPKDKPRYVMGIGTPHYILDAIYYGIDIFDCVNPTRIARHGSLLTDNGILRIKRAEFNVDTCPVEKDCSCSLCTRYSRGYLRHLIKSGETLGVMLASEHNIHYMFRLIQKARDAIMNDNFTKFRKLYLNKYDEGNLNE

SEQ ID NO: 52687 - protein, 375 aa, Borrelia burgdorferi
  misc_feature (1)..(375): sp|O51749|TGT_BORBU Queuine tRNA-ribosyltransferase OS= Borrelia burgdorferi (strain ATCC 35210 / B31 / CIP 102 532 / DSM 4680) OX=224326 GN=tgt PE=3 SV=1
MFSVIKNDKHFNARVGFLNLPHGRVDIPCFMPVGTLGAMKGLKHAVLEKLECNLMLANTYHLYLRLGIKTVEKYVGLHNFTIWNKNFLTDSGGFRVFSFSDLRKIDLKGVHFKSHIDGSYHYFTSEGIFAMQEIFGSDIIMPLDICSSYGIDYNEANLYTNITTNWASSTFKSSKNRKEGYNGLLFLITQGNFFKDLRKRSINDILELDSPGIAIGGISVGEPREKYLEILEYSFLLIPKEKPRYVMGIGTPHYILNAIYYGIDIFDCFNPARITRHGSLLTDNGIMCIGRKEYKDDTSKVEKNCICTLCKRYSRGYLRHLIKSKELFGIVLASEHNIHYMFRLISKIRAAILNDDFLNFRTSYLKKYEEENFDE

SEQ ID NO: 52688 - protein, 375 aa, Borrelia burgdorferi
  misc_feature (1)..(375): sp|B7J0Q4|TGT_BORBZ Queuine tRNA-ribosyltransferase OS= Borrelia burgdorferi (strain ZS7) OX=445985 GN=tgt PE=3 SV=1
MFSVIKNDKHFNARVGFLNLPHGRVDIPCFMPVGTLGAMKGLKHAVLEKLECNLMLANTYHLYLRLGIKTVEKYVGLHNFTTWNKNFLTDSGGFRVFSFSDLRKIDLKGVHFKFHIDGSYHYFTSEGIFAMQEIFGSDIIMPLDICSSYGIDYNEANLYTNITTNWASSTFKSSKNRKEGYNGLLFLITQGNFFKDLRKRSINDILELDSPGIAIGGISVGEPREKYLEILEYSFLLIPKEKPRYVMGIGTPHYILNAIYYGIDIFDCFNPARITRHGSLLTDNGIMCIGRKEYKDDTSKVEKNCICTLCKRYSRGYLRHLIKSKELFGIVLASEHNIHYMFRLISKIRAAILNDDFLNFRTSYLKKYEEENFDE

SEQ ID NO: 52689 - protein, 375 aa, Borrelia coriaceae
  misc_feature (1)..(375): tr|W5SVQ2|W5SVQ2_9SPIR Queuine tRNA-ribosyltransferase OS=Borrelia coriaceae Co53 OX=1313292 GN=tgt PE=3 SV=1
MFSIIKDDKDSNARLGILELPHGKVETPCFMPVGTLGAMKALNHDVLEKLGCNLMLANTYHLYLRPGIDVIKKYGGLHNFTTWNKNFLTDSGGFQVFSLSNFRKIETEGVDFKSHIDGSRHYFTPESVFKLQEIFESDIIMALDICSSYGIDYSEASLYTNITTSWARRTLRAYENRKEGYDGLLFLITQGNFFKDLRKRSTEAILEFNSPGIAIGGISVGEPKDKYLEILEYNSSLIPKSKPKYVMGIGTPHYILDAIYYGIDIFDCVNPMRIARHGSLLTDNGVLRIKRAEFNVDTCPVERNCSCTLCTRYTRGYLRHLIKSGETLGVMLASEHNIHYMFRLIQKSRDAIMNDDFIKFRKLYLRKYDEGNFYE

SEQ ID NO: 52690 - protein, 375 aa, Borrelia crocidurae
  misc_feature (1)..(375): tr|I0FDP7|I0FDP7_BORCA Queuine tRNA-ribosyltransferase OS=Borrelia crocidurae (strain Achema) OX=1155096 GN=tg t PE=3 SV=1
MFNIIKNDKNSNARLGILELPHGNVSTPCFMPVGTLGVMKALKHDVLEKLECNLMLANTYHLYLRPGIDVIKKYGNLHNFTTWNKNFLTDSGGFQVFSLSNFRKIEDEGVDFKSHIDGSRHYFTPESVFSMQETFESDIIMALDICSPYGIDYDEASLYTNITTSWARRTLCAYKNRKEGYEGLLFLITQGNFFKDLRKRSTESILELNSPGIAIGGISVGEPRDRYLEILEYNSSLIPKDKPKYVMGIGTPHYILDAIYNGIDIFDCVNPTRIARHGSLLTDNGILRINRAEFRFDTCSVERECSCTLCTRYSRGYLRHLFKSEEALGVMLASEHNIHYMFRLINKAKNAIMNDNFVKFRKLYLDKYDEGNLNE

SEQ ID NO: 52691 - protein, 375 aa, Borrelia crocidurae
  misc_feature (1)..(375): tr|W5SP74|W5SP74_9SPIR Queuine tRNA-ribosyltransferase OS=Borrelia crocidurae DOU OX=1293575 GN=tgt PE=3 SV=1
MFNIIKNDKNSNARLGILELPHGNVATPCFMPVGTLGVMKALKHDVLEKLECNLMLANTYHLYLRPGIDVIKKYGNLHNFTTWNKNFLTDSGGFQVFSLSNFRKIEDEGVDFKSHIDGSRHYFTPESVFSMQETFESDIIMALDICSPYGIDYDEASLYTNITTSWARRTLCAYKNRKEGYEGLLFLITQGNFFKDLRKRSTESILELNSPGIAIGGISVGEPRDRYLEILEYNSSLIPKDKPKYVMGIGTPHYILDAIYNGIDIFDCVNPTRIARHGSLLTDNGILRINRAEFRFDTCSVERECSCTLCTRYSRGYLRHLFKSEESLGVMLASEHNIHYMFRLINKAKNAIMNDNFVKFRKLYLDKYDEGNLNE

SEQ ID NO: 52692 - protein, 299 aa, Borrelia duttonii
  misc_feature (1)..(299): tr|W6TXC1|W6TXC1_9SPIR Queuine tRNA-ribosyltransferase OS=Borrelia duttonii CR2A OX=1432657 GN=BDCR2A_00995 PE =3 SV=1
MHNFTTWNKNFLTDSGGFQVFSLSNFRKIEDEGVDFKSHIDGSRHYFTPESVFSMQETFESDIIMALDICSPYGIDYDEASLYTNITTSWARRTLCAYKNRKEGYEGLLFLITQGNFFKDLRKRSTESILELNSPGIAIGGISVGEPRDRYLEILEYNSSLIPKDKPKYVMGIGTPHYILDAIYNGIDIFDCVNPTRIARHGSLLTDNGILRINRAEFRFDTCSVERECSCTLCMRYSRGYLRHLFKSEEALGVMLASEHNIHYMFRLINKAKNAIMNDNFVKFRKLYLDKYDEGNLNE

SEQ ID NO: 52693 - protein, 375 aa, Borrelia duttonii
  misc_feature (1)..(375): sp|B5RN03|TGT_BORDL Queuine tRNA-ribosyltransferase OS= Borrelia duttonii (strain Ly) OX=412419 GN=tgt PE=3 SV= 1
MFNIIKNDKNSNARLGILELPHGNVATPCFMPVGTLGVMKALKHDVLEKLGCDLMLANTYHLYLRPGIDVIKKYGNLHNFTTWNKNFLTDSGGFQVFSLSNFRKIEDEGVDFKSHIDGSRHYFTPESVFSMQETFESDIIMALDICSPYGIDYDEASLYTNITTSWARRTLCAYKNRKEGYEGLLFLITQGNFFKDLRKRSTESILELNSPGIAIGGISVGEPRDRYLEILEYNSSLIPKDKPKYVMGIGTPHYILDAIYNGIDIFDCVNPTRIARHGSLLTDNGILRINRAEFRFDTCSVERECSCTLCTRYSRGYLRHLFKSEEALGVMLASEHNIHYMFRLINKAKNAIMNDNFVKFRKLYLDKYDEGNLNE

SEQ ID NO: 52694 - protein, 375 aa, Borrelia hermsii
  misc_feature (1)..(375): tr|A0A0E1C2C9|A0A0E1C2C9_BORHE Queuine tRNA-ribosyltran sferase OS=Borrelia hermsii MTW OX=1313291 GN=tgt PE=3 SV=1
MFNIIKNDKNSNARIGVLELPHGKVTTPCFMPVGTLGAMKALKHDVLDQLGCNLMLANTYHLYLRPGIDVIKEYGSLHNFTTWNKNFLTDSGGFQVFSLSNFRKIETEGVDFKSHIDGSRHYFTPESVFKMQEIFESDIIMALDICSSYGIDYSEASLYTNITTSWARRTLRAYENRKEGYDGLLFLITQGNFFKDLRRRSTEAILELNSPGIAIGGISVGEPRDKYLEILEYNSSLIPKDKPKYVMGIGTPHYILDAIYYGIDIFDCVNPTRIARHGSLLTDNGVLRIKRAEFNIDTSPVERDCFCTLCTRYSRAYLRHLIKSGETLGVMLASEHNIHYMFRLIQKARDAIMNDDFTQFRKLYLSKYDEGNFHE

SEQ ID NO: 52695 - protein, 375 aa, Borrelia hermsii
  misc_feature (1)..(375): sp|B2S1F3|TGT_BORHD Queuine tRNA-ribosyltransferase OS= Borrelia hermsii (strain HS1 / DAH) OX=314723 GN=tgt PE =3 SV=1
MFNIIKNDKNSNARIGVLELPHGKVTTPCFMPVGTLGVMKALKHDVLEKLGCNLMLANTYHLYLRPGIDVIKEYGSLHNFTTWNKNFLTDSGGFQVFSLSNFRKIETEGVDFKSHIDGSRHYFTPESVFKMQEIFESDIIMALDICSSYGIDYSEASLYANITTSWARRTLRAYENRKEGYDGFLFLITQGNFFKDLRKRSTEAILELNSPGIAIGGISVGEPRDKYLEILEYNSSLIPKDKPKYVMGIGTPHYILDAIYYGIDIFDCVNPTRIARHGSLLTDNGILRIKRAGFNVDTSPIEQDCSCTLCTRYSRGYLRHLIKSGETLGVMLASEHNIHYMFRLIQKARNAIMNDDFTQFRKLYLSKYDEGNFNE

SEQ ID NO: 52696 - protein, 375 aa, Borrelia mayonii
  misc_feature (1)..(375): tr|A0A1L6VUD8|A0A1L6VUD8_9SPIR Queuine tRNA-ribosyltran sferase OS=Borrelia mayonii OX=1674146 GN=tgt PE=3 SV=1
MFSVIKNDKHSNARVGFLNLPHGRVDTPCFMPVGTLGAMKGLKHTVLEKLECNLMLANTYHLYLRPGIKTIEKYGGLHNFTTWNKNFLTDSGGFQVFSLSGLRKIDLKGVHFKSHLDGSYHYFTPEGVFAMQEIFGSDIIMPLDICSSYGIDYNEANLYTNITTNWARSTFKSYRNRKEGCNGLLFLITQGNFFKDLRKRSINDILELDSPGIAIGGISVGEPREKYLEILEYSSLLIPKEKPRYVMGIGTPRYILDAIYYGIDIFDCVNPARIARHGSLLTDNGVMRIGRKEYKDDTFQVDKNCSCTLCTRYSRGYLRHLIKSKELFGIVLASEHNIHYMFRLISKIRTAILNDNFLNFRTSYLKKYEEGNFDE

SEQ ID NO: 52697 - protein, 375 aa, Borrelia miyamotoi
  misc_feature (1)..(375): tr|W5SCB8|W5SCB8_9SPIR Queuine tRNA-ribosyltransferase OS=Borrelia miyamotoi FR64b OX=1292392 GN=tgt PE=3 SV=1
MFNIIKTDKNSYARLGMLKLPHGKVRTPCFMPVGTLGAMKGLKHDVLDKLGCNLILANTYHLYLRPGVDVIKEYGNLHNFTAWNKNFLTDSGGFQVFSLSNLRKIEIDGIDFRSHIDGSRHYFTPESVFKMQEIFESDIIMALDICSSYGIDYSEANLYTNITTSWARRTLSAYENRKDGYDGLLFLITQGNFFKDLRKRSTEDILDLDSPGVAIGGISVGEPRDKYLEILEYNSSLIPKDKPKYVMGIGTPHYILDAIYYGVDIFDCVNPTRIARHGSLLTDNGILRIKRSEFAVDTSPVEQGCYCTLCTRYSRGYLRHLIKSGETFGVMLASEHNIHYMFRLIEKARNAIMNDDFIKFKKLYLSKYDEGNCNE

SEQ ID NO: 52698 - protein, 375 aa, Borrelia miyamotoi; identical to SEQ ID NO: 52697
  misc_feature (1)..(375): tr|A0A2D1Z7Z5|A0A2D1Z7Z5_9SPIR Queuine tRNA-ribosyltran sferase OS=Borrelia miyamotoi OX=47466 GN=tgt PE=3 SV=1

SEQ ID NO: 52699 - protein, 375 aa, Borrelia parkeri
  misc_feature (1)..(375): tr|W5SR40|W5SR40_BORPR Queuine tRNA-ribosyltransferase OS=Borrelia parkeri SLO OX=1313294 GN=tgt PE=3 SV=1
MFSIIKNDKNSNARLGVLELPHGKVETPCFMPVGTLGAMKALNHDVLEKLGCNLMLANTYHLYLRPGIDVIKKYGSLHNFTAWNKNFLTDSGGFQVFSLANFRKIETEGVDFKSHIDGSRHYFTPESVFKMQEIFESDIIMALDICSSYGIDYSEASLYTNITTSWARRTLRAYENRKEGYDGLLFLITQGNFFKDLRKRSTEAILELDSPGIAIGGISVGEPRDKYLEILEYNSSLIPKVKPKYVMGIGTPHYILDAIYYGIDIFDCVNPTRIARHGSLLTDNGILRIKRAEFNFDTCPVERDCSCTLCTRYSRGYLRHLIKSEETFGVMLASEHNIHYMFRLIKKARNAIMNGDFTKFRKLYLSKYDEGNFNE

SEQ ID NO: 52700 - protein, 375 aa, Borrelia recurrentis
  misc_feature (1)..(375): sp|B5RQE7|TGT_BORRA Queuine tRNA-ribosyltransferase OS= Borrelia recurrentis (strain A1) OX=412418 GN=tgt PE=3 SV=1
MFNIIKNDKNSNARLGILELPHGNVATPCFMPVGTLGVMKALKHDVLEKLGCDLMLANTYHLYLRPGIDVIKKYGNLHNFTTWNKNFLTDSGGFQVFSLSNFRKIEDEGVDFKSHIDGSRHYFTPESVFSMQETFESDIIMALDICSPYGIDYDEASLYTNITTSWARRTLCAYKNRKEGYEGLLFLITQGNFFKDLRKRSTELILELNSPGIAIGGISVGEPRDRYLEILEYNSSLIPKDKPKYVMGIGTPHYILDAIYNGIDIFDCVNPTRIARHGSLLTDNGILRINRAEFCFDTCSVERECSCTLCTRYSRGYLRHLFKSEEALGVMLASEHNIHYMFRLINKTKNAIMNDNFVKFRKLYLDKYDEGNLNE

SEQ ID NO: 52701 - protein, 375 aa, Borrelia sp.
  misc_feature (1)..(375): tr|A0A5J6WDM1|A0A5J6WDM1_9SPIR tRNA guanosine(34) trans glycosylase Tgt OS=Borrelia sp. CA690 OX=1476873 GN=tgt PE=4 SV=1
MFSIIKGDKHSNARVGFLNLPHGRVDTPCFMPVGTLGAMKGLKHTVLEKLECNLMLANTYHLYLRPGIKTIERYGGLHNFTTWNKNFLTDSGGFQVFSLSGLRKIDLEGVHFKSHLDGSYHHFTPEGVFAMQEIFGSDIIMSLDICSSYGIDYDEANLYTNITTNWARRTFNSYKNKKEGYSGLLFLITQGNFFKDLRKRSINDILELDSPGIAIGGISVGEPREKYLEILEYSSFLIPREKPRYVMGIGTPQYIFDAIYYGIDIFDCVNPARIARHGSLLTDNGIMRIGRKEYKDDTSKVEKNCSCTLCTRYSRGYLRHLIKSRELFGIILASEHNIHYMFRLISKIRTAILNDNFVNFRTEYLKKYEEGNFYE

SEQ ID NO: 52702 - protein, 375 aa, Borrelia turcica
  misc_feature (1)..(375): tr|A0A386PNH0|A0A386PNH0_9SPIR Queuine tRNA-ribosyltran sferase OS=Borrelia turcica IST7 OX=1104446 GN=tgt PE=3 SV=1
MFNIIKNDNSSNARLGVLELPHGRVNTPCFMPVGTLGAMKALKHDVLEKLGCNLMLANTYHLYLRPGIETIKKYGSLHKFTTWNKNFLTDSGGFQVFSLSKLRKIETEGVHFQSHIDGSRHYFTPESVFRMQETFESDIIMALDICSSYGIDYNEANLYTNITTLWARRICSAYENRKEGYDGLLFLITQGNFFKDLRKRSTEGILELNSPGIAIGGISVGEPRDKYLEILEYNSSLIPKDKPRYVMGIGTPHYILDAIYYGIDIFDCVNPARIARHGSLLTDNGILRIKRSEFSNDATPVEKNCICTLCTRYSRGYLRHLIKSEETLGIMLASEHNIHYMFRLIEKARDAIMNDDFTNFRKLYLKKYDEGNFHE

SEQ ID NO: 52703 - protein, 375 aa, Borrelia turicatae
  misc_feature (1)..(375): sp|A1R0N4|TGT_BORT9 Queuine tRNA-ribosyltransferase OS= Borrelia turicatae (strain 91E135) OX=314724 GN=tgt PE= 3 SV=1
MFSIIKNDKNSNARLGVLELPHGKVETPCFMPVGTLGAMKALKHDVLEKLGCDLMLANTYHLYLRPGIDVIKKYGSLHNFTAWDKNFLTDSGGFQVFSLANFRKIETEGVDFKSHIDGSRHYFTPESVFKMQEIFESDIIMALDICSSYGIDYSEASLYTNITTSWARRTLRAYENRKEGYDGLLFLITQGNFFKDLRKRSTEAILELDSPGIAIGGISVGEPRDKYLEILEYNSSLIPKVKPKYVMGIGTPHYILDAIYYGIDIFDCVNPTRIARHGSLLTDNGILRIKRAEFNFDTCPVERDCSCTLCTRYSRGYLRHLIKSEETLGVMLASEHNIHYMFRLIKKARNAIMNGDFTKFRKLYLSKYDEGNFDE

SEQ ID NO: 52704 - protein, 375 aa, Borrelia turicatae
  misc_feature (1)..(375): tr|A0A172XCJ6|A0A172XCJ6_BORTU Queuine tRNA-ribosyltran sferase OS=Borrelia turicatae OX=142 GN=tgt PE=3 SV=1
MFSIIKNDKNSNARLGVLELPHGKVETPCFMPVGTLGAMKALKHDVLEKLGCDLMLANTYHLYLRPGIDVIKKYGSLHNFTAWDKNFLTDSGGFQVFSLANFRKIETEGVDFKSHIDGSRHYFTPESVFKMQEIFESDIIMALDICSSYGIDYSEASLYTNITTSWARRTLRAYENRKEGYDGLLFLITQGNFFKDLRKRSTEAILELNSPGIAIGGISVGEPRDKYLEILEYNSSLIPKVKPKYVMGIGTPHYILDAIYYGIDIFDCVNPTRIARHGSLLTDNGILRIKRAEFNFDTCPVERDCSCTLCTRYSRGYLRHLIKSEETLGVMLASEHNIHYMFRLIKKARNAIMNGDFTKFRKLYLSKYDEGNFDE

SEQ ID NO: 52705 - protein, 375 aa, Borreliella bavariensis
  misc_feature (1)..(375): sp|Q65ZW4|TGT_BORBP Queuine tRNA-ribosyltransferase OS= Borreliella bavariensis (strain ATCC BAA-2496 / DSM 234 69 / PBi) OX=290434 GN=tgt PE=3 SV=1
MFSVIKNDKHSNARVGFLNLPHGRVDTPCFMPVGTLGAMKGLKHSVLEKLKCNLMLANTYHLYLRPGIKTIEKYGGLHNFTTWNKNFLTDSGGFQVFSLSSLRKIDLKGVRFKSHLDGSYHYFTPEGVFAMQEIFGSDIIMPLDICSSYGIDYNEANLYTNITTNWARSTFKAYKNRKEGYNGLLFLITQGNFFKDLRKRSINDILELDSPGIAIGGISVGEPREKYLEILEYSSLLMPKEKPRYVMGIGTPHYILDAIYHGIDIFDCVNPARIARHGSLLTDNGIMRISRKEYKDDTSQVEKNCGCTLCTRYSRGYLRHLIKSKELFGIILASEHNIYYMFRLISKIRTAILNDNFLNFRTSYLKKYEEENFDE

SEQ ID NO: 52706 - protein, 375 aa, Borreliella bavariensis; identical to SEQ ID NO: 52705
  misc_feature (1)..(375): tr|A5JJQ9|A5JJQ9_BORBP Queuine tRNA-ribosyltransferase (Fragment) OS=Borreliella bavariensis (strain ATCC BAA- 2496 / DSM 23469 / PBi) OX=290434 GN=tgt PE=3 SV=1

SEQ ID NO: 52707 - protein, 375 aa, Borreliella bissettii
  misc_feature (1)..(375): tr|A0A1L8ZAP0|A0A1L8ZAP0_BORBI Queuine tRNA-ribosyltran sferase OS=Borreliella bissettii OX=64897 GN=tgt PE=3 S V=1
MFSVIKNDKHSNARVGFLNLPHGRVDTPCFMPVGTLGAMKGLKHAILEKLECNLMLANTYHLYLRPGIKIIEKYGSLHNFTTWNKNFLTDSGGFQVFSLSGLRKIDLKGVHFKSHLDGSYHYFTPEGVFAMQEIFGSDIIMPLDICSSYGIDYNEANLYTNITTNWARSTFKSYKNRKEGYNGLLFLITQGNFFKDLRKRSINDILELDSPGIAIGGISVGEPREKYLEILEYSSLLIPKEKPRYVMGIGTPHYILDAIYYGIDIFDCVNPARIARHGSLLTDNGVMRIGRKEYKDDTSRVEKDCGCTLCTRYSRGYLRHLIKSKELFGIVLASEHNIHYMFRLIAKIRTAILNDNFLNFRTEYLKKYEEGNFDE

SEQ ID NO: 52708 - protein, 375 aa, Borreliella bissettii
  misc_feature (1)..(375): tr|G0AMP6|G0AMP6_BORBD Queuine tRNA-ribosyltransferase OS=Borreliella bissettii (strain DN127) OX=521010 GN=tg t PE=3 SV=1
MFSVIKNDKHSNARVGFLNLPHGRVDTPCFMPVGTLGAMKGLKHAILEKLECNLMLANTYHLYLRPGIKIIEKYGSLHNFTTWNKNFLTDSGGFQVFSLSGLRKIDLKGVHFKSHLDGSYHYFTPEGVFAMQEIFGSDIIMPLDICSSYGIDYNEANLYTNITTNWARSTFKSYKNRKEGYNGLLFLITQGNFFKDLRKRSINDVLELDSPGIAIGGISVGEPREKYLEILEYSSLLIPKEKPRYVMGIGTPHYILDAIYYGIDIFDCVNPARIARHGSLLTDNGVMRIGRKEYKDDTSRVEKDCGCTLCTRYSRGYLRHLIKSKELFGIVLASEHNIHYMFRLIAKIRTAILNDNFLNFRTEYLKKYEEGNFDE

SEQ ID NO: 52709 - protein, 375 aa, Borreliella burgdorferi
  misc_feature (1)..(375): tr|A0A0E1UFK1|A0A0E1UFK1_BORBG Queuine tRNA-ribosyltran sferase OS=Borreliella burgdorferi 64b OX=498740 GN=tgt PE=3 SV=1
MFSVIKNDKHFNARVGFLNLPHGRVDIPCFMPVGTLGAMKGLKHAVLEKLECNLMLANTYHLYLRLGIKTVEKYVGLHNFTTWNKNFLTDSGGFRVFSFSDLRKIDLKGVHFKSHIDGSYHYFTSEGIFAMQEIFGSDIIMPLDICSSYGIDYNEANLYTNITTNWASSTFKSSKNRKEGYNGLLFLITQGNFFKDLRKRSINDILELDSPGIAIGGISVGEPREKYLEILEYSFLLIPKEKPRYVMGIGTPHYILNAIYYGIDIFDCFNPARITRHGSLLTDNGIMCIGRKEYKDDTSKVEKNCICTLCKRYSRGYLRHLIKSKELFGIVLASEHNIHYMFRLISKIRAAILNDDFLNFRTSYLKKYEEENFDE

SEQ ID NO: 52710 - protein, 360 aa, Borreliella burgdorferi
  misc_feature (1)..(360): tr|M9VNM6|M9VNM6_BORBG Queuine tRNA-ribosyltransferase (Fragment) OS=Borreliella burgdorferi 156a OX=445983 GN =tgt PE=3 SV=1
EKHFNARVGFLNLPYGRVDIPCFMPVGTLGAMKGLKHAVLEKLECNLMLANTYHLYLRLGIKTVEKYVGLHNFTTWNKNFLTDSGGFRVFSFSDLRKIDLKGVHFKSHIDGSYHYFTSEGIFAMQEIFGSDIIMPLDICSSYGIDYNEANLYTNITTNWASSTFKSSKNRKEGYNGLLFLITQGNFFKDLRKRSINDILELDSPGIAIGGISVGEPREKYLEILEYSFLLIPKEKPRYVMGIGTPHYILNAIYYGIDIFDCFNPARITRHGSLLTDNGIMCIGRKEYKDDTSKVEKNCICTLCKRYSRGYLRHLIKSKELFGIVLASEHNIHYMFRLISKIRAAILNDDFLNFRTSYLKK

SEQ ID NO: 52711 - protein, 375 aa, Borreliella chilensis
  misc_feature (1)..(375): tr|A0A0A7UX03|A0A0A7UX03_9SPIR Queuine tRNA-ribosyltran sferase OS=Borreliella chilensis OX=1245910 GN=tgt PE=3 SV=1
MFSVIKNDKHSKARIGVLNLPHGKVDTPCFMPVGTLGAMKGLKHAVLEKLGCNLMLANTYHLYLRPGIKTIEKYGSLHNFTTWNKNFLTDSGGFQVFSLSSLRKIDLKGVHFKSHLDGSYHYFTPEGVFAMQEIFGSDIIMPLDICSSYGIDYNEANLYTNITTNWARSTVNSYKHKKEGYSGFLFLITQGNFFKDLRKRSINDILELDSPGIAIGGISVGEPREKYLEILEYSSLLIPKEKPRYVMGIGTPHYILDAIYYGIDIFDCVNPARIARHGSLLTDNGIMRIGKEEYKNDTSRVEKNCDCTLCTRYSRGYLRHLIKSKELFGIILASEHNINYMFRLISKIRTAILNDNFLNFRTAYLRKYEEGNLDE

SEQ ID NO: 52712 - protein, 375 aa, Borreliella finlandensis
  misc_feature (1)..(375): tr|C0AM55|C0AM55_9SPIR Queuine tRNA-ribosyltransferase OS=Borreliella finlandensis OX=498741 GN=tgt PE=3 SV=1
MFSVIKNDKHSNARVGFLNLPHGRVDTPCFMPVDTLEAMKGLKHAVLEKLECNLMLANTYHLYLRPGIKTIEKYGGLHNFTTWNKNFLTDSGRFQVFSLSDLRKIDLKGVHFKSYLDGSYHYFTPEGIFAMQEIFGSDIIMPPDICSSYGIDYNEANLYTNITTNWACSTFKSYKNRKEGYNGLLFLIAQGNFFKDLRKRSINDILELDSPGIVIGGISVGEPREKYLEILKYSSLLIPKEKPRYVMGIGTLHYILDAIYYGIDIFYCVNPARIARHGSLLTDNGIMRIGRKEYKDDTSQIEKNCICTLCTRYSKGYLRHLIKSKELFVIVLASEHNICYMFRLISKIRTAILNDDFLNFRTSYLKKYEEGNFDE

SEQ ID NO: 52713 - protein, 352 aa, Borreliella finlandensis
  misc_feature (1)..(352): tr|A5JJS5|A5JJS5_9SPIR Queuine tRNA-ribosyltransferase (Fragment) OS=Borreliella finlandensis OX=498741 GN=tgt PE=3 SV=1
FNARVGFLNLPHGRVDTPCFMPVDTLEAMKGLKHAVLEKLECNLMLANTYHLYLRPGIKTIEKYGGLHNFTTWNKNFLTDSGRFQVFSLSDLRKIDLKGVHFKSYLDGSYHYFTPEGIFAMQEIFGSDIIMPPDICSSYGIDYNEANLYTNITTNWACSTFKSYKNRKEGYNGLLFLIAQGNFFKDLRKRSINDILELDSPGIVIGGISVGEPREKYLEILKYSSLLIPKEKPRYVMGIGTLHYILDAIYYGIDIFYCVNPARIARHGSLLTDNGIMRIGRKEYKDDTSQIEKNCICTLCTRYSKGYLRHLIKSKELFVIVLASEHNICYMFRLISKIRTAILNDDFLNFRT

SEQ ID NO: 52714 - protein, 375 aa, Borreliella garinii
  misc_feature (1)..(375): tr|B7XTS2|B7XTS2_BORGR Queuine tRNA-ribosyltransferase OS=Borreliella garinii PBr OX=498743 GN=tgt PE=3 SV=1
MFSVIKNDKHSNARVGFLNLPHGRVDTPCFMPVGTLGAMKGLKHAVLEKLECNLMLANTYHLYLRPGIKTIEKYGGLHNFTTWNKNFLTDSGGFQVFSLSGLRKIDLKGVHFKSHLDGSYHYFTPEGVFAMQEIFGSDIIMPLDICSSYGIDYNEANLYTNITTNWASSTFKAYKNKKEGYNGLLFLITQGNFFKDLRKRSINDILELDSPGIAIGGISVGEPREKYLEILEYSSLLIPKEKPRYVMGIGTPHYILDAIYYGIDIFDCVNPARIARHGSLLTDNGIMRIGRKEYKDDTSPVEKNCGCTLCTRYSRGYLRHLIKSKELFGIILASEHNIHYMFRLISKIRTAILNDNFLNFRTSYLKKYEEGNFDE

SEQ ID NO: 52715 - protein, 375 aa, Borreliella japonica
  misc_feature (1)..(375): tr|A0A1G4P2C9|A0A1G4P2C9_BORJA Queuine tRNA-ribosyltran sferase OS=Borreliella japonica OX=34095 GN=tgt PE=3 SV =1
MFSVIKNDKHSNARVGFLNLPHGRVDTPCFMPVGTLGAMKGLKHAVLEKLECNLMLANTYHLYLRPGIKTIEKYGGLHNFTTWNKNFLTDSGGFQVFSLSGLRKIDLKGVHFKSHLDGSYHYFTPEGVFAMQEIFGSDIIMPLDICSSYGIDYNEANLYTNITTNWARSTFKSYKNKKEGYNGLLFLITQGNFFKDLRKRSINDILELDSPGIAIGGISVGEPREKYLEILEYSSFLIPKEKPRYVMGIGTPHYILDAIYYGIDIFDCVNPARIARHGSLLTDNGIMRIGRKEYKDDTSQVEKNCGCTLCTRYSRGYLRHLIKSKELFGIILASEHNIYYMFRLISKIRNAILNDNFLNFRTSYLKKYEEENFDE

SEQ ID NO: 52716 - protein, 375 aa, Borreliella spielmanii
  misc_feature (1)..(375): tr|B9X7J5|B9X7J5_9SPIR Queuine tRNA-ribosyltransferase OS=Borreliella spielmanii A14S OX=498742 GN=tgt PE=3 SV =1
MFSVIKNDKHSNARVGFLNLPHGRVDTPCFMPVGTLGAMKGLKHTVLEKLECNLMLANTYHLYLRPGIKTIEKYGGLHNFTTWNKNFLTDSGGFQVFSLSSLRRIDLKGVHFKSHLDGSYHYFTPEGVFAMQEAFGSDIIMPLDICSSYGIDYNEANLYTNITTNWARSTFKAYKNKKEGYNGLLFLITQGNFFKDLRKRSINDILELDSPGIAIGGISVGEPREKYLEILEYSSLLIPREKPRYVMGIGTPHYILDAIYHGIDIFDCVNPARIARHGSLLTDNGIMRISRKEYKDDISPVEKNCSCTLCTRYSRGYLRHLIKSRELFGIILASEHNIYYMFRLISKIRAAILNDDFLNFKTSYLKKYEEGNFDE

SEQ ID NO: 52717 - protein, 375 aa, Borreliella valaisiana
  misc_feature (1)..(375): tr|D6RWF7|D6RWF7_BORVA Queuine tRNA-ribosyltransferase OS=Borreliella valaisiana VS116 OX=445987 GN=tgt PE=3 S V=1
MFNVIKNDKHSSARVGFLNLPHGRVDTPCFMPVGTLGAMKGLKHAVLEKLECNLMLANTYHLYLRPGIKTIEKYGGLHNFTTWNKNFLTDSGGFQVFSLSGLRKIDLKGVHFKSHLDGSYHYFTPEGVFAMQEIFGSDIIMPLDICSSYGIDYNEANLYTNITTNWARSTFKSYKNKKEGYKGLLFLITQGNFFKDLRKRSINDILELDSPGIAIGGISVGEPREKYLEILEYSSLLIPKEKPRYVMGIGTPHYILDAIYYGIDIFDCVNPARIARHGTLLTDNGMMRIGRKEYKDDTSPVEKNCGCTLCTRYSRGYLRHLIKSRELFGIILASEHNIYYMFRLISKIRTAILNDNFLNFRTSYLKKYEEGNFDE

SEQ ID NO: 52718 - protein, 378 aa, Bosea lathyri
  misc_feature (1)..(378): tr|A0A1H5W484|A0A1H5W484_9BRAD Queuine tRNA-ribosyltran sferase OS=Bosea lathyri OX=1036778 GN=tgt PE=3 SV=1
MTSSTTTEFGFHLLGRDGAARTGEIRMPRGVIRTPAFMPVGTAATVKGMYPEQVKALGADVVLGNTYHLMLRPGAERVAGLGGLHKFMNWPHPILTDSGGFQVMSLSQLRKLTEEGVTFQSHIDGSKHVLTPERSVEIQNLLGSDIVMQLDECVSLPCELAVAEKAMRLSLRWAERCKAAFGNPAGRALFGIVQGGEVPALRIESAKSLVAMDLKGYAIGGLAVGEPQDVMLAMIETVEPHLPQEKPRYLMGVGTPDDIVQAVARGIDMFDCVMPTRAGRHGQIFTRFGRMNLKNAKHADDSRPIDPQSTCPAANTYSRAYLHHLVKAEEMLGKMLLTWVNLAYYQDLMAGLRGAIAAGRLDDFIAETKEGWLKGEPV

SEQ ID NO: 52719 - protein, 374 aa, Bosea lupini
  misc_feature (1)..(374): tr|A0A1H7H2J5|A0A1H7H2J5_9BRAD Queuine tRNA-ribosyltran sferase OS=Bosea lupini OX=1036779 GN=tgt PE=3 SV=1
MTTDFSFHLLGRDGAARTGEVRMPRGVIRTPAFMPVGTAATVKGMYPEQVKALGADVVLGNTYHLMLRPGAERVARLGGLHKFMNWPHPILTDSGGFQVMSLANLRKLTEEGVTFQSHIDGSKHVLSPERSVEIQNLLGSDIVMQLDECVSLPCEDKVAEKAMHLSLRWAERCRKAFGDPAGRALFGIVQGGAVPALRVESARELAAMDLKGYAIGGLAVGEPQDVMLAMIETVEPHLPSEKPRYLMGVGTPDDIVEAVRRGVDMFDCVMPTRAGRHGQIFTRFGRMNLKNAKHAEDGRPIDPQSSCPAANSYSRAYLHHLVKAEEMLGKMLLTWVNLAYYQELTAGLRAAIAAGRLEDFIAETKEGWAKGEPA

SEQ ID NO: 52720 - protein, 392 aa, Bosea sp.
  misc_feature (1)..(392): tr|A0A0N1BAB9|A0A0N1BAB9_9BRAD Queuine tRNA-ribosyltran sferase OS=Bosea sp. AAP35 OX=1523417 GN=tgt PE=3 SV=1
MTDEPDLPQPAPPQPGPTDFTFRLHARDGAARTGEIAMPRGVIRTPAFMPVGTAATVKGMYPDQVRALGADVVLGNTYHLMLRPGAERVAGLGGLHRFMNWPHPILTDSGGFQVMSLANLRKLTEEGVAFRSHIDGSKHMLTPERSVEIQNLLGSDIVMQLDECVSLPCEDAVAEKAMRLSLRWAQRCKEAFGHHPGRALFGIVQGGSVPALRVESARELVAMDLKGYAIGGLAVGEPQDVMLAMIETVEPHLPVEKPRYLMGVGTPDDIVQAVCRGIDMFDCVMPTRAGRHGQIFTRFGRMNLKNAKHADDSRPVDEGSSCPAANGWSRAYLHHLVRCEEMLGKMLLTWINLAYYQELMAGLRAAIAAGRLADFVAETKEGWARGDTSGPA

SEQ ID NO: 52721 - protein, 374 aa, Bosea sp.
  misc_feature (1)..(374): tr|A0A4Q1TI85|A0A4Q1TI85_9BRAD Queuine tRNA-ribosyltran sferase OS=Bosea sp. Tri-39 OX=1867714 GN=tgt PE=3 SV=1
MTTDFSFHLLGRDGAARTGEVRMPRGMIRTPAFMPVGTAATVKGMYPEQVKALGADVVLGNTYHLMLRPGAERVARLGGLHKFMNWPHPILTDSGGFQVMSLANLRKLTEEGVTFQSHIDGSKHVLTPERSVEIQNLLGSDIVMQLDECVSLPCEDKVAEKAMRLSLRWAERCKTAFGDPAGRALFGIVQGGAVPSLRVESARELAAMDLKGYAIGGLAVGEPQDIMLAMIETVEPHLPQEKPRYLMGVGTPDDIVEAVRRGVDMFDCVMPTRAGRHGQIFTRFGRMNLKNAKHAEDPRPVDPQSSCQAANTYSRAYLHHLVKAEEMLGKMLLTWVNLAYYQELTAGLRAAIAAGRLEDFIAETKEGWARGEPA

SEQ ID NO: 52722 - protein, 387 aa, Bosea thiooxidans
  misc_feature (1)..(387): tr|A0A1T5CTH6|A0A1T5CTH6_9BRAD Queuine tRNA-ribosyltran sferase OS=Bosea thiooxidans OX=53254 GN=tgt PE=3 SV=1
MTVQPQLSQPETAATTDFTFHVAARDGAARTGAISMPRGVIRTPAFMPVGTAATVKGMYPEQVRALGADVVLGNTYHLMLRPGAERVARLGGLHKFMNWPHPILTDSGGFQVMSLSQLRKLTEEGVTFRSHIDGSKHVLSPERSVEIQNLLGSDIVMQLDECVALPCEDKVAEKAMRLSLRWAERCKTAFGNHPGRALFGIVQGGAVPHLRVESARELAAMDLKGYAVGGLAVGEPQEIMLAMIETVEPHLPQEKPRYLMGVGTPDDIIQSVARGIDMFDCVMPTRAGRHGQIFTRFGRMNLKNAKFAEDTRPVDEQSSCPAANGWSRAYLHHLVKAEEMLGKMLLTWVNLAYYQDLMAGLRAAIAQGRLADFIAETREGWERGEPA

SEQ ID NO: 52723 - protein, 387 aa, Bosea thiooxidans
  misc_feature (1)..(387): tr|A0A0Q3I1W5|A0A0Q3I1W5_9BRAD Queuine tRNA-ribosyltran sferase OS=Bosea thiooxidans OX=53254 GN=tgt PE=3 SV=1
MTVQPQLSQPETAATTDFTFHVAARDGAARTGAISMPRGVIRTPAFMPVGTAATVKGMYPEQVRALGADVVLGNTYHLMLRPGAERVARLGGLHKFMNWPHPILTDSGGFQVMSLSQLRKLTEEGVTFRSHIDGSKHVLSPERSVEIQNLLGSDIVMQLDECVALPCEDKVAEKAMRLSLRWAERCKTAFGNHPGRALFGIVQGGAVPHLRVESARELAAMDLKGYAVGGLAVGEPQEIMLAMIETVEPHLPQEKPRYLMGVGTPDDIIQSVARGIDMFDCVMPTRAGRHGQIFTRFGRMNLKNAKFAEDTRPVDEQSSCPAANGWSRAYLHHLVKAEEMLGKMLLTSVNLAYYQDLMAGLRAAIAQGRLADFIAETREGWERGEPA

SEQ ID NO: 52724 - protein, 379 aa, Bosea vaviloviae
  misc_feature (1)..(379): tr|A0A0N1F4G3|A0A0N1F4G3_9BRAD Queuine tRNA-ribosyltran sferase OS=Bosea vaviloviae OX=1526658 GN=tgt PE=3 SV=1
MGATDFSFHLHARDGAARTGEIRMPRGVIRTPAFMPVGTAATVKGMYPEQVRALGADVVLGNTYHLMLRPGAERVAKLGGLHRFMNWPHPILTDSGGFQVMSLANLRKLTEEGVTFQSHIDGSKHMLSPERSVEIQNLLGSDIVMQLDECVSLPCEDKVAEKAMRLSLRWAERCKAAFGDPAGRALFGIVQGGSVPALRVESARELVAMDLKGYAIGGLAVGEPQDVMLAMIETVEPHLPVEKPRYLMGVGTPDDIVQAVCRGIDMFDCVMPTRAGRHGQIFTRFGRMNLKNAKHADDPRPVDEASSCPATNGWSRAYLHHLVKSEEMLGKMLLTWVNLAYYQELMAGLRAAIAAGRLANFVAQTRDDWARGDSAGEPA

SEQ ID NO: 52725 - protein, 388 aa, Bosea vaviloviae
  misc_feature (1)..(388): tr|A0A1D7U5C8|A0A1D7U5C8_9BRAD Queuine tRNA-ribosyltran sferase OS=Bosea vaviloviae OX=1526658 GN=tgt PE=3 SV=1
MTTDTITTDASRSDFSFHLAARDGAARTGEIRMPRGVIRTPAFMPVGTAATVKGMYPEQVKALGADVVLGNTYHLMLRPGAERVAKLGGLHKFMNWPHPILTDSGGFQVMSLSQLRKLTEEGVTFQSHIDGSKHVLTPERSVEIQNLLGSDIVMQLDECVSLPCEDKVAEKAMRLSLRWAERCKTAFGNPAGRALFGIVQGGVVPALRVESARELVAMDLKGYAIGGLAVGEPQDIMLAMIETVEPHLPVEKPRYLMGVGTPDDLVEAVSRGIDMFDCVMPTRAGRHGQIFTRFGRMNLKNAKHAEDPRPIDPQSSCQAANGYARAYLHHLVKAEEMLGKMLLTWVNLAYYQDLMAGLRAAIAQGRLQDFIAETKEGWARGEPAGEPA

SEQ ID NO: 52726 - protein, 438 aa, Bosea vestrisii
  misc_feature (1)..(438): tr|A0A543NYG2|A0A543NYG2_9BRAD Queuine tRNA-ribosyltran sferase OS=Bosea vestrisii OX=151416 GN=tgt PE=3 SV=1
MKVPAWIPGLPAVTRDDDLIGIPGEGAWLIRRAGLFPKPARCSTSQAMTVQPQPMQPDIAATPEFTFKVAARDGAARTGAISMPRGVIRTPAFMPVGTAATVKGMYPEQVRALGADVVLGNTYHLMLRPGAERIARLGGLHKFMNWPHPILTDSGGFQVMSLSQLRKLTEEGVTFQSHIDGSKHVMTPERSVEIQNLLGSDIVMQLDECVALPCEDKVAEKAMRLSLRWAERCKTAFGTHPGRALFGIVQGGAVPSLRVESARELAAMDLKGYAVGGLAVGEPQEVMLAMIEAVEPHLPQEKPRYLMGVGTPDDIVEAVSRGIDMFDCVMPTRAGRHGQIFTRFGRMNLKNAKHAEDPRPIDEQSACPAANGWSRAYLHHLVKAEEMLGKMLLTWVNLAYYQELMAGLRAAIAAGRLADFIAETKEGWARGEPGSGPA

SEQ ID NO: 52727 - protein, 376 aa, Boseongicola aestuarii
  misc_feature (1)..(376): tr|A0A238IWG1|A0A238IWG1_9RHOB Queuine tRNA-ribosyltran sferase OS=Boseongicola aestuarii OX=1470561 GN=tgt PE= 3 SV=1
MTATFSFDLKATDGAARTGVISTPRGNIRTPAFMPVGTAATVKAMMPESVAATGADILLGNTYHLMLRPGAERIERLGGLHKFMNWERPILTDSGGFQVMSLADLRKLTEKGVTFKSHIDGSKHELTPERSMEIQRQLGSDIVMCFDECPALPSDRARIEDSMRLSMRWAARSREAFGDRPGHALFGIQQGGLEQDLRQESADALRGIGFDGYAVGGLAVGEGQEAMFAVLDYAPAQLPVDKPRYLMGVGKPDDIVGAVKRGIDMMDCVLPSRSGRTGQAFTRRGVVNIKNARHADDPRPLDEQCACPACSKYSRAYLHHVFRAGEMISGMLLTWHNLHYFQEIMSGMRAAIEEGAFEEWERGFHETRAKGDIDAL

SEQ ID NO: 52728 - protein, 376 aa, Boseongicola sp.
  misc_feature (1)..(376): tr|A0A5D0RKL3|A0A5D0RKL3_9RHOB Queuine tRNA-ribosyltran sferase OS=Boseongicola sp. HY14 OX=2603819 GN=tgt PE=3 SV=1
MSATFRFTLNATDGRARAGVISTPRGDIRTPAFMPVGTAATVKAMLPESVRATGADILLGNTYHLMLRPGAERIARLGGLHRFMNWDRPILTDSGGFQVMSLAELRKLTEEGVSFRSHIDGSRHMLSPETSMEIQRLLGSDIVMCFDECPALPADEARVAESMRLSMRWAARSREAFGDRPGHALFGIQQGGVTEELRGESAEALKAIGFDGYAIGGLAVGEGQEAMFGVLDYAPDMLPEDKPRYLMGVGKPDDIVGAVGRGVDMMDCVLPSRSGRTGQAFTRRGVVNIKNARHADDPRPLDEDCACPACRGYSRAYLHHVFRAGEIISSMLLTWHNLRYYQDLMDGMRTAIAAGDFARFEADFHAGRAGGDIDPI

SEQ ID NO: 52729 - protein, 372 aa, Bowmanella sp.
  misc_feature (1)..(372): tr|A0A4V2L005|A0A4V2L005_9ALTE Queuine tRNA-ribosyltran sferase OS=Bowmanella sp. JS7-9 OX=1605368 GN=tgt PE=3 SV=1
MKFELINTDGKARRGRLIFDRGVVETPAFMPVGTYGTVKGMTPEELKDTGAHICLGNTFHLMLRPGTEIMKMHGDLHDFMHWDKPILTDSGGFQVFSLGDLRKISEEGVTFRSPINGEKILLTPEKSMEVQRDLGSDIVMIFDECTPYPATDEQARTSMELSLRWAQRSKDAHADNPSALFGIIQGGMYEDLRDVSLQGLVNIDFDGYAIGGLSVGEPKEDMIRILDHTAWKIPAHKPRYLMGVGKPEDIVEAVRRGIDMFDCVMPTRNARNGHLFVTEGVIKIRNAANKTDTRPLDEKCDCYTCKNYTRSYLHHLDKCNEILGARLNTIHNLRYYQRVMQGLRDAIEANKLDEFVAEFYAQKGMDVPPLAE

SEQ ID NO: 52730 - protein, 431 aa, Brachybacterium alimentarium
  misc_feature (1)..(431): tr|A0A2A3YH87|A0A2A3YH87_9MICO Queuine tRNA-ribosyltran sferase OS=Brachybacterium alimentarium OX=47845 GN=tgt PE=3 SV=1
MPTAAGPFVPALSAHPGRAETGFEVTARHGDKARAGVITTPHGEIATPAFIPVGTKATVKAVLPESMSDLGTQALLANAYHLYLQPGHDLIDEAGGLGAFMNWPGPTYTDSGGFQVMSLGAGFKKVLSSEFSGGEKARTSSGEDDAVAEGKERLAHVDDDGVTFRSFINGDEHRFTPEISMQIQHGLGADIMFAFDELTTLMNSRRYQEQALERTRLWAIRCLAEHARLTADRTHRPYQQLWGVIQGAQYEDLRRQASRDLGAMEVEGWSFDGFGIGGALEKENLGTIVDWVTDELPEAKPRHLLGISEVDDLFVAIASGADTFDCVSPSRVARNSAVYTRTGRVNLTGSRYRRQFAPIDEACDCYTCTHYTAAYVHHLFRAKEMLSSTLCTIHNERFVVRLVDRIRAALHSGDFDALREETTGAYYGAPR

SEQ ID NO: 52731 - protein, 430 aa, Brachybacterium endophyticum
  misc_feature (1)..(430): tr|A0A2U2RKX7|A0A2U2RKX7_9MICO Queuine tRNA-ribosyltran sferase OS=Brachybacterium endophyticum OX=2182385 GN=t gt PE=3 SV=1
MQDSPVHPDFTVPPDSSRRSGFEITARHGDKARAGVISTPHGPIATPSFVPVGTKATVKAVLPEAMADLGAQAVLANAYHLYLQPGHDLVDEAGGLGAFMNWPGPTYTDSGGFQVMSLGAGFKKVLSSEFSGGEKARTANGEDDAVAEGKERLAHVDDDGVTFRSFINGDVHRFTPEISMQIQHGLGADIMFAFDELTTLMNSRPYQEQALERTRLWAIRCLAEHARLTAEREGKPYQQLWGVIQGAQYEDLRRRASHDLGAMDVDGQRFDGFGIGGALEKENLGTIVGWVTDELPEDRPRHLLGISEVDDLFVAIAAGADTFDCVSPSRVARNSAVYTRTGRVNLTGSRYRRQFAPIDETCDCYTCTHYTAAYIHHLFRAKEILSATLCTIHNERFVVRLVDEIRAAIGSGDFEALREERTGAYYGEAR

SEQ ID NO: 52732 - protein, 427 aa, Brachybacterium faecium
  misc_feature (1)..(427): tr|C7MGZ2|C7MGZ2_BRAFD Queuine tRNA-ribosyltransferase OS=Brachybacterium faecium (strain ATCC 43885 / DSM 481 0 / NCIB 9860) OX=446465 GN=tgt PE=3 SV=1
MTDHRLETPRTPSPADGGFEILARHGEKARAGVISTPHGEIATPAFVPVGTKATVKAVLPESMSDLGAQALLANAYHLYLQPGHDLVDEAGGLGAFMNWPGPTYTDSGGFQVMSLGAGFKKVLSSEFSGGESARTSSGEDDDVAEGKERLAHVDDDGVTFRSFINGDVHRFTPEISMQIQHGLGADIMFAFDELTTLMNSRRYQEQALERTRLWAIRCLAEHARLTAERTHRPYQQLWGVIQGAQYEDLRRQAARDLGAMDVEGWSFDGFGIGGALEKENLGTIVGWVTDELPEARPRHLLGISEVDDLFVAIAAGADTFDCVSPSRVARNSAVYTRSGRVNLTGARYRRQFAPIDESCDCYTCTHYTAAYVHHLFRAKEMLSSTLCTIHNERFVVRLVDQIRASLHSGDFEALREETTGAYYGSPR

SEQ ID NO: 52733 - protein, 421 aa, Brachybacterium faecium
  misc_feature (1)..(421): tr|A0A2W5CFE1|A0A2W5CFE1_9MICO Queuine tRNA-ribosyltran sferase OS=Brachybacterium faecium OX=43669 GN=tgt PE=3 SV=1
MESSPPSPADVGYEITARHGDKARAGVITTPHGQIATPAFIPVGTKATVKAVLPESMADAGAQALLANAYHLYLQPGHDLVDEAGGLGAFMNWPGPTYTDSGGFQVMSLGAGFKKVLSSEFAGGTTARTASGEDDAVAEGKERLAHVDDDGVTFRSFINGDVHRFTPEISMQIQHGLGADIMFAFDELTTLMNSRGYQEKALERTRLWAIRCLAEHQRLTAERTHRPYQQLWGVIQGAQFEDLRRKAARDLGAMDVDGQVFDGFGIGGALEKENLGTIVGWVTDELPELRPRHLLGISEVDDLFTAVAAGADTFDCVSPSRVARNSAVYTRTGRVNLTGARYRRQFAPIDETCDCYTCTHYTAAYVHHLFRAKEMLSSTLCTIHNERFVVRLVDEIRASLISGDFEALREQRTADYYGAPR

SEQ ID NO: 52734 - protein, 427 aa, Brachybacterium ginsengisoli
  misc_feature (1)..(427): tr|A0A291H263|A0A291H263_9MICO Queuine tRNA-ribosyltran sferase OS=Brachybacterium ginsengisoli OX=1331682 GN=t gt PE=3 SV=1
MTELPPDPSRAPSSTDSGFEILARHGEKARAGVISTPHGEIATPAFVPVGTKATVKAVLPESMSELGAQALLANAYHLYLQPGHDLVDEAGGLGAFMNWPGPTYTDSGGFQVMSLGAGFQKVLSSEFSGGEKARTSNGEDDAVREGKERLAHVDDDGVTFRSFINGDEHRFTPEISMQIQHGLGADIMFAFDELTTLMNSRGYQEQALERTRLWALRCLAEHARLTEERTHRPYQQLWGVIQGAQYEDLRRQASRDLGTMDVAGQAFDGFGIGGALEKENLGTIVGWVTDELPDQKPRHLLGISEVDDLFVAIAAGADTFDCVSPSRVARNSAVYTATGRVNLTGARYRRQFSPIDETCDCYTCTHYTAAYVHHLFRAKEMLSSTLCTIHNERFVVRLVDRIRASLLDGDFDALREETTGAYYGSPR

SEQ ID NO: 52735 - protein, 444 aa, Brachybacterium muris
  misc_feature (1)..(444): tr|A0A022KU18|A0A022KU18_9MICO Queuine tRNA-ribosyltran sferase OS=Brachybacterium muris UCD-AY4 OX=1249481 GN= tgt PE=3 SV=1
MAVTELPAHTTDGTETARAADPVTPPSPPSPADVGYEITARHGDKARAGVITTPHGQIATPAFIPVGTKATVKAVLPESMADLGAQALLANAYHLYLQPGHDLVDEAGGLGAFMNWPGPTYTDSGGFQVMSLGAGFKKVLSSEFAGGATARTASGEDDAVAEGKERLALVDDDGVTFRSFINGDVHRFTPEISMQIQHGLGADIMFAFDELTTLMNSRGYQEKALERTRLWAIRCLAEHQRLTAERTHRPYQQLWGVIQGAQFEDLRRKAARDLGAMDVDGQVFDGFGIGGALEKENLGTIVGWVTDELPEDRPRHLLGISEVDDLFTAVAAGADTFDCVSPSRVARNSAVYTRTGRVNLTGARYRRQFAPIDETCDCYTCTHYTAAYVHHLFRAKEMLSSTLCTIHNERFVVRLVDEIRASLISGDFEALREQRTADYYGAPR

SEQ ID NO: 52736 - protein, 418 aa, Brachybacterium nesterenkovii
  misc_feature (1)..(418): tr|A0A1X6WVT0|A0A1X6WVT0_9MICO Queuine tRNA-ribosyltran sferase OS=Brachybacterium nesterenkovii OX=47847 GN=tg t PE=3 SV=1
MAPRSAATGFAVTARDGAKARAGVITTPHGQIATPAFVPVGTKATVKAVLPESMTQLGAQALLANAYHLYLQPGHDLVDEAGGLGAFMNWPGPTYTDSGGFQVMSLGAGFKKVLSSEFSGGERARTASGEDDAVAEGKERLAHVDDDGVTFRSFINGDVHRFTPEISMRIQHGLGADIMFAFDELTTLMNSRGYQEQALERTRLWAQRCLAEHRRLTAERTHRPYQQLWGVIQGAQYEDLRRTAARDLGTMEVDGQAFDGFGIGGALEKENLGTIVGWVTDELPEDRPRHLLGISEVDDLFAAVAAGADTFDCVSPSRVARNSAVYTRTGRVNLTGSRYRRQFAPIDDSCDCYTCEHYTAAYIHHLFRAKEMLSSTLCTIHNERFVVRLVDRIRAAIGAGELDALREETTGAYYGSPR

SEQ ID NO: 52737 - protein, 434 aa, Brachybacterium paraconglomeratum
  misc_feature (1)..(434): tr|A0A3R8QU00|A0A3R8QU00_9MICO Queuine tRNA-ribosyltran sferase OS=Brachybacterium paraconglomeratum OX=173362 GN=tgt PE=3 SV=1
MTTPPPPAPSAAETPAAAPSPADVGFEITARHGEKARAGVITTPHGDIATPAFVPVGTKATVKSVLPESMAELGAQALLANAYHLYLQPGHDLVDEAGGLGAFMNWPGPTYTDSGGFQVMSLGAGFQKVLSSEFSGGEKARTANGEDDAVREGKERLAHVDDDGVTFRSFINGDEHRFTPEISMQIQHGLGADIMFAFDELTTLMNSRGYQEQALERTRLWALRCLAEHARLTHERTHRPYQQLWGVIQGAQYEDLRRQAAHDLGGMEVEGWSFDGFGIGGALEKENLGTIVGWVTDELPEDKPRHLLGISEVDDLFVAIAAGADTFDCVSPSRVARNSAVYTRTGRVNLTGSRYRRQFAPIDETCDCYTCTHYTAAYVHHLFRAKEMLSSTLCTIHNERFVVRLVDRIRASLQDGTFDALREETTGAYYGEPR

SEQ ID NO: 52738 - protein, 469 aa, Brachybacterium phenoliresistens
  misc_feature (1)..(469): tr|Z9JNL3|Z9JNL3_9MICO Queuine tRNA-ribosyltransferase OS=Brachybacterium phenoliresistens OX=396014 GN=tgt PE =3 SV=1
MTSAPSASDPRDTASAASRGTDPGRRATGSDASSGVRPAGADLAAGVPSAGAHPGRAESGFEVTARHGEKARAGVITTPHGPIATPAFIPVGTKATVKAVLPESMTDLGAQALLANAYHLYLQPGHDLVDEAGGLGAFMNWPGPTYTDSGGFQVMSLGAGFKKVLSSEFSGGQKARTASGEDDDVAAGKERLAHVDDDGVTFRSFINGDVHRFTPEISMQIQHGLGADIMFAFDELTTLMNSRGYQESALERTRLWALRCLAEHARLSADRTHRPYQMLWGVIQGAQYEDLRRKASRDLGGMDVEGWSFDGFGIGGALEKENLGTIVGWVTDELPEEKPRHLLGISEVDDLFTAVAAGADTFDCVSPSRVARNSAVYTRTGRVNLTGSRYRRQFAPIDETCDCYTCTHYTAAYIHHLFRAKEMLSSTLCTLHNERFVVRLVDEIRESIGRGDFEALREERTGAYYGAPR

SEQ ID NO: 52739 - protein, 426 aa, Brachybacterium saurashtrense
  misc_feature (1)..(426): tr|A0A345YTK2|A0A345YTK2_9MICO Queuine tRNA-ribosyltran sferase OS=Brachybacterium saurashtrense OX=556288 GN=t gt PE=3 SV=1
MPAVPAPTAYPRRAGTGFAVTARHGEKARAGVITTPHGEIATPAFVPVGTKATVKAVLPESMSQLGAQALLANAYHLYLQPGHELVDEAGGLGAFMNWPGPTYTDSGGFQVMSLGAGFRKVLSSEFSGGEKARTATGEDDAVAEGKERLAHVDDDGVTFRSFINGDVHRFTPEISMQIQHGLGADIMFAFDELTTLMNSRGYQEQALERTRLWALRCLAEHARLTAERTHRPYQQLWGVIQGAQYEDLRRQAARDLGAMEVAGWGFDGFGIGGALEKENLGTIVGWVTDELPEQRPRHLLGISEVDDLFVAIAAGADTFDCVSPSRVARNSAVYTRTGRVNLTGSRYRRQFAPIDETCDCYTCTHYTAAYIHHLFRAKEMLSSTLCTIHNERFVVRLVDRIRASLGAGEFEALREETTGAYYGAPR

SEQ ID NO: 52740 - protein, 395 aa, Brachybacterium sp.
  misc_feature (1)..(395): tr|A0A0M8KL80|A0A0M8KL80_9MICO Queuine tRNA-ribosyltran sferase OS=Brachybacterium sp. SW0106-09 OX=1704590 GN= Y09_0498 PE=3 SV=1
MITTPHGDIATPAFVPVGTKATVKSVLPESMAELGAQALLANAYHLYLQPGHDLVDEAGGLGAFMNWPGPTYTDSGGFQVMSLGAGFQKVLSSEFSGGEKARTANGEDDAVREGKERLAHVDDDGVTFRSFINGDEHRFTPEISMQIQHGLGADIMFAFDELTTLMNSRGYQEQALERTRLWALRCLAEHARLTHERTHRPYQQLWGVIQGAQYEDLRRQAAHDLGGMEVEGWSFDGFGIGGALEKENLGTIVGWVTGELPEDKPRHLLGISEVDDLFVAIAAGADTFDCVSPSRVARNSAVYTRTGRVNLTGSRYRRQFAPIDETCDCYTCTHYTAAYVHHLFRAKEMLSSTLCTIHNERFVVRLVDRIRASLQDGTFDALREETTGAYYGEPR

SEQ ID NO: 52741 - protein, 430 aa, Brachybacterium sp.
  misc_feature (1)..(430): tr|A0A291GSE2|A0A291GSE2_9MICO Queuine tRNA-ribosyltran sferase OS=Brachybacterium sp. VM2412 OX=2017484 GN=tgt PE=3 SV=1
MSPDPVVAPPSALAPPATGTGFEVLARHGEKARAGVITTPHGQIATPAFVPVGTKATVKAVLPESMSDLGAQALLANAYHLYLQPGHDLIDEAGGLGAFMNWPGPTFTDSGGFQVMSLGAGFKKVLSSEFSGGEKARTSSGEDDDVAEGKERLAHVDDDGVTFRSFINGDVHRFTPEISMQIQHGLGADIMFAFDELTTLMNSRGYQEQALERTRLWALRCLAEHSRLTAERSHRPYQQLWGVIQGAQHEDLRRRAARELGAMDVGGQAFDGFGIGGALEKENLGTIVGWVTDELPQERPRHLLGISEVDDLFVAIAAGADTFDCVSPSRVARNSAVYTRTGRVNLTGARYRRRFAPIDEDCDCYTCTHFTAAYVHHLFRAKEMLSSTLCTIHNERFVVRLVDRIRDSLRSGDFDALREETTGAYYGAPR

SEQ ID NO: 52742 - protein, 391 aa, Brachymonas denitrificans
  misc_feature (1)..(391): tr|A0A1H8KDI6|A0A1H8KDI6_9BURK Queuine tRNA-ribosyltran sferase OS=Brachymonas denitrificans DSM 15123 OX=11211 17 GN=tgt PE=3 SV=1
MLQFDLLSTHGPEGKARRGRMTLNHGVVETPIFMPVGTYGTVKGVMPRSLHDMGAQIILGNTFHLWMRPGLDIMESFGGLHQFENWHKPILTDSGGFQVWSLGEMRKITEEGVKFASPVNGDKLFLTPEISMQIQTVLNSDIVMQLDECTPYETKGHITTEREARASMEMSLRWAQRCRTEFQRLENPNALFGIVQGGMYENLRQESLEQLVEMDFPGYAVGGVSVGEPKEDMLRLTAHTPHRLPAHKPRYLMGVGTPEDLVYGVQHGVDMFDCVMPTRNARNSHVFTRFGDLKIRNARHKTDQRPLDETCTCYACAGASGIPYAEGGRDGFSRAYLHHLDRCGEMLGPMLTTIHNLHYYLNLMQEMRDAMDANRFDAFVAQFHADRARGI

SEQ ID NO: 52743 - protein, 375 aa, Brachyspira aalborgi
  misc_feature (1)..(375): tr|A0A5C8GHX6|A0A5C8GHX6_9SPIR Queuine tRNA-ribosyltran sferase OS=Brachyspira aalborgi OX=29522 GN=tgt PE=3 SV =1
MSFSFKVLKSSSSTLARLGKIEINGIEIDTPVFMPVGTKATVKALTPAMIEESESKIILANTYHLILKPSLEVIKKFGGVKKFMAWKGAMLTDSGGFQVFSLVKLRKINDNGVEFNSHIDGTKYFFTPKSVIEAEHIIGADFIMCLDECSKHDEGYKYVKEAMERTHKWAKECKEYHDNSQNSEWQYLGGIIQGGMFDDLRKISAETLTEMNFPFYAIGGLSVGETPEKMHEVLSKVMPYTNKEKPRYLMGVSEPRDILNSVMEGIDMFDCVMPTRNARNGEAFTMDGIIRIRNSKYRMDDAVLEKECDCYTCKNFSKAYLNHLDKTHEILFSILMTIHNIRFMQRFMHDLRLSIEKDNFSDYRNNMMKKFYKIN

SEQ ID NO: 52744 - protein, 375 aa, Brachyspira aalborgi
  misc_feature (1)..(375): tr|A0A5C8DZS2|A0A5C8DZS2_9SPIR Queuine tRNA-ribosyltran sferase OS=Brachyspira aalborgi OX=29522 GN=tgt PE=3 SV =1
MSFSFKVLKSSSSTLARLGKIEINGIEIDTPVFMPVGTKATVKALTPAMIEESESKIILANTYHLILKPSLEVIKKFGGVKKFMAWKGAMLTDSGGFQVFSLAKLRKINDNGVEFNSHIDGTKYFFTPKSVIEAEHIIGADFIMCLDECSKHDEGYKYVKEAMERTHKWAKECKEYHDNSQNSEWQYLGGIIQGGMFDDLRKISAETLTEMNFPFYAIGGLSVGETPEKMHEVLSKVMPYTNKEKPRYLMGVSEPRDILNSVMEGIDMFDCVMPTRNARNGEAFTMDGIIRIRNSKYRMDDAVLEKECDCYTCKNFSKAYLNHLDKTHEILFSILMTIHNIRFMQRFMHDLRLSIEKDNFSDYRNNMMKKFYKIN

SEQ ID NO: 52745 - protein, 372 aa, Brachyspira hampsonii
  misc_feature (1)..(372): tr|A0A2U4EX29|A0A2U4EX29_9SPIR Queuine tRNA-ribosyltran sferase OS=Brachyspira hampsonii 30446 OX=1289135 GN=tg t PE=3 SV=1
MSFTFNVLKNSSQTSARLGKININGIEIDTPVFMPVGTKATVKALTPLMIEETESKIILSNTYHLVLKPGLEVLKKFGGVKKFMGWKGAMLTDSGGFQVFSLAKLRKINDNGVEFSSHIDGSKYLFTPRSVMEAEHIIGADFIMCLDECSRADADYNYAKEAMLRTHKWAKECKEYHDSTPNSEYQYLGGIIQGGMFDDLRKESAETLVNMDFPFYSIGGLSVGETPEKMHDVLSKVMLYTDKSKPRYLMGVSEPRDILNAVMEGIDMFDCVMPTRNARNGEAFTMNGIVRIRNSKYRMDDTVLEEECDCYTCKNFSKAYLNHLDKTHEILFSILMTIHNVRFMQRFMKDLRNSIENDVFSDYRKDMMKKFY

SEQ ID NO: 52746 - protein, 372 aa, Brachyspira hampsonii
  misc_feature (1)..(372): tr|A0A1E5NDE0|A0A1E5NDE0_9SPIR Queuine tRNA-ribosyltran sferase OS=Brachyspira hampsonii OX=1287055 GN=tgt PE=3 SV=1
MSFTFNVLKNSCQTSARLGKININGIEIDTPVFMPVGTKATVKALTPLMIEETESKIILSNTYHLVLKPGLEVLKKFGGVKKFMGWKGAMLTDSGGFQVFSLAKLRKINDNGVEFSSHIDGSKYLFTPRSVMEAEHIIGADFIMCLDECSKYDASYEYAKEAMLRTHKWAKECKEYHDSTPNSEYQYLGGIIQGGMFDDLRKESAETLVNMDFPFYSIGGLSVGETPEKMHDVLSKVMLYTDKSKPRYLMGVSEPRDILNAVMEGIDMFDCVMPTRNARNGEAFTMNGIVRIRNSKYRMDDTVLEEECDCYTCKNFSKAYLNHLDKTHEILFSILMTIHNVRFMQRFMKDLRNSIENDVFSDYRKDMMKKFY

SEQ ID NO: 52747 - protein, 372 aa, Brachyspira hyodysenteriae
  misc_feature (1)..(372): sp|C0R0X6|TGT_BRAHW Queuine tRNA-ribosyltransferase OS= Brachyspira hyodysenteriae (strain ATCC 49526 / WA1) OX =565034 GN=tgt PE=3 SV=1
MSFTFNVLKNSSQTSARLGKININGIEIDTPVFMPVGTKATVKALTPLMIEETESKIILANTYHLVLKPGLEVLKKFGGVKKFMNWKGAMLTDSGGFQVFSLAKLRKINDDGVEFSSHIDGSKYFFTPRSVMEAEHIIGADFIMCLDECSKHDASYDYVKEAMFRTHKWAKECKEYHDSTPNSEYQYLGGIIQGGMFDDLRKESAETLVNMDFPFYSIGGLSVGETPEQMHEVLSKVMLYTNKQKPRYLMGVSEPRDILNAVMEGIDMFDCVMPTRNARNGEAFTMNGIVRIRNSKYRMDDTVLEEDCDCYTCKNFSKAYLNHLDKTHEILFPILMTIHNVRFMQRFMKDLRNSIENDVFSDYRKDMMNKFY

SEQ ID NO: 52748 - protein, 372 aa, Brachyspira hyodysenteriae; identical to SEQ ID NO: 52747
  misc_feature (1)..(372): tr|A0A3B6VZ91|A0A3B6VZ91_BRAHO Queuine tRNA-ribosyltran sferase OS=Brachyspira hyodysenteriae ATCC 27164 OX=126 6923 GN=tgt PE=3 SV=1

SEQ ID NO: 52749 - protein, 372 aa, Brachyspira intermedia
  misc_feature (1)..(372): tr|G0EJS7|G0EJS7_BRAIP Queuine tRNA-ribosyltransferase OS=Brachyspira intermedia (strain ATCC 51140 / PWS/A) O X=1045858 GN=tgt PE=3 SV=1
MSFTFNVLKNSSQTAARLGKININGIEIDTPVFMPVGTKATVKALTPLMIEETESKIILANTYHLVLKPGLEVLKKFGGVKKFMGWKGAMLTDSGGFQVFSLAKLRKINDDGVEFSSHIDGSKYFFTPRSVMEAEHIIGADFIMCLDECSKHDASYEYVKEAMFRTHKWAKECKEYHDSTPNSEYQYLGGIIQGGMFDDLRKESAETLVNMDFPFYSIGGLSVGETPEQMHEVLSKVMLYTNKQKPRYLMGVSEPRDILNGVMEGIDMFDCVMPTRNARNGEAFTMNGVVRIRNSKYRMDDEVLEEGCDCYTCKNFSKAYLNHLDKTHEILFSILMTIHNVRFMQRFMKDLRNSIENDVFSDYRKDMMNKFY

SEQ ID NO: 52750 - protein, 373 aa, Brachyspira murdochii
  misc_feature (1)..(373): tr|D5U8H5|D5U8H5_BRAM5 Queuine tRNA-ribosyltransferase OS=Brachyspira murdochii (strain ATCC 51284 / DSM 12563 / 56-150) OX=526224 GN=tgt PE=3 SV=1
MSFSFNVLKTSSQTSARLGKIEINGIEIDTPVFMPVGTKATVKALTPLMIEETESKIILANTYHLVLKPGLEVLKKFGGVKKFMAWKGAMLTDSGGFQVFSLAKLRNINNDGVEFSSHIDGSKYLFMPKSVMEAEHIIGADFIMCLDECSKADASYEYAKEAMLRTHKWAKECKDYHDSTPNSEYQYLGGIIQGGMFDDLRKESAETLVNMNFPFYSIGGLSVGETPEKMHDVLSKVMLYTDKSKPRYLMGVSEPRDILNAVMEGIDMFDCVMPTRNARNGEAFTMNGIVRIRNSKYRTDDTALEDKCDCYTCRNFSKAYLNHLDKVHEILFSTLMTIHNVRFMQRFMKDLRSSIENDRFADYRKDMMLKFYE

SEQ ID NO: 52751 - protein, 375 aa, Brachyspira pilosicoli
  misc_feature (1)..(375): tr|A0A3B6VZT9|A0A3B6VZT9_BRAPL Queuine tRNA-ribosyltran sferase OS=Brachyspira pilosicoli P43/6/78 OX=1042417 G N=tgt PE=3 SV=1
MSFSFEVLKNSSQTHARLGKIEVNGVVIDTPVFMPVGTKATVKALTPAMIEETESKIILANTYHLVLKPGLEVIKKFGGVKKFMNWKGAMLTDSGGFQVFSLAQLRKITDEGVEFRSHIDGSKYFFTPKSVMEAEHIIGADFIMSFDECCKADADYNYAKEAMLRTHKWAKECKEYHDSTPNSEYQYLGGIIQGGMFDDLRKESAETLVNMDFPFYSIGGLSVGETPEKMHEVLSKVMLYTNKQKPRYLMGVSEPRDILNAVMEGIDMFDCVMPTRNARNGEAFTMNGVVRIRNSKYRMDDTVLEEGCDCYTCKNFSKAYLNHLDKSHEILFSILMTIHNIRFMQRFMKDLRNSIENDNFSEYRNTMMRKFYDNE

SEQ ID NO: 52752 - protein, 375 aa, Brachyspira pilosicoli
  misc_feature (1)..(375): tr|A0A5C8EJW9|A0A5C8EJW9_BRAPL Queuine tRNA-ribosyltran sferase OS=Brachyspira pilosicoli OX=52584 GN=tgt PE=3 SV=1
MSFSFEVLKNSSQTHARLGKIEVNGVVIDTPVFMPVGTKATVKALTPAMVEETESKIILANTYHLVLRPSLEVIKKFGGVKKFMNWKGAMLTDSGGFQVFSLAQLRKINDEGVEFRSHIDGTKYFFTPKSVMEAEHIIGADFIMSFDECCKADADYNYAKEAMLRTHKWARECKEYHDSTPNSEYQYLGGIIQGGMFDDLRKESAETLVNMDFPFYSIGGLSVGETPENMHEVLSKVMTYTNKQKPRYLMGVSEPRDILNAVMEGIDMFDCVMPTRNARNGEAFTMNGVIRIRNSKYRTDDTILEEGCDCYTCKNFSKAYLNHLDKSHEILFSILMTIHNMRFMQRFMKDLRNSIENDNFSEYRNTMMKRFYENE

SEQ ID NO: 52753 - protein, 373 aa, Brachyspira sp.
  misc_feature (1)..(373): tr|A0A2A4IPR1|A0A2A4IPR1_9SPIR Queuine tRNA-ribosyltran sferase OS=Brachyspira sp. G79 OX=1358104 GN=tgt PE=3 S V=1
MSFSFNVLKTSSETSARLGKIEINGIEIDTPVFMPVGTKATVKALTPLMIEETESKIILANTYHLVLKPGLEVLKKFGGVKKFMAWKGAMLTDSGGFQVFSLAKLRNINNDGVEFSSHIDGSKYLFTPRSVMEAEHIIGADFIMCLDECSKYDASYEYAKEAMLRTHKWAKECKDYHDSTPNSEYQYLGGIIQGGMFDDLRKESAETLVNMDFPFYSIGGLSVGETPEKMHDVLSKVMLYTDKNKPRYLMGVSEPRDILNAVMEGIDMFDCVMPTRNARNGEAFTMNGIVRIRNSKYRTDDTALEDKCDCYTCRNFSKAYLNHLDKVHEILFSTLMTIHNVRFMQRFMKDLRSSIENNKFADYRKDMMLKFYE

SEQ ID NO: 52754 - protein, 374 aa, Brachyspira sp.
  misc_feature (1)..(374): tr|R5H4H6|R5H4H6_9SPIR Queuine tRNA-ribosyltransferase OS=Brachyspira sp. CAG:484 OX=1262759 GN=tgt PE=3 SV=1
MRDNAHENFKYELVHTCKQTGARAGVFTTPHGVIKTPIFMPVGTNSAVKTLTSGQIADTEAQIILSNSYHLYLRAGTKRIKQFGGIHSWMNWHKPVLTDSGGFQVFSLAHLNKITEDGVEFRDPKDGKKHFISPEVSMEIQQDIGADIIMAFDQCAPYPCDYDTAKKAMERTHRWLERCFKAKTNPKQALFPIVQGAFFDDLRKESASVISSYDAVGYAIGGLSVGETKDLMNHFVEFTAPLLPAGKPRYLMGVGTPEDLLDGIKRGIDMFDCVLPTRNARHGSFFTWDGKRNIKNKQYSDDALPLVEGCNCYACKNHSRAYIRHLWRCQEATASTLLSIHNIKFLVDFSQKCRQAILDDKFGDFYNEHYSRLF

SEQ ID NO: 52755 - protein, 372 aa, Brachyspira suanatina
  misc_feature (1)..(372): tr|A0A0G4K8M9|A0A0G4K8M9_9SPIR Queuine tRNA-ribosyltran sferase OS=Brachyspira suanatina OX=381802 GN=tgt PE=3 SV=1
MSFTFNVLKNSSQTAARLGKININGIEIDTPVFMPVGTKATVKALTPLMIEETESKIILANTYHLVLKPGLEVLKKFGGVKKFMGWKGAMLTDSGGFQVFSLAKLRKINDDGVEFSSHIDGSKYFFTPRSVMEAEHIIGADFIMCLDECSKHDASYEYVKEAMFRTHKWAKECKEYHDSTPNSEYQYLGGIIQGGMFDDLRKESAETLVNMDFPFYSIGGLSVGETPEQMHEVLSKVMLYTNKQKPRYLMGVSEPRDILNGVMEGIDMFDCVMPTRNARNGEAFTMNGVVRIRNSKYRMDDEVLEEGCDCYTCKNFSKAYLNHLDKTHEILFSTLMTIHNVRFMQRFMKDLRNSIENDVFSDYRKDMMNKFY

SEQ ID NO: 52756 - protein, 382 aa, Bradymonadaceae bacterium
  misc_feature (1)..(382): tr|A0A3D8MXV1|A0A3D8MXV1_9DELT Queuine tRNA-ribosyltran sferase OS=Bradymonadaceae bacterium TMQ3 OX=2283320 GN =tgt PE=3 SV=1
MTSISNTVRCETFSFREVARDGAARAGELKLTHGTVQTPIFMPVGTVGTVKAMRPDELATQVEAQIILGNTYHLYLRPGLDVVRAHGGLHTMMGWDRPILTDSGGYQVFSLKDLRKIREEGVEFQDHISGSYHLFTPEKVIEIQETLGSDIMMAFDECPPAGAEERYMRDSMARTTRWEKRCLEARTRHDCALFGIGQGGTSEQLRREHLEELAPLPFEGMAIGGLSVGEETQAMYDTVEFTTPMMPEEKPKYLMGVGKPEDLVECIARGVDMFDCVIPTRNARNGHCFTSRGVVVVRNAVHKEDLRPLDPDCDCYTCQNFSRSYLRHLLKSGEMLGPQLCTLHNLRYFLTLVGQAREAIVEGRFEAFRKRFHTLQAEGGSR

SEQ ID NO: 52757 - protein, 504 aa, Bradymonadaceae bacterium
  misc_feature (1)..(504): tr|A0A3D8N1P1|A0A3D8N1P1_9DELT Queuine tRNA-ribosyltran sferase OS=Bradymonadaceae bacterium TMQ3 OX=2283320 GN =tgt PE=3 SV=1
MTDTTQEGAPSQALSFELKCTDGRARRGKVTVTHGSFETPAFMPVGTRGTVKGMTPRDLRETGAEICLGNTYHLNIAPGGKIVKKLGGLHGMMGWDAPILTDSGGFQVFSLPKLEIEEEGVTFAFKKGGKAIQLTPERSMQIQEALGADIIMAFDHVVAHPAPYQLAEEAVYRTSRWLERCRKAHTRTDQALFGIVQGSTFPNLRRLSVELICSQDLPGYAIGGLSVGEGHQLMMDTIDQTEPFMPAEKPRYLMGVGYPEDLVEAVARGVDMFDCVLPSRLARSGIIFTRHGRYRVTKGRYKADKFPLDTNCNCYACRNFSRAYINHLINSKEILGSVLATLHNITFYQDLMRAMRQAIEEGRFESFRRAFLDEYLSDDRKEELDLEEVLGVSENEGDDLPWKTTHSVVPPTTVEENRRRSRRDVEVSVPEERMKEHKRDSKSDSGKGSHTKAKGQGNTRRTSSGRSQKSAKSSKSGAPKSGGKNSGKSSKFSKSSKSGAGKPK

SEQ ID NO: 52758 - protein, 385 aa, Bradymonadales bacterium
  misc_feature (1)..(385): tr|A0A5B8XKY8|A0A5B8XKY8_9DELT Queuine tRNA-ribosyltran sferase OS=Bradymonadales bacterium V1718 OX=2600177 GN =tgt PE=3 SV=1
MTKPLKFELLKTDHDARRGRVTTLHGSFETPAFMPVGTRGTVKGLMPRDLKETGSEICLGNTYHLHIAPGDKVVRKFGGLHEFMGWDKSILTDSGGFQVFSLPGVQVEEEGVTFKFEKSGKPVTLTPERSVQIQENLGADIFMAFDVCVEFPCDYRRAQEAVYRTDRWLKRCKEAQTTADTQSLFGIVQGSTYDDLRALSAQLTIEHDLPGYAIGGVSVGETHDLMMQAIEFAAPFLPKDKPRYLMGVGYPEDLVEGVARGIDMFDCVLPSRLGRSGVIFSRRGRYRVTKGKYRNDKYPLDTNCSCYACQNFSRGYINHLLNVKEILGSTLATLHNITFYQDLMRGMRDAIEQGRFEKFRENFLEEYLSEDRFEELVQSRDDNDE

SEQ ID NO: 52759 - protein, 434 aa, Bradymonadales bacterium
  misc_feature (1)..(434): tr|A0A5B8YAM1|A0A5B8YAM1_9DELT Queuine tRNA-ribosyltran sferase OS=Bradymonadales bacterium YN101 OX=2292766 GN =tgt PE=3 SV=1
MTDSPLQFELHTTDGRARRGKVTVPHGSFNTPAFMPVGTRATVKGLMPRDLRETGSEICLSNTYHLNISPGPKIVKKMGGLHHFMGWDAPILTDSGGYQVFSLPKAKLDEEGVTFKFEQKGGKKITLTPEKSMQIQEDLGADIIMAFDVCVPHPCEYQDAREAVYRTIRWLERCKEAHSRKDQALFGIIQGSTYADLRALSTQLTREIDLPGYAIGGLSVGEGHELMMSSIDQTEPGMIKEKPRYLMGVGYPEDIVEAVARGIDMFDCVIPSRYARSGVAFTRRGRFRVTNARYRSDKFPLDTNCNCYCCRNFSRAYLNHLINTNEILGSALMTLHNVTFYQDMMRAIRMAIEEGSFEKFRQAFLDEYLSDDKKEELGFDDLDGRYDQEDFGWDVKHSVVPPTDIAENLEKTEPVDEVAGPRRRIEKIKNLGDD

SEQ ID NO: 52760 - protein, 373 aa, Bradymonas sediminis
  misc_feature (1)..(373): tr|A0A2Z4FKZ7|A0A2Z4FKZ7_9DELT Queuine tRNA-ribosyltran sferase OS=Bradymonas sediminis OX=1548548 GN=tgt PE=3 SV=1
MAIKCETFSFEVQAQDGTARAGRIETAHGSIETPIFMPVGTQGTVKSLTPEDLRDEIEAQIILGNTYHLYLRPGLDVIKKHGGLHQFMNWNHPILTDSGGYQVFSLKDLRKIKEEGVLFQDHIGGAKHLFTPEKVIEIQETLGSDIMMAFDECPELPCTEDYMQKSMARTTRWAKRCLEARTRPDCALFGIIQGGTSEKLRKLHADELCKLPFDGFAIGGLSVGEAKDKMYETVEFTTPMMPDDKPKYLMGVGKPDDLIECIARGVDMFDCVLPSRNARNGQCFTHSGVVNIRNAEYAEDMAPIDPDCDCYTCKNYTRSYIRHLYKAKEILSARLCTLHNLHYFLTLVGQAREAIIEGRFEQFRLDYYAAKED

SEQ ID NO: 52761 - protein, 408 aa, Bradymonas sediminis
  misc_feature (1)..(408): tr|A0A2Z4FJ77|A0A2Z4FJ77_9DELT Queuine tRNA-ribosyltran sferase OS=Bradymonas sediminis OX=1548548 GN=tgt PE=3 SV=1
MASTTTGPLSFDLKGTDGRARRGRVTVPHGVIQTPAFMPVGTRATVKGLMPRDLKATGSEICLANTYHMDISPGPKIVKKMGGLHEFMGWDKPILTDSGGYQVFSLPKTQLDEEGVTFRFEKKGGKKVKLTPERSMQIQQDLGADIAMAFDVCVPYPCDYKNAQDAVYRTIRWLERCKEAHTRPDQALFGIVQGSSYADLRGLSAQLTMGIDLPGYAIGGLSVGEGHSIMMAMIDCTEPSMVKEKPRYLMGVGYPEDIVEAVARGVDMFDCVIPTRYARSGVAFARHGRFRVSNARYKTDKYPLDTNCSCYTCKNFTRAYLNHLINTNEILGSALMTLHNVTFYQDLMRTIRTAIEEKNFEKFRVSFLQEYLAEDKKEELGIEDIDGRYDQDDFSWDVEHSVIRPTDD

SEQ ID NO: 52762 - protein, 434 aa, Bradymonas sp.; identical to SEQ ID NO: 52759
  misc_feature (1)..(434): tr|A0A4Y6PZL5|A0A4Y6PZL5_9DELT Queuine tRNA-ribosyltran sferase OS=Bradymonas sp. YN101 OX=2589075 GN=tgt PE=3 SV=1

SEQ ID NO: 52763 - protein, 374 aa, Bradymonas sp.
  misc_feature (1)..(374): tr|A0A4Y6Q1S3|A0A4Y6Q1S3_9DELT Queuine tRNA-ribosyltran sferase OS=Bradymonas sp. YN101 OX=2589075 GN=tgt PE=3 SV=1
MTVQCETFSFEVHAEDGMARAGEVETAHGRFQTPIFMPVGTKGTVKAMTPEDLTDQIGAQIILGNTYHLYLRPGLDIIRKHGGLHEFMNWDGPILTDSGGYQVFSLEDLRKIKEDGVEFQDHIEGSYHFFTPEKVIEIQEVLGSDIMMAFDECPALPCSDEYMRESLARTTRWETRCLEARTRTDCALFGILQGGTSPEFRRAHIEELCELPFDGFAIGGLSVGEAKDKMYETVELSTPLMPHDKPKYLMGVGKPDDLVECIARGVDMFDCVIPTRNARNGQCFTSQGVVKIRNAVYAEDMRPLDPNCECYTCQNYTRSYLRHLYKAQEILSARLCTLHNLHYFLELTRTARQAIVEGRFEAFRKEYYARKEHA

SEQ ID NO: 52764 - protein, 377 aa, Bradyrhizobiaceae bacterium; identical to SEQ ID NO: 51316
  misc_feature (1)..(377): tr|F7QMS0|F7QMS0_9BRAD Queuine tRNA-ribosyltransferase OS=Bradyrhizobiaceae bacterium SG-6C OX=709797 GN=tgt P E=3 SV=1

SEQ ID NO: 52765 - protein, 381 aa, Bradyrhizobiaceae bacterium
  misc_feature (1)..(381): tr|A0A431RTF3|A0A431RTF3_9BRAD Queuine tRNA-ribosyltran sferase OS=Bradyrhizobiaceae bacterium OX=2072420 GN=tg t PE=3 SV=1
MNPDNDLPNHFELLATDGAARTGRLTTPHGVVRTPAFMPVGTAGAMKGMHWREVRDAGADIVLGNTYHLMLRPTAERIAALGGLQKFTGWNGPMLTDSGGFQVMSLSDLRKVTENAVTFRSHIDGAKVELSPERSIEVQRLLGSDIAMQMDECVRLPAERADIERAMQLSLRWAERSKRAFASAPDGYMLFGIVQGGDIPELRHASARGLVAIGFHGYAIGGLAVGEPQAVMLAMIDETAPLLPKERPRYLMGVGTPDDILEAVKRGIDMFDCVMPTRNGRHGVAFTRFGQVNLRNARHADDPRPLDEESSWPSTRDCARAYLHHLVKAGETLGAMLLSEINVAYYQSLMQGIREAIAHGRFEQFYQRTREDWARGDIAPR

SEQ ID NO: 52766 - protein, 377 aa, Bradyrhizobium arachidis
  misc_feature (1)..(377): tr|A0A1I7ITC1|A0A1I7ITC1_9BRAD Queuine tRNA-ribosyltran sferase OS=Bradyrhizobium arachidis OX=858423 GN=tgt PE =3 SV=1
MTLPNHFELLATDGAARTGRLTTPHGMVRTPAFMPVGTAGAMKGMHWREVREAGADIVLGNTYHLMLRPGAERIAALGGLQRFTGWNGPMLTDSGGFQVMSLADLRKVSEHAVTFRSHIDGAKVELSPERSIEVQRFLGSDIAMQMDECVRLPAERDDIERAMRLSLRWAERSKRAFESAPDGYMLFGIVQGGDIPQLRHASAQGLVEMGFHGYAIGGLAVGEPQAVMLAMIDETAPALPTDRPRYLMGVGTPDDILEAVKRGVDMFDCVMPTRNGRHGVAFTRFGQVNLRNARHADDPRPLDEASTWPSARNYARAYLHHLVKAGETLGAMLLSEINIAYYQFLMQGIRDAIAHGTFEEFYQRTRADWSRGDIAPR

SEQ ID NO: 52767 - protein, 387 aa, Bradyrhizobium betae
  misc_feature (1)..(387): tr|A0A4V1P617|A0A4V1P617_9BRAD Queuine tRNA-ribosyltran sferase OS=Bradyrhizobium betae OX=244734 GN=tgt PE=3 S V=1
MNLPDTDLPNTGLPNHFELRATDGAARTGRLTTPHGVVRTPAFMPVGTAGAMKGMHWREVRDAGADIVLGNTYHLMLRPGAERIAALGGLQTFTGWNGPMLTDSGGFQVMSLADLRKVTEHAVTFRSHIDGAKVELSPERSIEVQRFLGSDIAMQMDECVRLPAERDDIERAMRLSLRWAERSKRAFESAPDGYMLFGIVQGGDIPQLRHASAEGLVEIGFHGYAIGGLAVGEPQTVMLAMIDETAPRLPKERPRYLMGVGTPDDILEAVKRGIDMFDCVMPTRNGRHGVAFTRFGQVNLRNARHADDPRPLDEESSWPSTRNYARAYLHHLVKAGETLGAMLLSEINIAYYQFLMQGIRDAIAHGKFEEFYQRTREDWARGDIAPR

SEQ ID NO: 52768 - protein, 377 aa, Bradyrhizobium canariense
  misc_feature (1)..(377): tr|A0A1H1Q1A2|A0A1H1Q1A2_9BRAD Queuine tRNA-ribosyltran sferase OS=Bradyrhizobium canariense OX=255045 GN=tgt P E=3 SV=1
MSLPNHFDLVATDGAARTGRLTTPHGVVRTPVFMPVGTAGAMKGVHWREVRDAGADIVLGNTYHLMLRPGAERIAALGGLQVFTGWQGPMLTDSGGFQVMSLSELRKVSEAAVTFRSHIDGAKIELSPERSIEVQRLLGSDIAMQMDECVRLPAERDDIERAMQLSLRWAERSKRAFETAPPGYMLFGIAQGGDIPELRQASARGLVDIGFHGYAIGGLAVGEPQSVMLAMIEEVAPILPPDRPRYLMGVGTPDDLLEAVARGIDMFDCVMPTRNGRHGVAFTRFGQVNLRNARHADDPRPLDEESPWPSARNCSRAYLHHLVKSGETLGAMLLSEINIAYYQQLMHDIRSAVSEGRFADLREHIRAGWAKGDITAR

SEQ ID NO: 52769 - protein, 382 aa, Bradyrhizobium canariense
  misc_feature (1)..(382): tr|A0A1X3DXF3|A0A1X3DXF3_9BRAD Queuine tRNA-ribosyltran sferase OS=Bradyrhizobium canariense OX=255045 GN=tgt P E=3 SV=1
MNRPDTALPNHFELLATDGAARTGRLTTPHGVVRTPAFMPVGTAGAMKGMHWREVREAGADIVLGNTYHLMLRPGAERIAALGGLQTFTGWNGPMLTDSGGFQVMSLADLRKVSEQAVTFRSHIDGAKVELSPERSIEVQRLLGSDIAMQMDECVRLPAERADIDRAMQLSLRWAERSKRAFESAPDGYMLFGIVQGGDIPQLRHASAQGLIEIGFHGYAIGGLAVGEPQAVMLAMIDETAPLLPKERPRYLMGVGTPDDILEAVKRGIDMFDCVMPTRNGRHGVAFTRFGQVNLRNARHADDPRPLDEESSWPSARSYARAYLHHLVKAGETLGAMLLSEINIAYYQFLMQGIRDAIAQGTFEEFYRRTREDWGRGDIAPR

SEQ ID NO: 52770 - protein, 377 aa, Bradyrhizobium centrolobii
  misc_feature (1)..(377): tr|A0A176Y731|A0A176Y731_9BRAD Queuine tRNA-ribosyltran sferase OS=Bradyrhizobium centrolobii OX=1505087 GN=tgt PE=3 SV=1
MSLPNHFELLATDGAARTGRLTTPHGVVRTPAFMPVGTAGAMKGMHWREVRDAGADIVLGNTYHLMLRPGAERISALGGLQRFTGWNGPMLTDSGGFQVMSLSDLRKVSENAVTFRSHIDGAKVELSPERSIEVQRFLGSDIAMQMDECVRLPAERDDIERAMQLSLRWAERSKRAFESAPDGYMLFGIVQGGDVPQLRHASAEGLVETGFHGYAIGGLAVGEPQEVMLAMIDETAPALPRGRPRYLMGVGTPDDILEAVKRGIDMFDCVMPTRNGRHGVAFTRFGQVNLRNARHADDPRPLDEESSWPSTRSYARAYLHHLVKSGETLGAMLLSEINVAYYQFLMQGIRDAIAQGTFEEFYQRTREDWARGDIAPR

SEQ ID NO: 52771 - protein, 413 aa, Bradyrhizobium daqingense
  misc_feature (1)..(413): tr|A0A562KWP2|A0A562KWP2_9BRAD Queuine tRNA-ribosyltran sferase OS=Bradyrhizobium daqingense OX=993502 GN=tgt P E=3 SV=1
MGPIVSQPEPLTGRGMAWGGLIGLVRHAISTAMNPDNDLPNHFELLATDGAARTGRLTTPHGVVRTPAFMPVGTAGAMKGMHWREVRDAGADIVLGNTYHLMLRPGAERIAALGGLQTFTGWNGPMLTDSGGFQVMSLADLRKVSEHAVTFRSHIDGAKVELSPERSIEVQRLLGSDIAMQMDECVRLPAERADIERAMQLSLRWAERSKRAFASAPDGYMLFGIVQGGDVPQLRHASAQGLVEIGFHGYAIGGLAVGEPQAVMLAMIDETGPLLPKQRPRYLMGVGTPDDILEAVKRGVDMFDCVMPTRNGRHGVAFTRFGQVNLRNARHADDPRPLDEESSWPSTRSCARAYLHHLVKAGETLGAMLLSEINVAYYQSLMQGIRDAIAQGKFEEFYRRTREDWARGDIAPR

SEQ ID NO: 52772 - protein, 405 aa, Bradyrhizobium diazoefficiens
  misc_feature (1)..(405): tr|Q89L65|Q89L65_BRADU Queuine tRNA-ribosyltransferase OS=Bradyrhizobium diazoefficiens (strain JCM 10833 / IA M 13628 / NBRC 14792 / USDA 110) OX=224911 GN=tgt PE=3 SV=1
MAEVRSRGLIGLLRHAISTAMNRPDAALPNHFELLATDGTARTGRLTTPHGVVRTPAFMPVGTAGAMKGMHWREVRDAGADIVLGNTYHLMLRPGAERIAALGGLQRFTGWSGPMLTDSGGFQVMSLADLRKVSEHAVTFRSHIDGAKVELSPERSIEVQRFLGSDIAMQMDECVRLPAEHADIERAMQLSLRWAERSKRAFESAPDGYMLFGIVQGGDVPQLRHASAEGLVAIGFHGYAIGGLAVGEPQAVMLAMIDETAPMLPKERPRYLMGVGTPDDILEAVKRGIDMFDCVMPTRNGRHGVAFTRFGQVNLRNARHADDPRPLDEESTWPSTRSYARAYLHHLVKAGETLGAMLLSEINIAYYQSLMQGIRDAIAHGTFDEFYQRTREDWARGDIAPRQGD

SEQ ID NO: 52773 - protein, 405 aa, Bradyrhizobium diazoefficiens; identical to SEQ ID NO: 52772
  misc_feature (1)..(405): tr|A0A2A6MRR4|A0A2A6MRR4_9BRAD Queuine tRNA-ribosyltran sferase OS=Bradyrhizobium diazoefficiens OX=1355477 GN= tgt PE=3 SV=1

SEQ ID NO: 52774 - protein, 377 aa, Bradyrhizobium elkanii
  misc_feature (1)..(377): tr|A0A1E3EKI3|A0A1E3EKI3_BRAEL Queuine tRNA-ribosyltran sferase OS=Bradyrhizobium elkanii OX=29448 GN=tgt PE=3 SV=1
MNLPNHFELLATDGAARTGRLTTAHGLVRTPAFMPVGTAGAMKGMHWREVRDAGADIVLGNTYHLMLRPGAERIAGLGGLQRFTGWGGPMLTDSGGFQVMSLSELRKVTEKAVTFRSHIDGTKVELSPERSIEVQRLLGSDIAMQMDECVRLPAERADIERAMQLSLRWAERSKRAFEAAPDGYMLFGIVQGGDVPDLRHASARGLTDIGFHGYAIGGLAVGEPQAVMLAMIEETAPALPVDRPRYLMGVGTPEDILEAVARGVDMFDCVMPTRNGRHGMAFTRFGQINLRNARHVDDPRPLDEESPWPAANGYSRAYLHHLVRSGETLGAMLLSEINVAYYQQLMQGIRDAVANGTFEDFRTKTRAGWARGDIAPR

SEQ ID NO: 52775 - protein, 377 aa, Bradyrhizobium elkanii
  misc_feature (1)..(377): tr|A0A4Q4K4F4|A0A4Q4K4F4_BRAEL Queuine tRNA-ribosyltran sferase OS=Bradyrhizobium elkanii OX=29448 GN=tgt PE=3 SV=1
MNLPNHFELLATDGAARTGRLTTPHGLVRTPAFMPVGTAGAMKGMHWREVRDAGADIVLGNTYHLMLRPGAERIAGLGGLQRFTGWGGPMLTDSGGFQVMSLSELRKVTEKAVTFRSHIDGTKVELSPERSIEVQRLLGSDIAMQMDECVRLPAERADIERAMQLSLRWAERSKHAFEAAPDGYMLFGIVQGGDVPDLRHASARGLTDIGFHGYAIGGLAVGEPQAVMLAMIEETAPALPVDRPRYLMGVGTPEDILEAVARGVDMFDCVMPTRNGRHGMAFTRFGQINLRNARHVDDPRPLDDESPWPAANGYSRAYLHHLVRSGETLGAMLLSEINVAYYQQLMQGIRDAVANGTFEDFRTKTRAGWARGDIAPR

SEQ ID NO: 52776 - protein, 381 aa, Bradyrhizobium erythrophlei
  misc_feature (1)..(381): tr|A0A1N6KAD6|A0A1N6KAD6_9BRAD Queuine tRNA-ribosyltran sferase OS=Bradyrhizobium erythrophlei OX=1437360 GN=tg t PE=3 SV=1
MSLPDHPANHFDLLATDGAARTGRLTTPHGLVRTPGFMPVGTAGAMKGMHWREVREAGADIVLGNTYHLMLRPGAERIAGLGGLQRFTGWGGPMLTDSGGFQVMSLSELRKVTENAVTFRSHIDGAKVELSPERSIEVQRLLGSDIAMQMDECVRLPAERGDIERAMQLSLRWAARSKRAFETAPEGYMLFGIVQGGDVPELRHASARGLVEIGFHGYAIGGLAVGEPQAVMLAMIEETAPRLPADRPRYLMGVGTPEDILEAVARGIDMFDCVMPTRNGRHGMAFTRFGQINLRNARHIDDPRPLDEASPWPSTRNYSRAYLHHLVRAGETLGAMLLSEINVAYYQELMQGIRDAIAGGTFEDFRKQTRADWARGDIAPR

SEQ ID NO: 52777 - protein, 377 aa, Bradyrhizobium erythrophlei
  misc_feature (1)..(377): tr|A0A1M5RSU5|A0A1M5RSU5_9BRAD Queuine tRNA-ribosyltran sferase OS=Bradyrhizobium erythrophlei OX=1437360 GN=tg t PE=3 SV=1
MSLPNHFDLVATDGRARTGRLTTPHGVVRTPAFMPVGTAGAMKGMHWREVRDAGADIVLGNTYHLMLRPGAERIAALGGLQTFTGWNGPMLTDSGGFQVMSMSELRKVAEKAVTFRSHIDGAMVELSPERSIEVQRLLGSDIAMQMDECVRLPADPDDIERAMLLSLRWAERSKRAFETAPPGYMLFGIAQGGDVSQLRQASARGLVEIGFHGYAIGGLAVGEPQAVMLAMVEEVAAHLPDDRPRYLMGVGTPDDILEAVARGIDMFDCVMPTRNGRHGMAFTRFGQINLRNARHADDPRPLDEQSLWPSTRDYSRAYLHHLVKSGETLGAMLLSEINIAYYQRLMADIRDAISQGTFADFRERTRAGWAMGDIPPR

SEQ ID NO: 52778 - protein, 381 aa, Bradyrhizobium genosp.
  misc_feature (1)..(381): tr|A0A4Q7FP17|A0A4Q7FP17_9BRAD Queuine tRNA-ribosyltran sferase OS=Bradyrhizobium genosp. SA-3 OX=508868 GN=tgt PE=3 SV=1
MNPDNDLPNHFELLATDGAARTGRLTTPHGVVRTPAFMPVGTAGAMKGMHWREVRDAGADIVLGNTYHLMLRPGAERIAALGGLQTFTGWNGPMLTDSGGFQVMSLADLRKVSEHAVTFRSHIDGAKVELSPERSIEVQRFLGSDIAMQMDECVRLPAERDDIERAMRLSLRWAERSKRAFASASAGYMLFGIVQGGDVPQLRHASAQGLVEIGFHGYAIGGLAVGEPQAVMLAMIDETSPLLPRERPRYLMGVGTPDDILEAVKRGVDMFDCVMPTRNGRHGVAFTRFGQVNLRNARHANDPRPLDEESSWPSTRSCARAYLHHLVKAGETLGAMLLSEINVAYYQSLMQGIRDAVAQGRFEEFYQRTREDWTRGDIAPR

SEQ ID NO: 52779 - protein, 377 aa, Bradyrhizobium guangdongense
  misc_feature (1)..(377): tr|A0A410VGN5|A0A410VGN5_9BRAD Queuine tRNA-ribosyltran sferase OS=Bradyrhizobium guangdongense OX=1325090 GN=t gt PE=3 SV=1
MNLPNHFELLATDGAARTARLTTPHGVVRTPAFMPVGTAGAMKGMHWREVREAGADIVLGNTYHLMLRPGAERINGLGGLQRFTGWNGPMLTDSGGFQVMSLSDLRKISEHAVTFRSHIDGAKIELSPERSIEVQRLLGSDIAMQMDECVRLPAERDDIDRAMRLSLRWAERSKRAFESAPDGYMLFGIVQGGDVPQLRHASAQGLVEIGFHGYAIGGLAVGEPQAVMLAMIDETAPALPTDRPRYLMGVGTPDDILEAVKRGVDMFDCVMPTRNGRHGVAFTRFGQVNLRNARHADDPRPLDEESSWPSACNYARAYLHHLVKAGETLGAMLLSEINIAYYQFLMQGIRNAIAHGTFEEFYQRTREDWARGDIAPR

SEQ ID NO: 52780 - protein, 382 aa, Bradyrhizobium guangzhouense
  misc_feature (1)..(382): tr|A0A4Q0RIQ6|A0A4Q0RIQ6_9BRAD Queuine tRNA-ribosyltran sferase OS=Bradyrhizobium guangzhouense OX=1325095 GN=t gt PE=3 SV=1
MNPPATGLPNHFELLATDGAARTGRLTTPHGVVRTPAFMPVGTAGAMKGMHWREVRDAGADIVLGNTYHLMLRPGAERIAALGGLQRFTGWNGPMLTDSGGFQVMSLADLRKVSEHAVTFRSHIDGAKVELSPERSIEVQRFLGSDIAMQMDECVRLPAERDDIERAMRLSLRWAERSKRAFESAPDGYMLFGIVQGGDVPELRHASAQGLVEIGFHGYAIGGLAVGEPQAVMLAMIDETAPRLPADRPRYLMGVGTPDDILEAVKRGVDMFDCVMPTRNGRHGVAFTRFGQVNLRNARHADDPRPLDEESVWPSTRNCARAYLHHLVKAGETLGAMLLSEINIAYYQFLMQGIRDAIAHGTFDEFYQRTREDWARGDIAPR

SEQ ID NO: 52781 - protein, 382 aa, Bradyrhizobium huanghuaihaiense
  misc_feature (1)..(382): tr|A0A562RHU8|A0A562RHU8_9BRAD Queuine tRNA-ribosyltran sferase OS=Bradyrhizobium huanghuaihaiense OX=990078 GN =tgt PE=3 SV=1
MNLPDTNLPNHFELLATDGAARTGRLTTPHGVVRTPAFMPVGTAGAMKGMHWREVREAGADIVLGNTYHLMLRPGAERIAALGGLQRFTGWNGPMLTDSGGFQVMSLADLRKVSEHAVTFRSHIDGAKVELSPERSIEVQRFLGSDIAMQMDECVRLPAERDDIDRAMRLSLRWAERSKRAFESAPDGYMLFGIVQGGDIPQLRHASAQGLVEIGFHGYAIGGLAVGEPQEVMLAMIDETAPMLPKERPRYLMGVGTPDDILEAVKRGIDMFDCVMPTRNGRHGVAFTRFGQVNLRNARHADDPRPLDEESSWPSTRNCARAYLHHLVKAGETLGAMLLSEINVAYYQSLMQGIRDAIAHGTFDEFYQRTREDWARGDIAPR

SEQ ID NO: 52782 - protein, 377 aa, Bradyrhizobium icense
  misc_feature (1)..(377): tr|A0A1B1UH17|A0A1B1UH17_9BRAD Queuine tRNA-ribosyltran sferase OS=Bradyrhizobium icense OX=1274631 GN=tgt PE=3 SV=1
MNLPNHFELLATNGTARTGRLTTPHGVVQTPAFMPVGTAGAMKGMHWREVRDAGADIVLGNTYHLMLRPGAERIAALGGLQTFTGWNGPMLTDSGGFQVMSLSDLRKVSEKAVTFRSHIDGTKVELSPERSIEVQRLLGSDIAMQMDECVRLPAARDDIERAMRLSLRWAERSKRAFETAPDGYMLFGIVQGGDIPEMRHISARELVDIGFHGYAIGGLAVGEPQAVMLSMIEETAPALPADRPRYLMGVGTPEDLLEAVARGIDMFDCVMPTRNGRHGMAFTRFGQINLRNARHADDPRPLDEESEWPAARNISRAYLHHLVRSGETLGAMLLSEINVAYYQYLMQGMRDAITAGTFEAFQKQTRAGWARGDIAPR

SEQ ID NO: 52783 - protein, 382 aa, Bradyrhizobium japonicum
  misc_feature (1)..(382): tr|A0A1L3FEW8|A0A1L3FEW8_BRAJP Queuine tRNA-ribosyltran sferase OS=Bradyrhizobium japonicum OX=375 GN=tgt PE=3 SV=1
MNLPDTGLPNHFELLATDGAARTGRLTTPHGVVRTPAFMPVGTAGAMKGMHWREVREAGADIVLGNTYHLMLRPGAERISALGGLQRFTGWNGPMLTDSGGFQVMSLSDLRKVTENAVTFRSHIDGAKVELSPERSIEVQRFLGSDIAMQMDECVRLPAERDDIERAMRLSLRWAERSKRAFESAPDGYMLFGIVQGGDVPQLRHASAEGLVAIGFHGYAIGGLAVGEPQAVMLAMIDETAPMLPRERPRYLMGVGTPDDILEAVKRGIDMFDCVMPTRNGRHGVAFTRFGQVNLRNARHADDPRPLDAESSWPSACNYARAYLHHLVKAGETLGAMLLSEINIAYYQFLMQGIRDAIAHGTFDEFYQRTRQDWARGDIAPR

SEQ ID NO: 52784 - protein, 382 aa, Bradyrhizobium japonicum
  misc_feature (1)..(382): tr|A0A1Y2JB77|A0A1Y2JB77_BRAJP Queuine tRNA-ribosyltran sferase OS=Bradyrhizobium japonicum OX=375 GN=tgt PE=3 SV=1
MNLPDTGLPNHFELLATDGAARTGRLTTPHGVVRTPAFMPVGTAGAMKGMHWREVREAGADIVLGNTYHLMLRPGAERISALGGLQRFTGWNGPMLTDSGGFQVMSLSDLRKVTENAVTFRSHIDGAKVELSPERSIEVQRFLGSDIAMQMDECVRLPAERDDIERAMRLSLRWAERSKRAFESAPDGYMLFGIVQGGDVPQLRHASAEGLVAIGFHGYAIGGLAVGEPQAVMLAMIDETAPMLPRERPRYLMGVGTPDDILEAVKRGIDMFDCVMPTRNGRHGVAFTRFGQVNLRNARHADDPRPLDEASSWPSARNYARAYLHHLVKAGETLGAMLLSEINIAYYQFLMQGIRDAIAHGTFDEFYQRTRQDWARGDIAPR

SEQ ID NO: 52785 - protein, 377 aa, Bradyrhizobium jicamae
  misc_feature (1)..(377): tr|A0A0R3KCQ1|A0A0R3KCQ1_9BRAD Queuine tRNA-ribosyltran sferase OS=Bradyrhizobium jicamae OX=280332 GN=tgt PE=3 SV=1
MSLPNHFELLATDSAARTGRLTTPHGVVQTPAFMPVGTAGAMKGMHWREVRDAGADIVLGNTYHLMLRPGAERIAALGGLQTFTGWNGPMLTDSGGFQVMSLSDLRKVTEKAVTFRSHIDGAKVELSPERSIEVQRLLGADIAMQMDECVRLPATRDDIERAMRLSLRWAERSKRAFESALDGYMLFGIVQGGDIPEMRHVSACELVEIGFHGYAIGGLAVGEPQVVMLAMVEETAPALPADRPRYLMGVGTPEDLLESVARGIDMFDCVMPTRNGRHGMAFTRFGQINLRNARHADDPRPLDEESEWPAARNYSRAYLHHLVRSGETLGAMLLSEINVAYYQHLMRGMREAIASGMFETFQNQTRAGWARGDIAPR

SEQ ID NO: 52786 - protein, 377 aa, Bradyrhizobium lablabi
  misc_feature (1)..(377): tr|A0A2H9VCE5|A0A2H9VCE5_9BRAD Queuine tRNA-ribosyltran sferase OS=Bradyrhizobium lablabi OX=722472 GN=tgt PE=3 SV=1
MSLPNHFELIATDGTARTGRLTTPHGAVQTPAFMPVGTAGAMKGMHWREVRDAGTDIVLGNTYHLMLRPGAERIAALGGLQQFTGWGGPMLTDSGGFQVMSLSELRKVSEHAVTFRSHIDGAKVELSPERSIEVQRLLGSDIAMQMDECVRLPAERADIERAMQLSLRWAERSKRAFETAPTGTMLFGIVQGGDVPALRQTNARGLIDIGFHGYAIGGLAVGEPQAVMLDMIEETAPVLPQDRPRYLMGVGTPEDILEAVARGIDMFDCVMPTRNGRHGMAFTRFGQINLRNARHADDPRPLDEISSWPATQNYSRAYLHHLVRSGETLGAMLLSEINIAYYQQLMGDIRAAIAGGTFEDFKNQTRADWARGDIAVK

SEQ ID NO: 52787 - protein, 377 aa, Bradyrhizobium lablabi
  misc_feature (1)..(377): tr|A0A0R3ML45|A0A0R3ML45_9BRAD Queuine tRNA-ribosyltran sferase OS=Bradyrhizobium lablabi OX=722472 GN=tgt PE=3 SV=1
MSLPNHFELLATNGAARTGRLTTPHGVVQTPAFMPVGTAGAMKGMHWREVRDAGADIVLGNTYHLMLRPGAERIAVLGGLQTFTGWNGPMLTDSGGFQVMSLSDLRKVSEKAVTFRSHIDGAKVELSPERSIEVQRLLGADIAMQMDECVRLPAGRDDIERAMRLSLRWAERSKRAFETAPDGYMLFGIVQGGDIPEMRHTSARELVEIGFHGYAIGGLAVGEPQAVMLAMIEETAPALPVDRPRYLMGVGTPEDLLEAVARGIDMFDCVMPTRNGRHGMAFTRFGQINLRNARHADDPRPLDEESEWPSTRNISRAYLHHLVRSGETLGAMLLSEINVAYYQHLMRGMREAISQGAFASFRERTRAGWAKGDIPPR

SEQ ID NO: 52788 - protein, 381 aa, Bradyrhizobium liaoningense
  misc_feature (1)..(381): tr|A0A151FJG7|A0A151FJG7_9BRAD Queuine tRNA-ribosyltran sferase OS=Bradyrhizobium liaoningense OX=43992 GN=tgt PE=3 SV=1
MNPDNDLPNHFEVLAADGAARTGRLTTPHGVVRTPAFMPVGTAGAMKGMHWREVRDAGADIVLGNTYHLMLRPSAERIAVLGGLQRFTGWNGPMLTDSGGFQVMSLADLRKVSENAVTFRSHIDGAKVELSPERSIEVQRLLGSDIAMQMDECVRLPAERADIERAMQLSLRWAERSKRAFESAPDGYMLFGIVQGGDIPQLRHASAEGLVTIGFHGYAIGGLAVGEPQAVMLAMIDETAPLLPRERPRYLMGVGTPDDILEAVKRGIDMFDCVMPTRNGRHGVAFTRFGQVNLRNARHADDPRPLDEESSWPAARNYARAYLHHLVKAGETLGAMLLSEINIAYYQFLMQGIRGAIAQGQFDEFYQRTREDWARGDIAPR

SEQ ID NO: 52789 - protein, 376 aa, Bradyrhizobium lupini
  misc_feature (1)..(376): tr|K5D0G1|K5D0G1_RHILU Queuine tRNA-ribosyltransferase OS=Bradyrhizobium lupini HPC(L) OX=1229491 GN=tgt PE=3 SV=1
MHDKFTFTLKATSGGARLGEVAMPRGVIRTPAFMPVGTVGTVKAMYLDQVRELGADIILGNTYHLMLRPGPERVARLGGLHELIRWPHPILTDSGGFQVMSLSGLRKLDEKGVTFKSHVDGSLHHMSPERSIEIQGLLDSDIQMQLDECIALPAERKEIERAMEMSLRWAERCRVAFGDQPGKAMFGIVQGGDQPDLRIRSAEGLKQLDLKGYAVGGLAVGEPQDVMLGMLDITLPVLPTEKPRYLMGVGTPDDILKSVARGIDMFDCVMPTRSGRHGLAFTRRGKVNIRNARHAEDMRPLDEQSNCPASRDYSRAYLHHLVRANEALGGMLLSWHNLAYYQELMQGIRKSIEEGRFADFYAETIEMWARGDIDPV

SEQ ID NO: 52790 - protein, 377 aa, Bradyrhizobium macuxiense
  misc_feature (1)..(377): tr|A0A560MHG9|A0A560MHG9_9BRAD Queuine tRNA-ribosyltran sferase OS=Bradyrhizobium macuxiense OX=1755647 GN=tgt PE=3 SV=1
MNLPNHFELLATDGAARTGRLTTPHGLVRTPAFMPVGTAGAMKGMHWREVRDAGADIVLGNTYHLMLRPGAERIARLGGLQRFTGWGGPMLTDSGGFQVMSLSELRKVTEKAVTFRSHIDGAKVELSPERSIEVQRLLGSDIAMQMDECVRLPAERADIERAMQLSLRWAERSKRAFESASDGYMLFGIVQGGDIPDLRHASARSLTDIGFHGYAIGGLAVGEPQAVMLSMIEETAPALPVDRPRYLMGVGTPEDILEAVARGVDMFDCVMPTRNGRHGMAFTRFGQINLRNARHIDDPRPLDEESLWPAARDYSRAYLHHLVRAGETLGAMLLSEINVAYYQELMQGIRAAVASGTFEDFRTKTRAGWARGDIAPM

SEQ ID NO: 52791 - protein, 377 aa, Bradyrhizobium macuxiense
  misc_feature (1)..(377): tr|A0A109JYG3|A0A109JYG3_9BRAD Queuine tRNA-ribosyltran sferase OS=Bradyrhizobium macuxiense OX=1755647 GN=tgt PE=3 SV=1
MNLPNHFELLATDGAARTGRLTTPHGVVRTPTFMPVGTAGAMKGMHWREVREAGADIVLGNTYHLMLRPGAERVAGLGGLQRFTGWGGPMLTDSGGFQVMSLSELRKVTEKAVTFRSHIDGAKVELSPERSIEVQRLLGSDIAMQMDECVRLPAERADIERAMQLSLRWAERSKRAFEAAPDGYMLFGIAQGGDVPALRQVSARGLTDIGFHGYAIGGLAVGEPQAVMLSMIEETAPALPADRPRYLMGVGTPEDMLEAVARGIDMFDCVMPTRNGRHGMAFTRFGQINLRNARHVDDPRPLDEESPWPAARSYSRAYLHHLVRSGETLGAMLLSEINVAYYQELMQGIRGAIANGTFESFRNQTRAGWARGDITQR

SEQ ID NO: 52792 - protein, 381 aa, Bradyrhizobium nanningense
  misc_feature (1)..(381): tr|A0A4Q0S2M7|A0A4Q0S2M7_9BRAD Queuine tRNA-ribosyltran sferase OS=Bradyrhizobium nanningense OX=1325118 GN=tgt PE=3 SV=1
MNPDNDLPNHFELLATDGAARTGRLTTPHGVVRTPAFMPVGTAGAMKGMHWREVRDAGADIVLGNTYHLMLRPSAERIAALGGLQKFTGWNGPMLTDSGGFQVMSLSDLRKVTENAVTFRSHIDGAKVELSPERSIEVQRLLGSDIAMQMDECVRLPAERADIERAMQLSLRWAERSKRAFESAPDGYMLFGIVQGGDIPQLRHASAEGLVAIGFHGYAIGGLAVGEPQAVMLAMIDETAPRLPKERPRYLMGVGTPDDILEAVKRGIDMFDCVMPTRNGRHGVAFTRFGQVNLRNARHADDPRPLDEESSWPSARNCARAYLHHLVKAGETLGAMLLSEINIAYYQFLMQGIRNAIAQGTFEEFYQRTREDWARGDIAPR

SEQ ID NO: 52793 - protein, 382 aa, Bradyrhizobium neotropicale
  misc_feature (1)..(382): tr|A0A176YWR0|A0A176YWR0_9BRAD Queuine tRNA-ribosyltran sferase OS=Bradyrhizobium neotropicale OX=1497615 GN=tg t PE=3 SV=1
MSLPNNSLPNHFELLATDGAARTGRLTTPHGVVRTPAFMPVGTAGAMKGMHWREVRDAGADIVLGNTYHLMLRPGAERIAALGGLQRFTGWNGPMLTDSGGFQVMSLSDLRKVSENAVTFRSHIDGAKVELSPERSIEVQRFLGSDIAMQMDECVRLPAERDDIERAMQLSLRWAERSKRAFESAPDGYMLFGIVQGGDVPQLRHASAEGLVEIGFHGFAIGGLAVGEPQEVMLAMIGETAPALPSDRPRYLMGVGTPDDILEAVKRGIDMFDCVMPTRNGRHGVAFTRFGQVNLRNARHADDPRPLDEESSWPSARNYARAYLHHLVKAGETLGAMLLSEINIAYYQFLMQSIRDAIARGAFEEFYQRTREGWARGDIAPR

SEQ ID NO: 52794 - protein, 384 aa, Bradyrhizobium oligotrophicum
  misc_feature (1)..(384): tr|M4ZUL8|M4ZUL8_9BRAD Queuine tRNA-ribosyltransferase OS=Bradyrhizobium oligotrophicum S58 OX=1245469 GN=tgt PE=3 SV=1
MSSSEGDLPNHFELLGTDGAARTGRLTTPHGVVRTPAFMPVGTAGAMKGVHWRDVRDAGADIVLGNTYHLMLRPGAERIAALGGLQRFTGWGGPMLTDSGGFQVMSLSALRKVTEQAVTFRSHIDGARIELSPERAVEVQRLLNSDIAMQLDECVRLPAGPDDIERAMLLSLRWAERCRRAFETAPAGYMLFGIVQGGDVPDLRVASARALVDIGFHGYAIGGLAVGEPQAVMLQMIEATAPVLPANRPRYLMGVGTPDDLLESVKRGIDMFDCVLPTRNGRHGVAYTRFGPVNLRNARHVDDARPLDEESPWPPARSYARAYLHHLIKAGEALGATLLSEINIAYFQQLMAGMREAIAHGRFSEFYERTKADWARGDIAAHVS

SEQ ID NO: 52795 - protein, 381 aa, Bradyrhizobium ottawaense
  misc_feature (1)..(381): tr|A0A2U8PE45|A0A2U8PE45_9BRAD Queuine tRNA-ribosyltran sferase OS=Bradyrhizobium ottawaense OX=931866 GN=tgt P E=3 SV=1
MNPDNDLPNHFELLGTDGAARTGRLTTPHGVVRTPAFMPVGTAGAMKGMHWREVRDAGADIVLGNTYHLMLRPSAERIAGLGGLQRFTGWNGPMLTDSGGFQVMSLSDLRKVTENAVTFRSHIDGAKVELSPERSIEVQRLLGSDIAMQMDECVRLPAERADIERAMQLSLRWAERSKRAFESAPDGYMLFGIVQGGDIPQLRHESARGLVATGFHGYAIGGLAVGEPQAVMLAMIDETAPLLPKERPRYLMGVGTPDDILEAVKRGIDMFDCVMPTRNGRHGVAFTRFGQVNLRNARHADDPRPLDEESSWPSARNCARAYLHHLVKAGETLGAMLLSEINIAYYQFLMQGIRDAIAQGRFDEFYQRTRADWARGDIAPR

SEQ ID NO: 52796 - protein, 377 aa, Bradyrhizobium pachyrhizi
  misc_feature (1)..(377): tr|A0A0R3CLA9|A0A0R3CLA9_9BRAD Queuine tRNA-ribosyltran sferase OS=Bradyrhizobium pachyrhizi OX=280333 GN=tgt P E=3 SV=1
MTLPNHFELLATDGAARTGRLTTPHGLVRTPAFMPVGTAGAMKGMHWREVRDAGADIVLGNTYHLMLRPGAERIAGLGGLQRFTGWGGPMLTDSGGFQVMSLSELRKVTEKAVTFRSHIDGTKVELSPERSIEVQRLLGSDIAMQMDECVRLPAERADIERAMQLSLRWAERSKRAFEAAPDGYMLFAIVQGGDVPDLRHASARGLTDIGFHGYAIGGLAVGEPQAVMLAMIEETAPALPVDRPRYLMGVGTPEDILEAVARGVDMFDCVMPTRNGRHGMAFTRFGQINLRNARHVDDPRPLDEESPWPAASGYSRAYLHHLVRSGETLGAMLLSEINVAYYQQLMQGIRDAVANGTFEDFRTKTRAGWARGDIAPR

SEQ ID NO: 52797 - protein, 377 aa, Bradyrhizobium retamae
  misc_feature (1)..(377): tr|A0A0R3MY54|A0A0R3MY54_9BRAD Queuine tRNA-ribosyltran sferase OS=Bradyrhizobium retamae OX=1300035 GN=tgt PE= 3 SV=1
MSLPNHFELLATNGTARTGRLTTPHGVVQTPAFMPVGTAGAMKGMHWREVRDAGADIVLGNTYHLMLRPGAERIAALGGLQTFTGWNGPMLTDSGGFQVMSLSDLRKVSEKAVTFRSHIDGAKVELSPERSIEVQRLLGADIAMQMDECVRLPATRDDIERAMRLSLRWAERSKRAFESAPDGNMLFGIVQGGDIPEMRHINARELVDIGFHGYAIGGLAVGEPQAVMLAMIEETAPALPVDRPRYLMGVGTPEDLLEAVARGIDMFDCVLPTRNGRHGMAFTRFGQINLRNARHADDPRPLDEESEWPSARNISRAYLHHLVRSGETLGAMLLSEINVAYYQHLMQGMREAITAGTFETFQEQTRAGWAKGDIPPR

SEQ ID NO: 52798 - protein, 382 aa, Bradyrhizobium rifense
  misc_feature (1)..(382): tr|A0A5D3JYW7|A0A5D3JYW7_9BRAD Queuine tRNA-ribosyltran sferase OS=Bradyrhizobium rifense OX=515499 GN=tgt PE=3 SV=1
MSLPDTDLPNHFELLATDGSARTGRLTTPHGVVRTPAFMPVGTAGAMKGMHWREVREAGADIVLGNTYHLMLRPGAERIAALGGLQRFTGWNGPMLTDSGGFQVMSLADLRKVTENAVTFRSHIDGAKVELSPERSIEVQRLLGSDIAMQMDECVRLPAERDDIERAMLLSLRWAERSKRAFESAPDGYMLFGIVQGGDIPQLRHASAQGLVEIGFHGYAIGGLAVGEPQAVMLAMIDETAPALPTDRPRYLMGVGTPDDILEAVKRGIDMFDCVMPTRNGRHGVAFTRFGQVNLRNARHADDPRPLDEESSWPSARNYARAYLHHLVKAGETLGAMLLSEINIAYYQFLMQGIRDAIAQGTFEEFYQRTREDWARGDIAPR

SEQ ID NO: 52799 - protein, 455 aa, Bradyrhizobium sacchari
  misc_feature (1)..(455): tr|A0A560KNF7|A0A560KNF7_9BRAD Queuine tRNA-ribosyltran sferase OS=Bradyrhizobium sacchari OX=1399419 GN=tgt PE =3 SV=1
MKGKALSAAGGSHKYSRRHIHRGIPVQPRIKLHCVVLFGNPGGTHVRVKSVKPGALRGPSGLIGLARHAISTAMNRPDTDLPNHFELLATDGAARTGRLTTPHGVVRTPAFMPVGTAGAMKGMHWREVREAGADIVLGNTYHLMLRPGAERIAALGGLQRFTGWNGPMLTDSGGFQVMSLADLRKVTENAVTFRSHIDGAKVELSPERSIEVQRFLGSDIAMQMDECVRLPAERDDIDRAMRLSLRWAERSKRAFESAPDGYMLFGIVQGGDIPQLRHASAQGLVEIGFHGYAIGGLAVGEPQEVMLAMIDETAPMLPKERPRYLMGVGTPDDILEAVKRGIDMFDCVMPTRNGRHGVAFTRFGQVNLRNARHADDPRPLDEESSWPSTRNCARAYLHHLVKAGETLGAMLLSEINIAYYQSLMQGIRDAVAHGTFDEFYQRTREDWARGDIAPR

SEQ ID NO: 52800 - protein, 381 aa, Bradyrhizobium shewense
  misc_feature (1)..(381): tr|A0A1C3XFS6|A0A1C3XFS6_9BRAD Queuine tRNA-ribosyltran sferase OS=Bradyrhizobium shewense OX=1761772 GN=tgt PE =3 SV=1
MNPDHDLPNHFELLGTDGAARTGRLTTPHGVVRTPAFMPVGTAGAMKGMHWREVRDAGADIVLGNTYHLMLRPSAERIAALGGLQKFTGWNGPMLTDSGGFQVMSLSDLRKVTENAVTFRSHIDGAKVELSPERSIEVQRLLGSDIAMQMDECVRLPAERADIERATQLSLRWAERSKRAFESAPDGNMLFGIVQGGDIPQLRHESAQGLVATGFHGYAIGGLAVGEPQAVMLAMIDETAPLLPKQRPRYLMGVGTPDDILEAVKRGIDMFDCVMPTRNGRHGVAFTRFGQVNLRNARHADDPRPLDEESSWPSARNCARAYLHHLVKAGETLGAMLLSEINIAYYQFLMQGIRDAIAHGKFDEFYQRTRADWARGDIAPR

SEQ ID NO: 52801 - protein, 382 aa, Bradyrhizobium sp.
  misc_feature (1)..(382): tr|A0A1Y6KHK2|A0A1Y6KHK2_9BRAD Queuine tRNA-ribosyltran sferase OS=Bradyrhizobium sp. ORS 285 OX=115808 GN=tgt PE=3 SV=1
MSSPANDLPNHFELLGTDGATRTGRLTTPHGVVRTPAFMPVGTAGAMKGIHWRDVREAGADIVLGNTYHLMLRPTAERIAALGGLQRFTGWGGPMLTDSGGFQVMSLSGLRKVTEQAVTFRSHIDGAKIELSPERAIEVQRLLNSDIAMQLDECVRLPAEPADIERAMRLSLRWAERCRRAFESAPAGYMLFGIVQGGDVPALRVASAQALVDIGFHGYAIGGLAVGEPQAVMLEMIEATVPALPADRPRYLMGVGTPDDLLESVKRGVDMFDCVLPTRNGRHGVAYTRFGPVNLRNARHADDARPLDEESPWPPARSYARAYLHHLIKAGEALGATLLSEINIAYFQQLMAGMREAIAQGRFTEFYERTKADWAHGDIAPL

SEQ ID NO: 52802 - protein, 377 aa, Bradyrhizobium sp.
  misc_feature (1)..(377): tr|A0A1B9YQA1|A0A1B9YQA1_9BRAD Queuine tRNA-ribosyltran sferase OS=Bradyrhizobium sp. LMTR 3 OX=189873 GN=tgt P E=3 SV=1
MSLPNHFELLATNGTARTGRLTTPHGVVQTPAFMPVGTAGAMKGMHWREVRDAGADIVLGNTYHLMLRPGAERIAALGGLQAFTGWNGPMLTDSGGFQVMSLSDLRKVSEKAVTFRSHIDGAKVELSPERSIEVQRLLGADIAMQMDECVRLPAERSDIERAMRLSLRWAERSKRAFESAPEGYMLFGIVQGGDIPEMRHINARELVDIGFHGYAIGGLAVGEPQAVMLAMIEETAPALPVDRPRYLMGVGTPEDLMEAVARGIDMFDCVMPTRNGRHGMAFTRFGQINLRNARHADDPRPLDEESEWPSARNISRAYLHHLVRSGETLGAMLLSEINVAYYQRLMQGMRDAITAGTFGTFQEQTRAGWAKGDIPPR

SEQ ID NO: 52803 - protein, 382 aa, Bradyrhizobium stylosanthis
  misc_feature (1)..(382): tr|A0A560DIP2|A0A560DIP2_9BRAD Queuine tRNA-ribosyltran sferase OS=Bradyrhizobium stylosanthis OX=1803665 GN=tg t PE=3 SV=1
MNPSDTSLPSHFELLGTDGAARTGRLTTPHGVVRTPAFMPVGTAGAMKGMHWREVRDAGADIVLGNTYHLMLRPGAERIAALGGLQTFTGWNGPMLTDSGGFQVMSLADLRKVSEHAVTFRSHIDGAKVELSPERSIEVQRYLGSDIAMQMDECVRLPAERDDIDRAMRLSLRWAERSKRAFESAPDGYMLFGIVQGGDIPQLRHASAQGLVEIGFHGYAIGGLAVGEPQAVMLAMIDETAPLLPQERPRYLMGVGTPDDILEAVKRGIDMFDCVMPTRNGRHGVAFTRFGQVNLRNARHADDPRPLDAESPWPSTRNYARAYLHHLVKAGETLGAMLLSEINIAYYQFLMQGIRDAIAHGTFDEFYQRTREDWARGDIAPR

SEQ ID NO: 52804 - protein, 377 aa, Bradyrhizobium valentinum
  misc_feature (1)..(377): tr|A0A0R3KNI0|A0A0R3KNI0_9BRAD Queuine tRNA-ribosyltran sferase OS=Bradyrhizobium valentinum OX=1518501 GN=tgt PE=3 SV=1
MNLPNHFELLATDGAARTGRLTTPHGVVHTPAFMPVGTAGAMKGMHWREVRDAGADIVLGNTYHLMLRPGAERIAALGGLQAFTGWNGPMLTDSGGFQVMSLSDLRKVSEKAVTFRSHIDGAKVELSPERSIEVQRLLGADIAMQMDECVRLPAGRDDIERAMRLSLRWAERSKRAFETAPDGYMLFGIVQGGDIPEMRHVSARELVEIGFHGYAIGGLAVGEPQAVMLSMIEETAPALPVDRPRYLMGVGTPEDLMEAVARGIDMFDCVLPTRNGRHGMAFTRFGQINLRNARHADDPRPLDEESEWPSARNISRAYLHHLVRSGETLGAMLLSEINVAYYQHLMRGMREAIAGGTFETFQKQTRAGWARGDIAPR

SEQ ID NO: 52805 - protein, 381 aa, Bradyrhizobium vignae
  misc_feature (1)..(381): tr|A0A4Q0R1J7|A0A4Q0R1J7_9BRAD Queuine tRNA-ribosyltran sferase OS=Bradyrhizobium vignae OX=1549949 GN=tgt PE=3 SV=1
MNPDDDVPNHFELLATDGAARTGRLTTPHGVVRTPAFMPVGTAGAMKGMHWREVRDAGADIVLGNTYHLMLRPSAERIAALGGLQRFTGWNGPMLTDSGGFQVMSLSDLRKVSENAVTFRSHIDGAKVELSPERSIEVQRLLGSDIAMQMDECVRLPAEHADIERAMQLSLRWAERSKRAFESAPAGYMLFGIVQGGDVPQLRHASARGLVAVGFHGYAIGGLAVGEPQAVMLAMIDETAPLLPRERPRYLMGVGTPDDILEAVKRGIDMFDCVMPTRNGRHGVAFTRFGQVNLRNARHADDPRPLDEESSWPSTRNCARAYLHHLVKAGETLGAMLLSEINVAYYQSLMRGVRDAIAHGKFDEFYQRTREDWARGDIAPR

SEQ ID NO: 52806 - protein, 381 aa, Bradyrhizobium yuanmingense
  misc_feature (1)..(381): tr|A0A0R3C8I6|A0A0R3C8I6_9BRAD Queuine tRNA-ribosyltran sferase OS=Bradyrhizobium yuanmingense OX=108015 GN=tgt PE=3 SV=1
MNPDNDLPNHFELLATDGAARTGRLTTPHGVVRTPAFMPVGTAGAMKGMHWREVRDAGADIVLGNTYHLMLRPSAERIAALGGLQTFTGWNGPMLTDSGGFQVMSLADLRKVSEHAVTFRSHIDGAKVELSPERSIEVQRLLGSDIAMQMDECVRLPAERADIERAMQLSLRWAERSKRAFASAPDGYMLFGIVQGGDVPELRHASAQSLVGIGFHGYAIGGLAVGEPQAVMLAMIDETAPLLPKQRPRYLMGVGTPDDILEAVKRGIDMFDCVMPTRNGRHGVAFTRYGQVNLRNARHADDPRPLDEESSWPSTRNCARAYLHHLVKAGETLGAMLLSEINVAYYQSLMQGIRDAIAQGNFEEFYQRTRADWARGDIAPR

SEQ ID NO: 52807 - protein, 381 aa, Bradyrhizobium yuanmingense
  misc_feature (1)..(381): tr|A0A1C3W527|A0A1C3W527_9BRAD Queuine tRNA-ribosyltran sferase OS=Bradyrhizobium yuanmingense OX=108015 GN=tgt PE=3 SV=1
MNPDNDLPNHFELLATDGAARTGRLTTPHGVVRTPAFMPVGTAGAMKGMHWREVRDAGADIVLGNTYHLMLRPSAERIAALGGLQTFTGWNGPMLTDSGGFQVMSLADLRKVSEHAVTFRSHIDGAKVELSPERSIEVQRLLGSDIAMQMDECVRLPAERADIERAMQLSLRWAERSKRAFASAPDGYMLFGIVQGGDVPELRHASAQGLVGIGFHGYAIGGLAVGEPQAVMLAMIDETAPLLPKQRPRYLMGVGTPDDILEAVKRGIDMFDCVMPTRNGRHGVAFTRYGQVNLRNARHADDPRPLDEESSWPSTRNCARAYLHHLVKAGETLGAMLLSEINVAYYQSLMQGIRDAIAQGNFEEFYQRTRADWARGDIAPR

SEQ ID NO: 52808 - protein, 381 aa, Bradyrhizobium zhanjiangense
  misc_feature (1)..(381): tr|A0A4Q0QHJ8|A0A4Q0QHJ8_9BRAD Queuine tRNA-ribosyltran sferase OS=Bradyrhizobium zhanjiangense OX=1325107 GN=t gt PE=3 SV=1
MNPDNDLPNHFELLATDGAARTGRLTTPHGVVRTPAFMPVGTAGAMKGMHWREVRDAGADIVLGNTYHLMLRPGAERIAALGGLQTFTGWNGPMLTDSGGFQVMSLADLRKVSEHAVTFRSHIDGAKVELSPERSIEVQRFLGSDIAMQMDECVRLPAERDDIERAMRLSLRWAERSKRAFTSAPAGYMLFGIVQGGDVPQLRHASAQGLVEIGFHGYAIGGLAVGEPQAVMLAMIDETAPLLPRERPRYLMGVGTPDDILEAVKRGIDMFDCVMPTRNGRHGVAFTRFGQVNLRNARHADDPRPLDEESSWPSTRSCARAYLHHLVKAGETLGAMLLSEINVAYYQSLMQGIRDAVAQGRFEEFYQRTREDWTRGDIAPR

SEQ ID NO: 52809 - protein, 381 aa, Bradyrhizobium zhanjiangense
  misc_feature (1)..(381): tr|A0A4Q0SCC7|A0A4Q0SCC7_9BRAD Queuine tRNA-ribosyltran sferase OS=Bradyrhizobium zhanjiangense OX=1325107 GN=t gt PE=3 SV=1
MNPDNDLPNHFELLATDGAARTGRLTTPHGTVRTPTFMPVGTAGAMKGMHWREVRDAGADIVLGNTYHLMLRPGAERIAALGGLQTFTGWNGPMLTDSGGFQVMSLADLRKVSEHAVTFRSHIDGAKVELSPERSIEVQRFLGSDIAMQMDECVRLPAERDDIERAMRLSLRWAERSKRAFTSAPAGYMLFGIVQGGDVPQLRHASAQGLVEIGFHGYAIGGLAVGEPQAVMLAMIDETAPLLPRERPRYLMGVGTPDDILEAVKRGVDMFDCVMPTRNGRHGVAFTRFGQVNLRNARHADDPRPLDEESSWPSTRSCARAYLHHLVKAGETLGAMLLSEINVAYYQSLMQGIRDAVAQGRFEEFYQRTREDWTRGDIAPR

SEQ ID NO: 52810 - protein, 381 aa, Brenneria alni
  misc_feature (1)..(381): tr|A0A421DT74|A0A421DT74_9GAMM Queuine tRNA-ribosyltran sferase OS=Brenneria alni OX=71656 GN=tgt PE=3 SV=1
MKYELQKTDGHARRGRLIFERGVVETPAFMPVGTYGTVKGMTPEEVKDTGAQILLGNTFHLWLRPGQEIMKLHGDLHDFMQWHGPILTDSGGFQVFSLGDIRKITEEGVHFRNPINGDAIFLSPEKSMEIQYDLGSDVVMIFDECTPYPADWDYAKRSMEMSLRWAKRCRQRFDELNNKNALFGIIQGSVYEDLRDVSVKGLVDIGFDGYAVGGLAVGEPKEDMHRILEHVCPQIPADKPRYLMGVGKPEDLVEGVRRGIDMFDCVMPTRNARNGHLFVTDGVVKIRNAKHKDDVNPLDEHCDCYTCRNYSRAYLHHLDRCNEILGARLNTIHNLRYYQRLMAGLRQAIEEGKLEHFVADFYQRIGKLVPSLAEKDIADSN

SEQ ID NO: 52811 - protein, 381 aa, Brenneria goodwinii
  misc_feature (1)..(381): tr|A0A0G4JPS8|A0A0G4JPS8_9GAMM Queuine tRNA-ribosyltran sferase OS=Brenneria goodwinii OX=1109412 GN=tgt PE=3 S V=1
MKYELQKTDGRARRGRLIFERGVVETPAFMPVGTYGTVKGMTPEEVKDTGAQILLGNTFHLWLRPGQEIMKLHGDLHDFMQWHGPILTDSGGFQVFSLGDIRKITEEGVHFRNPINGDAIFLSPEKSMEIQYDLGSDVVMIFDECTPYPAEWDYAKRSMEMSLRWAKRCRQRFDELNNKNALFGIIQGSVYEDLRDVSVKELVDIGFDGYAVGGLAVGEPKEDMHRILEHVCPQIPADKPRYLMGVGKPEDLVEGVRRGIDMFDCVMPTRNARNGHLFVTDGVVKIRNAKHRDDVLPLDEHCDCYTCRNYSRAYLHHLDRCNEILGARLNTIHNLRYYQRLMAGLRQAIEEGKLDHFVVDFYQRMGKPVPPLAEKNVADSN

SEQ ID NO: 52812 - protein, 381 aa, Brenneria goodwinii
  misc_feature (1)..(381): tr|A0A250BFM9|A0A250BFM9_9GAMM Queuine tRNA-ribosyltran sferase OS=Brenneria goodwinii OX=1109412 GN=tgt PE=3 S V=1
MKYELQKTDGRARRGRLIFERGVVETPAFMPVGTYGTVKGMTPEEVKDTGAQILLGNTFHLWLRPGQEIMKLHGDLHDFMQWHGPILTDSGGFQVFSLGDIRKITEEGVHFRNPINGDAIFLSPEKSMEIQYDLGSDVVMIFDECTPYPAEWDYAKRSMEMSLRWAKRCRQRFDELNNKNALFGIIQGSVYEDLRDVSVKELVDIGFDGYAVGGLAVGEPKEDMHRILEHVCPQIPADKPRYLMGVGKPEDLVEGVRRGIDMFDCVMPTRNARNGHLFVTDGVVKIRNAKHRDDVRPLDEHCDCYTCRNYSRAYLHHLDRCNEILGARLNTIHNLRYYQRLMAGLRQAIEEGKLDHFVVDFYQRMGKPVPPLAEKNVADSN

SEQ ID NO: 52813 - protein, 385 aa, Brenneria nigrifluens
  misc_feature (1)..(385): tr|A0A2U1UW18|A0A2U1UW18_9GAMM Queuine tRNA-ribosyltran sferase OS=Brenneria nigrifluens DSM 30175 = ATCC 13028 OX=1121120 GN=tgt PE=3 SV=1
MKYELQTTDGRARRGRLIFERGVVETPAFMPVGTYGTVKGMTPEEVKESGAQILLGNTFHLWLRPGQEIMKLHGDLHGFMQWHGPILTDSGGFQVFSLGDIRKITEEGVHFRNPINGDAIFLSPEKSMEIQYDLGSDVVMIFDECTPYPADWDYAKRSMEMSLRWAKRSRQRFDELNNNNALFGIIQGGVYEDLRDVSVKGLVDIGFDGYAVGGLAVGEPKEDMHRILEHVCPQIPADKPRYLMGVGKPEDLVEGVRRGIDMFDCVMPTRNARNGHLFVTDGVVKIRNAQHKDDVSPLDEHCDCYTCRNYSRAYLHHLDRCNEILGARLNTIHNLRYYQRLMAGLRQAIEEGKLEHFVVDFYQRIGKPIPPLAEKTLLTVTDRQL

SEQ ID NO: 52814 - protein, 381 aa, Brenneria roseae
  misc_feature (1)..(381): tr|A0A2U1U007|A0A2U1U007_9GAMM Queuine tRNA-ribosyltran sferase OS=Brenneria roseae subsp. americana OX=1508507 GN=tgt PE=3 SV=1
MKYELHKTDGRARRGRMIFERGVVETPAFMPVGTYGTVKGMTPEEVKETGAQILLGNTFHLWLRPGQEIMKLHGDLHDFMQWHGPILTDSGGFQVFSLGDIRKITEEGVHFRNPINGDSIFLSPEKSMEIQYDLGSDIVMIFDECTPYPADWDYAKRSMEMSLRWAKRSRQRFNELNNKNALFGIIQGSVYEDLRDVSVKGLVDIGFDGYAVGGLAVGEPKEDMHRILEHVCPQIPADKPRYLMGVGKPEDLVEGVRRGIDMFDCVMPTRNARNGHLFVTDGVVKIRNARHKDDVSPLDEHCDCYTCRNYSRAYLHHLDRCNEILGARLNTIHNLRYYQRLMAGLRQAIEEGKLEHFVMDFYQRIGKPIPPLAEKDVAQSN

SEQ ID NO: 52815 - protein, 381 aa, Brenneria rubrifaciens
  misc_feature (1)..(381): tr|A0A4P8QWU3|A0A4P8QWU3_9GAMM Queuine tRNA-ribosyltran sferase OS=Brenneria rubrifaciens OX=55213 GN=tgt PE=3 SV=1
MKYELQKKDGRARRGRLIFERGVVETPAFMPVGTYGTVKGMTPEEVRDTGAQILLGNTFHLWLRPGQEIMKLHGDLHGFMQWHGPILTDSGGFQVFSLGDIRKITEEGVHFRNPINGDSIFLSPEKSMEIQYDLGSDIVMIFDECTPYPAERDYAKRSMEMSLRWAQRSRQRFNELNNKNALFGIVQGSVYEDLRDVSVKGLVDIGFDGYAVGGLAVGEPKEDMHRILEHVCPQIPEDKPRYLMGVGKPEDLVEGVRRGIDMFDCVMPTRNARNGHLFVTDGVVKIRNAKHKDDVSPLDEHCDCYTCRNYSRAYLHHLDRCNEILGARLNTIHNLRYYQRLMAGLRQAIEESKLERFVVDFYRRIGKPVPPLTEKGVAPSH

SEQ ID NO: 52816 - protein, 381 aa, Brenneria salicis
  misc_feature (1)..(381): tr|A0A366IE50|A0A366IE50_9GAMM Queuine tRNA-ribosyltran sferase OS=Brenneria salicis ATCC 15712 = DSM 30166 OX= 714314 GN=tgt PE=3 SV=1
MKFQLQTTDGRARRGKLTFERGVVETPAFMPVGTYGTVKGMTPEEVKDTGAQILLGNTFHLWLRPGQEIMKLHGDLHDFMQWHGPILTDSGGFQVFSLGDIRKITEEGVHFRNPINGDAIFLSPEKSMEIQYDLGSDIVMIFDECTPYPADWDYAKRSMEMSLRWARRSRQRFNALNNHNALFGIIQGGVYEDLRDVSVKGLVDIGFDGYAVGGLAVGEPKADMHRILEHVCPQIPEDKPRYLMGVGKPEDLVEGVRRGIDMFDCVMPTRNARNGHLFVTDGVVKIRNARHKDDVSPLDEHCDCYTCRSYSCAYLHHLDRCNEILGARLNTIHNLRYYQRLMAGLRQAIEEGKLEHFVVEFYQRIGKPIPPLAEKDVAQSN

SEQ ID NO: 52817 - protein, 381 aa, Brenneria sp.
  misc_feature (1)..(381): tr|A0A2U1UA12|A0A2U1UA12_9GAMM Queuine tRNA-ribosyltran sferase OS=Brenneria sp. CFCC 11842 OX=2173106 GN=tgt P E=3 SV=1
MKYELQTTDGRARRGRLIFERGVVETPAFMPVGTYGTVKGMTPEEVKETGAQILLGNTFHLWLRPGQEIMKLHGDLHDFMQWHGPILTDSGGFQVFSLGDIRKITEEGVHFRNPINGDAIFLSPEKSMEIQYDLGSDVVMIFDECTPYPADWDYAKRSMEMSLRWAKRSRQRFDELNNNNALFGIIQGGVYEDLRDVSVKGLVDIGFDGYAVGGLAVGEPKADMHRILEHVCPQIPADKPRYLMGVGKPEDLVEGVRRGIDMFDCVMPTRNARNGHLFVTDGVVKIRNAQHKDDVSPLDAHCDCYTCRNYSRAYLHHLDRCNEILGARLNTIHNLRYYQRLMAGLRQAIEEGKLEHFVVDFYQRIGKPIPPLADKNVADSN

SEQ ID NO: 52818 - protein, 384 aa, Brenneria sp.
  misc_feature (1)..(384): tr|A0A5J5G0K8|A0A5J5G0K8_9GAMM tRNA guanosine(34) trans glycosylase Tgt OS=Brenneria sp. L3-3HA OX=2590031 GN=t gt PE=4 SV=1
MKFELQTTDGQARRGRLIFERGVVDTPAFMPVGTYGTVKGMTPEEVKDTGAQILLGNTFHLWLRPGQEIMKLHGDLHDFMQWHGPILTDSGGFQVFSLGDIRKITEEGVHFRNPINGDAIFLSPEKSMEIQHDLGSDVVMIFDECTPYPADWDYAKRSMEMSLRWAKRCRQRFDELGNRNALFGIIQGSVYEDLRDVSVKGLVDIGFDGYAVGGLAVGEPKADMHRILEHVCPQIPADKPRYLMGVGKPEDLVEGVRRGIDMFDCVMPTRNARNGHLFVTDGVVKIRNTRYKDDTGPLDEHCDCYTCRNYSRAYLHHLDRCNEILGARLNTIHNLRYYQRLMAALRQAIGEGKLDRFVADFYQRTGKPVPPLARTAVDDEVSPD

SEQ ID NO: 52819 - protein, 382 aa, Breoghania corrubedonensis
  misc_feature (1)..(382): tr|A0A2T5VB90|A0A2T5VB90_9RHIZ Queuine tRNA-ribosyltran sferase OS=Breoghania corrubedonensis OX=665038 GN=tgt PE=3 SV=1
MTTEAFSFSLLATDGMARRGEVKTPHGLVRTPAFMPVGTQATVKAMYPEQVRELGADVVLGNTYHLMLRPTAERVARLGGLHTFMNWQHTILTDSGGFQVMSLAQIRKLSEKGVTFQSHIDGSRHEMTPERSIEIQGLLGSDIQMQLDECLRLPAERKEVERAMQLSLRWAERSRAQFEKMGGPGKGRGLYGIVQGGDVADLRVASAQALSQMPFEGYSIGGLAVGEPQDVMLRMLEITTPVLPTTKPRYLMGVGTPDDIVESVARGVDMFDCVMPTRAGRHGLAYTRFGKINLKNARHADDPRPLDEESSCPGARTYSRAYLHHLIRAGEGLGGMLLTWNNLAYYQSMMQGIRDAIEAGRFADFKAEVKEGWAKGDLPALG

SEQ ID NO: 52820 - protein, 386 aa, Breoghania sp.
  misc_feature (1)..(386): tr|A0A346R253|A0A346R253_9RHIZ Queuine tRNA-ribosyltran sferase OS=Breoghania sp. L-A4 OX=2304600 GN=tgt PE=3 S V=1
MSVEPTPKPFGFKLITTDGMARRGTVSTPHGEVRTPAFMPVGTQATVKVMYPEQVRELGSDVVLGNTYHLMLRPTAERVARLGGLHRFMNWPHTILTDSGGFQVMSLAQLRKLDENGVTFQSHIDGSRHELTPERSIEIQGLLGSDIQMQFDECIRLPASREEVERAMQLSLRWAQRSRDKFEAMGGPAKGQGLFGIVQGGDVADLRIESAQKLSELPFEGYSVGGLAVGEPQDVMLKMLEITTPVLPAHKPRYLMGVGTPDDLIESVARGIDMFDCVMPTRAGRHGVAYTRRGRINLKNARHADDPRPLDETSTCQAANTYSRAYLHHLIKAGEGLGAMLLTWNNLHYYQSLMQGIRDAIEAKRFAEHRIEVKAEWERGDLAEVG

SEQ ID NO: 52821 - protein, 365 aa, Brevefilum fermentans
  misc_feature (1)..(365): tr|A0A1Y6K3D9|A0A1Y6K3D9_9CHLR tRNA-guanine transglycos ylase, various specificities OS=Brevefilum fermentans O X=1986204 GN=CFX1CAM_1011 PE=4 SV=1
MQTPQKMQIRDKALTLPAFLPDATLGYVRAVDSRDLESVGIQGLVMNTFHLMQKPGSSTIQSFSGLHNFADWHKVIVTDSGGFQAYSLIHQSEQFGTLTDRGILFRPDGKGRKLLLSPEKSIQLQISYGSDVVICLDDCTHVDASRAQQEISVKRTLDWAKRCKQEYNLQLDQRKISDVDRPLIFSVIQGGGYADLRKMCADGLLEIGFDAFGYGGWPLNSQGQLLTDIVGLTRELVPSSYHMHALGIGHPLNLVKTFRLGYDLFDCALPTRDARHGRLMRYNLPPDQPLQGEDWLEYVYLQDKKHIKVDRPISDDCDCPVCQHYSLGYLHHLFKTGDWLYYRLATLHNLRFMTQLTERLQNDHG

SEQ ID NO: 52822 - protein, 374 aa, Brevefilum fermentans
  misc_feature (1)..(374): tr|A0A1Y6K7H7|A0A1Y6K7H7_9CHLR Queuine tRNA-ribosyltran sferase OS=Brevefilum fermentans OX=1986204 GN=tgt PE=3 SV=1
MQKPEKPSDTFTFELLAQDGDARVGVFHTPHGSIPTPIFAPVGTQATVKSLTQRHLRELDAKLILANTYHLYLRPGDDLIAEMGGLHKFMSWSGPILTDSGGFQVFSLADTRRVDEEGVTFKSHIDGSTHRFTPELSVAIQENLGSDIIMAFDECAEPYDREYNQRAVERTHRWAERCLAAKKRTDQALFGIVQGGAFPDLREASARVIAGLDLPGNAIGGLSVGETKPEMHQMIRVVNAVLPVEKPRYLMGVGTPQDLVECVGLGVDLFDCVLPTRLARHNAAMTDSGQMNLMNTRYARDERPISETCTCYTCQTHSRAYIRHLIQAREMLSGTLLSIHNVHTLLNLVARLRAAISAGEYAHFARAYLSNLNS

SEQ ID NO: 52823 - protein, 376 aa, Brevibacillus agri
  misc_feature (1)..(376): tr|A0A3M8AUD8|A0A3M8AUD8_9BACL Queuine tRNA-ribosyltran sferase OS=Brevibacillus agri OX=51101 GN=tgt PE=3 SV=1
MAVRYELIKTCKQTGARLGKLHTPHGTIDTPVFMPVGTQATVKTMSPEELKAIGAGIILSNTYHLFLRPGHEIVREAGGLHGFMNWDRAILTDSGGFQVFSLSNLRKITEEGVSFRSHLNGEKLFIGPEEATQIQNALGADIFMAFDECAPYPAEYDYVKKSMERTTRWAERCLKAHSRPNEQALFGIVQGGMFNDLREQSAKDLISMDFPGYAIGGLSVGEPFSLMYEVLEHTVPLLPAGKPRYLMGVGSPDALIDGAIRGIDMFDCVLPTRIARNGTCMTSQGRLVIRNAKYARDFTPLDPNCDCYTCKNYTRAYIRHLIKAEETFGIRLTTYHNLHFLVKLMEQVRQAIAEDRLQDFRDQFFAQYGLSEDRSF

SEQ ID NO: 52824 - protein, 376 aa, Brevibacillus borstelensis
  misc_feature (1)..(376): tr|M8E0E5|M8E0E5_9BACL Queuine tRNA-ribosyltransferase OS=Brevibacillus borstelensis AK1 OX=1300222 GN=tgt PE= 3 SV=1
MAVRYELIKTCKQTGARLGKLHTPHGTIDTPVFMPVGTQATVKTMSPEELKELGAGIILSNTYHLFLRPGHEIVREAGGLHGFMNWDRAILTDSGGFQVFSLSNLRKITEEGVSFRSHLNGEKLFIGPEEATQIQNALGADIFMAFDECAPYPAEYDYVKKSMERTSRWAERCLKAHTRPNEQALFGIVQGGMFKDLREISARDLVSMDFPGYAIGGLSVGEPFPLMYEILEHTVPLLPTGKARYLMGVGSPDALIEGAMRGIDMFDCVLPTRIARNGTCMTSQGRLVIRNAKYARDFGPLDPNCSCYTCKNYTRAYIRHLVKAEETFGIRLTTYHNLHFLVNLMKEVRQAIAEDRLGDFRDQFFAQYGLSEDRSF

SEQ ID NO: 52825 - protein, 376 aa, Brevibacillus brevis
  misc_feature (1)..(376): tr|C0ZAN9|C0ZAN9_BREBN Queuine tRNA-ribosyltransferase OS=Brevibacillus brevis (strain 47 / JCM 6285 / NBRC 10 0599) OX=358681 GN=tgt PE=3 SV=1
MAVRYELIKTCKQTGARLGKLHTPHGTIDTPVFMPVGTQATVKTMSPEELKAIGAGIILSNTYHLFLRPGHEIVREAGGLHGFMNWDRAILTDSGGFQVFSLSNLRKITEEGVSFRSHLNGEKLFIGPEEATQIQNALGADIFMAFDECAPYPAEYDYVKKSMERTTRWAERCLKAHTRPNEQALFGIVQGGMFNDLRAQSARDLVSMDFPGYAIGGLSVGEPFPLMYEVLEHTVPLLPTSKARYLMGVGSPDALIEGAIRGIDMFDCVLPTRIARNGTCMTSQGRLVIRNAKYARDFTPLDPNCDCYTCKNYTRAYIRHLVKSEETFGIRLTTYHNLHFLVKLMEQVRQAIAEDRLQDFRDQFFAQYGLGEDRSF

SEQ ID NO: 52826 - protein, 376 aa, Brevibacillus brevis; identical to SEQ ID NO: 52825
  misc_feature (1)..(376): tr|A0A0J6BLP8|A0A0J6BLP8_BREBE Queuine tRNA-ribosyltran sferase OS=Brevibacillus brevis OX=1393 GN=tgt PE=3 SV= 1

SEQ ID NO: 52827 - protein, 376 aa, Brevibacillus choshinensis
  misc_feature (1)..(376): tr|A0A0Q3T490|A0A0Q3T490_BRECH Queuine tRNA-ribosyltran sferase OS=Brevibacillus choshinensis OX=54911 GN=tgt P E=3 SV=1
MAVRYELIKTCKQTGARLGKLHTPHGTIDTPVFMPVGTQATVKTMSPEELKAMGAGIILSNTYHLFLRPGHEIVREAGGLHGFMNWDRAILTDSGGFQVFSLSNLRKITEEGVSFRSHLNGEKLFLGPEEATQIQNALGADIFMAFDECAPYPAEYDYVQKSMERTTRWAERCLKAHTRPNEQALFGIVQGGMYHDLRAQSARDLVSMDFPGYAIGGLSVGEPFPLMYEVLESTVPLLPTNKPRYLMGVGSPDALIDGAIRGIDMFDCVLPTRIARNGTCMTSQGRLVIRNAKYARDFTPLDPNCDCYTCKNYTRAYIRHLVKSEETFGIRLTTYHNLHFLVKLMENVRQAIAEDRLQDFRDQFFAQYGLGEDRSF

SEQ ID NO: 52828 - protein, 376 aa, Brevibacillus fluminis
  misc_feature (1)..(376): tr|A0A3M8DR38|A0A3M8DR38_9BACL Queuine tRNA-ribosyltran sferase OS=Brevibacillus fluminis OX=511487 GN=tgt PE=3 SV=1
MAVRYELIKTCKQTGARLGKLHTPHGTIDTPVFMPVGTQATVKTMSPEEISEMGAGILLSNTYHLFLRPGHEIVREAGGLHKFMNWPGAILTDSGGFQVFSLSKLRKITEEGVSFRSHLNGESLFIGPEEAMKIQNALGADIIMAFDECAPYPADYDYVKQSMERTTRWAERCLTAHERKADQALFGIVQGGMYHDLRAQSARDLVSLDFPGYAVGGLSVGEPFPLMYEVLESTVPLLPSNKPRYLMGVGSPDALVEGAIRGIDMFDCVLPTRIARNGTCMTSQGRLVIRNAKFARDFGPLDPECDCYTCRNYSRAYLRHLIKAEETFGIRLTTYHNLYFLIKLMERVRQAIAEDRLGDFRDQFFAQYGLGENRSF

SEQ ID NO: 52829 - protein, 376 aa, Brevibacillus formosus
  misc_feature (1)..(376): tr|A0A220MD38|A0A220MD38_9BACL Queuine tRNA-ribosyltran sferase OS=Brevibacillus formosus OX=54913 GN=tgt PE=3 SV=1
MAVRYELIKTCKQTGARLGKLHTPHGTIDTPVFMPVGTQATVKTMSPEELKALGAGIILSNTYHLFLRPGHEIVREAGGLHGFMNWDRAILTDSGGFQVFSLSNLRKITEEGVSFRSHLNGEKLFIGPEEATQIQNALGADIFMAFDECAPYPAEYDYVKKSMERTTRWAERCLKAHTRPNEQALFGIVQGGMFNDLRAQSARDLVSMDFPGYAIGGLSVGEPFPLMYEVLEHTVPLLPTSKARYLMGVGSPDALIEGAIRGIDMFDCVLPTRIARNGTCMTSQGRLVIRNAKYARDFTPLDPNCDCYTCKNFTRAYIRHLVKSEETFGIRLTTYHNLHFLVKLMEQVRQAIAEDRLQDFRDQFFAQYGLGEDRSF

SEQ ID NO: 52830 - protein, 376 aa, Brevibacillus formosus
  misc_feature (1)..(376): tr|A0A4Y4HZ37|A0A4Y4HZ37_9BACL Queuine tRNA-ribosyltran sferase OS=Brevibacillus formosus OX=54913 GN=tgt PE=3 SV=1
MAVRYELIKTCKQTGARLGKLHTPHGTIDTPVFMPVGTQATVKTMSPEELKTIGAGIILSNTYHLFLRPGHEIVREAGGLHGFMNWDRAILTDSGGFQVFSLSNLRKITEEGVSFRSHLNGEKLFIGPEEATQIQNALGADIFMAFDECAPYPAEYDYVKKSMERTTRWAERCLKAHTRPNEQALFGIVQGGMFNDLRAQSARDLVSMDFPGYAIGGLSVGEPFPLMYEVLEHTVPLLPTSKARYLMGVGSPDALIEGAIRGVDMFDCVLPTRIARNGTCMTSQGRLVIRNAKYARDFTPLDPNCDCYTCKNYTRAYIRHLVKSEETFGIRLTTYHNLHFLVKLMEQVRQAIAEDRLQDFRDQFFAQYGLGEDRSF

SEQ ID NO: 52831 - protein, 376 aa, Brevibacillus gelatini
  misc_feature (1)..(376): tr|A0A3M8ATI1|A0A3M8ATI1_9BACL Queuine tRNA-ribosyltran sferase OS=Brevibacillus gelatini OX=1655277 GN=tgt PE= 3 SV=1
MAVRYELIKTCKQTGARLGKLHTPHGTIDTPVFMPVGTQATVKTMSPEELKAIGAGIILSNTYHLFLRPGHEIVREAGGLHGFMNWDRAILTDSGGFQVFSLSNLRKITEEGVSFRSHLNGEKLFIGPEEATQIQNALGADIFMAFDECAPYPAEYDYVKKSMERTTRWAERCLKAHARPNEQALFGIVQGGMFKDLREQSAKDLISMDFPGYAIGGLSVGEPFSLMYEVLEHTVPLLPTNKPRYLMGVGSPDALIDGAIRGIDMFDCVLPTRIARNGTCMTSQGRLVIRNAKYARDFTPLDPNCDCYTCKNYTRAYIRHLIKAEETFGIRLTTYHNLHFLVKLMEQVRQAIAEDRLQDFRDQFFAQYGLSEDRSF

SEQ ID NO: 52832 - protein, 376 aa, Brevibacillus invocatus
  misc_feature (1)..(376): tr|A0A3M8CN01|A0A3M8CN01_9BACL Queuine tRNA-ribosyltran sferase OS=Brevibacillus invocatus OX=173959 GN=tgt PE= 3 SV=1
MAVRYELIKTCKQTGARLGKLHTPHGTIDTPVFMPVGTQATVKTMSPEELKEMGAGIILSNTYHLFLRPGHEIVREAGGLHGFMNWDRAILTDSGGFQVFSLSNLRKITEEGVSFRSHLNGEKLFIGPEEATQIQNALGADIFMAFDECAPYPAEYDYVKQSMERTTRWAERCLKAHTRPEDQALFGIVQGGMFNDLRAISARDLVSLDFPGYAIGGLSVGEPFPLMYEVLENTVPLLPTGKPRYLMGVGSPDALIEGAIRGIDMFDCVLPTRIARNGTCMTSQGRLVIRNAKFARDFTPLDPNCDCYTCKNYSRAYIRHLVKSEETFGIRLTTYHNLYFLVKLMEQVRQAIAEDRLQDFRDQFFAQYGLGGDRSF

SEQ ID NO: 52833 - protein, 376 aa, Brevibacillus laterosporus
  misc_feature (1)..(376): tr|A0A075R7R3|A0A075R7R3_BRELA Queuine tRNA-ribosyltran sferase OS=Brevibacillus laterosporus LMG 15441 OX=1042 163 GN=tgt PE=3 SV=1
MAVRYELIKTCKQTGARLGRVHTPHGTFETPAFMPVGTQATVKTMSPEEISGMGANIILSNTYHLFLRPGHQIVKEAGGLHKFMNWNGAILTDSGGFQVFSLSNLRKITEEGVSFRSHLNGEKLFIGPEEAMQIQNALGADIMMAFDECAPYPAEYDYVKKSMERTTRWAERCLRAHERKEDQALFGIVQGGMYQDLREQSARDLVQMDFPGYAIGGLSVGEPFPLMYEVLDYTVPLLPDNKPRYLMGVGSPDALIEGALRGIDMFDCVLPTRIARNGTCMTSQGRLVVRNAKFARDFTPLDPNCDCYTCKNYTRAYIRHLIKAEETFGIRLTTHHNLHFLIKLMEKVRQAIREDRLKDFRDQFFAQYGLGENRSF

SEQ ID NO: 52834 - protein, 376 aa, Brevibacillus laterosporus; identical to SEQ ID NO: 52833
  misc_feature (1)..(376): tr|H0UGH4|H0UGH4_BRELA Queuine tRNA-ribosyltransferase OS=Brevibacillus laterosporus GI-9 OX=1118154 GN=tgt PE =3 SV=1

SEQ ID NO: 52835 - protein, 376 aa, Brevibacillus nitrificans
  misc_feature (1)..(376): tr|A0A3M8D9N2|A0A3M8D9N2_9BACL Queuine tRNA-ribosyltran sferase OS=Brevibacillus nitrificans OX=651560 GN=tgt P E=3 SV=1
MAVRYELIKTCKQTGARLGKLHTPHGTIDTPVFMPVGTQATVKTMSPEELKAMGAGIILSNTYHLFLRPGHEIVREAGGLHGFMNWDRAILTDSGGFQVFSLSNLRKITEEGVSFRSHLNGEKLFIGPEEATHIQNALGADIFMAFDECAPYPAEYDYVQKSMERTTRWAERCLKAHTRPNEQALFGIVQGGMYHDLRAQSARDLVSMDFPGYAIGGLSVGEPFSLMYEVLESTVPLLPTNKPRYLMGVGSPDALIDGAIRGIDMFDCVLPTRIARNGTCMTSQGRLVIRNAKYARDFTPLDPNCDCYTCKNYTRAYIRHLVKSEETFGIRLTTYHNLHFLVKLMENVRKAIAEDRLQDFRDQFFAQYGLGEDRSF

SEQ ID NO: 52836 - protein, 376 aa, Brevibacillus panacihumi
  misc_feature (1)..(376): tr|A0A3M8DGE5|A0A3M8DGE5_9BACL Queuine tRNA-ribosyltran sferase OS=Brevibacillus panacihumi OX=497735 GN=tgt PE =3 SV=1
MAVRYELIKTCKQTGARLGKLHTPHGTIDTPVFMPVGTQATVKTMSPEELKEMGAGIILSNTYHLFLRPGHEIVREAGGLHSFMNWDRAILTDSGGFQVFSLSNLRKITEEGVSFRSHLNGEKLFIGPEEATQIQNALGADIFMAFDECAPYPAEYDYVKQSMERTTRWAERCLKAHERPDSQALFGIVQGGMYNDLRAISARDLVSLDFPGYAIGGLSVGEPFSLMYEVLEHTVPLLPSGKPRYLMGVGSPDALIEGAIRGIDMFDCVLPTRIARNGTCMTSQGRLVIRNAKFARDFTPLDPNCDCYTCKNYTRAYIRHLVKSEETFGIRLTTYHNLYFLVKLMEKVRQAIAEDRLQDFRDQFFAQYGLGGDRSF

SEQ ID NO: 52837 - protein, 376 aa, Brevibacillus panacihumi
  misc_feature (1)..(376): tr|V6MDE6|V6MDE6_9BACL Queuine tRNA-ribosyltransferase OS=Brevibacillus panacihumi W25 OX=1408254 GN=tgt PE=3 SV=1
MAVRYELIKTCKQTGARLGKLHTPHGTIDTPVFMPVGTQATVKTMSPEELKEMGAGIILSNTYHLFLRPGHEIVREAGGLHSFMNWDRAILTDSGGFQVFSLSNLRKITEEGVSFRSHLNGEKLFIGPEEATQIQNALGADIFMAFDECAPYPAEYDYVKQSMERTTRWAERCLKAHERPDAQALFGIVQGGMYNDLRAISARDLVSLDFPGYAIGGLSVGEPFSLMYEVLENTVPLLPSGKPRYLMGVGSPDALIEGAIRGIDMFDCVLPTRIARNGTCMTSQGRLVIRNAKFARDFTPLDPNCDCYTCKNYTRAYIRHLVKSEETFGIRLTTYHNLYFLVKLMEKVRQAIAEDRLQDFRDQFFAQYGLGGDRSF

SEQ ID NO: 52838 - protein, 376 aa, Brevibacillus parabrevis
  misc_feature (1)..(376): tr|A0A4Y3PE87|A0A4Y3PE87_BREPA Queuine tRNA-ribosyltran sferase OS=Brevibacillus parabrevis OX=54914 GN=tgt PE= 3 SV=1
MAVRYELIKTCKQTGARLGKLHTPHGTIDTPVFMPVGTQATVKTMSPEELKAIGAGIILSNTYHLFLRPGHEIVREAGGLHGFMNWDRAILTDSGGFQVFSLSNLRKITEEGVSFRSHLNGEKLFIGPEEATQIQNALGADIFMAFDECAPYPAEYDYVKKSMERTTRWAERCLKAHARPNDQALFGIVQGGMFNDLREQSAKDLISMDFPGYAIGGLSVGEPFPLMYEVLEHTVPLLPANKPRYLMGVGSPDALIDGAIRGIDMFDCVLPTRIARNGTCMTSQGRLVIRNAKFARDFTPLDPNCDCYTCKNYTRAYIRHLIKAEETFGIRLTTYHNLHFLVKLMEQVRQAIAEDRLQDFRDQFFAQYGLGEDRSF

SEQ ID NO: 52839 - protein, 376 aa, Brevibacillus reuszeri
  misc_feature (1)..(376): tr|A0A0K9YZ50|A0A0K9YZ50_9BACL Queuine tRNA-ribosyltran sferase OS=Brevibacillus reuszeri OX=54915 GN=tgt PE=3 SV=1
MAVRYELIKTCKQTGARLGKLHTPHGTIDTPVFMPVGTQATVKTMSPEELKSIGAGIILSNTYHLFLRPGHEIVREAGGLHGFMNWDRAILTDSGGFQVFSLSNLRKITEEGVSFRSHLNGEKLFIGPEEATQIQNALGADIFMAFDECAPYPAEYDYVKKSMERTTRWAERCLKAHSRPDEQALFGIVQGGMYNDLRAQSARDLVSMDFPGYAIGGLSVGEPFSLMYEVLEHTVPLLPTNKPRYLMGVGSPDALLDGAIRGIDMFDCVLPTRIARNGTCMTSQGRLVIRNAKYARDFTPLDPNCDCYTCKNYTRAYIRHLVKSEETFGIRLTTYHNLYFLVKLMEQVRQAIAEDRLQDFRDQFFAQYGLGEDRSF

SEQ ID NO: 52840 - protein, 376 aa, Brevibacillus sp.
  misc_feature (1)..(376): tr|A0A553KNT4|A0A553KNT4_9BACL Queuine tRNA-ribosyltran sferase OS=Brevibacillus sp. LEMMJ03 OX=2595056 GN=tgt PE=3 SV=1
MAVRYELIKTCKQTGARLGKLHTPHGTIDTPVFMPVGTQATVKAMSPEELKEIGAGIILSNTYHLFLRPGHEIVREAGGLHGFMNWDRAILTDSGGFQVFSLSNLRKITEEGVFFRSHLNGEKLFIGPEEATQIQNALGADIFMAFDECAPYPAEYDYVKQSMERTTRWAERCLKAHTRPEDQALFGIVQGGMYKDLREQSARDLVSLDFPGYAIGGLSVGEPFSLMYEVLEHTVPLLPSGKPRYLMGVGSPDALIEGAIRGIDMFDCVLPTRIARNGTCMTSQGRLVIRNAKYARDFTPLDPNCDCYTCKNYTRAYIRHLIKADEIFGVRLTTYHNLYFLVKLMEQVRQAIAEDRLRDFRDQFFAQYGLSEDRSF

SEQ ID NO: 52841 - protein, 376 aa, Brevibacillus sp.
  misc_feature (1)..(376): tr|A0A2P7V783|A0A2P7V783_9BACL Queuine tRNA-ribosyltran sferase OS=Brevibacillus sp. NRRL NRS-1210 OX=2126352 G N=tgt PE=3 SV=1
MAVRYELIKTCKQTGARLGKLHTPHGTIDTPVFMPVGTQATVKTMSPEELKAIGAGIILSNTYHLFLRPGHEIVREAGGLHGFMNWDRAILTDSGGFQVFSLSNLRKITEEGVSFRSHLNGEKLFIGPEEATQIQNALGADIFMAFDECAPYPAEYDYVKKSMERTTRWAERCLKAHTRPNEQALFGIVQGGMFNDLRAQSARDLVSMDFPGYAIGGLSVGEPFPLMYEVLEHTVPLLPTSKARYLMGVGSPDALIDGAIRGIDMFDCVLPTRIARNGTCMTSQGRLVIRNAKYARDFTPLDPNCDCYTCKNYTRAYIRHLVKSEETFGIRLTTYHNLHFLVKLMEQVRQAIAEDRLQDFRDQFFAQYGLGEDRSF

SEQ ID NO: 52842 - protein, 419 aa, Brevibacterium antiquum
  misc_feature (1)..(419): tr|A0A2H1IWD3|A0A2H1IWD3_9MICO Queuine tRNA-ribosyltran sferase OS=Brevibacterium antiquum CNRZ 918 OX=1255637 GN=tgt PE=3 SV=1
MTRIESSAESETAPINDRSRFGFEVGTRLDQGGRTGVIHTPHGDIATPAFIPVGTKATVKAVRPDEVAELGGQAVLANAYHLYLQPGSDLIDEAGGLGKFMNWPGPTFTDSGGFQVMSLGSGFKKVISMESTGEQNDDLVAVGKERMSNVDDDGVTFKSHLDGTMHRFTPEVSMRVQHELGADIMFAFDELTTLVNTRGYQVESLERTRQWALRCIEEHQRQTAARTHRPYQALFGVLHGAQYEDLRRKAARDLGGMDFDGFGIGGALEKENLGTIIRWVCEELPENKPRHLLGISEPDDLFEAIKTGADTFDCVSPSRVARNAAIYTRDGRYNLTGAKYRRDFGPLDPDCACYTCQNYSRAYLRHLYKAKEMLFSTLCTVHNEYFVVNLVAEIRQSMIDGRFAELEAEVLGRYYAKKA

SEQ ID NO: 52843 - protein, 419 aa, Brevibacterium antiquum
  misc_feature (1)..(419): tr|A0A2H1IJZ6|A0A2H1IJZ6_9MICO Queuine tRNA-ribosyltran sferase OS=Brevibacterium antiquum OX=234835 GN=tgt PE= 3 SV=1
MTRIESSAESETAPINDRSRFGFEVGTRLDQGGRTGVIHTPHGDIATPAFIPVGTKATVKAVRPDEVAELGGQAVLANAYHLYLQPGSDLIDEAGGLGKFMNWPGPTFTDSGGFQVMSLGSGFKKVISMESTGEQNDDLVAVGKERMSNVDDDGVTFKSHLDGTMHRFTPEVSMRVQHELGADIMFAFDELTTLVNTRGYQVESLERTRQWALRCIEEHQRQTAARTHRPYQALFGVLQGAQYEDLRRKAARDLGGMDFDGFGIGGALEKENLGTIIRWVCEELPENKPRHLLGISEPDDLFEAIKTGADTFDCVSPSRVARNAAIYTRDGRYNLTGAKYRRDFGPLDPDCACYTCQNYSRAYLRHLYKAKEMLFSTLCTVHNEYFVVNLVAEIRQSMIDGRFAELEAEVLGRYYAKKA

SEQ ID NO: 52844 - protein, 419 aa, Brevibacterium aurantiacum
  misc_feature (1)..(419): tr|A0A2H1IFL1|A0A2H1IFL1_9MICO Queuine tRNA-ribosyltran sferase OS=Brevibacterium aurantiacum OX=273384 GN=tgt PE=3 SV=1
MTRIESSAESETAPINDRSRFGFEVGTRLDEGGRTGVIHTPHGDIATPAFIPVGTKATVKAVRPDEVAELGGQAVLANAYHLYLQPGSDLIDEAGGLGKFMNWPGPTFTDSGGFQVMSLGSGFKKVISMESTGEQNDDLVAVGKERMSNVDDDGVTFKSHLDGTMHRFTPEVSMRVQHELGADIMFAFDELTTLVNTRGYQVESLERTRQWALRCIEEHQRQTAARTHRPYQALFGVLQGAQYEDLRRKAARDLGGMDFDGFGIGGALEKENLGTIIRWVCEELPENKPRHLLGISEPDDLFEAIKTGADTFDCVSPSRVARNAAIYTRDGRYNLTGAKYRRDFGPLDPDCACYTCQNYSRAYLRHLYKAKEMLFSTLCTVHNEYFVVNLVAEIRQSMIDGRFAELEAEVLGRYYAKKA

SEQ ID NO: 52845 - protein, 405 aa, Brevibacterium aurantiacum
  misc_feature (1)..(405): tr|A0A2A3ZGT3|A0A2A3ZGT3_9MICO Queuine tRNA-ribosyltran sferase OS=Brevibacterium aurantiacum OX=273384 GN=tgt PE=3 SV=1
MNDRSRFGFEVGTRLDQGGRTGVIHTPHGDIATPAFIPVGTKATVKAVRPDEVAELGGQAVLANAYHLYLQPGSDLIDEAGGLGKFMNWPGPTFTDSGGFQVMSLGSGFKKVISMESTGEQNDDLVAVGKERMSNVDDDGVTFKSHLDGTMHRFTPEVSMRVQHELGADIMFAFDELTTLVNTRGYQVESLERTRQWALRCIEEHQRQTAARTHRPYQALFGVLQGAQYEDLRRKAARDLGGMDFDGFGIGGALEKENLGTIIRWVCEELPENKPRHLLGISEPDDLFEAIKTGADTFDCVSPSRVARNAAIYTRDGRYNLTGAKYRRDFGPLDPDCACYTCQNYSRAYLRHLYKAKEMLFSTLCTVHNEYFVVNLVAEIRQSMIDGRFAELEAEVLGRYYAKKA

SEQ ID NO: 52846 - protein, 418 aa, Brevibacterium casei
  misc_feature (1)..(418): tr|A0A165E6F4|A0A165E6F4_9MICO Queuine tRNA-ribosyltran sferase OS=Brevibacterium casei OX=33889 GN=tgt PE=3 SV =1
MTDIDSRAASETATPPINDRSQFGFEVGTRLETGGRTGVISTPHGQIRTPAFIPVGTKATVKAVKPEDVAALGGQAVLANAYHLYLQPGSDIVDEAGGLGRFMNWPGPTFTDSGGFQVMSLGAGFKKVISMEVTGEQNDDAIAAGKERLSNVDDDGVTFKSHLDGTMHRFTPEVSMRVQHELGADIMFAFDELTTLVNTRGYQETSLERTRLWAIRCIEEHQRLTQERSRRPYQALFGVLQGAQYEDLRRKAARDLGAMDFDGYGIGGALEKENLGTIIRWVCEELPEDKPRHLLGISEPDDLFEAIKTGADTFDCVSPSRVARNAAVYTRDGRYNLTGAKYRRDFGPLDPECDCYTCENYSRAYLRHLYKAKEMLFSTLCTIHNEHFVVSLVAEIRQAMEDGRFSELETEVLGRYYA

SEQ ID NO: 52847 - protein, 418 aa, Brevibacterium casei
  misc_feature (1)..(418): tr|A0A2H1J135|A0A2H1J135_9MICO Queuine tRNA-ribosyltran sferase OS=Brevibacterium casei CIP 102111 OX=1255625 G N=tgt PE=3 SV=1
MTDIDSRAASETAPPPINDRSQFGFEVGTRLETGGRTGVISTPHGQIRTPAFIPVGTKATVKAVKPEDVAALGGQAVLANAYHLYLQPGSDIVDEAGGLGRFMNWPGPTFTDSGGFQVMSLGAGFKKVISMEVTGEQSDDAIAAGKERLSNVDDDGVTFKSHLDGTMHRFTPEVSMQVQHELGADIMFAFDELTTLVNTRGYQETSLERTRLWAIRCIEEHQRLTQARSHRPYQALFGVLQGAQYEDLRRKAARDLGAMDFDGYGIGGALEKENLGTIIRWVCEELPEDKPRHLLGISEPDDLFEAIKTGADTFDCVSPSRVARNAAVYTRDGRYNLTGAKYRRDFGPLDPECDCYTCENYSRAYLRHLYKAKEMLFSTLCTIHNEHFVVSLVAEIRQAMEDGRFSELETEVLGRYYA

SEQ ID NO: 52848 - protein, 439 aa, Brevibacterium celere
  misc_feature (1)..(439): tr|A0A366IEX9|A0A366IEX9_9MICO Queuine tRNA-ribosyltran sferase OS=Brevibacterium celere OX=225845 GN=tgt PE=3 SV=1
MTTPAMTPTSSSSAPAPHDASSAEAASPAPSALPVNDRARFGFEIGTRLESGGRTGVIHTPHGDIRTPAFIPVGTKATVKAVRPDEVAELGGQAVLANAYHLYLQPGSDLIDEAGGLGAFMNWPGPTFTDSGGFQVMSLGAGFKKVISMESTGEQNDDLVAAGKDRLSRVDDDGVTFKSHLDGTMHRFTPEVSMRVQHELGADIMFAFDELTTLVNTRGYQETSLERTRLWAIRCIEEHQRLTAERTHRPYQALFGVLQGAQYEDLRRKAARDLGAMDFDGFGIGGALEKENLGTIITWVCEELPEDKPRHLLGISEPDDLFEAIRTGADTFDCVSPSRVARNAAIYTRDGRFNLTGAKYRRDFGPLDPECRCYTCSNYSRAYLRHLYKAKEMLFSTLCTIHNEAFIVGLVDEIRQSIEDGRFAEFEAEVLGRYYAKRI

SEQ ID NO: 52849 - protein, 418 aa, [Brevibacterium] flavum
  misc_feature (1)..(418): tr|A0A0F6SQJ0|A0A0F6SQJ0_9CORY Queuine tRNA-ribosyltran sferase OS=[Brevibacterium] flavum OX=92706 GN=tgt PE=3 SV=1
MSDLSFTLNNKLADDAPGKHGRTGVIHTPHGDIATPAFIPVATKATVKTLTPEQIRETGAQAILSNAYHLYLQPGPDIVDEAGGVSAFENWHGPTYTDSGGFQVMSLGSGFKKVLAMDTTNLTRNDIKAAKKERMALVDEDGVDFKSVIDGSKHRFTPEVSMQIQHQLGADIIFAFDELTTLVDTYDYQVESVERTRRWAQRCLLEHERLTQERVDKPLQSLWGVVQGAQFEDLRRQAVKGLLDLDRQAADEGRRGFGGFGIGGALEKENLGTIVGWVCDELPEDKPRHLLGISEPDDLFVAVEAGADTFDCVAPTRLGRRGGVYTLDGRMNLTGARFKRDFKGIDEEVGGYASENYSRAYIHHLLKAKEFLAGTLCTMHNLYFMITLVDKIRASIDDGTYYEFKEEFLGRYYASKVS

SEQ ID NO: 52850 - protein, 380 aa, [Brevibacterium] frigoritolerans
  misc_feature (1)..(380): tr|A0A4R6AGJ7|A0A4R6AGJ7_9BACI Queuine tRNA-ribosyltran sferase OS=[Brevibacterium] frigoritolerans OX=450367 G N=tgt PE=3 SV=1
MSSPIRYELIKTCKQTGARLGRVHTPHGSFETPVFMPVGTLATVKTMSPEELVQMGAGIILSNTYHLWLRPGHEIVKEAGGLHKFMNWDRAILTDSGGFQVFSLSEFRKIEEEGVHFRNHLNGDKLFLSPEKAMQIQNALGSDIMMAFDECPPFPAEYDYMKKSVERTSRWAERCLNAHERPQDQGLFGIVQGGEYEELRKQSARDLVSMDFPGYAVGGLSVGEPKDIMNRVLESTTPLLPSNKPRYLMGVGSPDSLIDGAIRGIDMFDCVLPTRIARNGTLMTSSGRLVVKNAKYARDFGPIDENCDCYTCRNYSRAYIRHLMKCDETFGIRLTSYHNLHFLLKLMEQVRQAIREDRLGDFRDEFFEQYGFNKPNAKNF

SEQ ID NO: 52851 - protein, 379 aa, [Brevibacterium] frigoritolerans; identical to SEQ ID NO: 52138
  misc_feature (1)..(379): tr|A0A3Q9SBF9|A0A3Q9SBF9_9BACI Queuine tRNA-ribosyltran sferase OS=[Brevibacterium] frigoritolerans OX=450367 G N=tgt PE=3 SV=1

SEQ ID NO: 52852 - protein, 418 aa, Brevibacterium iodinum
  misc_feature (1)..(418): tr|A0A2H1K9N9|A0A2H1K9N9_9MICO Queuine tRNA-ribosyltran sferase OS=Brevibacterium iodinum ATCC 49514 OX=1255616 GN=tgt PE=3 SV=1
MTTDETPAASETAPINDRSQFGFEVGTRMDTGGRTGVIHTPHGDIQTPAFIPVGTKATVKAVRPDEVAELGGQAVLSNAYHLYLQPGSDLIDEAGGLGKFMNWSGPTFTDSGGFQVMSLGSGFKKVISMESTGEQNDELVAVGKERLSNVDDDGVTFKSHLDGSMHRFTPEISMRVQHELGADIMFAFDELTTLVNTRGYQEESVERTRLWALRCIDEHFRLTVERSHRPYQALFGVLQGAQYEDLRRKAARDLGAMDFDGFGIGGALEKENLGIIIRWVCEELPENKPRHLLGISEPDDLFEAIKTGADTFDCVSPSRVARNAAIYTRDGRYNLTGAKYRRDFGPLDPDCTCYTCQNYSRAYLRHLYKAKEMLFSTLCTIHNEHFVVSLVAEIRQSIVDGRFDELETEVLGRYYAKK

SEQ ID NO: 52853 - protein, 416 aa, Brevibacterium jeotgali
  misc_feature (1)..(416): tr|A0A2H1L187|A0A2H1L187_9MICO Queuine tRNA-ribosyltran sferase OS=Brevibacterium jeotgali OX=1262550 GN=tgt PE =3 SV=1
MTETTTAAADSAADRSEFGFDVGTTMSEGGRTGTIRTPHGTIATPAFIPVGTKATVKAVKPEDVDALGADAVLANAYHLFLQPGADIVDEAGGLGAFMNWPGPTFTDSGGFQVMSLGVGSKKVLTTEFAGKDRSDLQTVDKERRMANVDEDGVTFRSHLNGDIHRFTPEVSMQVQHQLGADIIFAFDELTMLTNTRAYQEESLERTRRWAERCVTEHFRLTQERSHRPYQALFGVLQGAQYEDLRRRAARDLGAMDVDGFGIGGALEKENLGTIVGWVCEELPEEKPRHLLGIGEPDDLFAAIRRGADTFDCVSPSRVARNAAVYSRDGRYNISGARHKRDWRPIDPECTCYTCTNHSRAYLHHLWKAKEMLFSTLCTIHNEYFIVQLVAEIRGAIEDGRYDELEADVMGRYYAKR

SEQ ID NO: 52854 - protein, 418 aa, Brevibacterium linens
  misc_feature (1)..(418): tr|A0A2H1IKB6|A0A2H1IKB6_BRELN Queuine tRNA-ribosyltran sferase OS=Brevibacterium linens ATCC 9172 OX=1255617 G N=tgt PE=3 SV=1
MTADETSAAFETAPINDRSNFGFEVGTRMDTGGRTGVIHTPHGDIQTPAFIPVGTKATVKAVRPDEVAELGGQAVLSNAYHLYLQPGSDLIDEAGGLGRFMNWPGPTFTDSGGFQVMSLGSGFKKVISMESTGEQNDELVAVGKERLSNVDDDGVTFKSHLDGSMHRFTPEISMRVQHELGADIMFAFDELTTLVNTRGYQEESLERTRLWAIRCIEEHFRLTEERSHRPYQALFGVLQGAQYEDLRRKAARDLGDMDFDGFGIGGALEKENLGIIIRWVCEELPENKPRHLLGISEPDDLFEAIKTGADTFDCVSPSRVARNAAIYARDGRYNLTGAKYRRDFGPLDPDCSCYTCRNYSRAYLRHLYKAKEMLFSTLCTIHNEHFVVSLVDEIRQSIVDGRFSELETDVLGRYYAKK

SEQ ID NO: 52855 - protein, 418 aa, Brevibacterium linens
  misc_feature (1)..(418): tr|A0A2H1ILM6|A0A2H1ILM6_BRELN Queuine tRNA-ribosyltran sferase OS=Brevibacterium linens OX=1703 GN=tgt PE=3 SV =1
MTADETSAAFETAPINDRSNFGFEVGTRMDTGGRTGVIHTPHGDIQTPAFIPVGTKATVKAVRPDEVAELGGQAVLSNAYHLYLQPGSDLIDEAGGLGRFMNWPGPTFTDSGGFQVMSLGSGFKKVISMESTGEQNDELVAVGKERLSNVDDDGVTFKSHLDGSMHRFTPEISMRVQHELGADIMFAFDELTTLVNTRGYQEESLERTRLWAIRCIEEHFRLTEERSHRPYQALFGVLQGAQYEDLRRKAARDLGAMDFDGYGIGGALEKENLGIIIRWVCEELPENKPRHLLGISEPDDLFEAIKTGADTFDCVSPSRVARNAAIYTRDGRYNLTGAKYRRDFGPLDPDCSCYTCQNYSRAYLRHLYKAKEMLFSTLCTIHNEHFVVSLVDEIRQSMIDGRFSELETDVLGRYYAKK

SEQ ID NO: 52856 - protein, 394 aa, Brevibacterium luteolum
  misc_feature (1)..(394): tr|A0A2N6PJR1|A0A2N6PJR1_9MICO Queuine tRNA-ribosyltran sferase OS=Brevibacterium luteolum OX=199591 GN=tgt PE= 3 SV=1
MATGGRTGTIRTPHGEIQTPAFIPVGTKATVKAVKPDDVAALGAQAVLANAYHLYLQPGADLLDEAGGLGKFMNWPGPTFTDSGGFQVMSLGVGFKKVISMDIPDSPDDSAMAADKERRAMVDDDGVTFKSHIDGTLHRFTPEVSMQVQHQLGADIMFAFDELTTLMNTRGYQEMSLERTRLWAERCLAEHERLTEARSHRPYQALFGVLQGAQYEDLRRKAARDLGAMDFDGFGIGGALEKENLGTIVGWVCEELPEDKPRHLLGISEPDDLFTAIKAGADTFDCVSPSRVARNAAVYTRDGRYNITGAKYRRDFGPIDPECTCYTCQNYSRAYLRHLFKAKEMLFSTLCTIHNEHFIVTLVDDIRASIEDGRFDELEAEVLGRYYAPKATTQ

SEQ ID NO: 52857 - protein, 458 aa, Brevibacterium ravenspurgense
  misc_feature (1)..(458): tr|A0A150H6E6|A0A150H6E6_9MICO Queuine tRNA-ribosyltran sferase OS=Brevibacterium ravenspurgense OX=479117 GN=t gt PE=3 SV=1
MHTDSAPGGDSTARDGTSASPDRAEVSFGFTIESRLDPGSRTRSPYSLGQGSVHGRTGVIRTPHGDIQTPAFIPVGTKATVKAVRPEEMRELGAQALLANAYHLYLQPGADLVDEAGGLAAFMNWHGPTFTDSGGFQVMSLGSGFKKVISMEAAADKAGFDDDATAAGKERLSFVDDDGVNFKSHLDGSLHRFTPEISMRVQHQLGADIMFAFDELTTLMNSRAYQEESLERTRLWAIRCIEEHKKLTAERSAPGFAGLPGGKPYQALFGVIQGAQYEDLRRKACRDLGAMDFDGYGIGGALEKESLGTIVGWCNDELPEDRPRHLLGISEPNDMFTAVRAGADTFDCVQPSRVARNGAVYTAYGRYNVNNAASERNWDPIEPGCECYTCQNYSRAYLRHLFKAKEMLFSTLCTIHNEHYTVRLVEKMREAIADGTFDEYEEETLGRFYGSGPAGQRG

SEQ ID NO: 52858 - protein, 458 aa, Brevibacterium ravenspurgense
  misc_feature (1)..(458): tr|A0A2I1II77|A0A2I1II77_9MICO Queuine tRNA-ribosyltran sferase OS=Brevibacterium ravenspurgense OX=479117 GN=t gt PE=3 SV=1
MHTDSAPGGDSTARGGTSASRDRGEAGFGFTIESRLDPGSRTRSPHSLGQGSVHGRTGVIRTPHGDIQTPAFIPVGTKATVKAVRPEEMRELGAQALLANAYHLYLQPGADLVDEAGGLAAFMNWNGPTFTDSGGFQVMSLGSGFKKVISMEAAADKAGFDDDATAAGKERLSFVDDDGVNFKSHLDGSLHRFTPEISMRVQHQLGADIMFAFDELTTLMNSRAYQEESLERTRLWAIRCIEEHKKLTAERSAPGFAGLPGGKPYQALFGVIQGAQYEDLRRKACRDLGAMDFDGYGIGGALEKESLGTIVGWCNDELPEDRPRHLLGISEPNDMFTAVRAGADTFDCVQPSRVARNGAVYTAYGRYNVNNAASERNWDPIEPGCECYTCQNYSRAYLRHLFKAKEMLFSTLCTIHNEHYTVRLVEKMREAIADGTFDEYEEETLGRFYGSGPAGQRG

SEQ ID NO: 52859 - protein, 429 aa, Brevibacterium sandarakinum
  misc_feature (1)..(429): tr|A0A1H1N8C3|A0A1H1N8C3_9MICO Queuine tRNA-ribosyltran sferase OS=Brevibacterium sandarakinum OX=629680 GN=tgt PE=3 SV=1
MTRIESSAESETASSTDGGADAPAINDRSRFGFEVGTRLETGGRTGVIHTPHGDIATPAFIPVGTKATVKAVRPDEVEELGGQAVLSNAYHLYLQPGSDLVDEAGGLGKFMNWPGPTFTDSGGFQVMSLGSGFKKVISMESTGEQNDDLVAVGKERMSNVDDDGVTFKSHLDGSMHRFTPEVSMRVQHELGADIMFAFDELTTLVNTRGYQVLSLERTRQWALRCIEEHQRLTAARSHRPYQALFGVLQGAQYEDLRRKAAHDLGAMDFDGFGIGGALEKENLGTIIRWVCEELPESKPRHLLGISEPDDLFESIKTGADTFDCVSPSRVARNAAIYTRDGRYNLTGAKYRRDFGPLDPDCACYTCQNYSRAYLRHLYKAKEMLFSTLCTVHNEYFVVNLVAEIRQAMIDGRFAELEAEVLGRYYAKQR

SEQ ID NO: 52860 - protein, 418 aa, Brevibacterium siliguriense
  misc_feature (1)..(418): tr|A0A1H1XGK6|A0A1H1XGK6_9MICO Queuine tRNA-ribosyltran sferase OS=Brevibacterium siliguriense OX=1136497 GN=tg t PE=3 SV=1
MTTDETPAASETAPINDRSQFGFEVGTRMDTGGRTGVIHTPHGDIQTPAFIPVGTKATVKAVRPDEVAELGGQAVLSNAYHLYLQPGSDLIDEAGGLGKFMNWPGPTFTDSGGFQVMSLGSGFKKVISMESTGEQNDELVAVGKERLSNVDDDGVTFKSHLDGSMHRFTPEISMRVQHELGADIMFAFDELTTLVNTRGYQEESLERTRLWAIRCIEEHFRLTEERSHRPYQALFGVLQGAQYEDLRRRAARDLGAMDFDGFGIGGALEKENLGIIIRWVCEELPENKPRHLLGISEPDDLFEAIKTGADTFDCVSPSRVARNAAIYTRDGRYNLTGAKYRRDFGPLDPDCTCYTCQNYSRAYLRHLYKAKEMLFSTLCTIHNEHFVVSLVAEIRQAMIDGRFDELETEVLGRYYAKK

SEQ ID NO: 52861 - protein, 481 aa, Brevibacterium sp.
  misc_feature (1)..(481): tr|A0A4P8HDK5|A0A4P8HDK5_9MICO Queuine tRNA-ribosyltran sferase OS=Brevibacterium sp. CS2 OX=2575923 GN=tgt PE= 3 SV=1
MTVPAHTSAPASPVGTSTPAGPAPASQPADATSAPAGSAPASHPADGTSAPTGPAAASQRAGAASAPGAAPTGDTGVNDRSRFGFAVEARMESGGRAGVIRTPHGDIPTPAFVPVGTKATVKAVKPDDVAALGARAVLANAYHLYLQPGPDLIDEAGGLGAFMGWPGPTFTDSGGFQVMSLGSGFKKVLSEEFSGARSDQAVAAGKERMANVDDDGVTFKSHLDGSRHRFTAEVSMQVQHQLGADIIFAFDELTTLVNTRGYQEEALERTRLWAQRCIVEHERLTAARSHRPYQALFGVIQGAQYEDLRRKAARDLGAMDFDGFGIGGALEKDRLGTIVGWVSEELPEAKPRHLLGISEPDDLFTAIAAGADTFDCVSPSRVARNAAVYSRDGRYNLTGAKYRRDFSPLDPECTCSTCATFSRAYLRHLYKAKEMLFSTLVTIHNEHFIVDLVARIRQAIIDGRFHELEAEVLGRYYANRR

SEQ ID NO: 52862 - protein, 430 aa, Brevibacterium sp.
  misc_feature (1)..(430): tr|A0A2H1ISX0|A0A2H1ISX0_9MICO Queuine tRNA-ribosyltran sferase OS=Brevibacterium sp. 239c OX=1965356 GN=tgt PE =3 SV=1
MTRIESPAESETAASNHGSVDVPAINDRSRFGFEIGTRLDEGGRTGVIHTPHGDIATPAFIPVGTKATVKAVRPDEVAELGGQAVLANAYHLYLQPGSDIVDEAGGLGKFMNWSGPTFTDSGGFQVMSLGSGFKKVISMESTGEQNDDLVAVGKERMSNVDDDGVTFKSHLDGSMHRFTPEVSMGVQHELGADIMFAFDELTTLINTRGYQVESLERTRLWALRCIEEHQRLTEARSHRPYQALFGVLQGAQYEDLRRKAAHDLGAMDFDGYGIGGALEKENLGTIIRWVCEELPENKPRHLLGISEPDDLFEAIKTGADTFDCVSPSRVARNAAIYTRDGRYNLTGAKYRRDFGPLDPDCKCYTCQNYSRAYLRHLYKAKEMLFSTLCTVHNEYFIVNLVAEIRRAMEEGRFAELETEVLGRYYAKQRG

SEQ ID NO: 52863 - protein, 445 aa, Brevibacterium yomogidense
  misc_feature (1)..(445): tr|A0A1X6X9K4|A0A1X6X9K4_9MICO Queuine tRNA-ribosyltran sferase OS=Brevibacterium yomogidense OX=946573 GN=tgt PE=3 SV=1
MTETTTSAADAARANAGGAHAAGAPAGGDAAGGDTAGGDTAADRTQFGFDVGTTMSSGGRTGTIRTPHGTIATPAFIPVGTKATVKAVKPEDVDALGADAVLANAYHLFLQPGADIVDEAGGLGAFMNWPGPTYTDSGGFQVMSLGVGSKKVLTTEFAGKDRSDLQTVDKERRMANVDEDGVTFRSHLNGDIHRFTPEVSMQVQHQLGADIIFAFDELTMLTNTRAYQEESLERTRRWAERCVTEHVRLTQERTHRPYQALFGVLQGAQYEDLRRTAARDLGAMDFDGFGIGGALEKENLGTIVGWVCEELPEEKPRHLLGIGEPDDLFAAIRRGADTFDCVSPSRVARNAAVYSRDGRYNISGSRYKRDWQPIDPECSCYTCAHHSRAYLHHLWKAKEMLFSTLCTIHNEHFIVQLVAEIRGAIEDGRYDELEAEVMGRYYAKR

SEQ ID NO: 52864 - protein, 576 aa, Brevifollis gellanilyticus
  misc_feature (1)..(576): tr|A0A512MFH1|A0A512MFH1_9BACT Queuine tRNA-ribosyltran sferase OS=Brevifollis gellanilyticus OX=748831 GN=tgt PE=3 SV=1
MSSSRLDFKLQARATGSRARAATFRTLHGVIETPLFMPVGTQATVKAQTPESLKASGSQILLANTYHLLLRPGGEVFERMGGIHKFMKWPGSVLTDSGGYQIFSLPNSRAMTEKGAVFQSYVDNRRILLSPELSIQMQRSIGSDIMMVLDQCIPSTADEAAAREALQVTQRWAARSLAAREDSPQSMFAIVQGALYPELRKESAAGLIEMPFDGFAIGGLAVGEEKHQREDVCELTAALLPEDRPRYLMGVGTPLDLLEAVHRGVDMFDCIIPTQVAKRGTAFTSRGIVELRRSVFKFADTPLDAACSCPVCVTHSRAYLHHLTKTQETLGWTLVGQHNIHFYHQLMREVRQSILEDRFLPLYHEKRAFLHEEDTEHPVKPPKRQSAEVVEKIGHYRLHRDEENGVSIRHAETSEEVITEVDANQHPELVQLMRKLPVLDGEEALPLVVWDVDLGSAATALAAIVMYEEAAGRGPVRPLHLVSFTEDLSPLRLALSHKRHFGYLRHGAADTLVHRGAWKSRYRHGLSWSLMLGPMDEMMKDAPGPPEVVLGGGGLSAAARLAFHPPNLGITTSSRD

SEQ ID NO: 52865 - protein, 385 aa, Brevifollis gellanilyticus
  misc_feature (1)..(385): tr|A0A512MGE3|A0A512MGE3_9BACT Queuine tRNA-ribosyltran sferase OS=Brevifollis gellanilyticus OX=748831 GN=tgt PE=3 SV=1
MFDLLANDPASSARRGRLQTPHGVIETPVFMPVGTQGTVKAVHPNELRELNSQIILGNTYHLWVRPGMEIIREAGGLHQFMNWDRPILTDSGGFQVFSLAKLRKIKEEGCYFNNHVDGTPMFLGPETAMEIQATLGSDIAMLFDECTPYPCTHDEAKKSMELTLRWAKRCRDWVDQNQPDAGAHGRSATQTKQLHFPIVQGSVFQDLRQHCARELVAMDFPGYAVGGLSVGEPEEDMMRIAEWTCPLLPEHKPRYAMGLGTPPQIVELIARGVDMFDCVIPTRLARNGTAFTHEGLMNLRNNKFAKDFRDLAEDTHPLCRGFSRAYIRHLINTQEVLGLRLISLHNLHFYASLTSRARLAIEQGCFSEFRAEVNARYQTRSDSPD

SEQ ID NO: 52866 - protein, 374 aa, Brevinema andersonii
  misc_feature (1)..(374): tr|A0A1I1FAM2|A0A1I1FAM2_9SPIR Queuine tRNA-ribosyltran sferase OS=Brevinema andersonii OX=34097 GN=tgt PE=3 SV =1
MKRFPFFVENSDSYARACTLTLPHGMVQTPIFMPVGTQGSVKTLSREELEDMGASIVLANSYHLFLRPGVEFFSEYGGLHKFSGWNHNFLTDSGGFQIFSLPGMRRISDDGVCFQSHLDGRQHFLTPEIMVQIQQAIGADIMMVLDECVPGNASYNSTLSALKRTTAWAERAKIEFLKLNIDNQFAFGIVQGGVFEDLRKESAKQLRDLDFPGYSIGGLSVGESKEEMYCMLDVLTDEMPVDKPRYLMGVGVPEDILEGIARGVDMFDCVFPTRVARHGTAFTRDGRINLRTQIFTYDTRPIDEECSCYACRNYDRAYIRHLLRANEVLGARLASIHNLFFLIELTRNARQSILDNNFSAFKDNFLARYCSSKK

SEQ ID NO: 52867 - protein, 376 aa, Brevirhabdus pacifica
  misc_feature (1)..(376): tr|A0A1U7DLC8|A0A1U7DLC8_9RHOB Queuine tRNA-ribosyltran sferase OS=Brevirhabdus pacifica OX=1267768 GN=tgt PE=3 SV=1
MTQRVTFQLQARDGKARRGVIQTPRGEIRTPAFMPVGTAATVKAMLPESVRATGADVLLGNTYHLMLRPTAERIAALGGLHKFMNWERPILTDSGGFQVMSLAELRKLTEKGVTFRSHVDGARHELTPERSMEIQALLGSDIVMSFDECTPYPATEEVAASSMRLSMRWAQRSRDAFGDRPGHALFGIQQGSTFRELREESAQALQQIGFDGYAVGGLAVGEGQEAMFDVLDYAPDMLPEDKPRYLMGVGKPDDIVGAVARGIDMMDCVLPSRSGRTGQVFTHRGVVNIKNARHRDDPRPLDESCTCPACRSYSRAYLHHVFRAGEMISGMLLTWHNLHYYQVLMDGMREAIEAGDFAGFERDFHARRAEGDIEPI

SEQ ID NO: 52868 - protein, 370 aa, Brevundimonas diminuta
  misc_feature (1)..(370): tr|A0A246K8L3|A0A246K8L3_BREDI Queuine tRNA-ribosyltran sferase OS=Brevundimonas diminuta OX=293 GN=tgt PE=3 SV =1
MPFPFEISAVEGRARTGVLKTTRGDIRTPTFMPVGTAATVKAMTVDQVKQTGADVILGNTYHLMLRPGPERMERLGGLHNFMRWDKPILTDSGGFQVMSLSGISKLSEEAVTFSSHIDGSKHVLTPERSIQIQADRLGSDIVMQLDECVAWPAEEKRAREGMELSARWAQRSKNAFGTRDAQALFGIQQGSTYENLRRESSERLQEIGFDGYALGGLAVGEGHEAMCEVLDYAPEFLPKDRPRYLMGVGKPIDLVEAVYRGVDMFDCVLPTRAGRHGQAWTWDGPLNLKNARFAEDQDPLDPEVPCPASQDYSKAYLHHLIRADEILGKILLSWHNIAFFQALTAAMRAAIAEGRFEQFRRDFRARHLKA

SEQ ID NO: 52869 - protein, 370 aa, Brevundimonas diminuta
  misc_feature (1)..(370): tr|L1QFS2|L1QFS2_BREDI Queuine tRNA-ribosyltransferase OS=Brevundimonas diminuta 470-4 OX=1035191 GN=tgt PE=3 SV=1
MPFPFEISATEGRARTGVLKTTRGDIRTPAFMPVGTAATVKAITVDQVKQTGADIILGNTYHLMLRPGPERMERLGGLHNFMRWDKPILTDSGGFQVMSLSGISKLTEKAVTFSSHIDGSKHVLTPERSIQIQADRLGSDIVMQLDECVAWPAEEKRAREGMELSARWAQRSKNAFGTRDAQALFGIQQGSTYENLRRESSERLQEIGFDGYAIGGLAVGEGHEAMCEVLDYAPEFLPKDRPRYLMGVGKPIDLVEAVYRGVDMFDCVLPTRAGRHGQAWTWDGPLNLKNARFAEDQDPLDPEVPCPASQDYSKAYLHHLIRADEILGKILLSWHNIAFFQALTAAMRAAIAEGRFEQFRRDFRARHLKA

SEQ ID NO: 52870 - protein, 370 aa, Brevundimonas intermedia
  misc_feature (1)..(370): tr|A0A4Y9S1Y8|A0A4Y9S1Y8_9CAUL Queuine tRNA-ribosyltran sferase OS=Brevundimonas intermedia OX=74315 GN=tgt PE= 3 SV=1
MMPFPFEISATEGRARTGVLKTARGDIRTPAFMPVGTAATVKAMTVDQVKATGADIILGNTYHLMLRPGPERMERLGGLHKFMGWDKPILTDSGGFQVMSLAGISKVKEEAVTFSSHIDGSKHVLTPERSIEIQADRIGADISMQLDQCVSWPAERDAAQKAMELSIRWGARSKARFGEREHQALFGIQQGSTFEDLRRQSSDQLQEIGFDGYAIGGLAVGEGHQAMCEVLDYAPEMLPADRPRYLMGVGKPIDLVEAVWRGVDMFDCVLPTRAGRHGQAWTWDGPLNLKNARFAEDQNPLDPAIDGPSSQYSKAYLHHLIRADEILGKVLLSWHNIAFYQALTAAMRAAISEGRFEQFRRDFHARHTSN

SEQ ID NO: 52871 - protein, 370 aa, Brevundimonas naejangsanensis
  misc_feature (1)..(370): tr|A0A4P7BP43|A0A4P7BP43_9CAUL Queuine tRNA-ribosyltran sferase OS=Brevundimonas naejangsanensis OX=588932 GN=t gt PE=3 SV=1
MPFPFEISAAEGRARTGVLKTPRGDIRTPAFMPVGTAATVKAMTLDQVKQTGADIILGNTYHLMLRPGPERMERLGGLHNFMRWDKPILTDSGGFQVMSLSGISKLTEEAVTFSSHIDGSKHVLTPERSIQIQADRLGSDIVMQLDECVAWPAEEKRAREGMELSARWAQRSKNAFGTRDAQALFGIQQGSTYENLRRESSERLQEIGFDGYAIGGLAVGEGHEAMCEVLDYAPEFLPKDRPRYLMGVGKPIDLVEAVYRGVDMFDCVLPTRAGRHGQAWTWDGPLNLKNARFAEDQDPLDPEVPCPASQDYSKAYLHHLIRADEILGKILLSWHNIAFFQALTAAMRAAIAEGRFEQFRREFRARHLKA

SEQ ID NO: 52872 - protein, 371 aa, Brevundimonas naejangsanensis
  misc_feature (1)..(371): tr|A0A494RQI1|A0A494RQI1_9CAUL Queuine tRNA-ribosyltran sferase OS=Brevundimonas naejangsanensis OX=588932 GN=t gt PE=3 SV=1
MLPFPFDIFATEGRARTGVLKTPRGDIRTPAFMPVGTAATVKAMTVDQVKQTGADILLGNTYHLMLRPGPERMERLGGLHNFMRWDKPILTDSGGFQVMSLSGISKLTEEAVTFSSHIDGSKHILTPERSIQIQADRLGSDIVMQLDECVAWPAEEKRAREGMELSARWAQRSKNAFGTRDAQALFGIQQGSTYENLRRESSERLQEIGFDGYAIGGLAVGEGHEAMCEVLDFAPEFLPKDRPRYLMGVGKPIDLVEAVYRGVDMFDCVLPTRAGRHGQAWTWDGPLNLKNARFAEDQDPLDPGVPCPASQDYSKAYLHHLIRADEILGKILLSWHNIAFFQALTAAMREAISEGRFEQFRRDFRARHLKA

SEQ ID NO: 52873 - protein, 370 aa, Brevundimonas nasdae
  misc_feature (1)..(370): tr|A0A0B4CR95|A0A0B4CR95_9CAUL Queuine tRNA-ribosyltran sferase OS=Brevundimonas nasdae OX=172043 GN=tgt PE=3 S V=1
MPFPFQISATEGRARTGVLKTARGDIRTPAFMPVGTAATVKAMTVDQVKATGADILLGNTYHLMLRPGPERMERLGGLHKFMGWDKPILTDSGGFQVMSLAGISKVKEEAVTFSSHIDGSKHVLTPERSIEIQADRIGADISMQLDQCVAYPAEKDAARKAMELSIRWGARSKARFGERENQALFGIQQGSTFEDLRRQSSEQLQEIGFDGYAIGGLAVGEGHQAMCEVLDYAPEMLPADRPRYLMGVGKPVDLVEAVYRGVDMFDCVLPTRAGRHGQAWTWDGPLNLKNARFAEDQDPLDPTIDGPSSQYSKAYLHHLIRADEILGKVLLSWHNIAFYQALTAAMRAAISEGRFEQFRRDFHARHTSNG

SEQ ID NO: 52874 - protein, 371 aa, Brevundimonas sp.
  misc_feature (1)..(371): tr|A0A0Q7T6I3|A0A0Q7T6I3_9CAUL Queuine tRNA-ribosyltran sferase OS=Brevundimonas sp. Root1423 OX=1736462 GN=tgt PE=3 SV=1
MPFPFHIQNTEGRARTGVLRTPRGDIRTPAFMPVGTAATVKAMTVDQVAQTGADIILGNTYHLMLRPGPERMERLGGLHKFMGWNRPILTDSGGFQVMSLAGISKVKEDAVTFASHIDGSKHVLSPERSIEIQADRIGADISMQLDQCVAWPAEEPAARAAMELSARWGARSKAAFGTRETQALFGIQQGSTFENLRRESSERLRETGFDGYAIGGLAVGEGHQAMCEVLDYAPDMLPADRPRYLMGVGKPVDLVEAVWRGVDMFDCVLPTRAGRHGQAWTWDGPINLKNARFAEDQDPLDPALACPGSSQYSKAYLHHLIRADEILGKVLLSWHNIAFFQALMAAMRAAIAEGRFEAFRRDFHARHTSNG

SEQ ID NO: 52875 - protein, 370 aa, Brevundimonas sp.
  misc_feature (1)..(370): tr|A0A3B8UCP2|A0A3B8UCP2_9CAUL Queuine tRNA-ribosyltran sferase OS=Brevundimonas sp. OX=1871086 GN=tgt PE=3 SV= 1
MPFPFEISATEGRARTGVLKTTRGDIRTPAFMPVGTAATVKAMTVDQVKQTGADIILGNTYHLMLRPGPERMERLGGLHNFMRWDKPILTDSGGFQVMSLSGISKLTEEAVTFSSHIDGSKHVLTPERSIQIQADRLGSDIVMQLDECVAWPAEEKRAREGMELSARWAQRSKNAFGTRDAQALFGIQQGSTYENLRRESSERLQEIGFDGYAIGGLAVGEGHEAMCEVLDYAPEFLPKDRPRYLMGVGKPIDLVEAVYRGVDMFDCVLPTRAGRHGQAWTWDGPLNLKNARFAEDQDPLDPEVPCPASQDYSKAYLHHLIRADEILGKILLSWHNIAFFQALTAAMRAAIAEGTFEQFRRDFRARHLKA

SEQ ID NO: 52876 - protein, 370 aa, Brevundimonas subvibrioides
  misc_feature (1)..(370): tr|D9QM84|D9QM84_BRESC Queuine tRNA-ribosyltransferase OS=Brevundimonas subvibrioides (strain ATCC 15264 / DSM 4735 / LMG 14903 / NBRC 16000 / CB 81) OX=633149 GN=tg t PE=3 SV=1
MPFPFTLTATEGRARTGVLTTPRGDIRTPAFMPVGTAATVKAMSVDQVKATGADIILGNTYHLMLRPGPERMERLGGLHAFMGWDKPILTDSGGFQVMSLAGISKVKEEAVTFSSHIDGSKHILSPERSIEIQADRIGADISMQLDECVAWPAEEPRARAAMELSARWAARSKAAFGTRETQGLFGIQQGSTFENLRRESSERLIDIGFDGYAIGGLAVGEGHQAMCEVLDYAPDMLPADRPRYLMGVGKPVDLVEAVWRGVDMFDCVLPTRAGRHGQAWTWDGPINLKNARFAEDRTPLDPTIDCPASSQTSKAYLHHLIRADEILGKTLLSWHNIAFYQAVTAAMREAIAHGRFEAWRKDFHARHVSN

SEQ ID NO: 52877 - protein, 369 aa, Brevundimonas subvibrioides
  misc_feature (1)..(369): tr|A0A258HDP4|A0A258HDP4_9CAUL Queuine tRNA-ribosyltran sferase OS=Brevundimonas subvibrioides OX=74313 GN=tgt PE=3 SV=1
MPFPFEISATEGRARTGVLKTARGDIRTPAFMPVGTAATVKAMTVEQVKATGADIILGNTYHLMLRPGPERMERLGGLHKFMGWDKPILTDSGGFQVMSLAGISKVKEDAVTFASHIDGSKHVLSPERSIEIQADRIGADISMQLDQCVAWPAEKPAAKAAMELSIRWGARSKAAFGPRETQALFGIQQGSTFEDLRRQSSDQLREIGFDGYAIGGLAVGEGHTAMCEVLDYAPEMLPADRPRYLMGVGKPIDLVEAVYRGVDMFDCVLPTRAGRHGQAWTWDGPINLKNARFAEDQDPLDPTLSGPSSQYSKAYLHHLIRADEILGKILLSWHNIAFFQALTAAMRDAIQHGRFEQFRRDFHTRHTSN

SEQ ID NO: 52878 - protein, 370 aa, Brevundimonas vancanneytii
  misc_feature (1)..(370): tr|A0A4P1K4W2|A0A4P1K4W2_9CAUL Queuine tRNA-ribosyltran sferase OS=Brevundimonas vancanneytii OX=1325724 GN=tgt PE=3 SV=1
MPFPFEISAVEGRARTGVLKTTRGDIRTPAFMPVGTAATVKAITVDQVKQTGADIILGNTYHLMLRPGPERMERLGGLHNFMRWDKPILTDSGGFQVMSLSGISKLSEEAVTFSSHIDGSKHVLTPERSIQIQADRLGSDIVMQLDECVAWPAEEKRAREGMELSARWAQRSKNAFGTRDAQALFGIQQGSTYENLRRESSERLQEIGFDGYAIGGLAVGEGHEAMCEVLDFAPEFLPKDRPRYLMGVGKPIDLVEAVYRGVDMFDCVLPTRAGRHGQAWTWDGPLNLKNARFAEDQDLLDPEVPCPASQDYSKAYLHHLIRADEILGKILLSWHNIAFFQALTAAMRAAIAEGRFEQFRRDFRARHLKA

SEQ ID NO: 52879 - protein, 370 aa, Brevundimonas vesicularis
  misc_feature (1)..(370): tr|A0A2X1CGX3|A0A2X1CGX3_BREVE Queuine tRNA-ribosyltran sferase OS=Brevundimonas vesicularis OX=41276 GN=tgt PE =3 SV=1
MPFPFQISATEGRARTGVLKTARGDIRTPAFMPVGTAATVKAMTVDQVKATGADILLGNTYHLMLRPGPERMERLGGLHTFMGWDKPILTDSGGFQVMSLAGISKVKEEAVTFSSHIDGSKHVLTPERSIEIQADRIGADISMQLDQCVAYPAEKDAAKKAMELSIRWGARSKTRFGERENQALFGIQQGSTFEDLRRQSSEQLQEIGFDGYAIGGLAVGEGHQAMCEVLDYAPEMLPADRPRYLMGVGKPVDLVEAVYRGVDMFDCVLPTRAGRHGQAWTWDGPLNLKNARFAEDQDPLDPTIDGPSSSYSKAYLHHLIRADEILGKVLLSWHNIAFYQALTAAMRAAISEGRFEQFRRDFHARHTSNG

SEQ ID NO: 52880 - protein, 370 aa, Brevundimonas vesicularis
  misc_feature (1)..(370): tr|A0A1Z3U547|A0A1Z3U547_BREVE Queuine tRNA-ribosyltran sferase OS=Brevundimonas vesicularis OX=41276 GN=tgt PE =3 SV=1
MPFPFQIFATEGRARTGVLKTARGDIRTPAFMPVGTAATVKAMTVDQVKATGADILLGNTYHLMLRPGPERMERMGGLHKFMGWDKPILTDSGGFQVMSLAGISKVKEEAVTFSSHIDGSKHVLTPERSIEIQADRIGADISMQLDQCVAYPAEKDAARKAMELSIRWGARSKARFGERENQALFGIQQGSTFADLRRQSSEQLQEIGFDGYAIGGLAVGEGHHAMCEVLDYAPEMLPADRPRYLMGVGKPVDLVEAVYRGVDMFDCVLPTRAGRHGQAWTWDGPLNLKNARFAEDQDPLDPTIDGPSSQYSKAYLHHLIRADEILGKVLLSWHNIAFYQALTAAMRAAISEGRFKQFRRDFHARHTSNG

SEQ ID NO: 52881 - protein, 373 aa, Brevundimonas viscosa
  misc_feature (1)..(373): tr|A0A1I6S180|A0A1I6S180_9CAUL Queuine tRNA-ribosyltran sferase OS=Brevundimonas viscosa OX=871741 GN=tgt PE=3 SV=1
MPFPFDISATDGRARTGLLRTPRGDIRTPAFMPVGTAATVKALTVGQVEQTGADILLGNTYHLMLRPGPERMERLGGLHRFMRWDKPILTDSGGFQVMSLSGISKLTEEAVTFSSHVDGSKHVLTPERSIEIQADRLGSDIVMQLDECVAWPAEESRAREGMELSARWAKRSKAAFGSRDAQALFGIQQGSTFEHLRRESSDRLQDIGFDGYAIGGLAVGEGHAAMCEVLDYAPEMLPADRPRYLMGVGKPVDLVEAVWRGVDMFDCVLPTRAGRHGQAWTWAGPINLKNARFAEDEEPLDPEVPCPASQDYSKAYLHHLVRTDEILGKVLLSWHNIAFFQALTAAMRAAIAEGRFEQFRRDFHARHVSNGRG

SEQ ID NO: 52882 - protein, 380 aa, Brochothrix campestris
  misc_feature (1)..(380): tr|W7D136|W7D136_9LIST Queuine tRNA-ribosyltransferase OS=Brochothrix campestris FSL F6-1037 OX=1265861 GN=tgt PE=3 SV=1
MKPAVTYELIKTDKATGARAGIIHTPHGSFPTPMFMPVGTLATVKTMAPEDLKEMNAGIILSNTYHLWLRPGHELIREAGGLHKFMNWDQPILTDSGGFQVFSLSKIRDIKEEGVHFRSHLDGSKLFLSPEKAIEIQEALGSDIMMSFDECPPYPASREYMIQSMARTTRWAERGLKAHTTMDKQSLFGIVQGGVYADLRQQHAKELASLDFPGYSIGGLSVGEEKHLMNEALEATTPFLPADKPRYLMGVGSPDALIDGVIRGIDMFDCVLPTRIARNGTTMTSQGRVVIKNKIYEKDFGPLDPNCDCHVCKNYSRAYIRHLVKAKESFGIRLTSYHNLHFLIKLMENVREAIMEDRLLAFREEFFEQYGYNKPNPRNF

SEQ ID NO: 52883 - protein, 380 aa, Brochothrix thermosphacta
  misc_feature (1)..(380): tr|A0A1D2LQ71|A0A1D2LQ71_BROTH Queuine tRNA-ribosyltran sferase OS=Brochothrix thermosphacta OX=2756 GN=tgt PE= 3 SV=1
MRPAVVYELLKTDKETGARAGIIHTPHGSFPTPMFMPVGTLATVKTLSPEELKEMGSGIILSNTYHLWLRPGHELIREAGGLHKFMNWDQPILTDSGGFQVFSLSKIRDIKEEGVHFRSHLDGSKLFLSPEKAIEIQEALGSDIMMSFDECPPYPASREYMIQSMARTTRWAERGLKAHTTMDKQSLFGIVQGGVYSDLRQQHAKELASLDFPGYSIGGLSVGEEKHLMNEALEATTPFLPADKPRYLMGVGSPDALIDGVIRGIDMFDCVLPTRIARNGTTMTSQGRVVIKNAIYERDFGPLDPNCDCHVCKNYSRAYLRHLIKAKEAFGIRLTSYHNLYFLIKLMEDVREAIMEDRLLAFREEFFEQYGYNKENPRNF

SEQ ID NO: 52884 - protein, 377 aa, Brockia lithotrophica
  misc_feature (1)..(377): tr|A0A2T5G785|A0A2T5G785_9THEO Queuine tRNA-ribosyltran sferase OS=Brockia lithotrophica OX=933949 GN=tgt PE=3 SV=1
MAIRFEVLARDRRSGARVGRLVTPHGTFETPMFMPVGTQATVKTLAPEELREIGAKIVLANTYHLWLRPGEDVVAEAGGLHRFMAWDGAILTDSGGFQVFSLAERRRVEEEGVYFLSHLDGSVKFMSPEVSIAVQNALDADIIMAFDECPPLEADRTYVEKSAERTLRWAERSLRAHRFPERQALFGIVQGGFYPDLRIAHARALVALDFPGYAVGGLSIGEPKEVMYRILEETVPHLPEGKPRYLMGVGSPDAIFAAVERGIDLFDSVLPTRIARNGTAMTSRGRLVVRNAEYRRSWDPLDAACDCKVCRTFTRGYLRHLFHAEEMLGPRLLTYHNLYFLLSLMEGIRASIREGRFQEFKEAFLTAYYADQPNRGF

SEQ ID NO: 52885 - protein, 253 aa, Brucella abortus
  misc_feature (1)..(253): tr|D7H3N1|D7H3N1_BRUAO Queuine tRNA-ribosyltransferase (Fragment) OS=Brucella abortus bv. 5 str. B3196 OX=5204 53 GN=BAYG_01362 PE=3 SV=1
MTTENFGFKVLARDGAARQGEISMPRGVVRTPAFMPVGTAGTVKAMYMDQVKELGADIILGNTYHLMLRPGAERVARLGGLHEFGGWKGPILTDSGGFQVMSLAQLRKLNEHGVTFRSHIDGKAYEMTPERSIEIQGLLDSDIQMQLDECVALPSPEKNTERAMELSLRWAERCKVAFGDQPGKAMFGIVQGGDIARLRERSAEALKAMDLKGYSVGGLAVGEPQEVMLDMLEVVCPILPTEKPRYLMGVGTP

SEQ ID NO: 52886 - protein, 377 aa, Brucella abortus
  misc_feature (1)..(377): tr|Q57D46|Q57D46_BRUAB Queuine tRNA-ribosyltransferase OS=Brucella abortus biovar 1 (strain 9-941) OX=262698 G N=tgt PE=3 SV=1
MTTENFGFKVLARDGAARQGEISMPRGVVRTPAFMPVGTAGTVKAMYMDQVKELGADIILGNTYHLMLRPGAERVARLGGLHEFGGWKGPILTDSGGFQVMSLAQLRKLNEHGVTFRSHIDGKAYEMTPERSIEIQGLLDSDIQMQLDECVALPSPEKNTERAMELSLRWAERCKVAFGDQPGKAMFGIVQGGDIARLRERSAEALKAMDLKGYSVGGLAVGEPQEVMLDMLEVVCPILPTEKPRYLMGVGTPDDILKSVARGIDMFDCVMPTRAGRHGLAFTRFGKVNLRNARHAEDHRPLDPQSDCPASRDYSRAYLHHLVKSGEALGAMLLTWNNLAYYQYLMKGIRAAIADGNFSDFTAETTEGWARGDMPAL

SEQ ID NO: 52887 - protein, 377 aa, Brucella canis; identical to SEQ ID NO: 52886
  misc_feature (1)..(377): tr|A9M5A3|A9M5A3_BRUC2 Queuine tRNA-ribosyltransferase OS=Brucella canis (strain ATCC 23365 / NCTC 10854) OX=4 83179 GN=tgt PE=3 SV=1

SEQ ID NO: 52888 - protein, 377 aa, Brucella ceti
  misc_feature (1)..(377): tr|C0G6I2|C0G6I2_9RHIZ Queuine tRNA-ribosyltransferase OS=Brucella ceti str. Cudo OX=595497 GN=tgt PE=3 SV=1
MTTENFGFKVLARDGAARQGEISMPRGVVRTPAFMPVGTAGTVKAMYMDQVKELGADIILGNTYHLMLRPGAERVARFGGLHEFGGWKGPILTDSGGFQVMSLAQLRKLNEHGVTFRSHIDGKAYEMTPERSIEIQGLLDSDIQMQLDECVALPSPEKNTERAMELSLRWAERCKVAFGDQPGKAMFGIVQGGDIARLRERSAEALKAMDLKGYSVGGLAVGEPQEVMLDMLEVVCPILPTEKPRYLMGVGTPDDILKSVARGIDMFDCVMPTRAGRHGLAFTRFGKVNLRNARHAEDHRPLDPQSDCPASRDYSRAYLHHLVKSGEALGAMLLTWNNLAYYQYLMKGIRAAIADGNFSDFTAETTEGWARGDMPAL

SEQ ID NO: 52889 - protein, 377 aa, Brucella melitensis; identical to SEQ ID NO: 52886
  misc_feature (1)..(377): tr|A0A4P6KM72|A0A4P6KM72_BRUML Queuine tRNA-ribosyltran sferase OS=Brucella melitensis OX=29459 GN=tgt PE=3 SV= 1

SEQ ID NO: 52890 - protein, 377 aa, Brucella melitensis
  misc_feature (1)..(377): sp|Q8YHB2|TGT_BRUME Queuine tRNA-ribosyltransferase OS= Brucella melitensis biotype 1 (strain 16M / ATCC 23456 / NCTC 10094) OX=224914 GN=tgt PE=3 SV=1
MTTENFGFKVLARDGAARQGEISMPRGVVRTPAFMPVGTAGTVKAMYMDQVKELGADIILGNTYHLMLRPGAERVARLGGLHEFGGWKGPILTDSGGFQVMSLAQLRKLNEHGVTFRSHIDGKAYEMTPERSIEIQGLLDSDIQMQLDECVALPSPEKNTERAMELSLRWAERCKVAFGDQPGKAMFGIVQGGDIARLRERSAEALKAMDLKGYSVGGLAVGEPQEVMLDMLEVVCPILPTEKPRYLMGVGTPDDILKSVARGIDMFDCVMPTRAGRHGLAFTRFGKVNLRNARHAEDHRPLDPQSDCPASRDYSRAYLHHLVKSGEALGAMLLTWNNLAYYQYLMKGIRAAIADGKFSDFTAETTEGWARGDMPAL

SEQ ID NO: 52891 - protein, 377 aa, Brucella microti; identical to SEQ ID NO: 52890
  misc_feature (1)..(377): tr|C7LC44|C7LC44_BRUMC Queuine tRNA-ribosyltransferase OS=Brucella microti (strain CCM 4915) OX=568815 GN=tgt PE=3 SV=1

SEQ ID NO: 52892 - protein, 202 aa, Brucella neotomae
  misc_feature (1)..(202): tr|A0A381B8T7|A0A381B8T7_BRUNE Queuine tRNA-ribosyltran sferase OS=Brucella neotomae OX=29460 GN=tgt_1 PE=4 SV= 1
MAFGDQPGKAMFGIVQGGDIARLRERSAEALKAMDLKGYSVGGLAVGEPQEVMLDMLEVVCPILPTEKPRYLMGVGTPDDILKSVARRIDMFDCVMPTRAGRHGLAFTRFGKVNLRNARHAEDHRPLDPQSDCPASRDYSRAYLHHLVKSGEALGAMLLTWNNLAYYQYLMKGIRAAIADGKFSDFTAETTEGWARGDMPAL

SEQ ID NO: 52893 - protein, 377 aa, Brucella neotomae
  misc_feature (1)..(377): tr|A0A381B945|A0A381B945_BRUNE Queuine tRNA-ribosyltran sferase OS=Brucella neotomae OX=29460 GN=tgt_2 PE=3 SV= 1
MTTENFGFKVLARDGAARQGEISMPRGVVRTPAFMPVGTAGTVKAMYMDQVKELGADIILGNTYHLMLRPGAERVARLGGLHEFGGWKGPILTDSGGFQVMSLAQLRKLNEHGVTFRSHIDGKAYEMTPERSIEIQGLLGSDIQMQLDECVALPSPEKNTERAMELSLRWAERCKVAFGDQPGKAMFGIVQGGDIARLRERSAEALKAMDLKGYSVGGLAVGEPQEVMLDMLEVVCPILPTEKPRYLMGVGTPDDILKSVARGIDMFDCVMPTRAGRHGLAFTRFGKVNLRNARHAEDHRPLDPQSDCPASRDYSRAYLHHLVKSGEALGAMLLTWNNLAYYQYLMKGIRAAIADGNFSDFTAETTEGWARGDMPAL

SEQ ID NO: 52894 - protein, 377 aa, Brucella ovis
  misc_feature (1)..(377): tr|N8LXX5|N8LXX5_BRUOV Queuine tRNA-ribosyltransferase OS=Brucella ovis IntaBari-2002-82-58 OX=1293916 GN=tgt PE=3 SV=1
MTIENFGFKVLARDGAARQGKISMPRGVVRTPAFMPVGTAGTVKAMYMDQVKELGADIILGNTYHLMLRPGAERVARLGGLHEFGGWKGPILTDSGGFQVMSLAQLRKLNEHGVTFRSHIDGKAYEMTPERSIEIQGLLDSDIQMQLDECVALPSPEKNTERAMELSLRWAERCKVAFGDQPGKAMFGIVQGGDIARLRERSAEALKAMDLKGYSVGGLAVGEPQEVMLDMLEVVCPILPTEKPRYLMGVGTPDDILKSVARGIDMFDCVMPTRAGRHGLAFTRFGKVNLRNARHAEDHRPLDPQSDCPASRDYSRAYLHHLVKSGEALGAMLLTWNNLAYYQYLMKGIRAAIADGNFSDFTAETTEGWARGDMPAL

SEQ ID NO: 52895 - protein, 377 aa, Brucella ovis; identical to SEQ ID NO: 52894
  misc_feature (1)..(377): tr|A0A0H3ARE5|A0A0H3ARE5_BRUO2 Queuine tRNA-ribosyltran sferase OS=Brucella ovis (strain ATCC 25840 / 63/290 / NCTC 10512) OX=444178 GN=tgt PE=3 SV=1

SEQ ID NO: 52896 - protein, 377 aa, Brucella pinnipedialis; identical to SEQ ID NO: 52886
  misc_feature (1)..(377): tr|A0A0E1X2A7|A0A0E1X2A7_9RHIZ Queuine tRNA-ribosyltran sferase OS=Brucella pinnipedialis M292/94/1 OX=520462 G N=tgt PE=3 SV=1

SEQ ID NO: 52897 - protein, 377 aa, Brucella sp.
  misc_feature (1)..(377): tr|A0A1M4LAK0|A0A1M4LAK0_9RHIZ Queuine tRNA-ribosyltran sferase OS=Brucella sp. 10RB9215 OX=1149953 GN=tgt PE=3 SV=1
MTTENFGFKVLARDGAARQGEISMPRGVVRTPAFMPVGTAGTVKAMYMDQVKELGADIILGNTYHLMLRPGAERVARLGGLHEFGGWKGPILTDSGGFQVMSLAQLRKLNEHGVTFRSHIDGKAYEMTPERSIEIQGLLDSDIQMQLDECVALPSPEKNTERAMELSLRWAERCKVAFGDQPGKAMFGIVQGGDIARLREKSAEALKAMDLKGYSVGGLAVGEPQEVMLDMLEVVCPILPMEKPRYLMGVGTPDDILKSVARGIDMFDCVMPTRAGRHGLAFTRFGKVNLRNARHAEDHRPLDPQSDCPASRDYSRAYLHHLVKSGEALGAMLLTWNNLAYYQYLMKGIRAAIADGNFSDFTAETTEGWARGDMPAL

SEQ ID NO: 52898 - protein, 377 aa, Brucella sp.
  misc_feature (1)..(377): tr|D1CY51|D1CY51_9RHIZ Queuine tRNA-ribosyltransferase OS=Brucella sp. 83/13 OX=520449 GN=tgt PE=3 SV=1
MTTENFGFKVLARDGAARQGEISMPRGVVRTPAFMPVGTAGTVKAMYMDQVKELGADIILGNTYHLMLRPGAERVARLGGLHEFGGWKGPILTDSGGFQVMSLAQLRKLNEHGVTFRSHIDGKAYEMTPERSIEIQGLLDSDIQMQLDECVALPSPEKNTERAMELSLRWAERCKVAFGDQPGKAMFGIVQGGDIARLRERSAEALKAMDLKGYSVGGLAVGEPQEVMLDMLEVVCPILPTEKPRYLMGVGTPDDILKSVARGIDMFDCVMPTRAGRHGLAFTRFGKVNLRNARHAEDHRPLDPQSDCPASRDYSRAYLHHLVKSGEALGAMLLTWNNLAYYQYLMKGIRAAIADGNFSDFTAEITEGWARGDMPAL

SEQ ID NO: 52899 - protein, 374 aa, Brucella suis
  misc_feature (1)..(374): tr|A0A4Z0F0X8|A0A4Z0F0X8_BRUSS Queuine tRNA-ribosyltran sferase (Fragment) OS=Brucella suis OX=29461 GN=tgt PE= 3 SV=1
MTTENFGFKVLARDGAARQGEISMPRGVVRTPAFMPVGTAGTVKAMYMDQVKELGADIILGNTYHLMLRPGAERVARLGGLHEFGGWKGPILTDSGGFQVMSLAQLRKLNEHGVTFRSHIDGKAYEMTPERSIEIQGLLDSDIQMQLDECVALPSPEKNTERAMELSLRWAERCKVAFGDQPGKAMFGIVQGGDIARLRERSAEALKAMDLKGYSVGGLAVGEPQEVMLDMLEVVCPILPTEKPRYLMGVGTPDDILKSVARGIDMFDCVMPTRAGRHGLAFTRFGKVNLRNARHAEDHRPLDPQSDCPASRDYSRAYLHHLVKSGEALGAMLLTWNNLAYYQYLMKGIRAAIADGNFSDFTAETTEGWARGDM

SEQ ID NO: 52900 - protein, 377 aa, Brucella suis; identical to SEQ ID NO: 52886
  misc_feature (1)..(377): sp|Q8G0K1|TGT_BRUSU Queuine tRNA-ribosyltransferase OS= Brucella suis biovar 1 (strain 1330) OX=204722 GN=tgt P E=3 SV=1

SEQ ID NO: 52901 - protein, 377 aa, Brucellaceae bacterium
  misc_feature (1)..(377): tr|A0A3P1UNF2|A0A3P1UNF2_9RHIZ Queuine tRNA-ribosyltran sferase OS=Brucellaceae bacterium VT-16-1752 OX=2487907 GN=tgt PE=3 SV=1
MTSENFEFTVLARDGAARQGEISMPRGVVRTPAFMPVGTAGTVKAMYMDQVKDLGADIILGNTYHLMLRPGAERVARLGGLHEFGGWKGPILTDSGGFQVMSLAQLRKLDEKGVTFRSHIDGKAYEMTPERSIEIQGLLDSDIQMQLDECVALPSPEKNTERAMELSLRWAERCKVAFGDQPGKAMFGIVQGGDNARLRERSAEALKAMDLKGYSVGGLAVGEPQNVMLDMLEVVCPILPAEKPRYLMGVGTPDDILKSVARGIDMFDCVMPTRAGRHGLAFTRFGKVNLRNARHADDHRPLDPESDCPASRDYSRAYLHHLVKSGEALGAMLLTWNNLAYYQYLMKGIRAAIAEGRFNDFAAETTAGWERGDIPAL

SEQ ID NO: 52902 - protein, 376 aa, Brumimicrobium aurantiacum
  misc_feature (1)..(376): tr|A0A3E1EY97|A0A3E1EY97_9FLAO Queuine tRNA-ribosyltran sferase OS=Brumimicrobium aurantiacum OX=1737063 GN=tgt PE=3 SV=1
MHFELKHQDKNSQARAGKLVTDHGEIETPIFMPVGTVGSVKGIHQHEIENEINAQIILGNTYHLFLRPGTEVLEAAGGLHKFIDYKRPILTDSGGYQVYSMSGSRKITEEGVKFQSHVDGSYHFFTPERAIDIQRSIGADIIMAFDECTPYPCDYQYAKRSMKMTHRWLDRCFTQMNNTQPKYGYDQALFPIVQGSVYTDLRQESAKYIADTDSLGNAIGGLSVGEPAEELYAMTEVVTDILPKEKPRYLMGVGTPMNLLECIALGVDMFDCVMPTRNARHGMLFTSEGIINIKNKKWEKDFTPIDPNGTSSVDTVYTKAYLRHLIKTKESLGLQIASIHNLAFYLALMKEARKRIIDGSFKEWKNVMVKKMAQRL

SEQ ID NO: 52903 - protein, 376 aa, Brumimicrobium glaciale
  misc_feature (1)..(376): tr|A0A4V1WG11|A0A4V1WG11_9FLAO Queuine tRNA-ribosyltran sferase OS=Brumimicrobium glaciale OX=200475 GN=tgt PE= 3 SV=1
MHFELLHQDKNSQARAGKLVTDHGEIETPIFMPVGTVGSVKGIHQHEIENEIKAQIILGNTYHLFLRPGTEVLEAAGGLHKFMNYNRPILTDSGGYQVYSMSGSRKITEEGVKFQSHVDGSYHFFTPERAIDIQRSIGADIIMAFDECTPYPCDYQYAKRSMKMTHRWLDRCFTQMNNTEPKYGYEQALFPIVQGSVYTDLRQESAKYIADTDSLGNAIGGLSVGEPAEELYAMTEVVTAILPKEKPRYLMGVGTPINLLECIALGIDMFDCVMPTRNARHGMLFTSEGIINIKNKKWEKDFSPIDPNGTSSVDTFYTKAYLRHLVRTKESLGLQIASIHNLAFYLALMKEARTRIIDGTFTEWKNKMVVKLGQRL

SEQ ID NO: 52904 - protein, 376 aa, Brumimicrobium salinarum
  misc_feature (1)..(376): tr|A0A2I0R3M4|A0A2I0R3M4_9FLAO Queuine tRNA-ribosyltran sferase OS=Brumimicrobium salinarum OX=2058658 GN=tgt P E=3 SV=1
MHFELLHQDKDTKARVGKLHTDHGEIETPIFMPVGTAGTVKGIHQYEIENEIQAQIILGNTYHLFLRPGTEVIEAAGGLHKFINYNRPILTDSGGYQVYSLSGSRKITEEGVKFQSHIDGTYHFFTPERAIDIQKSIGADIIMAFDECTPYPCDYQYAKNSMKMTHRWLDRCFAQFNKTPGKYGYEQALFPIVQGSVYKDLRQESAKYIADTDSLGNAIGGLSVGEPAEELYEMTEVVTDILPSEKPRYLMGVGTPINLLECIALGIDMFDCVMPTRNARHGLLFTSEGTINIKNKKWEKDFSPIDPNGTSSVDSFYTKAYLRHLIKTKEYLGVQIASIHNLAFYLALIKEARVKIMEGTFLEWKDEMVKKLGQRL

SEQ ID NO: 52905 - protein, 376 aa, Brumimicrobium sp.
  misc_feature (1)..(376): tr|A0A2U2X0P0|A0A2U2X0P0_9FLAO Queuine tRNA-ribosyltran sferase OS=Brumimicrobium sp. C305 OX=2100725 GN=tgt PE =3 SV=1
MHFELLHQDKSSQARAGKLVTDHGEIETPIFMPVGTVGSVKGVHQQEIENEIKAQIILGNTYHLFLRPGTEVLEAAGGLHKFMNYNRPILTDSGGYQVYSMSGSRKITEEGVKFQSHVDGSYHFFTPERAIDIQRSIGADIIMAFDECTPYPCDYQYAKRSMKMTHRWLDRCFTQMNNTEPKYGYEQALFPIVQGSVYTDLRQESAKYIADTDSLGNAIGGLSVGEPAEELYAMTEVVTEILPKEKPRYLMGVGTPVNLLECVALGIDMFDCVMPTRNARHGMLFTSEGVINIKNKKWEKDFTPLDPNGTSSVDHFYTKAYLRHLLKTKESLGMQIASIHNLAFYLALMKEARARIVDGTFTEWKNKMVVKLDQRL

SEQ ID NO: 52906 - protein, 284 aa, Bryobacterales bacterium
  misc_feature (1)..(284): tr|A0A359LRF9|A0A359LRF9_9BACT Queuine tRNA-ribosyltran sferase (Fragment) OS=Bryobacterales bacterium OX=20267 91 GN=tgt PE=3 SV=1
SGGFQVFSLNGLRKISEEGVLFRSHLNGDAHLFTPESTVDTQLAFGSDIMMVLDECLAYPASHEASAVSSDLTVRWARRAFAHYRDQCERIETRHALFPIVQGGMFPDLRRRCAEQLLELDAEGYAIGGLSVGEPRALSLEMTEAAAPLLPEDRPRYVMGVGMPEELGEYVARGVDMMDCVLPTRNARNGCLFTSRGRVIIKQARYREDDQPLDANCRCYTCAHFSRAYLRHLFQSGEILFSTLATIHNLSHYLDRMKQMRESIGFGTFPAFLKAVHSQAEEDS

SEQ ID NO: 52907 - protein, 380 aa, Bryobacterales bacterium
  misc_feature (1)..(380): tr|A0A350UEG0|A0A350UEG0_9BACT Queuine tRNA-ribosyltran sferase OS=Bryobacterales bacterium OX=2026791 GN=tgt P E=3 SV=1
MRAIRFELEAVCPETGARAGRLHTPHGIVETPVFMPVGTQATVKGVLQRDLAEELGARIILGNTYHLFLRPGHELIRKFGGLHGFMQWDRAILTDSGGFQVWSLSKLRKVREEGVVFQSHLNGDRHLFTPESVVDVQRALGSDIMMVLDECTDYPATEKDARRSMELTVRWARRAFAHYRTQGGEAEGRQALFPIVQGSMFAEFRRECAAQLVELDADGYAIGGLSVGEPRPLSLEMTEAAEPLLPADRPRYVMGVGMPGELPEYVARGIDMMDCVLPSRNARNGCLFTSEGKLIIKQAQYREDPRPVDPACGCLTCRSYSRAYLRHLFVAGEMLYSTLATIHNIAHYLDIMRRMRESIVLGTFPAFLQSVRTSPLAAGD

SEQ ID NO: 52908 - protein, 426 aa, Bryocella elongata
  misc_feature (1)..(426): tr|A0A1H5YD66|A0A1H5YD66_9BACT Queuine tRNA-ribosyltran sferase OS=Bryocella elongata OX=863522 GN=tgt PE=3 SV= 1
MSNVPGQEATKNPHLVPDFYNEVWMQPDFTVHNTTPAGGRRSVLRLPHGEVQTPVFMPVGTAATVKTIEQSVIESLNAEIILANTYHLYLRPGHELIRRAGGVHRFMSWQRPMLTDSGGFQVFSLSKLRKVTPDGVEFRSHLDGSKHFFSPEHSMAVQIALGADIMMAFDECVETPASWERTRDSMGLTHEWAARSKRYWEEHRHEVPWGQGLGIREQGLDLAPGGSTAFGRTYDHTRFSDKHQLLFGIVQGGMYPDLRRESAERLVEMDFPGYAIGGLAVGEPREVTREMIALSLEILPKDKPRYVMGVGYPDEIEEYAKLGVDMMDCVLPTRAGRHGLVFIREDPNDRASKPIRWNIKRVDNAEDHGPIDAGCKCMVCERYSRAYLRHLYVSDEPLGAMLNSIHNVAFYLETMTRVRAELQAQV

SEQ ID NO: 52909 - protein, 370 aa, Buchnera aphidicola
  misc_feature (1)..(370): sp|P57233|TGT_BUCAI Queuine tRNA-ribosyltransferase OS= Buchnera aphidicola subsp. Acyrthosiphon pisum (strain APS) OX=107806 GN=tgt PE=3 SV=1
MNFKVLYQDNNARCGVFNFNQEIIETPVFMPVGTYGAVKSISTEEIKNTGSRIILSNAFHLYFRPGLEIIKLHGNLHNFMNWSGPILTDSGGFQVFSLSRFCKVNEEGVIFQNHIDGKKTFLTPKISMKIQSDLGSNIVMIFDQCIEYNQNWEKTKNAMERSLYWAKKSRIYFDSYKNKNSLFGIIHGGIYPSLRDISLQELIKIDFDGYALGGLAVGEPKIEMYKLLDHICPQIPKNKPRYLMGVGKPEDLIEGVRRGVDMFDCVIPTRNARNGHLFVTNGVIKIRNKKYKKDLSCLDNTCVCYTCRYYSRSYLHHLDACNEILGARLNTIHNLHYYQTLMSNIRNSIKNNTFEQFSVNFYKQKNKIDF

SEQ ID NO: 52910 - protein, 370 aa, Buchnera aphidicola
  misc_feature (1)..(370): sp|B8D738|TGT_BUCAT Queuine tRNA-ribosyltransferase OS= Buchnera aphidicola subsp. Acyrthosiphon pisum (strain Tuc7) OX=561501 GN=tgt PE=3 SV=1
MNFEVLYQDNNARCGVFNFNQEIIETPVFMPVGTYGAVKSISTEEIKNTGSRIILSNAFHLYFRPGLEIIKLHGNLHNFMNWSGPILTDSGGFQVFSLSRFCKINEEGVIFQNHIDGKKTFLTPKISMKIQSDLGSNIVMIFDQCIEYNQNWEKTKNAMERSLYWAKKSRIYFDSYKNKNSLFGIIHGGIYPSLRDISLQELIKIDFDGYALGGLAVGEPKIEMYKLLDHICPQIPKNKPRYLMGVGKPEDLIEGVRRGVDMFDCVIPTRNARNGHLFVTNGVIKIRNKKYKKDLSCLDNTCACYTCRYYSRSYLHHLDACNEILGARLNTIHNLHYYQTLMSNIRNSIKNNTFEQFSLNFYKQKNKIDF

SEQ ID NO: 52911 - protein, 333 aa, Budvicia aquatica
  misc_feature (1)..(333): tr|A0A484ZVA6|A0A484ZVA6_9GAMM Queuine tRNA-ribosyltran sferase OS=Budvicia aquatica OX=82979 GN=tgt PE=3 SV=1
MKFELQTTDGRARRGRLVFERGVVETPAFMPVGTYGTVKGMTPEEVKETGAQILLGNTFHLWLRPGQDIMRKHGDLHDFMNWHGPILTDSGGFQVFSLGDISKITEEGVNFRNPINGDAIFLSPEKSMEIQNDLGSDIVMIFDECTPYPADWDYAKRSMEMSLRWAKRSRVRFDELNNKNALFGIIQGSVYEDLRDVSVKGLVDIGFDGYAVGGLAVGEPKEDMHRILEHVCPQIPADKPRYLMGVGKPEDLVEGVRRGIDMFDCVMPTRNARNGHLFVTDGVVKIRNAKHKDDTSTLDEHCDCYTCRNYSRAYLYHLDRCNEILGARLNTIP

SEQ ID NO: 52912 - protein, 374 aa, Budvicia aquatica
  misc_feature (1)..(374): tr|A0A2C6DK83|A0A2C6DK83_9GAMM Queuine tRNA-ribosyltran sferase OS=Budvicia aquatica OX=82979 GN=tgt PE=3 SV=1
MKFELQTTDGRARRGRLVFERGVVETPAFMPVGTYGTVKGMTPEEVKETGAQILLGNTFHLWLRPGQDIMRKHGDLHDFMNWHGPILTDSGGFQVFSLGDISKITEEGVNFRNPINGDAIFLSPEKSMEIQNDLGSDIVMIFDECTPYPADWDYAKRSMEMSLRWAKRSRVRFDELNNKNALFGIIQGSVYEDLRDVSVKGLVDIGFDGYAVGGLAVGEPKEDMHRILEHVCPQIPADKPRYLMGVGKPEDLVEGVRRGIDMFDCVMPTRNARNGHLFVTDGVVKIRNAKHKDDTSTLDEHCDCYTCRNYSRAYLYHLDRCNEILGARLNTIHNLRYYQRLMAGLRNAIEQGTLEHFVADFYDRIGKTVPPLAN

SEQ ID NO: 52913 - protein, 377 aa, Bulleidia extructa
  misc_feature (1)..(377): tr|D2MP01|D2MP01_9FIRM Queuine tRNA-ribosyltransferase OS=Bulleidia extructa W1219 OX=679192 GN=tgt PE=3 SV=1
MKNPVTFEITHICKQSGARTGLLHTPHGDVETPMFMPVGTLATVKFISPEELYTMKAGVILANTYHLWLRPGEEIVFKAGGVQKFMNYKGPMLTDSGGFQVFSLSDTRKIAEEGVYFKNIFNGDSLFLSPEKSIQIQNKIGADIIMSFDECIPYPATYDYAKKSMERTLRWAKRGKEANRRPEEQALFGIVQGGDNEDLRRYCAEKLVEMDFPGYAIGGTSVGEDKETMMRMVDYCTPYLPENKPRYLMGVGAVNDLLGAILRNIDMCDCVLPTRIARHGTLLTSEGRINIHKAIYKEDFRPLDSKCDCYCCQNYSRAYLHHLFKTKEGFGTRLMSIHNIRFLIRLMENARQAIKEDRYLDFMNETLANMGFDERGF

SEQ ID NO: 52914 - protein, 397 aa, Burkholderia ambifaria
  misc_feature (1)..(397): tr|A0A2S9L072|A0A2S9L072_9BURK Queuine tRNA-ribosyltran sferase OS=Burkholderia ambifaria OX=152480 GN=tgt PE=3 SV=1
MTEGSSHDHDTHAPVHDRPANGLEFELLTTDGHARRGRVKLNHGVVETPIFMPVGTYGTVKAIQPRELHEINAQIILGNTFHLWLRPGLDTIDAHGGLHGFMGWNKPILTDSGGFQVFSLGDLRKITEDGVTFASPINGDKLFLSPEVSMQIQKVLNSDIVMQFDECTPYATNGVPTTHKEAADSMRMSLRWAKRSLDEFDRLGNPNALFGIVQGGMFEDLRDESLAGLSELGFHGLAIGGLSVGEPKEDMMRVLRHVGPKLPANKPHYLMGVGTPEDLVEGVANGIDMFDCVMPTRNARNGWLFTRFGDVKIRNATHKNSLKPLDASCTCYTCQNFSRGYLHHLHRVGEILGAQLNTIHNLHYYLQLMGEIRDAIETHTFDAFRQRFAEDRARGVD

SEQ ID NO: 52915 - protein, 395 aa, Burkholderia ambifaria
  misc_feature (1)..(395): tr|B1T9K0|B1T9K0_9BURK Queuine tRNA-ribosyltransferase OS=Burkholderia ambifaria MEX-5 OX=396597 GN=tgt PE=3 S V=1
MTEGSSHDTHPPVQGRPANGLEFELLTTDGHARRGRVKLNHGVVETPIFMPVGTYGTVKAIQPRELHEIKAQIILGNTFHLWLRPGLDTIDAHGGLHGFMGWNKPILTDSGGFQVFSLGDLRKITEDGVTFASPINGDKLFLSPEVSMQIQKVLNSDIVMQFDECTPYATNGVPTTHKEAADSMRMSLRWAKRSLDEFDRLGNPNALFGIVQGGMFEDLRDESLAGLSELGFHGLAIGGLSVGEPKEDMMRVLRHVGPKLPANKPHYLMGVGTPEDLVEGVANGIDMFDCVMPTRNARNGWLFTRFGDVKIRNATHKNALKPLDASCTCYTCQNFSRGYLHHLHRVGEILGAQLNTIHNLHYYLQLMGEIRDAIETHTFDAFRQRFAEDRARGVD

SEQ ID NO: 52916 - protein, 399 aa, Burkholderia anthina
  misc_feature (1)..(399): tr|A0A3P0C938|A0A3P0C938_9BURK Queuine tRNA-ribosyltran sferase OS=Burkholderia anthina OX=179879 GN=tgt PE=3 S V=1
MTEGSSHDTHAHPSAPVQDRPANGLEFELLTTDGHARRGRVKLNHGTVETPIFMPVGTYGTVKAIQPRELHEIKAQIILGNTFHLWLRPGLDTIDAHGGLHGFMGWNKPILTDSGGFQVFSLGDLRKITEDGVTFASPINGDKLFLSPEVSMQIQKVLNSDIVMQFDECTPYATNGVPTTHKEAADSMRMSLRWAKRSLDEFNRLGNPNALFGIVQGGMFEDLRDESLAGLSELGFHGLAIGGLSVGEPKEDMMRVLRHVGPKLPASKPHYLMGVGTPEDLVDGVTNGIDMFDCVMPTRNARNGWLFTRFGDVKIRNATHKNSLKPLDSTCTCYTCQNFSRGYLHHLHRVGEILGAQLNTIHNLHYYLQLMSEIRDAIETHTFDAFRQRFAEDRARGVD

SEQ ID NO: 52917 - protein, 399 aa, Burkholderia anthina
  misc_feature (1)..(399): tr|A0A104L625|A0A104L625_9BURK Queuine tRNA-ribosyltran sferase OS=Burkholderia anthina OX=179879 GN=tgt PE=3 S V=1
MTEGSSHDTHAHPSAPVQDRPANGLEFELLTTDGHARRGRVKLNHGTVETPIFMPVGTYGTVKAIQPRELHEIKAQIILGNTFHLWLRPGLDTIDAHGGLHGFMGWNKPILTDSGGFQVFSLGDLRKITEDGVTFASPINGDKLFLSPEVSMQIQKVLNSDIVMQFDECTPYATNGVPTTHKEAADSMRMSLRWAKRSLDEFNRLGNPNALFGIVQGGMFEDLRDESLAGLSELGFHGLAIGGLSVGEPKEDMMRVLRHVGPKLPASKPHYLMGVGTPEDLVDGVANGIDMFDCVMPTRNARNGWLFTRFGDVKIRNATHKNSLKPLDSTCTCYTCQNFSRGYLHHLHRVGEILGAQLNTIHNLHYYLQLMSEIRDAIETHTFDAFRQRFAEDRARGVD

SEQ ID NO: 52918 - protein, 395 aa, Burkholderia catarinensis
  misc_feature (1)..(395): tr|A0A1J9NTL5|A0A1J9NTL5_9BURK Queuine tRNA-ribosyltran sferase OS=Burkholderia catarinensis OX=1108140 GN=tgt PE=3 SV=1
MTEGSSHDTNAPVQDRPANGLEFELLATDGHARRGRVKLNHGVVETPIFMPVGTYGTVKAIQPRELHEIKAQIILGNTFHLWLRPGLDTIDAHGGLHGFMGWNKPILTDSGGFQVFSLGDLRKITEDGVTFASPINGDKLFLSPEVSMQIQKVLNSDVVMQFDECTPYATNGVPTTHKEAADSMRMSLRWAKRSLDEFDRLGNPNALFGIVQGGMFEDLRDESLAGLSELGFHGLAIGGLSVGEPKEDMMRVLRHVGPKLPANKPHYLMGVGTPEDLVEGVANGIDMFDCVMPTRNARNGWLFTRFGDVKIRNATHKNSLKPLDASCTCYTCQNFSRGYLHHLHRVGEILGAQLNTIHNLHYYLQLMSEIRDAIETHTFDAFRQRFAEDRARGVD

SEQ ID NO: 52919 - protein, 447 aa, Burkholderia cenocepacia
  misc_feature (1)..(447): tr|A0A0H2XML5|A0A0H2XML5_BURCA Queuine tRNA-ribosyltran sferase OS=Burkholderia cenocepacia (strain AU 1054) OX =331271 GN=tgt PE=3 SV=1
MRTMAGASHCRRAVFYVVRATLARTRFSPPPISRAAFPTCAGLFSGSKESNTMTEGSSHDTHAPVQDRPANGLEFELLTTDGHARRGRVKLNHGTVETPIFMPVGTYGTVKAIQPRELHEIKAQIILGNTFHLWLRPGLDTIDAHGGLHGFMGWNKPILTDSGGFQVFSLGDLRKITEDGVTFASPINGDKLFLSPEVSMQIQKVLNSDVVMQFDECTPYATNGVPTTHQEAADSMRMSLRWAKRSLDEFHRLGNPNALFGIVQGGMFEDLRDESLAGLAELGFHGLAIGGLSVGEPKEDMMRVLQHVGPKLPANKPHYLMGVGTPEDLVEGVANGIDMFDCVMPTRNARNGWLFTRFGDVKIRNATHKNSLKPLDSTCTCYTCQNFSRGYLHHLHRVGEILGAQLNTIHNLHYYLQLMSEIRDAIETHTFDAFRQRFAEDRARGVD

SEQ ID NO: 52920 - protein, 395 aa, Burkholderia cenocepacia
  misc_feature (1)..(395): tr|A0A071MG88|A0A071MG88_9BURK Queuine tRNA-ribosyltran sferase OS=Burkholderia cenocepacia OX=95486 GN=tgt PE= 3 SV=1
MTEGSSHDTHAPVQDRPANGLEFELLTTDGHARRGRVKLNHGVVETPIFMPVGTYGTVKAIQPRELHEIKAQIILGNTFHLWLRPGLDTIDAHGGLHGFMGWNKPILTDSGGFQVFSLGDLRKITEDGVTFASPINGDKLFLSPEVSMQIQKVLNSDVVMQFDECTPYATDGVPTTHKEAADSMRMSLRWAKRSLDEFNRLGNPNALFGIVQGGMFEDLRDESLAGLAELGFHGLAIGGLSVGEPKEDMMRVLRHVGPKLPANKPHYLMGVGTPEDLVEGVANGVDMFDCVMPTRNARNGWLFTRFGDVKIRNATHKNSLKPLDASCTCYTCRNFSRGYLHHLHRVGEILGAQLNTIHNLHYYLQLMSEIREAIETHTFDAFRQRFAEDRARGVD

SEQ ID NO: 52921 - protein, 395 aa, Burkholderia cepacia
  misc_feature (1)..(395): tr|A0A103ZBY2|A0A103ZBY2_BURCE Queuine tRNA-ribosyltran sferase OS=Burkholderia cepacia OX=292 GN=tgt PE=3 SV=1
MTEGSSHDTHAPVQDRPANGLEFELLTTDGHARRGRVKLNHGVVETPIFMPVGTYGTVKAIQPRELHEIKAQIILGNTFHLWLRPGLDTIDAHGGLHGFMGWNKPILTDSGGFQVFSLGDLRKITEDGVTFASPINGDKLFLSPEVSMQIQKVLNSDVVMQFDECTPYATDGVPTTHKEAADSMRMSLRWAKRSLDEFNRLGNPNALFGIVQGGMFEDLRDESLAGLAELGFHGLAIGGLSVGEPKEDMMRVLRHVGPKLPANKPHYLMGVGTPEDLVEGVANGVDMFDCVMPTRNARNGWLFTRFGDVKIRNATHKNSLKPLDASCTCYTCRNFSRGYLHHLHRVGEILGAQLNTIHNLHYYLQLMSEIRDAIETHTFDAFRQRFAEDRARGVD

SEQ ID NO: 52922 - protein, 395 aa, Burkholderia cepacia
  misc_feature (1)..(395): tr|A0A0U4BZL4|A0A0U4BZL4_BURCE Queuine tRNA-ribosyltran sferase OS=Burkholderia cepacia JBK9 OX=1395570 GN=tgt PE=3 SV=1
MTEGSSHDTHAPVQDRPAGGLEFELLTTDGHARRGRVKLNHGVVETPIFMPVGTYGTVKAIQPRELHEIKAQIILGNTFHLWLRPGLDTIDAHGGLHGFMGWNKPILTDSGGFQVFSLGDLRKITEDGVTFASPINGDKLFLSPEVSMQIQKVLNSDVVMQFDECTPYATNGVPTTHKEAADSMRMSLRWAKRSLDEFDRLGNPNALFGIVQGGMFEDLRDESLAGLAELGFHGLAIGGLSVGEPKEDMMRVLRHVGPKLPANKPHYLMGVGTPEDLVEGVANGVDMFDCVMPTRNARNGWLFTRFGDVKIRNATHKNSLKPLDASCTCYTCQNFSRGYLHHLHRVGEILGAQLNTIHNLHYYLQLMSEIREAIETHTFDAFRQRFAEDRARGVD

SEQ ID NO: 52923 - protein, 399 aa, Burkholderia contaminans
  misc_feature (1)..(399): tr|A0A2S5DYK8|A0A2S5DYK8_9BURK Queuine tRNA-ribosyltran sferase OS=Burkholderia contaminans OX=488447 GN=tgt PE =3 SV=1
MTEGSSHDTHADTHTPVQDRPANGLEFELLTTDGHARRGRVKLNHGVVETPIFMPVGTYGTVKAIQPRELHEIKAQIILGNTFHLWLRPGLDTIDAHGGLHAFMGWNKPILTDSGGFQVFSLGDLRKITEDGVTFASPINGDKLFLSPEVSMQIQKVLNSDVVMQFDECTPYATNGVPTTHKEAADSMRMSLRWAKRSLDEFNRLGNPNALFGIVQGGMFEDLRDESLAGLAELGFHGLAIGGLSVGEPKEDMMRVLRHVGPKLPANKPHYLMGVGTPEDLVEGVANGVDMFDCVMPTRNARNGWLFTRFGDVKIRNATHKNSLKPLDASCTCYTCQNFSRGYLHHLHRVGEILGAQLNTIHNLHYYLQLMSEIREAIETHTFDAFRQRFAEDRARGVD

SEQ ID NO: 52924 - protein, 395 aa, Burkholderia contaminans
  misc_feature (1)..(395): tr|A0A0G3YY27|A0A0G3YY27_9BURK Queuine tRNA-ribosyltran sferase OS=Burkholderia contaminans OX=488447 GN=tgt PE =3 SV=1
MTEGSSHDTHAPVQDRPANGLEFELLTTDGHARRGRVKLNHGVVETPIFMPVGTYGTVKAIQPRELHEIKAQIILGNTFHLWLRPGLDTIDAHGGLHGFMGWNKPILTDSGGFQVFSLGDLRKITEDGVTFASPINGDKLFLSPEVSMQIQKVLNSDVVMQFDECTPYATNGVPTTHKEAADSMRMSLRWAKRSLDEFDRLGNPNALFGIVQGGMFEDLRDESLAGLAELGFHGLAIGGLSVGEPKEDMMRVLQHVGPKLPANKPHYLMGVGTPEDLVEGVANGIDMFDCVMPTRNARNGWLFTRFGDVKIRNATHKNSLKPLDASCTCYTCQNFSRGYLHHLHRVGEILGAQLNTIHNLHYYLQLMSEIREAIETHTFDAFRQRFAEDRARGVD

SEQ ID NO: 52925 - protein, 394 aa, Burkholderia dabaoshanensis
  misc_feature (1)..(394): tr|A0A2N7W185|A0A2N7W185_9BURK Queuine tRNA-ribosyltran sferase OS=Burkholderia dabaoshanensis OX=564714 GN=tgt PE=3 SV=1
MTAGHTHDHSPSPESGLPGLKFELLKTDGLARRGRVTLNHGVVETPIFMPVGTYGTVKAIAPRELEEIQAQIILGNTFHLWLRPGLDTVAAHGGLHGFMGWRRPILTDSGGFQVFSLGDLRKITEDGVTFASPVNGDKLFLSPEVSMQIQKVLNSDIVMQFDECTPYATDGVPTSRDDAAASMRMSMRWAKRSIAEFNRLGNPNALFGIVQGGMFEDLRDESLAGLSELGFHGLAVGGLSVGEPKEDMMRVLEHVGPKLPADKPHYLMGVGTPEDLVAGVASGIDMFDCVMPTRNARNGWLFTRFGDIKIRNATHKNSLRPLDESCGCYTCRNFTRGYLHHLHRVGEILGAQLNTIHNLHYYLELMSEIREAIETGTFEAFRRRFRDERARGVD

SEQ ID NO: 52926 - protein, 395 aa, Burkholderia diffusa
  misc_feature (1)..(395): tr|A0A1B4BPR5|A0A1B4BPR5_9BURK Queuine tRNA-ribosyltran sferase OS=Burkholderia diffusa OX=488732 GN=tgt PE=3 S V=1
MTEGSSHDTHAPVQERPANGLEFELLTTDGHARRGRVKLNHGMVETPIFMPVGTYGTVKAIQPRELHEINAQIILGNTFHLWLRPGLDTIDAHGGLHGFMGWNKPILTDSGGFQVFSLGDLRKITEDGVTFASPINGDKLFLSPEVSMQIQKVLNSDIVMQFDECTPYATNGVPTTHKEAADSMRMSLRWAKRSLDEFDRLGNPNALFGIVQGGMFEDLRDESLAGLSELGFHGLAIGGLSVGEPKEDMMRVLRHVGPKLPADKPHYLMGVGTPEDLVEGVANGVDMFDCVMPTRNARNGWLFTRFGDVKIRNATHKNSLKPLDASCTCYTCRNFSRGYLHHLHRVGEILGAQLNTIHNLHYYLQLMSEIRDAIETHTFDAFRQRFAEDRARGVD

SEQ ID NO: 52927 - protein, 395 aa, Burkholderia dolosa
  misc_feature (1)..(395): tr|A2WCI9|A2WCI9_9BURK Queuine tRNA-ribosyltransferase OS=Burkholderia dolosa AU0158 OX=350701 GN=tgt PE=3 SV= 1
MTEGSSHDTHAPVYDRPADGLEFELLTTDGNARRGRVKLNHGVVETPIFMPVGTYGTVKAIQPRELHEINAQIILGNTFHLWLRPGLDTIDAHGGLHGFMGWNKPILTDSGGFQVFSLGDLRKITEDGVTFASPINGDKLFLSPEVSMQIQKVLNSDIVMQFDECTPYATDGVPTTHKEAADSMRMSLRWAKRSLDEFDRLGNPNALFGIVQGGMFEDLRDESLAGLSELGFHGLAIGGLSVGEPKEDMMRVLRHVGPKLPANKPHYLMGVGTPEDLVEGVANGVDMFDCVMPTRNARNGWLFTRFGDVKIRNATHKNSLKPLDPSCTCYTCSNFSRGYLHHLHRVGEILGAQLNTIHNLHYYLQLMSEIRSAIETHTFDAFRQRFAEDRATGVD

SEQ ID NO: 52928 - protein, 396 aa, Burkholderia gladioli
  misc_feature (1)..(396): tr|F2L963|F2L963_BURGS Queuine tRNA-ribosyltransferase OS=Burkholderia gladioli (strain BSR3) OX=999541 GN=tgt PE=3 SV=1
MTDRQSESVQAHVPPENGLKFELLTTDGHARRGRVTLNHGVVETPIFMPVGTYGTVKAVQPRELHEMQAQIILGNTFHLWLRPGLETIGAHGGLHRFMGWNKPILTDSGGFQVFSLGELRKITEDGVTFASPINGDKLFLSPEVSMQIQKVLNSDIVMQFDECTPYATDGVPTTHKEAAESMRMSLRWARRSLDEFNGLGNPNALFGIVQGGMFEDLRDESLAGLAELDFHGYAIGGLSVGEPKEDMMRVLQHVGPRLPAHKPHYLMGVGTPEDLVEGVANGVDMFDCVMPTRNARNGWLFTRFGDVKIRNATHKNSLRPLDESCGCYTCRNFTRGYLHHLHRVGEILGAQLNTIHNLHYYLTLMSEIREAIETHSFEAFRLRFAADRARGVEQRE

SEQ ID NO: 52929 - protein, 396 aa, Burkholderia gladioli
  misc_feature (1)..(396): tr|A0A3G3LCH8|A0A3G3LCH8_BURGA Queuine tRNA-ribosyltran sferase OS=Burkholderia gladioli OX=28095 GN=tgt PE=3 S V=1
MTDRQSEPVQAHVPPENGLKFELLTTDGHARRGRVTLNHGVVETPIFMPVGTYGTVKAVQPRELHEMQAQIILGNTFHLWLRPGLETIGAHGGLHRFMGWNKPILTDSGGFQVFSLGELRKITEDGVTFASPINGDKLFLSPEVSMQIQKVLNSDIVMQFDECTPYATDGVPTTHKEAAESMRMSLRWARRSLDEFNGLGNPNALFGIVQGGMFEDLRDESLAGLAELDFHGYAIGGLSVGEPKEDMMRVLQHVGPRLPAHKPHYLMGVGTPEDLVEGVANGVDMFDCVMPTRNARNGWLFTRFGDVKIRNATHKNSLRPLDESCGCYTCRNFTRGYLHHLHRVGEILGAQLNTIHNLHYYLTLMSEIREAIETHSFEAFRLRFAADRARGVEQRE

SEQ ID NO: 52930 - protein, 406 aa, Burkholderia glumae
  misc_feature (1)..(406): tr|A0A2J9HDC1|A0A2J9HDC1_BURGL Queuine tRNA-ribosyltran sferase OS=Burkholderia glumae OX=337 GN=tgt PE=3 SV=1
MTDRRPEPVPTHVPPENGLNFELLTTDGHARRGRVTLNHGVVETPIFMPVGTYGTVKAVQPRELREMQAQIILGNTFHLWLRPGLETIGAHGGLHRFMGWDRPILTDSGGFQVFSLGELRKITEDGVTFASPINGDKLFLSPEVSMQIQKVLNSDIVMQFDECTPYATGGVPTTHREAAESMRMSLRWAKRSLDEFDRLGNPNALFGIVQGGMFEDLRDESLAGLAALDFHGYAIGGLSVGEPKEDMMRVLRHVGPKLPAHKPHYLMGVGTPEDLVEGVANGVDMFDCVMPTRNARNGWLFTRFGDVKIRNATHRNSLKPLDERCGCYTCRHFTRGYLHHLHRVGEILGAQLNTIHNLHYYLELMSEIRAAIETHTFDAFRARFAADRARGVEAEPVAPGEAAAGG

SEQ ID NO: 52931 - protein, 406 aa, Burkholderia glumae; identical to SEQ ID NO: 52930
  misc_feature (1)..(406): tr|C5AB58|C5AB58_BURGB Queuine tRNA-ribosyltransferase OS=Burkholderia glumae (strain BGR1) OX=626418 GN=tgt P E=3 SV=1

SEQ ID NO: 52932 - protein, 386 aa, Burkholderia insecticola
  misc_feature (1)..(386): tr|R4WT91|R4WT91_9BURK Queuine tRNA-ribosyltransferase OS=Burkholderia insecticola OX=758793 GN=tgt PE=3 SV=1
MTATHTAPENGLKFDLLTTDGQARRGRLTLNHGVIETPIFMPVGTYGTVKAIQPRELEEIRAQIILGNTFHLWLRPGLETIGAHGGLHRFMGWNRPILTDSGGFQVFSLGDLRKITEDGVTFASPINGDKLFLSPEVSMQIQKVLNSDIVMQFDECTPYATKGVPTSHQEAADSMRMSMRWAKRSIDEFNRLGNPNALFGIVQGGMFEDLRDESLAGLSEIGFHGLAIGGLSVGEPKEDMMRVLNHIGPKLPADKPHYLMGVGTPEDLVAGVAAGVDMFDCVMPTRNARNGWLFTRFGDLKIKNATHKNSMKPLDESCGCYTCQNFTRGYLHHLHRVGEILGAQLNTIHNLHYYLQLMSEVRESIENHTFDAFRKTFAENRARGVD

SEQ ID NO: 52933 - protein, 395 aa, Burkholderia lata
  misc_feature (1)..(395): tr|A0A3G3H160|A0A3G3H160_BURL3 Queuine tRNA-ribosyltran sferase OS=Burkholderia lata (strain ATCC 17760 / DSM 2 3089 / LMG 22485 / NCIMB 9086 / R18194 / 383) OX=482957 GN=tgt PE=3 SV=1
MTEGSSHDTHAPVQDRPANGLEFELLTTDGHARRGRVKLNHGVVETPIFMPVGTYGTVKAIQPRELHEIKAQIILGNTFHLWLRPGLDTIDAHGGLHGFMGWNKPILTDSGGFQVFSLGDLRKITEDGVTFASPINGDKLFLSPEVSMQIQKVLNSDIVMQFDECTPYATNGVPTTHKEAADSMRMSLRWAKRSLDEFDRLGNPNALFGIVQGGMFEDLRDESLAGLAELGFHGLAIGGLSVGEPKEDMMRVLRHVGPKLPANKPHYLMGVGTPEDLVEGVSNGIDMFDCVMPTRNARNGWLFTRFGDVKIRNATHKNSLKPLDASCTCYTCQNFSRGYLHHLHRVGEILGAQLNTIHNLHYYLQLMSEIRDAIETHTFDAFRQRFAEDRARGVD

SEQ ID NO: 52934 - protein, 395 aa, Burkholderia lata
  misc_feature (1)..(395): tr|Q39JF5|Q39JF5_BURL3 Queuine tRNA-ribosyltransferase OS=Burkholderia lata (strain ATCC 17760 / DSM 23089 / L MG 22485 / NCIMB 9086 / R18194 / 383) OX=482957 GN=tgt PE=3 SV=1
MTEGSSHDTHAPVQDRPANGLEFELLTTDGHARRGRVKLNHGVVETPIFMPVGTYGTVKAIQPRELHEIKAQIILGNTFHLWLRPGLDTIDAHGGLHAFMGWNKPILTDSGGFQVFSLGDLRKITEDGVTFASPINGDKLFLSPEVSMQIQKVLNSDVVMQFDECTPYATNGVPTTHKEAADSMRMSLRWAKRSLDEFNRLGNPNALFGIVQGGMFEDLRDESLAGLAELGFHGLAIGGLSVGEPKEDMMRVLRHVGPKLPANKPHYLMGVGTPEDLVEGVANGVDMFDCVMPTRNARNGWLFTRFGDVKIRNATHKNSLKPLDASCTCYTCQNFSRGYLHHLHRVGEILGAQLNTIHNLHYYLQLMSEIREAIETHTFDAFRQRFAEDRARGVD

SEQ ID NO: 52935 - protein, 399 aa, Burkholderia latens
  misc_feature (1)..(399): tr|A0A1B4NPL6|A0A1B4NPL6_9BURK Queuine tRNA-ribosyltran sferase OS=Burkholderia latens OX=488446 GN=tgt PE=3 SV =1
MTEGSSHDTHADTHAPAQERPANGLEFELLTTDGHARRGRVKLNHGVVETPIFMPVGTYGTVKAIQPRELHEIKAQIILGNTFHLWLRPGLDTIDAHGGLHGFMGWNKPILTDSGGFQVFSLGDLRKITEDGVTFASPINGDKLFLSPEVSMQIQKVLNSDIVMQFDECTPYATNGVPTTHKEAADSMRMSLRWAKRSLDEFDRLGNPNALFGIVQGGMFEDLRDESLAGLSELGFHGLAIGGLSVGEPKEDMMRVLRHVGPKLPADKPHYLMGVGTPEDLVEGVANGVDMFDCVMPTRNARNGWLFTRFGDVKIRNATHKNSLKPLDASCTCYTCQNFSRGYLHHLHRVGEILGAQLNTIHNLHYYLQLMSEIREAIETHTFDAFRQRFAEDRARGVD

SEQ ID NO: 52936 - protein, 397 aa, Burkholderia mallei
  misc_feature (1)..(397): tr|A0A0H2WLK4|A0A0H2WLK4_BURMA Queuine tRNA-ribosyltran sferase OS=Burkholderia mallei (strain ATCC 23344) OX=2 43160 GN=tgt PE=3 SV=1
MTTEGPSHDTHDTSAGIRPHGGLKFELLTTDGRARRGRVTLNHGVVETPIFMPVGTYGTVKAVQPRELDEMRAQIILGNTFHLWLRPGLETIGAHGGLHRFMGWNKPILTDSGGFQVFSLGDLRKITEEGVTFASPINGDRLFLSPEVSMQIQKTLNSDIVMQFDECTPYATNGVPTTHREAAESMRMSLRWAKRSLDEFERLGNPNALFGIVQGGMYEDLRDESLAGLSALGFHGLAIGGLSVGEPKEDMMRVLEHVAPRLPADKPHYLMGVGTPEDLVAGVAAGVDMFDCVMPTRNARNGWLFTRFGDVKIRNATHKNSLKPLDETCGCYTCRNFSRGYLHHLHRVGEILGAQLNTIHNLHYYLDLMREIREAIETHTFEAFQKRFAQDRARGVD

SEQ ID NO: 52937 - protein, 397 aa, Burkholderia mallei; identical to SEQ ID NO: 52936
  misc_feature (1)..(397): tr|A2S5D1|A2S5D1_BURM9 Queuine tRNA-ribosyltransferase OS=Burkholderia mallei (strain NCTC 10229) OX=412022 GN =tgt PE=3 SV=1

SEQ ID NO: 52938 - protein, 395 aa, Burkholderia metallica
  misc_feature (1)..(395): tr|A0A1B4HQY1|A0A1B4HQY1_9BURK Queuine tRNA-ribosyltran sferase OS=Burkholderia metallica OX=488729 GN=tgt PE=3 SV=1
MTEGSSHDTHAPVQDRPVGGLEFELLTTDGHARRGRVKLNHGTVETPIFMPVGTYGTVKAIQPRELHEIKAQIILGNTFHLWLRPGLDTIDAHGGLHGFMGWNKPILTDSGGFQVFSLGDLRKITEDGVTFASPINGDKLFLSPEVSMQIQKVLNSDVVMQFDECTPYATNGVPTTHKEAADSMRMSLRWAKRSLDEFNRLGNPNALFGIVQGGMFEDLRDESLAGLAELGFHGLAIGGLSVGEPKEDMMRVLRHVGPKLPANKPHYLMGVGTPEDLVEGVANGVDMFDCVMPTRNARNGWLFTRFGDVKIRNATHKNSLKPLDASCTCYTCQNFSRGYLHHLHRVGEILGAQLNTIHNLHYYLQLMSEIREAIETHTFDAFRQRFAEDRARGVD

SEQ ID NO: 52939 - protein, 399 aa, Burkholderia multivorans
  misc_feature (1)..(399): tr|A0A2S9L5Z8|A0A2S9L5Z8_9BURK Queuine tRNA-ribosyltran sferase OS=Burkholderia multivorans OX=87883 GN=tgt PE= 3 SV=1
MTEGSSHDTRAHAPEAAPARPANGLEFELLTTDGHARRGRVKLNHGVVETPIFMPVGTYGTVKAIQPRELHEIKAQIILGNTFHLWLRPGLDTIDAHGGLHGFMGWNKPILTDSGGFQVFSLGDLRKITEDGVTFASPINGDKLFLSPEVSMQIQKVLNSDIVMQFDECTPYATNGVPTTHKEAADSMRMSLRWAKRSLDEFNRLGNPNALFGIVQGGMFEDLRDESLAGLSELGFHGLAIGGLSVGEPKEDMMRVLRHVGPKLPAHKPHYLMGVGTPEDLVEGVANGVDMFDCVMPTRNARNGWLFTRFGDVKIRNATHKNSLKPLDRSCTCYTCSNFSRGYLHHLHRVGEILGAQLNTIHNLHYYLQLMSEIRDAIESHTFDAFRQRFAEDRARGVD

SEQ ID NO: 52940 - protein, 399 aa, Burkholderia multivorans
  misc_feature (1)..(399): tr|A0A0H3KGY5|A0A0H3KGY5_BURM1 Queuine tRNA-ribosyltran sferase OS=Burkholderia multivorans (strain ATCC 17616 / 249) OX=395019 GN=tgt PE=3 SV=1
MTEGSSHDTRAHAPEAAPARPANGLEFELLTTDGHARRGRVKLNHGVVETPIFMPVGTYGTVKAIQPRELHEIKAQIILGNTFHLWLRPGLDTIDAHGGLHGFMGWNKPILTDSGGFQVFSLGDLRKITEDGVTFASPINGDKLFLSPEVSMQIQKVLNSDIVMQFDECTPYATNGVPTTHKEAADSMRMSLRWAKRSLDEFNRLGNPNALFGIVQGGMFEDLRDESLAGLSELGFHGLAIGGLSVGEPKEDMMRVLRHVGPKLPAHKPHYLMGVGTPEDLVEGVANGVDMFDCVMPTRNARNGWLFTRFGDVKIRNATHKNSLKPLDPSCTCYTCSNFSRGYLHHLHRVGEILGAQLNTIHNLHYYLQLMSEIRDAIESHTFDAFRQRFAEDRARGVD

SEQ ID NO: 52941 - protein, 386 aa, Burkholderia novacaledonica
  misc_feature (1)..(386): tr|A0A2U3I4Q9|A0A2U3I4Q9_9BURK Queuine tRNA-ribosyltran sferase OS=Burkholderia novacaledonica OX=1544861 GN=tg t PE=3 SV=1
MTTHHIPPENGLKFELLTTDGQARRGRLTLNHGVVETPIFMPVGTYGTVKAIQPRELEEIRAQIILGNTFHLWLRPGLDVIGAHGGLHKFMGWNRPILTDSGGFQVFSLGELRKITEEGVTFASPINGDRLFLSPEVSMQIQKVLNSDIVMQFDECTPYATNGIPTSHKDAADSMRMSMRWAKRSIDEFNGLGNPNALFGIVQGGMFEDLRDESLAGLSDIGFHGFAIGGLSVGEPKEDMMRVLNHIGPKLPADKPHYLMGVGTPEDLVAGVAAGVDMFDCVMPTRNARNGWLFTRFGDLKIKNATHKNSMKPLDESCACYTCRNFTRGYLHHLHRVGEILGAQLNTIHNLHYYLQLIGEVRESIENHTFEAFRKTFAENRARGVD

SEQ ID NO: 52942 - protein, 393 aa, Burkholderia oklahomensis
  misc_feature (1)..(393): tr|A0A381BTC9|A0A381BTC9_9BURK Queuine tRNA-ribosyltran sferase OS=Burkholderia oklahomensis OX=342113 GN=tgt P E=3 SV=1
MTEGSSHDTAAGIRPHGGLKFELLTTDGRARRGRVTLNHGVVETPIFMPVGTYGTVKAVQPRELDEMRAQIILGNTFHLWLRPGLETIAAHGGLHRFMGWNKPILTDSGGFQVFSLGDLRKITEDGVTFASPINGDRLFLSPEVSMQIQKTLNSDIVMQFDECTPYATNGVPTTHQEAADSMRMSLRWAKRSLDEFDRLGNPNALFGIVQGGMFEDLRDESLAGLAELGFHGLAIGGLSVGEPKEDMMRVLEHVAPRLPADKPHYLMGVGTPEDLVAGVAAGVDMFDCVMPTRNARNGWLFTRFGDVKIRNATHRNSLKPLDETCGCYTCRNFSRGYLHHLHRVGEILGAQLNTIHNLHYYLELMREIREAIETHTFDAFRKRFAEDRARGVD

SEQ ID NO: 52943 - protein, 406 aa, Burkholderia plantarii
  misc_feature (1)..(406): tr|A0A0B6RIF7|A0A0B6RIF7_9BURK Queuine tRNA-ribosyltran sferase OS=Burkholderia plantarii OX=41899 GN=tgt PE=3 SV=1
MTDRQPESVSPHVPPDNGLKFDLLTTDGHARRGRVTLNHGVVETPIFMPVGTYGTVKAVQPRELREMQAQIILGNTFHLWLRPGLETIGAHGGLHRFMGWDKPILTDSGGFQVFSLGDLRKITEDGVTFASPINGDKLFLSPEVSMQIQKVLNSDVVMQFDECTPYATDNVPTTHQEAAGSMRMSLRWAKRSLDEFNRLGNPNALFGIVQGGMFEDLRDESLAGLAALDFHGYAIGGLSVGEPKEDMMRVLRHVGPKLPAHKPHYLMGVGTPEDLVEGVANGVDMFDCVMPTRNARNGWLFTRFGDVKIRNATHRNSLKPLDESCDCYTCRNFTRGYLHHLHRVGEILGAQLNTIHNLHYYLKLMSEIREAIETHTFDAFRARFAADRARGVDAEPVAPGATAAGG

SEQ ID NO: 52944 - protein, 394 aa, Burkholderia pseudomallei
  misc_feature (1)..(394): tr|A0A2K9DBT4|A0A2K9DBT4_BURPE Queuine tRNA-ribosyltran sferase OS=Burkholderia pseudomallei OX=28450 GN=tgt PE =3 SV=1
MTTEGPSHDTSAGIRPHGGLKFELLTTDGRARRGRVTLNHGVVETPIFMPVGTYGTVKAVQPRELDEMRAQIILGNTFHLWLRPGLETIGAHGGLHRFMGWNKPILTDSGGFQVFSLGDLRKITEEGVTFASPINGDRLFLSPEVSMQIQKTLNSDIVMQFDECTPYATNGVPTTHREAAESMRMSLRWAKRSLDEFERLGNPNALFGIVQGGMYEDLRDESLAGLSALGFHGLAIGGLSVGEPKEDMMRVLEHVAPRLPADKPHYLMGVGTPEDLVAGVAAGVDMFDCVMPTRNARNGWLFTRFGDVKIRNATHKNSLKPLDETCGCYTCRNFSRGYLHHLHRVGEILGAQLNTIHNLHYYLDLMREIREAIETHTFEAFQKRFAQDRARGVD

SEQ ID NO: 52945 - protein, 397 aa, Burkholderia pseudomallei
  misc_feature (1)..(397): tr|A8EI52|A8EI52_BURPE Queuine tRNA-ribosyltransferase OS=Burkholderia pseudomallei 406e OX=360118 GN=tgt PE=3 SV=1
MTTEGPSHDTHDTSAGIRPHGGLKFELLTTDGRARRGRVTLNHGVVETPIFMPVGTYGTVKAVQPRELDEMRAQIILGNTFHLWLRPGLETIGAHGGLHRFMGWNKPILTDSGGFQVFSLGDLRKITEEGVTFASPINGDRLFLSPEVSMQIQKTLNSDIVMQFDECTPYATNGVPTTHREAAESMRMSLRWAKRSLDEFERLGNPNALFGIVQGGMYEDLRDESLAGLSALGFHGLAIGGLSVGEPKEDMMRVLEHVAPRLPADKPHYLMGVGTPEDLVAGVAAGVDMFDCVMPTRNARNGWLFTRFGDVKIRNATHKNSLKPLDETCGCYTCRNFSRGYLHHLHRVGEILGAQLNTIHNLHYYLELMREIREAIETHTFDAFQKRFAQDRARGVD

SEQ ID NO: 52946 - protein, 397 aa, Burkholderia pseudomultivorans
  misc_feature (1)..(397): tr|A0A132EBW3|A0A132EBW3_9BURK Queuine tRNA-ribosyltran sferase OS=Burkholderia pseudomultivorans OX=1207504 GN =tgt PE=3 SV=1
MTDGSSHDTHAQEAAPARPANGLEFELLTTDGHARRGRVKLNHGVVETPIFMPVGTYGTVKAIQPRELHEIKAQIILGNTFHLWLRPGLDTIDAHGGLHGFMGWNKPILTDSGGFQVFSLGDLRKITEEGVTFASPINGDKLFLSPEVSMQIQKVLNSDIVMQFDECTPYATDNVPTTHQEAADSMRMSLRWAKRSLDEFNRLGNPNALFGIVQGGMFEDLRDESLAGLSELGFHGLAIGGLSVGEPKEDMMRVLRHVGPKLPANKPHYLMGVGTPEDLVEGVANGVDMFDCVMPTRNARNGWLFTRFGDVKIRNATHKNSLKPLDPSCTCYTCSNFSRGYLHHLHRVGEILGAQLNTIHNLHYYLQLMSEIREAIETHTFDAFRQRFAEDRARGVD

SEQ ID NO: 52947 - protein, 397 aa, Burkholderia pseudomultivorans
  misc_feature (1)..(397): tr|A0A132F724|A0A132F724_9BURK Queuine tRNA-ribosyltran sferase OS=Burkholderia pseudomultivorans OX=1207504 GN =tgt PE=3 SV=1
MTEGSSHDTHAHEAAPARPANGLEFELLTTDGHARRGRVKLNHGLVETPIFMPVGTYGTVKAIQPRELHEIKAQIILGNTFHLWLRPGLDTIDAHGGLHGFMGWNKPILTDSGGFQVFSLGDLRKITEEGVTFASPINGDKLFLSPEVSMQIQKVLNSDIVMQFDECTPYATDNVPTTHKEAADSMRMSLRWAKRSLDEFNRLGNPNALFGIVQGGMFEDLRDESLAGLSELGFHGLAIGGLSVGEPKEDMMRVLRHVGPKLPANKPHYLMGVGTPEDLVEGVANGVDMFDCVMPTRNARNGWLFTRFGDVKIRNATHKNSLKPLDPSCTCYTCSNFSRGYLHHLHRVGEILGAQLNTIHNLHYYLQLMSEIREAIETHTFDAFRQRFAEDRARGVD

SEQ ID NO: 52948 - protein, 395 aa, Burkholderia puraquae
  misc_feature (1)..(395): tr|A0A1X1PBJ6|A0A1X1PBJ6_9BURK Queuine tRNA-ribosyltran sferase OS=Burkholderia puraquae OX=1904757 GN=tgt PE=3 SV=1
MTEGSSHDTHAPVQDRPANGLEFELLTTDGHARRGRVKLNHGVVETPIFMPVGTYGTVKAIQPRELHEIKAQIILGNTFHLWLRPGLDTIDAHGGLHGFMGWNKPILTDSGGFQVFSLGDLRKITEDGVTFASPINGDKLFLSPEVSMQIQKVLNSDVVMQFDECTPYATNGVPTTHKEAADSMRMSLRWAKRSLDEFNRLGNPNALFGIVQGGMFEDLRDESLAGLAELGFHGLAIGGLSVGEPKEDMMRVLRHVGPKLPANKPHYLMGVGTPEDLVEGVANGVDMFDCVMPTRNARNGWLFTRFGDVKIRNATHKNSLKPLDASCTCYTCQNFSRGYLHHLHRVGEILGAQLNTIHNLHYYLQLMSEIRDAIETHTFDAFRQRFAEDRARGVD

SEQ ID NO: 52949 - protein, 397 aa, Burkholderia pyrrocinia
  misc_feature (1)..(397): tr|A0A318IVJ2|A0A318IVJ2_BURPY Queuine tRNA-ribosyltran sferase OS=Burkholderia pyrrocinia OX=60550 GN=tgt PE=3 SV=1
MTEGSSHDHDTHAPVHDRPANGLEFELLTTDGHARRGRVKLNHGVVETPIFMPVGTYGTVKAIQPRELHEINAQIILGNTFHLWLRPGLDTIDAHGGLHGFMGWNKPILTDSGGFQVFSLGDLRKITEDGVTFASPINGDKLFLSPEVSMQIQKVLNSDVVMQFDECTPYATDGVPTTHKEAADSMRMSLRWAKRSLDEFDRLGNPNALFGIVQGGMFEDLRDESLAGLSELGFHGLAIGGLSVGEPKEDMMRVLRHVGPKLPANKPHYLMGVGTPEDLVEGVANGIDMFDCVMPTRNARNGWLFTRFGDVKIRNATHKNSLKPLDASCACYTCRNFSRGYLHHLHRVGEILGAQLNTIHNLHYYLQLMSEIRDAIETHTFDAFRQRFAEDRARGVD

SEQ ID NO: 52950 - protein, 393 aa, Burkholderia pyrrocinia
  misc_feature (1)..(393): tr|A0A104MTY3|A0A104MTY3_BURPY Queuine tRNA-ribosyltran sferase OS=Burkholderia pyrrocinia OX=60550 GN=tgt PE=3 SV=1
MTEGSSHDTHAHIRPHNGLKFDLLTTDGHARRGRVTLNHGVVETPIFMPVGTYGTVKAIQPRELHEIKAQIILGNTFHLWLRPGLDTIDAHGGLHGFMGWNKPILTDSGGFQVFSLGDLRKITEDGVTFASPINGDKLFLSPEVSMQIQKVLNSDIVMQFDECTPYATNGVPTTHQEAADSMRMSLRWAKRSLDEFDRLGNPNALFGIVQGGMFEDLRDESLAGLAELDFHGLAIGGLSVGEPKEDMMRVLQHVGPKLPAHKPHYLMGVGTPEDLVAGVANGIDMFDCVMPTRNARNGWLFTRFGDVKIRNATHKNSLKPLDPSCTCYTCQNFSRGYLHHLHRVGEILGAQLNTIHNLHYYLQLMSEIRDAIETHTFDAFRQRFAEDRARGVD

SEQ ID NO: 52951 - protein, 398 aa, Burkholderia reimsis
  misc_feature (1)..(398): tr|A0A365QH84|A0A365QH84_9BURK Queuine tRNA-ribosyltran sferase OS=Burkholderia reimsis OX=2234132 GN=tgt PE=3 SV=1
MTEGSSHDTHDAHAPVQDRPANGLEFELLTTDGHARRGRVKLNHGVVETPIFMPVGTYGTVKAIQPRELHEIKAQIILGNTFHLWLRPGLDTIDAHGGLHGFMGWNKPILTDSGGFQVFSLGDLRKITEDGVTFASPINGDKLFLSPEVSMQIQKVLNSDVVMQFDECTPYATNGVPTTHKEAADSMRMSLRWAKRSLDEFNRLGNPNALFGIVQGGMFEDLRDESLAGLAELGFHGLAIGGLSVGEPKEDMMRVLRHVGPKLPANKPHYLMGVGTPEDLVEGVANGVDMFDCVMPTRNARNGWLFTRFGDVKIRNATHKNSLKPLDASCTCYTCQNFSRGYLHHLHRVGEILGAQLNTIHNLHYYLQLMSEIRDAIETHTFDAFRQRFAEDRARGVD

SEQ ID NO: 52952 - protein, 395 aa, Burkholderia seminalis
  misc_feature (1)..(395): tr|A0A103KE17|A0A103KE17_9BURK Queuine tRNA-ribosyltran sferase OS=Burkholderia seminalis OX=488731 GN=tgt PE=3 SV=1
MTEGSSHDTHAPVQDRPANGLEFELLTTDGHARRGRVKLNHGVVETPIFMPVGTYGTVKAIQPRELHEIKAQIILGNTFHLWLRPGLDTIDAHGGLHGFMGWNKPILTDSGGFQVFSLGDLRKITEDGVTFASPINGDKLFLSPEVSMQIQKVLNSDVVMQFDECTPYATDGVPTTHKEAADSMRMSLRWAKRSLDEFNRLGNPNALFGIVQGGMFEDLRDESLAGLAELGFHGLAIGGLSVGEPKEDMMRVLRHVGPKLPANKPHYLMGVGTPEDLVEGVANGVDMFDCVMPTRNARNGWLFTRFGDVKIRNATHKNSLKPLDASCTCYTCQNFSRGYLHHLHRVGEILGAQLNTIHNLHYYLQLMSEIREAIETHTFDAFRQRFAEDRARGVD

SEQ ID NO: 52953 - protein, 393 aa, Burkholderia singularis
  misc_feature (1)..(393): tr|A0A103E481|A0A103E481_9BURK Queuine tRNA-ribosyltran sferase OS=Burkholderia singularis OX=1503053 GN=tgt PE =3 SV=1
MTEGSSHDTHTHVHAHGGLKFELLTTDGRARRGRVTLNHGVVDTPIFMPVGTYGTVKAVKPSELEEMRAQIILGNTFHLWLRPGLETIGAHGGLHRFMGWNKPILTDSGGFQVFSLGELRKITEEGVTFASPINGDRLFLSPEVSMQIQKVLNSDIVMQFDECTPYATNGVPTTHREAADSMRMSLRWAKRSLDEFQRLGNPNALFGIVQGGMYEDLRDESLAGLSELGFHGLAIGGLSVGEPKEDMMRVLEHVAPRLPADKPHYLMGVGTPEDLVAGVAAGVDMFDCVMPTRNARNGWLFTRFGDVKIRNASHKNALKPLDETCGCYTCRNFSRGYLHHLHRVGEILGAQLNTIHNLHYYLELMREIREAIDTHTFDAFRKRFAQDRARGVD

SEQ ID NO: 52954 - protein, 393 aa, Burkholderia singularis
  misc_feature (1)..(393): tr|A0A238H9U6|A0A238H9U6_9BURK Queuine tRNA-ribosyltran sferase OS=Burkholderia singularis OX=1503053 GN=tgt PE =3 SV=1
MTEGSSHDTHTHVHAHDGLKFELLTTDGRARRGRVTLNHGVVDTPIFMPVGTYGTVKAVKPSELDEMRAQIILGNTFHLWLRPGLETIGAHGGLHRFMGWNKPILTDSGGFQVFSLGELRKITEEGVTFASPINGDRLFLSPEVSMQIQKVLNSDIVMQFDECTPYATNGVPTTHREAADSMRMSLRWAKRSLDEFRRLGNPNALFGIVQGGMYEDLRDESLAGLSELGFHGLAIGGLSVGEPKEDMMRVLEHVAPRLPADKPHYLMGVGTPEDLVAGVAAGVDMFDCVMPTRNARNGWLFTRFGDVKIRNASHKNALKPLDETCGCYTCRNFSRGYLHHLHRVGEILGAQLNTIHNLHYYLELMREIREAIDTHTFDAFRKRFAQDRARGVD

SEQ ID NO: 52955 - protein, 393 aa, Burkholderia sp.
  misc_feature (1)..(393): tr|A0A063BM59|A0A063BM59_9BURK Queuine tRNA-ribosyltran sferase OS=Burkholderia sp. lig30 OX=1192124 GN=tgt PE= 3 SV=1
MTEGSSHDTHTHIRPHNGLKFDLLTTDGHARRGRVTLNHGVVETPIFMPVGTYGTVKAIQPRELHEINAQIILGNTFHLWLRPGLETIDAHGGLHGFMGWNKPILTDSGGFQVFSLGDLRKITEDGVTFASPINGDKLFLSPEVSMQIQKVLNSDIVMQFDECTPYATNGIPTTHKEAADSMRMSLRWAKRSLDEFGRLGNPNALFGIVQGGMFEDLRDESLAGLAELDFHGLAIGGLSVGEPKDDMVRILQHVAPKLPAHKPHYLMGVGTPEDLVAGVAAGIDMFDCVMPTRNARNGWLFTRFGDVKIRNATHKNSLKPLDESCGCYTCRNFSRGYLHHLHRVGEILGAQLNTIHNLHYYLELMSEIREAIETHTFDAFRKRFAEDRARGVD

SEQ ID NO: 52956 - protein, 395 aa, Burkholderia sp.
  misc_feature (1)..(395): tr|A0A3P0S9N8|A0A3P0S9N8_9BURK Queuine tRNA-ribosyltran sferase OS=Burkholderia sp. Bp9004 OX=2184559 GN=tgt PE =3 SV=1
MTEGSSHDTHAPVQDRPANGLEFELLTTDGHARRGRVKLNHGVVETPIFMPVGTYGTVKAIQPRELHEIKAQIILGNTFHLWLRPGLETIDAHGGLHGFMGWNKPILTDSGGFQVFSLGDLRKITEDGVTFASPINGDKLFLSPEVSMQIQKVLNSDIVMQFDECTPYATNGVPTTHKEAADSMRMSLRWAKRSLDEFDRLGNPNALFGIVQGGMFEDLRDESLAGLSELGFHGLAIGGLSVGEPKEDMMRVLRHVGPKLPANKPHYLMGVGTPEDLVEGVANGVDMFDCVMPTRNARNGWLFTRFGDVKIRNATHKNSLKPLDASCTCYTCQNFSRGYLHHLHRVGEILGAQLNTIHNLHYYLQLMSEIRDAIETHTFDAFRQRFAEDRARGVD

SEQ ID NO: 52957 - protein, 395 aa, Burkholderia stabilis
  misc_feature (1)..(395): tr|A0A1D7ZCV5|A0A1D7ZCV5_9BURK Queuine tRNA-ribosyltran sferase OS=Burkholderia stabilis OX=95485 GN=tgt PE=3 S V=1
MTEGSSHDTHAPVQDRPANGLEFELLTTDGHARRGRVKLNHGVVETPIFMPVGTYGTVKAIQPRELHEIKAQIILGNTFHLWLRPGLDTIDAHGGLHRFMGWNKPILTDSGGFQVFSLGDLRKITEDGVTFASPINGDKLFLSPEVSMQIQKVLNSDVVMQFDECTPYATNGVPTTHKEAADSMRMSLRWAKRSLDEFNRLGNPNALFGIVQGGMFEDLRDESLAGLSELGFHGLAIGGLSVGEPKEDMMRVLRHVGPKLPANKPHYLMGVGTPEDLVEGVSNGVDMFDCVMPTRNARNGWLFTRFGDVKIRNATHKNSLKPLDASCTCYTCQNFSRGYLHHLHRVGEILGAQLNTIHNLHYYLQLMSEIRDAIETHTFDAFRQRFAEDRARGVD

SEQ ID NO: 52958 - protein, 397 aa, Burkholderia stabilis
  misc_feature (1)..(397): tr|A0A1Y1BQH2|A0A1Y1BQH2_9BURK Queuine tRNA-ribosyltran sferase OS=Burkholderia stabilis OX=95485 GN=tgt PE=3 S V=1
MTEGSSHDHDTHASVQDRPANGLEFELLTTDGHARRGRVKLNHGVVETPIFMPVGTYGTVKAIQPRELHEIKAQIILGNTFHLWLRPGLDTIDAHGGLHGFMGWNKPILTDSGGFQVFSLGDLRKITEDGVTFASPINGDKLFLSPEVSMQIQKVLNSDVVMQFDECTPYATDGVPTTHKEAADSMRMSLRWAKRSLDEFDRLGNPNALFGIVQGGMFEDLRDESLAGLSELGFHGLAIGGLSVGEPKEDMMRVLRHVGPKLPANKPHYLMGVGTPEDLVEGVANGIDMFDCVMPTRNARNGWLFTRFGDVKIRNATHKNSLKPLDASCTCYTCRNFSRGYLHHLHRVGEILGAQLNTIHNLHYYLQLMSEIRDAIETHTFDAFRQRFAEDRARGVD

SEQ ID NO: 52959 - protein, 393 aa, Burkholderia stagnalis
  misc_feature (1)..(393): tr|A0A118SC32|A0A118SC32_9BURK Queuine tRNA-ribosyltran sferase OS=Burkholderia stagnalis OX=1503054 GN=tgt PE= 3 SV=1
MTEGSSHDTHAHLRPHNGLKFDLLTTDGHARRGRVTLNHGVVETPIFMPVGTYGTVKAIQPRELHEIKAQIILGNTFHLWLRPGLDTIDAHGGLHGFMGWNKPILTDSGGFQVFSLGDLRKITEDGVTFASPINGDKLFLSPEVSMQIQKVLNSDIVMQFDECTPYATNGVPTTHKEAADSMRMSLRWAKRSLDEFDRLGNPNALFGIVQGGMFEDLRDESLAGLAELDFHGLAIGGLSVGEPKEDMMRVLQHVGPKLPAHKPHYLMGVGTPEDLVAGVANGIDMFDCVMPTRNARNGWLFTRFGDVKIRNATHKNSLKPLDPSCTCYTCQNFSRGYLHHLHRVGEILGAQLNTIHNLHYYLQLMSEIRDAIETHTFDAFRQRFAEDRARGVD

SEQ ID NO: 52960 - protein, 395 aa, Burkholderia territorii
  misc_feature (1)..(395): tr|A0A102G088|A0A102G088_9BURK Queuine tRNA-ribosyltran sferase OS=Burkholderia territorii OX=1503055 GN=tgt PE =3 SV=1
MTEGSSHDTHAPVHERPANGLEFELLTTDGHARRGRVKLNHGVVETPIFMPVGTYGTVKAIQPRELHEINAQIILGNTFHLWLRPGLDTIDAHGGLHGFMGWNKPILTDSGGFQVFSLGDLRKITEDGVTFASPINGDKLFLSPEVSMQIQKVLNSDIVMQFDECTPYATNGVPTTHKEAADSMRMSLRWAKRSLDEFDRLGNPNALFGIVQGGMFEDLRDESLAGLSELGFHGLAIGGLSVGEPKEDMMRVLRHVGPKLPADKPHYLMGVGTPEDLVEGVANGVDMFDCVMPTRNARNGWLFTRFGDVKIRNATHKNSLKPLDASCACYTCRNFSRGYLHHLHRVGEILGAQLNTIHNLHYYLQLMSEIRDAIETHTFDAFRQRFAEDRARGVD

SEQ ID NO: 52961 - protein, 394 aa, Burkholderia thailandensis
  misc_feature (1)..(394): tr|Q2SZ24|Q2SZ24_BURTA Queuine tRNA-ribosyltransferase OS=Burkholderia thailandensis (strain ATCC 700388 / DSM 13276 / CIP 106301 / E264) OX=271848 GN=tgt PE=3 SV=1
MTTEGPSHDTPTGIRPHNGLKFELLTTDGRARRGRVTLNHGVVETPIFMPVGTYGTVKAVQPRELDEMRAQIILGNTFHLWLRPGLETIDAHGGLHRFMGWNKPILTDSGGFQVFSLGDLRKITEEGVTFASPINGDRLFLSPEVSMQIQKTLNSDIVMQFDECTPYATNGVPTTHREAAESMRMSLRWAKRSLAEFERLGNPNALFGIVQGGMYEDLRDESLAGLSELGFHGLAIGGLSVGEPKEDMMRVLEHVAPRLPADKPHYLMGVGTPEDLVAGVAAGVDMFDCVMPTRNARNGWLFTRFGDVKIRNATHKNSLKPLDETCGCYTCRHFSRGYLHHLHRVGEILGAQLNTIHNLHYYLELMREIREAIETHTFEAFQKRFAQDRARGVD

SEQ ID NO: 52962 - protein, 394 aa, Burkholderia thailandensis
  misc_feature (1)..(394): tr|A0A2N8QVC3|A0A2N8QVC3_BURTH Queuine tRNA-ribosyltran sferase OS=Burkholderia thailandensis OX=57975 GN=tgt P E=3 SV=1
MTTEGPSHDTPTGIRPHNGLKFELLTTDGRARRGRVTLNHGVVETPIFMPVGTYGTVKAVQPRELDEMRAQIILGNTFHLWLRPGLETIDAHGGLHRFMGWNKPILTDSGGFQVFSLGDLRKITEEGVTFASPINGDRLFLSPEVSMQIQKTLNSDIVMQFDECTPYATNGVPTTHREAAESMRMSLRWAKRSLAEFERLGNPNALFGIVQGGMYEDLRDESLAGLSELGFHGLAIGGLSVGEPKEDMMRVLEHVAPRLPADKPHYLMGVGTPEDLVAGVAAGVDMFDCVMPTRNARNGWLFTRFGDVKIRNATHKNSLKPLDETCGCYTCRNFSRGYLHHLHRVGEILGAQLNTIHNLHYYLELMREIREAIETHTFEAFQKRFAQDRARGVD

SEQ ID NO: 52963 - protein, 393 aa, Burkholderia ubonensis
  misc_feature (1)..(393): tr|A0A3N7Q015|A0A3N7Q015_9BURK Queuine tRNA-ribosyltran sferase OS=Burkholderia ubonensis OX=101571 GN=tgt PE=3 SV=1
MTEGSSHDTHAHIRPHNGLKFDLLTTDGHARRGRVTLNHGVVETPIFMPVGTYGTVKAIQPRELHEIKAQIILGNTFHLWLRPGLDTIDAHGGLHGFMGWNKPILTDSGGFQVFSLGDLRKITEDGVTFASPINGDKLFLSPEVSMQIQKVLNSDIVMQFDECTPYATNGVPTTHKEAADSMRMSLRWAKRSLDEFNRLGNPNALFGIVQGGMFEDLRDESLAGLAELDFHGLAIGGLSVGEPKEDMMRVLRHVGPKLPAHKPHYLMGVGTPEDLVDGVANGIDMFDCVMPTRNARNGWLFTRFGDVKIRNATHKNSLKPLDPSCTCYTCQNFSRGYLHHLHRVGEILGAQLNTIHNLHYYLQLMSESREAIETHTFDAFRQRFAEDRARGVD

SEQ ID NO: 52964 - protein, 395 aa, Burkholderia ubonensis
  misc_feature (1)..(395): tr|A0A105RG09|A0A105RG09_9BURK Queuine tRNA-ribosyltran sferase OS=Burkholderia ubonensis OX=101571 GN=tgt PE=3 SV=1
MTEGPSHDHDTHAHIRPHNGLKFDLLTTDGHARRGRVTLNHGVVETPIFMPVGTYGTVKAIQPRELHEIKAQIILGNTFHLWLRPGLDTIDAHGGLHGFMGWNKPILTDSGGFQVFSLGDLRKITEDGVTFASPINGDKLFLSPEVSMQIQKVLNSDIVMQFDECTPYATNGVPTTHKEAADSMRMSLRWAKRSLDEFNRLGNPNALFGIVQGGMFEDLRDESLAGLAELDFHGLAIGGLSVGEPKEDMMRVLRHVGPKLPAHKPHYLMGVGTPEDLVDGVANGIDMFDCVMPTRNARNGWLFTRFGDVKIRNATHKNSLKPLDPSCACYTCRNFSRGYLHHLHRVGEILGAQLNTIHNLHYYLQLMSEIREAIETHTFDAFRQRFAEDRARGVD

SEQ ID NO: 52965 - protein, 397 aa, Burkholderia vietnamiensis
  misc_feature (1)..(397): tr|A4JBP2|A4JBP2_BURVG Queuine tRNA-ribosyltransferase OS=Burkholderia vietnamiensis (strain G4 / LMG 22486) O X=269482 GN=tgt PE=3 SV=1
MTEGSSHDTHASADVHERPANGLEFELLTTDGHARRGRVKLNHGVVETPIFMPVGTYGTVKAIQPRELHEINAQIILGNTFHLWLRPGLDTIDAHGGLHRFMGWNKPILTDSGGFQVFSLGDLRKITEDGVTFASPINGDKLFLSPEVSMQIQKVLNSDIVMQFDECTPYATNGVPTTHKEAADSMRMSLRWAKRSLDEFDRLGNPNALFGIVQGGMFEDLRDESLAGLSELGFHGLAIGGLSVGEPKEDMMRVLQHVGPKLPADKPHYLMGVGTPEDLVDGVANGIDMFDCVMPTRNARNGWLFTRFGDVKIRNATHKNSLKPLDPTCSCYTCRNFSRGYLHHLHRVGEILGAQLNTIHNLHYYLQLMSEIREAIETHTFDAFRQRFAQDRATGVD

SEQ ID NO: 52966 - protein, 397 aa, Burkholderia vietnamiensis
  misc_feature (1)..(397): tr|A0A103HX10|A0A103HX10_BURVI Queuine tRNA-ribosyltran sferase OS=Burkholderia vietnamiensis OX=60552 GN=tgt P E=3 SV=1
MTEGSSHDTHASADVHERPANGLEFELLTTDGHARRGRVKLNHGVVETPIFMPVGTYGTVKAIQPRELHEINAQIILGNTFHLWLRPGLDTIDAHGGLHRFMGWNKPILTDSGGFQVFSLGDLRKITEDGVTFASPINGDKLFLSPEVSMQIQKVLNSDIVMQFDECTPYATNGVPTTHKEVADSMRMSLRWAKRSLDEFDRLGNPNALFGIVQGGMFEDLRDESLAGLSELGFHGLAIGGLSVGEPKEDMMRVLRHVGPKLPADKPHYLMGVGTPEDLVDGVANGIDMFDCVMPTRNARNGWLFTRFGDVKIRNATHKNSLKPLDPTCSCYTCRNFSRGYLHHLHRVGEILGAQLNTIHNLHYYLQLMSEIREAIETHTFDAFRQRFAQDRATGVD

SEQ ID NO: 52967 - protein, 379 aa, Burkholderiaceae bacterium
  misc_feature (1)..(379): tr|A0A4U8VGY6|A0A4U8VGY6_9BURK Queuine tRNA-ribosyltran sferase OS=Burkholderiaceae bacterium PBA OX=795666 GN= tgt PE=3 SV=1
MLKYELLKTDGHARRGRLTLNHGVVETPIFMPVGTYGSVKAMSPLELNEIGAQIILGNTFHLWLRPGLEVVATHEGLHGFIGWGKPILTDSGGFQVFSLGDLRKITEDGVTFASPVNGDKLFLSPEISMQIQRTLNSDIVMQFDECTPYEIDGRPATRDEAAKSMRMSLRWGKRSRDEFDRGENPNALFGIVQGGMFEDLREESLAGLQATGDGGFHGYAIGGLSVGEPKEDMLRVLEHIGPKLPADKPHYLMGVGTPEDLVAGVASGVDMFDCVMPTRNARNGWLFTRYGDIKIKNAAHKNDPRPLDESCGCYTCRNFSRAYLHHLHRVGEILGARLNTIHNLYYYLELMREMRDAIDAGQFSAFVARFHADRGRGAQ

SEQ ID NO: 52968 - protein, 291 aa, Burkholderiaceae bacterium
  misc_feature (1)..(291): tr|A0A522FT69|A0A522FT69_9BURK Queuine tRNA-ribosyltran sferase (Fragment) OS=Burkholderiaceae bacterium OX=203 0806 GN=EPN64_11495 PE=3 SV=1
MLQFELLKTDDAQGGYAGSHARRGRLTLNHGVVETPIFMPVGTYGTVKGVLPRSLQEMGAQIILGNTFHLWMRPGQDVMTSFGGLHQFEKWDKPILTDSGGFQVWSLGEMRKITEEGVHFASPVNGDKLFMSPEVSMQIQTVLNSDIAMQLDECTPYETAGHVTTEREARASMEMSLRWARRSQDEFARLQNPNALFGIVQGGMFENLREESLEQLAAMDFPGYAIGGVSVGEPKDEMLRIMAHTPHRLPAHKPRYLMGVGTPEDLVEGVAQGVDMFDCVMPTRNARNGTL

SEQ ID NO: 52969 - protein, 401 aa, Burkholderiales bacterium
  misc_feature (1)..(401): tr|A0A1F4M1U4|A0A1F4M1U4_9BURK Queuine tRNA-ribosyltran sferase OS=Burkholderiales bacterium RIFOXYD12_FULL_59_ 19 OX=1797574 GN=tgt PE=3 SV=1
MVQFDLLRTDPPVSDTGYAGSHARRGTLVLNHGMVQTPIFMPVGTYGTVKGVMPSNLEDMGAQIILGNTFHLWMRPGLDVMQSFGGLHDFERWTKPILTDSGGFQVWSLGAMRKITEEGVHFSSPVNGDKLFMSPEVSMQIQTTLNSDIAMQLDECTPYLSVEPKTKGQITTEHEARSSMEMSLRWAKRSQDEFARLDNPNALFGIVQGGMFEGLRQESLEQLVAMDFPGYAVGGVSVGEPKDEMLRIMAHTPHRLPWHKPRYLMGVGTPEDLVEGVAQGVDMFDCVMPTRNARNGTLFTRFGDLKMRNARHKADHGPLDSTCSCYTCKGTTRPNGTISGGFSRAYLHHLDRCGEMLGPMLASIHNLHYYLNLMREVRAALDGGSFGAFRQQFKADRARGV

SEQ ID NO: 52970 - protein, 390 aa, Burkholderiales bacterium
  misc_feature (1)..(390): tr|A0A1M3JUS7|A0A1M3JUS7_9BURK Queuine tRNA-ribosyltran sferase OS=Burkholderiales bacterium 68-12 OX=1896170 G N=tgt PE=3 SV=1
MLQFQILATDPSSHARRATLTLNHGVVQTPIFMPVGTYGTVKGVMPQSLHDMGAQIILGNTFHLWMRPGLDVVQSFGGLHGFEQWHKPILTDSGGFQVWSLGAMRKITEEGVHFASPVNGDKLFMSPEVSMQIQTTLNSDIVMQLDECTPYETNGHLTTEAEARKSMEMSRRWAARSKAEFERLGNPNALFGIVQGGMYEHLRQESLDALVEMDFPGYAVGGVSVGEPKDEMLRIMAHTPHRLPAHKPRYLMGVGTPEDLVEGVAQGVDMFDCVMPTRNARNGTIFTRYGDLKIRNARHKTDHQPLDVSCTCHACAGQAGVAWDAGGRGGFSRAYLHHLDRCGEMLGPMLTTIHNLHYYLHLMGEIRAALDAGRFAAFRAQFKADRARGV

SEQ ID NO: 52971 - protein, 375 aa, Buttiauxella agrestis
  misc_feature (1)..(375): tr|A0A381CDL5|A0A381CDL5_9ENTR Queuine tRNA-ribosyltran sferase OS=Buttiauxella agrestis OX=82977 GN=tgt PE=3 S V=1
MKFELDTTDGRARRGRLVFDRGVVETPAFMPVGTYGTVKGMTPEEVEATGAHIILGNTFHLWLRPGQEIMKLHGDLHDFMQWKGPILTDSGGFQVFSLGDIRKITEAGVHFRNPINGDAIFLDPEKSMEIQYDLGSDIVMIFDECTPYPADWDYAKRSMEMSLRWAQRSRDRFDSLENKNALFGIIQGSVYEDLRDISVKGLVEIGFDGYAVGGLAVGEPKEDMHRILEHVCPQIPADKPRYLMGVGKPEDLVEGVRRGIDMFDCVMPTRNARNGHLFVTDGVVKIRNAKYKDDTSSLDSECDCYTCRNYSRAYLHHLDRCNEILGARLNTIHNLRYYQRLMAGLRKAIEEGKLEHFVSDFYERTGKPVPPLNVD

SEQ ID NO: 52972 - protein, 375 aa, Buttiauxella agrestis
  misc_feature (1)..(375): tr|A0A085GI02|A0A085GI02_9ENTR Queuine tRNA-ribosyltran sferase OS=Buttiauxella agrestis ATCC 33320 OX=1006004 GN=tgt PE=3 SV=1
MKFELDTTDGRARRGRLVFDRGVVETPAFMPVGTYGTVKGMTPEEVEATGAQIILGNTFHLWLRPGQEIMKLHGDLHDFMQWKGPILTDSGGFQVFSLGDIRKITEAGVHFRNPINGDAIFLDPEKSMEIQYDLGSDIVMIFDECTPYPADWDYAKRSMEMSLRWAQRSRDRFDSLENKNALFGIIQGSVYEDLRDISVKGLVEIGFDGYAVGGLAVGEPKEDMHRILEHVCPQIPADKPRYLMGVGKPEDLVEGVRRGIDMFDCVMPTRNARNGHLFVTDGVVKIRNAKHKDDTSTLDSECDCYTCRNYSRAYLYHLDRCNEILGARLNTIHNLRYYQRLMAGLRKAIEEGKLEHFVSDFYERIGKPVPPLNVD

SEQ ID NO: 52973 - protein, 375 aa, Buttiauxella brennerae
  misc_feature (1)..(375): tr|A0A1B7IUZ8|A0A1B7IUZ8_9ENTR Queuine tRNA-ribosyltran sferase OS=Buttiauxella brennerae ATCC 51605 OX=1354251 GN=tgt PE=3 SV=1
MKFELDTTDGRARRGRLVFDRGVVETPAFMPVGTYGTVKGMTPEEVEATGAQIILGNTFHLWLRPGQEIMKLHGDLHDFMQWKGPILTDSGGFQVFSLGDIRKITEAGVHFRNPINGDAIFLDPEKSMEIQYDLGSDIVMIFDECTPYPADWDYAKRSMEMSLRWAQRSRDRFDSLENKNALFGIIQGSVYEDLRDISVKGLVDIGFDGYAVGGLAVGEPKEDMHRILEHVCPQIPADKPRYLMGVGKPEDLVEGVRRGIDMFDCVMPTRNARNGHLFVTDGVVKIRNAKHKDDTSTLDSECDCYTCRNYSRAYLYHLDRCNEILGARLNTIHNLRYYQRLMAGLRKAIEEGKLEHFVSDFYERIGKPVPPLNVD

SEQ ID NO: 52974 - protein, 375 aa, Buttiauxella gaviniae
  misc_feature (1)..(375): tr|A0A1B7HU79|A0A1B7HU79_9ENTR Queuine tRNA-ribosyltran sferase OS=Buttiauxella gaviniae ATCC 51604 OX=1354253 GN=tgt PE=3 SV=1
MKFELDTTDGRARRGRLVFDRGVVETPAFMPVGTYGTVKGMTPEEVEATGAQIILGNTFHLWLRPGQEIMKLHGDLHDFMQWKGPILTDSGGFQVFSLGDIRKITEAGVHFRNPINGDAIFLDPEKSMEIQYDLGSDIVMIFDECTPYPADWDYAKRSMEMSLRWAQRSRDRFDSLENKNALFGIIQGSVYEDLRDISVKGLVEIGFDGYAVGGLAVGEPKEDMHRILEHVCPQIPADKPRYLMGVGKPEDLVEGVRRGIDMFDCVMPTRNARNGHLFVTDGVVKIRNAKHKDDTSTLDSECDCYTCRNYSRAYLYHLDRCNEILGARLNTIHNLRYYQRLMAGLRKAIEEGKLEQFVSDFYERIGKPVPPLNVD

SEQ ID NO: 52975 - protein, 375 aa, Buttiauxella izardii; identical to SEQ ID NO: 52972
  misc_feature (1)..(375): tr|A0A3A5JYB1|A0A3A5JYB1_9ENTR Queuine tRNA-ribosyltran sferase OS=Buttiauxella izardii OX=82991 GN=tgt PE=3 SV =1

SEQ ID NO: 52976 - protein, 375 aa, Buttiauxella noackiae
  misc_feature (1)..(375): tr|A0A1B7I1I3|A0A1B7I1I3_9ENTR Queuine tRNA-ribosyltran sferase OS=Buttiauxella noackiae ATCC 51607 OX=1354255 GN=tgt PE=3 SV=1
MKFELDTTDGRARRGRLVFDRGVVETPAFMPVGTYGTVKGMTPEEVEATGAQIILGNTFHLWLRPGQEIMKLHGDLHDFMQWKGPILTDSGGFQVFSLGDIRKITEAGVHFRNPINGDAIFLDPEKSMEIQYDLGSDIVMIFDECTPYPADWDYAKRSMEMSLRWAQRSRDRFDSLENKNALFGIIQGSVYEDLRDISVKGLVEIGFDGYAVGGLAVGEPKEDMHRILEHVCPQIPADKPRYLMGVGKPEDLVEGVRRGIDMFDCVMPTRNARNGHLFVTDGVVKIRNAKHKDDVSPLDAECDCYTCRNYSRAYLHHLDRCNEILGARLNTIHNLRYYQRLMAGLRKAIEEGKLEHFVSDFYERTGKPVPPLNVD

SEQ ID NO: 52977 - protein, 375 aa, Buttiauxella sp.
  misc_feature (1)..(375): tr|A0A5C5DAP8|A0A5C5DAP8_9ENTR Queuine tRNA-ribosyltran sferase OS=Buttiauxella sp. B2 OX=2587812 GN=tgt PE=3 S V=1
MKFELDTTDGRARRGRLVFDRGVVETPAFMPVGTYGTVKGMTPEEVEATGAQIILGNTFHLWLRPGQEIMKLHGDLHDFMQWKGPILTDSGGFQVFSLGDIRKITEAGVHFRNPINGDAIFLDPEKSMEIQYDLGSDIVMIFDECTPYPADWDYAKRSMEMSLRWAQRSRDRFDSLENKNALFGIIQGSVYEDLRDISVKGLVDIGFDGYAVGGLAVGEPKEDMHRILEHVCPQIPTDKPRYLMGVGKPEDLVEGVRRGIDMFDCVMPTRNARNGHLFVTDGVVKIRNAKYKDDTSTLDSECDCYTCRNYSRAYLYHLDRCNEILGARLNTIHNLRYYQRLMAGLRKAIEEGKLEHFVSDFYERIGKPVPPLNVD

SEQ ID NO: 52978 - protein, 375 aa, Buttiauxella sp.
  misc_feature (1)..(375): tr|A0A4P5QCH4|A0A4P5QCH4_9ENTR Queuine tRNA-ribosyltran sferase OS=Buttiauxella sp. A111 OX=2563088 GN=tgt PE=3 SV=1
MKFELDTTDGRARRGRLVFDRGVVETPAFMPVGTYGTVKGMTPEEVEATGAQIILGNTFHLWLRPGQEIMKLHGDLHDFMQWKGPILTDSGGFQVFSLGDIRKITEAGVHFRNPINGDAIFLDPEKSMEIQYDLGSDIVMIFDECTPYPADWDYAKRSMEMSLRWAQRSRDRFDSLENKNALFGIIQGSVYEDLRDISVKGLVEIGFDGYAVGGLAVGEPKEDMHRILEHVCPQIPADKPRYLMGVGKPEDLVEGVRRGIDMFDCVMPTRNARNGHLFVTDGVVKIRNAKHKDDTSPLDSECDCYTCRNYSRAYLHHLDRCNEILGARLNTIHNLRYYQRLMAGLRKAIEEGKLEHFVSDFYERTGKPVPPLNVD

SEQ ID NO: 52979 - protein, 375 aa, Buttiauxella warmboldiae
  misc_feature (1)..(375): tr|A0A3N5E0P0|A0A3N5E0P0_9ENTR Queuine tRNA-ribosyltran sferase OS=Buttiauxella warmboldiae OX=82993 GN=tgt PE= 3 SV=1
MKFELDTTDGRARRGRLVFERGVVETPAFMPVGTYGTVKGMTPEEVEATGAQIILGNTFHLWLRPGQEIMKLHGDLHDFMQWKGPILTDSGGFQVFSLGDIRKITEAGVHFRNPINGDAIFLDPEKSMEIQYDLGSDIVMIFDECTPYPADWDYAKRSMEMSLRWAQRSRDRFDSLENKNALFGIIQGSVYEDLRDISVKGLVEIGFDGYAVGGLAVGEPKEDMHRILEHVCPQIPADKPRYLMGVGKPEDLVEGVRRGIDMFDCVMPTRNARNGHLFVTDGVVKIRNAKHKDDTSPLDAECDCYTCRNYSRAYLHHLDRCNEILGARLNTIHNLRYYQRLMAGLRQAIEEGKLELFVSDFYQRTGKPVPPLNVD

SEQ ID NO: 52980 - protein, 381 aa, Unknown
  misc_feature (1)..(381): tr|D7GSK3|D7GSK3_9FIRM Queuine tRNA-ribosyltransferase OS=butyrate-producing bacterium SS3/4 OX=245014 GN=tgt PE=3 SV=1
MKYKILAKDGRAKRADVETVHGTIHTPVFMNVGTVAAIKGAVSTDDLRGIGTQVELSNTYHLHVRTGDKLIKELGGLHRFMNWDRPILTDSGGFQVFSLAGLRKIKEEGVYFNSHIDGHKIFMGPEESMQIQSNLGSTIAMAFDECAPHPCTREYMENSVARTTRWLARCQAEMARLNSLPDTVNKEQLLFGINQGGTFEDIRIAHADTISKMNCDGYAVGGLAVGESHEEMYRILDAVVPHLPEEKPTYLMGVGTPANILEAVDRGVDFFDCVYPTRNGRHGHVYTNHGKINLFNEQFSKDMRPIEEGCQCPACRSYSRAYIRHLLKAKEMLGMRLCVLHNLYFYNTMMTEIREAIENHCYAEYKEKKLEGVTGNYKDKV

SEQ ID NO: 52981 - protein, 369 aa, Butyribacterium methylotrophicum
  misc_feature (1)..(369): tr|A0A1E7S0W1|A0A1E7S0W1_BUTME Queuine tRNA-ribosyltran sferase OS=Butyribacterium methylotrophicum OX=1487 GN= tgt PE=3 SV=1
MFRYELIKEDKHTGARLGKIHTSHGVINTPIFMPVGTQATVKSMTSEDLEEMDANIILGNTYHLYLRPGQEIMEKAGGLHKFMHWDRPILTDSGGFQVFSLNDLRKITEEGVEFCSHLDGSRHFMSPEKSIDMQNTIGADIIMCFDECAPADADYEYTKKSMEMTTRWAKRCKDAHRRPDDQALFGIVQGGMYEDLRAESVRGLTEIDFPGYSIGGLSVGESKDTMYRILDATVPLLPKDKPRYLMGVGSVDALLEGVIRGVDMFDCVLQTRIARNGTAMTSQGKVVVRNATYKEDFTPLDPECDCFVCRNYTRAYLRHLVKCNEILGARLLTYHNLYFTLKLMEKVRNAIMEDNLLAFKESFFQKYGI

SEQ ID NO: 52982 - protein, 376 aa, Butyricicoccus porcorum
  misc_feature (1)..(376): tr|A0A252F343|A0A252F343_9CLOT Queuine tRNA-ribosyltran sferase OS=Butyricicoccus porcorum OX=1945634 GN=tgt PE =3 SV=1
MFKVLRTEGNARRGEFTCAHGTVQTPVFQNVGTQGAIKGAVSAQDLKELGCQIELSNTYHLHVRPGDQIVRAMGGLHKFMNWDGPILTDSGGFQVFSLSSLRRIKEEGVYFSSHVDGRKIFMGPEESMQIQSNLGSDIAMAFDECCENPSPYEYVKKSCERTTRWLYRCKAELDRLNSLPTTVNPQQMLFGINQGGTYDDLRIQHMKDIAQLDLPGYAIGGLAVGESTETMYHILDVVLPHAPADKPRYLMGVGTPSNIIEAVWRGVDFFDCVMPTRNARHGHLFTWDGIRNLNNAKYQLDDKPIDERCNCPVCRTYSRAYIRHLLKSGEMLGQRLTVMHNLWFYNNLMAEIRKALDEGRFAEFRAQWSDRLSQRI

SEQ ID NO: 52983 - protein, 380 aa, Butyricicoccus pullicaecorum
  misc_feature (1)..(380): tr|R8W4N0|R8W4N0_9CLOT Queuine tRNA-ribosyltransferase OS=Butyricicoccus pullicaecorum 1.2 OX=1203606 GN=tgt P E=3 SV=1
MEIGAFELKKTEGKARRGAFQTAHGLVQTPVFMNVGTAGAIKGAVDAFDLKELGCQVELSNTYHLHVRPGDAIVKQMGGLHKFMRWDGPMLTDSGGFQVFSLASLRKIREEGVTFNSHVDGRKIFMGPEESMRIQSNLGSDIAMAFDECIENPAPYEYVKDSCARTTRWLVRCKEEMARLNSLPDTVNPHQLLFGINQGGTYDDLRVAHMEEIAKLDLPGYAIGGLAVGESTDVMYHILDVVLPHAPEHKPRYLMGVGTPSNIIEGVARGIDFFDCVMPTRNARHGHLFTWDGIMNIHNAKYQTDDRPIEEGCQCPTCRKFSRAYVRHLLKAGEMLSQRLLVQHNLWFYNNLMVKIREALDQGTFAEFRAQYSEKLAKRI

SEQ ID NO: 52984 - protein, 380 aa, Butyricicoccus pullicaecorum
  misc_feature (1)..(380): tr|A0A1Y4LG57|A0A1Y4LG57_9CLOT Queuine tRNA-ribosyltran sferase OS=Butyricicoccus pullicaecorum OX=501571 GN=tg t PE=3 SV=1
MEIGAFELKKTEGKARRGAFQTAHGLVQTPVFMNVGTAGAIKGAVDAFDLKELGCQVELSNTYHLHVRPGDAIVKQMGGLHKFMRWDGPMLTDSGGFQVFSLASLRKIREEGVTFNSHVDGRKIFMGPEESMRIQSNLGSDIAMAFDECIENPAPYEYVKDSCARTTRWLVRCKEEMARLNSLPDTVNPHQLLFGINQGGTYDDLRIAHMEEIAKLDLPGYAIGGLAVGESTDVMYHILDVVLPHAPEHKPRYLMGVGTPSNIIEGVARGIDFFDCVMPTRNARHGHLFTWDGIMNIHNAKYQTDDRPIEEGCQCPTCRKFSRAYVRHLLKAGEMLSQRLLVQHNLWFYNNLMVKIREALDQGTFAEFRAQYSEKLAKRI

SEQ ID NO: 52985 - protein, 380 aa, Butyricicoccus sp.
  misc_feature (1)..(380): tr|A0A417HX09|A0A417HX09_9CLOT Queuine tRNA-ribosyltran sferase OS=Butyricicoccus sp. AM28-25 OX=2292294 GN=tgt PE=3 SV=1
MEIGKFNLIKTEGRARRGEFCTAHGVVQTPVFQNVGTAGAIKGAVDAFDLKELGCQIELSNTYHLHVRPGDQIVKQMGGLHKFMRWDGPMLTDSGGFQVFSLATLRKIKEEGVTFHSHVDGRKIFMGPEESMRIQSNLGSDIAMAFDECIENPAPREYVKNSIDRTTRWLKRCKTELDRLNTLPDTVNPHQMLFGINQGGTYDDLRIEHMQAIAELDLPGYAIGGLAVGESTEVMYHILDVVLPHAPEHKPRYLMGVGTPSNIIEGVARGIDFFDCVMPTRNARHGHLFTHNGILNIMNAKYQTDDRPIEEGCQCPTCQRFSRAYLRHLLKSGEMLSQRLLVMHNLWFYNHLMQEIRDALDNGTFEDYRAEYSEKMSKRI

SEQ ID NO: 52986 - protein, 380 aa, Butyricicoccus sp.
  misc_feature (1)..(380): tr|A0A396MDN9|A0A396MDN9_9CLOT Queuine tRNA-ribosyltran sferase OS=Butyricicoccus sp. AF15-40 OX=2292197 GN=tgt PE=3 SV=1
MEIGKFNLIKTEGRARRGEFCTAHGVVQTPVFQNVGTAGAIKGAVDAFDLKELGCQIELSNTYHLHVRPGDQIVKQMGGLHKFMRWDGPMLTDSGGFQVFSLATLRKIKEEGVTFHSHVDGRKIFMGPEESMRIQSNLGSDIAMAFDECIENPAPREYVKNSIDRTTRWLKRCKTELDRLNTLPDTVNPHQMLFGINQGGTYDDLRIEHMQAIAELDLPGYAIGGLAVGESTEVMYHILDVVLPHAPEHKPRYLMGVGTPSNIIEGVARGIDFFDCVMPTRNARHGHLFTHNGILNIMNAKYQTDDRPIEEGCQCPTCQRFSRAYLRHLLKSGEMLSQRLLVMHNLWFYNHLMQEIRDALDNGTFEAYRAEYSEKMSKRI

SEQ ID NO: 52987 - protein, 376 aa, Butyricimonas faecalis
  misc_feature (1)..(376): tr|A0A3S9VSG6|A0A3S9VSG6_9BACT Queuine tRNA-ribosyltran sferase OS=Butyricimonas faecalis OX=2093856 GN=tgt PE= 3 SV=1
MKYTLLAKDKNSDARCGVLTTDHGNIETPIFMPVGTVGTVKAVHARELKEDIKAQIILGNTYHLYLRPGTEVLEEAGGLHKFNSWDRPILTDSGGFQVFSLGDCRKITEEGVVFRSHIDGSKHLFTPENVMDIQRKIGADIIMAFDECPPGQSEYGYAKNSLELTQRWLERCVKRLDATEPLYGYHQSLFPIVQGCTFRDLREKAAEHAVALDREGYAIGGLAVGEEADVMYEMIQVVNRILPQDKPRYLMGVGTPENILEAISLGVDMFDCVMPTRNGRNGMLFTTEGVINIKNKKWEKDFSRIDPAVLSFVDSDYSKAYLRHLIKADEILGLQICSIHNLSFYLWLVREARKHILEGDFVTWKESTIKKVTRRL

SEQ ID NO: 52988 - protein, 376 aa, Butyricimonas sp.
  misc_feature (1)..(376): tr|A0A1Y3VNT9|A0A1Y3VNT9_9BACT Queuine tRNA-ribosyltran sferase OS=Butyricimonas sp. An62 OX=1965649 GN=tgt PE= 3 SV=1
MKYTLLAKDKNSDARCGVLTTDHGNIETPIFMPVGTVGTVKAVHARELKEDIKAQIILGNTYHLYLRPGTEVLEEAGGLHKFNSWDRPILTDSGGFQVFSLGDCRKITEEGVVFRSHIDGSKHLFTPENVMDIQRKIGADIIMAFDECPPGQSEYGYAKNSLELTQRWLERCVKRLDSTEPLYGYHQSLFPIVQGCTFRDLREKAAEHAVALDREGYAIGGLAVGEEAEVMYEMIQVVNRILPQDKPRYLMGVGTPENILEAISLGVDMFDCVMPTRNGRNGMLFTTEGVINIKNKKWEKDCSRIDPAGLSFVDDDYSKAYLRHLIKADEILGLQICSIHNLSFYLWLVREARKHILEGDFVTWKESTIKKVTRRL

SEQ ID NO: 52989 - protein, 376 aa, Butyricimonas sp.
  misc_feature (1)..(376): tr|A0A3D2DRT2|A0A3D2DRT2_9BACT Queuine tRNA-ribosyltran sferase OS=Butyricimonas sp. OX=1969738 GN=tgt PE=3 SV= 1
MKYTLLAKDKNSDARCGVLTTDHGNIETPIFMPVGTVGTVKAVHARELKEDIKAQIILGNTYHLYLRPGTEVLEEAGGLHKFNSWDRPILTDSGGFQVFSLGDCRKITEEGVVFRSHIDGSKHLFTPENVMDIQRKIGADIIMAFDECPPGQSEYGYAKNSLELTQRWLERCVKRLDSTEPLYGYHQSLFPIVQGCTFRDLREKAAEHAVALDREGYAIGGLAVGEEAEVMYEMIQVVNRILPQDKPRYLMGVGTPENILEAISLGVDMFDCVMPTRNGRNGMLFTTEGVINIKNKKWEKDFSRIDPAGLSFVDNDYSKAYLRHLIKADEILGLQICSIHNLSFYLWLVREARKHILEGDFVTWKESTIKKVTRRL

SEQ ID NO: 52990 - protein, 376 aa, Butyricimonas synergistica
  misc_feature (1)..(376): tr|A0A1U7LAK6|A0A1U7LAK6_9BACT Queuine tRNA-ribosyltran sferase OS=Butyricimonas synergistica OX=544644 GN=tgt PE=3 SV=1
MKYTLLAKDKNSDARCGVLTTNHGNIETPIFMPVGTVGTVKAVHARELKEDIKAQIILGNTYHLYLRPGTEVLEEAGGLHKFNSWDRPILTDSGGFQVFSLGDCRKIAEEGVVFRSHIDGSKHLFTPENVMDIQRKIGADIIMAFDECPPGQSEYGYAKNSLELTQRWLERCVNRLDSTEPLYGYHQSLFPIVQGCTFRDLREKAAEHAVALDREGYAIGGLAVGEEAEVMYEMIQVVNRILPQDKPRYLMGVGTPENILEAISLGVDMFDCVMPTRNGRNGMLFTTEGVINIKNKKWEKDFSRIDPAGLSFVDDDYSKAYLRHLIKADEILGLQICSIHNLSFYLWLVREARKHILEGDFVTWKESTIKKVTRRL

SEQ ID NO: 52991 - protein, 376 aa, Butyricimonas virosa
  misc_feature (1)..(376): tr|A0A415QP46|A0A415QP46_9BACT Queuine tRNA-ribosyltran sferase OS=Butyricimonas virosa OX=544645 GN=tgt PE=3 S V=1
MKYTLLAKDKNSDARCGVLTTDHGNIETPIFMPVGTVGTVKAVHARELKEDIKAQIILGNTYHLYLRPGTEVLEEAGGLHKFNSWDRPILTDSGGFQVFSLGDCRKITEEGVVFRSHIDGSKHLFTPENVMDIQRKIGADIIMAFDECPPGQSEYGYAKNSLELTQRWLERCVKRFDSTEPLYGYHQSLFPIVQGCTFRDLREKAAEHAVTLDREGYAIGGLAVGEEAEVMYEMIQVVNRILPQDKPRYLMGVGTPENILEAISLGVDMFDCVMPTRNGRNGMLFTTEGVINIKNKKWEKDFSRIDPAGLSFVDNDYSKAYLRHLIKADEILGLQICSIHNLSFYLWLVREARKHILEGDFVTWKESTIKKVTRRL

SEQ ID NO: 52992 - protein, 376 aa, Butyricimonas virosa
  misc_feature (1)..(376): tr|A0A413IIT8|A0A413IIT8_9BACT Queuine tRNA-ribosyltran sferase OS=Butyricimonas virosa OX=544645 GN=tgt PE=3 S V=1
MKYTLLAKDKNSDARCGVLTTDHGNIETPIFMPVGTVGTVKAVHARELKEDIKAQIILGNTYHLYLRPGTEVLEEAGGLHKFNSWDRPILTDSGGFQVFSLGDCRKITEEGVVFRSHIDGSKHLFTPENVMDIQRKIGADIIMAFDECPPGQSEYGYAKNSLELTQRWLERCVKRFDSTEPLYGYHQSLFPIVQGCTFRDLREKAAEHAVALDREGYAIGGLAVGEEAEVMYEMIQVVNRILPQDKPRYLMGVGTPENILEAISLGVDMFDCVMPTRNGRNGMLFTTEGVINIKNKKWEKDFSRIDPAGLSFVDNDYSKAYLRHLIKADEILGLQICSIHNLSFYLWLVREARKHILEGDFVTWKESTIKKVTRRL

SEQ ID NO: 52993 - protein, 379 aa, Butyrivibrio crossotus
  misc_feature (1)..(379): tr|R5LXA1|R5LXA1_9FIRM Queuine tRNA-ribosyltransferase OS=Butyrivibrio crossotus CAG:259 OX=1263062 GN=tgt PE= 3 SV=1
MEYKVLKTDGKAKRAEMKTVHGTIQTPVFMNVGTVAAIKGAVSTDDLREIGCQVELSNTYHLHVRTGDKLIKEMGGIREFMNWDRPVLTDSGGFQVFSLAKLRKIKEEGVSFNSHIDGHKIFMGPEESMQIQSNLGSTIAMAFDECIENPSPRDYVQKSVDRTTRWLVRCKNEMARLNSLPDTVNKEQLLFGINQGGTYDDIRINHAKAIAELNLDGYAIGGLAVGETHEEMYRIIDAVVPHLPADKPVYLMGVGTPANILEAVDRGVDFFDCVYPSRNGRHGHVYTRFGKLNLFNAQYEKDARPIEEGCGCPACRSYSRAYIRHLLKAKEMLGMRLCVLHNLYFYNHLMEQIREAIDEGRYSEFKKETLESLQGGQTS

SEQ ID NO: 52994 - protein, 379 aa, Butyrivibrio crossotus
  misc_feature (1)..(379): tr|D4S0N9|D4S0N9_9FIRM Queuine tRNA-ribosyltransferase OS=Butyrivibrio crossotus DSM 2876 OX=511680 GN=tgt PE= 3 SV=1
MEYKVLKTDGKAKRAEMKTVHGTIQTPVFMNVGTVAAIKGAVSTDDLREIGCQVELSNTYHLHVRTGDKLIKEMGGIREFMNWDRPVLTDSGGFQVFSLAKLRKIKEEGVSFNSHIDGHKIFMGPEESMQIQSNLGSTIAMAFDECIENPSPRDYVQKSVDRTTRWLVRCKNEMARLNSLPDTVNKEQLLFGINQGGTYDDIRINHAKAIAGLNLDGYAIGGLAVGETHEEMYRIIDSVVPNLPADKPVYLMGVGTPANILEAVDRGVDFFDCVYPSRNGRHGHVYTRFGKLNLFNAQYEKDARPIEEGCGCPACRSYSRAYIRHLLKAKEMLGMRLCVLHNLYFYNHLMEQIREAIDEGRYSEFKKETLESLQGGQTS

SEQ ID NO: 52995 - protein, 393 aa, Butyrivibrio fibrisolvens
  misc_feature (1)..(393): tr|A0A1M5PMR6|A0A1M5PMR6_BUTFI Queuine tRNA-ribosyltran sferase OS=Butyrivibrio fibrisolvens DSM 3071 OX=112113 1 GN=tgt PE=3 SV=1
MYKLLKTEGRAKRGEFQTVHGTIQTPVFMNVATVAAIKGAVSTEDLEGIKNQVVLCNTYHLHLRPGDDNVYRMGGLHKFMSCNKPILTDSGGFQVFSLAKTRRIREEGVYFHSHIDGHKLFMGPEESMRIQSHLGSTIAMAFDECPSARADHEYVQMSVDRTTRWLERCKKEMDRLNSLPDTVNPHQMLFGINQGAIFDDIRIEHAKRIAEMNLDGYAVGGLAVGETHEEMYHVLDTVVPYLPQDKPTYLMGVGTPANILEAVERGVDFFDCVYPSRNGRHGHVYTKKGKLNLLNARFELDSHPIEEGCQCPACKRYSRGYIRHLLKSGEMLGMRLCVLHNLYFYNNMMEEIRDALDNGNFAEYKKKTIEGFSEYEELSTAPGSDIAKNWRKG

SEQ ID NO: 52996 - protein, 393 aa, Butyrivibrio fibrisolvens
  misc_feature (1)..(393): tr|A0A317G608|A0A317G608_BUTFI Queuine tRNA-ribosyltran sferase OS=Butyrivibrio fibrisolvens OX=831 GN=tgt PE=3 SV=1
MYKLLKTEGRAKRGEFQTVHGTIQTPVFMNVATVAAIKGAVSTEDLEGIKNQVVLCNTYHLHLRPGDDNVYRMGGLHKFMSCNKPILTDSGGFQVFSLAKTRRIKEEGVYFHSHIDGHKLFMGPEESMRIQSHLGSTIAMAFDECPSARADHEYVQMSVDRTTRWLERCKKEMDRLNSLPDTVNPHQMLFGINQGAIFDDIRIEHAKRIREMDLDGYAVGGLAVGETHEEMYHVLEQVVPYLPQDKPTYLMGVGTPANILEGVERGIDFFDCVYPSRNGRHGHVYTKKGKLNLLNARFELDSHPIEEGCQCPACKRYSRGYIRHLLKAGEMLGMRLCVLHNLYFYNNMMEEIRDALDNGNFAAYKKKTLDGFREYEELSTAPGGDIAKNWRKG

SEQ ID NO: 52997 - protein, 393 aa, Butyrivibrio hungatei
  misc_feature (1)..(393): tr|A0A1M7T5Y7|A0A1M7T5Y7_9FIRM Queuine tRNA-ribosyltran sferase OS=Butyrivibrio hungatei DSM 14810 OX=1121132 G N=tgt PE=3 SV=1
MYKILKKDGNAKRAEFTTVHGKIQTPVFMNVATVAAIKGGVSTEDLEGIDTQVVLSNTYHLHLRPGDDVVYKMGGLHKFMSCNKPILTDSGGFQVFSLAKTRRIKEEGVYFHSHIDGHKLFMGPEESMRIQSHLGSTIAMAFDECPSAKAEHEYVQMSVDRTTRWLERCKKEMDRLNGLEYTVNKNQMLFGINQGAIFDDIRIEHAKRISELDLDGYAVGGLAVGESHEEMYHVLETTVPYLPENKPTYLMGVGTPANILEAVERGVDFFDCVYPSRNGRHGHLYTNKGHINLLNARYELDDSPIEEGCGCPACRRYSKAYIRHLLKSGEMLGLRLCVLHNLYFYNHMMIEIRDAIEKGEYSAYKKRKLDGFLEYDSIPVNDGYNIARNWRKG

SEQ ID NO: 52998 - protein, 365 aa, Butyrivibrio hungatei
  misc_feature (1)..(365): tr|A0A1D9P1X8|A0A1D9P1X8_9FIRM Queuine tRNA-ribosyltran sferase OS=Butyrivibrio hungatei OX=185008 GN=tgt PE=3 SV=1
MNVATVAAIKGGVSTEDLEGIDTQVVLSNTYHLHLRPGDDVVYKMGGLHKFMSCNKPILTDSGGFQVFSLAKTRRIKEEGVYFHSHIDGHKLFMGPEESMRIQSHLGSTIAMAFDECPSAKAEHEYVQMSVDRTTRWLERCKKEMDRLNGLEYTVNKNQMLFGINQGAIFDDIRIEHAKRISELDLDGYAVGGLAVGESHEEMYHVLETTVPYLPENKPTYLMGVGTPANILEAVERGVDFFDCVYPSRNGRHGHLYTNKGHINLLNARYELDDSPIEEGCGCPACRRYSKAYIRHLLKSGEMLGLRLCVLHNLYFYNHMMIEIRDAIEKGEYSAYKKRKLDGFLEYDSIPVNDGYNIARNWRKG

SEQ ID NO: 52999 - protein, 393 aa, Butyrivibrio proteoclasticus
  misc_feature (1)..(393): tr|E0RUN1|E0RUN1_BUTPB Queuine tRNA-ribosyltransferase OS=Butyrivibrio proteoclasticus (strain ATCC 51982 / DS M 14932 / B316) OX=515622 GN=tgt PE=3 SV=1
MYKILKKDGSAKRAEFTTVHGTVQTPVFMNVATVAAIKGGVSTEDLEGIDTQVVLSNTYHLHLRPGDDVVYRMGGLHKFMSCNKPILTDSGGFQVFSLAKTRKIKEEGVYFHSHIDGHKLFMGPEESMRIQSHLGSTIAMAFDECPSAKAEHEYVQMSVDRTTRWLERCKKEMDRLNSLEYTVNHDQMLFGINQGAIFDDIRIEHAKRISELDLDGYAVGGLAVGESHEEMYHVLETVVPYLPENKPTYLMGVGTPANILEAVERGVDFFDCVYPSRNGRHGHLYTNRGHINLLNARYELDDTPIEEGCKCPACRRYSKAYIRHLLKSGEMLGLRLCVLHNLYFYNHMMEEIRDAIDAGRFQEYKKNKLYGMQEFDSVVNTEYANIDKNWRKG

SEQ ID NO: 53000 - protein, 393 aa, Butyrivibrio proteoclasticus
  misc_feature (1)..(393): tr|A0A1I5QGH0|A0A1I5QGH0_9FIRM Queuine tRNA-ribosyltran sferase OS=Butyrivibrio proteoclasticus OX=43305 GN=tgt PE=3 SV=1
MYKILKKDGNAKRAEFTTVHGTVQTPVFMNVATVAAIKGGVSTEDLEGIDTQVVLSNTYHLHLRPGDELVYRMGGLHKFMSCNKPILTDSGGFQVFSLAKTRKIREEGVYFHSHIDGHKLFMGPEESMRIQSHLGSTIAMAFDECPSAKAEHEYVQMSVDRTTRWLLRCKKEMDRLNGLEYTVNPHQMLFGINQGAIFDDIRIEHAKRISELDLDGYAVGGLAVGESHEEMYHVLDTVVPFLPENKPTYLMGVGTPANILESVDRGVDFFDCVYPSRNGRHGHLYTNRGHINILNAKYEMDDTPIEEGCGCPACRRYTKAYIRHLLKAGEMLGMRLCVLHNLYFYNHMMTEIREAIEKGEYKEYKKRKLEGMLEFDSETIADGYNIARNWRKG

SEQ ID NO: 53001 - protein, 393 aa, Butyrivibrio sp.
  misc_feature (1)..(393): tr|A0A1I1CV18|A0A1I1CV18_9FIRM Queuine tRNA-ribosyltran sferase OS=Butyrivibrio sp. YAB3001 OX=1520812 GN=tgt P E=3 SV=1
MYKILKKDGSAKRAEFSTVHGTIQTPVFMNVATVAAIKGGVSTEDLEGIDTQVVLSNTYHLHLRPGDDVVYRMGGLHKFMSCNKPILTDSGGFQVFSLAKTRRIKEEGVYFHSHIDGHKLFMGPEESMRIQSHLGSTIAMAFDECPSAKAEHEYVQMSVDRTTRWLKRCQDEMRRLNGLEYTVNPNQLLFGINQGAIFDDIRIEHAKVISDMNLDGYAVGGLAVGETHEEMYHVLETVVPYLPEDKPTYLMGVGTPANILEAVERGVDFFDCVYPSRNGRHGHLYTSKGHINLLNARYELDDTPIDSGCNCPACRRYTKAYIRHLLKSGEMLGMRLCVLHNLYFYNHLMEEIRDAIEKGEYASYKKKKLEGFMEYDSAEIKDSYNIARNWRKG

SEQ ID NO: 53002 - protein, 393 aa, Butyrivibrio sp.
  misc_feature (1)..(393): tr|A0A1H5RXU1|A0A1H5RXU1_9FIRM Queuine tRNA-ribosyltran sferase OS=Butyrivibrio sp. Su6 OX=1520810 GN=tgt PE=3 SV=1
MYKILKKDGNAKRAEFTTVHGTVQTPVFMNVATVAAIKGGVSTEDLEGIDTQVVLSNTYHLHLRPGDELVYRMGGLHKFMSCNKPILTDSGGFQVFSLAKTRKIREEGVYFHSHIDGHKLFMGPEESMRIQSHLGSTIAMAFDECPSAKAEHEYVQMSVDRTTRWLLRCKKEMDRLNGLEYTVNPHQMLFGINQGAIFDDIRIEHAKRISELDLDGYAVGGLAVGESHEEMYHVLDTVVPFLPDNKPTYLMGVGTPANILEAVDRGVDFFDCVYPSRNGRHGHLYTNRGHINILNAKYEMDDTPIEEGCGCPACRRYTKAYIRHLLKAGEMLGMRLCVLHNLYFYNHMMIEIREAIEKGEYKAYKKRKLEGMLEFDSETIADGYNIARNWRKG

SEQ ID NO: 53003 - protein, 375 aa, Bythopirellula goksoyri
  misc_feature (1)..(375): tr|A0A5B9QLM5|A0A5B9QLM5_9PLAN Queuine tRNA-ribosyltran sferase OS=Bythopirellula goksoyri OX=1400387 GN=tgt PE =3 SV=1
MASSPFRFELLHSDTGCDARRGRLHTPHGTVELPTFMPVGTLGTVKGVDIARLRETGAQIVLGNTYHLALRPGANVVAELGGLHVFMGWQGPILTDSGGFQVFSLAERVKVTEKGVSFRSHIDGSALEITPERSIAIQEELGSDFAMAFDHVVALPNKREVIEDATWRSVRWAERCLEAAQREDQMLLGIVQGGLDPELRQSCAKALVSLDFRGYAIGGLSVGEPPEEMYSTLEATVPALPTERPRYLMGVGRPEDLVESMARGVDMFDCVMPTRNGRNALAFTDQGTVRLRNSQHERNRDPLEANCPCPACQHSRGYLRHLFQAKEMLGPILTSIHNITYYQRLMAEARQAIEADSFSEFRRAKLAAWGAKDSK

SEQ ID NO: 53004 - protein, 386 aa, Caballeronia arationis
  misc_feature (1)..(386): tr|A0A158A220|A0A158A220_9BURK Queuine tRNA-ribosyltran sferase OS=Caballeronia arationis OX=1777142 GN=tgt PE= 3 SV=1
MTDGHNPPANGLKFDLLTTDGQARRGRLTLNHGVVETPIFMPVGTYGTVKAIQPRELEEIRAQIILGNTFHLWLRPGLETIRAHGGLHQFMNWKRPILTDSGGFQVFSLGDLRKITEDGVTFASPINGDKLFLSPEISMQIQKILNSDIVMQFDECTPYATNGVPTSHKDAADSMRMSMRWAKRSIDEFDRLGNPNALFGIVQGGMFEDLRDESLAGLADIGFHGLAIGGLSVGEPKEDMMRVLKHIGPKLPADKPHYLMGVGTPEDLVAGVAAGVDMFDCVMPTRNARNGWLFTRFGDVKIRNATHKNSLKPLDETCGCYTCANFTRGYLHHLHRVGEILGAQLNTIHNLHYYLQLMTEVRESIENHKFDTFRKQFHENRARGID

SEQ ID NO: 53005 - protein, 387 aa, Caballeronia arvi
  misc_feature (1)..(387): tr|A0A158J795|A0A158J795_9BURK Queuine tRNA-ribosyltran sferase OS=Caballeronia arvi OX=1777135 GN=tgt PE=3 SV= 1
MTTGQFTPPENGLKFELLTTDGQARRGRLTLNHGVVETPIFMPVGTYGTVKAIQPRELEEIRAQIILGNTFHLWLRPGLEVIGAHGGLHKFMGWNRPILTDSGGFQVFSLGDLRKITEEGVTFASPINGDKLFLSPEVSMQIQKVLNSDIVMQFDECTPYSTNGIATSHKDAADSMRMSMRWAKRSIDEFQRLGNPNALFGIVQGGMFEDLRDESLAGLSEIGFHGLAIGGLSVGEPKEDMMRVLNHIGPKLPADKPHYLMGVGTPEDLVAGVAAGVDMFDCVMPTRNARNGWLFTRFGDLKIKNATHKNSMKPLDESCGCYTCQNFTRGYLHHLHRVGEILGAQLNTIHNLHYYLQLIGEVRESIENHTFEAFRKTFAENRARGVD

SEQ ID NO: 53006 - protein, 387 aa, Caballeronia calidae
  misc_feature (1)..(387): tr|A0A158B4V2|A0A158B4V2_9BURK Queuine tRNA-ribosyltran sferase OS=Caballeronia calidae OX=1777139 GN=tgt PE=3 SV=1
MTAGQFTPPENGLKFELLTTDGQARRGRLTLNHGVVETPIFMPVGTYGTVKAIQPRELEEIRAQIILGNTFHLWLRPGLEVIGAHGGLHKFMGWNRPILTDSGGFQVFSLGDLRKITEDGVTFASPINGDKLFLSPEVSMQIQKVLNSDIVMQFDECTPYATNGIPTSHKDAADSMRMSMRWAKRSIDEFGRLGNPNALFGIVQGGMFEDLRDESLAGLSDIGFHGLAIGGLSVGEPKEDMMRVLNHIGPKLPADKPHYLMGVGTPEDLVAGVAAGVDMFDCVMPTRNARNGWLFTRFGDLKIKNATHKNSMKPLDESCTCYTCQNFTRGYLHHLHRVGEILGAQLNTIHNLHYYLQLIGEVRESIENHTFEAFRKTFAKNRARGVD

SEQ ID NO: 53007 - protein, 387 aa, Caballeronia catudaia
  misc_feature (1)..(387): tr|A0A158A9L2|A0A158A9L2_9BURK Queuine tRNA-ribosyltran sferase OS=Caballeronia catudaia OX=1777136 GN=tgt PE=3 SV=1
MTAGQFTPPANGLKFELLTTDGQARRGRLTLNHGVVETPIFMPVGTYGTVKAIQPRELEEIRAQIILGNTFHLWLRPGLEVIGAHGGLHRFMGWNRPILTDSGGFQVFSLGDLRKITEEGVTFASPINGDKLFLSPEVSMQIQKVLNSDIVMQFDECTPYSTNGIATSHKDAADSMRMSMRWAKRSIDEFQRLGNPNALFGIVQGGMFEDLRDESLAGLSDIGFHGLAIGGLSVGEPKEDMMRVLNHIGPKLPADKPHYLMGVGTPEDLIAGVAAGVDMFDCVMPTRNARNGWLFTRFGDLKIKNATHKNSMKPLDESCGCYTCQNFTRGYLHHLHRVGEILGAQLNTIHNLHYYLQLIGEVRESIESHTFEAFRKTFADNRARGVD

SEQ ID NO: 53008 - protein, 386 aa, Caballeronia choica
  misc_feature (1)..(386): tr|A0A158KFX9|A0A158KFX9_9BURK Queuine tRNA-ribosyltran sferase OS=Caballeronia choica OX=326476 GN=tgt PE=3 SV =1
MTDGHNPPANGLKFDLLTTDGQARRGRLTLNHGVVETPIFMPVGTYGTVKAIQPRELEEIKAQIILGNTFHLWLRPGLETIGAHGGLHQFMNWKRPILTDSGGFQVFSLGELRKITEDGVTFASPINGDKLFLSPEISMQIQKVLNSDIVMQFDECTPYATNGVPTSHQDAADSMRMSMRWAKRSVDEFNRLGNPNALFGIVQGGMFEDLREESLAGLKDIGFHGLAIGGLSVGEPKEDMMRVLNHIGPKLPADKPHYLMGVGTPEDLVAGVAAGVDMFDCVMPTRNARNGWLFTRFGDVKIRNAAHKNSLKPLDETCGCYTCANFTRGYLHHLHRVGEILGAQLNTIHNLHYYLQLMSEVRESIENHTFDTFRKQFHENRARGID

SEQ ID NO: 53009 - protein, 387 aa, Caballeronia cordobensis
  misc_feature (1)..(387): tr|A0A158ER19|A0A158ER19_9BURK Queuine tRNA-ribosyltran sferase OS=Caballeronia cordobensis OX=1353886 GN=tgt P E=3 SV=1
MTEGQHNPPENGLKFELLTTDGQARRGRLTLNHGVVETPIFMPVGTYGTVKAIQPRELEEIRAQIILGNTFHLWLRPGLEVIGAHGGLHKFMGWNRPILTDSGGFQVFSLGDLRKITEDGVTFASPINGDKLFLSPEVSMQIQKVLNSDIVMQFDECTPYSTNGIATSHKDAADSMRMSMRWAKRSIDEFNRLGNPNALFGIVQGGMFEDLRDESLAGLSDIGFHGLAIGGLSVGEPKEDMMRVLNHIGPKLPADKPHYLMGVGTPEDLVAGVAAGVDMFDCVMPTRNARNGWLFTRFGDLKIKNATHKNSMKPLDESCGCYTCRNFTRGYLHHLHRVGEILGAQLNTIHNLHYYLELIGEVRESIENHTFDAFRKTFAENRARGVD

SEQ ID NO: 53010 - protein, 386 aa, Caballeronia fortuita
  misc_feature (1)..(386): tr|A0A157ZHD2|A0A157ZHD2_9BURK Queuine tRNA-ribosyltran sferase OS=Caballeronia fortuita OX=1777138 GN=tgt PE=3 SV=1
MTENHTPPDNGLKFELLTTDGQARRGRLTLNHGVVETPIFMPVGTYGTVKAIQPRELEEIRAQIILGNTFHLWLRPGLEVIGAHGGLHKFMGWNRPILTDSGGFQVFSLGELRKITEEGVTFASPINGDKLFLSPEVSMQIQKVLNSDIVMQFDECTPYSTNGIPTSHKDAADSMRMSMRWAKRSIDEFNKLGNPNALFGIVQGGMFEDLRDESLAGLSDIGFHGFAIGGLSVGEPKEDMMRVLNHIGPKLPADKPHYLMGVGTPEDLVAGVAAGVDMFDCVMPTRNARNGWLFTRFGDLKIKNATHKNSMKPLDESCACYTCRNFTRGYLHHLHRVGEILGAQLNTIHNLHYYLQLIGEVRESIENHTFEAFRKTFAENRARGVD

SEQ ID NO: 53011 - protein, 386 aa, Caballeronia glathei
  misc_feature (1)..(386): tr|A0A069Q4P1|A0A069Q4P1_9BURK Queuine tRNA-ribosyltran sferase OS=Caballeronia glathei OX=60547 GN=tgt PE=3 SV =1
MTDGHTPPANGLKFDLLTTDGQARRGRLTLNHGVVETPIFMPVGTYGTVKAIQPRELEEIRAQIILGNTFHLWLRPGLETIGAHGGLHAFMNWKRPILTDSGGFQVFSLGDLRKITEDGVTFASPINGDKLFLSPEISMQIQKVLNSDIVMQFDECTPYATSGVPTSHQDAADSMRMSMRWAKRSVDEFGRLGNPNALFGIVQGGMFEDLREESLAGLADIGFHGLAIGGLSVGEPKEDMMRVLNHIGPKLPADKPHYLMGVGTPEDLVAGVAAGVDMFDCVMPTRNARNGWLFTRFGDVKIRNASHKNSLKPLDESCGCYTCANFTRGYLHHLHRVGEILGAQLNTIHNLHYYLQLMSEIRESIENHTFDTFRKHFYENRARGID

SEQ ID NO: 53012 - protein, 386 aa, Caballeronia glebae
  misc_feature (1)..(386): tr|A0A157ZAU8|A0A157ZAU8_9BURK Queuine tRNA-ribosyltran sferase OS=Caballeronia glebae OX=1777143 GN=tgt PE=3 S V=1
MTATHTPPENGLKFELLTTDGQARRGRLTLNHGVVETPIFMPVGTYGTVKAIQPRELEEIRAQIILGNTFHLWLRPGLEVVGAHGGLHKFMGWNRPILTDSGGFQVFSLGELRKITEDGVTFASPINGDKLFLSPEVSMQIQKVLNSDIVMQFDECTPYATNGIATSHKDAADSMRMSMRWAKRSIDEFDRLDNPNALFGIVQGGMFEDLRDESLAGLSDIGFHGFAIGGLSVGEPKEDMMRVLNHIGPKLPADKPHYLMGVGTPEDLVAGVAAGVDMFDCVMPTRNARNGWLFTRFGDLKIKNATHKNSLKPLDESCACYTCQNFTRGYLHHLHRVGEILGAQLNTIHNLHYYLQLMSEVRDSIENHTFEAFRKTFAENRARGVD

SEQ ID NO: 53013 - protein, 386 aa, Caballeronia grimmiae
  misc_feature (1)..(386): tr|A0A069P6E2|A0A069P6E2_9BURK Queuine tRNA-ribosyltran sferase OS=Caballeronia grimmiae OX=1071679 GN=tgt PE=3 SV=1
MTENHTPPDNGLKFELLTTDGQARRGRLTLNHGVIETPIFMPVGTYGTVKAIQPRELEEIRAQIILGNTFHLWLRPGLQTIGAHGGLHRFMGWDRPILTDSGGFQVFSLGDLRKITEEGVTFASPINGDRLFLSPEVSMQIQKVLNSDIVMQFDECTPYSTNGVPTSHQDAADSMRMSMRWAKRSIDEFTRLDNPNALFGIVQGGMFEDLRDESLAGLSDIPFHGFAIGGLSVGEPKEDMMRVLNHIGPKLPADKPHYLMGVGTPEDLVAGVAAGVDMFDCVMPTRNARNGWLFTRFGDLKIKNATHRNSMKPLDESCGCYTCQNFTRAYLHHLHRVGEILGAQLNTIHNLHYYLQLIGEVRESIEKHTFEAFRKTFAENRARGVD

SEQ ID NO: 53014 - protein, 386 aa, Caballeronia humi
  misc_feature (1)..(386): tr|A0A158EXJ8|A0A158EXJ8_9BURK Queuine tRNA-ribosyltran sferase OS=Caballeronia humi OX=326474 GN=tgt PE=3 SV=1
MTDGHNPPTNGLKFDLLTTDGQARRGRLTLNHGVVETPIFMPVGTYGTVKAIQPRELEEIRAQIILGNTFHLWLRPGLETIGAHGGLHQFMNWKRPILTDSGGFQVFSLGDLRKITEDGVTFASPINGDKLFLSPEISMQIQKVLNSDIVMQFDECTPYATNGVPTSHKDAADSMRMSMRWAKRSVDEFARLGNPNALFGIVQGGMFEDLRDESLAGLADIGFHGLAIGGLSVGEPKEDMMRVLNHIGPKLPADKPHYLMGVGTPEDLVAGVAAGVDMFDCVMPTRNARNGWLFTRFGDVKIRNATHKNSLKPLDESCGCYTCANFTRGYLHHLHRVGEILGAQLNTIHNLHYYLELMSEVRESIENHTFDTFRKQFHENRARGID

SEQ ID NO: 53015 - protein, 387 aa, Caballeronia hypogeia
  misc_feature (1)..(387): tr|A0A157Z2T9|A0A157Z2T9_9BURK Queuine tRNA-ribosyltran sferase OS=Caballeronia hypogeia OX=1777140 GN=tgt PE=3 SV=1
MTAGHHTPPENGLKFELLTTDGQARRGRLTLNHGVIETPIFMPVGTYGTVKAIQPRELEEIRAQIILGNTFHLWLRPGLEVIGAHGGLHKFMGWNRPILTDSGGFQVFSLGDLRKITEDGVTFASPINGDKLFLSPEVSMQIQKVLNSDIVMQFDECTPYATNGVPTSHKDAADSMRMSMRWAQRSIDEFSRLGNPNALFGIVQGGMFEDLRDESLAGLSDIGFHGFAIGGLSVGEPKEDMMRVLNHIGPKLPADKPHYLMGVGTPEDLVAGVAAGVDMFDCVMPTRNARNGWLFTRFGDLKIKNATHKNSLKPLDESCTCYTCQNFTRGYLHHLHRVGEILGAQLNTIHNLHYYLQLIGEVRESIENHTFDAFRKTFAENRARGVD

SEQ ID NO: 53016 - protein, 386 aa, Caballeronia jiangsuensis
  misc_feature (1)..(386): tr|A0A038H6L4|A0A038H6L4_9BURK Queuine tRNA-ribosyltran sferase OS=Caballeronia jiangsuensis OX=1458357 GN=tgt PE=3 SV=1
MTATHTPPENGLKFELLTTDGQARRGRLTLNHGVVETPIFMPVGTYGTVKAIQPRELEEIRAQIILGNTFHLWLRPGLEVIGAHGGLHKFMGWNRPILTDSGGFQVFSLGELRKITEEGVTFASPINGDKLFLSPEVSMQIQKVLNSDIAMQFDECTPYSTNGIPTSHKDAADSMRMSMRWAKRSIDEFSKLGNPNALFGIVQGGMFEDLRDESLAGLSDIGFHGLAIGGLSVGEPKEDMMRVLNHIGPKLPADKPHYLMGVGTPEDLVAGVAAGVDMFDCVMPTRNARNGWLFTRFGDLKIKNATHKNSMKPLDESCGCYTCRNFTRGYLHHLHRVGEILGAQLNTIHNLHYYLELIGEVRESIENHTFEAFRKTFAENRARGVD

SEQ ID NO: 53017 - protein, 386 aa, Caballeronia megalochromosomata
  misc_feature (1)..(386): tr|A0A149Q024|A0A149Q024_9BURK Queuine tRNA-ribosyltran sferase OS=Caballeronia megalochromosomata OX=1399969 G N=tgt PE=3 SV=1
MTATHTPPENGLKFELLTTDGQARRGRLTLNHGVVETPIFMPVGTYGTVKAIQPRELEEIRAQIILGNTFHLWLRPGLEVIGAHGGLHKFMGWNRPILTDSGGFQVFSLGELRKITEEGVTFASPINGDRLFLSPEVSMQIQKVLNSDIVMQFDECTPYSTNGIPTSHKDAADSMRMSMRWAKRSIDEFNGLGNPNALFGIVQGGMFEDLRDESLAGLSEIGFHGLAIGGLSVGEPKEDMMRVLNHIGPKMPADKPHYLMGVGTPEDLVAGVAAGVDMFDCVMPTRNARNGWLFTRFGDLKIKNATHKNSMKPLDESCGCYTCQNFTRGYLHHLHRVGEILGAQLNTIHNLHYYLQLIGEVRESIENHTFEAFRKTFAENRARGVD

SEQ ID NO: 53018 - protein, 395 aa, Caballeronia mineralivorans
  misc_feature (1)..(395): tr|A0A0J1CQS1|A0A0J1CQS1_9BURK Queuine tRNA-ribosyltran sferase OS=Caballeronia mineralivorans PML1(12) OX=9086 27 GN=tgt PE=3 SV=1
MTEASSAADTIDTTAQPANGLQFELITTDGKARRGRVTLNHGVVETPIFMPVGTYGTVKAVAPRELEEMNAQIILGNTFHLWLRPGLETIAAHGGLHRFMNWQRPILTDSGGFQVFSLGDLRKITEDGVTFASPINGDKLFLSPEISMQIQKVLNSDIVMQFDECTPYATNGVPTPHQDAADSMRMSMRWAKRSVDEFAKGENPNALFGIVQGGMFEDLRDESLAGLADIGFHGFAIGGLSVGEPKEDMMRVLEHIGPKLPADKPHYLMGVGTPEDLVAGVASGVDMFDCVMPTRNARNGWLFTRFGDVKIRNAAHKNSLKPLDETCGCYTCRNFTRGYLHHLHRVGEILGSQLNTIHNLHYYLQLMQEIRDSIENHTFDTFVKQFQENRARGID

SEQ ID NO: 53019 - protein, 386 aa, Caballeronia pedi
  misc_feature (1)..(386): tr|A0A157Z598|A0A157Z598_9BURK Queuine tRNA-ribosyltran sferase OS=Caballeronia pedi OX=1777141 GN=tgt PE=3 SV= 1
MTATHTPPDNGLKFELLTTDGQARRGRLTLNHGVVETPIFMPVGTYGTVKAIQPRELEEIRAQIILGNTFHLWLRPGLEVIGAHGGLHKFMGWNRPILTDSGGFQVFSLGELRKITEEGVTFASPINGDRLFLSPEVSMQIQKVLNSDIVMQFDECTPYSTNGIPTSHKDAADSMRMSMRWAKRSIDEFNGLGNPNALFGIVQGGMFEDLRDESLAGLSEIGFHGLAIGGLSVGEPKEDMMRVLNHIGPKLPADKPHYLMGVGTPEDLVAGVAAGVDMFDCVMPTRNARNGWLFTRFGDLKIKNATHKNSMKPLDESCGCYTCQNFTRGYLHHLHRVGEILGAQLNTIHNLHYYLQLIGEVRESIETHTFEAFRKTFAENRARGVD

SEQ ID NO: 53020 - protein, 386 aa, Caballeronia peredens
  misc_feature (1)..(386): tr|A0A158GAD9|A0A158GAD9_9BURK Queuine tRNA-ribosyltran sferase OS=Caballeronia peredens OX=1777132 GN=tgt PE=3 SV=1
MTATHTAPDNGLKFDLLTTDGQARRGRLTLNHGVVETPIFMPVGTYGTVKAIQPRELEEIRAQIILGNTFHLWLRPGLETIGAHGGLHRFMGWNRPILTDSGGFQVFSLGDLRKITEDGVTFASPINGDKLFLSPEVSMQIQKVLNSDIVMQFDECTPYATNGVPTSHQDAADSMRMSMRWAKRSIDEFGRLGNPNALFGIVQGGMFEDLRDESLAGLSEIGFHGLAIGGLSVGEPKEDMMRVLNHIGPKLPADKPHYLMGVGTPEDLVAGVAAGVDMFDCVMPTRNARNGWLFTRFGDLKIKNATHKNSMKPLDESCGCYTCRNFTRGYLHHLHRVGEILGAQLNTIHNLHYYLQLMSEVRESIETHTFDAFRRSFAENRARGVD

SEQ ID NO: 53021 - protein, 387 aa, Caballeronia ptereochthonis
  misc_feature (1)..(387): tr|A0A158BJW4|A0A158BJW4_9BURK Queuine tRNA-ribosyltran sferase OS=Caballeronia ptereochthonis OX=1777144 GN=tg t PE=3 SV=1
MTAGHPNAPENGLKFELLTTDGQARRGRLTLNHGVVETPIFMPVGTYGTVKAIQPRELEEIRAQIILGNTFHLWLRPGLETIGAHGGLHRFMGWQRPILTDSGGFQVFSLGDLRKITEDGVTFASPINGDKLFLSPEVSMQIQKVLNSDIVMQFDECTPYATSGVPTSHKDAADSMRMSMRWAKRSIDEFNGLGNPNALFGIVQGGMYEDLRDESLAGLSDIGFHGLAIGGLSVGEPKEDMMRVLNHIGPKLPADKPHYLMGVGTPEDLVAGVAAGVDMFDCVMPTRNARNGWLFTRFGDLKIKNATHRNSMKPLDESCGCYTCQNFSRGYLHHLHRVGEILGAQLNTIHNLHYYLQLMSEVRESIENHTFEAFRKTFSENRARGVD

SEQ ID NO: 53022 - protein, 395 aa, Caballeronia sordidicola
  misc_feature (1)..(395): tr|A0A4R1PH97|A0A4R1PH97_9BURK Queuine tRNA-ribosyltran sferase OS=Caballeronia sordidicola OX=196367 GN=tgt PE =3 SV=1
MSETSNPADTIEAPAQPANGLKFELITTDGQARRGRVTLNHGVVETPIFMPVGTYGTVKAVAPRELEEMNAQIILGNTFHLWLRPGLETIVAHGGLHRFMNWQRPILTDSGGFQVFSLGDLRKITEDGVTFASPINGDKLFLSPEISMQIQKVLNSDIVMQFDECTPYATNGVPTPHQDAADSMRMSMRWAKRSVDEFAKGENPNALFGIVQGGMFEDLRDESLAGLADIGFHGFAIGGLSVGEPKEDMMRVLEHIGPKLPADKPHYLMGVGTPEDLVAGVASGVDMFDCVMPTRNARNGWLFTRFGDVKIRNAAHKNSLKPLDETCGCYTCRNFTRGYLHHLHRVGEILGSQLNTIHNLHYYLQLMQEIRDSIENHVFDAFVKQFKEDRARGID

SEQ ID NO: 53023 - protein, 395 aa, Caballeronia sordidicola
  misc_feature (1)..(395): tr|A0A226WLV8|A0A226WLV8_9BURK Queuine tRNA-ribosyltran sferase OS=Caballeronia sordidicola OX=196367 GN=tgt PE =3 SV=1
MTEANNTVDTIDTPARPENGLKFELITTDGQARRGRVTLNHGVVETPIFMPVGTYGTVKAVAPRELEEMNAQIILGNTFHLWLRPGLETIAAHGGLHRFMNWQRPILTDSGGFQVFSLGDLRKITEDGVTFASPINGDKLFLSPEISMQIQKVLNSDIVMQFDECTPYATNDVPTPHQDAADSMRMSMRWAKRSVDEFAKGENPNALFGIVQGGMFEDLRDESLAGLADIGFHGFAIGGLSVGEPKEDMMRVLEHIGPKLPADKPHYLMGVGTPEDLVAGVASGVDMFDCVMPTRNARNGWLFTRFGDVKIRNAAHKNSLKPLDETCACYTCRNFTRGYLHHLHRVGEILGSQLNTIHNLHYYLQLMQEIRDSIENHAFDAFVKQFKEDRARGID

SEQ ID NO: 53024 - protein, 386 aa, Caballeronia telluris
  misc_feature (1)..(386): tr|A0A158K401|A0A158K401_9BURK Queuine tRNA-ribosyltran sferase OS=Caballeronia telluris OX=326475 GN=tgt PE=3 SV=1
MTDGHHPPENGLKFDLLTTDGQARRGRLTLNHGVVETPIFMPVGTYGTVKAIQPRELEEIRAQIILGNTFHLWLRPGLETIGAHGGLHQFMNWKRPILTDSGGFQVFSLGDLRKITEDGVTFASPINGDKLFLSPEISMQIQKVLNSDVVMQFDECTPYATNGVPTSHQDAADSMRMSMRWAKRSIDEFGRLGNPNALFGIVQGGMFEDLRDESLAGLADIGFHGLAIGGLSVGEPKEDMMRVLNHIGPKLPADKPHYLMGVGTPEDLVAGVAAGVDMFDCVMPTRNARNGWLFTRFGDVKIRNATHKSSLKPLDETCGCYTCANFTRGYLHHLHRVGEILGAQLNTIHNLHYYLQLMAEVRESIENHTFDTFRKQFHENRARGIE

SEQ ID NO: 53025 - protein, 386 aa, Caballeronia temeraria
  misc_feature (1)..(386): tr|A0A158B6E8|A0A158B6E8_9BURK Queuine tRNA-ribosyltran sferase OS=Caballeronia temeraria OX=1777137 GN=tgt PE= 3 SV=1
MTTTHTPPDNGLKFELLTTDGQARRGRLTLNHGVVETPIFMPVGTYGTVKAIQPRELEEVRAQIILGNTFHLWLRPGLEVIGAHGGLHKFMGWNRPILTDSGGFQVFSLGELRKITEEGVTFASPINGDRLFLSPEVSMQIQKVLNSDIVMQFDECTPYSTNGIPTSHKDAADSMRMSMRWAKRSIDEFNGLGNPNALFGIVQGGMFEDLRDESLAGLSEIGFHGLAIGGLSVGEPKEDMMRVLNHIGPKLPADKPHYLMGVGTPEDLVAGVAAGVDMFDCVMPTRNARNGWLFTRFGDLKIKNATHKNSMKPLDGSCTCYTCQNFTRGYLHHLHRVGEILGAQLNTIHNLHYYLQLIGEVRESIETHTFEAFRKTFAENRARGVD

SEQ ID NO: 53026 - protein, 386 aa, Caballeronia terrestris
  misc_feature (1)..(386): tr|A0A158JWP5|A0A158JWP5_9BURK Queuine tRNA-ribosyltran sferase OS=Caballeronia terrestris OX=1226301 GN=tgt PE =3 SV=1
MTDGHNPPANGLKFDLLTTDGQARRGRLTLNHGVVETPIFMPVGTYGTVKAIQPRELEEIKAQIILGNTFHLWLRPGLETIGAHGGLHQFMNWKRPILTDSGGFQVFSLGDLRKITEDGVTFASPINGDKLFLSPEISMQIQKVLNSDIVMQFDECTPYATNGVPTSHKDAADSMRMSMRWAKRSVDEFSRLGNPNALFGIVQGGMFEDLRDESLAGLADIGFHGLAIGGLSVGEPKDDMMRVLNHIGPKLPADKPHYLMGVGTPEDLVAGVAAGVDMFDCVMPTRNARNGWLFTRFGDVKIRNATHKSALKPLDETCGCYTCANFTRGYLHHLHRVGEILGAQLNTIHNLHYYLQLMSEVRESIENHTFDTFRKQFHENRARGID

SEQ ID NO: 53027 - protein, 386 aa, Caballeronia turbans
  misc_feature (1)..(386): tr|A0A158G9M3|A0A158G9M3_9BURK Queuine tRNA-ribosyltran sferase OS=Caballeronia turbans OX=1777134 GN=tgt PE=3 SV=1
MTANHTPPENGLKFELLTTDGQARRGRLTLNHGVVETPIFMPVGTYGTVKAIQPRELEELRAQIILGNTFHLWLRPGLEVIGAHGGLHKFMGWNRPILTDSGGFQVFSLGELRKITEEGVTFASPINGDRLFLSPEVSMQIQKVLNSDIVMQFDECTPYSTNGIPTSHKDAADSMRMSMRWAKRSIDEFNRLGNPNALFGIVQGGMFEDLRDESLAGLSEIGFHGLAIGGLSVGEPKEDMMRVLNHIGPKLPADKPHYLMGVGTPEDLVAGVAAGVDMFDCVMPTRNARNGWLFTRFGDLKIKNATHKNSMKPLDESCGCYTCQNFTRGYLHHLHRVGEILGAQLNTIHNLHYYLQLIGEVRASIENHSFEAFRKTFAENRARGVD

SEQ ID NO: 53028 - protein, 394 aa, Caballeronia udeis
  misc_feature (1)..(394): tr|A0A3M0VDS3|A0A3M0VDS3_9BURK Queuine tRNA-ribosyltran sferase OS=Caballeronia udeis OX=1232866 GN=tgt PE=3 SV =1
MTEPNAADTIDATAQPANGLRFELITTDGKARRGRVRLNHGVVETPIFMPVGTYGTVKAVAPRELKEMNAQIILGNTFHLWLRPGLDTIAAHGGLHRFMNWQRPILTDSGGFQVFSLGDLRKITEDGVTFASPINGDKLFLSPEISMQIQKVLNSDIVMQFDECTPYATNGVPTPHQDTADSMRMSMRWAKRSVDEFAKGENPNALFGIVQGGMFEDLRDESLAGLADIGFHGFAIGGLSVGEPKEDMMRVLEHIGPKLPADKPHYLMGVGTPEDLVAGVASGVDMFDCVMPTRNARNGWLFTRFGDVKIRNAAHKNSLKPLDETCDCYTCRNFTRGYLHHLHRVGEILGSQLNTIHNLHYYLQLMQEIRDSIENHTFDTFVKQFQENRARGID

SEQ ID NO: 53029 - protein, 395 aa, Caballeronia udeis
  misc_feature (1)..(395): tr|A0A158JEP4|A0A158JEP4_9BURK Queuine tRNA-ribosyltran sferase OS=Caballeronia udeis OX=1232866 GN=tgt PE=3 SV =1
MSETSNPADTIEAPARPANGLKFELITTDGQARRGRVTLNHGVVETPIFMPVGTYGTVKAVAPRELEEMNAQIILGNTFHLWLRPGLETIAAHGGLHRFMNWQRPILTDSGGFQVFSLGDLRKITEDGVTFASPINGDKLFLSPEISMQIQKVLNSDIVMQFDECTPYATNGVPTPHQDAADSMRMSMRWAKRSVDEFAKGENPNALFGIVQGGMFEDLRDESLAGLADIGFHGFAIGGLSVGEPKEDMMRVLEHIGPKLPADKPHYLMGVGTPEDLVAGVASGVDMFDCVMPTRNARNGWLFTRFGDVKIRNAAHKNSLKPLDETCGCYTCRNFTRGYLHHLHRVGEILGSQLNTIHNLHYYLQLMQEIRDSIENHAFDAFVKQFKEDRARGID

SEQ ID NO: 53030 - protein, 401 aa, Caedibacter sp.
  misc_feature (1)..(401): tr|A0A1M3ITJ1|A0A1M3ITJ1_9PROT Queuine tRNA-ribosyltran sferase OS=Caedibacter sp. 37-49 OX=1895735 GN=tgt PE=3 SV=1
MLPYPNFQFDILKPSHNSKARLGRLMTPHGIVNTPAFIFCATKAAIKGATPNQVNEVDTQIILSNTYHLMLQPGGEIIEKQGGLHRFMGWNKPMLTDSGGFQIFSLGHGSVASEIKGKRLTTRPKTLLKITEEGAKFKSYIDGRMHLLTPERSIQVQRQLGADLIVVLDECTPFHVDKTYTQRSMQLSHRWALRSLSEFQRTDNQKQALYGIIQGGVYTDLRSESSKFVNDQPFFGHAVGGSLGASKEQMHDIVALTMSLLNPERPVHLLGIGGVSDIFNGVRQGIDTFDCVHPTRLARHGGALIQPSFWDNEDGQGGEHINLRNARFREDSKPIDETCPCPTCKTFSRSYLHHLLRAQEILALQAITIHNISFMNRLLTAIREAIAQDQLESEEKNWVFK

SEQ ID NO: 53031 - protein, 404 aa, Caedibacter sp.
  misc_feature (1)..(404): tr|A0A1M3IL74|A0A1M3IL74_9PROT Queuine tRNA-ribosyltran sferase OS=Caedibacter sp. 38-128 OX=1895736 GN=tgt PE= 3 SV=1
MSHYPNFQFEIHKTSKNSKARLGRLVTPRGIVETPAFIFCATKAAIKGATPQQIDEANTQIILSNTYHLMLQPGGEIIERQGGLHRFMGWNKPMLTDSGGFQIFSLGHGSVASEIKGKRLTKRPKTLLKITEEGAQFKSYIDGRMHLLTPERSIQVQRQLGADLIVVLDECTPFHVDKIYTQRSMQLSHRWALRSLAEFQRTDNQRQALYGIIQGGVYDDLRKESSQFVNDHSFFGHAVGGSLGASKDQMHDIVALTMSLLNPERPVHLLGIGGVSDIFNGVRQGIDTFDCVHPTRLARHGGALVQPSFWHKNDGKGGEHINLRNAHFREDSKPIDETCPCATCKTFSRSYLHHLLKAQEILALQAITIHNIAFMNRLLRAIREAISLDQLDEEEKNWVFKEST

SEQ ID NO: 53032 - protein, 401 aa, Caedimonas varicaedens
  misc_feature (1)..(401): tr|A0A0K8MFV7|A0A0K8MFV7_9PROT Queuine tRNA-ribosyltran sferase OS=Caedimonas varicaedens OX=1629334 GN=tgt PE= 3 SV=1
MSLYPKFSFNITHRSAVSGARAGLLKTPHGTIETPAFIFCATKGAIKGAFPREMKAAGTQIILSNTYHMMLQPGSELVEKMGGLHKFIGWDGPMLTDSGGYQIFSLGHGSVASEIKGKRVTHRPKTMLKITEEGARFKSYINGQIFLLTPERSLEIQRQLGADLIVVLDECTPFHVDKSYTECSMHLSHRWALRSLAEFQRGNDGRQALYGIIQGGIYEDLRRQGAEFVNHHPFFGHAVGGSLGASKEQMHDIVGLTLKMLDPERPVHLLGIGGISDIFNGVEQGIDTFDCVHPTRLARHGGALVTADHWMRYEGKGGEHINLRNKIYREDSRPIDESCGCHSCQNFSRAYLHHLLKAQEMLALQALTIHNVYFMNELLKNIREAIRTDTLDIQKKKWAGV

SEQ ID NO: 53033 - protein, 386 aa, Caenimonas sp.
  misc_feature (1)..(386): tr|A0A562ZMD1|A0A562ZMD1_9BURK Queuine tRNA-ribosyltran sferase OS=Caenimonas sp. HX-9-20 OX=2596921 GN=tgt PE= 3 SV=1
MLHFDLLKTEGHARRGRLTLNHGVVETPIFMPVGTYGTVKGVMPRSLEEMGAQIILGNTFHLWMRPGLDVLKQFGGLHRFENWTRPILTDSGGFQVWSLGEMRKIAEEGVNFASPVNGDKLFLTPEISMQIQTALNSDIVMQFDECTPYDTKGHITTEDEARFSMELSRRWALRCKAEFERLANPNALFGIVQGGMFESLREESLQALVEMDFPGYAVGGVSVGEPKEEMLRIMAHTPHRLPANKPRYLMGVGTPEDLVEGVAQGVDMFDCVMPTRNARNGHLFTRFGDLKIRNAKHRSDERPLDETCGCYTCRGHTRADGSVQGGFSRAYLHHLERCGEMLGPMLATIHNLHYYLNLMREVREALDQGTFAAFTQRFREDRRRGV

SEQ ID NO: 53034 - protein, 377 aa, Caenispirillum bisanense
  misc_feature (1)..(377): tr|A0A286GY41|A0A286GY41_9PROT Queuine tRNA-ribosyltran sferase OS=Caenispirillum bisanense OX=414052 GN=tgt PE =3 SV=1
MTHVFRYELLKTDGAARLGRVHTAHGTIDTPAFMPVGTAATVKAMRPEEVRATGAQIILGNTYHLMLRPTAERVAALGGLRNFMNWRGPILTDSGGFQVMSLAKLRKLTEDGVTFQSHVDGSRHHLTPERSIEIQHLLDATITMAFDECTPFPATHEQAAESMRLSMRWAERSRKAFVARPGYGQFGIVQGSVFEDLRRESVEALNALDYEGYAVGGLAVGEGQEAMFSTLEFTTPLMPQHKPRYLMGVGKPADLVGAVMRGIDMFDCVLPTRSGRTAQAFTRRGTVNLRNARHSDDPRPLDAECSCAACRQYSRAYLHHLIRCEEILGMMLLTQHNLQYYQDLMRGIRGAIQEGRLAEFAARFDEDQARGDIAPLA

SEQ ID NO: 53035 - protein, 378 aa, Caenispirillum salinarum
  misc_feature (1)..(378): tr|K9GYS0|K9GYS0_9PROT Queuine tRNA-ribosyltransferase OS=Caenispirillum salinarum AK4 OX=1238182 GN=tgt PE=3 SV=1
MTHVFRYERLATDGPARLGRVHTAHGIVDTPAFMPVGTAATVKAQRPEEVRATGAQIILGNTYHLMLRPTAERVAKLGGLRNFMNWRGPILTDSGGFQVMSLAKLRKMTEEGVTFQSHIDGTKHHLTPERSIEIQHLLDATITMAFDECTPYPASHEQAAESMRLSMRWAERSRKAFVARPGYGQFGIVQGSVYEDLRRESVEALAGMDYEGYAVGGLAVGEGQELMFQTLDFTCPMMPEDKPRYLMGVGKPADIVGAVARGIDMFDCVLPTRSGRTAQAFTRRGTVNLRNARHAEDPRPLDADCACAACRQYSRAYLHHLIRCDEILGLMLLTGHNLQYYQDLMRSLRGAIGDGRLGDFIARFEEDQARGDIAPLED

SEQ ID NO: 53036 - protein, 378 aa, Caldalkalibacillus thermarum
  misc_feature (1)..(378): tr|F5LAQ5|F5LAQ5_CALTT Queuine tRNA-ribosyltransferase OS=Caldalkalibacillus thermarum (strain TA2.A1) OX=9860 75 GN=tgt PE=3 SV=1
MAVRYELIKTCKQSGARLGRLHTPHGTIETPVFMPVGTLATVKTMSPEELKEMNAQIILSNTYHLYLRPGEDIVREAGGLHAFMNWDRPILTDSGGFQVFSLSKLRHIEEEGVHFRNHISGEKLFISPEKATQIQNDLGADIIMAFDECAPYPADRDYVKASLERTTRWAERCLKAHQRPHDQALFGIVQGGMYPDLRAQSVKEITSLGFPGYAVGGLSVGEPKEVMNQILEETTPLLPADKPRYLMGVGSPDALIDGVIRGIDMFDCVLPTRIARNGTTMTSQGRLVVRNAQYARDFRPLDPECDCYTCRNYTRAYIRHLIKCNETFGFRLTTYHNLYFLLRLMENIKEAIRNDSLLDFREQFFEKYGFNRPGARPF

SEQ ID NO: 53037 - protein, 375 aa, Caldanaerobacter subterraneus
  misc_feature (1)..(375): sp|Q8RAM9|TGT_CALS4 Queuine tRNA-ribosyltransferase OS= Caldanaerobacter subterraneus subsp. tengcongensis (str ain DSM 15242 / JCM 11007 / NBRC 100824 / MB4) OX=27306 8 GN=tgt PE=3 SV=1
MAAIKYQVIKKDARTKARLGILETPHGVIETPVFMPVGTQATVKAMTPDELKEMGATIILGNTYHLYLRPGHKIIEKAGGLHKFMNWDRAILTDSGGFQVFSLSSLRKITEDGVEFRSHIDGSKHFFTPEKVIEIQNSLGSDIIMSFDECAPYPADYDYVKRSMELTIKWAKRGKKAHKNTDRQALFGIVQGGTYKDLRRECAERLVDMDFPGYAIGGLSVGEPKDLMYEIIDFTTDYLPHDKPRYLMGVGTPEDLIEGVIRGVDMFDCVLPTRIARNGTVFTSRGKLIVRDAPYAEDFSPLDEECDCYTCKNYSRAYLRHLFKAKEILAARLATYHNLYFLIKLMEKIREAIRQDRLLEFKEEFLKKYYGNREE

SEQ ID NO: 53038 - protein, 375 aa, Caldanaerobacter subterraneus
  misc_feature (1)..(375): tr|U5CQC1|U5CQC1_CALSX Queuine tRNA-ribosyltransferase OS=Caldanaerobacter subterraneus subsp. yonseiensis KB- 1 OX=1388761 GN=tgt PE=3 SV=1
MAAIKYRVIKKDARTKARLGILETPHGVIETPVFMPVGTQATVKAMTPDELKEMGATIILGNTYHLYLRPGHKIIEKAGGLHKFMNWDKAILTDSGGFQVFSLSSLRKITEDGVEFRSHIDGSKHFFTPEKVIEIQNSLGSDIIMSFDECAPYPADYDYVKRSMELTIKWAERGKKAHKNTDRQALFGIVQGGTYKDLRRECAERLVDMDFPGYAIGGLSVGEPKDLMYEIIDFTTDYLPHDKPRYLMGVGTPEDLIEGVIRGVDMFDCVLPTRIARNGTVFTSRGKLIVRDAPYAEDFSPLDEECDCYTCKNYSRAYLRHLFKAKEILAARLATYHNLYFLIKLMEKIREAIRQDRLLEFKEEFLKKYYGNREE

SEQ ID NO: 53039 - protein, 371 aa, Caldanaerobius fijiensis
  misc_feature (1)..(371): tr|A0A1M4TXN1|A0A1M4TXN1_9THEO Queuine tRNA-ribosyltran sferase OS=Caldanaerobius fijiensis DSM 17918 OX=112125 6 GN=tgt PE=3 SV=1
MLKFEVHKREKNTMARLGLLQTSHGTIETPVFMPVGTQATVKAMTPDELKDIGAKIILSNTYHLYLRPGHELIEKAGGLHKFMSWNGSILTDSGGFQIFSLNKLRNISEDGVEFISHLDGSRHFIGPEENMRIQNALGADIIMAFDECVPYPADYDYVKNSMELTLKWAKRCKESHKRPDEQALFGIVQGGTYRDLREESARRTVDLDFPGYAIGGLSVGEEKELMYEVIEYTTPLLPFDKPRYLMGVGSPDALIEGVIRGIDMFDCVLPTRIARNGTVMTSHGKLVIRNAEYAEDFRPLDEECDCYACRNFSRAYIRHLFKAGEILAARLATIHNLYFLMKLMEKIRQAIKEDRLLEFRKEFFTKYGYVY

SEQ ID NO: 53040 - protein, 369 aa, Caldanaerovirga acetigignens
  misc_feature (1)..(369): tr|A0A1M7JKD6|A0A1M7JKD6_9FIRM Queuine tRNA-ribosyltran sferase OS=Caldanaerovirga acetigignens OX=447595 GN=tg t PE=3 SV=1
MMKFSIIKSSHQCMARIGYLETLHGVIKTPVFMPVGTQATVKTMTPEELEQIGAKIILSNTYHLYLRPGHELIEEAGGLHKFMNWKGSILTDSGGYQVFSLGELREIKEEGVTFRSHLDGSLHFISPEMSIEIQNSLGADIIMAFDECIPYPATYEYAKNSVERTTRWAERCKKHHKRDDQALFGIVQGGLYRDLREKSAKDLVAMDFEGYAVGGLSVGEPKECMYEVLDYVVPLLPEEKPRYLMGVGSPDSIFEGIQRGIDMFDCVLPTRIARHGTVFTARGKLVVRNAAYAKDFSPLDPECDCYVCKNYTRAYIRHLLNAGEILGLRLTTYHNLYFLLRLVEKVREAIEGDYFFDLKEEFFSKYGYS

SEQ ID NO: 53041 - protein, 380 aa, Calderihabitans maritimus
  misc_feature (1)..(380): tr|A0A1Z5HT42|A0A1Z5HT42_9THEO Queuine tRNA-ribosyltran sferase OS=Calderihabitans maritimus OX=1246530 GN=tgt PE=3 SV=1
MTIAFEVIKECKDTRARVGRLYTPHGVVDTPVFMPVGTQATVKAMSPEELEEIGAQIILSNTYHLYLRPGAEIIKEAGGLHRFMHWNHPILTDSGGFQVFSLADLRQINDEGVTFRSHIDGSSHFLSPEKATEIQMALGSDIAMCFDECPPYPASYEQVEKAVKRTSSWAERCLEAHRREDQALFGIVQGGVFRDLRERSAAELTALDFPGYAIGGLSVGEPKRLMYEVLDYTVPLLPASKPRYLMGVGTPDALLEGVKKGVDMFDCVLPTRVARNGLALTSSGKVVVRNARYARDYEPLDPECDCYVCRNYTRAYIRHLLKANEILGLRLTTYHNLYFLIRLMAKIRTAVMEGYFLKFAEEFMAKYLEKEVSSGECRNQ

SEQ ID NO: 53042 - protein, 381 aa, Caldibacillus debilis
  misc_feature (1)..(381): tr|A0A3E0K0I3|A0A3E0K0I3_9BACI Queuine tRNA-ribosyltran sferase OS=Caldibacillus debilis OX=301148 GN=tgt PE=3 SV=1
MHLAPIRFELIKVCKQTGARLGILHTPHGSFETPMFMPVGTLATVKTMSPEDLKELGAGIILSNTYHLWLRPGHEIVEEAGGLHAFMNWDRGILTDSGGFQVFSLSDLRQIDEEGVHFRSHLNGDKLFLSPEKATEIQNALGADIIMAFDECPPYPCDYDYMKKSVERTSRWAERCLKAHKKPDWQGMFGIVQGGAYEDLRKQSAADLVSLDFPGYAIGGLSVGEPKEVMNRMLEFTAPLLPADKPRYLMGVGSPDSLVDGAIRGIDMFDCVLPTRIARNGTLLTSSGRLVVKNAQYRRDFRPPDEACDCYVCKNYTRAYLRHLIHANEILGFRLATYHNLYFLLKLMEQVRQAIREDRLADFREQFFDQYGYNKPDAKNF

SEQ ID NO: 53043 - protein, 381 aa, Caldibacillus debilis
  misc_feature (1)..(381): tr|A0A420VC11|A0A420VC11_9BACI Queuine tRNA-ribosyltran sferase OS=Caldibacillus debilis GB1 OX=1339248 GN=tgt PE=3 SV=1
MHLAPIRFELIKVCKQTGARLGILHTPHGSFETPMFMPVGTLATVKTMSPEDLKELGAGIILSNTYHLWLRPGHEIVEEAGGLHAFMNWDRGILTDSGGFQVFSLSDLRQIDEEGVHFRSHLNGDKLFLSPEKATEIQNALGADIIMAFDECPPYPCDYDYMKKSVERTSRWAERCLKAHKKPDRQGMFGIVQGGAYEDLRKQSAADLVSLDFPGYAIGGLSVGEPKEVMNRMLEFTAPLLPADKPRYLMGVGSPDSLVDGAIRGIDMFDCVLPTRIARNGTLLTSSGRLVVKNAQYRRDFRPPDEACDCYVCKNYTRAYLRHLIHANEILGFRLATYHNLYFLLKLMEQVRQAIREDRLADFREQFFDQYGYNKPDAKNF

SEQ ID NO: 53044 - protein, 357 aa, Caldicellulosiruptor bescii
  misc_feature (1)..(357): tr|B9MN60|B9MN60_CALBD Queuine tRNA-ribosyltransferase OS=Caldicellulosiruptor bescii (strain ATCC BAA-1888 / DSM 6725 / Z-1320) OX=521460 GN=tgt PE=3 SV=1
MAIKFELIKKSKKSNARRGRLYTPHGVIETPVFMPVGTQATVKAIMHRDLYEMGAQIILANTYHLYLRPGIDVIKEAGGLHRFMNWQKPILTDSGGFQVFSLSRLRTITDDGVEFRSHIDGSRHFFTPEKVIEIQNILGADIIMAFDECVPYPCDHEYAKWALERTARWLKRCKAHHKNTENQALFGIVQGSTYKDLRIESAKRTVEEDLPGYAIGGLSVGEPKELMYEMIEVLHPILPEDRPRYLMGVGTPDCLYESVIRGVDMFDCVFATRTARNGTVFTKEGRMIIKNAQYAKDFRPIEEDCDCYTCQNFTRAYLRHLIKSEEILGAILLSIHNVRFLLRFMEKLRKDIEEDRI

SEQ ID NO: 53045 - protein, 357 aa, Caldicellulosiruptor changbaiensis
  misc_feature (1)..(357): tr|A0A3T0D2G2|A0A3T0D2G2_9FIRM Queuine tRNA-ribosyltran sferase OS=Caldicellulosiruptor changbaiensis OX=122201 6 GN=tgt PE=3 SV=1
MAIKFELIKKSKKSNARRGRLYTPHGVIETPVFMPVGTQATVKAIMHRDLYEMGTQIILANTYHLYLRPGIDVIKEAGGLHKFMNWQKPILTDSGGFQVFSLSKLRTITDDGVEFRSHIDGSRHFFTPEKVIEIQNILGSDIIMAFDECVPYPCDHEYAKWAVERTARWLKRCKAHHKNTENQALFGIVQGSTYKDLRIESAKRTVEEDLPGYAIGGLSVGEPKELMYEMIEVLHPILPEDRPRYLMGVGTPDCLYESVIRGVDMFDCVFATRTARNGTVFTKEGRMIIKNAQYAKDFRPIEEDCDCYTCQNFTRAYLRHLIKAEEILGAILLSIHNVRFLLRFMEKLRKDIEEDRI

SEQ ID NO: 53046 - protein, 357 aa, Caldicellulosiruptor hydrothermalis
  misc_feature (1)..(357): tr|E4Q8D0|E4Q8D0_CALH1 Queuine tRNA-ribosyltransferase OS=Caldicellulosiruptor hydrothermalis (strain DSM 1890 1 / VKM B-2411 / 108) OX=632292 GN=tgt PE=3 SV=1
MAIKFELIKKSKKSNARRGRLYTPHGVIETPVFMPVGTQATVKAIMHRDLYEMGTQIILANTYHLYLRPGIDVIKEAGGLHKFMNWQKPILTDSGGFQVFSLSKLRTITEDGVEFRSHIDGSRHFFTPEKVIEIQNILGSDIIMAFDECVPYPCDHEYAKWALERTARWLKRCKAHHKNTENQALFGIVQGSTYKDLRIESAKRTVEEDLPGYAIGGLSVGEPKELMYEMIEVLHPILPEDRPRYLMGVGTPDCLYESVIRGVDMFDCVFATRTARNGTVFTKEGRMIIKNAQYAKDFRPIEEDCDCYTCQNFTRAYLRHLIKAEEILGAILLSIHNVRFLLRFMEKLRKDIEEDRI

SEQ ID NO: 53047 - protein, 357 aa, Caldicellulosiruptor kristjanssonii
  misc_feature (1)..(357): tr|E4S840|E4S840_CALKI Queuine tRNA-ribosyltransferase OS=Caldicellulosiruptor kristjanssonii (strain ATCC 700 853 / DSM 12137 / I77R1B) OX=632335 GN=tgt PE=3 SV=1
MAIKFELIKKSKKSNARRGRLYTPHGVIETPVFMPVGTQATVKAIMHRDLYEMGTQIILANTYHLYLRPGIDVIKEAGGLHKFMNWQKPILTDSGGFQVFSLSKLRTITEDGVEFRSHIDGSRHFFTPERVIEIQNILGSDIIMAFDECVPYPVDHEYAKWAVERTARWLKRCKAHHKNTENQALFGIVQGSTYKDLRIESAKRTVEEDLPGYAIGGLSVGEPKELMYEMIEVLHPILPEDRPRYLMGVGTPDCLYESVIRGVDMFDCVFATRTARNGTVFTKEGRMIIKNAQYAKDFRPIEEDCDCYTCQNFTRAYLRHLIKAEEILGAILLSIHNVRFLLRFMEKLRKDIEEDRI

SEQ ID NO: 53048 - protein, 357 aa, Caldicellulosiruptor kronotskyensis
  misc_feature (1)..(357): tr|E4SH61|E4SH61_CALK2 Queuine tRNA-ribosyltransferase OS=Caldicellulosiruptor kronotskyensis (strain DSM 1890 2 / VKM B-2412 / 2002) OX=632348 GN=tgt PE=3 SV=1
MAIKFELIKKSKKSNARRGRLYTPHGVIETPVFMPVGTQATVKAIMHRDLYEMGTQIILANTYHLYLRPGIDVIKEAGGLHSFMNWQKPILTDSGGFQVFSLSKLRTITEDGVEFRSHIDGSRHFFTPEKVIEIQNILGSDIIMAFDECVPYPCDHEYAKWALERTARWLKRCKAHHKNTENQALFGIIQGSTYKDLRIESAKRTIEEDLPGYAIGGLSVGEPKELMYEMIEVLHPILPEDRPRYLMGVGTPDCLYESVIRGVDMFDCVFATRTARNGTVFTKEGRMIIKNAQYAKDFRPIEEDCDCYTCQNFTRAYLRHLIKAEEILGAILLSIHNVRFLLRFMEKLRKDIEEDRI

SEQ ID NO: 53049 - protein, 357 aa, Caldicellulosiruptor lactoaceticus; identical to SEQ ID NO: 53047
  misc_feature (1)..(357): tr|G2PVJ6|G2PVJ6_9FIRM Queuine tRNA-ribosyltransferase OS=Caldicellulosiruptor lactoaceticus 6A OX=632516 GN=t gt PE=3 SV=1

SEQ ID NO: 53050 - protein, 357 aa, Caldicellulosiruptor obsidiansis
  misc_feature (1)..(357): tr|D9TI49|D9TI49_CALOO Queuine tRNA-ribosyltransferase OS=Caldicellulosiruptor obsidiansis (strain ATCC BAA-20 73 / strain OB47) OX=608506 GN=tgt PE=3 SV=1
MAIKFELIKKSKKSNARRGRLYTPHGVIETPVFMPVGTQATVKAIMHRDLYEMGTQIILANTYHLYLRPGVDVIKEAGGLHKFMNWQKPILTDSGGFQVFSLSKLRTITEDGVEFRSHIDGSRHFFTPEKVIEIQNILGSDIIMAFDECVPYPVDHEYAKWAVERTARWLKRCKAHHKNTENQALFGIVQGSTYKDLRIESAKRTVEEDLPGYAIGGLSVGEPKQLMYEMIEVLHPILPEDKPRYLMGVGTPDCLYESVIRGVDMFDCVFATRTARNGTVFTKEGRMIIKNAQYAKDFRPIEEDCDCYTCQNFTRAYLRHLIKAEEILGAILLSIHNVRFLLRFMEKLRKDIEEDRI

SEQ ID NO: 53051 - protein, 357 aa, Caldicellulosiruptor owensensis
  misc_feature (1)..(357): tr|E4Q312|E4Q312_CALOW Queuine tRNA-ribosyltransferase OS=Caldicellulosiruptor owensensis (strain ATCC 700167 / DSM 13100 / OL) OX=632518 GN=tgt PE=3 SV=1
MAIKFELIKKSKKSNARRGRLYTPHGVIETPVFMPVGTQATVKAIMHRDLYEMGTQIILANTYHLYLRPGIDVIKEAGGLHRFMNWQKPILTDSGGFQVFSLSKLRKITDDGVEFRSHIDGSRHFFTPEKVIEIQNILGSDIIMAFDECVPYPVDHEYAKWAVERTARWLKRCKAHHKNTENQALFGIVQGSTYKDLRIESAKRTVEEDLPGYAIGGLSVGEPKERMYEMIEVLHPFLPEDKPRYLMGVGTPDCLYESVIRGVDMFDCVFATRTARNGTVFTKEGRMIIKNAQYAKDFRPIEEDCDCYTCQNFTRAYLRHLIKAEEILGAILLSIHNVRFLLRFMEKLRKDIEEDRI

SEQ ID NO: 53052 - protein, 357 aa, Caldicellulosiruptor saccharolyticus
  misc_feature (1)..(357): tr|A4XG69|A4XG69_CALS8 Queuine tRNA-ribosyltransferase OS=Caldicellulosiruptor saccharolyticus (strain ATCC 43 494 / DSM 8903 / Tp8T 6331) OX=351627 GN=tgt PE=3 SV=1
MAIKFELIKKSKKSNARRGRLYTPHGVIETPVFMPVGTQATVKAIMHRDLYEMGTQIILANTYHLYLRPGIDVIKEAGGLHKFMNWQKPILTDSGGFQVFSLSKLRTITDDGVEFRSHIDGSRHFFTPEKVIEIQNILGSDIIMAFDECVPYPCDHEYAKWALERTARWLKRCKTHHKNTENQALFGIVQGSTYKDLRIESAKRTVEEDLPGYAIGGLSVGEPKELMYEMIEVLHPILPEDRPRYLMGVGTPDCLYESVIRGVDMFDCVFATRTARNGTVFTKEGRMIIKNAQYAKDFRPIEEDCDCYTCQNFTRAYLRHLIKTEEILGAILLSIHNVRFLLRFMEKLRKDIEEDRI

SEQ ID NO: 53053 - protein, 373 aa, Caldicoprobacter faecalis
  misc_feature (1)..(373): tr|A0A1I5VJ87|A0A1I5VJ87_9FIRM Queuine tRNA-ribosyltran sferase OS=Caldicoprobacter faecalis OX=937334 GN=tgt P E=3 SV=1
MSFKFEVIKECSKTGARLGRIYTPHGSFETPIFMPVGTQATVKALTPRDLKEINAQIILANTYHLYLRPGYELIRQAGGLHKFMNWDRPILTDSGGFQVFSLADLREITDEGVYFRSHLDGSKHFISPEKAIEIENALGADIIMAFDECVPYPCDYETAKDAVERTSRWARRCKAAHQREDQALFGIIQGSVFRDLRMRSLEQLLELDFPGYGIGGLSVGEPKPVMYEILEHMIPAMPKDKPRYLMGVGSPDCLIEGVIRGVDMFDCVLPTRTARTGLAMTSRGKVMLRNAPYQRDFSPLDPECDCYTCQNFSRAYLRHLVKAREILAAILISLHNVRFLIRLMEEIREAIRNDRLLEYRDSFFEKYGYNNKE

SEQ ID NO: 53054 - protein, 373 aa, Caldicoprobacter oshimai
  misc_feature (1)..(373): tr|A0A2W4KPG5|A0A2W4KPG5_9FIRM Queuine tRNA-ribosyltran sferase OS=Caldicoprobacter oshimai OX=551788 GN=tgt PE =3 SV=1
MSFKFEVIKECSKTGARLGRIYTPHGSFETPIFMPVGTQATVKALTPRDLKEINAQIILANTYHLYLRPGYELIRQAGGLHKFMNWDRPILTDSGGFQVFSLADLREITDEGVYFRSHLDGSKHFISPEKAIEIENALGADIIMAFDECVPYPCDYETAKDAVERTSRWARRCKAAHQREDQALFGIIQGSVFRDLRMRSLEQLLELDFPGYGIGGLSVGEPKPVMYEILEHMIPAMPKDKPRYLMGVGSPDCLIEGVIRGVDMFDCVLPTRTARTGLAMTSRGKVMLRNAPYQRDFSPLDPECDCYTCKNFSRAYLRHLVKAREILAAILISLHNVRFLIRLMEEIREAIRNDCLLEYRDSFFEKYGYNNKE

SEQ ID NO: 53055 - protein, 386 aa, Caldilinea aerophila
  misc_feature (1)..(386): tr|I0I5G3|I0I5G3_CALAS Queuine tRNA-ribosyltransferase OS=Caldilinea aerophila (strain DSM 14535 / JCM 11387 / NBRC 104270 / STL-6-O1) OX=926550 GN=tgt PE=3 SV=1
MTFHFDLLCQDGQARRGVFHTPHGPIQMPAFAPVGTQANVKTLEPRDLHEAGAELILANTYHLYLRPGHRLIERMGGLHAFMAWDRPILTDSGGYQVFSLADSRKLNEEGVLFRSHIDGSLHHFTPEKVMEIEQALGADIAMVLDECPPPLDRAYNEEALARTHRWAERCKAAHCRKDQALFGIVQGGIFEDLRLQSVEFLCQLDFPGYAIGGLAVGETKEQMYATLDFTCSAMPPNKPRYLMGVGAPEDIVESVARGVDFFDCVLPTRIARNGQLLTPDGRMNLRNAQYAEDPRPVQEDCTCYTCRTFSRAYLRHLYKAGEISALRLGTIHNVHFMLELMRQIQTAIEEGRFAAFREQFHQRFRITDQAKRHEQRALRQAKRAQT

SEQ ID NO: 53056 - protein, 387 aa, Caldilineae bacterium
  misc_feature (1)..(387): tr|A0A3M1EZM0|A0A3M1EZM0_9CHLR Queuine tRNA-ribosyltran sferase OS=Caldilineae bacterium OX=2420332 GN=tgt PE=3 SV=1
MFTFQLHSTDGQARLSTYHTPHGPIPMPAFAPVGTLANVKTLEPRDLEELGARLILANTYHLYLRPGHELVRKMGGLHRFMAWDGPILTDSGGFQVFSLAHRRQVDADGVTFRSHLDGSRHRFTPEKVMEIEQALGADIAMVLDECADPLDRAYNEAALARTHAWAERCRTAHIRPDQALFGIVQGGIFPDLRQESAAFLAGLDFHGYAVGGLAVGETKAQMYATLDETCPALPAEKPRYLMGVGAPEDILEAVDRGIDMFDCVLPTRVARNGGLLTPHGRINIRNQVHQEDPRPIWEGCTCYTCRTFSRAYLRHLFKAKEISGLRLATIHNVHFMLRFMEDIRTAIAQGRFQQFKQDFLAGYQLTDQTVRHEQRRKRAEAIRSQNS

SEQ ID NO: 53057 - protein, 385 aa, Caldilineae bacterium
  misc_feature (1)..(385): tr|A0A3M1E8R5|A0A3M1E8R5_9CHLR Queuine tRNA-ribosyltran sferase OS=Caldilineae bacterium OX=2420332 GN=tgt PE=3 SV=1
MVVHSANDFAAEEFVSAFQFELLREDTETAARAGVIHTPHGDIPTPVFAPVGTQGTVKTLSPADLQSLGATLILGNTYHLYLRPGPDLIADFGGLHHFMGWHGPILTDSGGFQVFSLEGLRDIDDDGVTFRSHLDGSLHRFTPEKVIAIQEQIGADIIMAFDECPPPGDYEYNVIALRRTHRWADRCRAAHRRPDQALYGIVQGGIFPDLRARSAEFLTGLDFDGYGIGGLSVGESKADMHAMLEVLHPLLPRHKPRYLMGVGSPEDLFECVARGVDQFDCVLPTRIARNGAVLTHRGRLNLRNAKYARRKDPIEAGCACYTCQHFSLAYLRHLIKANEILGLHLATLHNVHFMLETMRRIRQSILDGTFAAYRAEFLATYLAGA

SEQ ID NO: 53058 - protein, 387 aa, Caldimicrobium thiodismutans
  misc_feature (1)..(387): tr|A0A2N7PJ39|A0A2N7PJ39_9BACT Queuine tRNA-ribosyltran sferase OS=Caldimicrobium thiodismutans OX=1653476 GN=t gt PE=3 SV=1
MSMFKFEVLFSDKKTGARIGKIITPRGVVETPVFMPVGTAGSVKALLPEFVASLGYRIILANTYHLLLRPGPEIIKKAGGLHPFMNWRGLILTDSGGFQVYSLSFLRKIKTEGILFKSHLDGQEIFLTPEFSLEIQLKLNSDILMVLDTCIPYPANREETEELTHLTHTWALKSLEFWEKNKKEGKALFGIVQGGMFEDLRKQSARFIANLPFDGYAIGGLSVGEPLELRNKMLEIAVPELPESSPRYLMGVGTPLDLIESVIRGIDMFDCVLPTRNARRGTLFTSQGIISIKNSRYKEDFTPLDPECNCYTCRNYTKAYLRHLFYAKELLIYSLLTLHNLTYYAKIMREIKEAIKTSSLEKLREELFIKFYKSQKEEYDESLGNCY

SEQ ID NO: 53059 - protein, 384 aa, Caldimicrobium thiodismutans
  misc_feature (1)..(384): tr|A0A0U5APU3|A0A0U5APU3_9BACT Queuine tRNA-ribosyltran sferase OS=Caldimicrobium thiodismutans OX=1653476 GN=t gt PE=3 SV=1
MFLFKLLYSDSKTQARIGQIITPRGVIETPVFMPVGTAGTVKALFPELVASLGFSIILANTYHLLLRPGPEIIKNAGGLHAFMNWKGLILTDSGGFQVYSLSSFRKITSEGILFQSHLDGSEYFLTPEFALEIQLMLNSDILMVLDTCIPYPSDIEKTQILTELTHKWAIKSLEFWERNKKEGKAIFGIVQGGMFEDLRKESARFIANLPFNGYALGGLSVGEPFELRNAMLDIAIPELPEGAPRYLMGVGTPLDLVEAVIRGIDMFDCVLPTRNARRGSLFTSQGIISIKSSKYKEDFSPLDPECSCYTCRNYTKAYLRHLFLAKELLIYSLLTLHNLTYYAKIVRQIKEAVRTGNLSALREDLYLKYYKTSKEEDDGSDVNF

SEQ ID NO: 53060 - protein, 371 aa, Caldisalinibacter kiritimatiensis
  misc_feature (1)..(371): tr|R1CEE8|R1CEE8_9CLOT Queuine tRNA-ribosyltransferase OS=Caldisalinibacter kiritimatiensis OX=1304284 GN=tgt PE=3 SV=1
MAIKYELIKESKECNARLGKLHTPHGVIETPIFMPVGTKATVKTMTPEELKDIGAQIILSNTYHLYLRPGHELIKEAGGLHKFMNWDGPILTDSGGFQVFSLGHLRNITEEGVEFRSHIDGSKHFISPEKSIEIQNSLGSDIIMAFDECAPYPSDREYVKNSLERTTRWAKRCIKAHKNPEKQALFGIVQGGMYKDLREQSAKDLLELDFPGYAVGGLSVGEPAELMYEVLDYTVPLLPKNKPRYLMGVGSPDYLFEAVVRGIDMADCVLPTRMARNGTFLTSQGRVVIKNAKYKKDFNKLDPECDCYTCQNYSRAYLRHLFKANEILGARLATIHNLYFLLKLMENIREAIKEDRLLEYKNEFYRKYGYI

SEQ ID NO: 53061 - protein, 374 aa, Caldiserica bacterium
  misc_feature (1)..(374): tr|A0A2H9MBF6|A0A2H9MBF6_9BACT Queuine tRNA-ribosyltran sferase OS=Caldiserica bacterium CG02_land_8_20_14_3_00 _36_38 OX=1973932 GN=tgt PE=3 SV=1
MKDIKFKITATDRNSRARVTQFETAHGIIETPVFMPVGTQATVKTLTPDELNEIGFKIILANTYHLYLQPGASVIERAHGIHKFMNWNGAILTDSGGFQVLSLKDLRKISKEGVQFKSFIDGSTHFFSPEVVVETQEKIGSDIAIHLDICGIYQSDWKETNRELDITLQWAKRSLLHKKREDQIMFGVVQGGFYKDLRKKAAEEISSMDFPGFTLGGLSVGEERALTEEFVDYTVQLLPDDKPRYLMGVGDPLSIIEYIKMGVDMFDCVLPTRIARNRSLFTKHGVIKITKNIYKEDFTPIEDDCSCYTCRNFTKAYLHHLFKSKEYLAGRLATIHNLFFLQKLILNIRESIKSGSFDQFYRDFKNNYSQINYE

SEQ ID NO: 53062 - protein, 374 aa, Caldiserica bacterium; identical to SEQ ID NO: 53061
  misc_feature (1)..(374): tr|A0A2H9MRL5|A0A2H9MRL5_9BACT Queuine tRNA-ribosyltran sferase OS=Caldiserica bacterium CG17_big_fil_post_rev_ 8_21_14_2_50_35_7 OX=1973933 GN=tgt PE=3 SV=1

SEQ ID NO: 53063 - protein, 375 aa, Caldisericum exile
  misc_feature (1)..(375): tr|I0GJC6|I0GJC6_CALEA Queuine tRNA-ribosyltransferase OS=Caldisericum exile (strain DSM 21853 / NBRC 104410 / AZM16c01) OX=511051 GN=tgt PE=3 SV=1
MFDIKFKVLAEDSWSRARITQFETPHGTIETPVFMPVGTQATVKTLTSDEIREIGFKIILSNTYHLYLQPGASIIEKAGGIHKFMDWDGAVLTDSGGFQVLSLKDLRKINSDGVEFKSFIDGSKHFFTPELVIETQEKIGSDIAIPLDICGTYPSPHSETKRELDITVEWAKRSLKAHKREDQILFGVIQGGFYKDLRKEAVERILELDFPGVTLGGLSIGEEKELTAEMVDYTVSLLPKYKPRYFMGVGDPISILEYVRLGVDMFDCVLPTRIARNRTLFTKTGTIKITKAIYKEDFTPIENDCGCYTCKHYTKAYLNHLFKAKEHLAGRLATIHNLYFMNWLIQEIRKSIKEGYFKDFYQEFKSKYKEGNNSE

SEQ ID NO: 53064 - protein, 374 aa, Caldisericum sp.; identical to SEQ ID NO: 53061
  misc_feature (1)..(374): tr|A0A1J5C1S3|A0A1J5C1S3_9BACT Queuine tRNA-ribosyltran sferase OS=Caldisericum sp. CG2_30_36_11 OX=1805053 GN= tgt PE=3 SV=1

SEQ ID NO: 53065 - protein, 373 aa, Calditerrivibrio nitroreducens
  misc_feature (1)..(373): tr|A0A2J6WJZ9|A0A2J6WJZ9_9BACT Queuine tRNA-ribosyltran sferase OS=Calditerrivibrio nitroreducens OX=477976 GN= tgt PE=3 SV=1
MLSFVIDKKDKNCSARAGTIKTTHGIIETPIFMPVGTVGSVKTLTPDELYEIGATIILGNTYHLHLRPGEEIVAHFGGLHRFMNWQRNILTDSGGFQVFSLADLNKITEDGVEFKSHIDGSRHFFSPEISMEIQKKLGSDIVMAFDECVPYPSEKSYVAKSLERTTRWAKRCKEYTLDNHQSLFGIVQGGVFKDLRKISADQLIDLDFPGYAIGGLSVGEEIPLMYEIAEYTAHLLPEEKPRYLMGVGTPEDILNGISFGIDMFDCVMPTRNARNALLFTSEGRLSIKRADLAKSDDPIDKNCGCYTCRNFSRGYLRHLYKAGEILAMRLNTIHNLHFYISLVKSARNAIINGNFEKFKSDMLLKLNQGGNNV

SEQ ID NO: 53066 - protein, 373 aa, Calditerrivibrio nitroreducens
  misc_feature (1)..(373): tr|E4TJ16|E4TJ16_CALNY Queuine tRNA-ribosyltransferase OS=Calditerrivibrio nitroreducens (strain DSM 19672 / N BRC 101217 / Yu37-1) OX=768670 GN=tgt PE=3 SV=1
MLSFVVDAKDKNCSARAGTIKTTHGIIETPIFMPVGTVGSVKTLTPDELYEIGATIILGNTYHLHLRPGDDIVAHFGGLHRFMNWKRNILTDSGGFQVFSLADLNKITEDGVEFKSHIDGSKHFFSPEISMEIQKKLGSDIVMAFDECVPYPSEKSYVAKSLERTTRWAKRCKEYSLDYHQSLFGIVQGGVFKDLRKISADQLIDLDFPGYAIGGLSVGEEIPLMYEIAEYTAQLLPEEKPRYLMGVGTPEDILNGISFGIDMFDCVMPTRNARNALLFTSEGRLSIKRADLAKSDDPIDKNCDCYTCRNFSRGYLRHLYKAGEILAMRLNTIHNLHFYISLVKSARNAIINGNFEAFKNDMLLKLNQGGNNV

SEQ ID NO: 53067 - protein, 377 aa, Caldithrix abyssi
  misc_feature (1)..(377): tr|H1XPF5|H1XPF5_9BACT Queuine tRNA-ribosyltransferase OS=Caldithrix abyssi DSM 13497 OX=880073 GN=tgt PE=3 SV =1
MFFDLKHTDVNSKARAGVLNTDHGSIETPIFMPVGTQGTVKALSPRDLKEVNASIILGNTYHLYMRPGHRLIEKMGGLHRFMGWDRAILTDSGGFQVFSLKELRKIDDEGILFQSHLDGSYHKFTPQLVLEIQRSLGSDIMMVLDECPPYPSTRDYALKSNQLTIDWARQAREIFSGWQPLYGHRQWLFAIVQGGTFKDIREQSARALMELDFPGYAIGGLAVGEPKDEMFDITDFCTEILPEQKPRYLMGVGMPDDILEAIERGVDMFDCVIPTRNARNGTVFTTEGKMVLKSARFKEDTKPVDANCQCYTCKNFSRAYLRHLYNANEILGLTLATIHNVHFYLWLVRQARKAILQDNYVSWKERILQKITRVVEN

SEQ ID NO: 53068 - protein, 377 aa, Caldithrix sp.
  misc_feature (1)..(377): tr|A0A1F4N6H0|A0A1F4N6H0_9BACT Queuine tRNA-ribosyltran sferase OS=Caldithrix sp. RBG_13_44_9 OX=1797576 GN=tgt PE=3 SV=1
MKFQIDAEDVNSKARATSFFTEHGVVKTPVFMPVGSIGTIKTLSPEDLISSEVQIILANTYHLYLKPGLEILEKAGGLHRFINWSGPILTDSGGFQVYSLDELKKISEEGVEFKSHWDGSSHFFTPHKVVDIQRVIGSDIILVLDQCIPNPSDKTTSRNAHLLTFKWADIARKYFLNLRPLYQFRQYQFAVIQGGIYPDLRKESIDKLIDLDFDGYAIGGLAVGESWEKRNEITEFCTTRMPHQKPKYLMGVGTPVDILNAIERGVDMFDCVIPTRNARNGTLFTRFGKLVIRNADYKSDFQPIDPGCSCYSCRNFSRAYIRHLFNINEVLGLRLATYHNIYFYMNLLKQARQAILDRFFNSFKKQFLEIYSSIESI

SEQ ID NO: 53069 - protein, 384 aa, Caldithrix sp.
  misc_feature (1)..(384): tr|A0A523IJT8|A0A523IJT8_9BACT Queuine tRNA-ribosyltran sferase OS=Caldithrix sp. OX=1962856 GN=tgt PE=3 SV=1
MTLDFKVLHQDQTSKARLGSLTTAHGQIQTPVFMPVGTQGTVKSLSPQELVEVGSQIILGNAYHLYLRPGHEIIERAGGLHKFSSWEKPILTDSGGYQVFSLSDLRKINDEGVTFQSHHDGSFHELSPERAVEIQMSLGSDIMMVLDECPPYPSPESYIAESVERTRNWAQRCLRKWQNSKPKFGYEQSLFAIVQGSTLSKLRKTSAQALIEMDFPGYAIGGLSIGEPKPVLFEMIGVCTDILPENKPRYLMGMGKPEDLVEAVSLGVDMFDCVIPTRNGRKGQFFTWTGTLNVRNAAYKEDFLPVDETCKCYTCLNFSRAYLRHLFHSNELLGLRLGSLHNLYFYHQLTQQIRQHIESNNFISWRQDFLNHYKSSSEVNKEEN

SEQ ID NO: 53070 - protein, 379 aa, Calditrichaeota bacterium
  misc_feature (1)..(379): tr|A0A3N9N2S7|A0A3N9N2S7_9BACT Queuine tRNA-ribosyltran sferase OS=Calditrichaeota bacterium OX=2212469 GN=tgt PE=3 SV=1
MKFDLIHKDKNSEARAGLLETDHGMVETPIFMPVGTQATVKTMAPRNLDETGVQIILGNTYHLYLRPGEELIGRFGGIHNFMGWNKPVLTDSGGYQVFSLKELRKLDSEGVTFQSHLDGSSHRFTPEKVLDIQRHLGSDIMMVLDECAPYPSTHEYAEESNALTLKWAREARVLYEKKERLYGYDQWLFGIVQGSIYEDLREGSARELMDMDFPGYAIGGLAVGESKSEMYRITSLCTDILPAHKPRYLMGVGMPEDILEGIARGVDMFDCVLPTRNARNGTVFTWNGRLVIKAGRFKEDTLPIDEQCTCYTCRNFSRAYLRHLFNANEILGLHLATLHNIHFYMDLVKKSREKILNNEFSVWSKTVLPTVANLIENNN

SEQ ID NO: 53071 - protein, 379 aa, Calditrichaeota bacterium
  misc_feature (1)..(379): tr|A0A3M1XCG9|A0A3M1XCG9_9BACT Queuine tRNA-ribosyltran sferase OS=Calditrichaeota bacterium OX=2212469 GN=tgt PE=3 SV=1
MEFLLEASDSATRARAGRFRTAHGVVETPQFMPVGTVGTVKTLTPAELWEAGARIILGNTYHLYLRPGLEVLQAAGGLHRFNGWNGPILTDSGGFQIYSLNDLRQVNQEGVEFRSHWDGSTHFFSPERVVDIQRVIGSDIMMVLDQCIANPSDEAAARQAHLLTLDWAQRSREHFLRQKPLYGFPQLQFGIVQGGVYDHLRKESVRELVAIGFDGYAIGGLAVGEDARTRNRMTELCTDLLPENRVRYLMGVGKPEDLLDAIARGVDIFDCVIPTRNARNGWAFTRTGKVVIRNARYRSDFAPLSADCRCFCCTHFTRAYLHHLFRVKEMLGYRLLTIHNVHFFLSLMRQARRHILDGTFQDFQNRFLESYFTHQEKGR

SEQ ID NO: 53072 - protein, 376 aa, Calditrichales bacterium
  misc_feature (1)..(376): tr|A0A524LAB3|A0A524LAB3_9BACT Queuine tRNA-ribosyltran sferase OS=Calditrichales bacterium OX=2528038 GN=tgt P E=3 SV=1
MNFKLEHTDTQSKARCGTVSTGHGDIKTPIFMPVGTNGTVKTLSPLELTDNGAQIILGNTYHLYMRPGDDLLARFGGLHKFMGWNGPILTDSGGFQVFSLADLRKIDADGVTFQSHLDGSKHRFDAEKVIDIQQNIGSDIMMVLDECTPYPCTPDYAEKSMQMTLRWAERARDYWESSAKSRNPQQALFAIVQGSVYEELRRQCAVDLIQLDFPGYAIGGLAVGEPFDERNRITDICTDVLPTDKPRYLMGVGLPEDILESIALGVDMFDCVIPTRNARNGTVFTTKGKLIAKAARYKEDPLPIDTDCDCYTCRNFSRAYIRHLFNSNEILGLRLATIHNIHFYLWLVKQAREKILNGAFVQWKSQMIQTWKNETD

SEQ ID NO: 53073 - protein, 374 aa, Caloramator australicus
  misc_feature (1)..(374): tr|I7KWS9|I7KWS9_9CLOT Queuine tRNA-ribosyltransferase OS=Caloramator australicus RC3 OX=857293 GN=tgt PE=3 SV =1
MSAIRFELIKTCKQSGARLGKLYTPHGVIDTPIFMPVGTQATVKAMTPEELKEIGAQIILSNTYHLYLRPGEKLVEKAGGLHKFMNWDRAILTDSGGFQVFSLSDLRNITEEGVTFKSHIDGSKHFISPEKAIQIENALGADIIMAFDECTPYEADYDYTKNSMERTLRWAERCLKAHQKPDKQALFGIVQGGMFKDLRQESARQTVKMDFPGYAVGGLSIGEPKEIMYQVLDWTVPFLPENKPRYLMGVGSPDALLEGVIRGIDMFDCVLPTRIARNGTVFTSKGKLVVRNAEYAEDFRPLDDECDCYACKNYSRAYIRHLFKAKEILAARLATIHNLRFLLKLMEDVRRAIMEDSLLDFKEEFFRKYGYTNE

SEQ ID NO: 53074 - protein, 374 aa, Caloramator fervidus
  misc_feature (1)..(374): tr|A0A1H5W0F0|A0A1H5W0F0_9CLOT Queuine tRNA-ribosyltran sferase OS=Caloramator fervidus OX=29344 GN=tgt PE=3 SV =1
MSAIRFELLKVCKQSGARLGKLHTPHGTIDTPIFMPVGTQATVKAMTPEELKEIGAQIILSNTYHLYLRPGEKLIEKAGGLHNFMHWDRAILTDSGGFQVFSLSDLRDITEEGVTFKSHIDGSKHFISPEKAIEIENALGADIIMAFDECTPYEADYDYTKNSMERTLRWAERCLKAHRKPEKQALFGIVQGGMFKDLRQESARQTVKMDFPGYAVGGLSIGEPKEIMYQVLEWTVPLLPENKPRYLMGVGSPDALLEGVIRGIDMFDCVLPTRIARNGTVFTSKGKLVVRNAEYAEDFRPLDDECDCYACKNYSRAYIRHLFKAKEILAARLATIHNLRFLLRLMEDIRRAIMEDSLLDFKEEFFRKYGYTKE

SEQ ID NO: 53075 - protein, 374 aa, Caloramator mitchellensis
  misc_feature (1)..(374): tr|A0A0R3JV89|A0A0R3JV89_9CLOT Queuine tRNA-ribosyltran sferase OS=Caloramator mitchellensis OX=908809 GN=tgt P E=3 SV=1
MSAIRYELIKQCKQSGARLGKLHTPHGIIETPIFMPVGTQATVKAMTPEELKEIGAQIILSNTYHLYLRPGERLVERAGGLHEFMNWDRPILTDSGGFQVFSLSDLRNITEEGVTFRSHLDGSKHFISPEKAIEIENALGADIIMAFDECTPYEADYEYTKNSMERTLRWAERCKSAHKKPDKQALFGIVQGGMFKDLREISAKETVKMDFPGYAVGGLSIGEPKDIMYQVLDWTVPFLPENKPRYLMGVGSPDALLEGVIRGIDMFDCVLPTRIARNGTVFTSKGKVVIKNAEHAEDFSPLDDECDCYTCKNYSRAYIRHLFKAKEILAARLATIHNLRFLLKLMEDIRRAIMEDSLLDFKEEFFKKYGYTQD

SEQ ID NO: 53076 - protein, 378 aa, Caloramator proteoclasticus
  misc_feature (1)..(378): tr|A0A1M4WSZ0|A0A1M4WSZ0_9CLOT Queuine tRNA-ribosyltran sferase OS=Caloramator proteoclasticus DSM 10124 OX=112 1262 GN=tgt PE=3 SV=1
MGAIRYELIKTCKQSGARLGRLHTPHGVIETPIFMPVGTQATVKTMTPEELKEIGAQIILSNTYHLYMRPGEKLVEKAGGLHKFMNWDRPILTDSGGFQVFSLSQLRDITEEGVTFRSHIDGSKHFISPEKAIEIENALGADIIMAFDECLPYPCDYDYAKNSLYRTIRWAERCLKAHKNTEKQALFGIIQGGMYRDLREESVREMIKLDFPGYAVGGLSIGEPKDIMYEVLDWTVHLLPENKPRYLMGVGSPDALLEGVIRGVDMFDCVLPTRIARNGTVFTSKGKLVVRNAEYAEDFRPLDEECDCYACKNYSRAYIRHLFKAKEILGARLTTIHNLRFLLKLMEDVRQAIMEDRLLDFKEEFFEKYGYNEGKWTF

SEQ ID NO: 53077 - protein, 374 aa, Caloramator quimbayensis
  misc_feature (1)..(374): tr|A0A1T4WUJ4|A0A1T4WUJ4_9CLOT Queuine tRNA-ribosyltran sferase OS=Caloramator quimbayensis OX=1147123 GN=tgt P E=3 SV=1
MEAIRYELIKKDERTGARLGKLHTPHGTIDTPVFMPVGTQATVKAMTPDELKSIGAQIILSNTYHLYLRPGEKLVEKAGGLHNFMNWDRAILTDSGGFQVFSLSELRDIKEEGVTFKSHIDGSKHFISPEKAIEIENALGADIIMAFDECPPYPADYDYTKNSLYRTIRWAERCKKTHKNTEKQALFGIIQGGMFKDLRQEAVKEMIKLDFPGYSVGGLSIGEPKPIMYDVLDWTTPLMPEDKPRYLMGVGSPDCLIEGVIRGIDMFDCVLQTRIARNGTVFTSKGKLVVRNAEYAEDFRPLDEECDCYTCRNYSRAYIRHLLKAQEILGARLTTIHNLRFTIRLMEKIREAIMQDSLLEFRDEFYAKFGYNNN

SEQ ID NO: 53078 - protein, 374 aa, Caloramator sp.
  misc_feature (1)..(374): tr|A0A5B7TGV1|A0A5B7TGV1_9CLOT Queuine tRNA-ribosyltran sferase OS=Caloramator sp. E03 OX=2576307 GN=tgt PE=3 S V=1
MEAIRYELIKKCEKTGARLGKLHTPHGTIDTPVFMPVGTQATVKAMTPDELKSIGAQIILSNTYHLYLRPGEKLIEKAGGLHSFMNWDRAILTDSGGYQVFSLSELRDIKEEGVTFKSHIDGSKHFISPEKAIEIENALGADIIMAFDECPPYTADYDYTKNSLYRTIRWAERCKKVHKNTEKQALFGIIQGGMFKDLREEAVREMIKLDFPGYSVGGLSIGEPKPIMYEVLNWTVPLMPENKPRYLMGVGSPDCLIEGVIRGIDMFDCVLQTRIARNGTVFTSKGKLVVRNAEYAEDFRPLDEECDCYTCQNFSRAYIRHLLKAQEILGARLTTIHNLRFTIRFMEKIREAIMQDSILEFRDEFYAKFGYNNN

SEQ ID NO: 53079 - protein, 372 aa, Caloranaerobacter azorensis
  misc_feature (1)..(372): tr|A0A096BK22|A0A096BK22_9CLOT Queuine tRNA-ribosyltran sferase OS=Caloranaerobacter azorensis H53214 OX=115641 7 GN=tgt PE=3 SV=1
MAVKYELIKESTECRARLGKLYTPHGVIETPIFMPVGTRATVKTMTPEELKDLGAQIILSNTYHLYLRPGHELIKEAGGLHKFMNWDRPILTDSGGFQVFSLGDLRKITEEGVEFRSHIDGSRHFISPEKSIEIQNALGSDIMMAFDECAPYPSDRDYVKHSLERTTRWAKRCKEAHRNPDTQALFGIVQGGVYRDLREQSAKEIVDLDFPGYAIGGLSVGEPKELMYEVLDYTVPLLPKNKPRYLMGVGSPDCLFEGVIRGIDMFDCVLPTRIARNGTVMTSHGKVVIRNAKYARDFGKLDPECDCYTCRNYSRAYIRHLFNVNEILGARLTTIHNLYFLLRLMENIRLAIKEDRLLQYKEEFFKKYGYIK

SEQ ID NO: 53080 - protein, 372 aa, Caloranaerobacter azorensis; identical to SEQ ID NO: 53079
  misc_feature (1)..(372): tr|A0A1M5TRB0|A0A1M5TRB0_9CLOT Queuine tRNA-ribosyltran sferase OS=Caloranaerobacter azorensis DSM 13643 OX=112 1264 GN=tgt PE=3 SV=1

SEQ ID NO: 53081 - protein, 373 aa, Caloranaerobacter sp.
  misc_feature (1)..(373): tr|A0A0N8NMH0|A0A0N8NMH0_9CLOT Queuine tRNA-ribosyltran sferase OS=Caloranaerobacter sp. TR13 OX=1302151 GN=tgt PE=3 SV=1
MMAVKYELIKESTECKARLGKLHTPHGIIETPIFMPVGTRATVKTMTPEELKDLGAQIILSNTYHLYLRPGHELIKEAGGLHKFMNWDKPILTDSGGFQVFSLGDLRKITEEGVEFRSHIDGSRHFISPEKSIEIQNALGSDIIMAFDECAPYPSDRDYVKHSLERTTRWAKRCKEAHRNPETQALFGIVQGGMYRDLREQSAKEIIDLDFPGYAIGGLSVGEPKELMYEVLDYTAPLLPKNKPRYLMGVGSPDCLFEGVIRGIDMFDCVLPTRIARNGTVMTSQGKVVIRNAKYARDFGKLDPECDCYTCQNYSRAYIRHLFNVNEILGARLTTIHNLYFLLKLMENIRLAIKEDRLLQYKEEFFKKYGYIK

SEQ ID NO: 53082 - protein, 332 aa, Calothrix brevissima
  misc_feature (1)..(332): tr|A0A1Z4JU05|A0A1Z4JU05_9CYAN Queuine tRNA-ribosyltran sferase OS=Calothrix brevissima NIES-22 OX=1973478 GN=t gt PE=3 SV=1
MPVGTLANVKTVTPAQLKDTGAQMVLSNTYHLHLQPGEGIVAGGGGLHKFMGWNGPMLTDSGGFQVFSLSEMRKITEEGVTFRSPHDGQIIKLTPERSIEIQNTLGADVIMAFDECPPYPATRQEVEAATERTYRWLERCIAAHKRSDQALFGIVQGGVYLDLRSQAALALAKLDLPGYAIGGVSVGEPPELVAQIVQNTAPLLPSEKPRYLMGVGTYKEMAIAIASGVDVFDCVIPTRWARHGTAIVQGERWNLKNAKFREDFAPLDETCTCYACQNFSRAYISHLVRSQEILAYTLLSIHNITELIGFTQRIREAILSDRFATEFAHWLD

SEQ ID NO: 53083 - protein, 343 aa, Calothrix desertica
  misc_feature (1)..(343): tr|A0A433VAB2|A0A433VAB2_9CYAN Queuine tRNA-ribosyltran sferase OS=Calothrix desertica PCC 7102 OX=232991 GN=tg t PE=3 SV=1
MPVGTLANVKTITPAQLKDTGAQMVLSNTYHLHLQPGEAIVAGGGGLHKFMGWNGPMLTDSGGFQVFSLSEMRKITEEGVTFRSPHDGQIINLTPEKSIEIQNILGADVIMAFDECPPYPATREEVETATARTYRWLERCIAAHQRTDQALFGIVQGGVYLDMRSSAASSLAAFDLPGYAIGGVSVGEPPELIHQIVEATAPLLPYHKPRYLMGVGTYQEMAIAIASGIDLFDCVIPTRWARHGTAMVQGERWNIKNAKFREDFTPLDETCPCYTCQNFSRAYLSHLVRCQEILAYTLLSIHNITELIRFTQKIRQSIINGTFATDFAIWLDTSNESKVLSAE

SEQ ID NO: 53084 - protein, 375 aa, Calothrix elsteri
  misc_feature (1)..(375): tr|A0A2A2TDR8|A0A2A2TDR8_9CYAN Queuine tRNA-ribosyltran sferase OS=Calothrix elsteri CCALA 953 OX=987040 GN=tgt PE=3 SV=1
MTANFSFECIASCNQTKARAGVFQTPHGIVETPRFMPVGTLANVKTITPAQLKDTGAQMVLSNTYHLHLQPGEDIVAGGGGLHKFMGWNGPMLTDSGGFQVFSLSEMRKITEEGVTFRSPRDGRIINLTPERSIAIQNTLGADVIMAFDECPPYPATREEVEAATSRTYRWLERCISAHQRQDQALFGIVQGGVYLDLRAKAALDLKQFDLPGYAIGGVSVGEPPELIAQIVETTAPLLPSDKPRYLMGVGTYREMAMAIASGIDLFDCVIPTRWARHGTAMVQGERWNLKNAKFREDFAPLDETCPCYTCQNFSRAYISHLLRSQEILAYTLLSIHNITELIRFTQKIRNAILQGTFATDFAHWLKPGEVQEEK

SEQ ID NO: 53085 - protein, 332 aa, Calothrix parasitica
  misc_feature (1)..(332): tr|A0A1Z4LLD7|A0A1Z4LLD7_9CYAN Queuine tRNA-ribosyltran sferase OS=Calothrix parasitica NIES-267 OX=1973488 GN= tgt PE=3 SV=1
MPVGTLANVKTITTAQLQETGAQMVLSNTYHLHLQPGEAIVAGGGGLHKFMGWDKPMLTDSGGFQVFSLSEMRKITEEGVSFRSPLDGSIINLTPEKSIEIQNILGADVIMAFDECPPATANRTEVEAATERTYRWLLRCIEAHNRSEQALFGIVQGGIYADLRSSAANALTELDLPGYAIGGVSVGEEPELIHEIVRQTAPLLPAHKPRYLMGVGTHKEMVVAIASGVDLFDCVIPTRWARHGTAMVKGERWNVKNAKFREDFTPLDETCPCYTCQNFTRAYLSHLIRAQEILAYTLLSIHNITELIRFTQKIRESILNDTFTEEFGHWLK

SEQ ID NO: 53086 - protein, 332 aa, Calothrix sp.
  misc_feature (1)..(332): tr|A0A1Z4FTU5|A0A1Z4FTU5_9CYAN Queuine tRNA-ribosyltran sferase OS=Calothrix sp. NIES-2098 OX=1954171 GN=tgt PE =3 SV=1
MPVGTLANVKTVTPAQLRDTGAQMVLSNTYHLHLQPGEAIVAGGGGLHKFMGWNGPMLTDSGGFQVFSLSEMRKITEEGVTFRSPHDGQIINLTPERSIEIQNTLGADVIMAFDECPPYPATRQEVEAATGRTYRWLERCIVAHKRSDQALFGIVQGGVYLDLRSQAALALAELDLPGYAIGGVSVGEPPELMAQIVQTTAPLLPPEKPRYLMGVGTYKEMAIAIASGVDLFDCVIPTRWARHGTAMVKGDRWNLKNAKFREDFAPLDETCGCYACQNFSRAYISHLVRSQEILAYTLLSIHNITELIRFTQHIREAILSDRFATEFASWLD

SEQ ID NO: 53087 - protein, 376 aa, Calothrix sp.
  misc_feature (1)..(376): tr|A0A1Z4RHK4|A0A1Z4RHK4_9CYAN Queuine tRNA-ribosyltran sferase OS=Calothrix sp. NIES-4101 OX=2005461 GN=tgt PE =3 SV=1
MTANFSFECIASCQETKARAGVFQTPHGIVETPRFMPVGTLANVKTITPAQLQDTGAQMVLSNTYHLHLQPGEDIVAGGGGLHKFMGWHGPMLTDSGGFQVFSLSEMRKITEEGVTFRSPHDGQIINLTPERSIAIQNTLGADVIMAFDECPPYPATRQEVEAATSRTYRWLERCITAHQRPDQALFGIVQGGVYLDLRAKAAEDLKQLDLPGYAIGGVSVGEPPELIAQIVATTAPLLPFDKPRYLMGVGTYREMAVAIASGVDLFDCVIPTRWARHGTAMVQGERWNLKNAKFREDFAPLDETCPCYTCQNFSRAYISHLVRSQEILAYTLLSIHNITELIRFTQKIRNAIIKGTFAQDFAHWLEPSTESSDED

SEQ ID NO: 53088 - protein, 389 aa, Camelimonas lactis
  misc_feature (1)..(389): tr|A0A4R2GMV1|A0A4R2GMV1_9RHIZ Queuine tRNA-ribosyltran sferase OS=Camelimonas lactis OX=659006 GN=tgt PE=3 SV= 1
MTSQPNLTSAGNGVAQPAFAFATSAIDGRARTGLITTAHGQIRTPAFMPVGTAATVKAMYPAQVKQLGADVVLGNTYHLMLRPGAERVARLGGLHQFMNWPHPILTDSGGFQLMSLSKLRKITEKGVTFQSHIDGARYELTPERSIEIQGLLGADIQMQLDECVRMPCAREEADRAMQLSLRWAERSKAAFGALPGQGLFGIVQGADVPELRVESARKLIDIGFHGYAVGGLAVGEPQDVMLAMLDVVTPILPADRPRYLMGVGTPDDLVESVRRGVDMFDCVMPTRAGRHGLAYTRHGKVNLKNARHAEDTRPLDEASPCEASSAWSRAYLHHLVKSGEILGMMLLTWNNLAYYQELMAGMRAAIAAGRLDDFIAETKDGWARGEAAA

SEQ ID NO: 53089 - protein, 372 aa, Caminibacter mediatlanticus
  misc_feature (1)..(372): tr|A6DAZ3|A6DAZ3_9PROT Queuine tRNA-ribosyltransferase OS=Caminibacter mediatlanticus TB-2 OX=391592 GN=tgt PE =3 SV=1
MEFKIDGTCGNARACIIKTDHSEIKTPIFMPVGTAAAVKSLDAIDMMEILNTNIILANTYHLYLRPGDEVIKNLGGLHNFSGYKRSFLTDSGGFQAFSLGNNVKFSDEGIEFKSHIDGSRHFFTPEKVIDIEYNLNSDIMMVLDDLIPLPNTKERIKKSIQRTTNWAYRSLVHHINKGKKNNLFAIIQGGTDFEFRRISAESLVSLEYKGYSFDGFAIGGLSVGEENQLMYDTIEVTTPYMPKDKPRYLMGVGTPEDIIEAIDRGVDMFDCVMPTRNARNGYLFTSFGTLRIKNARYKLDDNPVDSSCECYTCKNFSRAYLNHLFKAKELTYFRLASIHNLHYYLTLVKEAREAILEGKFKEFKKEFYSKRS

SEQ ID NO: 53090 - protein, 372 aa, Caminicella sporogenes
  misc_feature (1)..(372): tr|A0A1M6M1L7|A0A1M6M1L7_9CLOT Queuine tRNA-ribosyltran sferase OS=Caminicella sporogenes DSM 14501 OX=1121266 GN=tgt PE=3 SV=1
MAIKYELIKECKQTGARLGKIYTPHGTIETPIFMPVGTQATVKSMTPEELKEINAQIILSNTYHLYLRPGYELVDKAGGLHKFMNWDRPILTDSGGFQVFSLGKLRKITEEGVEFRSHLDGSKHFISPEKAIEIENALGADIIMAFDECAPYPADKEYVKNSLERTTRWAKRCKNAHKKKDSQALFGIIQGGMYKDLRKQSAYEIIEMDFPGYAVGGLSVGEPKPLMYEILEYTTPLMPKDKPRYLMGVGTPDCLIEGVIRGIDMFDCVLPTRIARNGTALTSRGKVVIKQAKYYDDFTPLDPECDCYTCKNYSRAYIRHLFKANEILSARLITYHNLYFLLKLMEKIREAIKNDRLLDFRKEFFEKYGYEL

SEQ ID NO: 53091 - protein, 374 aa, Campylobacter avium
  misc_feature (1)..(374): tr|A0A222MWR8|A0A222MWR8_9PROT Queuine tRNA-ribosyltran sferase OS=Campylobacter avium LMG 24591 OX=522484 GN=t gt PE=3 SV=1
MEFKIKHKDSRARVCEIKTSHSSFTTPIFMPVGTAACVKSLDFLDLSLILDAKIILANTYHLYLRPGADIVAKFKGLHGFTGFSRSFLTDSGGFQAFSLSKNSKHKEEGIEFKSHIDGSRHFFTPKSVLDTQYLLNSDIMMVLDDLVALPSDEKRVILSVQRTIKWAKESINYHKERQSKGLNLDNNIFAIIQGGTSYEQRKLCALELCELSFDGLAIGGLSVGEENALMYDTVEAVSEFIDENRPRYLMGVGTPEDLVECVERGVDMFDCVMPTRNARNGTLFTNFGKINIKKAEFLRDERAIDEDCKCYTCKNFSRGYLHHLFRAKELTFFRLASLHNLHYYLSLVKAMQEAILKDSFSEFKKEFYAKRSLS

SEQ ID NO: 53092 - protein, 372 aa, Campylobacter blaseri
  misc_feature (1)..(372): tr|A0A2P8R2D1|A0A2P8R2D1_9PROT Queuine tRNA-ribosyltran sferase OS=Campylobacter blaseri OX=2042961 GN=tgt PE=3 SV=1
MLFKIDKKDKNARACTIKTAHSTIQTPIFMPVGTVGAVKSLDAIDMIEILDAKIILANTYHMYLRPSSKIVKEFGGLHGFTKFDRSFLTDSGGFQAFSLSKISKPDENGIKFASHIDGSKHYFTPTSVLDTQYDFGSDIMMVLDDLIALPAEKKRVELSLQRTIKWAKESIEYHKFMQNKGVGINQNIFGIIQGGTDYEARKECAKALCEMDFDGLAIGGLSVGESNEMMYDTVEGVMPFIDENRPRYLMGVGTPEDLVENIERGVDMFDCVMPTRNARNGTLFTSFGKLNIKNAKYIHDDDPIDKECDCYTCKNYSRGYLNHLFKAKELTFFRLASLHNLHYYLNLVKKAREAILASNFDEFKKEFYSKRT

SEQ ID NO: 53093 - protein, 377 aa, Campylobacter coli
  misc_feature (1)..(377): tr|W8KJ14|W8KJ14_CAMCO Queuine tRNA-ribosyltransferase OS=Campylobacter coli RM4661 OX=1183379 GN=tgt PE=3 SV= 1
MEFKLKHKDNLARVCEITTAHSTFETPMFMPVGTVGAVKSLDAIDLKEQLNAKIILANTYHMYLRPGSKIVKHFGGLHGFTKFDRSFLTDSGGFQAFSLSANSKHFQEGIEFKSHIDGSKHLFTPKSVLDTQYDLNSDIMMILDDLIALPATKERIKVSVDRTIKWAKEAIDYHKQMQIQGLGLKQNIFGIIQGGTDYEERKRCALALNEMDFDGLAIGGLSVGEENALMYETVENLNPFLDENHPRYLMGVGTPEDLVENIERGVDMFDCVMPTRNARNGTFFTNFGKFNIKRAEFINDHESIDNECSCYTCRNFSRGYLNHLFKAKELTFFRLASLHNLHYYLTLVAQAREAIKKSEFKKFKYEFYAKRLTNGMR

SEQ ID NO: 53094 - protein, 377 aa, Campylobacter coli
  misc_feature (1)..(377): tr|A0A3Z9Z2S8|A0A3Z9Z2S8_CAMCO Queuine tRNA-ribosyltran sferase OS=Campylobacter coli OX=195 GN=tgt PE=3 SV=1
MEFKLKHKDNLARVCEITTAHSTFETPMFMPVGTVGAVKSLDAIDLKEQLNAKIILANTYHMYLRPGSKIVKHFGGLHGFTKFDRSFLTDSGGFQAFSLSANSKHFQEGIEFKSHIDGSKHLFTPKSVLDTQYDLNSDIMMILDDLIALPATKERIKVSVDRTIKWAKEAIDYHKQMQIQGLGLKQNIFGIIQGGTDYEERKRCALALNEMDFDGLAIGGLSVGEENALMYETVENLNPFLDENHPRYLMGVGTPEDLVENIERGVDMFDCVMPTRNARNGTFFTNFGKFNIKRAEFINDHESIDNECLCYTCRNFSRGYLNHLFKAKELTFFRLASLHNLHYYLTLVAQAREAIKKSEFKKFKYEFYAKRLTNGMR

SEQ ID NO: 53095 - protein, 376 aa, Campylobacter concisus
  misc_feature (1)..(376): sp|A7ZD89|TGT_CAMC1 Queuine tRNA-ribosyltransferase OS= Campylobacter concisus (strain 13826) OX=360104 GN=tgt PE=3 SV=1
MKFEVIKKDGNARRGILTTAHSVIQTPVFMPVGTVGAVKSLDAFDMSEILDAKIILANTYHMYLRPGSKVVREFGGLHGFSKFDRSFLTDSGGFQAFSLRSNTKNDDGGIKFKSHIDGSTHYFTPRSVLDTQYELGSDIMMILDDLVALPAEPKRIDLSIKRTIKWAKEAIDYHKFMQSKGVGLQQNIFGIVQGGTDYEARKFCAEALNEMPFDGLAIGGLSVGESNEAMYDTVEAVMPFMDELRPRYLMGVGTPEDLVENVERGVDMFDCVMPTRNARNGTLFTSFGKINIKSAKFINDHAPIDPQCQCYTCKRYSRGYLNHLFKARELTFFRLASLHNLHYYLNLMKEMREAIEVGEFAKFKRNFYAKRSTDEL

SEQ ID NO: 53096 - protein, 376 aa, Campylobacter concisus
  misc_feature (1)..(376): tr|U2GT36|U2GT36_9PROT Queuine tRNA-ribosyltransferase OS=Campylobacter concisus ATCC 51561 OX=1243032 GN=tgt PE=3 SV=1
MKFEVIKKDGNARRGVLTTAHSVIQTPVFMPVGTVGAVKSLDAFDMSEILDAKIILANTYHMYLRPGSKVVREFGGLHGFSKFDRSFLTDSGGFQAFSLRSNTKNDDGGIKFKSHIDGSTHYFTPRSVLDTQYELGSDIMMILDDLVALPAEPKRIDLSIKRTIKWAKEAIDYHKFMQSKGVGLQQNIFGIVQGGTDYEARKFCAQALNEMPFDGLAIGGLSVGESNEAMYDTVEAVMPFMDELRPRYLMGVGTPEDLVENVERGVDMFDCVMPTRNARNGTLFTSFGKINIKSAKFINDHAPIDPQCQCYTCKRYSRGYLNHLFKARELTFFRLASLHNLHYYLNLMKEMREAIEVGEFAKFKRNFYAKRSTDEL

SEQ ID NO: 53097 - protein, 373 aa, Campylobacter cuniculorum
  misc_feature (1)..(373): tr|A0A1W6BWU0|A0A1W6BWU0_9PROT Queuine tRNA-ribosyltran sferase OS=Campylobacter cuniculorum DSM 23162 = LMG 24 588 OX=1121267 GN=tgt PE=3 SV=1
MDFKIKHRDQNARVCEIKTAHSSFLTPIFMPVGTLGAVKSLDANDLMDELNAQIILANTYHLYLRPTCAVIKNFGGLHKFSGFKRSFLTDSGGFQAFSLSQNSKQNENGIEFKSHIDGSLHFFTPQSVLDAQYDFKSDIMMILDDLIALPADKKRIELSVKRTIKWAKEAISYHLENKNNGIGINQNIFGIIQGGTDFHYRKHCALALNEMEFDGLAIGGLSVGEENALMYETIENLMPFMDENRPRYLMGVGTPEDLVEAVSRGVDMFDCVMPTRNARNGTFFTNFGKFNIKKAEFINDNESIDKTCSCYTCKNFSRGYLHHLFRAKELTFFRLASLHNLHFYLSLTKQMQEAIKNNRFDAFKKEFYRQRIS

SEQ ID NO: 53098 - protein, 388 aa, Campylobacter curvus
  misc_feature (1)..(388): sp|A7GYD5|TGT_CAMC5 Queuine tRNA-ribosyltransferase OS= Campylobacter curvus (strain 525.92) OX=360105 GN=tgt P E=3 SV=1
MKFEVLKTDGNARAGVLTTAHSVIQTPIFMPVGTVGAVKSLDATDMREILDAKIILANTYHMYLRPGSRVVAEFGGLHGFCKFNRSFLTDSGGFQAFSLRANTKNDEGGIKFKSHIDGSIHYFTPRSVLDTQYELDSDIMMILDDLVELPRDPHALGADEKARLKKRIDLSVTRTIKWAREAIDYHKFKQSQGAGLDQNIFGIIQGGTDYDARKICAQALCEMPFDGLAIGGLSVGEANEHMYETVEAVMPFIDAARPRYLMGVGTPEDIVENVQRGVDMFDCVMPTRNARNGTLFTSFGKIAIKNARFVNDHEPIDPECECYTCRRYSRGYLNHLFRAHELTFFRLASLHNLHYYLNLMKQIREAITAGKFSEFKREFYAKRSGGEI

SEQ ID NO: 53099 - protein, 374 aa, Campylobacter fetus
  misc_feature (1)..(374): tr|A0A0E1GM31|A0A0E1GM31_CAMFE Queuine tRNA-ribosyltran sferase OS=Campylobacter fetus subsp. fetus 04/554 OX=1 240980 GN=tgt PE=3 SV=1
MNFKIDKTDGNARACTLQTAHSTIQTPIFMPVGTLGAVKSLDAIDLKEILDAKIILANTYHLYLRPTSKVVREFGGLHGFSKFDRSFLTDSGGFQAFSLSKISKPDENGIKFKSHIDGSMHYFTPKSVLDTQYDLSSDIMMILDDLVALPATKERIDLSIKRTINWAKIACEYHKSNKQKSVGIDQNIFGIIQGGTDYNARKLCAEALCEMEFDGLAIGGLSVGESNEEMYHTVEALMPFIDKNRPRYLMGVGTPEDLVQNVERGVDMFDCVMPTRNARNGTLFTSFGKINIKSAAFIKDDNKIDPECDCYTCSNFSRGYLNHLYKARELTFFRLASLHNLHYYLNLVKQMREAIMQGKFKEFKREFYAKRGMI

SEQ ID NO: 53100 - protein, 374 aa, Campylobacter fetus
  misc_feature (1)..(374): sp|A0RPL5|TGT_CAMFF Queuine tRNA-ribosyltransferase OS= Campylobacter fetus subsp. fetus (strain 82-40) OX=3601 06 GN=tgt PE=3 SV=1
MNFKIDKTDGNARACTLQTAHSTIQTPIFMPVGTLGAVKSLDAIDLKEILDAKIILANTYHLYLRPTSKVVREFGGLHGFSKFDRSFLTDSGGFQAFSLSKISKPDENGIKFKSHIDGSMHYFTPKSVLDTQYDLSSDIMMILDDLVALPATKERIDLSIKRTINWAKIACEYHKSNKQKSVGIDQNIFGIIQGGTDYNARKLCAEALCEMEFDGLAIGGLSVGESNEEMYDTVEALMPFIDKNRPRYLMGVGTPEDLVQNVERGVDMFDCVMPTRNARNGTLFTSFGKINIKSAAFIKDDNKIDPECDCYTCSNFSRGYLNHLYKARELTFFRLASLHNLHYYLNLVKQMREAIMQGKFKEFKREFYAKRGMI

SEQ ID NO: 53101 - protein, 376 aa, Campylobacter geochelonis
  misc_feature (1)..(376): tr|A0A128EIX9|A0A128EIX9_9PROT Queuine tRNA-ribosyltran sferase OS=Campylobacter geochelonis OX=1780362 GN=tgt PE=3 SV=1
MTFNIDKTDGAARACTIKTAHSVIQTPIFMPVGTVGAVKSLDATDLKEILNAKIILANTYHMYLRPGSKIVKEFGGLHGFTKFDRSFLTDSGGFQAFSLSKNSKPDEDGIKFKSHIDGSTHYFTPRSVLDTQYELGSDIMMILDDLVALPAEKKRIELSLKRTIKWAKEAIDYHKFKQSKGVGIDQNIFGIIQGGTDFEARKECSKALCDMEFDGLAIGGLSVGESNELMYETVENMMPFVDTNRPRYLMGVGTPEDLVENTARGVDMFDCVMPTRNARNGTLFTSYGKINIKSAKFIHDDDPIDSECECYTCKRYSKGYLNHLFKAKELTFFRLASLHNLHYYLNLMRQMREAILTGKFSEFRREFYAKRGVIVS

SEQ ID NO: 53102 - protein, 388 aa, Campylobacter gracilis
  misc_feature (1)..(388): tr|C8PIR3|C8PIR3_9PROT Queuine tRNA-ribosyltransferase OS=Campylobacter gracilis RM3268 OX=553220 GN=tgt PE=3 SV=1
MEFQIDGADGAARACTIRTAHSTIRTPVFMPVGTVGAVKALDATDVAGILDAQIILANTYHMYLRPGSRVVAEFGGLHGFTKFPRSFLTDSGGFQAFSLRANTKNDEGGIKFKSHIDGSMHYFTPRSVLDTQYELNSDIMMILDDLVELPREPGALSSDDRSRLKKRIDLSVARTIKWAREAIDYHEAMKSRGLHTHQNIFGIIQGGTDPQARKFCAEALCEMSFDGLAIGGLSVGEKNELMYETVEAMMPYVDPARPRYLMGVGTPEDLVENVARGVDMFDCVMPTRNARNGTLFTSFGKISIKNASFISDCDPIDPHCDCYTCKRFSRGYLNHLFRARELSFYRLASIHNLHYYLRLAADMREAIVHGRFAEFRREFYAARSGARD

SEQ ID NO: 53103 - protein, 372 aa, Campylobacter helveticus
  misc_feature (1)..(372): tr|A0A1V0RGM3|A0A1V0RGM3_9PROT Queuine tRNA-ribosyltran sferase OS=Campylobacter helveticus OX=28898 GN=tgt PE= 3 SV=1
MEFKLKHKDNHARVCEIKTAHSSFLTPIFMPVGTAAAVKSLDAYDMSEILKAKIILANTYHLYLRPGSKIIRNLGGLHNFTRFSHSFLTDSGGFQAFSLSQNTKHFEEGIKFKSHIDGSLHLFTPKSVLETQYDFNSDICMVLDDLVALPASRKRVELSVERTIKWAKEAITHHKFKQQQGEALSQNVFGIIQGGTEFDLRKKCALELCEMDFDGLAIGGLSVGEENALMYEVVENLTPFMDEGRPRYLMGVGTPEDLVENVERGVDMFDCVMPTRNARNGTFFTSFGKFNIKRAEFINDNESIDKTCSCYTCKTYSRAYLNHLFKAKELTFFRLASLHNLHYYLTLVKEMRGAIMQNKFSEFKKEFYAKRS

SEQ ID NO: 53104 - protein, 373 aa, Campylobacter hepaticus
  misc_feature (1)..(373): tr|A0A424Z077|A0A424Z077_9PROT Queuine tRNA-ribosyltran sferase OS=Campylobacter hepaticus OX=1813019 GN=tgt PE =3 SV=1
MEFKLKHKDNMARVCQINTAHSSFLTPIFMPVGTLGAIKSLDANDIKNELDAKIILANTYHMYLRPGSKIIKDLGGLHGFTKFNRSFLTDSGGFQAFSLSKNSKHFDEGIEFKSHIDGSRHFFTPKNVLNAQYDFNSDIMMILDDLIALPADKKRIKISVDRTIAWAKEAINYHKIMQNQGIGLKQNIFGIIQGGTDYEERKRCALALNEMPFDGIAIGGLSVGEENSLMYETVQNLNPFMDENRPRYLMGVGTPEDLVENVERGIDMFDCVMPTRNARNGTFFTNFGKFNIKKTEFINDHEPIDQTCSCYTCRNFSRAYLNHLFKAKELTFFRLASLHNLYYYLELTKQMQKAILSNSFSQFKKEFYTKRRK

SEQ ID NO: 53105 - protein, 372 aa, Campylobacter hominis
  misc_feature (1)..(372): sp|A7I2I6|TGT_CAMHC Queuine tRNA-ribosyltransferase OS= Campylobacter hominis (strain ATCC BAA-381 / LMG 19568 / NCTC 13146 / CH001A) OX=360107 GN=tgt PE=3 SV=1
MKFQIDKTDGNARACTITTAHSVIKTPIFMPVGTVGAVKSLDALDLKEILDAKIILANTYHMFLRPGSKIVKEFGGLHGFTKFDRSFLTDSGGFQAFSLRTNTKNDDDGIHFKSHIDGSLHYFTPTSVLDTQYDFGSDIMMILDDLVALPADPKRVKLSIERTIKWAKKAINYHLQKRESGVGLNQNIFGIIQGGTDENARKFCAQSLCELPFDGLAIGGLSVGETNREMYDTVEAVMPYIDSARPRYLMGVGTPEDIVENVERGVDMFDCVMPTRNARNGTLFTSFGKINIKSARFIHDDTPIDPCCDCYTCKNYSRGYLNHLYRAREITFYRLASLHNLHYYLHLVSDIRTAILEGKFLEFKKDFYSKRS

SEQ ID NO: 53106 - protein, 374 aa, Campylobacter hyointestinalis
  misc_feature (1)..(374): tr|A0A330FEC3|A0A330FEC3_CAMHY Queuine tRNA-ribosyltran sferase OS=Campylobacter hyointestinalis subsp. lawsoni i OX=91353 GN=tgt PE=3 SV=1
MNFKIDKTDGNARACTIKTAHSTIQTPIFMPVGTLGAVKSLDAIDLKEILDTKIILANTYHLYLRPTSKVVREFGGLHGFSKFDRSFLTDSGGFQAFSLSKISKPDENGIKFKSHIDGSTHYFTPKSVLDTQYDLGSDIMMILDDLVALPASFERVELSIKRTINWAKIASEYHKSNKQKGVGIDQNIFGIIQGGTDYNARKFCAEALCEMEFDGLAIGGLSVGESNEEMYDTVEAVMPFIDKDRPRYLMGVGTPEDLVENVERGVDMFDCVMPTRNARNGTLFTSFGKVNIKAAAFIKDDNKIDPQCDCYTCSNFSRGYLNHLYKARELTFFRLASLHNLHYYLNLVKQMREAIMQGKFKEFKKEFYSKRGVL

SEQ ID NO: 53107 - protein, 374 aa, Campylobacter hyointestinalis
  misc_feature (1)..(374): tr|A0A2S5J6D2|A0A2S5J6D2_CAMHY Queuine tRNA-ribosyltran sferase OS=Campylobacter hyointestinalis subsp. hyointe stinalis OX=91352 GN=tgt PE=3 SV=1
MNFKIDKTDGNARACTLKTAHSTIQTPIFMPVGTLGVVKSLDAIDLKEILDTKIILANTYHLYLRPTSKVVREFGGLHGFSKFDRSFLTDSGGFQAFSLSKISKPDENGIKFKSHIDGSTHYFTPKSVLDTQYDLGSDIMMILDDLVALPASFERVELSIKRTINWAKIASEYHKSNKQKGVGESQNIFGIIQGGTDYNARKFCAEALCEMEFDGLAIGGLSVGESNEEMYDTVEAVMPFIDKDRPRYLMGVGTPEDLVENVERGVDMFDCVMPTRNARNGTLFTSFGKVNIKAAAFIKDDNKIDPQCDCYTCSNFSLGYLNHLYKARELTFFRLASLHNLHYYLNLVKQMREAIMQGKFKEFKKEFYAKRGVL

SEQ ID NO: 53108 - protein, 376 aa, Campylobacter iguaniorum
  misc_feature (1)..(376): tr|A0A076FB96|A0A076FB96_9PROT Queuine tRNA-ribosyltran sferase OS=Campylobacter iguaniorum OX=1244531 GN=tgt P E=3 SV=1
MNFKIDKTDGNARACTIQTAHSTIQTPIFMPVGTVGAVKSLDATDLKEILDAKIILGNTYHLYLRPTSKVVREFGGLHGFSKFDRSFLTDSGGFQAFSLSKISKPDENGIKFKSHIDGSMHYFTPKSVIDTQYDLGSDIMMILDDLVALPATKERIELSIKRTIKWAKEASLYHEENKQKGIGVNQNIFGIIQGGTDFEARRFCAEALCEMSFDGLAIGGLSVGESNQQMYDTVEAVMPHIDPKRPRYLMGVGTPEDLVENVERGVDMFDCVMPTRNARNGTLFTTFGKINIKSAAFINDHLPIDPDCDCYTCKRYSRGYLNHLYKARELTFFRLASLHNLHYYLNLVKQMRQAIMQGKFKEFKKAFYAKRGVYDK

SEQ ID NO: 53109 - protein, 373 aa, Campylobacter insulaenigrae
  misc_feature (1)..(373): tr|A0A0A8H019|A0A0A8H019_9PROT Queuine tRNA-ribosyltran sferase OS=Campylobacter insulaenigrae NCTC 12927 OX=10 31564 GN=tgt PE=3 SV=1
MQFKVEYKSANARACRIKTSHSEILTPIFMPVGTLAAVKSLDAVDMNEILNAKIILANTYHLYLRPGSKIINKMGGLHGFSKFNGSFLTDSGGFQAFSLNKNSKPNEGGIEFKSHIDGSLHYFTPQSVLDAQYDFNSDIMMILDDLVALPATKERIDLSLKRTIKWAKEAIKYHKMKQNQGIGIGQNIFGIIQGGVDFEARKQCSLSLCEMDFDGLAIGGLSVGEENQVMYDTIEAMMPFVDEDRPRYLMGVGTPEDLVENVSRGVDMFDCVMPTRNARNGTFFTSFGKFNIKKSDFITDYLPIDPKCSCYTCKNFSRAYLNHLFKAKELTFFRLASLHNLHYYLDLARQMREAIIKDEFEKFKKEFYSQRMT

SEQ ID NO: 53110 - protein, 373 aa, Campylobacter jejuni
  misc_feature (1)..(373): sp|Q9PNT0|TGT_CAMJE Queuine tRNA-ribosyltransferase OS= Campylobacter jejuni subsp. jejuni serotype O:2 (strain ATCC 700819 / NCTC 11168) OX=192222 GN=tgt PE=3 SV=1
MEFKLKHKDGMARVCEITTAHSTFLTPVFMPVGTVGAVKSLDANDMKNELDAKIILANTYHMYLRPTSKVVKDFGGLHGFTKFDRSFLTDSGGFQAFSLSKNSKHFNEGIEFKSHIDGSRHLFTPKSVLDTQYDFNSDIMMILDDLVALPATKERVKISVDRTILWAKEAITYHKNMQNKGIGIGQNIFGIIQGGTDYEERKRCALSLNEMPFDGLAIGGLSVGEENALMYETVQNLNPYLDENRPRYLMGVGTPEDLVENVERGVDMFDCVMPTRNARNGTFFTSFGKFNIKKAEFINDHEVIDSTCSCYTCRNFSRGYLNHLFKAKELTFFRLASLHNLHYYLELARKMREAILNNSFTQFKRNFYHLRGK

SEQ ID NO: 53111 - protein, 373 aa, Campylobacter jejuni
  misc_feature (1)..(373): sp|A8FM59|TGT_CAMJ8 Queuine tRNA-ribosyltransferase OS= Campylobacter jejuni subsp. jejuni serotype O:6 (strain 81116 / NCTC 11828) OX=407148 GN=tgt PE=3 SV=1
MEFKLKHKDGMARVCEITTAHSTFLTPVFMPVGTVGAVKSLDANDMKNELDAKIILANTYHMYLRPTSKVVKDFGGLHGFTKFDRSFLTDSGGFQAFSLSKNSKHFNEGIEFKSHIDGSRHLFTPKSVLDTQYDFNSDIMMILDDLVALPATKERVKISVDRTILWAKEAITYHKSMQNKGIGIGQNIFGIIQGGTDYKERKRCALSLNEMPFDGLAIGGLSVGEENALMYETVQNLNPYLDENRPRYLMGVGTPEDLVENVERGVDMFDCVMPTRNARNGTFFTSFGKFNIKKAEFINDHEAIDPACSCYTCCNFSRGYLNHLFKAKELTFFRLASLHNLHYYLELARKMREAILNNSFTQFKRNFYHLRGK

SEQ ID NO: 53112 - protein, 372 aa, Campylobacter lanienae
  misc_feature (1)..(372): tr|A0A562Y7S3|A0A562Y7S3_9PROT Queuine tRNA-ribosyltran sferase OS=Campylobacter lanienae OX=75658 GN=tgt PE=3 SV=1
MEFKIDKISQNARACTIKMAHGVVQTPVFMPVGTLGAIKSLDAIDMGEILKAKIILANTYHLYLRPGSKVIRGFGGLHGFSKFGGNFLTDSGGFQAFSLSHRSKADENGIKFKSHIDGSLHYFTPKSVLDTQYDLGSDIMMILDDLVALPATKERIELSLKRTIKWAKEAEIYHKNQKANGVGVNQNLFGIIQGGTDYKARKECAMALCDMDFDGLAIGGLSVGESNEQMYDTVEGVMPYIDPNRPRYLMGVGTPEDLVENVSRGVDMFDCVMPTRNARNGTLFTSFGKLNIKAAAFINDHEPIDLECRCYTCKRYSRGYLNHLYKAKELTFFRLASLHNLHYYLNLMKEMREAIMADKFIEFRAKFYAKRA

SEQ ID NO: 53113 - protein, 375 aa, Campylobacter lanienae
  misc_feature (1)..(375): tr|A0A381D929|A0A381D929_9PROT Queuine tRNA-ribosyltran sferase OS=Campylobacter lanienae OX=75658 GN=tgt PE=3 SV=1
MEFKIDKISQNARACTIKMAHGVVQTPVFMPVGTLGAIKSLDAVDMSEILGAKIILANTYHMYLRPGSKVIRGFGGLHGFSKFGGNFLTDSGGFQAFSLSHRSKPDENGIKFKSHIDGSLHYFTPKSVLDTQYDLGSDIMMILDDLVALPATKERIELSLKRTIKWAKEAEIYHKSQKSKGIGVDQNLFGIIQGGTDYNARKECAMALCDMDFDGLAIGGLSVGESNEQMYDTVEGVMPYIDPNRPRYLMGVGTPEDLVENVSRGVDMFDCVMPTRNARNGTLFTSFGKLNIKAAAFINDHEPIDNECQCYTCKRYSRGYLNHLYKAKELTFFRLASLHNLHYYLNLMKEMREAIMADKFIEFKMEFYAKRALTK

SEQ ID NO: 53114 - protein, 373 aa, Campylobacter lari
  misc_feature (1)..(373): sp|B9KFT3|TGT_CAMLR Queuine tRNA-ribosyltransferase OS= Campylobacter lari (strain RM2100 / D67 / ATCC BAA-1060 ) OX=306263 GN=tgt PE=3 SV=1
MEFKVEYKSANARACRIKTTHSEILTPAFMPVGTLAAIKSLDAIDMSEILDAKIILANTYHLYLRPSSKVIKQMGGLHGFSKFDRSFLTDSGGFQAFSLNKISKPDEEGIKFKSHIDGSLHYFTPKSVLDAQYDFNSDIMMILDDLVALPASKERIELSLKRTIKWAKEAIDYHKLKQNQGVGMGQNIFGIIQGGTDFEARRICSQALCEMDFDGLAIGGLSVGEENEVMYDTVEAMMPYVDNNRPRYLMGVGTPEDLVENVARGVDMFDCVMPTRNARNGTLFTSFGKFNIKKAEFITDHSPIDSKCSCYTCKNFSRAYLNHLFKAKELTFFRLASLHNLHYYLNLAKQMREAIIKNEFENFKKEFYRQRTC

SEQ ID NO: 53115 - protein, 373 aa, Campylobacter lari
  misc_feature (1)..(373): tr|A0A0A8HU74|A0A0A8HU74_CAMLA Queuine tRNA-ribosyltran sferase OS=Campylobacter lari NCTC 11845 OX=1388749 GN= tgt PE=3 SV=1
MEFEVQYKSANARACRIKTTHSEILTPIFMPVGTLAAIKSLDAIDMSEILNAKIILANTYHLYLRPGSKVIKQMGGLHGFSKFKGSFLTDSGGFQAFSLSKNSKPDEKGIQFKSHIDGSLHYFTPQSVLDAQYDFNSDIMMILDDLVALPASKERIELSLKRTIKWAKEAIDYHKLKQSQGIGIGQNIFGIIQGGTDFEARKICSQVLCEMDFDGLAIGGLSVGEENEAMYDTVEAMMPYVDNNRPRYLMGVGTPEDLVENVARGVDMFDCVMPTRNARNGTLFTSFGKFNIKKAEFITDHAPIDNKCSCYTCKNFSRAYLNHLFKAKELTFFRLASIHNLHYYLNLVKQMREAIIKDEFENFRKEFYRQRIC

SEQ ID NO: 53116 - protein, 373 aa, Campylobacter ornithocola
  misc_feature (1)..(373): tr|A0A1C2FST5|A0A1C2FST5_9PROT Queuine tRNA-ribosyltran sferase OS=Campylobacter ornithocola OX=1848766 GN=tgt PE=3 SV=1
MEFEVQYKSANARACRIKTTHSEILTPIFMPVGTLAVIKSLDAIDMSEILNAKIILANTYHLYLRPGSKVIKQMGGLHGFSKFNGSFLTDSGGFQAFSLSKNSKPDEKGIQFKSHIDGSLHYFTPQSVLDAQYDFNSDIMMILDDLVALPASKERIELSLKRTIKWAKEAIDYHKLKQSQGVGIGQNIFGIIQGGTDFEARKICSQALCEMDFDGLAIGGLSVGEENEVMYDTVEAMMPYVDNNRPRYLMGVGTPEDLVENVARGVDMFDCVMPTRNARNGTLFTSFGKFNIKKAEFITDHAPIDNKCSCYTCKNFSRAYLNHLFKAKELTFFRLASIHNLHYYLNLVKQMREAIIKDEFENFRKEFYRQRIC

SEQ ID NO: 53117 - protein, 372 aa, Campylobacter peloridis
  misc_feature (1)..(372): tr|A0A0A8GR78|A0A0A8GR78_9PROT Queuine tRNA-ribosyltran sferase OS=Campylobacter peloridis LMG 23910 OX=1388753 GN=tgt PE=3 SV=1
MEFEVQYKSANARACRIKTTHSEILTPIFMPVGTLAAIKSLDAIDMSEILNAKIILANTYHLYLRPGSKVIKQMGGLHGFSKFEGSFLTDSGGFQAFSLSKNSKPDECGIKFKSHIDGSLHYFTPQNVLDAQYDFNSDIMMILDDLVALPASKERIELSLKRTIKWAKEAIDYHKIKQNQGIGIGQNIFGIIQGGTDFEARKICSEALCEMEFDGLAIGGLSVGEENKAMYDTVEAMMPYVDENRPRYLMGVGTPEDLVENVSRGVDMFDCVMPTRNARNGTLFTSFGKFNIKKAEFITDHTPIDPKCSCYTCRNFSRAYLNHLFKAKELTFFRLASLHNLHYYLNLVKQMREAIIKNEFENFKKEFYRQRS

SEQ ID NO: 53118 - protein, 372 aa, Campylobacter peloridis
  misc_feature (1)..(372): tr|A0A5C7DKM5|A0A5C7DKM5_9PROT Queuine tRNA-ribosyltran sferase OS=Campylobacter peloridis OX=488546 GN=tgt PE= 3 SV=1
MEFEVQYKSANARACRIKTTHSEILTPIFMPVGTLAAIKSLDAIDMSEILNAKIILANTYHLYLRPGSKVIKQMGGLHGFSKFNGSFLTDSGGFQAFSLSKNSKPDECGIKFKSHIDGSLHYFTPQSVLDAQYDFNSDIMMILDDLVALPASKERIELSLKRTIKWAKEAIDYHKIKQKQGIGIGQNIFGIIQGGTDFEARKICSQALCEMDFDGLAIGGLSVGEENEAMYDTVEAMMPYVDENRPRYLMGVGTPEDLVENVSRGVDMFDCVMPTRNARNGTLFTSFGKFNIKKAEFITNHTPIDPKCSCYTCRNFSRAYLNHLFKARELTFFRLASLHNLHYYLNLVKQMREAIIKNEFEKFKKEFYRQRS

SEQ ID NO: 53119 - protein, 375 aa, Campylobacter pinnipediorum
  misc_feature (1)..(375): tr|A0A1S6TPS9|A0A1S6TPS9_9PROT Queuine tRNA-ribosyltran sferase OS=Campylobacter pinnipediorum subsp. pinnipedi orum OX=1660067 GN=tgt PE=3 SV=1
MKFDIVAKDSNARAGIIQTAHSMIQTPVFMPVGTVGAVKSLDALDMKETLNANIILANTYHMYLRPGSKIVKEFGGLHGFTKFDRSFLTDSGGFQAFSLRSNTKNDDGGIKFKSHIDGSMHYFTPKSVLDTQYDFGSDIMMILDDLVALPADKKRVELSLHRTIKWAKEAIDYHKLKQSQGIGVNQNIFGIIQGGTDYEARKKCATEISQMDFDGLAIGGLSVGESNQEMYDTVEAVMPFIDQNRPRYLMGVGTPEDLVENVGRGVDMFDCVMPTRNARNGTLFTSFGKINIKSAKFINDHMPIDPECQCYTCKNYSRGYLNHLFKARELTFFRLASLHNLHYYLNLMKEIREAIIKGEFAKFKIKFYAKRNIQK

SEQ ID NO: 53120 - protein, 375 aa, Campylobacter pinnipediorum
  misc_feature (1)..(375): tr|A0A1S6U858|A0A1S6U858_9PROT Queuine tRNA-ribosyltran sferase OS=Campylobacter pinnipediorum subsp. caledonic us OX=1874362 GN=tgt PE=3 SV=1
MKFDIVAKDSNARAGVIQTAHSTIQTPVFMPVGTVGAVKSLDALDMKETLNANIILANTYHMYLRPGSKIVKEFGGLHGFTKFDRSFLTDSGGFQAFSLRSNTKNDDGGIKFKSHIDGSMHYFTPKSVLDTQYDFGSDIMMILDDLVALPADKKRVELSLHRTIKWAKEAIDYHKFKQSQGIGVNQNIFGIIQGGTDYEARKKCAIEISQMDFDGLAIGGLSVGESNQEMYDTVEAVMPFIDKNRPRYLMGVGTPEDLVENVERGVDMFDCVMPTRNARNGTLFTSFGKINIKSAKFINDHMPIDPECQCYTCKNYSRGYLNHLFKARELTFFRLASLHNLHYYLNLMKEIRESIIKGEFTKFKIKFYAKRNIQK

SEQ ID NO: 53121 - protein, 378 aa, Campylobacter rectus
  misc_feature (1)..(378): tr|B9D297|B9D297_CAMRE Queuine tRNA-ribosyltransferase OS=Campylobacter rectus RM3267 OX=553218 GN=tgt PE=3 SV =1
MTFSIDKTDGVARAGTLTTAHSTIKTPVFMPVGTVGAVKSLDAVDMMQILGAQIILGNTYHLYLRPGSKVVKELGGLHGFTKFNRSFLTDSGGFQAFSLSKISKPDENGIKFKSHIDGSAHYFTPRSVLDTQYDLNSDIMMILDDLVALPAEKKRVELSIKRTIKWAREAIDYHKFKQDKGEGLTQNIFGIIQGGTDEAARKFCAEALCEMPFDGLAIGGLSVGESNQEMYDTVQAVMPYIDAARPRYLMGVGTPEDLVENVARGVDMFDCVMPTRNARNGTLFTSFGKINIKSAKFAADPAPIDPQCDCYACRNYSRAYLSHLYRAGELTFFRLASLHNLHYYLNLMRQMREAITAGEFEKFRRNFYAKRGKDAPSI

SEQ ID NO: 53122 - protein, 378 aa, Campylobacter rectus
  misc_feature (1)..(378): tr|A0A3P1X7G4|A0A3P1X7G4_CAMRE Queuine tRNA-ribosyltran sferase OS=Campylobacter rectus OX=203 GN=tgt PE=3 SV=1
MTFSIDKTDGAARAGTLITAHSTIKTPVFMPVGTVGAVKSLDAVDMMQILGAQIILGNTYHLYLRPGSKVVKELGGLHGFTKFNRSFLTDSGGFQAFSLSKISKPDENGIKFKSHIDGSAHYFTPRSVLDTQYDLNSDIMMILDDLVALPAEKKRVELSIKRTIKWAREAIDYHKFKQNNGEGLTQNIFGIIQGGTDEAARKFCAEALCEMPFDGLAIGGLSVGESNQEMYDTVQAVMPYIDAARPRYLMGVGTPEDLVENVARGVDMFDCVMPTRNARNGTLFTSFGKINIKSARFATDRAPIDPQCDCYACQNYSCAYLSHLYRAGELTFFRLASLHNLHYYLNLMRQMREAIMAGEFEKFRRNFYAKRGKDAPSI

SEQ ID NO: 53123 - protein, 378 aa, Campylobacter showae
  misc_feature (1)..(378): tr|C6RFF3|C6RFF3_9PROT Queuine tRNA-ribosyltransferase OS=Campylobacter showae RM3277 OX=553219 GN=tgt PE=3 SV =1
MTFSIDKTDGAARAGTLITAHSTIKTPVFMPVGTVGVVKSLDAVDMMQILGAQIILGNTYHLYLRPSSKVVKELGGLHGFTKFNHSFLTDSGGFQAFSLSKISKPDENGIKFKSHIDGSAHYFTPRSVLDTQYDLNSDIMMILDDLVALPAEKKRVELSIKRTIKWAREAIDYHKFKQSKGEGLTQNIFGIIQGGTDEAARKFCAEALCEMPFDGLAIGGLSVGESNQEMYDTVQGVMPYIDAARPRYLMGVGTPEDLVENAARGVDMFDCVMPTRNARNGTLFTSFGKINIKSAKFATDRAPIDPQCNCYACQNYSRAYLSHLYRAGELTFFRLASLHNLQYYLNLMKQMREAIIAGEFEKFRRNFYAKRGKDAPSI

SEQ ID NO: 53124 - protein, 374 aa, Campylobacter showae
  misc_feature (1)..(374): tr|M5IR57|M5IR57_9PROT Queuine tRNA-ribosyltransferase OS=Campylobacter showae CSUNSWCD OX=1244083 GN=tgt PE=3 SV=1
MTFSIDKTDGAARAGTLTTAHSTIKTPVFMPVGTVGAVKSLDAVDMMQILDAQIILGNTYHLYLRPGSKVVKELGGLHGFTKFNRSFLTDSGGFQAFSLSKISKPDENGIKFKSHIDGSTHYFTPRSVLDTQYDLNSDIMMILDDLVALPAEKKRVELSIKRTIKWAREAIDYHKFKQNKGEGLTQNIFGIIQGGTDEAARKFCAEALCEMPFDGLAIGGLSVGESNQEMYDTVQAVMPYIDAARPRYLMGVGTPEDLVENVARGVDMFDCVMPTRNARNGTLFTSFGKINIKSARFATDRAPIDPECECYACQNYSRAYLSHLYRAGELTFFRLASLHNLHYYLNLMKQMREAIKDGKFAEFRREFYAKRQAK

SEQ ID NO: 53125 - protein, 372 aa, Campylobacter sp.
  misc_feature (1)..(372): tr|A0A1X9SWQ1|A0A1X9SWQ1_9PROT Queuine tRNA-ribosyltran sferase OS=Campylobacter sp. RM6137 OX=1660073 GN=tgt P E=3 SV=1
MEFKIDKISQNARACTIKMAHGIIKTPVFMPVGTLGAIKSLDAVDMSEILDAKIILANTYHLYLRPGSKVVKGFGGLHGFSGFDRNFLTDSGGFQAFSLSHRSKADENGIKFKSHIDGSLHYFTPKSVLDTQYDLGSDIMMILDDLVALPATKERIELSLKRTIKWAKEAQMYHKTQKANGVGAHQNLFGIIQGGTDYKARKECATALCDMEFDGLAIGGLSVGESNQQMYDTVQGVMPYIDPNRPRYLMGVGTPEDLVENVSRGVDMFDCVMPTRNARNGTLFTSFGKLNIKAAAFINDHEPIDQECQCYTCKRYSRGYLNHLYKARELTFFRLASLHNLHYYLNLMKQIREAIMADKFAEFRSEFYAKRA

SEQ ID NO: 53126 - protein, 376 aa, Campylobacter sp.
  misc_feature (1)..(376): tr|A0A4U7BPA4|A0A4U7BPA4_9PROT Queuine tRNA-ribosyltran sferase OS=Campylobacter sp. MIT 17-664 OX=2040646 GN=t gt PE=3 SV=1
MEFKLKYKDGMARVCEITTAHSTFETPIFMPVGTVGAVKSLDTNDLRNELNAKIILANTYHMYLRPGLEVIKNFKGLHGFTRFDRSFLTDSGGFQAFSLSKNSKHFNEGIEFKSHIDGSKHLFTPRSVLDIQYTFKSDIMMILDDLVALPANKERVKISVDRTILWAKEAIEYHKKMQKQNIGLDQNIFGIIQGGTDYEERKRCALALNEMEFDGLAIGGLSVGEENALMYETVENLNPFLDENRPRYLMGVGTPEDLVENVERGVDMFDCVMPTRNARNGTFFTSFGKFNIKKAEFVNDHDPIDKTCQCYTCRNFSRAYLNHLFKAKELTFFRLASLHNLYYYLDLVKQMREAIKKNEFNKFKKDFYSKRLNNAI

SEQ ID NO: 53127 - protein, 376 aa, Campylobacter sputorum
  misc_feature (1)..(376): tr|A0A381DKE4|A0A381DKE4_9PROT Queuine tRNA-ribosyltran sferase OS=Campylobacter sputorum biovar sputorum OX=32 024 GN=tgt PE=3 SV=1
MKFKIDKIDQNARACTIQTSHSTIQTPIFMPVGTLGAVKSLDANDLLDELDAKIILGNTYHLYLRPGSKIIKEFGGLHGFTKFNRSFLTDSGGFQAFSLRSNTKNDDLGIKFKSHIDGSMHYFTPKSVLDTQYDFNSDIMMILDDLPALPASKERIELSIKRTLSWAKIAIDYHEQNKQNGIGINQNIFGIIQGGTDYEARKLCSQSLCEMNFDGLAIGGLSVGESNNEMYDTVEAMMPFVDTNRPRYLMGVGTPEDIVENIERGVDMFDCVMPTRNARNGTLFTTFGKINIKSAKFINDQGPIDPNCNCYTCRNFSRGYLNHLFKSRELTFFRLASIHNLHYYLSLVKEAREAILQCKFSKFKKEFYAKRGKNEI

SEQ ID NO: 53128 - protein, 373 aa, Campylobacter subantarcticus
  misc_feature (1)..(373): tr|A0A0A8H8P8|A0A0A8H8P8_9PROT Queuine tRNA-ribosyltran sferase OS=Campylobacter subantarcticus LMG 24374 OX=13 88751 GN=tgt PE=3 SV=1
MEFEVQYKSANARACRIKTTHSEIVTPIFMPVGTLAAIKSLDAVDMSEILDARIILANTYHLYLRPGSKVIKQMGGLHGFSKFEGSFLTDSGGFQAFSLSKNSKPDEKGIQFKSHIDGSLHYFTPQSVLDAQYDFNSDIMMILDDLVALPASKERIELSLKRTIKWAKEAIDYHKLKQSQGVGIGQNIFGIIQGGTDFEARKICSQALCEMDFDGLAIGGLSVGEENEAMYDTVEAMMPYVDNNRPRYLMGVGTPEDLVENVARGVDMFDCVMPTRNARNGTLFTSFGKFNIKKAEFITDHAPIDSKCSCYTCKNFSRAYLNHLFKAKELTFFRLASIHNLHYYLNLVKQMREAIIKDEFENFRKEFYRQRMC

SEQ ID NO: 53129 - protein, 372 aa, Campylobacter upsaliensis
  misc_feature (1)..(372): tr|A0A381EIC4|A0A381EIC4_CAMUP Queuine tRNA-ribosyltran sferase OS=Campylobacter upsaliensis OX=28080 GN=tgt PE =3 SV=1
MEFKLKYKDNNARVCEIKTAHSSFLTPIFMPVGTAAAVKSLDAYDMSEILKAKIILANTYHLYLRPSSKVIKNLGGLHHFTQFPYSFLTDSGGFQAFSLSKNSKHFEEGIKFKSHIDGSLHLFTPQSVLETQYDFNSDICMVLDDLVALPSSRARVELSVERTIKWAKEAINYHKFKQNEGEGLTQNVFGIIQGGTEFDLRKKCALELCEMDFDGLAIGGLSVGEENTLMYEVVENLTPFMDENRPRYLMGVGTPEDLVENVERGVDMFDCVMPTRNARNGTFFTSFGKFNIKRAEFINDNESIDKTCSCYTCQNYSRAYLNHLFRAKELTFFRLASLHNLHYYLNLVKQMQEAIMKNQFNEFKREFYAKRS

SEQ ID NO: 53130 - protein, 372 aa, Campylobacter upsaliensis
  misc_feature (1)..(372): tr|E6L916|E6L916_CAMUP Queuine tRNA-ribosyltransferase OS=Campylobacter upsaliensis JV21 OX=888826 GN=tgt PE=3 SV=1
MEFKLKYKDNNARVCEIKTAHSSFLTPIFMPVGTAAAVKSLDAYDMSEILKAKIILANTYHLYLRPSSKVIKNLGGLHHFTQFPYSFLTDSGGFQAFSLSKNSKHFEEGIKFKSHIDGSLHLFTPQSVLETQYDFNSDICMVLDDLVALPSSRARVELSVERTIKWAKEAIDYHKFKQNEGEGLTQNVFGIIQGGTEFDLRKKCALELCEMDFDGLAIGGLSVGEENALMYEVVENLTPFMDEKRPRYLMGVGTPEDLVENVERGVDMFDCVMPTRNARNGTFFTSFGKFNIKKAEFINDNESIDKTCSCYTCQNYSRAYLNHLFRAKELTFFRLASLHNLHYYLNLVQQMREAIMKNQFSEFKREFYAKRS

SEQ ID NO: 53131 - protein, 372 aa, Campylobacter ureolyticus
  misc_feature (1)..(372): tr|A0A381E8D9|A0A381E8D9_9PROT Queuine tRNA-ribosyltran sferase OS=Campylobacter ureolyticus OX=827 GN=tgt PE=3 SV=1
MEFNIDKIDGNARACTIKTTHSTIQTPIFMPVGTVGAVKSLDAFDLMQTLDAKIILANTYHMYLRPGSKIVKNFGGLHGFTKFNRSFLTDSGGFQAFSLSDISKPDENGIKFRSHIDGSKHYFTPKSVLDIQYDLGSDIMMILDDLVGLPATKKRVDESIKRTIKWAKEAIDYHKLNQNKGIGINQNLFGIIQGGTDYEARKFCAQKLCEMEFDGLAIGGLSVGESNEEMYDTVEGVMPFVDKNRPRYLMGVGTPEDLVENIERGVDMFDCVMPSRNARNGTLFTSFGKINIKGAKFINDHEPVDKTCNCHTCKNYSRAYLNHLYRSKELTFYRLATLHNLHYYLNLVKDAREAILKGKFSEFKKEFYSLRS

SEQ ID NO: 53132 - protein, 373 aa, Campylobacter ureolyticus
  misc_feature (1)..(373): tr|S3XR58|S3XR58_9PROT Queuine tRNA-ribosyltransferase OS=Campylobacter ureolyticus ACS-301-V-Sch3b OX=883165 GN=tgt PE=3 SV=1
MEFNIDKIDGNARACTIKTAHSTIQTPIFMPVGTVGAVKSLDAFDLMQTLDAKIILANTYHMYLRPGSKIVKNFGGLHGFTKFNRSFLTDSGGFQAFSLSDISKPDENGIKFRSHIDGSKHYFTPKSVLDTQYDLGSDIMMILDDLVGLPATKKRVDESIKRTIKWAKEAIDYHKLNQNKGVGIGQNLFGIVQGGTDYEARKFCAQKLCEMEFDGLAIGGLSVGESNEEMYDTVEGVMPFIDKNRPRYLMGVGTPEDLVENIERGVDMFDCVMPSRNARNGTLFTSFGKINIKGAKFINDHEPVDKTCNCHTCKNYSRAYLNHLYRSKELTFYRLATLHNLHYYLNLVKDAREAILKGKFSEFKKEFYSLRSL

SEQ ID NO: 53133 - protein, 373 aa, Campylobacter volucris
  misc_feature (1)..(373): tr|A0A5C8KXT6|A0A5C8KXT6_9PROT Queuine tRNA-ribosyltran sferase OS=Campylobacter volucris OX=1031542 GN=tgt PE= 3 SV=1
MEFKVEYKSSNARACRIKTSHSEILTPIFMPVGTLAAIKSLDAIDMSEILDAKIILANTYHLYLRPGSKIIKQMGGLHGFSKFDRSFLTDSGGFQAFSLSKNSKPDEEGIKFKSHIDGSLHYFTPKSVLDAQYDFNSDIMMILDDLVALPASKERIELSLKRTIKWAKEAIDYHKLKQSQGIGIGQNIFGIIQGGTDFEARKICSQALCEMSFDGLAIGGLSVGEENEAMYDTVEAMMPYVDENRPRYLMGVGTPEDLVENVSRGVDMFDCVMPTRNARNGTLFTSFGKFNIKKAEFITDNLPIDLKCSCYTCKNFSRAYLNHLFKAKELTFFRLASLHNLHYYLDLVKQMRQAIIKDEFENFKREFYRQRTC

SEQ ID NO: 53134 - protein, 373 aa, Campylobacter volucris
  misc_feature (1)..(373): tr|A0A5C7E5L9|A0A5C7E5L9_9PROT Queuine tRNA-ribosyltran sferase OS=Campylobacter volucris OX=1031542 GN=tgt PE= 3 SV=1
MEFKIEYKSSNARACCIKTSHSEILTPVFMPVGTLAAIKSLDAIDMSEILDAKIILANTYHLYLRPGSKIIKQMGGLHGFSKFNRSFLTDSGGFQAFSLSANSKPDEEGIKFKSHIDGSLHYFTPKSVLDAQYDFNSDIMMILDDLVALPASKERIDLSLKRTIKWAKEAIDYHKFKQSQGIGIEQNIFGIIQGGTDFEARKICAQALCEMSFDGLAIGGLSVGEENEAMYDTVEAMMPYVDENRPRYLMGVGTPEDLVENVSRGVDMFDCVMPTRNARNGTLFTSFGKFNIKKAEFITDNLPIDPKCSCYTCKNFSRAYLNHLFKAKELTFFRLASLHNLHYYLDLAKQMRQAIIKDEFENFKREFYRQRTC

SEQ ID NO: 53135 - protein, 377 aa, Campylobacteraceae bacterium
  misc_feature (1)..(377): tr|A0A1V4R5D3|A0A1V4R5D3_9PROT Queuine tRNA-ribosyltran sferase OS=Campylobacteraceae bacterium 4484_166 OX=195 6165 GN=tgt PE=3 SV=1
MRFDINFQSQKARATTIQTASSVIQTPVFMPVGTQATVKALDTNDIKNLQAKIVLANTYHLYLRPGYKLIKELGGLHKFTNYPHSFLTDSGGFQAFSLSKLNKNSVKVDENGIRFKSHIDGSTHYFTPISVLEAQYGFKSDIMMVLDDLISLPNTTKRILKSIQRTTSWAKISLDFHKLQQKKGIATTQNIFAIIQGGTDKNMRTISSKQLCELDFDGFAIGGLSVGEPNELMYDIVEHTTAYMPTHKPRYLMGVGTPIDLLECIHRGVDMFDCVMPTRNARNGTIFTNNGRLNIRNKEFISDDRPLEAGCECHSCRHYTRAYLNHLYKTKEMSYFRLASIHNIHYYMNLMRQAREAILQDNWFEFKTATIKKLQQK

SEQ ID NO: 53136 - protein, 379 aa, Campylobacteraceae bacterium
  misc_feature (1)..(379): tr|A0A1V4R820|A0A1V4R820_9PROT Queuine tRNA-ribosyltran sferase OS=Campylobacteraceae bacterium 4484_166 OX=195 6165 GN=tgt PE=3 SV=1
MKFDIDNICGSARAGTIVTKHSTITTPVFMPVGTQATVKALDGIDMTNLGAKIILANTYHLYLRPKSTTIRKAGGIHKFANYPYSFLTDSGGFQAFSLGKLQKNSVKQNEHGIEFRSHIDGSKHIFTPTSVLDTQYDIRSDIMMVLDDLVALPNSKKRIELSVNRTTKWAKQSILYHQQQQKKGIGLDQNIFAIIQGGTDKSLRTKSAKELCSLDGFDGFAIGGLSVGEANDIMYDIVSHTTQYMPSNKPRYLMGVGTPADLISCIDRGVDMFDCVMPTRNARNGTLFTKYGRINIRNSTYIDDFTAIEDDCSCYCCVNFTKAYLNHLYKTKELIYFRLATIHNIHYYLQLMRQARSAIIEDRWQEFKQKFFYDINLRK

SEQ ID NO: 53137 - protein, 373 aa, Campylobacterales bacterium
  misc_feature (1)..(373): tr|A0A258X145|A0A258X145_9PROT Queuine tRNA-ribosyltran sferase OS=Campylobacterales bacterium 16-40-21 OX=1970 501 GN=tgt PE=3 SV=1
MEFTIDATCGKARACTITTAHSTIQTPIFMPVGTVGSVKSLDMFDMNDILGAQIILANTYHTYLRPGDETIAAMGGLHGFTTYPKTFLTDSGGFQAFSLSDISKPTESGIEFKSHIDGSRHFFTPEKVIDIQNNLGSDIMMILDDLVALPATQERIKTSIDRTTQWAKQSIEYFRHKQSLGIGTQQNIFAIIQGGTDLNFRTQSANELCAMDYDGFAIGGLSVGESNNLMYDTVEHTTPLMPVNKPRYLMGVGTPEDLVENIERGIDMFDCVMPTRNARNGTLFTTYGRINIRGAKFKLDSEPIDPACECYTCKRYTRAYLHHLFRAKELTFFRLASLHNLHYYLWLVGEARKAIIAGQFSEFKKDFYARRQA

SEQ ID NO: 53138 - protein, 365 aa, Scalindua sp.
  misc_feature (1)..(365): tr|A0A286TV83|A0A286TV83_9BACT Queuine tRNA-ribosyltran sferase OS=Candiadtus Scalindua japonica OX=1284222 GN= tgt PE=3 SV=1
MQFRLLASDNKTKARCGEITTNHGLIPTPAFMPVGTQATVKTLTPLQLQETEAHALLCNAYHLYLRPGHEVVKKLGGLHKFMKWDRSIITDSGGYQVFSLERLTKVTDDGVEFQSPIDGSRRFLNPEIVMDIQHALGADIIMAFDECLPYPCEKDRVRQSMYRTVKWANRCLKAHNSDDQELFAIVQGSVFKDIREECTDRLVEMEFNGYAIGGLSVGEGNLLMNEVLEYTTPRLPENKPRYLMGVGFPLDILDGIEHGIDLFDCVIPTRNGRNGCAFTSNGKLKIRNSCYKTDERPIDKNCHCYACKNFSRAYIRHLLTSNEILGLSLMSLHNICFFENMMKKARQSIIEGNFLNFKSKFLSLQ

SEQ ID NO: 53139 - protein, 378 aa, Unknown
  misc_feature (1)..(378): tr|A0A2M7TKX8|A0A2M7TKX8_9BACT Queuine tRNA-ribosyltran sferase OS=candidate division WWE3 bacterium CG_4_10_14 _0_2_um_filter_41_14 OX=1975072 GN=tgt PE=3 SV=1
MTVEKFAINSKDALTNARTGILNSRNGNIQTPCFLPDATRATVKHLSPTDLDDIGVQIILGNLYHLWLRPGVEVIEHMGGLHSFMNWHKPILTDSGGYQVFSLLHSKGLGKITQEGAYFTSHIDGKKLMLTPESSVSMQYRMGSDVILMLDESAPGTSSESYISQSVERTIAWAKRSKQTYENLNKDHDRFLFGIVQGGVYENQLIKSAQETVAIGFDGYALGGVAVGITADKLHDVMGYSIEHLPVDKPRYLLGAGYPNDIVRAVSLGVDVFDCVVPTRNARHGSLFTQNGKLCLTNAQFTTDPNPIDETCSCYACKNFSRAYIRHLIRVNEALGFRLTTIHNLTYYMWLMKTIRQTIENGTFSVFYKEIIGQYEKT

SEQ ID NO: 53140 - protein, 425 aa, Unknown
  misc_feature (1)..(425): tr|A0A2M7WYV9|A0A2M7WYV9_9BACT Queuine tRNA-ribosyltran sferase (Fragment) OS=candidate division WWE3 bacterium CG_4_9_14_3_um_filter_43_9 OX=1975082 GN=tgt PE=3 SV=1
LPHGKVETPSFVPVGTQASVKALSSQELKEIGVKIFFGNTYHLFLRPGAQVIQKLGGIHKFMGWDGPIMTDSGGFQVFSLGLGKLKLKIEKEKLKIAGRYETPYENASPVCAGKLDPSVPIRRLRMTFKESKTGKNQFLAEFAEEGVRFKSHLDGSEHFLTPEKSIQIQKQLGADIILAFDDCTPYPVDYAYAELSMERTHRWAERSLKEFKRLRTKTKAGLRPQFLASGQSLYGVIQGSTFEDLRKKSARFIDALGTEGIAIGGMAVGESKKLMYKTLEWTIPELEEEKPRHLLGVGEVDDIFEAVERGVDTLDCVTPTRLARHKNLFVHPKIAALEKSKSRFNLIITNAKYAADKSPVDPLCQCVVCQNYSRAYLHHLYKSNEILGVRLGTYHNLYFLVSLMKQIREAIADNRFQRLKQEWLV

SEQ ID NO: 53141 - protein, 373 aa, Abawacabacteria bacterium
  misc_feature (1)..(373): tr|A0A1F4XLF7|A0A1F4XLF7_9BACT Queuine tRNA-ribosyltran sferase OS=Candidatus Abawacabacteria bacterium RBG_16_ 42_10 OX=1817814 GN=tgt PE=3 SV=1
MFDFAITSKKITNTYARTGMFSTPHGNFETPIFMPVGTKGTVKTFTPEELVSLGAEIILGNTYHLYLRPGPEFLAERGGLHRWIHWDKPILTDSGGFQVFSLKKIRSITEDGVEFQSIHDGSKHFFTPEKVMEVQADIGADIIMAFDECAPGRVDMAYAKEAMDRTHRWLERCIAAQKRPKDQALFPIIQGVTYDDLRIESCKFVTQHDLPGIAIGGLAVGEAKDTTYRVLDTLAPYLPEHKPHYLMGVGSPEDLWESVHRGVDMFDCVLPTRVGRHGGVFTQTGRIDVKRNAYRTSDKPIDETCSCYTCKNYSLSYLRHLITENEILGARLCSFHNMHFLFEQIRHIRASIQDGTFLTQKEAFTRKYKYMGS

SEQ ID NO: 53142 - protein, 375 aa, Abyssubacteria bacterium
  misc_feature (1)..(375): tr|A0A3A4P0D8|A0A3A4P0D8_9BACT Queuine tRNA-ribosyltran sferase OS=Candidatus Abyssubacteria bacterium SURF_5 O X=2093360 GN=tgt PE=3 SV=1
MKEDFAFQILKTDSRTRARAGRFITPHGAVDTPQFMPVGTQATVKTLTSEDLHLLGAQIILSNTYHLYLRPGHQIIQAAGGLHSFMNWPKPILTDSGGFQVFSLAELNKVTEDGVHFQSHIDGSRHFFTPELCMEIQNALGADIIMVFDECLPYPVEKDYARSSLQLTLQWAQRCKAAHNNRRQALFGIVQGATFHDLRIEAARRLVDMDFPGYAVGGLSVGETPQTMYEILDYTVEELPPQKPRYLMGSGPPADIFEAVERGIDMFDCVMPTRNARNASLMTSQGVVIVKNAEYASDFSPLDSECDCLTCRNYTRAYLRHLFKAGEITAMRLATLHNVRFMVTLLDNIRSAILSDSYSEFKRSFLEKYQRKVRP

SEQ ID NO: 53143 - protein, 377 aa, Abyssubacteria bacterium
  misc_feature (1)..(377): tr|A0A419F6J0|A0A419F6J0_9BACT Queuine tRNA-ribosyltran sferase OS=Candidatus Abyssubacteria bacterium SURF_17 OX=2093361 GN=tgt PE=3 SV=1
MLMQANEFTFEVIRNDSGTRARVGKLTTPHGIVNTPQFIPVGTQAAVKTLSSEDLHTLGSEIILSNTYHLYLRPGHEVVRSAGGLHSFMNWPKPILTDSGGFQVFSLAELNKVTEDGVHFQSHLDGSRHFFTPELCMEVQNALGADIVMVFDECLPYPIEHDYAKASLRLTLNWAERCKKAHQNHQQALFGIVQGATFRDLRMECARELARMDFPGYAIGGLSVGETPQMMYEILDYTADELPAGKPRYLMGSGPPVDIFEAVERGIDLFDCVMPTRNARNASLMTSQGVVIVKNAEYAADFSALDPECSCITCQHYTRAYLRHLFKAGEITAMRLATLHNVHFMLTLLVQIREAILSDRYMEFKQSFLEKYRKSVD

SEQ ID NO: 53144 - protein, 369 aa, Accumulibacter sp.
  misc_feature (1)..(369): tr|A0A080M407|A0A080M407_9PROT Queuine tRNA-ribosyltran sferase OS=Candidatus Accumulibacter sp. SK-02 OX=14539 99 GN=tgt PE=3 SV=1
MNFELLASDGAARRGRLGLAHGCIETPVFMPVGTYGTVKAMTPRDLIETGTQICLGNTFHLWLRPGLEVIAAHAGLHRFMCWNGPILTDSGGFQVFSLGALRKISEEGVRFQSPINGDRLFLTPEESMRIQHVLDSDIVMILDECTPYPATRSEAASSMRLSLRWASRSRLQHDQLENGNALFGIVQGGMYEDLRDESLAGLAEIGFDGFAIGGLSVGEPKHEMARILAHSTPRLPQNKPRYLMGVGTPEDLVAAVQAGIDMFDCVLPTRNARNGHFFTRHGDVRIRNAKHKNDPRPLDESCGCYTCRNFSRAYLHHLNRVGEILAAQLGTLHNLHYYHQLMKELRDAISTGTLSAVVAAFHSRRCQQS

SEQ ID NO: 53145 - protein, 371 aa, Accumulibacter aalborgensis
  misc_feature (1)..(371): tr|A0A1A8XFR7|A0A1A8XFR7_9PROT Queuine tRNA-ribosyltran sferase OS=Candidatus Accumulibacter aalborgensis OX=18 60102 GN=tgt PE=3 SV=1
MKFALLANDGAARRGCLTLAHGSVDTPAFMPVGTYGTVKAMTPRDLTETGAQICLGNTFHLWLRPGLEVIAAHGGLHRFMCWNGPILTDSGGFQVFSLGALRKITEEGVRFQSPINGDRLFLTPEESMHIQHVLNSDIVMILDDCTPYPASHDQAATSMRLSLRWAQRSRATHDRLDNGNALFGIVQGGMYEDLRDESLAGLAEIGFDGFAIGGLSVGEPKGDMARILAHSAPRLPQDKPRYLMGVGTPEDLVAAVSAGIDMFDCVLPTRNARNGHLFTRHGDVRIRNARHKNDPRPLDEGCPCYTCRNFSRAYLHHLNRVGEILGAHLGTLHNLSYYHDLMRDLRTAIAGGTLAIAVSAFHRARAQEAQR

SEQ ID NO: 53146 - protein, 403 aa, Acetothermia bacterium
  misc_feature (1)..(403): tr|A0A3D3X2P3|A0A3D3X2P3_9BACT Queuine tRNA-ribosyltran sferase OS=Candidatus Acetothermia bacterium OX=2053493 GN=tgt PE=3 SV=1
MYKLKRQDKRSPARTGLLKTAHGTVATPAFVAVATRATVKALEPQALTKIGVQIVIANSYHLHLRPGEETIATLGGLHRFSGWKGPTMTDSGGFQVFSLGAGKEHGVGKIGSIFPGEEPRPPTKREKQGKSLVKLSEEGAYFRSIIDGSEHFFSPEGVIELERKLGADIIFVLDECTSPLHDYTYTKGAMERTHRWAKRALNAFNELACDASFPNPDQILYGIVQGGAYKDLRHESATVIGGMDFGGFAIGGSLGRSKEEMHKVLDWTIPLLPEEKARHLLGIGEIEDIFAAVRRGIDTFDCAAPTRIARNGTVFFKDAPRHRINLRNSRFRDDPQPIDETCNCFTCCHHSRAYLRHLCLAGEFSFYRLATIHNLHFLVRLMQDIRAAIESDTLDKLENEWEN

SEQ ID NO: 53147 - protein, 402 aa, Acetothermia bacterium
  misc_feature (1)..(402): tr|A0A351JN22|A0A351JN22_9BACT Queuine tRNA-ribosyltran sferase OS=Candidatus Acetothermia bacterium OX=2053493 GN=tgt PE=3 SV=1
MSSFRIIARVPGSAARRGELVTPHGTVQTPAFVAVATRGTVKALGIEDVLALGVEVLIGNTYHLALRPGADAIGPRGGLHGFTGWTGPWFTDSGGFQVFSLGAGKVHGVGKIASIFPGETPTKPVGESLVELTEDGARFRSVVDGSRVFFSPEGVIRLQRLLGADVVLPLDECTSPFHDRAYTGAAMERTHRWAERARVAFERTRGIGPNPGQALWGIVQGGAYEDLRRMSAKVIGGMGFPGFAIGGSLGRSKDDMLNVIEWTVDKLPPDPPRHLLGIGTVEDILAAVNLGVDTFDCAAPTRLARNGALLTFGEEGFRIAIKNARFRDDDRPVEEGCDCPTCARHSRAFLRHLLQTGELSYYRLATLHNVRFMARLMERVRAALAAGRFPTLDVLRERQRSE

SEQ ID NO: 53148 - protein, 377 aa, Acididesulfobacter guangdongensis
  misc_feature (1)..(377): tr|A0A519BHL3|A0A519BHL3_9DELT Queuine tRNA-ribosyltran sferase OS=Candidatus Acididesulfobacter guangdongensis OX=2597225 GN=tgt PE=3 SV=1
MFEILKKDPLSNARTGKLRTKNETIDTPVFMPVGTLGTVKSISPLELYNEGFKIMLSNTYHLFLRPGMEVIEKFGSLRNFTNYKGAILTDSGGFQIFSLSKFAKISSGGAEFMSHIDGSVHIFTPERVVKLQETFDSDIIMPLDVFSGPGVSKKIAEKDLDITLEWAERSISAKNKEKNNLIFLISQGNFFDDLREKSAIYLSELNADGYAIGGLAVGEDKETMRDMLGISVSKLPENKPRYLMGVGTPEDIITAVSLGVDMFDCVLPSRNARTGFAFTSKGNLNIKNSVHKFEKQPIDDECGCYACLNFSRAYLRHAFMSKEIFSQRLLTIHNLHFYQNMILNIRRSINDGNFTDYKNDFLGKRQQTAVLPEDTSL

SEQ ID NO: 53149 - protein, 367 aa, Acididesulfobacter diazotrophicus
  misc_feature (1)..(367): tr|A0A519BN63|A0A519BN63_9DELT Queuine tRNA-ribosyltran sferase OS=Candidatus Acididesulfobacter diazotrophicus OX=2597226 GN=tgt PE=3 SV=1
MFEILKKDSKSKARLGKLHTQNGIIDTPVFMPVGTLGTVKSVSPLELYNEGFKIMLSNTYHLFLRPGMEVIEKFGSLRNFINYKGAILTDSGGFQIFSLAKFAKISDDSVEFMSHIDGAIHVFTPEKVVKLQEVFDSDIIMPLDVFSGPEASKSRAEKDLDITLKWAEISINAKNKEKNNLIFLISQGNFFEDLREKSAIYLSELNADGYAIGGLAVGEDKETMYNMLNISASKLPENKPRYLMGVGTPEDIITAVSLGVDMFDCVLPTRNARTGSVFTSKGNLNIKNSIHKFEKQPIDDECNCYACSNFSRAYLRHVFMSKEIFSQRLLTIHNLHFYQNMIFNIRQSINNDNFMNYKNNFLEKRLK

SEQ ID NO: 53150 - protein, 369 aa, Acidulodesulfobacterium ferriphilum
  misc_feature (1)..(369): tr|A0A519BC76|A0A519BC76_9DELT Queuine tRNA-ribosyltran sferase OS=Candidatus Acidulodesulfobacterium ferriphil um OX=2597223 GN=tgt PE=3 SV=1
MFKIIKKDECTGARIAELSTKNGIIETPVFMPVGTIGTVKSLSPFEIYDEGFKVMLGNTYHLFLRPGIDIIKKFGSLRNFTRYKGMILTDSGGFQIFSLAKFAKVKDDGVSFMSHIDGETHFFTPERVVEIQEALDSDIMMQLDVFSGPEASRDKAEKDLDITIKWAERSMSAKKKDGNLLFLISQGNFFEDLREKSAKIMSGFDADGYAIGGLAVGETKEIMFKMLASSASNLPENKPRYLMGVGTPEDIINAVSLGVDMFDCVMPTRNARNGFVFTSSGTLNIKNSKYKSETGPLDAGCGCFCCKNFSAAYVRHIFMTKEIFSQRLLTLHNLHFYQNLIVKIRQAIKENSFLNMLNKINMQKPSSLF

SEQ ID NO: 53151 - protein, 361 aa, Actinomarina minuta
  misc_feature (1)..(361): tr|S5DM12|S5DM12_9ACTN Queuine tRNA-ribosyltransferase OS=Candidatus Actinomarina minuta OX=1389454 GN=tgt PE= 3 SV=1
MNNIKVNTIVTDGKARLNEVTLNDKTFKTPMFMPVATKGALKSLPFKYLQQTDFILGNTYHLYLRPGLDVIREFNGLHNFIGWNKLILTDSGGFQGWSIPNKFNDDGIQFKNIYDGSKFFMDPKLSMDIQQTLNSDIAMILDSLIDIDSGYDAQLKSIDTTKRWARVAREYHSNTNQSLFGIVQGGRHKELREKSTNDMISLDFNGYAIGGLAIGESAEERKEIVNFTLEMLPKEKLRYVMGLGDINGMLELIELGVDMFDCVWPARLARHGKIINKGNFFNLKNNKFRVDSEPLVQGCTCYTCLNYSKAYLRHLLNNESTSSWFYLTLHNFVQTENILNEVRESILNSEFDKYKESIING

SEQ ID NO: 53152 - protein, 307 aa, Actinomarina minuta
  misc_feature (1)..(307): tr|S5DX66|S5DX66_9ACTN Queuine tRNA-ribosyltransferase (Fragment) OS=Candidatus Actinomarina minuta OX=1389454 PE=3 SV=1
ILGNTYHLYLRPGLDVIREFNGLHNFIGWNKLILTDSGGFQGWSIPNKFKDDGIQFKNIYDGSKFFMDPKLSMDIQQTLNSDIAMILDSLIDIDSGYDSQLKSIDTTKRWAREAREYHSNTNQSLFGIVQGGRHKELREKSTNDMISLDFNGYAIGGLAIGESPEERKEIVNFTVEMLPKEKLRYVMGLGDINGMLELIELGVDMFDCVWPARLARHGKIINKGNFFNLKNNKFRMDSEPLVQGCTCYTCLNYSKAYLRHLLINESTSSWFYLTLHNFVQTENILNEVRESILNSEFDKYKESIING

SEQ ID NO: 53153 - protein, 361 aa, Actinomarinales bacterium
  misc_feature (1)..(361): tr|A0A520VRX2|A0A520VRX2_9ACTN Queuine tRNA-ribosyltran sferase OS=Candidatus Actinomarinales bacterium OX=2510 331 GN=tgt PE=3 SV=1
MNNININILNTDGKARTSNLNVNGKVIKTPAFMPVATRGTIKSMPHIFLNNTDVLLANTYHLHLRPGSEVIKEIGGIHKFMNWDKVILTDSGGFQIWSLPTKINEGSVTFKNVYDGSYFEMTPEDSIKIQNNLGSDIAMILDCLINIDDTKDRQINSINLTREWGYKAREFHKNDKQALFGIIQGGTYKDLREMSAKYMIEQNYDGYAIGGLAIGETPNERKDIVSYTSALLPENKPKYVMGLGDISGLIDLIEEGIDLFDCVWPARLARHGKLIIGNSYINIKNEKYKADPTPISESCSCFSCKNFSKAYLRHLIQNENTSAWLYLTVHNLIQTEIILDEARESILESNFNKFKMKYKHE

SEQ ID NO: 53154 - protein, 361 aa, Actinomarinales bacterium
  misc_feature (1)..(361): tr|A0A520VZU9|A0A520VZU9_9ACTN Queuine tRNA-ribosyltran sferase OS=Candidatus Actinomarinales bacterium OX=2510 331 GN=EVA27_02255 PE=3 SV=1
MNKINLKTIATDGKARVNDVIINGKSLQTPTFMPVATRGAIKSLPLNYLEKTDVLLANTYHLYLRPGLDVIKEFEGLHNFIGWDNLILTDSGGFQGWSIPNKFNEDGIEFKNIYDGSKFFMDPILSMDIQNTLNSDIAMILDSLVDIDKDYNNQLQSINTTKEWAEVARNYHSNNNQSLFGIVQGGKFLELREKSSIDMVSLNFDGYAIGGLAIGETPEERKSIVDFTVDFLPKDKLRYVMGLGDIEGMINLIDSGIDMFDCVWPARLARHGKIINKGKFFNLKNSQFKNDTEPLVLACECFVCKKYSKAYLRHLLINESTSSWLYLTLHNIFQTENILSEVRKSILNSEFENYKESIING

SEQ ID NO: 53155 - protein, 419 aa, Adlerbacteria bacterium
  misc_feature (1)..(419): tr|A0A1F4Y0U2|A0A1F4Y0U2_9BACT Queuine tRNA-ribosyltran sferase OS=Candidatus Adlerbacteria bacterium RIFCSPLOW O2_01_FULL_54_21b OX=1797245 GN=tgt PE=3 SV=1
MPGSLARAGILHTLHGDIKTPAFVAVGTKADVKGIQVAQFGELGIQTIIANTYHLYLSPGPELIEKAGGLHKFMGFDGPIMTDSGGFQVFSLGEGFGKKISKFLPPEAQVPTKGRDERDPNSLLQDLRAPAVYDEEIATSHGKLAIIDEEGVTFTSHIDGSLHRFTPERSIEIQHELGADIIFAFDECTSPAADEAYQKEAMDRTHRWADRSLKAHRQMSGKVRPSQKGLTFTPGIYGIVQGGKFEDLRIESATELAGMDFDGYGIGGSFSKDDILGILDKVNVVLPKEKPRHLLGIGEPEDIFIGVAAGIDTFDCVLPTRNGRTGGIYTKRGKIQIPNAGYKEDFGPLDTECGCPVCREHTRAYIHHLFRTKELLGPILASMHNLYFLTTLTARIRETILNGDFEEYRDSFLSGYKMR

SEQ ID NO: 53156 - protein, 419 aa, Adlerbacteria bacterium
  misc_feature (1)..(419): tr|A0A1F4Y1W9|A0A1F4Y1W9_9BACT Queuine tRNA-ribosyltran sferase OS=Candidatus Adlerbacteria bacterium RIFCSPHIG HO2_02_FULL_54_18 OX=1797241 GN=tgt PE=3 SV=1
MPGSLARAGILHTPHGDIKTPAFVAVGTKADVKGIQAAQFGELGIQTIIANTYHLYLSPGPELIEKAGGLHKFMGFDGPIMTDSGGFQVFSLGEGFGKKISKFLPPEAQVPTKGRDERDPNSLLQDLRAPAVYDEEIATSHGKLAIIDEEGVTFTSHIDGSLHRFTPERSIEIQHELGADIIFAFDECTSPAADEAYQKEAMDRTHRWADRSLKAHRQMSGKVRPSQKGLTFTPGIYGIVQGGKFEDLRIESATELAGMDFDGYGIGGSFSKDDILGILDKVNVVLPKEKPRHLLGIGEPEDIFIGVAAGIDTFDCVLPTRNGRTGGIYTKRGKIQIPNAGYKEDFGPLDTECGCPVCREHTRAYIHHLFRTKELLGPILASMHNLYFLTTLTARIRETILNGDFEEYRDSFLSGYKMR

SEQ ID NO: 53157 - protein, 373 aa, Aegiribacteria bacterium
  misc_feature (1)..(373): tr|A0A1V4MZM2|A0A1V4MZM2_9BACT Queuine tRNA-ribosyltran sferase OS=Candidatus Aegiribacteria bacterium MLS_C OX =1775674 GN=tgt PE=3 SV=1
MRPSFRLLTRSGKARRGVLELAHGRVETPVFMPVGTQASVKTARNSDLLRDDWRIILGNTYHLYLRPGEEILASAGGLHRFMSWDRNILTDSGGFQLFSLSDLRRRSEEGYRFQSHIDGSSHLLTPERVVELQKCFGSDVMMVLDECLEQPSDRTRTEESLELTLRWAERSRRMHREDSQAMFGIVQGGAYTDLRERAATVLSGMDFDGYAIGGVSVGEPRRLMMKAVRACIGHLPEDRPRYLMGVGRPEDLVDFTAEGVDMFDCVVPTRNARGGSFFVPGGHINIRNARFAADLSPVQPDCGCYTCSTYSRAYLRHLFMSREWLAPILATLHNLHYFSVLMGRIRMAVEERHFSAWRRDWHLERRDFDPGRF

SEQ ID NO: 53158 - protein, 375 aa, Aerophobetes bacterium
  misc_feature (1)..(375): tr|A0A497E3L0|A0A497E3L0_9BACT Queuine tRNA-ribosyltran sferase OS=Candidatus Aerophobetes bacterium OX=2030807 GN=tgt PE=3 SV=1
MEFKLIHQDASSKARSGKIFTSHGIIDTPVFMPVGTQGTVKTVSPDELKEIDIRIILCNTYHLYLRPGPRIIKKLGGLHKFMSWEGAILTDSGGYQIFSISSLQRAEEDGVRFKSHLDGSEHFLSPEDVLRIQLDLDSDIIMVLDECTSYPITHREAEISLEKTIKWARRTKLAWLDVSREERGLFGIVQGSTFEDLRKRCAEELIDLGFDGYALGGLSVGEPYSLRKEIIEYTCSLLPPDRPRYLMGVGTPEEILEAISLGIDMFDCALPTRIARNGTVFTMEGRKVLKNAEYKEDPSPLDPECDCYTCRNYSRAYVRHLLWAREILGMRLTTYHNLYFLTKLMKKARKAIEEDRFEKFKEKFLSRYQYKNKES

SEQ ID NO: 53159 - protein, 229 aa, Aerophobetes bacterium
  misc_feature (1)..(229): tr|A0A1V5K518|A0A1V5K518_9BACT Queuine tRNA-ribosyltran sferase OS=Candidatus Aerophobetes bacterium ADurb.Bin4 90 OX=1852830 GN=tgt PE=3 SV=1
MMVLDECPPYPAERKYIEESLDLTLAWAKRARDYHKSDTSFLFGIIQGGVHRDLREKSMEELFKMDFPGYSIGGVSVGEGKELIYQGVDWCAPFMPENKPRYLMGVGTPEDIWYAVEKGVDMFDCVFPTRIARNGAVYTKEGQISVRNGEYKEDFRPMDPGCGCYACQNYTRAYIRHLFNTHELLGMRLTTLHNIYFMLRLMDLIRKSIFEDRYEKAKEEFFSLYKLRS

SEQ ID NO: 53160 - protein, 357 aa, Amesbacteria bacterium
  misc_feature (1)..(357): tr|A0A0G0Y8J7|A0A0G0Y8J7_9BACT Queuine tRNA-ribosyltran sferase OS=Candidatus Amesbacteria bacterium GW2011_GWA 2_42_12 OX=1618356 GN=tgt PE=3 SV=1
MFGFEVTGKLKGRGRTGIIHTPHGDIKTPVFMPVGTNATVKSLSPEDLQDVGARIILANNYHLFLRPGSEVVQHMGGIHKFMNWPKPILTDSGGFQVWSLGMKYTEEGAFFKSHQSGLKYFWTPEDAIKSQVQIGADIIMAFDVCTPDKVSFQDTKNALDITHKWLVRCKNTMNHEPTNQSLFGIIQGGSHKELRIESAKFVVDQDLPGIAVGGETIGYNMDGTEEVMSWIEKLLPQNKPRYAMGLGLRPSDLIRAVECGFDMFDCVAPTRIARNGNLFNPEYPSERIDISKSEYKTNSNPIWQDCDCYTCKNYTLAYIHHLFKTKELLYYRLASIHNLRVMIKTLDDWVAKQSSAN

SEQ ID NO: 53161 - protein, 376 aa, Amesbacteria bacterium
  misc_feature (1)..(376): tr|A0A1F4Z260|A0A1F4Z260_9BACT Queuine tRNA-ribosyltran sferase OS=Candidatus Amesbacteria bacterium RIFCSPLOWO 2_01_FULL_47_33 OX=1797258 GN=A2972_01160 PE=3 SV=1
MIEFSDTGALKGFGRTGQITTPHGQISTPVFMPVGTAATVKSLSPLDLESVGAQIILVNNYHLYLRPGSESIAALGGIHKFMNWTLPVLTDSGGFQVQSLGKADIALAKITQDGVEFRSHLDGGTLHFLTPELAIRSQLQIGADIIMAFDDSVPAGADYKRAETAVRRTHDWLVRCIKEWRRLYTTSFPPPKLGGGIKEGGTPALFGIIQGGEFPDLLKQSAEFVISQNLPGVAIGGAVIGSDPRQTADAIAAVRELLPKDKPLYAMGVGVRPSDLKSVIVAGADMFDCVAPTRLARAGLLYNMQSPNERIDISQNKFRLDTNPIDKDCDCSACGQFTRAYLHHLFKSRELLYYRLASIHNLRMMIRTVEYISSIK

SEQ ID NO: 53162 - protein, 376 aa, Aminicenantes bacterium
  misc_feature (1)..(376): tr|A0A1F5AV00|A0A1F5AV00_9BACT Queuine tRNA-ribosyltran sferase OS=Candidatus Aminicenantes bacterium RBG_13_64 _14 OX=1797271 GN=tgt PE=3 SV=1
MSSAFRTTSEDPLSAARTGLLETPHGTVETPAFMPVGSQGTVKGLTHAQVEALGAQIILVNSYHLFLRPGVDAVAAMGGLHSFMSWPKPILTDSGGFQIYSLSPLVRTSDEGVRFSSHLDGTKIYLKPEDVVDLQVRLGTDVLMCLDHFPAYPYSAETMKESVRLTTAWAGRSKVRFAEIDTHQQLWGISQGGIYPDLRAKSIEDLLELGFSGYAFGGLGLGEPKTRLFETLEHGNLLLPRDRPRYLMGMGYVEDVVEAVARGVDFFDCVLPTRNARNGTLFTSRGRVAIKNRKYALDERPLDEACPCYTCHNFSRAYLHHLFERGEITAAVLHTIHNLHFYLDIFRKIRHSIQSNSFGLLKKSLISNASEKEETT

SEQ ID NO: 53163 - protein, 373 aa, Aminicenantes bacterium
  misc_feature (1)..(373): tr|A0A523WQW3|A0A523WQW3_9BACT Queuine tRNA-ribosyltran sferase OS=Candidatus Aminicenantes bacterium OX=205214 9 GN=tgt PE=3 SV=1
MKKTFEITASDSKSSARTGIIHTMHGPIKTPAFAPVASQGTVKALTHNLVQSLKAQLILANSYHLYLRPGLETIKKLGGLHSFISWTKPILSDSGGFQIYSLSPLVKVSKEGVTFSSHLDGTKIFLTPEDIIDIQLQLGTDIIMALDYFIPFPSSEEKMKGAVEITTLWAQRSQTHFLQHNSSQLLWGISQGSIYWNLRKQSIEDLLKVDFDGYALGGLGIGEPKSLFMEIVEKSDSLIPKEKPRYLMGIGYINDILDAIEKGIDLFDCVLPTRNARNGTLFTSKGKIAIKNKKYEHDHRPLDKECSCYTCQNYSRAYLRHLYERQEINSAVLNTIHNLHFYLDIFRKIRQAIQSNSYQQLKCSISSKKKEEE

SEQ ID NO: 53164 - protein, 374 aa, Amoebophilus sp.
  misc_feature (1)..(374): tr|A0A1Q3W7N3|A0A1Q3W7N3_9BACT Queuine tRNA-ribosyltran sferase OS=Candidatus Amoebophilus sp. 36-38 OX=1895716 GN=tgt PE=3 SV=1
MQFELEHVDTSSKARAGIITTSHGKIHTPIFMPVGTAGTVKAVEQRNLHQDVAAEIILGNTYHLYLRPGTHVLEQAGGLHGFINWNKPILTDSGGYQVYSLTDRRKITEQGVTFYSHIDGSIHTFTPENVIDTQRSIGSDIMMVLDECTPHPCTYTYARQSMEMTHRWLQRGIDQFKKTTTATNNYQTLFPIVQGSIYKDLRLQSAETIAAMDQPGNAIGGVCHPTGQLYEVTDWVCSVLPAEKPRYLMGVGTPRDLLECIALGIDMFDCVMPTRSGRNGRLFTTQGIINIKNQQWKQDFSPIDSGLNSYVSNHYTKAYLYHLFKSQEILGAQLASIHNLTFYLWLVKEARKQILINNFVPWKNSIIKRIMERL

SEQ ID NO: 53165 - protein, 376 aa, Amulumruptor caecigallinarius
  misc_feature (1)..(376): tr|A0A4Q0UAR9|A0A4Q0UAR9_9BACT Queuine tRNA-ribosyltran sferase OS=Candidatus Amulumruptor caecigallinarius OX= 2109911 GN=tgt PE=3 SV=1
MDFKLQATDTQGAARAGLITTDHGQIETPIFMPVGTVGSVKGVHMRELRDDINAQIILGNTYHLYLRPGTEILRQAGGLHKFNGWDRPILTDSGGFQVFSLSANRKLKEEGAYFRSHIDGSKHLFTPEGVVDIQRSIGADIMMALDECPPGTSDYAYARKSLDLTHRWLRRGWERYTSTEGLYGYHQAYFPIVQGCTYPELRRESAKFVTDLGAEGNAIGGLAVGEPAEVMYDMIEVVNEILPADRPRYLMGVGTPANILEAIDRGVDMMDCVMPTRNGRNGMLFTPDGIMNMRNKKWADDFSPIDETSDCFVDRVYSKAYLRHLFIAQELLAMQIASIHNLAFYLWLVREARKHIIAGDFKTWKTGMMERVTRRL

SEQ ID NO: 53166 - protein, 399 aa, Andersenbacteria bacterium
  misc_feature (1)..(399): tr|A0A2M6WYR4|A0A2M6WYR4_9BACT Queuine tRNA-ribosyltran sferase OS=Candidatus Andersenbacteria bacterium CG10_b ig_fil_rev_8_21_14_0_10_54_11 OX=1974485 GN=tgt PE=3 SV =1
MIEFRIHKQSTRSRARLGSLTTPHGTFETPAFVPVATQATVKTLTSEQALAAGSQLLIANTFHLHLKPSEDIVAGGGGLHQFMQWPRPLMTDSGGFQVFSLGFGRDHGVGKMLSEKRDEVIALGQQPSRINITERGVMFTSPVDGAKIYLDPKKSIDIQQKLGADIMFAFDEATSPVADKSYTRESLARTHRWAQESLAAKTSDQALFGIVQGGKFKELRLASARTIGGIPFDGFGIGGEYGNDKKTMLAIIKIVIDELPSAKPRHLLGIGHLEDIPQIIKAGVDTFDCIVPTHYARHGTAFANLGGRAALALRNFSGAKFGKVSHHRLDLTKRQFLTDQSPLDAACSCAVCKTYTRAYISHLVRAKEVTGLQLLTFHNLYFFNAYVTRLREQIRHEKI

SEQ ID NO: 53167 - protein, 289 aa, Andersenbacteria bacterium
  misc_feature (1)..(289): tr|A0A353CVZ6|A0A353CVZ6_9BACT Queuine tRNA-ribosyltran sferase (Fragment) OS=Candidatus Andersenbacteria bacte rium OX=2053502 GN=tgt PE=3 SV=1
MTDSGGFQVFSLGFGQDHGVGKVLKQKIDESVTIGQQPKNITITNEGVTFRSPVDGQKLFIGPPESIAIQQKLGADIIYTFDEATSPVANKEYTKVSLERTHNWAKQCLSAKTSNQALFGIVQGGKFTDLRKESAQFIGSLPFDGFGIGGEYGDDKTIMPEIIQTVLQELPPDKPRHLLGIGHLEDIPTIIKAGIDTFDCIVPTHYARHGTAFTSQGKLNLKNAIFMNDQKPLDPKCQCFVCQGYKRSYIAHLIKAQEITGLKLLTFHNLHLFNSYIADIRQQIKAGKI

SEQ ID NO: 53168 - protein, 370 aa, Annandia adelgestsuga
  misc_feature (1)..(370): tr|A0A3Q9CLW2|A0A3Q9CLW2_9ENTR Queuine tRNA-ribosyltran sferase OS=Candidatus Annandia adelgestsuga OX=1302411 GN=tgt PE=3 SV=1
MKFKIYKKYKNARCGYIFLKNGIIKTPAFMPVGTYGIIKTLSTNELKEIGSDIILNNSLHMYLNCDINIIKKSGDLHNFMKWKKPIITDSGGFQIFSLKKKINIDNKKITFYHPTKGNIVNIDPKKSIYIQHILGSDISMVFDECIKYTTNYNKVYNSMQKSIYWSLISKEYFENINKKKYLFGILQGGIFKNLRDISIKENLKINFDGYAIGGLAVGEPKKDMFKIIKHTCLQIPENKPRYLMGVGNPTDIINSVYLGIDLFDCVIPTRNARNGYLFTNNGIIRIRNIKYKNNIYPIDINCFCYTCKNYSCSYLHYLDKRKETLGLRLNTIHNLYFYEKLMSNIRYYIYKNKFEYFVKNFYRKFNNFKN

SEQ ID NO: 53169 - protein, 361 aa, Aquarickettsia rohweri
  misc_feature (1)..(361): tr|A0A3R9ZQS5|A0A3R9ZQS5_9RICK Queuine tRNA-ribosyltran sferase OS=Candidatus Aquarickettsia rohweri OX=2602574 GN=tgt PE=3 SV=1
MSIKFKILDSCNDSRTGIIYTANGQINTPVFMPVGTLATVKSMLPESLIKTGADIILGNTYHLMLRPGEDVISNLGGLHQFMNWQKPILTDSGGFQVMSLAKLRKISDDGVEFRSHIDGKKYFLSPKKSIEIQHKLDSNITMIFDECTPYPVNYEYAKESMHLSLKWARESKDNFIDREGYGIFGIIQGSIFEDLRKESTTKLKDIEFDGYAIGGLAVGEGHDEMLKVLDFTIPHTPNNKPRYLMGVGKPIDIVASVKKGIDMFDCVLPTRSGRNGQAFITGGTLNIKNNQYISDNSPLDKNCNCYTCKNYSKAYLNHLIRSKEILGSVLMTWHNISYYQNLMRKLRKLINNDTLYQYKNE

SEQ ID NO: 53170 - protein, 394 aa, Arcanobacter lacustris
  misc_feature (1)..(394): tr|A0A0F5MQ41|A0A0F5MQ41_9RICK Queuine tRNA-ribosyltran sferase OS=Candidatus Arcanobacter lacustris OX=1607817 GN=tgt PE=3 SV=1
MYKNFKFTITHQDQKTPARCGEIHTPHGIVQTPNFIFCATKAAIKGVDLATMKQEGTQIILSNTYHLMLQPGSETIRALGGLHKMMNWDGPLLSDSGGYQIFSLGHGSVSNEIKGKRNSNRPQSLLKITEEGAKFKSYIDGSYHLLTPEKSIQIQRDLGVDFMVVLDECTPFNVTKEYTEKSMHMSHRWALRSLAEFKNHDDESQSLYGIVQGGIYDDLRKQSTDFVNENEFFAHAVGGSLGASKAQMHDIVAHTMSMLSKDRPVHLLGIGGVSDIFNGIKYGIDTFDCVHPTRLARHGGALVKVSMSENGKEHINIRNNRFKTDPNPIDSECKCSTCMRYSRGYLHHLFKAGEILGMQALTIHNVHFMNKLMLAVRGAIREDRVEEEQKIWCG

SEQ ID NO: 53171 - protein, 366 aa, Arthromitus sp.
  misc_feature (1)..(366): tr|A0A1B7LMW5|A0A1B7LMW5_9CLOT Queuine tRNA-ribosyltran sferase OS=Candidatus Arthromitus sp. SFB-turkey OX=184 0217 GN=tgt PE=3 SV=1
MAKRAEFKTVHGTIQTPVFMNVGTLGVIKGAVSTIDLEKINCQVELSNTYHLHIRPGDEIIKKLGGIHKFMNWQKPILTDSGGFQVFSLARLRDITERGVKFNSHIDGRKIFIGPEESIRIQSNLGSTIAMAFDECIPNPSTREYVSNSVSRTTRWLERCIVEMDRLNKQEDTVNKNQLLFGINQGGVYEDIRIEHAKIISEFDLPGYAIGGLAVGESTEEMYEVLDKVVPYLPRNKPIYLMGVGTPENILEAVERGVDFFDCVLPARNGRHGQVFTNKGKINLLNKKFELDDNPIDEECKCEACCNYSRAYIRHLFKAKEMLALRLCVLHNLNFYNTLLRDVRKSIELNEFSKFKKQKLEDWKMI

SEQ ID NO: 53172 - protein, 375 aa, Arthromitus sp.
  misc_feature (1)..(375): tr|G2IHL0|G2IHL0_9CLOT Queuine tRNA-ribosyltransferase OS=Candidatus Arthromitus sp. SFB-rat-Yit OX=1041504 GN =tgt PE=3 SV=1
MYKLLNVDGRARRGEFKTVHGTIQTPVFMNVGTQGVVKGAVSTMDLNKIDCQVELSNTYHLHLRPGDENIKKMGGLHKFINWNKPILTDSGGFQIFSLSKFRKITEERVEFNSHLDGKKIFIGPEESMKIQSNLASTIAMAFDECIPNPSERSYVIDSVFRTTRWLKRCIAEMDRLNKMDDTINPNQLLFGINQGGVYSDIRIEHAKQISDLDLPGYAIGGLAVGETKEEMYHIIDEVVPYLPKHKPIYLMGVGTPENILESIYRGVDFFDCVLPARNGRHGQLFTSTGKINLINKKFELDDRPIDEKCSCEACENYSRAYIRHLFKSKEMLSMRLCVLHNLNFYNKLLEESRKAIELNQFSNFKNQKFREWGIH

SEQ ID NO: 53173 - protein, 366 aa, Atelocyanobacterium thalassa
  misc_feature (1)..(366): tr|A0A086CFQ3|A0A086CFQ3_9CHRO Queuine tRNA-ribosyltran sferase OS=Candidatus Atelocyanobacterium thalassa isol ate SIO64986 OX=1527444 GN=tgt PE=3 SV=1
MKFSFQLQKKCCNTQARVGVYSTPHGIVETPRFMPVGTIAAVKGITPAQLQTTEVQMILANTYHLHLQPGENIIEKAGGLHKFMHWNGPILTDSGGFQVFSLSKLREISELGVTFRSPKDGRIIKLTPEKSINIQNALGADVIMAFDECPPGNANYQTVEAATNRTYRWLKRCIEAHSRTKEQALFGIVQGGTYPKLRLKAISSLIELNLPGYAIGGVSVGEEPSLIQDIVQFSAPLLPENKPRYLMGVGTYKEIAMAIASGIDLFDCVIPTRFGRHGTALVAGERWNLKNSKFREDFMPLDEECTCYTCQNFTRAYLNHLIRSQEVLGYTLLSLHNITELVKFTQNIRKSILNNSFIEDFKFWLT

SEQ ID NO: 53174 - protein, 369 aa, Atribacteria bacterium
  misc_feature (1)..(369): tr|A0A1F5A7R2|A0A1F5A7R2_9BACT Queuine tRNA-ribosyltran sferase OS=Candidatus Atribacteria bacterium RBG_19FT_C OMBO_35_14 OX=1797291 GN=tgt PE=3 SV=1
MSIKFEILKESKTTKARLGKLYTCHGIIDTPVFMPVGTQATVKAMTPRELDDLGIQIILSNSYHLYLRPGYNLVAQAGGLHKFMGWKGAILTDSGGFQIFSLGKLNKISDEGVFFNSHIDGSKHFINPEKAMEIQIALGSDIAMAFDECAPYPSGKYQVEIAAQRTIQWAKRCKEAHHGSSQSLFGIVQGGAFKDLRIENANKLVELDFPGYAIGGLSVGEPKSLMYEILDCTVPCLPNNKPRYLMGVGAPQSILEGIIRGVDMFDCVLPTRNARNGSLLASSGNLSITNAKYKDDFTPLDNKCQCYTCQNFTRAYLRHLYMSNEILASILGTIHNLYFMSSLMKNIRLALLEDRLLEFKEEFLSNFLN

SEQ ID NO: 53175 - protein, 348 aa, Atribacteria bacterium
  misc_feature (1)..(348): tr|A0A2N3AHG9|A0A2N3AHG9_9BACT Queuine tRNA-ribosyltran sferase (Fragment) OS=Candidatus Atribacteria bacterium HGW-Atribacteria-1 OX=2013676 GN=CVT91_17615 PE=3 SV=1
MSIKFEILKESKKTKARLGKLYTCHGIIDTPVFMPVGTQAAVKAMTPRELDDLGIQIILSNSYHLYLRPGYNLVAQVGGLHKFMGWKGAILTDSGGFQIFSLGKLNKISDEGVFFNSHIDGSKHFINPEKAMEIQMALGSDIAMAFDECAPYPSGKYQIEIAAQRTIQWAKRCKETHHSSSQSLFGIVQGGAFKDLRIENANKLVELNFPGYAIGGLSVGEPKSLMYEILDCTVPCLPNNKPRYLMGVGVPQSILEGIIRGVDMFDCVLPTRNARNGSLLTSSGNLSITNAKYKDDFTPLDNKCQCYTCQNFTRAYLRHLYMSNEILASILGTIHNLYFMSSLMKNIR

SEQ ID NO: 53176 - protein, 373 aa, Aureabacteria bacterium
  misc_feature (1)..(373): tr|A0A3A4QX38|A0A3A4QX38_9BACT Queuine tRNA-ribosyltran sferase OS=Candidatus Aureabacteria bacterium SURF_26 O X=2093366 GN=tgt PE=3 SV=1
MDFTFIKKDARCGARRGEISTPRGKIQTPVFMPVGTQATVKGIFPRDLLDFDAEIILGNTYHLYLRPGMEIMKEAGGLHAFMGWDRPILTDSGGFQVFSLADLRKITGEGVEFQSHIDGSYHFFTPELVVDIQHTLGSDIVMVLDECVPYPADHNYACNSMKLSLKWAELCKRHHSKKDSESGLFGIVQGSVYRDLRKECAYALQDIGFDGYAIGGLSVGEPTSVMYEVTGYTVDYLPENQPRYVMGCGFPDDILMMVECGIDMFDCVIPTRYGRNGTGFTSSGKVPVKNGAYKSDFQPLDPECDCYTCRTFTRAYLRHLFNTGEMLGPALLSLHNIHFYLNLMRHVRSAIDNDNYLVFKHKFLSRYQEGENL

SEQ ID NO: 53177 - protein, 382 aa, Azambacteria bacterium
  misc_feature (1)..(382): tr|A0A358VNP6|A0A358VNP6_9BACT Queuine tRNA-ribosyltran sferase OS=Candidatus Azambacteria bacterium OX=2053511 GN=tgt PE=3 SV=1
MEFNILKKSKKSNARLGVLKTPHGLVETPALVPVATQAVVKTLTSEEAEAAKCQMLIANTFHLHLKPGEKIVKNSGGIHEFMNWNRPLMTDSGGFQIFSLGFGYDLGVGKVLGFFPGKKGEGLVIDKTAQPKKVRITSQGAYFKSPITGEELFIGPKESIKIQEALGADIIFAFDECTPPFSSYEYVQKAIKRTHDWAKICVDNKKSNQALFGIVQGSKFQDLRSESAKYINSLGFDGFGIGGDLGETKKDMTKILSWIIPHLDEEKPRHMLGIGRLDDMENIIKSGIDLFDCTVPTHYARRGIAFVSGGKLNLSKSIFLKDKKPLDSKCECSVCQNYKRHYIAHLWKAKEITAMRLLTFHNLYFFNIFVENIRQKIKNNQI

SEQ ID NO: 53178 - protein, 397 aa, Azambacteria bacterium
  misc_feature (1)..(397): tr|A0A352KTZ7|A0A352KTZ7_9BACT Queuine tRNA-ribosyltran sferase OS=Candidatus Azambacteria bacterium OX=2053511 GN=tgt PE=3 SV=1
MTAENFSFKMVKKDSKTGARAGILRTSHGEIKTPAFVTVGTQATVKALSPEELKGLGAQIVLANTYHLYLRPGEEVIEKMGGLGKFMNWDGPTMTDSGGFQVFSLGFGIEHGVGKIASIFPSEEFADKPKEARPKLAKIDEDGTTFTSHIDGSTCRLTPEKSIEIQQKLGADIILAFDECTSPLHDYEYTKNALARTHRWAERSLKAKTNPKQALFGIVQGGEYEDLRKESAKFISSLDFDGFAIGGSLGKSKEDMHRVLEWTNEILPEEKPRHLLGIGRPEDIFEGVERGVDMFDCVMPTRVARNGTLLVGKERLNITNAEFAADPNPPDKSCRCYTCSNYSRAYLNHLFKAKEILGHRLASIHNLYFIVNLVKQIRQSITEDRFLEFKKEFLRSG

SEQ ID NO: 53179 - protein, 376 aa, Babela massiliensis
  misc_feature (1)..(376): tr|V6DG82|V6DG82_9BACT Queuine tRNA-ribosyltransferase OS=Candidatus Babela massiliensis OX=673862 GN=tgt PE=3 SV=1
MNYFKFEVIAKSKKSRARVGRIFTPHGIINTPNFVPVATNGTLKLIDSITTSNIGVELMFCNTYHLMVHPGTETVRQAGGLHKFINRPHPIITDSGGFQVFSLAYGTVKEELKSKGIKKHTEAVVKISEEGVLFRSYKDGSKIMLTPETSIQAQKDLGADIIIPFDELPPYHIDQSKLQKSLDRTHRWEERSLKQHLKDKNNQAIYAVVHGGIDKNLRKKSCEFLTNLPFDGYAIGGSIGKNRSEMLELINYTMPMLPEDKPNHLLGIGDLESIDACVRLGIDTFDSSHPTRCARHGQIFTSEGTVKILQNKYKLKFEPLDADCICYTCQNYTSAYIHHLFKAREMTGLALASIHNTHYMIKLMSNYRNLILNEVI

SEQ ID NO: 53180 - protein, 376 aa, [Bacteroides] periocalifornicus
  misc_feature (1)..(376): tr|A0A0Q4B621|A0A0Q4B621_9BACT Queuine tRNA-ribosyltran sferase OS=Candidatus [Bacteroides] periocalifornicus O X=1702214 GN=tgt PE=3 SV=1
MLFTVEVADPHSYARCGRMVLPHGVVETPIFMPVGTLGGVKAILHSNLRQDTQARIVLGNTYHLFLRPGLHTIREAGGLHAFSTWQGPMLTDSGGFQVFSLAGRRKLTEAGVSFQSHIDGSTYLFTPERVVDIERIIGADIIMPLDECPPGDAPYGYAKESMQLTLGWLERAQRQMRYTQPLYGYSQALFPIVQGAAYPDLRLRCAESMMRYDAPGYAIGGLAVGEPTEIMYSIVEGLHPVLPYHRPRYLMGVGTPANLLECIARGVDMFDCVMPTRNGRNGMLFTWKGVVNIKNRKWRNCFIPIDFSSTSRPDRQYTLAYLRHLFVSGEALAGQIASLHNVAFYLQLMAEARRQIRMGTFSSWKDSVLPTITQRL

SEQ ID NO: 53181 - protein, 370 aa, Baumannia cicadellinicola
  misc_feature (1)..(370): tr|A0A088MYX8|A0A088MYX8_9GAMM Queuine tRNA-ribosyltran sferase OS=Candidatus Baumannia cicadellinicola OX=1864 90 GN=tgt PE=3 SV=1
MKYQLLKNHGSARRGRMVFDRGVVETPAFMPVGTYGTVKSMTPEEVKETGAQILLCNTFHLWLRPGQEVMKLHGDLHHFMHWYGPILTDSGGFQVFSMGNLRKITEEGVHFRNPINGAAIFLSPEKSMEIQYDLGSDIVMIFDECTPYPVKWDYAKNSMEMSLRWSERSRKRFDELNNNNALFGIIHGGIYQDLRDISVNRLIDIGFDGYALGGLSVGEPKENMYHILAHICPQIPEDKPRYLMGVGKPEDLVEGWRRGIDIFDCVIPTRNARNGHLFVTNGIVKIRNAKYKNDVASLDMECDCYTCCNYSRAYLHHLYRCNEILGARLNTIHNLRYYQRLMAGLRQAIDTGKSHKFIEEFYNKKINSVS

SEQ ID NO: 53182 - protein, 399 aa, Beckwithbacteria bacterium
  misc_feature (1)..(399): tr|A0A1F5E5G6|A0A1F5E5G6_9BACT Queuine tRNA-ribosyltran sferase OS=Candidatus Beckwithbacteria bacterium RBG_13 _42_9 OX=1797457 GN=tgt PE=3 SV=1
MVKQPFFKLEAQQSKARAGIINTAHGQIKTPCFMPVGTQASVKALDPEDLRKINAQIILGNTYHLFLRPGEKLIEKSGGLHRFMNWTGPILTDSGGFQVLSLSKVRSKEVGLNDEPEIKLSQINEDGVQFRSHIDGRWHFINPEKSIQIQKSLGADIIMAFDEADPSSDKSYARKGMERTHRWLRRSKKEWRRQKYFCSDESIHQYKKNALFGIIQGGKYKDLRQESAKFVANQDLPGIAVGGASIGSSPEETAQVLSWVKEYLPLGKPVYTMGVGVKPSDLVSVIQAGADIFDCVAPTRLARTGYLYHGFLQLSKNIDKVNFVSEFAHERLDISKSLFKNDAHPILQDCDCYTCRSGFSRAYLHHLFKCRELLYYRLASIHNLRVMIRICEEMRKAII

SEQ ID NO: 53183 - protein, 350 aa, Berkelbacteria bacterium
  misc_feature (1)..(350): tr|A0A2M7CJ17|A0A2M7CJ17_9BACT Queuine tRNA-ribosyltran sferase OS=Candidatus Berkelbacteria bacterium CG03_lan d_8_20_14_0_80_40_36 OX=1974509 GN=tgt PE=3 SV=1
MKSKKIEKNCLRIVNKKINLPCFMPCATRGVVRAVSFDEIKKIGFQMVLVNAYHLYLTPGLKVIRAMGGLHKFMGWDGAILCDSGGFQVFSLKPKLTSEGVKFQSHIDGSTHFFSPEKVWEINMALGTNIAMPLDDCPPGTATKKRVAESVERTHRWLLKTIDAKDNQKGNKPKLFGIVQGGIYPDLRKKSADFVSELYKKGKIDGIAVGGVAVGEQKTKIKQVICWTSRWLPQDAPKYLMGIGEPEDIIYAVKYGFQMFDCVLPTRLGRHGIAYTQFQSLNLKFQNNNQKLNNFQFHKLDLGKSKFKTDKKWAYLHHLIRLKEIEGLRICSLNNLNIYHALMEELAKIT

SEQ ID NO: 53184 - protein, 448 aa, Berkelbacteria bacterium
  misc_feature (1)..(448): tr|A0A554LLK4|A0A554LLK4_9BACT Queuine tRNA-ribosyltran sferase OS=Candidatus Berkelbacteria bacterium Athens10 14_28 OX=2017145 GN=tgt PE=3 SV=1
MDFEILKKSESSSLRRGVISTYCGNIDTPVFMPVGTVGTVKSVAPWELRELGAEIILGNTYHLFLRPGEKLIEKFGGLSKWSGWGGPILTDSGGYQVFSLREKKIKNPCLAGRQEKSKIKIKEKDLFDNSELVKITDDGVEFKSYLDGTKHFFTPEKVIDIQLALGSDIIMPLDVCPSSIAHREEIENAVEISIKWLVRSKLHLERKFQITRNKSQTNLKSLPCRTSASSVESQAGQTSNLKPALFGIIQGGIDKKLRKYCAEEMIKLDLPGYAIGGLAVGESQKEMLEMVGFLDKILPKNKPRYLMGVGTPDDILKATKLGVDMFDCVLPTRMARHGTAYVKLKVKSQKSKVDGRYLFEEINLLNSKFREDKNLIDKNCQCPTCRAPQKSNSFCEIPRSEAEGDKNNFSLAYLSHLIREKEILGVRLLTLHNLHLYLNLMKEIRESI

SEQ ID NO: 53185 - protein, 383 aa, Berkiella aquae
  misc_feature (1)..(383): tr|A0A0Q9YNF5|A0A0Q9YNF5_9COXI Queuine tRNA-ribosyltran sferase OS=Candidatus Berkiella aquae OX=295108 GN=tgt PE=3 SV=1
MLSDVANKADFRFEILYQSKRSRARVGRIITPHGVIETPNFVAVGTNGSLKTLHNHDHEELDIQLMFCNTYHLMVQPGTQLIKESGGLHTFIQRQQPIITDSGGFQVFSLAYGNVAKELKGQGGKKHPPSKMKVTEEGVVFRSYRDGTKIFLSPETSVQAQKDLGADIIIPLDELLPFHVDEATLKASFARTHRWELRSLAEHLKARQNQAMFAVIHGGTDLALRQQSCQLLTKEAFDGFAIGGSLGRDHQELHDTVGGTTSHLPTEKPIHLLGIGDVTSINHCIPFGIDTFDSSYPSKVARHGMILTAKGPLKITRTEHARERIPLEHDCPCPTCKHYTRAYLHHLFKAKEPSAASLATWHNIRFMTRWMSKIRTEILCGLL

SEQ ID NO: 53186 - protein, 384 aa, Berkiella cookevillensis
  misc_feature (1)..(384): tr|A0A0Q9YT37|A0A0Q9YT37_9COXI Queuine tRNA-ribosyltran sferase OS=Candidatus Berkiella cookevillensis OX=43702 2 GN=tgt PE=3 SV=1
MIESQPQINSTFQFEILYQSKHSQARVGRIHTPHGIIDTPNFVAVGTNGTLKALPNHWLDELGLQLMFCNTYHLLVQPGTEVIQQAGGLHNFIQRKRPIITDSGGFQVFSLAYGGIANELKSKGTKKYTGSVLKITEEGVVFRSYFNGEKICLTPESSVQAQKAFGADIIIPLDELTPYHISDEALLDSFKRTHRWELRSLAEHRKNPNNQAMYSVIHGGIHPELRHKSCEILDNADFDGHAIGGSLGKNITELYATVQTTTPKLSPEKPRHLLGIGDLPSIDQCVPLGIDTFDSAYPTRSARHGVLFSFDGPIKIDRQIHRFEHFPVDKDCHCHLCQNYTRAYLYHLFKAKEPTAMLLASTHNVAFMMRRMESYRNQILSGLI

SEQ ID NO: 53187 - protein, 404 aa, Bipolaricaulis sibiricus
  misc_feature (1)..(404): tr|A0A410FVG7|A0A410FVG7_9BACT Queuine tRNA-ribosyltran sferase OS=Candidatus Bipolaricaulis sibiricus OX=25016 09 GN=tgt PE=3 SV=1
MTSFQILARASGSAARLGELVTPHGTIQTPAFVAVATRGTVKALGVDDLLGLGAEVLIANTYHLALRPGAEAVASLGGLHGFTGWRGPWFTDSGGFQVFSLGAGKVHGVGKIASMFPGERTAKPTGTSLVALTEDGAHFRSVVDGSPVFFSPEEVVRLQRLLGADVILPLDECTSPFHDRPYTESAMERTHRWAERALVAFEGTRGLGSNPGQALWGIVQGGAFDDLRRRSARTIAGMGFPGFAIGGSLGRSKDDMLRVIEWTVAELPEDRPRHLLGIGGVEDILAAVERGVDTFDCAAPTRLARNGVLLTFAEDGFRIAIRNARFARDESPVEEGCDCPTCRQYSRAFLRHLLQTGELSYHRLATLHNVRFMVRLMDRVRTALGAGEAVSDILSAPFTNPPAR

SEQ ID NO: 53188 - protein, 395 aa, Bipolaricaulis anaerobius
  misc_feature (1)..(395): tr|A0A2X3KL37|A0A2X3KL37_9BACT Queuine tRNA-ribosyltran sferase OS=Candidatus Bipolaricaulis anaerobius OX=2026 885 GN=tgt PE=3 SV=1
MFRVLARATGSAARLGELATPHGTIRTPAFVSVATRGTVKALGADDLRGLGVEALIGNTYHLSLRPGAETIASLGGLHGFTGWTGPWVTDSGGFQVFSLGAGKVHGVGKLATMFPGDAPAKREGESLVALTEEGAHFRSVVDGSRVFFSPEEVVRLERLLGADVILPLDECTSPFHDHAYTRAAMDRTHRWAERALAAFAKTKGLGPNPGQVLWGIVQGGAYEELRRASARTIAALGFPGVAIGGSLGRSKADMLRVIEWTVAELPEDRPRHLLGIGGVEDILAAVDRGVDTFDCAAPTRLARNGVLLTLAEDGFRIAIKNARFARDDRPVEEGCDCPTCAQYPRAFLRHLVQTGELSYYRLATLHNVRFMVRFLDRVRTALAEGRPASSSVLNP

SEQ ID NO: 53189 - protein, 366 aa, Blackburnbacteria bacterium
  misc_feature (1)..(366): tr|A0A1G1VEQ1|A0A1G1VEQ1_9BACT Queuine tRNA-ribosyltran sferase (Fragment) OS=Candidatus Blackburnbacteria bact erium RIFCSPLOWO2_01_FULL_41_27 OX=1797520 GN=A3A58_036 25 PE=3 SV=1
VATTATVKALDTKDIIECKSQVVLANTYHLLLRPGLEVLEQFGGFAPFMKWEGPTITDSGGYQVSFMRSDPPSPDGFGGVTTNVVKITDEGATFRSYVDGSKQLITPERSMEIQSVLNADIIMAFDQPLGKDYTEEKIKEAFKRTLLWEERSFHAWQDIQSKRKRQSKSYQALYGIVQGGTNKDLRRQSLEFILKTGFPGVAIGGETIGADPKITAESLDTIADLWPQDKPVHALGLGGGPEGIFEALSRGVDTFDNTSVTRIARSGLLYIYPEDGGTKENKFRLDVSKSKFKSKKESWSQTCRCYTCQNYSAAYLHHLLVARELSGFRLASIHNVHFMNELMIRIRTAIKNGDFEAMRREWAGAF

SEQ ID NO: 53190 - protein, 407 aa, Blackburnbacteria bacterium
  misc_feature (1)..(407): tr|A0A1G1VFD6|A0A1G1VFD6_9BACT Queuine tRNA-ribosyltran sferase OS=Candidatus Blackburnbacteria bacterium RIFCS PLOWO2_01_FULL_40_20 OX=1797519 GN=A3A77_03850 PE=3 SV= 1
MQNKNFSFKILRKDNITCARVGTIFTPHGAIQTPAFSPVATRATVKTLDPSDLINAGSQVVLANTYHLYLRPGIKIIEDFGGFAPFMKWDGPTITDSGGYQVSFLWSPSAKASVGQDTSGQESVLDSGRVAKITDEGATFISHIDGARHLLSPEKSMEIQHSLAADIIMALDQPLGKDFSEKKKREAFERTLRWEERSFVRWNELETKRKKGTFQALYGIMQGGINKDQIRKSLEFILVTGFPGIAAGGETIGTDPMLTSRTLDLVSDLLPDDKPLHALGLGGGPEGIFEAVERGVDTFDNTSITRQARSGLLFLYPEDGGKVENKFRMDIKKSKFKDIKEPFSKVCNCYSCSNFSAAYLHHLIISGELLGLRLASIHNVHFINDLMKKIREAILNGDFIQLKREWI

SEQ ID NO: 53191 - protein, 368 aa, Blochmannia chromaiodes
  misc_feature (1)..(368): tr|L0MUH3|L0MUH3_9ENTR Queuine tRNA-ribosyltransferase OS=Candidatus Blochmannia chromaiodes str. 640 OX=12404 71 GN=tgt PE=3 SV=1
MPFQLLQTDGHARLGRLICNQGIVDTPAFMPVGTYGSIKTLTSKEVEASGTQIILSNTFHLWLRPGLDIIKLHGSLHKFMSWNGPIITDSGGFQVFSLSKTRTITRKGVCFKSPIDGHLVFLTPEKSIEIQHDLQSDIVMIFDECISYPNTWDYVKKSVNISLNWAERSRLRFDTLHNSNMLFAIIQGGMYENLRDMSAKELINIGFDGYAIGGLSVGEPKKEMYRILSHICKLIPTNKPRYLMGAGKPEDLLEAVQKGIDMFDCVIPTRNARNGYLFVSDGTIKIRNAQYKKDTSPLDGDCDCYTCQHYSRSYLHHLDCCKEILGVRLNTIHNLRYYQRLMKELRQAIKTKSLQNFIDIFYKRVNRI

SEQ ID NO: 53192 - protein, 372 aa, Borkfalkia ceftriaxoniphila
  misc_feature (1)..(372): tr|A0A4Q2K8K6|A0A4Q2K8K6_9FIRM Queuine tRNA-ribosyltran sferase OS=Candidatus Borkfalkia ceftriaxoniphila OX=25 08949 GN=tgt PE=3 SV=1
MAEKFSFEIIKTDPETGARAGVFHTPHGDIQTPVYMSVGTQATVKGVLPKDLKEAGSQIVLANTYHLYMRPGHELVKKAGGLHRFMNWDRPILTDSGGFQVFSLAKLNNIRDEGVWFNSHIDGSKHFFTPEKVMEIENALGADIIMQFDECSEYGVDEKYAARALDRTAAWLERCAAAHANPEQALFPIVQGNFFADLRLKSLEYAKPFAKHGIAIGGLSVGEPKPLMYEMLDVLQPALPVDVPRYLMGVGSPDCLIEGVMRGIDMFDCVLATRIARNGTALTSKGKVVVRNAVYKEDFSPLDDECDCYCCKNYSKAYLRHLVNAGEMLSSMLLSLHNITFLNKLMRDMRQAILDGTLAEFRRAFYAKYGEN

SEQ ID NO: 53193 - protein, 387 aa, Brennerbacteria bacterium
  misc_feature (1)..(387): tr|A0A2H0PWY2|A0A2H0PWY2_9BACT Queuine tRNA-ribosyltran sferase OS=Candidatus Brennerbacteria bacterium CG11_bi g_fil_rev_8_21_14_0_20_43_10 OX=1974523 GN=tgt PE=3 SV= 1
MIFEIKTVFIKMAFDLNKYLKEYVIRGGKVQFPMYLPDATRAVTRSVDSSDLEIIGIEAVVINTYHLMSTPGTTVIEQAGGVKQFMHWNGLAVSDSGGFQILSLIYETSLSGQIKDEGVIFYQKGKKRKKEIFTPEKSIQIQFALNPDIMICLDDCPHMKATRGEVEISVKRTIEWAKRCKEEFDKQVEQRKMNALLRPLLFAVIQGGSHKDLREQCGQALQDIGFDGYGFGGWPMHPQTGKLDKDILQFTAQLMPHNKPKFALGVGTPQDIVDGFFMGYTIFDCVLPTRDARHQRMYVLSKSMNDLDITKDRVFEYLDLEKEKYTRDFRPISEFCDCPTCKNYSRAYVHHLFKIEETLAYRLATMHNLRTYTQTIELLRKYVCGDG

SEQ ID NO: 53194 - protein, 387 aa, Brennerbacteria bacterium; identical to SEQ ID NO: 53193
  misc_feature (1)..(387): tr|A0A2M8C1K5|A0A2M8C1K5_9BACT Queuine tRNA-ribosyltran sferase OS=Candidatus Brennerbacteria bacterium CG_4_9_ 14_3_um_filter_43_9 OX=1974522 GN=tgt PE=3 SV=1

SEQ ID NO: 53195 - protein, 367 aa, Brocadia sinica
  misc_feature (1)..(367): tr|A0A136MFT0|A0A136MFT0_9BACT Queuine tRNA-ribosyltran sferase OS=Candidatus Brocadia sinica OX=795830 GN=tgt PE=3 SV=1
MIFRTLAVDKQTKARCGELRLANHSISTPVFMPVGTQGTIKTLTPQQLKETNTKIILCNAYHLCLRPGEKIIRQSGGLHKFIGWDGAIITDSGGYQVFSLTGLTKVSDNGVEFQSPIDGTRMFLTPERMMQIQNDIGADVIMPFDECVPYPCEQDKAGVAVKRTVEWAERCLNAHKNKQQTLFGIVQGSVFRELRIECARKLVEMNFEGYSIGGLSVGEGAFLMNEVLDYTVDYLPQERPRYLMGVGFPIDIINAVERGIDMFDCVVPTRNGRNGCAFTSAGKIKILNSQYKEDKESLDKTCGCYTCRNFTRAYLRHLFLANEILGLTLISLHNIFYFQNLMQQIRESIMKGGFKDFKAEFLLKQSE

SEQ ID NO: 53196 - protein, 367 aa, Brocadia sinica; identical to SEQ ID NO: 53195
  misc_feature (1)..(367): tr|A0A0C9NL45|A0A0C9NL45_9BACT Queuine tRNA-ribosyltran sferase OS=Candidatus Brocadia sinica JPN1 OX=1197129 G N=tgt PE=3 SV=1

SEQ ID NO: 53197 - protein, 367 aa, Brocadiaceae bacterium
  misc_feature (1)..(367): tr|A0A5C6EVC3|A0A5C6EVC3_9BACT Queuine tRNA-ribosyltran sferase OS=Candidatus Brocadiaceae bacterium B188 OX=25 28032 GN=tgt PE=3 SV=1
MFFRCLAVDKQTKARYGELRFLNHRIPTPVFMPVGTQGTVKTLTPQQLKETDTKIILCNAYHLCLRPGEKIIKQSGGIHKFMGWDGAIITDSGGYQVFSLSGLTKISDNGVEFQSPIDGTRFFLTPENMMQIQKDIGADIIMPFDECVPYPCEKDRASVAVKRTTEWAERCLNMHTNRQQILFGIVQGSVFKELRIECARSLVEMNFEGYSIGGLSVGEGSVLMNEVLDYTVDYLPEDRPRYLMGVGFPVDILNAVERGIDMFDCVVPTRNGRNGCAFTSMGRVKILNSQYKEDSSPLDQMCNCYTCCNFSRAYLRHLFLAHEILGLTLLSLHNISFFQNLMQQIRESIKNGDFKDFKNEFLSRQSD

SEQ ID NO: 53198 - protein, 388 aa, Buchananbacteria bacterium
  misc_feature (1)..(388): tr|A0A1G1YLG2|A0A1G1YLG2_9BACT Queuine tRNA-ribosyltran sferase OS=Candidatus Buchananbacteria bacterium RIFCSP LOWO2_01_FULL_39_33 OX=1797543 GN=tgt PE=3 SV=1
MYKLLKTSQKSQARLGILKTAHGDIPTPFFMPLATKAAVKNLTADEVKGLGAEIILANTYHLYLQPGLKVLEKIGGLHKLMNWSGPILTDSGGFQVFSLAKIRKIMPYGVEFSSPIDGSKHVLTPKKVLEIQKIIGSDIAMILDVCPSSKENKSKIKAAVDLTTIWAKEASQEIKKTRKPENNKSRNQLFFGIIQGGLYKDLRLKSLNDLVSLGWDGYAIGGLAVGESPKEMYKVLDYLTPAMPKDKPRYLMGVGTPANIIEAVKRGVDMFDCVIPTREARHGRLYCFPSLPRRGLRGGWPTVGQFLPGLSLGKEGKFYTTINITNARFRSDKTPINNTNLKQYSRAYLHHLFKTKEPLAMRLATLNNLEFYLTLMVEIRQAISRGKL

SEQ ID NO: 53199 - protein, 338 aa, Buchananbacteria bacterium
  misc_feature (1)..(338): tr|A0A1G1YBV2|A0A1G1YBV2_9BACT Queuine tRNA-ribosyltran sferase (Fragment) OS=Candidatus Buchananbacteria bacte rium RIFCSPHIGHO2_02_FULL_45_11b OX=1797541 GN=A3J65_03 485 PE=3 SV=1
MFKLLKTSNKSKARLTRLTTPHGLVDGPFFMPIATKGAVKNLTADELKGLGAQIVLANAYHLFLAPGSKLIKKAGGLHQYMNWPGPILTDSGGVQVFSLSKIRKISEKGAEFSEPSSGRKYLLTPELSVQIQKDLGVDLAMAFDDVIGYPASKEKVKLAMERTSRWAKRCLAAREQGNKRTKEQNKSILFGIIQGGVYKDLRLKSAKDLTALKFDGYAVGGVAVGEPREKMKPILDWVVPLLPENKPRYLMGLGRPEEIVAAVKEGIDMFDCVIPTREARHGRLYLWSSGKRQPLLPSSEQRLRPNQLKGKFYQTINITNSRYKTDLSPINQTNLKQY

SEQ ID NO: 53200 - protein, 402 aa, Burkholderia pumila
  misc_feature (1)..(402): tr|A0A0J7JR79|A0A0J7JR79_9BURK Queuine tRNA-ribosyltran sferase OS=Candidatus Burkholderia pumila OX=1090375 GN =tgt PE=3 SV=1
MTEGQYHKPPENGLKFEVLTTDDQARRGRFTLNHGVIETPIFMPVGTYGTVKAIQPRELEEIKAQIILGNTFHLWLRPGLKVINAHGGLHKFMGWNRPILTDSGGFQVFSLGDLRKITEDSVTFASPINGDKLFLSPEMSMQIQKVLNSDIVMQFDECTPYATNGVPTSHKEAADSMRMSMRWAKRSIDEFNRLGNPNALFGIVQGGMFENLRDESLAGLSDIGFHGLAIGGLSVGEPKEDMMRVLNHIGPKLPADKPHYLMGVGTPEDLVNGVAAGVDMFDCVMPTRNARNGWLFTRFGDLKIKNASHKNSMKPLDETCTCYTCHNFTRGYLHHLHRVGEILGAQLNTIHNLHYYLQLIGEVRESIENHTFEAFRRTFAENRARRGLNYNMLSIAGVQNTA

SEQ ID NO: 53201 - protein, 387 aa, Burkholderia verschuerenii
  misc_feature (1)..(387): tr|A0A0L0M9E0|A0A0L0M9E0_9BURK Queuine tRNA-ribosyltran sferase OS=Candidatus Burkholderia verschuerenii OX=242 163 GN=tgt PE=3 SV=1
MTAGQFTPPENGLKFELLTTDGQARRGRLTLNHGVVETPIFMPVGTYGTVKAIQPRELEEIRAQIILGNTFHLWLRPGLEVIGAHGGLHKFMGWNRPILTDSGGFQVFSLGDLRKITEEGVTFASPINGDKLFLSPEVSMQIQKVLNSDIVMQFDECTPYATNGIPTTHKEAADSMRMSMRWAKRSIDEFGRLGNPNALFGIVQGGMFEDLRDESLAGLSEIGFHGLAIGGLSVGEPKEDMMRVLNHIGPKLPADKPHYLMGVGTPEDLVNGVAAGVDMFDCVMPTRNARNGWLFTRFGDLKIKNASHKSSMKPLDESCTCYTCQNFTRGYLHHLHRVGEILGAQLNTIHNLHYYLQLIGEVRESIENHTFEAFRKTFAKNRARGVD

SEQ ID NO: 53202 - protein, 402 aa, Campbellbacteria bacterium
  misc_feature (1)..(402): tr|A0A352LRX8|A0A352LRX8_9BACT Queuine tRNA-ribosyltran sferase OS=Candidatus Campbellbacteria bacterium OX=202 6716 GN=tgt PE=3 SV=1
MSIKFNIEKKMEGTLARAGVLETPHGKILTPSFVTVGTKATVKALTMEQVKDLGAQVVLANTYHLYLQPGDEIVKNAGGLHKMMNWFGPTMTDSGGFQAFSLGVAFGSGVSKIASADKKDIVNRCGEMSDGEGCSLAKIDEDGVTFKSHIDGSLHKFTPEKSIQIQHNIGADMIFAFDECTSPNADYDYQREAMDRTHRWAERSLDEHKKLNIEDKISLFGIVQGGRFEDLRKESAEVISKMDFDGFGIGGSFNKEDMNTAVGWVNKILPEGKPRHLLGIGEPEDLFGGVENGIDLFDCVAPTRMARNGSLHTKDGKINILNAKFKDDFSPIEKDCGCYTCKNYTKSYLSHLFRAKEMLGSTLATIHNLYFINKLVQDIRQSIMDENFDELKKDFLKRYKKE

SEQ ID NO: 53203 - protein, 401 aa, Campbellbacteria bacterium
  misc_feature (1)..(401): tr|A0A1F5EMY9|A0A1F5EMY9_9BACT Queuine tRNA-ribosyltran sferase OS=Candidatus Campbellbacteria bacterium RIFCSP LOWO2_01_FULL_34_15 OX=1797579 GN=tgt PE=3 SV=1
MLKFNIEKKIEGTLARAGVLETPHGEILTPSFVNVGTKATVKALTPEQVKDLGAQVVLANTYHLYLQPGDEIVKKAGGLHKMMNWNGPTMTDSGGFQAFSLGVAFGSGVSKIASADKKDIVNRCGEMSDGEGCSLAKIDEDGVIFKSHIDGSLHKFTPEKSIQIQHNIGADMIFAFDECTSPNADYDYQREAMDRTHRWAERSLDEHKKLNTEDKISLFGIVQGGRFEDLRKESAEVISKMDFDGFGIGGSFNKEDMNTAVGWVNKILPEEKPRHLLGIGEPEDLFGGVENGIDLFDCVAPTRMARNGSLHTKDGKINILNAKFKDDFEPIEKDCKCYTCKNYTKSYLSHLFRAKEMLGSTLATIHNLYFINKLVADIRQSIMDENFDEFKKDFLKRYKKE

SEQ ID NO: 53204 - protein, 378 aa, Carbobacillus altaicus
  misc_feature (1)..(378): tr|A0A2R6Y587|A0A2R6Y587_9BACL Queuine tRNA-ribosyltran sferase OS=Candidatus Carbobacillus altaicus OX=2163959 GN=tgt PE=3 SV=1
MSTFRFELIKEDKKTGARLGRLYTTHGVIETPTFMPVGTQATVKAMTPEELREIGAQIILSNTYHLWLRPGEEIIAEAGGLHAFMNWPHPILTDSGGFQVFSLQKIREITEDGVHFASHLDGSPLFMSPEVSIRVQNALGADIIMSFDECPPYPAERSYVEASMERTHRWAERGLRAHKRAHDQALFGIVQGGMYKDLRQRSARTLVAMDFPGYAIGGLSVGEPKETMYAMLEETTPLLPRHKPRYLMGVGSPDALLEGVMRGVDMFDCVLPTRIARNGTLFTHDGRMVIKNSQYARDFSPPDPDCTCHVCQNYSRAYLRHLFRAEEILGIRLATYHNLFFLIQLMADIRAAIREDRLLAFSERFLGRYYARDPNRAF

SEQ ID NO: 53205 - protein, 375 aa, Cardinium hertigii
  misc_feature (1)..(375): tr|A0A3N2QB33|A0A3N2QB33_9BACT Queuine tRNA-ribosyltran sferase OS=Candidatus Cardinium hertigii OX=247481 GN=t gt PE=3 SV=1
MQFLVEHEDQCSKARAGLITTGKGTIQTPIFMPVGTLGSVKSIPQNVLQDHINADIILGNTYHLYLRPGMQVLDAAGGLHSFMEWHRPILTDSGGYQVYSLAKNRSLTEEGVTFRSHIDGSKQLFTPESVIDIQRSIGSDIMMVLDECTPYPCSYSYAKDSMERTHRWLKRGSDHFDATLTEQNAYQALFAIVQGSVYKDLRIQSAEAIAAADRFGNAIGGVCHPTGQLYEITELVCDILPKHKPRYLMGVGTPLDLLECIALGVDMFDCVMPTRNGRNGTLFTTAGIINIKNSKWKTDCSPIDAQLSNALSGHYSKAYLRHLIISKEPLGLQLASVHNLTFYLWLVRQARKQIQQNNFVAWKNHVLQTIMKKIS

SEQ ID NO: 53206 - protein, 405 aa, Cerribacteria bacterium
  misc_feature (1)..(405): tr|A0A317JNM1|A0A317JNM1_9BACT Queuine tRNA-ribosyltran sferase OS=Candidatus Cerribacteria bacterium 'Amazon F NV 2010 28 9' OX=2081795 GN=tgt PE=3 SV=1
MSFSFDLLATKNKMRVGVMHTPHGDVPTPIFMPVGTQGSVKGLDAADVANTQSPIMLANTYHLYLRPGEEVVHTLGGIQRMMNWDKPVLTDSGGFQVFSLGEQLKGKNSKIKIPNSNTLTPEPSTLNPTVISDSGVEFTSHLDGSKHFFTPTKAIEIQQKIGADIMMTFDECTPDAADKNIAARAIERTYQWAIECKQQWERGDRLTAQGKYQALFGIIQGAMHEDLRKESTQQIVSLGFDGIAVGGETIGYNMPGTGEVMEWIESLLPVNKPRYAMGLGKNPQDIVDAVTLGFDMFDCVAPTRLARNGALYNGKLDKRTLKVESEFNHCRLGIGNSRFALDQTPIQDDCDCYTCVSGYTRAYLHHLFKTKELSYYRLASIHNVRFMIRLCDQLRSQILTSPSHS

SEQ ID NO: 53207 - protein, 388 aa, Chisholmbacteria bacterium
  misc_feature (1)..(388): tr|A0A1G1VSK5|A0A1G1VSK5_9BACT Queuine tRNA-ribosyltran sferase OS=Candidatus Chisholmbacteria bacterium RIFCSP HIGHO2_01_FULL_52_32 OX=1797591 GN=tgt PE=3 SV=1
MLKGFSFSVVVKAHKTRARAGELYTPHGLVRTPVFMPVGTAGSVKALAPGDLSDAGVQILLGNTYHLYLRPGDTAVRRLGGLHRFMAWTGPILTDSGGYQVSSLGKFRDEGFPVMSRIDDHGVTFKSHLDGSMHRFTPEKAIRIQENLGADIIMAFDEATPARGKAYARHAMERTHRWLDRCVSEWKKCEERKQGKALPQALFGIIQGGNYRDLRCESAEFVVSRDLMGIAIGGASIGKNPEETAENVSWVADLLPSNNPLYLMGVGVNPEDVIGAVLCGADLIDCVAPTRLARMGHLYSGKLRGKAGKWGFTSEFSRGRLNIDQARFRLDDHVIDEGCDCYTCAMGFSRAYLHHLFRSRELLYYRLASLHNVRFMVRLTEGLRRTIV

SEQ ID NO: 53208 - protein, 399 aa, Chisholmbacteria bacterium
  misc_feature (1)..(399): tr|A0A1G1VZ37|A0A1G1VZ37_9BACT Queuine tRNA-ribosyltran sferase OS=Candidatus Chisholmbacteria bacterium RIFCSP LOWO2_01_FULL_49_14 OX=1797593 GN=tgt PE=3 SV=1
MKFDFAVIAKDSRTKARAGVLHTAHGEIRTPTFMPVGTAGSVKALSPDDLKGCGAQIILGNTYHLYLRPGDQTIHTLGGLHQFMRWDGPLLTDSGGYQVSSLGLFKENAGRMFTRIDDNGVTFTSHLDGSRHRFTPQKSIEIQRNLGADIIMAFDEATPARGKTYAREAMQRTHRWLKLCKQRWSRFGDERRRGEPPQALFGIIQGGNYRDLRRESALFVVEQDLPGIAIGGGSIGRNPEETSENVGWVSDLLPAQKPLYLMGVGVNPTDILAAVECGADIFDCVAPTRLARMGQLYSGRLTIIGGKWSFESEYRHGRLNISQARFKVDKAVVDHGCDCMTCVNGFSRAYLHHLFKSRELLYYRLASVHNVRIMVRLTEELRRNIQDVSEERRQNTPRI

SEQ ID NO: 53209 - protein, 398 aa, Chloroploca asiatica
  misc_feature (1)..(398): tr|A0A2H3KY98|A0A2H3KY98_9CHLR Queuine tRNA-ribosyltran sferase OS=Candidatus Chloroploca asiatica OX=1506545 G N=tgt PE=3 SV=1
MFTITHRDPASQARSGLLTTAHGQVATPVFMPVGTRGTVKALTPHELHDHGASIILGNTYHLYLQPGHELLARRGGLHRFMGWDGPILTDSGGFQVFSLIYGGIADEVKGRRPQHAQRLPDMVKVTEDAVIFKSYLDGSRHIFTPERSIQVQHGIGGDIILAFDELPPFRAGYDYTRESLARTHRWAERCLTTHRERDPGALPNPDQRLFGIVHGGVFPDLRQASAEHIGAMGFDGLCIGGSLGADKSQIYEVVAMTVPHMPDGLARHLLGIGDVDDLFEGVARGIDMFDCVSPTRLGRHGTALIRDPSRRWKLNVLNAPLREDDAPLQEGCRCYACQHFSRAYIHYLYRAKEILGLRLVSLHNVAFLLDLMAEVRAAVAAGSFADLYAAWMGKALTL

SEQ ID NO: 53210 - protein, 377 aa, Chryseobacterium massiliae
  misc_feature (1)..(377): tr|A0A3D9AV76|A0A3D9AV76_9FLAO Queuine tRNA-ribosyltran sferase OS=Candidatus Chryseobacterium massiliae OX=204 089 GN=tgt PE=3 SV=1
MQKFFNIEKTSERKARAGELTTDHGTIQTPIFMPVGTVASVKTVHQRELKEDIKAQIILGNTYHLYLRPGMEVMQKAGGLHKFMNWDLPILTDSGGFQVFSLASSRKMSEEGARFKSHIDGSYHMFSPEKSMEIQRQIGADIFMAFDECVAYPCEYNQAKTSMELTHRWLKRCIEWTENNPELYGHKQRLFPIVQGSTFSDLRKISAEVIAEAGAEGNAIGGLSVGEPEEEMYRITDEVTDILPKEKPRYLMGVGTPWNILESIGLGIDMMDCVMPTRNARNAMLFTWKGVMNMKNEKWKKDFSPLDEFGTSFVDREYSKAYVRHLFVSKEYLAKQIASIHNLAFYLDLVKVAREHIMAGDFYQWKNSVVPILRQRL

SEQ ID NO: 53211 - protein, 356 aa, Cloacimonas sp.
  misc_feature (1)..(356): tr|A0A1V4RBR3|A0A1V4RBR3_9BACT Queuine tRNA-ribosyltran sferase OS=Candidatus Cloacimonas sp. 4484_143 OX=19561 64 GN=tgt PE=3 SV=1
MFEFKLEAASGNARAGTLKTPHGEIQTPIFMPVGTRATVKTMSPRDLHEIKAQIILGNTYHLYLRPGHELIKNAGGLHEFMGWHKPILTDSGGFQVMSLSGLRKITPEGVSFQSHIDGSYHMFTPEKVIEIQNAIGSDIMMSFDECPPYPATKEYVADSLKTTLDWARRGREAHKNTEKQALFGIVQGGIHEDLREESARKLMEMDFPGYSIGGLAVGENKSDMYRITNFLHDVLPKDKPRYLMGVGTPGDILQNIENGVDMFDCVMPTRNARKGTVFTRHGKLIIKAARYKEDLSPIDADCQCYTCRNFSRAYIRHLFNVDEFLGMRLATIHSLHFYLELVTLAREGAKLDTRIE

SEQ ID NO: 53212 - protein, 281 aa, Cloacimonas sp.
  misc_feature (1)..(281): tr|A0A3D3EZT8|A0A3D3EZT8_9BACT Queuine tRNA-ribosyltran sferase (Fragment) OS=Candidatus Cloacimonas sp. OX=205 3534 GN=DHW79_10395 PE=3 SV=1
MPFSFTLEATSGKARAGKINTNHGAIRTPVFMPVGTLGTVKAMSPKELMDADAQIILGNTYHLYMRPGHELIRKAGGLHKFINWPHPMLTDSGGFQVMSLAALRKITKDGVKFRSHIDGSLHYFTPEYVMEIQEALGADIIMSFDECPPYPATREYVEKSLTTTLRWAERGLRAFKNHQNQALFGIVQGGIYEDLREKSARALIEMGFPGYSIGGLAVGEEKPDMFRITEFLNDILPVNKPRYLMGVGTPSDLLNNIARGVDMFDCVMPTRNARKGSIFTR

SEQ ID NO: 53213 - protein, 371 aa, Cloacimonetes bacterium
  misc_feature (1)..(371): tr|A0A2N2KZS8|A0A2N2KZS8_9BACT Queuine tRNA-ribosyltran sferase OS=Candidatus Cloacimonetes bacterium HGW-Cloac imonetes-2 OX=2013734 GN=tgt PE=3 SV=1
MFSFTLESTSSKARAGRISTNHGEILTPVFMPVGTVGSVKAMSPHELEEVQAQIILGNTYHLYLKPGHELIRNAGGLHKFISWNRPMLTDSGGFQVMSLAALRKITPEGVKFRSHIDGSLHMFTPERVIEIQEAIGADIIMSFDECPPLPSTRHYLEKSLKLTLDWAARGKAAFTNEANQALFGIVQGGTYEDLRQKCAEELMQMDFPGYSIGGLAVGESKDEMFKVTSFLNDILPKDKPRYLMGVGTPSDLLNNIARGVDMFDCVMPTRNARKGSIFTRYGKMIIKAARYKEDLRPIDEHCGCYTCTHFSRAYIRHLITMNEILGMRLTTIHSLWFYQELMQMARAAILEDRYDDFLAEQLPVLDRIVDQ

SEQ ID NO: 53214 - protein, 371 aa, Cloacimonetes bacterium
  misc_feature (1)..(371): tr|A0A523XC51|A0A523XC51_9BACT Queuine tRNA-ribosyltran sferase OS=Candidatus Cloacimonetes bacterium OX=203080 8 GN=tgt PE=3 SV=1
MKFEIIKEDKISEARVGKIRLPHGDVYTPVFMPVGTQGTVKSVAPLFLNQAGVQMIVANTYHLHLRPGESTVKKAGGLHSFIGWNKGILTDSGGFQVISLADLNKITDEGVRFQSHIDGTYIFFTPENVIEMQCALGADIIMSFDEPVLYPSSYALCEKAVQRTTEWASRGKLIFNRREDDEKALFGIVQGGTYKELRKRSIEELKSIGFDGYAIGGLAIGEPKSLQLETTEYTSQLLPSEKPRYLMGVGYPEDIIDAVAKGIDMFDCVLPTRNARTGTVFTSQGKVVIKNAPYTEDYIPVDEECDCYTCQNFSRAYIRHLFNAGEILGPVLATIHNIHFFMKLMQEIRESIKKDKFGSWSGGFLSKYMNS

SEQ ID NO: 53215 - protein, 379 aa, Collierbacteria bacterium
  misc_feature (1)..(379): tr|A0A3D4CMI0|A0A3D4CMI0_9BACT Queuine tRNA-ribosyltran sferase OS=Candidatus Collierbacteria bacterium OX=2053 540 GN=tgt PE=3 SV=1
MPFKFIKNSDGTGVLTTDHGEVQTPVFMPVGTAATVKALDGKDIRDTKAEIVLANTYHLFLRPGEKVVSKMGGVAKFMNWNGPTLTDSGGFQVFSLGLGAKGETLSKIDEDGVTFKSHLDGQMHRFTPEKSMDIQKDLGADIIMAFDECTPDKIEKKYVREALNRTHRWAEKCIKRWEENGKKSAQGTDQALFGIIQGSTDREMREESAKFISSMPFSGVALGGETIGYNMEATQEVIGWIKHLLPKGKPIYTMGLGRDPQNIVDIIKCGIDMFDCVAPTRLARNGALYHGELRGGNFESEFVNGRLNISNAQFVSDKNIILEGCDCFTCQSGYTRGYLNHLYRSKELTYYRLASIHNVRFMVRLVEQMREKMRNKKEG

SEQ ID NO: 53216 - protein, 387 aa, Collierbacteria bacterium
  misc_feature (1)..(387): tr|A0A352JM48|A0A352JM48_9BACT Queuine tRNA-ribosyltran sferase OS=Candidatus Collierbacteria bacterium OX=2053 540 GN=tgt PE=3 SV=1
MFKFTKNQDGTGKITTDHGEVQTPVFMPVGTAATVKALDGQDIRQTKAEIVLANTYHLFLRPGEKTVSNLGGVAKFMNWDGPTLTDSGGFQVFSLGLGAKGESLSKIDEEGVTFKSHLDGKSHRFTPETSMDIQRDLGADIIMAFDECTPDKAEKKYIREALDRTHRWAERSVKQWQNNGMKSIQGTNQALFGIIQGSMDMKMRKEAAEFITSLPFSGIALGGETVGYNMEGTLEVIGWIKHLLPRDKPIYTMGLGRDPQNIVEIIKAGIDMFDCVAPTRLARNGALYHGEIRGDKFESEFSNGRLNIGNAQFIGDKDIIMEGCDCYTCLSGYTRGYLNHLYRSKELTYYRLASIHNVRFMVRLVEQMREKMEKNCFSLRTFVIVTH

SEQ ID NO: 53217 - protein, 378 aa, Colwellbacteria bacterium
  misc_feature (1)..(378): tr|A0A1G1Z9E3|A0A1G1Z9E3_9BACT Queuine tRNA-ribosyltran sferase OS=Candidatus Colwellbacteria bacterium RIFCSPL OWO2_12_FULL_43_11 OX=1797693 GN=tgt PE=3 SV=1
MIGFKIIKKSKLSKARLGVLKTPHGEIETPAFVGVATQATIKILTTEEVLKTKTQILIANTYHLHQRPGEHIVAKSGGVHKFMNWPGALMTDSGGFQVFSLGFGSDHGVGKILKEKKDIVVKADMQPQKMRITEDGVHFRSPIDGREIFIGPKESIRIQEKLGADIIFAFDECTSPVADYEYTKRSLRKSHRWAKQCLEYQKTNQALFGITQGGKFKDLRIESAKFIGSLPFAGFGIGGEFGNDKKKMAAMIRWVVRELPENKPRHLLGIGHPEDIPKIIKEGIDTFDCIAPTHYARRGVAFTSEGRLDMNRRTFLQDKKPLDNSCDCTTCSNYSRSYITHLFKAKEITGMHLLTFHNLYFFNSLVAGIREKIKKGKI

SEQ ID NO: 53218 - protein, 378 aa, Colwellbacteria bacterium
  misc_feature (1)..(378): tr|A0A1G1Z3W0|A0A1G1Z3W0_9BACT Queuine tRNA-ribosyltran sferase OS=Candidatus Colwellbacteria bacterium RIFCSPL OWO2_02_FULL_44_20b OX=1797691 GN=tgt PE=3 SV=1
MIDFKVLKQSKKSRARLGILKTPHGEIETPAFVGVATQAAVKTLFAHEAEHTNTQLLICNTFHLHLKPGEKIVKAAGGLHTFMQWKRPLMTDSAGFQVFSLGFGSDHGVGKILKEKRDIVIGEGAQPKKIKITRDGVWFRSPIDGVQVFIGPKESVKIQEALGADIILAFDECTSPVAGYEYTKQSLRRTHQWAEVCLAVKKSKQALYGITQGGKFKDLRIEGAKFIGSLPFDGFAIGGEFGDNKNAMIKMIEWTIRELPKEKPRHLLGIGHPEDIVKIIKAGIDTFDCIVPTHYARHGTAFTSKGRIDFKKSALVKDRRPLDSKCDCFVCTDYTRSYIAHLFKAKEITALSLLTFHNLYFFNKLVAKIRGDIKKGKV

SEQ ID NO: 53219 - protein, 375 aa, Competibacter denitrificans
  misc_feature (1)..(375): tr|W6M202|W6M202_9GAMM Queuine tRNA-ribosyltransferase OS=Candidatus Competibacter denitrificans Run_A_D11 OX= 1400863 GN=tgt PE=3 SV=1
MRFDLLQTAGAARRGRLTFARGTVETPAFMPVGTYGAVKTLTPEEVRASGAEILLGNTFHLMLRPGTAIIGRHGDLHDFMQWDGPILTDSGGFQVFSLAAIRKITEAGVKFQSPVDGSTVFLGPEESMAVQRALGADIVMIFDECTPYPATETEARQSMELSLRWARRSQLAHGDNPAALFGIVQGGMYPHLRQISAQGLQELGFDGYAIGGLAVGEPPEERARILEHTAPLLPSAAPRYLMGVGKPEDLIEAVHRGIDLFDCVLPTRNARNGHLFTRQGDIRIRNSRYRNDNRPLDEHCTCYTCRHYSRAYLRHLDQCRETLGARLNTIHNLHYYQELMRDLRDAIVRQRFEAFAAEIYENRGQAPVAVYNDAL

SEQ ID NO: 53220 - protein, 375 aa, Competibacteraceae bacterium
  misc_feature (1)..(375): tr|A0A3C1SMT6|A0A3C1SMT6_9GAMM Queuine tRNA-ribosyltran sferase OS=Candidatus Competibacteraceae bacterium OX=2 053538 GN=tgt PE=3 SV=1
MNFEIFHTDGAARRGRLTFPRGTVETPAFMPVGTYGTVKTLTPEEVRASGAEILLGNTFHLMLRPGTAIIQQHGDLHDFMHWQGPILTDSGGFQVFSLAAIRKISEAGVKFQSPVDGGTVFLGPEESMAVQRALGADIVMIFDECTPYPASETEARQSMELSLRWARRSKLAHGDNPAALFGIVQGGMYPHLRQSSAEGLREIGFDGYAIGGLAVGEPPAERLHILDFTLPLLPQPAPRYLMGVGKPEDIVEAVRRGVDLFDCVLPTRNARNGHLFTHHGDIRIRNSRYRDDTRPPDERCGCYTCRHYSRAYLRHLDQCQETLGARLNTLHNLHYYQELMHGLREAIAERRLESFAAELYEKRGQMIAPVYNDAL

SEQ ID NO: 53221 - protein, 370 aa, Competibacteraceae bacterium
  misc_feature (1)..(370): tr|A0A433I3R8|A0A433I3R8_9GAMM Queuine tRNA-ribosyltran sferase OS=Candidatus Competibacteraceae bacterium OX=2 053538 GN=tgt PE=3 SV=1
MHFQLFQTDGAARRGQLHFPRGTVETPAFMPVGTYGTVKAMTPEELRASGAEIILGNTFHLMLRPGTTVIEQHGDLHGFMHWDGPILTDSGGFQVFSLAAIRKITEAGVKFRSPVDGGLVFLGPEESMAVQRALGSDIVMIFDECTPYPATETEARTSMALSLRWARRSKAAHGDNPAALFGIVQGGMYPPLRRISAEGLCEIGFDGYAIGGLAVGEPLAERLAMLDCTVPLLPANAPRYLMGVGKPEDIVEAVRRGIDLFDCVMPTRNARNGHLFTHYGDVRIRNSQYRDDTRPVDETCGCYTCQHYSRAYLRHLDQCREILGARLNTIHNLYYYQDLMRQLRAAIAENRFAGFMAKFYARRGRAAPPS

SEQ ID NO: 53222 - protein, 374 aa, Cryosericum hinesii
  misc_feature (1)..(374): tr|A0A398DE24|A0A398DE24_9BACT Queuine tRNA-ribosyltran sferase OS=Candidatus Cryosericum hinesii OX=2290915 GN =tgt PE=3 SV=1
MAIFETTCQSSTGRERTGILTTAHGTVRTPVFMPVGTQATIKGLTPEQVREIGFEIILSNTYHLYLQPGDDVVHEAGGLHRFMHWDWSILTDSGGFQAMSLSRISKKSDEGIEFQSFIDGSRHMFTPERVIAIEKNLDSDVVMPLDICTQYPSERVTAEKDLARTVSWFGRAKKAMGESHQLLFGITQGGFYGDLREESTERIMELEPQGFAIGGLSVGEERQLTMDMLDHSLLHVPDDCPRYFMGMGDPIGILEIISRGVDMFDCVLPTRVARNQMVFTRDGVVKISKKIYERDFRPIDEDCSCYMCRNYTRAYLRHLFKANEMLAGTLATIHNLQFLQTMIGEIRDAIAAGTFAEYKHAFIERYTASSDRAW

SEQ ID NO: 53223 - protein, 374 aa, Cryosericum odellii
  misc_feature (1)..(374): tr|A0A398DD05|A0A398DD05_9BACT Queuine tRNA-ribosyltran sferase OS=Candidatus Cryosericum odellii OX=2290917 GN =tgt PE=3 SV=1
MAIFETTCQSSTGRERTGILTTAHGTVRTPVFMPVGTQATIKGLTPEQVREIGFEIILSNTYHLYLQPGDDVVHEAGGLHRFMHWDWSILTDSGGFQAMSLSRISKKSDEGIEFQSFIDGSRHMFTPERVIAIEKNLDSDVVMPLDICTQYPSERVTAEKDLARTVSWFGRAKKAMGESHQLLFGITQGGFYGDLREESTERIMELEPQGFAIGGLSVGEERQLTMDMLDHSLLHAPDDRPRYFMGLGDPIGILEIISRGVDMFDCVLPTRVARNQMVFTRDGVVKISKKIYERDFHPIDEDCSCYMCRNYTRAYLRHLFKANEMLAGTLATIHNLQFLQTMIGEIRDAIAAGTFAEYKRAFIERYTASSDRAW

SEQ ID NO: 53224 - protein, 378 aa, Curtissbacteria bacterium
  misc_feature (1)..(378): tr|A0A0G0UZF0|A0A0G0UZF0_9BACT Queuine tRNA-ribosyltran sferase OS=Candidatus Curtissbacteria bacterium GW2011_ GWA1_40_24 OX=1618406 GN=tgt PE=3 SV=1
MLEFKILKKSKRSLARLGALKTSHGEVETPSLVPVATQAAVKTLTSEEVLLTKSQILIANTYHLHLKPGEKIVKAGGGLHRFMNWQKPLMTDSGGFQVFSLGFGADFGMSKILKFSAKEKIKLDTRPRFVKIVPEGVYFRSPLDGKELFLGPKESIKIQEDLGADIIFAFDECPPPLADYQYLKKSLALTHRWAKICLKSKKTKQALFGIVQGGKYKDLRIESAKFIGSLPFDGFGIGGEFGYDKKTMAKMLNWINKELPENKPRHLLGIGYLEDVENIVRSGVDLFDCTVPTHYGRRGIAFTSAGELNLGKSIFLKDKKLLDKNCDCSVCRNYRRNYISHLFRAKEITAMKMLTFHNLYFFNSFVEKIRNKIKDGRL

SEQ ID NO: 53225 - protein, 375 aa, Cyclonatronum proteinivorum
  misc_feature (1)..(375): tr|A0A345UJW8|A0A345UJW8_9BACT Queuine tRNA-ribosyltran sferase OS=Candidatus Cyclonatronum proteinivorum OX=14 57365 GN=tgt PE=3 SV=1
MFQLLKNDPKTKARLGRLTTDHGTIETPIFMPVGTLATVKAVEQQQLKDQVKAQIILGNTYHLYLRPGNGIMREAGGLHQFMKWDKPILTDSGGYQVFSLSDNRKLEERGVTFKSHLDGSKHQFTPESVIETERILGSDIMMVLDECPPYPSTYEYALNSMHLTHRWAARCKKAFDESEPLYGHRQFLFGIAQGSTYKDLRNASAEAIAALDFDGNAIGGLSVGEPNELMYEMTDHITDYLPPHKARYLMGVGTPADLLNGVARGVDMFDCVMPTRNARNGTVFTRNGIVNLRNAKWKNHHKPLDEDFPSDFCSKYTMAYLHHLVRCNEILGMTLASLQNLTFYLWLMEEVRRNLAEGTFADWYLPMIEKVKTRL

SEQ ID NO: 53226 - protein, 369 aa, Dactylopiibacterium carminicum
  misc_feature (1)..(369): tr|A0A272EQB0|A0A272EQB0_9RHOO Queuine tRNA-ribosyltran sferase OS=Candidatus Dactylopiibacterium carminicum OX =857335 GN=tgt PE=3 SV=1
MKFELLSTSGQARRGRLHLAHGIVETPVFMPVGTYGTVKAMSPHELLDIGAQICLGNTFHLWLRPGMEVFKQFGGLHDFMGWSKPILTDSSGFQVFSLGALRKISEEGVKFSSPINGDKLFLTPEISMQIQHGLNSDVVMIFDECTPYPATRDEAAKSMRMSARWARRSRDEHDRLENRNALFGIVQGGMYEDLRDESQGVLEGIDFDGFAIGGLSVGEPKEDFYRVLAHTGPRLPAWKPHYLMGVGTPEDLVYGVSQGIDMFDCVMPTRNARNGWLFTRWGDLKIRNAKHKQDTRPIDESCECYTCRHFSRAYLHHLDRAQEMLGPRLMTIHNLHYYQHLMREIRAAIETDDYPAFQARFAIERQRGA

SEQ ID NO: 53227 - protein, 369 aa, Dadabacteria bacterium
  misc_feature (1)..(369): tr|A0A1F5ITU4|A0A1F5ITU4_9BACT Queuine tRNA-ribosyltran sferase OS=Candidatus Dadabacteria bacterium RIFCSPHIGH O2_12_FULL_53_21 OX=1797756 GN=tgt PE=3 SV=1
MFRFEILKHDTGTGARLGRIHTAHGTVDTPAFMPVATQASVKALSPAEVESLGFEMVIVNAYHMYLRPGHKTIEKLGGLHKFMSWPRPITTDSGGFQVLSLSKTRKVKEEGIVFQSHLDGSSHVLTPEKCIEIQESLGVDIMMCLDECPPYPSTPEYMKKSVGLTTRWAKLCKEAQKKHDNALFGIVQGGVFPDLRRESAEGLTGIGFDGYSLGGLGIGEDSARTCEITESTLAHLPPEKPRYLMGIGKPGDIAQAVSAGVDLFDCVIPTRNARNGTLFTSHGKLVIKNARYAEDEGPIDDNCGCYTCGNFSRAYLRHLYMSKEILVLRLLTLHNLSYYGKLMTDIRESIARGGFSVLLNRVKSPGGKD

SEQ ID NO: 53228 - protein, 368 aa, Dadabacteria bacterium
  misc_feature (1)..(368): tr|A0A523I2V9|A0A523I2V9_9BACT Queuine tRNA-ribosyltran sferase OS=Candidatus Dadabacteria bacterium OX=2080303 GN=tgt PE=3 SV=1
MFTFEILKSDESTDARLGKMTTAHGVVDTPAFMPVATQATVKSLSSEEIQDLGFEIIIVNAYHMYLRPGHRTVEKLGGLHKFMSWNKPIATDSGGYQVFSLSKTRKIKNEGILFRSHLDGSEHLFTPAKCIEIQEALGVDIMMCLDECPPYPSTEEYMKKSVELTTRWAKLSKESKSRTDNSLFGIVQGGVFDELREKSAGELTEIGFDGYAVGGLGIGEDQEKTYEITESTLFRLPKDKPRYLMGLGKPEDIVTAVSMGVDMFDCVIPTRNARNGTLFTSNGKLVIKNAQFAQDGRPIEEGCECYTCRIFSRAYLRHLYIAKETLVLRLLTLHNLFFYSELMKGIRDSIDSGDFPNFLTRVQSLGGK

SEQ ID NO: 53229 - protein, 392 aa, Daviesbacteria bacterium
  misc_feature (1)..(392): tr|A0A1F5JXQ1|A0A1F5JXQ1_9BACT Queuine tRNA-ribosyltran sferase OS=Candidatus Daviesbacteria bacterium RIFCSPHI GHO2_02_FULL_41_10 OX=1797774 GN=tgt PE=3 SV=1
MKSFKILHKDGKARVGELTTQHGVIDTPNFIPVGTQATVKALGPRELSEIGAQIVLANTYHLMLRPGADLIESFGGLHKFMGWDKPIMTDSGGFQVFSLGVALEHGNSKVVAERGKRKRESNYVSKPRLNKITEEGVVFQSHLDGSKHILTPEKSIKIQRQLGADLIVAFDDHESSKHSKAQMLESIELTERWGLRSLEAYKRSCHDSSQILYGVIHGGTHKDLRIRSARFTDDNFDAIAIGGIYGDKRDLCRIVEWVVDEVSEDKPRHLLGIGEVEDLFNGVERGVDFFDCVAPMRRARFGSLYISPNSFINIRQSKFTADKKPIDPACGCLTCGNFSRAYLRHLYMADEILYHQLATLHNVYFIIHLVSAMRDSIKGNNFKKFKSGFLQD

SEQ ID NO: 53230 - protein, 392 aa, Daviesbacteria bacterium
  misc_feature (1)..(392): tr|A0A1F5NM23|A0A1F5NM23_9BACT Queuine tRNA-ribosyltran sferase OS=Candidatus Daviesbacteria bacterium RIFCSPLO WO2_02_FULL_41_8 OX=1797798 GN=tgt PE=3 SV=1
MTSFKILHKDGKARVGELTTQHGVIDTPNFIPVGTQATVKALGPRELSEIGAQIVLANTYHLMLRPGADLIESFGGLHKFMGWDKPIMTDSGGFQVFSLGVALEHGNSKVVAERGKRKRESNYVSKPRLNKITEEGVVFQSHLDGSKHILTPEKSIKIQRQLGADLIVAFDDHESSKHSKAQMLESIELTERWGLRSLEAYKRSCHDSSQILYGVIHGGTHKDLRIRSARFTDDNFDAIAIGGIYGDKRDLCRIVEWVVDEVSEDKPRHLLGIGEVEDLFNGVERGVDFFDCVAPMRRARFGSLYISPNSFINIRQSKFTADKKPIDPACGCLTCGNFSRAYLRHLYMADEILYHQLATLHNVYFIIHLVSAMRDSIKGNNFKKFKSGFLQD

SEQ ID NO: 53231 - protein, 365 aa, Deianiraea vastatrix
  misc_feature (1)..(365): tr|A0A5B8XE74|A0A5B8XE74_9RICK Queuine tRNA-ribosyltran sferase OS=Candidatus Deianiraea vastatrix OX=2163644 G N=tgt PE=3 SV=1
MSFEFTLEKKTGNARCGTLNLAHGVVQTPVFMPVGTSASVKGLTNDMIKDTGAQIILGNTYHLMLRPGEEKMEKFGGMHKFMNWNLPILTDSGGFQVMSLSKIRKITEEGVTFRSHIDGTKYLLTPERSMDIQYKIGSDITMIFDECPAFPITHKKAKKSMELSLRWAQRSKDAYINRDGYGLFGIVQGSVFPDLREISAKSLIDIGFDGYAVGGLAVGEGQDEMLKTLDFTVPFMPEDKPRYLMGVGKPDDLIKAVARGIDMFDCVLPSRVARNGLAYTRNGEIRIKNAQYAISDRQLDEKCNCYTCKNHSLQYLHHLFKNQEILVATLMTIHNITFYQDLMKAIRSAIFAGNYSENTRLGDLF

SEQ ID NO: 53232 - protein, 374 aa, Delongbacteria bacterium
  misc_feature (1)..(374): tr|A0A2G6P356|A0A2G6P356_9BACT Queuine tRNA-ribosyltran sferase OS=Candidatus Delongbacteria bacterium OX=20445 94 GN=tgt PE=3 SV=1
MLTYELIKTDKKTGARAGIIHTDHGDIETPIFMPVGTIGNVKSMTNRDLEEARAQIILGNTYHLHMRPGKDLINRAGGLHKFMNWNKPILTDSGGFQVFSLAGLSKITDKGALIQSHIDGSKHFFNPELVMDIQRNIGSDIQMVIDECAPYPSTKEYALKALKRTTRWAKECRDIWVREEPLYGHYQSLFPIVQGSTYHDLRRISCNEIMELDPFEGYAIGGVSVGEPPELIKEITQVCTEILPKNKPRYLMGVGTPQDLLNCIEVGVDMFDCVMPTRNARNGTVFTSKGKLVLKGAKFKEDFNSIDKDCDCFTCRNYTRAYVRHLYNAKEMLSGQLASIHNIHFYLWLAREARKAIMEDRYYDFKKDIMSYYE

SEQ ID NO: 53233 - protein, 340 aa, Delongbacteria bacterium
  misc_feature (1)..(340): tr|A0A348P212|A0A348P212_9BACT Queuine tRNA-ribosyltran sferase OS=Candidatus Delongbacteria bacterium OX=20445 94 GN=tgt PE=3 SV=1
MPVGTLGNVKALTSRDLHEAQSQIILGNTYHLNNRPGMEIMMLAGGLHKFMNWDRNILTDSGGFQVFSLASLTKIKDEGVHFQSHLDGTKYFFTPESVVDIQRVIGSDIMMVLDECSHYPVEKIQAEKAVKRTTHWAKRSIEHFRSTSPLYGHDQTVFAIAQGSVFKDLRERSCNELAELDFPGYAIGGVSVGEPPEMIPEIAEVCTDILPKNKPRYLMGVGTPADILNCISVGVDMFDCVMPTRNARNGTVFTKNGKIILKGAKVKEDFTPIDDTCECYTCRNYTKAYVRHLFNAGEKLAGQLATIHNIYFYIWLTRESRKAIINGSYNKFKNSILENY

SEQ ID NO: 53234 - protein, 374 aa, Dependentiae bacterium
  misc_feature (1)..(374): tr|A0A3S0BT45|A0A3S0BT45_9BACT Queuine tRNA-ribosyltran sferase OS=Candidatus Dependentiae bacterium OX=2030827 GN=EKK58_03530 PE=3 SV=1
MFLFELLYQSKRSKARVGVIHTPHGTIETPHFVPVATNGTMKAVDSVMLDPLQVQLMFCNTYHLMVQPGTDLIEKAGGLHAFMNRSKPVITDSGGFQVFSLLYGGVQNELKSSGQKKTGTMVIGISEEGVKFRSYRNGDYLLLTPESSVAAQKKLGADIIIPFDELPPFHIDQSKLEKSLHRTHRWEKRSLEAHLKDRRQQAMYSVVHGGIDQRLRTLSATLLDSLPFDGHAIGGSLGKNKQQMIDMLSYTVPLLAPEKPRHLLGIGDLASIEPILSLGIDTFDSSYPTKCARHGLLFTFQGSKKAVHKDLTTLFGPIDAGCVCYTCTHYTAAYVQHLFKAHEMIAYTLASIHNIAHMVERVNRYRQAILGGLL

SEQ ID NO: 53235 - protein, 376 aa, Dependentiae bacterium
  misc_feature (1)..(376): tr|A0A523RLX0|A0A523RLX0_9BACT Queuine tRNA-ribosyltran sferase OS=Candidatus Dependentiae bacterium OX=2030827 GN=tgt PE=3 SV=1
MNAFSFELIHRSARSHARVGKIHTPHGTIDTPNFVAVGTNATIKALDSQQLENIGLQLMFCNTYHLLLQPGTQTIKKAGGLHKFMNRSMPIITDSGGFQVFSLMYGTVSDEIKSRGKKKLDNSVLKINEEGVLFRSYRDGTPILLTPESSVTAQKDLGADIIIPLDELPPYHVSQDKLRESLARTHRWEKRSFDTHMQNKNNQAMYAVIHGGLDKTLRKESCSYLTQLGFDGYAIGGSLGKTREQMFDLLSYTMPLLPENKPNHLLGIGDLDSLETCIKLGVDTFDSSHPTRCARHGLLFTKNGYKKILQANNKQCFSPIDEGCTCMTCKHYTIAYLHHLFKANELTGYMLATIHNLHFMVLLMAEYRQKILNDQL

SEQ ID NO: 53236 - protein, 370 aa, Desantisbacteria bacterium
  misc_feature (1)..(370): tr|A0A1J5EFN4|A0A1J5EFN4_9BACT Queuine tRNA-ribosyltran sferase OS=Candidatus Desantisbacteria bacterium CG2_30 _40_21 OX=1817895 GN=tgt PE=3 SV=1
MTAINFNIIKTSTQCRARVGKVITNHGVINTPAFMPVGTQATAKTMTPEELYEIGVEIILSNAYHLFLRPGSEIIKISGGFHRFMHWDKPILTDSGGYQIFSLNRLRKITEKGARFQSHIDGSYHLFTPESVIEFQMMLGSDIVMPLDECAPYPCGYEEARIAKDRTNRWAKRNKQTFLSINNNGSSLFGIVQGNMYPKLRHESIDELTDIGFDGYAIGGLSVGEPKELMYEMLKETVPHLPENSPHYLMGVGAPEDILEAVETGVDMFDCVMPTRHARTGEVFTSNGPLVIRNAPCATDTTPIDAECSCYVCRNYSRAYIRHLIHVNEILGVRLTTWHNLAFMMNLMRQIRESIQQERFMKFKKEFLAR

SEQ ID NO: 53237 - protein, 379 aa, Desantisbacteria bacterium
  misc_feature (1)..(379): tr|A0A2M7JDD3|A0A2M7JDD3_9BACT Queuine tRNA-ribosyltran sferase OS=Candidatus Desantisbacteria bacterium CG_4_8 _14_3_um_filter_40_12 OX=1974545 GN=tgt PE=3 SV=1
MTAINFNIIKTSTQCRARVGKVITNHGVINTPAFMPVGTQATAKTMTPEELYEIGVEIILSNAYHLFLRPGSEIIKISGGFHRFMHWDKPILTDSGGYQIFSLNRLRKITEEGARFQSHIDGSYHLFTPESVIEFQMMLGSDIVMPLDECAPYPCGYEEARIAKDRTNRWAKRNKQTFLSINNNGSSLFGIVQGNMYPKLRHESIDELTDIGFDGYAIGGLSVGEPKELMYEMLKETVPHLPENSPHYLMGVGAPEDILEAVETGVDMFDCVMPTRHARTGEVFTSNGPLVIRNAPCATDTTPIDAECSCYVCRNYSRAYIRHLIHVNEILGVRLTTWHNLAFMMNLMRQIRESIQQERFMEFKKEFLARWAIKEQVTC

SEQ ID NO: 53238 - protein, 389 aa, Desulfofervidus auxilii
  misc_feature (1)..(389): tr|A0A127ALE7|A0A127ALE7_9DELT Queuine tRNA-ribosyltran sferase OS=Candidatus Desulfofervidus auxilii OX=162198 9 GN=tgt PE=3 SV=1
MAMSCSSFNTPALEFAIQAQDGAARAGILKTQHGLIRTPVFMPVGTLASIKSLTSEDLKEIGVEIILANTYHLYLRPGIELIAKFEGLNHFMHWDGPILTDSGGFQIYSLAAKREIREEGATFRSHIDGSLHFLTPEKVTAFQEALGADIIMCFDECLPYPVDYDYAQKSLALTLRWAKRCKEAHCSSKQALFGIVQGSFYPNLRRQGAKLLTEIGFDGYAIGGLSVGEPKEKTWEAIEIANETLPQNQPRYAMGIGLPEDIIEAVWRGIDMFDCVVPTRHARTGTLFTSFGPLVIRHSCYADDKRPIDENCDCYVCRHYSRAYLRHLFITKELLAYRLNSYHNIYYFVSFMRQIRQAILSGCLAQFRKTFYERRNQLKEGNKYVDNLV

SEQ ID NO: 53239 - protein, 375 aa, Desulforudis sp.
  misc_feature (1)..(375): tr|A0A3A6MZX8|A0A3A6MZX8_9FIRM Queuine tRNA-ribosyltran sferase OS=Candidatus Desulforudis sp. OX=2093368 GN=tg t PE=3 SV=1
MPVAISFELIKTDPETGARLGRLTTPHGVVDTPVFMPVGTQATVKTMTPEEVYDLGGRIILSNTYHLYLRPGHELIREAGGLHRFMHWDGPILTDSGGFQVFSLAALRKISDEGVMFQSHIDGSKHLFTPEKVADIEGVIGSDIAMVFDECAPYPCSYEDAVKAHERTVHWATRTRDHLAQIGSDQAFFGIVQGSVVRELREASARALVELDFPGYGIGGLSVGEPKPLMYDALDWTVPLLPPEKPRYLMGVGSPDCVLEAVARGVDMFDCVLPTRMARHGAVFTTTGRLNLRNAKNALDFGPLDPGCGCYTCRHFSRAYMHHMFKTGEILGLRLATIHNLRFLLDLTERIREALAENRFAFLKTQYMEAYLTGG

SEQ ID NO: 53240 - protein, 372 aa, Desulforudis audaxviator
  misc_feature (1)..(372): tr|A0A3S8S5K3|A0A3S8S5K3_9FIRM Queuine tRNA-ribosyltran sferase OS=Candidatus Desulforudis audaxviator OX=47182 7 GN=tgt PE=3 SV=1
MGILFEVLKQDSRTRARLGRLTTPHGVVETPVFMPVGTQATVKTMTPEEVRDLGARIILSNTYHLYLRPGHELVREAGGLHRFMHWNGPILTDSGGFQVFSLAPLRKLSDEGVEFRSHIDGSRHFFTPEKVVAVQEALGSDIAMVLDECAPYPCSYKDARTATERTTRWAARARAAWNSDGATALFGIIQGSVYRDLREESTRALVDLDFPGYGIGGLSVGEPKPLMYEALEWVIPLIPEDRPRYLMGVGSPDCLFEGIARGVDMFDCVLPTRMARHGAVFTHTGRLVVRNAPNARDFGPLDPGCTCYTCRHFSRAYVHHLLRAGEVLGIRLTTIHNLHFLLDLARRIREAIAEDRFHSLKEQFLAACLTPA

SEQ ID NO: 53241 - protein, 394 aa, Desulfosporosinus infrequens
  misc_feature (1)..(394): tr|A0A2U3LJW7|A0A2U3LJW7_9FIRM Queuine tRNA-ribosyltran sferase OS=Candidatus Desulfosporosinus infrequens OX=2 043169 GN=tgt PE=3 SV=1
MTSDLKQRASTKATIIQKEVKGLTAVHLEIIKADSRTRARLGKLHTPHGVIDTPVFMPVGTQGTVKTITPEEIKEIGAGIILSNTYHLFLRPGQELIREAGGLHRFMNWDGAILTDSGGFQVFSLGDLRKIKEDGVEFRSHIDGSRQFLSPEIATQVQMALGSDIVMAFDECAPYPCTHEYAKDSLERTTRWLKRCKETLTTTDTQALFGIVQGGMYEDLRRQSAAEIMELDLPGYAIGGLSVGEPKELMYEVLDYTVSLLPKEKPRYLMGVGSPDALIEGVMRGIDMFDCVLPTRIARNGTAMTRYGKVIVRNAGSAHDFGPIDPSCDCYTCRNYSRAYIRHLIKADEILGLRLMTIHNLRYLQNLMREIREAIKCDRLPEYRKKCFEDYGYV

SEQ ID NO: 53242 - protein, 378 aa, Desulfovibrio trichonymphae
  misc_feature (1)..(378): tr|A0A1J1DRT4|A0A1J1DRT4_9DELT Queuine tRNA-ribosyltran sferase OS=Candidatus Desulfovibrio trichonymphae OX=17 25232 GN=tgt PE=3 SV=1
MTSTVFTLLQTDGTARAGLLQTAHGAVPTPVFMPVGTVGSVKCLAPDDLHAVGAPIILGNTYHLYLRPGDALVARCGGLHNFASWPGAALTDSGGFQIFSLSSLRKIQEEGVEFRSHLDGSRHFFTPENVVNIQRNLNADIMMVLDECLSYGTDYACTEKSLALTTRWAKRARAAYPAGAAGNLLFGIVQGGFFKDLRSRSAEEICTVDFDGFAVGGLSVGESKAEMYEMLSHTAPLLPRDKPRYLMGVGTPLDIVHGIHAGMDMFDCVLPTRNARNGTLYTSVGKINIKRREYAEDESPLDPDCGCYTCRTFSRAYLRHLFASREMLSFRLNSLHNLTYYLRLTREARRAILQNRFTAMLARMKALYPDEARAGCGA

SEQ ID NO: 53243 - protein, 339 aa, Dojkabacteria bacterium
  misc_feature (1)..(339): tr|A0A2N2F315|A0A2N2F315_9BACT Queuine tRNA-ribosyltran sferase OS=Candidatus Dojkabacteria bacterium HGW-Dojka bacteria-1 OX=2013761 GN=tgt PE=3 SV=1
MNLETLKQKYFFMPDATRGAVRYLTTKQLKETGTEAIVTNTLHLLIHPGPDVIQELGGIKKMMGWDGIVFTDSGGFQVFSLIHSKKWKGKVHENGATFKSPREGNVYELTPESSIDIQIKIGSDVLVCLDDCRKTDLNRYEAEQSVERTIKWAKRCKDHFEKEYGGTAKTGKLLTCVVQGANFPDLREKCAKALVEIGFDGYNFGGFVVDSEGRLVEDEMSAVIENVPKDTIRYAMGVGKPEDILKAAKIGFNLFDTVLVTRNARHGTLYTSEGELRMGNSEMALDKRPVDSNCNCECCSNYTRAYIHHMMKNGEATALTLATIHNLTHYQSLISKLNS

SEQ ID NO: 53244 - protein, 374 aa, Doolittlea endobia
  misc_feature (1)..(374): tr|A0A143WRY1|A0A143WRY1_9ENTR Queuine tRNA-ribosyltran sferase OS=Candidatus Doolittlea endobia OX=1778262 GN= tgt PE=3 SV=1
MEYQLLKTDGQARRGRLVFERGVVETPAFMPVGTYGTVKGITPEEAKETGAQILLGNTFHLWLRPGQTVIKLHGDLHDFMQWHGPILTDSGGFQVFSLKGIHKIAEEGVHFRHPINGSRIFLSPEKSMEIQYDLGSDIVMIFDECTPYPLDWSYAKQSMEMSLRWAARSRQRFDELDNPNMLFGIIHGGVYEDLRDVSVKKLVEIGFDGYAVGGLAVGEPKADMHRILSHLCPQIPADKPRYLMGVGKPEDLVEGVCRGIDMFDCVIPTRNARNGHLFVTDGVVKIRNIRYKDDVALLDAECDCYTCRNYSRAYLHHLDHCNEILGARLNTIHNLRYYQRLMADLRQTIDEGTLGYFVDAFYRRINKPNFIFNC

SEQ ID NO: 53245 - protein, 402 aa, Dormibacter sp.
  misc_feature (1)..(402): tr|A0A2W5YZC1|A0A2W5YZC1_9BACT Queuine tRNA-ribosyltran sferase OS=Candidatus Dormibacter sp. RRmetagenome_bin1 2 OX=2599630 GN=tgt PE=3 SV=1
MSALTIDARDGSARTGRLRTAHGDVNTPAFMPVGTHATVKSLDPDEVRACGADIVLCNAYHLALRPGVDLIERAGGLHSFMAWDGPILTDSGGFQLVSLRTVTAVDDDAATFVSPYDGARLRVTPEEAVGLQARMNADIVMCLDQPVAWGADAAQAEAATKRTHRWAERCAAVHPGDGRLLFGICQGGFDEQARAASASRVAGLDFDGIAVGGLSVGEPLEVMEAMTAASVAELPVDRPRYFMGLGTDAELLTMVALGVDMFDCVAPTRLARTGAALTPDGRLPLRRAVYRDDLRPLVDGCPCPACRRFSRAYLRHLIGAGEILGHRLLTLHNVTHLSTLMAGAREAISAGRFGVFRAETEARLRAAGDGEEGADAADAGQPQRIGRTVESARIPGTLGPRG

SEQ ID NO: 53246 - protein, 395 aa, Dormibacteraeota bacterium
  misc_feature (1)..(395): tr|A0A2W6AKA7|A0A2W6AKA7_9BACT Queuine tRNA-ribosyltran sferase OS=Candidatus Dormibacteraeota bacterium OX=205 2315 GN=tgt PE=3 SV=1
MFEFQVLATDRAARRGVIRTDHGELETPAFFAVATRAALKGVSPDAAWEVGVRSLICNAYHLTVQPGPELVEAAGGLHRFMGWPGVLATDSGGFQIFSLRHGQVADEVKGRRRLPPAEGDPIDAVRVDEEGADFRSYLDGSRHRFTPENNMALQRSLGADLLFCLDECTPFHVPAEYTRAAMERNARWARRCLDAFHRLGMEERQALFGIVHGGVYPELRRISAAAMAALPFSGFGIGDCLGESKQDWYRLVELVCPLLPEERPRHLLGVGEPDDLVEGALRGIDTFDCAMPTRIARHGQALVQGMPRFRLDLAKAERRGEDRPIEEGCPCTACRRFGRAYLHHLFRAGEMLGIALAAEHNLAFTARLMARIREAISAGSLAELRAEQRMPAASG

SEQ ID NO: 53247 - protein, 410 aa, Dormibacteraeota bacterium
  misc_feature (1)..(410): tr|A0A2W5YFJ4|A0A2W5YFJ4_9BACT Queuine tRNA-ribosyltran sferase OS=Candidatus Dormibacteraeota bacterium OX=205 2315 GN=tgt PE=3 SV=1
MLEFSITAQDGAARRGVIRTEHGELETPAFFAVATQAALKGLDPAVAAAAGVHSAICNSFHLTLEPGPEVIRRAGGLHTYMGWPGVLATDSGGFQVFSLRHGQVADELKGRRRIPDFGREEDALDAVRVDEEGADFRSYVDGSRHRFTPENNMQLQQALGADILFCLDECTPFHVTREYTQIATERNARWAQRCLDAFRVLGPAAPQSLFGIVHGGVYPDLRRWSAERMAELDFDGYGIGDCLGESKSDWYSVVDLVRPLLPEARPRHLLGVGEPDDLVEGALRGIDSFDCAMPSRIARHGQALHLGLPRNRLDLAKADRKLEDQPIEEGCPCSACRRFGRAYLNHLVKAKEILGISLLTEHNLAFTNRLMRRIREAISAGRLAELRAEVRGMARPERGVVRRQDSSEVP

SEQ ID NO: 53248 - protein, 393 aa, Doudnabacteria bacterium
  misc_feature (1)..(393): tr|A0A1F5QAC7|A0A1F5QAC7_9BACT Queuine tRNA-ribosyltran sferase OS=Candidatus Doudnabacteria bacterium RIFCSPLO WO2_02_FULL_48_13 OX=1817845 GN=tgt PE=3 SV=1
MDFFQILKNDINSKARLGIINTAHGPVKTPAFLPIGTRGSVKAVTSEELRFWGAEMILANTYHLWMRPGDALINKAGGLHKFMGWDGPIFTDSGGYQVYSLGEKITESTSERKPTLKKITEKGVEFRNELDGALHVLSPEESIQIQSNLGSDIAVVLDDVPGLPATKTRLESSLELTLKWAERAKKQFEKITPESVNPGQKLFGVVQGGDREYLRKKSVRALQKIGFDGYGIGGLAIGAVADDPEIMYRVIDFTVPYLEDDKPRHLLGVGYPEQIIKSIALGMDTFDCVIPTRNARHGELFINQKNGNGAGYAALKILNKQYAEDFTPIDNTCSCYGCRHHNRAYLRHLFMSGEPLGIRLATMHNLRFYLDFMEKVRRSIEFESFSELLALYQ

SEQ ID NO: 53249 - protein, 380 aa, Doudnabacteria bacterium
  misc_feature (1)..(380): tr|A0A1F5PYB7|A0A1F5PYB7_9BACT Queuine tRNA-ribosyltran sferase OS=Candidatus Doudnabacteria bacterium RIFCSPLO WO2_01_FULL_44_21 OX=1817841 GN=tgt PE=3 SV=1
MFTITKKDQKTKARIGVLQTAHGNVHTPVFLPIGTKGAIKSIAAEELRFWGAEMILANTYHLWQRPGDALIAKAGGLHKFMNWKGGIFTDSGGFQAFSLAKLTKVSDQGVSFMSEIDGNTHFLTPELSVQIQLNLGSDIALVLDEFGEAEADKKSVAIMVLRTRAWAKRARLMHEKLIANSINPNQQLWGIVQGGVFRDLRHQSAEAIKEIGFLGYCIGGVANGGESEELMYQAVKFSNPHLEEDKPKHLLGVGLPEQIVKAVSLGCDSFDCVIPTREGRHGKFFVNLKPQDGEGYYTLNITAEKYKEDFEPIDNTCDCYGCQNYTKSYIRHLFMSEEPLGIRLATMHNLKFYLNLTQRIRDSIETGKFQEFSKKYQLVL

SEQ ID NO: 53250 - protein, 373 aa, Edwardsbacteria bacterium
  misc_feature (1)..(373): tr|A0A1F5RHT3|A0A1F5RHT3_9BACT Queuine tRNA-ribosyltran sferase OS=Candidatus Edwardsbacteria bacterium GWF2_54 _11 OX=1817851 GN=tgt PE=3 SV=1
MHFKLEHTSGRARKGTITTAHGEIPTPIFMPVGTQGTVKAMTPQDLEAAGARIILGNAYHLYLRPGQELVKKAGGLHKFMGWDRPILTDSGGFQVFSLADLRKIKEDGVEFQSHLDGSHHKFTPENVMQLEVDLGADIIMNFDECIPYPSTPEYTEDSTARTTRWAKRCREKFLELKEGDTDSQALFGIVQGGTHPELRQRSAREMLEIGFEGYAIGGLAIGEPKEATWEAIEAANQILPTNKPRYMMGVGFPEDIIKGVWLGVDMFDCVIPTRNARNGSLFTSSGKLAMKNAVHQNDLGPVDEGCDCYLCRNFSRAYLRHLFMSGEILAAHLATVHNLRFYLAMMENIRQAISDDKFDEWSRGFLDSYHSQQ

SEQ ID NO: 53251 - protein, 373 aa, Edwardsbacteria bacterium; identical to SEQ ID NO: 53250
  misc_feature (1)..(373): tr|A0A3B9E721|A0A3B9E721_9BACT Queuine tRNA-ribosyltran sferase OS=Candidatus Edwardsbacteria bacterium OX=2053 551 GN=tgt PE=3 SV=1

SEQ ID NO: 53252 - protein, 386 aa, Eisenbacteria bacterium
  misc_feature (1)..(386): tr|A0A1F5RGR3|A0A1F5RGR3_9BACT Queuine tRNA-ribosyltran sferase OS=Candidatus Eisenbacteria bacterium RBG_16_71 _46 OX=1817856 GN=tgt PE=3 SV=1
MALTFSLEATDRGAAARAGRMTTAHGEVLTPAFMPVGTAGSVKTLTPDEVAAAGADILLANTYHLWLRPGVETVRRMGGLHRFMGWPHAILTDSGGFQIMSLSPLRKISDEGVEFRSHLDGSTHRLTPEEAVRVQDGLGSDIAMSLDELVELPAEPEQLRVAADRTVAWAARGLAERERLRGEGRGGMALFGINQGGTDPERRRHCFERIGALPFDGYALGGLWVGEGRRLGLEMVEHDCARFPADRPRYLMGVGHPVDVIESVARGVDLFDCVLPTRNARRGTVFVSTGRLVVKNAAYAQDPRPLDPECDCYTCRRFTRAYLRHLFAAGELLGMRLASLHAVHHMTQLVRRARRAIVEGRFAAFRSDFLEKYHSGETLSPSLSPG

SEQ ID NO: 53253 - protein, 376 aa, Eisenbacteria bacterium
  misc_feature (1)..(376): tr|A0A538TMD9|A0A538TMD9_9BACT Queuine tRNA-ribosyltran sferase OS=Candidatus Eisenbacteria bacterium OX=221247 0 GN=tgt PE=3 SV=1
MTSFALERGGAVAPRSGLLHTAHGTVRTPAFMPVGTAGSVKGLSPAEIRAAGTQILLANTYHLMLRPGADVVRELGGLHRMMAWDGPILTDSGGYQIMSLRERVKVREEGVEFRSHLDGRTEFLTPERAMEIQADIGSDIAVTLDHAVLLPIDPAAAREAAERSLRWAERSLRRARECSTPTGAAQLLFAIAQGADDLTLRREMAERTASLPCDGFAIGGLSVGESKEATWELTRATNEALPSDRPRYLMGMGTPLDLLEAVARGVDLFDCVLPTRNARNGMAFTSEGPLNIRNAAHARDPRPLDPECTCEACLQFSRAYLRHLHQAGEILAHRMLTLHNVTFYQTLMSAARAAIERGAFDAFAGAFRARYRDRAG

SEQ ID NO: 53254 - protein, 375 aa, Electronema sp.
  misc_feature (1)..(375): tr|A0A521FZW6|A0A521FZW6_9DELT Queuine tRNA-ribosyltran sferase OS=Candidatus Electronema sp. GS OX=2005002 GN= tgt PE=3 SV=1
MSFNSPYTLLHQSSQCPARCGQVATLHGTFNTPIFMPVGTLATVKAVTPENLLELGAQIILGNTYHLFIRPGHELIRSVFGGLHKFMHWDRPILTDSGGFQIFSLKELAKITELGAEFRSHLDGSKLFLSPEKAVEVQEALGSDIMMVLDTCIPYPASYDEAAKATALTSRWAKRCRDAQAETGQLLFGIVQGGMYPELRRQSAEELIDIGFDGYALGGLSVGEPKEQMHAMLDATVHLLPDSHAKYLMGVGTPEDLVEGVFRGVDMFDCVMPTRNARNGMLFTSSGRVVIKNSCYREDQGPVDERCNCYTCRNYSRAYLRHLFQCNEILAYQLNSIHNLHYYCSLMAEMRRAIAEDRFVEWRKGFYAQRGQSYY

SEQ ID NO: 53255 - protein, 381 aa, Electrothrix aarhusiensis
  misc_feature (1)..(381): tr|A0A444J2W1|A0A444J2W1_9DELT Queuine tRNA-ribosyltran sferase OS=Candidatus Electrothrix aarhusiensis OX=1859 131 GN=tgt PE=3 SV=1
MPIAMPIKNTSLSPYTLLHQSSECPARCGQVQTLHGTFDTPVFMPVGTLGTVKAVTPENLEELGAQIILGNTYHLFIRPGHELIRSFGGLHGFMHWDKPILTDSGGFQIFSLKELAKITEEGATFRSHMDGAKLFLSPEKAVEIQEALGSDIMMVLDTCIPYPATLDEAREATALTARWAKRCREAQSPTGQLLFGILQGGMYPELRKPAAEELIEIGFDGYAMGGLSVGEPKELMHEMLDASVHLLPDSHPKYLMGVGTPEDLVEGVYRGVDMFDCVMPTRNARNGMLFTSQGRVVIKNSRYREDQRPLDEQCTCYTCRNYSRAYLRHLFQCREILAYQLNSIHNLHYYCTLMAGMRQAIAEDRFLDFRRNFYAQRESPH

SEQ ID NO: 53256 - protein, 381 aa, Electrothrix marina
  misc_feature (1)..(381): tr|A0A444JD68|A0A444JD68_9DELT Queuine tRNA-ribosyltran sferase OS=Candidatus Electrothrix marina OX=1859130 GN =tgt PE=3 SV=1
MPIAMPIKNTSLSPYTLLHQSTECPARCGQVRTLHGTFDTPVFMPVGTLGTVKAVTPENLEELGAQIILGNTYHLFIRPGHELVRSFGGLHGFMHWDKPILTDSGGFQIFSLKELAKITEEGAMFRSHMDGARLFLSPEKAVEVQEALGSDIMMVLDTCIPYPATLDEARKATALTARWAKRCREAQSDTGQLLFGILQGGMYPELRKPAAEELIEIGFDGYAMGGLSVGEPKDLMHEMLDASVHLLPDSHPKYLMGVGTPEDLVEGVYRGVDMFDCVMPTRNARNGMLFTSQGRVVIKNSRYREDQRPLDEQCTCYTCRHYSRAYLRHLFQCREILAYQLNSIHNLHYYCTLMAGMRQAIAEDRFLDFRRNFYAQRESPH

SEQ ID NO: 53257 - protein, 382 aa, Endobugula sertula
  misc_feature (1)..(382): tr|A0A1D2QNP5|A0A1D2QNP5_9GAMM Queuine tRNA-ribosyltran sferase OS=Candidatus Endobugula sertula OX=62101 GN=tg t PE=3 SV=1
MQFELDTNDGHARRGRLCFPRGDVETPAFMPVGTYGTVKGMLPRDIEDIGAHIILGNTFHLMLRPGTDVIKSQFHVQSGTPETAPGTLHDFMHWQKPILTDSGGFQVFSLGKMRKITEEGVTFNSPIDGSRIFIGPEKSIEVQRDLGSDIVMIFDECTPYPATKEEAGASMQLSLRWAERSMKAHDNSPSALFGIIQGGMYEDLRKDSLDALEPMNFDGYAIGGLSVGEPKEDMVRILDALVHQMPVNKPRYLMGVGKPEDIVEAVRRGVDMFDCVMPTRNARNGHLFTFQGVVKIRNAKHRSSTKPLDSRCDCYTCTHFTRAYLHHLDKCREMLGAQLNTIHNLRHYQQLMAGLREAIAEQRLDVFIKAFYANLGKEVPPL

SEQ ID NO: 53258 - protein, 377 aa, Endolissoclinum sp.
  misc_feature (1)..(377): tr|A0A1Z9Y1C0|A0A1Z9Y1C0_9PROT Queuine tRNA-ribosyltran sferase OS=Candidatus Endolissoclinum sp. TMED26 OX=198 6636 GN=tgt PE=3 SV=1
MSEALTFEVLAEDGAARRGRLMTAHGSIETPTFMPVGTAGTVKAMTVEGVAATGAEIILGNTYHLMLRPGADVVAELGGLHEFSQWSGPILTDSGGFQVMSLAKLRKISEEGVRFNSHIDGTAMMLSPEESIKIQHKLGADITMVFDECTPFPASHEVADKSMALSLRWAERSKQAFVPRPGHGLFGIVQGSVYEDLRHRSIAGLTEIGFDGYAVGGLAVGEGQEMMFQTLDFTTPKLPIDRPRYLMGVGKPADIVGAVARGIDMFDCVMPTRSGRTGQGFTQRGVVNIRNARHQRDPRPLDESCACPTCQGYSRAYLNHLFKAGEVLGLMLLTQHNLQHYQDLMAGLRTAIAEGNLEAHIKQFHAQQARGDIPPLA

SEQ ID NO: 53259 - protein, 375 aa, Endolissoclinum sp.
  misc_feature (1)..(375): tr|A0A1Z8SS43|A0A1Z8SS43_9PROT Queuine tRNA-ribosyltran sferase OS=Candidatus Endolissoclinum sp. TMED37 OX=198 6638 GN=tgt PE=3 SV=1
MSISFSVDCKDGFARCGSLLTQHGKIDTPTFMPVGTAATVKAMMPASVKETGAQILLGNTYHLMLRPGASRIKDLGGLQKFMGWDGPILTDSGGYQVMSLSQLRKLDEDGVTFRSHIDGSYHKLTPEKSIEIQLDLGSNITMAFDECTPFPVSEEEAERSMLLSMRWAERSKQSFNDRDGFGLFGIVQGSIFESLRIQSAEKLKRIGFDGYAVGGLAVGEGHETMIKVLKMTVPCLPEDKPRYLMGVGKPRDLLAAVQNGVDMFDCVLPTRSGRTGQAFTRRGEVNLRNARHASDPRPLDAECNCPACQQFSRAYLHHLVKSGEILGAMLLTWHNLGYYQDLMRGLREAIKNGLLAEFTALFHEEQSLGDIASIK

SEQ ID NO: 53260 - protein, 386 aa, Endomicrobium trichonymphae
  misc_feature (1)..(386): tr|A0A1E5IJZ9|A0A1E5IJZ9_9BACT Queuine tRNA-ribosyltran sferase OS=Candidatus Endomicrobium trichonymphae OX=14 08204 GN=tgt PE=3 SV=1
MECGSYQLIKKSSECRARRGKVYTARGVIDTPVFMPVGTHGSVKGVAAEFLKSSGAQIILANSYHLYLRPGTEVIKKAGGIQKFNSWNSPMLTDSGGFQMFSLSDIRKITKDGAEFQSHIDGSKHFFSPEKSMQVQKDIGADIIMCFDDCAPYCSDYEYAKNSMELSLKWAKRCKEEFYKDDSYKTQSLFGIIQGSVYNDLRIRSAREMLNVGFTGYAIGGLSIGEPKKDMHSVLKNVLPVIPENKARYLMGVGMPEDLWECVERGIDMFDCVIPTRNGRNGQVFTSLGKINLRNAEFKKDFSSLDPNCACPACTGYSKAYLNHLIRSREILYLSLLSLHNIYFMVDLMLKIRKSLKNDTFFKSKKEFFEKYYSRDKFSRNLCSKK

SEQ ID NO: 53261 - protein, 338 aa, Enterovibrio escacola
  misc_feature (1)..(338): tr|A0A2A5T5T8|A0A2A5T5T8_9GAMM Queuine tRNA-ribosyltran sferase OS=Candidatus Enterovibrio escacola OX=1927127 GN=tgt PE=3 SV=1
MPVGTCGTVKGMTPEEVVETGAQILLGNTFHLWLRPGQEVIRAHGDLHDFMNWQGPILTDSGGFQVFSLGKTSKITEEGVYFRNPINGNKVFMDAEKSMEIQYSLGSDIVMVFDECTPYPVTYEEAKKSTEMNLRWAQRSRDHFDSMGNNNALFGIIQGSVYEDLRDESFEGLSKIGFDGYAVGGLAVGEPKEYMHCILEHVCSKLPENKPRYLMGVGKPEDLVEGVRRGIDMFDCVMPTRNARNGHLFVTGGVIKIRNAMHKNDTSALDPECDCYTCHNYSKAYLHHLDRCNEILGARLNTIHNLRYYQRLMESLRNAIDQGTLNNFIREFYASRDM

SEQ ID NO: 53262 - protein, 375 aa, Enterovibrio luxaltus
  misc_feature (1)..(375): tr|A0A291BA47|A0A291BA47_9GAMM Queuine tRNA-ribosyltran sferase OS=Candidatus Enterovibrio luxaltus OX=1927128 GN=tgt PE=3 SV=1
MKYELINKEGQARRGRLIFGRGTVETPAFMPVGTYGTVKGMTPEEVAETGAEILLGNTFHLWLRPGQEVIRAHGDLHDFMHWQGPILTDSGGFQVFSLGKICKITEKGVHFRSPVNGDCVFMDAEKSMEIQYDLGSDIVMIFDECTPYPASHDEAKKSMEMSLRWAQRSRNHFDQMGNKHALFGIAQGSVYESLRDASIMGLTKVGFDGYAVGGLAVGEPKADMYRILEHTCSRLPEDKPRYLMGVGTPENLVESVRRGVDMFDCVMPTRNARNGYLFVTGGVFKIRNAMYKNDTTALDPQCDCYTCLNYSKAYLHHLDRCNEILGVRLNTIHNLRYYQRLMKSLRNAIGEGKLGTFVEKFYARRGCEVPLLKED

SEQ ID NO: 53263 - protein, 263 aa, Entotheonella gemina
  misc_feature (1)..(263): tr|W4M9Z4|W4M9Z4_9BACT Queuine tRNA-ribosyltransferase (Fragment) OS=Candidatus Entotheonella gemina OX=142943 9 GN=ETSY2_13780 PE=3 SV=1
LGQLARVTEEGARFQSHIDGSRHLISPERAMEIQVALGSDIIMALDECTPYPSTYDSARLSMELTCRWAERCVAAAEDRPGGLFGIVQGSIYPELRSRCADVLRELPFDGYAIGGLAMGEPQETMYDLVGHTASQLPAHQPRYLMGVGRPRDLLQSVRLGVDMFDCVMPTRNARNGFLFTSEGRVVIKNARYRDDDRPLDPACECYTCQHHSRAYLRHLFMAGEILGLHLNTVHNVTYYVQLMAQIRQAIRSGTLAEFTVPDV

SEQ ID NO: 53264 - protein, 364 aa, Entotheonella factor
  misc_feature (1)..(364): tr|W4LXR9|W4LXR9_9BACT Queuine tRNA-ribosyltransferase OS=Candidatus Entotheonella factor OX=1429438 GN=tgt PE =3 SV=1
MALSFELLQTDTASQARLGKLTTPHGMIETPVFMPVGTQATVKTLRTDDLVRCGASIILGNTYHLYLRPGHELIRQFGGLHGFMNWPHPILTDSGGFQIFSLGQLARVTEEGARFQSHIDGSRHLISPERAMEIQVALGSDIIMALDECTSYPSTYDSARLSMELTCRWAERCVAAAEDRPGGLFGIVQGSIYPELRSRCADVLRDLPFDGYAIGGLAVGEPQETMYDLVGHTASQLPERQPRYLMGVGRPRDLLQSVRLGVDMFDCVMPTRNARNGFLFTSEGRVVIKNARYRDDDRPVDPTCGCYTCQHHSRAYLRHLFMAGEILGLHLNTVHNVTYYVQLMAQIRQAIRDGTLANFTVPDV

SEQ ID NO: 53265 - protein, 368 aa, Eremiobacter sp.
  misc_feature (1)..(368): tr|A0A2W5XDR6|A0A2W5XDR6_9BACT Queuine tRNA-ribosyltran sferase OS=Candidatus Eremiobacter sp. RRmetagenome_bin 22 OX=2599629 GN=tgt PE=3 SV=1
MSCLTLAARDGAARAGTLHTAHGEIPTPVFMPVGTQASVKGLAPAELTRLNVRLILANAYHLYLRPGADLIAKAGGLHAFMSWPGTILTDSGGFQVFSLARLSTVDDEGYHFASHLDGSRHTFTPESVVRIQEQLRSDIAMVLDDCAPAGVDEAAARASANRTLSWARRACAAIQPSAQLTFAIVQGSTFAGLRREQCRALAELDFPGYALGGLWVGEGRSAGLSMVELCCAELPVDKPRYLMGVGTPEDLLDCIAAGVDMFDCVYPTRCARHALALTTRGRVNLRNASMRDDFRPLDADCACDVCAEFSRAYLAHCFRAEEALGPRLVSLHNIAYMSGLARAARAAIVEQRFEAWRATCSAALLDPV

SEQ ID NO: 53266 - protein, 369 aa, Erwinia haradaeae
  misc_feature (1)..(369): tr|A0A451CZB2|A0A451CZB2_9GAMM Queuine tRNA-ribosyltran sferase OS=Candidatus Erwinia haradaeae OX=1922217 GN=t gt PE=3 SV=1
MKFILHSTDGFARRGCLIFDRGIVETPAFMPVGTYGSVKGVSPEELHNTGSQMILSNTFHLWLRPGTKIIKMHGDLHNFMKWQGPILTDSGGFQVFSLGSSNTISEEGVFFRNPINGSEVFLDAEKSMEIQYTLGSDVVMIFDECMSYPSSWKDAERSVKRSLNWAKRSRDRFESLGNKNALFGIIQGGIYTDLRDISVQGLLEIGFDGYAIGGLAVGEPKQDMKRILKHVCQKLSQDKPRYLMGIGRPEDLVEGVCCGIDMFDCVMPTRNARNGYLFVSDGIIKIRNTKYKEDTASLDSTCDCYTCLHYSRAYLHHLDRCKEMLGARLNTIHNLHYYQSLMSNLRQAITQGVLNQFVNDFYKKSLVYN

SEQ ID NO: 53267 - protein, 376 aa, Erwinia dacicola
  misc_feature (1)..(376): tr|A0A1E7YXX2|A0A1E7YXX2_9GAMM Queuine tRNA-ribosyltran sferase OS=Candidatus Erwinia dacicola OX=252393 GN=tgt PE=3 SV=1
MKFELDTTDDRARRGRLVFDRGVVETPAFMPVGTYGTVKGMTSEEVQDTGAQIILGNTFHLWLRPGQEIMKLHGDLHDFMQWKGPILTDSGGFQVFSLGDIRKITEKGVHFRNPINGDAIFLDPEKSMEIQYDLGSDTVMIFDECTPYLADWDYAKRSMEMSLRWAQRSRDRFDFLGNKNALFGIIQGSVYEDLRDVSVKGLVEIGFDGYAVGGLAVGEPKEDMHRILEHVCPQLPQDKPRYLMGVGKPQDLVEGVHRGIDMFDCVMPTRNARNGHLFVTDGVVKIRNAKYKDDTSPLDAECDCYTCRNYSRAYLYHLERCNEILGARLNTIHNLRYYQRLMAGLRQAIEEGKLEHFVTEFYQRTGLAVPPLPSGN

SEQ ID NO: 53268 - protein, 363 aa, Evansia muelleri
  misc_feature (1)..(363): tr|A0A078KB76|A0A078KB76_9GAMM Queuine tRNA-ribosyltran sferase OS=Candidatus Evansia muelleri OX=1495769 GN=tg t PE=3 SV=1
MRFRLLSKIGRARYGQLIFNRGIVDTPNFIPVGTYGAIKGLNHDDLNAGGVEIILSNTFHLLLRPGLNSIIKHGGLHNFIQWKKPILTDSGGFQVFSFVNMIKIIEEGVYFNINGKNIFIGPEESVLIQRILGSDIIMIFDYCPPYPMTYKNAKTSMELSLRWAKRSHYAHVGSRSALFGIIQGSIYRKLRERSLLGLMDIGFDGLAIGGLSVGEPKQEMIKVLNYLPMLMPDNKPRYLMGVGKPEDLVEGVCRGIDIFDCVIPTRNARNGHLYTFKGIINIRNSKHKHSNFTVEKYCDCYTCKYFSRSYLHHLYHCKDILGAKLNTIHNIRYYQRLMANLRNAIKNGTLDYFVSDFYKCRMH

SEQ ID NO: 53269 - protein, 385 aa, Falkowbacteria bacterium
  misc_feature (1)..(385): tr|A0A2M6WSR5|A0A2M6WSR5_9BACT Queuine tRNA-ribosyltran sferase OS=Candidatus Falkowbacteria bacterium CG10_big _fil_rev_8_21_14_0_10_37_14 OX=1974561 GN=tgt PE=3 SV=1
MSLRMFKLIKKSNKNDARLGKLTTAHGVLATPFFMPVGTRAAVKYISSEDIRKLGSKIVLSNTYHLMLKPGEQLIKKLGGLHKFMDWNGSILTDSGGFQVFSLAGKNAKGQNLVKLTEEGVQFSSHIDGSKHFLTPESCYDIQRALGVDIAVCLDECVALPAKREYVAKSVELTSSWAKRAKDHYQKIKGAKPLLFAVVQGGLEKDLRLKSLSDLSALDFDGYNIGGLSVGESPIEMYKVLDYLVPEMPADKPRYLMGVGYPENIIEAVKRGVDMFDCVIPTREGRHGRVFAWAKNGEIKLAKTLFSSKISTGDFYEILNYKNAKFATDKSPISAQSKFVELRNYSKAYLHYLFKVEEPMSARLASLQNLEFYLELMSAIRHSLR

SEQ ID NO: 53270 - protein, 375 aa, Falkowbacteria bacterium
  misc_feature (1)..(375): tr|A0A2H0V5Q6|A0A2H0V5Q6_9BACT Queuine tRNA-ribosyltran sferase OS=Candidatus Falkowbacteria bacterium CG10_big _fil_rev_8_21_14_0_10_39_11 OX=1974565 GN=tgt PE=3 SV=1
MSYKLLKQSKKSKARRGQVKTRRGILETPFFMPIATKASVKSLTFEDLKELEAQIVLSNTYHLMLKPGNKIIKRAGDLHEFMQWDRPILTDSGGFQVFSLSKIRKITEDGVQFRSHIDGSKQFMRPEDSIQIQLDLGSDIIMVLDECVELPAKREYLEKSVDMTTRWAARCKDYFGKSTIRELQGDKAMLFGIVQGGLDKDLRKKSAQGLTAIGFDGYAIGGLSVGESEKDMYEVLDYITDELPKDKPRYLMGVGRPENIINAVKRGVDMFDCVIPTREARHGRLYLWQPAAEKANYDVLANQNRCYRQINIKAEKFAQKFEPINANSRFPVLKKYSKAYLRHLFSVNEPLAIRLATLNNLEFYLNLMKKIRQAI

SEQ ID NO: 53271 - protein, 373 aa, Fermentibacter daniensis
  misc_feature (1)..(373): tr|A0A163VMI6|A0A163VMI6_9BACT Queuine tRNA-ribosyltran sferase OS=Candidatus Fermentibacter daniensis OX=17297 13 GN=tgt PE=3 SV=1
MRPETGFDLLRVSGRARRGRLHLAHGTVETPVFMPVGTQGTVKTARTTDLDGFGMILANTYHLYLRPGEDVIAAAGGLHAFTGYGGNILTDSGGFQIFSLSTLRKRTEDGYEFQSHVDGSRHLLTPEKVIRLQTVFGSDVMMVLDECLEQPSSRQRTEESLALTLRWAERARKVHPGGAAAMFGIVQGGGFGDLRAKAAKALVNMDFDGYAIGGVSVGEPRPLMEAAVESCVDLLPESGPRYLMGVGKPEDIVDFTAMGVDMFDCVVPTRNARGGDFFVPGGHICIRNSRFRNDHGPLQPDCGCFACTHHSRAYIRHLFMAREWLAPILATLHNLEYYRRLMAEIRNAVEDGTYMEWRRDWHARRASFDPGAF

SEQ ID NO: 53272 - protein, 373 aa, Fermentibacteria bacterium
  misc_feature (1)..(373): tr|A0A2G6LUK1|A0A2G6LUK1_9BACT Queuine tRNA-ribosyltran sferase OS=Candidatus Fermentibacteria bacterium OX=204 4591 GN=tgt PE=3 SV=1
MNRTPSFNLSCKSGKARAGTLNLRHGQVETPVFMPVGTQATVKTVRNSDLREDGWNIILGNTYHLYLRPGLELLEQAGGLHSFMNWERNILTDSGGFQLFSLSALRKVTEEGYNFQSHIDGSRHILTPEKVIEAQMVFGSDVMMVLDECLEQPSGEKVTEDSVGLTLRWAERARKLYPGNGQAMFGIVQGGGFPHLREKCARELVEMNFDGYAIGGVAVGEERLMMELAVKSCIDILPENRPRYLMGVGKPEDLIDFVAMGVDMFDCVVPTRNARGACFFVPEGRINIRNAKYRNDFRPVQEDCDCFVCTNHTRAYLRHLFVAKEWLAPIFATLHNLRYFARLTEQLREAIRKNRFENTSQELLKKMGKLDNC

SEQ ID NO: 53273 - protein, 372 aa, Fermentibacteria bacterium
  misc_feature (1)..(372): tr|A0A496UK72|A0A496UK72_9BACT Queuine tRNA-ribosyltran sferase OS=Candidatus Fermentibacteria bacterium OX=204 4591 GN=tgt PE=3 SV=1
MPSFNLLGKSGKARRGLLSLAHGTVETPVFMPVGTQASVKTVRNSDLLEDNWQIILSNTYHLYLRPGAAVIAEAGGLHKFMSWDGNILTDSGGFQLFSLSKLRKRSEEGYHFQSHIDGSSHLLTPEKVIELQTIFGSDIMMVLDECLEQPSDRDRTEESLGITLRWAERARRMHTGGSQALFGIVQGGAYPDLRRKSAEVLAGMEFDGYAIGGVSVGEPRNLMMRAVRSCIDYLPQDRPRYLMGVGKPEDLVDFVALGVDMFDCVVPTRNARGGAFFVPGGHINIRNARFRNDAAPVQPGCRCYACSTYSRSYIRHLFNAKEWLAPILATLHNLHYFSVLMGKIRMAVEERRFTTWRREWHRRRRSFDSGNF

SEQ ID NO: 53274 - protein, 387 aa, Filomicrobium marinum
  misc_feature (1)..(387): tr|A0A0D6JHN7|A0A0D6JHN7_9RHIZ Queuine tRNA-ribosyltran sferase OS=Candidatus Filomicrobium marinum OX=1608628 GN=tgt PE=3 SV=1
MQHTTSKFEFRLLAQSGAARRGEILTPRGVIRTPAFMPVGTTATVKALYTDQVKAAGADIILGNTYHLMLRPGAERIHRLGGLHSFMRWEGPILTDSGGFQVMSLATIRKITEAGAEFSSHIDGSRHMLSPERSIEIQCLLGSDIQMQFDECIELPAERSEVERAMQLSLRWAERSKSAFEEARDNGLAGDGQALFAIVQGGTDAALRRVSAEALVDMDFPGYAIGGLAVGEGHELMLSTLEATLPFLPKAKPRYLMGVGTPLDLIEAVARGVDMFDCVMPTRNGRHGLAFTWNGRVNLRNARHAEDTSPLDPESSCPAARDYSRAYLHHLVKSGEYLGAMLISWANTWFYQELMQAMRDAISEGRFDEWAAETKARLGETPSKGTA

SEQ ID NO: 53275 - protein, 392 aa, Finniella inopinata
  misc_feature (1)..(392): tr|A0A4Q7DJZ2|A0A4Q7DJZ2_9PROT Queuine tRNA-ribosyltran sferase OS=Candidatus Finniella inopinata OX=1696036 GN =tgt PE=3 SV=1
MFSFTYHETHQNKARLGTLTTPHGIIETPAFIFCATKAAMKGLTVDQMRQAGSQIILSNTYHLSLQPGAELVEKMGGLQKFTGWNGPMLTDSGGFQIFSLGHGSVASEIKGKRLGNRSKTLLKITEEGARFRSYWDGRLHLLTPEDSIRIQRSLGADLILVLDECTPYHVDKSYTAKSMELSHRWAVRSLDEFDRLDNNKQKLYGIIQGGVYPDLRQQSCDFVNSQPFFGHAIGGCLGGSKDQMQEVVDMAAPHLDRDRPIHLLGIGGVLDILKGVEKGIDTFDCVHPTRIARHGGALVRPIHNPKPHREHINLRNNQYLFDDTPIEPDCPCHTCTTYSKAYLHHLLKVQEMVAHTLISIHNVQFMNRLMAAIRQSLADDTFPDEKKQWALF

SEQ ID NO: 53276 - protein, 375 aa, Firestonebacteria bacterium
  misc_feature (1)..(375): tr|A0A1F5US74|A0A1F5US74_9BACT Queuine tRNA-ribosyltran sferase OS=Candidatus Firestonebacteria bacterium RIFOX YC2_FULL_39_67 OX=1817861 GN=tgt PE=3 SV=1
MNFKLLKKEKHTKARHGIISTPHGDLETPVFMPVGTTGTVKAMTMRDMKEIGTEIMLGNTYHLYLRPGMDVIKNAGGLHKFIGWDRPLLTDSGGFQVFSLKGLRKVTEEGVLFQSFLDGSEHMFTPEKVMEIENTLGADIIMTFDECVSNPCEKEYAVKALARTTDWAKRCRNAHDSKDRALFGIIQGSVFEDLRIRSAKEITGIDFDGYAIGGLSVGESKDLMYGMVDVVEPFMPENKPRYLMGVGTPEDIWAAVERGVDMFDCVMPTRIARNGSIYTSGGRIIIRNSIYSNDLSPLDPECDCYTCKNFTKSYLRHLINMGEYTAKQLNTLHNLAFMIKLLATIKTAIKEDRFLEAKDAFFKKYESSKESKDSK

SEQ ID NO: 53277 - protein, 375 aa, Firestonebacteria bacterium
  misc_feature (1)..(375): tr|A0A1F5UGZ9|A0A1F5UGZ9_9BACT Queuine tRNA-ribosyltran sferase OS=Candidatus Firestonebacteria bacterium RIFOX YA2_FULL_40_8 OX=1817859 GN=tgt PE=3 SV=1
MNFKLLKKEKHTKARHGIISTAHGDIETPVFMPVGTTGTVKAMTMRDMKEIGTEIMLGNTYHLYLRPGLEIIKNAGGLHKFIGWDKPLLTDSGGFQVFSLKGLRKVTEEGVLFQSFLDGSEHMFTPEKVMEIENTLGADIIMTFDECVPNPCEKEYAVKALERTTAWAKRCRDAHDSKNRALFGIIQGSVFEDLRVRSAKEITGIDFDGYAIGGLSVGESKDLMYGMIDVVEPFMPDNKPRYLMGVGTPEDIWAAVERGVDMFDCVMPTRIARNGSIYTSGGRIIIRNSTYSGDYSPLDPECDCYTCKNFTKSYLRHLANSGEYTGKQLNTLHNLAFMIKLLATIKTAIKEDRFLEAKDAFFKKYESSKESKDSK

SEQ ID NO: 53278 - protein, 359 aa, Fischerbacteria bacterium
  misc_feature (1)..(359): tr|A0A1F5VJG0|A0A1F5VJG0_9BACT Queuine tRNA-ribosyltran sferase (Fragment) OS=Candidatus Fischerbacteria bacter ium RBG_13_37_8 OX=1817863 GN=A2Y62_13355 PE=3 SV=1
RVGTLHTMHGEITTPAFMPVATVGSVKAITHKMLEELEADIILANTYHLYLRPGIDTIEKFHGLHNFMNWHKPLLTDSGGYQIFSMSQLHKIQDNGVLFQSHIDGSTHFFTPEKNIEVQQILGADIIMTIDECMPYPASYSDTKNSLEITLAWARQCKTAHNSSQQLLFGIAQGSVYKDLRARCIKELTEMNFDGYAIGGLSVGEPVEILLDIAAFCAELFPKNKPVYLMGSGTPTDIVHAVGAGIDMFDCVLPTRNARNGCLFTSTGRIIIKNQKYKYDEKPIDETCNCYTCKNFSRAYLRHLFLSKEYNSAILNSIHNLYFYLDLMKTIRNYIREGSFSHFAHSVVKSYEQEDTEET

SEQ ID NO: 53279 - protein, 373 aa, Fokinia solitaria
  misc_feature (1)..(373): tr|A0A2U8BRE9|A0A2U8BRE9_9RICK Queuine tRNA-ribosyltran sferase OS=Candidatus Fokinia solitaria OX=1802984 GN=t gt PE=3 SV=1
MLNFSVFHKKESNASSQRILKMNGEAVSLKKGKARVGRIETAHGIIETPCFMPVGTKGTVKGLKKEDIEATGAQIILANTYHMMLQPSAERVQQFGGLHKFMNWNKPILTDSGGFQIMSLSGLCKLTDDAAIFRSHIDGAMHVLTPSRSIEIQHMLGSNITMVLDQCIHNPAAHKVAEAAMYRSTRWAELSKNSYKPRKGYGIFGIVQGGLYEDLRRESAKHLVDMEFDGYAIGGLAVGESQNEMFSVLDYITECLPENKPRYLMGVGTPSDIIGAVERGVDMFDCVMPSRCGRNGRAFTSAGQLNIRNAKYASDCNNLDSECDCYTCMHYTNGYLHHLFKAKEMLGGILLTIHNLHYYNSLMSIIREHIRNW

SEQ ID NO: 53280 - protein, 376 aa, Frackibacter sp.
  misc_feature (1)..(376): tr|A0A1H8B4A4|A0A1H8B4A4_9FIRM Queuine tRNA-ribosyltran sferase OS=Candidatus Frackibacter sp. WG12 OX=2017977 GN=tgt PE=3 SV=1
MSFEYTLHKESSDTKARLGEFNTPHGKVETPIFMPVGTQATVKAMTPEELKELGSQIILSNTYHLYLRPGHDLIEEAGGLHEFMNWDRPILTDSGGFQVFSLADMRDITEKGVEFQSHLDGSKHFITPEKATEIQMALGADIIMAFDECPPYPAEKDYVKESLERTTRWAKRCKEAHTREDQALFGIIQGGMHQDLREQSAKEITELDFPGYAIGGLSVGEANELMYEVLDYAPELLPKDKPRYLMGVGTPEDLFEGVIRGVDMFDCVFPTRIARNGAVFTSQGRITIRNATYKRQFTTLDPECDCYVCRNYTRAYIRHLIKRNEILGLRLTTYHNLYFLCNLMTNIRKAIEEDRLLEYRAEFYQKYGLEVTDFNI

SEQ ID NO: 53281 - protein, 376 aa, Frackibacter sp.; identical to SEQ ID NO: 53280
  misc_feature (1)..(376): tr|A0A139CSD7|A0A139CSD7_9FIRM Queuine tRNA-ribosyltran sferase OS=Candidatus Frackibacter sp. T328-2 OX=178594 9 GN=tgt PE=3 SV=1

SEQ ID NO: 53282 - protein, 373 aa, Fukatsuia symbiotica
  misc_feature (1)..(373): tr|A0A2U8I3E6|A0A2U8I3E6_9GAMM Queuine tRNA-ribosyltran sferase OS=Candidatus Fukatsuia symbiotica OX=1878942 G N=tgt PE=3 SV=1
MKFELQKTDGYARRGRLVFERGVVETPAFMPVGTYGTVKSMTPEEVKASGAQILLGNTFHLWLRPGQEVIKAHGDLHDFMQWHGPILTDSGGFQVFSLGAMRKIKEEGVHFSNPINGNTVFLSPEKSMEIQRDLGADIVMIFDECTPYPADWDYAKRSMELSLRWAARSHHQHFDKLNNKNALFGIIQGSVYQDLRDISLNGLQDIGFDGYAVGGLAVGEPKEEMHRILEHICPQIPQDKPRYLMGVGKPQDLVEGVRRGIDMFDCVMPTRNARNGHLFVTEGVVKIRNAQYKRDEFKLDKNCDCYTCCHYSRAYLHHLDRCKEILGARLNIIHNLRYYQRLMVALRQAIEEGTLDRVITEFYKRIEKPDLEV

SEQ ID NO: 53283 - protein, 367 aa, Gallionella acididurans
  misc_feature (1)..(367): tr|A0A139BSK3|A0A139BSK3_9PROT Queuine tRNA-ribosyltran sferase OS=Candidatus Gallionella acididurans OX=179649 1 GN=tgt PE=3 SV=1
MNFTLHNTDGLSRRGTLNLAHGSVETPAFMPVGTYGTVKAMSPLELNEIGAQIVLGNTFHLWLRPGLEVIAAHGGLHRFMGWDGPILTDSGGFQVFSLGALRKISEDGVKFQSPVNGDKCFLSPEESMRIQKVLNSDIAMIFDECTPYPADENTAGESMRLSLRWAERSKRAHQGNANALFGIVQGGMHEHLRDESLAGLTGIGFDGYAIGGLSVGEPKEDMLRILRHTAPQLPADQPRYLMGVGTPEDLVDAVSQGIDMFDCVMPTRNARNGMLFTRFGDIKIKNAQYRLDMSPLDEQCACYTCRNFTRAYLHHLHRLNEILGARLNTIHNLHYYQELMGGIRAAIEAGRFADFAGRFRLMRSGHG

SEQ ID NO: 53284 - protein, 376 aa, Gastranaerophilales bacterium
  misc_feature (1)..(376): tr|A0A292RF62|A0A292RF62_9BACT Queuine tRNA-ribosyltran sferase OS=Candidatus Gastranaerophilales bacterium HUM _9 OX=1916320 GN=tgt PE=3 SV=1
MSYSNPEFEYFNYELVHTDKKTGARAGVLHTPHGDILTPIFMPVGTNSTVKLVTNHHLYESQAQIILGNSYHLYLRAGDELIAKFGGIHKWMNWDKPVLTDSGGFQVFSLAHLRKITEDGVEFRDPKDGKKHFINPEISMKIQQNIGADIIMAFDQCAPFPCEYNEAKKAMERTHRWLERCIKAKTNPKQALFPICQGAFYDDLRKESAEFVSQFDAVGYAIGGLSVGEDKETMNHFVNYTAPLLPANKPRYLMGVGTPEDLLDGIKGGVDMFDCVLPTRNARHGSFFTWNGKKQIKNAMYQEDPSPLDDKCDCYACRNHSKAYIRHLFKCNEGTAQALLSIHNITFLVKFSQLVRQAILEDRFEEFYEEHYHNFI

SEQ ID NO: 53285 - protein, 240 aa, Gastranaerophilales bacterium
  misc_feature (1)..(240): tr|A0A292SPX3|A0A292SPX3_9BACT Queuine tRNA-ribosyltran sferase (Fragment) OS=Candidatus Gastranaerophilales ba cterium HUM_21 OX=1916319 GN=tgt PE=3 SV=1
SMEIQQDIGADIAMAFDECAPYPCSYEEAKNAMERTHRWLERCFNAHTRDDQALFPIVQGAFYDDLRQESARVISSFDAVGYAIGGVSVGEPADVKNHFVGLTAPLLPRLKPRYLMGVGTPEDLLDGILRGIDMFDCVLPTRNARHGSFFTNDGRKIIKNKEFERESSPLDKECNCYTCRNHTKAYVRHLYRAGEATAAILMSIHNTQFLIDLVKEARKAILENRYEEFYREKMTRLFPL

SEQ ID NO: 53286 - protein, 383 aa, Gastranaerophilus sp.
  misc_feature (1)..(383): tr|A0A2L2X464|A0A2L2X464_9BACT Queuine tRNA-ribosyltran sferase OS=Candidatus Gastranaerophilus sp. (ex Termes propinquus) OX=2029980 GN=tgt PE=3 SV=1
MSHPAFSYGVSATCPTTKARAGVFKTPHGEIKTPVFMPVGTNSAVKMLTGRDIIETGAQIILANSYHLHLNPGEKLIKKAGGIHSWMNFQKPMLTDSGGFQVFSLSNLRKITEEGVNFTDPKNGNKHFISPEISMQIQTDIGADIIMAFDECAPYPCDYEHAKSAMERTHRWLKRCIAAHSKLNEETKAQGRPPQALFPIVQGAFFDDLRTESAKTVSSFDTAGYAIGGVSVGEPLDVKNRVVELVAPLLPFNKPRYLMGVGTPVDLLEGVYRGVDMFDCVMPTRNARHGSFFTYSGNKIIKNKEFEEDFSPLDEKCNCRTCQNHTRAYIRHLYRSGEATAAILLSIHNIHFLINLMNDARNAILNGNFAEFYSEIIKTQAKN

SEQ ID NO: 53287 - protein, 378 aa, Giovannonibacteria bacterium
  misc_feature (1)..(378): tr|A0A0G1W254|A0A0G1W254_9BACT Queuine tRNA-ribosyltran sferase OS=Candidatus Giovannonibacteria bacterium GW20 11_GWB1_47_6b OX=1618655 GN=tgt PE=3 SV=1
MGFFRIIKESDKSHARLGILRTSHGIVETPAFVPVATQAVFKTLTSKQARETRSQLAIANTFHLHLKPGEKTIKRAGGLGAFMAWPKPLMTDSGGFQIFSLGFGSDFGTGKILKGKRAEKIGIEAQPRRVEITEAGAWFRSIVDGTRLFIGPKESMKIQSDLGADIIFAFDECTSPIAGKAYTKKSLERSHRWAELSLAYHSKKQKLFGIIQGGKYKDLRKKSARFIGALPFDGFGIGGEFGDSKKNMMGMISWVLNELPPEKPRHLLGIGHPDDIKKIIRAGIDLFDCIAPTHYARRGFAFTSRGRLDMRKISFLADRKPLDSRCKCDVCRNYSRAYITHLMRSGEITGMSLLTMHNLYYFNTFVEEIRRGIRAGRI

SEQ ID NO: 53288 - protein, 386 aa, Giovannonibacteria bacterium
  misc_feature (1)..(386): tr|A0A0G1T5N8|A0A0G1T5N8_9BACT Queuine tRNA-ribosyltran sferase OS=Candidatus Giovannonibacteria bacterium GW20 11_GWB1_47_6b OX=1618655 GN=tgt PE=3 SV=1
MLFRILKKAKNSRARLGIIKTKNGVIHTPAFVPVATQAAVKGLTVEQLKEIGAESVLCNTYHLYLRPGDKTVRKMGGLHQFMNWHKPIWTDSGGFQAFSLGAAISHGVSKIASIFPDEGEREHAPQKPKENFVKITEEGVRFRSHLDGSFHLLTPEKSMEIQKNLGADLIFAFDECTSPLHDYAYTKKSMERTHRWAVRCLASAKLKSKNEKVKTDGQALFGIVQGGAYKDLRVQSAKFIGSMDFDGFGIGGSLGKSKKDMYKVLDWTVPLLPEEKPKHLLGIGSADDIWEAVKRGVDTFDCVAPTRIARNGSALLAKTALNLKSGRYLRDKNPIDKKCGCYTCVNYTRAYVSHLFKAHEMLGPILTTIHNLSFMEALLREIRNRI

SEQ ID NO: 53289 - protein, 387 aa, Glassbacteria bacterium
  misc_feature (1)..(387): tr|A0A1F5YM22|A0A1F5YM22_9BACT Queuine tRNA-ribosyltran sferase OS=Candidatus Glassbacteria bacterium RIFCSPLOW O2_12_FULL_58_11 OX=1817867 GN=tgt PE=3 SV=1
MTAEIKEFGFELAARDGAARAGVLHTGNGTVHTPVFMPVGTQGTVKTLTPRDLEEIGVELVLSNTYHLYLRPGHELVRRAGGIQRFMGWRGPLLTDSGGYQVFSLLDLSRITEEGVTFQSHLDGSPHLFTPERVVEIQTALGADIIMAFDECVPYPAEEDYVRLACERTLRWAERCRDHLDALPAELRPGWPQALFGIVQGGMYRHLRQFSARATVELGFPGYAVGGLSVGEPKALMFEMLECALEHLPAECPRYMMGVGYPEDMVEAVRRGVDMFDCVVPTRLGRNGTVFTASGRLVVKNAPCADDLRPLDESCDCYVCANFSRAYIRHLLNSNEILGLKLTSYHNVRFMIRLMQQMRQAILQGEIDRWTDTFYNRYDPGHGDNGV

SEQ ID NO: 53290 - protein, 400 aa, Glomeribacter gigasporarum
  misc_feature (1)..(400): tr|G2JAK0|G2JAK0_9BURK Queuine tRNA-ribosyltransferase OS=Candidatus Glomeribacter gigasporarum BEG34 OX=10703 19 GN=tgt PE=3 SV=1
MNSHRLSEVNAFATEIIQRARHNHARVLKITTPHGEVLTPAFMPVGTRAFVNHLSPEDLAAAGSQIILGGNTYHMLVNPGMEVIRAGGGMHRFMGWDGPMLTDSGGFQVFSLTRAKHCRIDETGAHFKHPGTGQPIHMTPQRSIETQQMIGADIIMAFDDCVAESAGKEAIMAGMQRTHRWLMQAKEMHSRSPYSAYGHRQALFGIVQGGYFRELREQSAHFIIEADMDGIGIGGESIGPIPEQTCTVIDWVRPLLPERKVRYPMGVGLAPQDLIDVVAHGADIFDCVAPTRNARHGALYCGEWRVIDGWLRFESVEPKGRILIKKAQYAYDETPVMAGCTCQTCQRYSRAYLHFLFKQKAAFYYPLACIHNVHVMQETCARMRHLVIHQRDESGNQVIA

SEQ ID NO: 53291 - protein, 368 aa, Goldbacteria bacterium
  misc_feature (1)..(368): tr|A0A2N1W3Z3|A0A2N1W3Z3_9BACT Queuine tRNA-ribosyltran sferase OS=Candidatus Goldbacteria bacterium HGW-Goldba cteria-1 OX=2013807 GN=tgt PE=3 SV=1
MEFFKVLHKYKLARACEINTIHGTIKTPVFMPVGTQATVKLMTPEDMYDMGVDVILGNTYHLFLRPGMDIMKKAGGLHKFMNWKRPILTDSGGFQVFSLSQFRKITPEGVKFKSHIDGAEHFLTPETVIDIQTDLGSDIMMVLDECPPYPAERKYIEDSLDLTLAWAKRAREYHKSDTSFLFGIIQGGVHKDLREKSMEELFKMDFPGYSIGGVSVGEGKDLINQGVDWCAPFMPENKPRYLMGVGTPEDIWYAVEKGVDMFDCVFPTRIARNGAVYTKEGQISVRNGEYKEDFRPMDPGCGCYACKNYTRAYIRHLFNTHELLGMRLTTLHNIYFMIRLMDIIRKSIFEDRYEKAKEEFFSVYKLRS

SEQ ID NO: 53292 - protein, 391 aa, Gottesmanbacteria bacterium
  misc_feature (1)..(391): tr|A0A1F6AAE6|A0A1F6AAE6_9BACT Queuine tRNA-ribosyltran sferase OS=Candidatus Gottesmanbacteria bacterium RIFCS PHIGHO2_02_FULL_40_13 OX=1798384 GN=tgt PE=3 SV=1
MASNYFSFKILSRDKKTKAKTGVINTPHGKINTPAFVPVGTAATIKSLTPEEIKNCGIEVFIVNTYHMIFRPGVETVKKGDGLHGFMNWKFPLMTDSGGFQAFSLGEYGPRNVSDKSENMVKITDQGIEFKSAWDGKKIFFGPHESILAQHKLGADLIMAFDECTFYPIKKSYAKRAMQRTHDWAKTCLQVKKQLNNKQTLYGIIQGSVFEDLRRNSANFFAGKPFEGFAVGSVANSREPRKKVFQVLDWTLPILLPVNKPIHFLGIGEVEDIFIAIEKGIDSFDCVIPTRLARMGWIFTKSAGLKNKFRFDITKSRYHSLKSPPDRSCRCYTCTNFTKSYLNHLFRCRELLGYRLATIHNLYFYANLMSQIRTAIENGEFLKLKQEWLKV

SEQ ID NO: 53293 - protein, 387 aa, Gottesmanbacteria bacterium
  misc_feature (1)..(387): tr|A0A1J4TRR1|A0A1J4TRR1_9BACT Queuine tRNA-ribosyltran sferase OS=Candidatus Gottesmanbacteria bacterium CG1_0 2_37_22 OX=1805209 GN=tgt PE=3 SV=1
MSNQIFKVTSYDKKTNARRGIIFTNHGLIQTPAFVPVGTAATVKSLTPSEIKDCNIDVFFVNTYHMLFRPGLEVIKKYKNLHEFMNWKGPLMTDSGGFQAFSLGEHGPRNNPISQTDHLIQINDEGINCKSAWDGKNLFIGPQESIKAQKILGADILMSFDECTFYPITKKRALKALERTHKWARICLKQRLINQLLYGIVQGSVFHDLRMQSAKFISELPFAGFAIGSVANSKEPREKVFQVLDWTLPILLSYLKPIHFLGIGEIEDIFISVSKGIDSLDCVTPTRLARMGWIFNKEAGLKNKFRYDIGRSEYIGNKTSLEKGCKCFTCNNFTKGYLNHLFRCRELLYYRLATIHNLNFFGNLMKKIRQSISEGIFTDLKDNWLYG

SEQ ID NO: 53294 - protein, 381 aa, Gracilibacteria bacterium
  misc_feature (1)..(381): tr|A0A1J5F038|A0A1J5F038_9BACT Queuine tRNA-ribosyltran sferase OS=Candidatus Gracilibacteria bacterium CG2_30_ 37_12 OX=1805211 GN=tgt PE=3 SV=1
MSFEFTLEATDGLARAGTLSTPHGDIQTPIFMPVGTHASVKGVHKDHILEIGTQIMLSNTYHLYLRPGDETIAHFGGLHEFMNINLPILTDSGGFQVFSLGQMKNSPGSKESGETKSLVKITEDGVEFRSHLDGSKHMFTPERAMQIQANLGADIIMAFDECAPGTSTHSYARAAMGRTHRWASRCVIEHTEQQKIRADKGLHPQALFPIAQGVIYDDLRVDSVKYISDLDMPGVAIGGISVGESKPDMIRILDAIAPHLPPSKPHYLMGLGTPEDLIEGIYRGIDMFDCVLPTRLGRHGVAYTSRGNIKVTNEKYKLEKEGIYTRPEYSTMVSRTYSLGYLRHLFKVGEMLAGQLVSLHNLEFLLNLSREARKAIMEGRY

SEQ ID NO: 53295 - protein, 392 aa, Gracilibacteria bacterium
  misc_feature (1)..(392): tr|A0A2U7PGJ3|A0A2U7PGJ3_9BACT Queuine tRNA-ribosyltran sferase OS=Candidatus Gracilibacteria bacterium HOT-871 OX=1540872 GN=tgt PE=3 SV=1
MFEFKIKNTDGFARVGEFFTEHGSFETPVFMPVGTKATVKGVPKDWLDEMGAEIILNNTYHLYLRPGDELVKEFGGVHKFQNYEKPILTDSGGFQVFSLGQTSEVGFKNNESLVKITEEGVHFRSFLDGSKHYFDAETVMDIESNLGADIIMAFDECAPGKSDWNYAKSAMDRTHRWAERCVKRWKENNEKRKNNGEYLQALFPIVQGVTYDDLRIESAKFIGGLETPGVAIGGLSVGEPKADMYRVLDTIKTVLPENKPRYLMGVGTPEDLVEGIYRGIDMFDCVLPTRLGRHGTCFSYEGNIKIKNKKYELDTNPIDERCDCKVCKNYTKGYLRHLIQEEEILGMQLLSYHNLYFLINLAKQARKAILENKYEEFRENFWKNYPKDVLEK

SEQ ID NO: 53296 - protein, 379 aa, Gullanella endobia
  misc_feature (1)..(379): tr|A0A143WSG8|A0A143WSG8_9ENTR Queuine tRNA-ribosyltran sferase OS=Candidatus Gullanella endobia OX=1070130 GN= tgt PE=3 SV=1
MEFQLLKTDGQARRGRLIFNRGVVETPAFMPLGTYGSVKGITPEEAKDNGAEIILSNTFHLWLRPGKAVIKLHGDLHDFMQWHGPILTDSGGFQIFSLSNIRKVTEKGVYFRSPINGDTIFLSPEKSMEIQYDLGSDIVMIFDECTPYPSDWYYAKQSMEMSLRWAVRSRHRFDELGNPNSLFGIIQGSIYEDLRDISLKRVVEIGFDGYAIGGLAVGEPKSDIYRILLHLCQKMPANKPRYLMGIGKPEDLIESVSYGIDMFDCAIPTRNARNGHLFVTNGVIKIRNAQYKDDINPLDDKCDCYTCRTYSRAYLHHLDRCNEILGSRLNTIHNLRYYQRLMANLRQAIYDNRLDHYISEFYRQTTGKPFSTFRYKIIQ

SEQ ID NO: 53297 - protein, 370 aa, Hamiltonella defensa
  misc_feature (1)..(370): tr|A0A2D3TB18|A0A2D3TB18_9ENTR Queuine tRNA-ribosyltran sferase OS=Candidatus Hamiltonella defensa OX=138072 GN =tgt PE=3 SV=1
MKYQLQKTDGRARLGKLIFERGLVDTPAFMPVGTYGSVKSMTPDEITETGAQIILGNTFHLWLRPGQDVIKLHGDLHDFMQWQGPILTDSGGFQVFSLNSMRKIEEKGVSFRHPLNGSEIFLSPEKSMEIQLDLGSDIVMVFDECPPYPSDLSYMKSSMEMSLRWANRSREHFNNLNNKNALFGIIQGGLSLELRETSLQGLLQIGFDGYAIGGLAVGEPKEEMYRVLNFLCPRIPDNKPRYLMGVGKPENLVEGVRRGIDMFDCVMPTRNARNGHLFVTHGVIKIRNTRYKTDISPLDPDCDCYTCRHYSRAYLHHLDRCNEILGARLNSIHNVRYYQRLMADLRHAIYEERLECFVEEFYKKIGLSIS

SEQ ID NO: 53298 - protein, 370 aa, Hamiltonella defensa
  misc_feature (1)..(370): tr|A0A249DXH7|A0A249DXH7_9ENTR Queuine tRNA-ribosyltran sferase OS=Candidatus Hamiltonella defensa (Bemisia tab aci) OX=672795 GN=tgt PE=3 SV=1
MKYQLQKTDGRARLGKLIFERGIVDTPAFMPVGTYGSVKSMTPDEITETGAQIILGNTFHLWLRPGQDVIKLHGDLHDFMQWQGPILTDSGGFQVFSLNSMRKIEEKGVSFRHPLNGSEIFLSPEKSMEIQLDLGSDIVMVFDECPPYPSNPSYMKSSMEMSLRWANRSREHFNNLNNKNALFGIIQGGLSLELRETSLQGLLQIGFDGYAIGGLAVGEPKEEMYRVLDFLCPQIPDNKPRYLMGVGKPENLVEGVRRGIDMFDCVMPTRNARNGHLFVTHGVIKIRNTRYKTDISPLDPDCDCYTCRHYSRAYLHHLDRCNEILGARLNSIHNVRYYQRLMANLRHAIYEERLECFVEEFYEKIGLSIS

SEQ ID NO: 53299 - protein, 393 aa, Harrisonbacteria bacterium
  misc_feature (1)..(393): tr|A0A1G1ZL73|A0A1G1ZL73_9BACT Queuine tRNA-ribosyltran sferase OS=Candidatus Harrisonbacteria bacterium RIFCSP LOWO2_01_FULL_44_18 OX=1798407 GN=tgt PE=3 SV=1
MNFKVLKKSKKSRARLGIIETPHGVIHTPAFVPVGTQATVKGLTVDQLKNIGVESLLCNTYHLYLRPGDKIIKKLGGLHEFMNWDRPIWTDSGGFQVFSLGAAIEHRVGKVASIFPKIGNQKSHRPIRANEPITDHHHEKFARIMEEGVEFRSHLDGSKHLLTPEKSMAIQKNLGADIIFAFDECTSPLHDYQYTKKSLERTHRWATRCLRTFEHRTSNLERQGLFGIVQGGVFKDLRVKSAKFIGALDFDGFGIGGSLGKSKKEMYKILDWTVPLLPEEKPKHLLGIGSAEDILEAVERGIDTFDCVLPTRLGRHGSTLLTASGVALDVKSGRYAKDKKPIDKKCGCYACQNFSRAYICHLFKAQEMLGPILATIHNLHFMEKLMERIRKTI

SEQ ID NO: 53300 - protein, 377 aa, Harrisonbacteria bacterium
  misc_feature (1)..(377): tr|A0A1G1ZTB6|A0A1G1ZTB6_9BACT Queuine tRNA-ribosyltran sferase OS=Candidatus Harrisonbacteria bacterium RIFCSP LOWO2_02_FULL_45_10c OX=1798410 GN=tgt PE=3 SV=1
MRFTLLKKSKKSRARLGLLETAHGVVETPAFVPVATQAVIKTLTSEEVLQTGAQMLIANTFHLHLRPGEKIIKSHGGIHSFMNWPKPLMTDSGGFQVFSLGFGKDFGQGKILKQRSNEKIESDQQPKLLKITEDGVAFRSYIDGREVFLGPKESIKIQEAIGADIIFAFDECTSPIADHDYTKKSLLKTHRWAEICLKTKKSDQALYGVVQGGKFQDLREESARVLGKMDFNGFGIGGEFGDDKKSMSRMLYWVTDVLPESKPRHLLGIGYIEDMPWMAQAGIDTFDCIAPTHYARRGIAFTSKGRLDLAKSAMLKDKKPLDTACDCFVCRNYTRSYICHLLKAWEITPLKLLTFHNLHYFNQSVAQLREDIKNGKI

SEQ ID NO: 53301 - protein, 374 aa, Hoaglandella endobia
  misc_feature (1)..(374): tr|A0A143WTA7|A0A143WTA7_9ENTR Queuine tRNA-ribosyltran sferase OS=Candidatus Hoaglandella endobia OX=1778263 G N=tgt PE=3 SV=1
MEYQLLNTDGQARCGRLVFDRGVVETPAFMPVGTYGTIKSMTPEEVKETGSQILLGNTFHLWLRPGQEIMKLQGDLHNFMQWHGPILTDSGGYQVFSLGDINKITEEIVHFRNPINGDLIFLSPEKSMEIQYDLGSDIVMIFDECTPYPSDWEDAKRSMEMSLRWAVRSRQRFDELCNPNALFGIIQGGVYEDLRDISVKRLIEIGFDGYAIGGLAVGEAKSDMYRILASLCPKMPVDKPRYLMGVGKPEDLVEGVCCGIDMFDCVMPTRNARNGYLFVTEGVVRIRNSRYKSDITPLDNECDCYTCRNYSRLYLHHLDRCNETLGARLNSIHNLRYYQRLMADLRQAINEGKLDQFVGKFYQRTGSQPYKEKI

SEQ ID NO: 53302 - protein, 375 aa, Hydrogenedentes bacterium
  misc_feature (1)..(375): tr|A0A3M2CJA7|A0A3M2CJA7_9BACT Queuine tRNA-ribosyltran sferase OS=Candidatus Hydrogenedentes bacterium OX=2030 809 GN=tgt PE=3 SV=1
MSYALKFEIECTATGSSARVGKLTTPHGEIETPVFMPVGTKATVKAMTPEELEEIGAQIILANTFHLFLRPGDEIVRELGGLHRFMHWSRAILTDSGGYQVFSLAKLNKITEEGVAFRSPIDGAALFLTPELSIRIQENLGADIIMCFDECTPYPATHDYAKSSAERTARWAERCKRAHQRDDQALFGIVQGGVYPDLREWSAQATVALDFVGYAIGGLSVGEPKEEMQLALEVMDRTLPRHKPRYLMGVGTPADFFMGVEQGVDMFDCVMPTRTARNGRLYTREGLLNIRNAKYTRDPRPVSESCRCYTCRHYSRAYLRHLMMSNEILGSRLATWHNLYYFVDLMRAIRQAIRENRLEALKRRALEPYSQPAEH

SEQ ID NO: 53303 - protein, 369 aa, Hydrogenedentes bacterium
  misc_feature (1)..(369): tr|A0A3M2F4E1|A0A3M2F4E1_9BACT Queuine tRNA-ribosyltran sferase OS=Candidatus Hydrogenedentes bacterium OX=2030 809 GN=tgt PE=3 SV=1
MLETGFTLVRCVGRARFGRLVTRHGVVETPCFMPVGTVGNVKGLTWEEVAGAGARMVLANTYHLLLRPGPEILEACGGLHRFADFDLPLLTDSGGYQVMSLSPFRKITEEGVHFSSPLDGSRFLLTPEEALRIQNAIGSDVQMVLDVCPSASEGPVAQRRANELTLCWARRSLEQPRTEGTLRFAIVQGGFDAEMRRDAAQNISSLPFDGFAIGGLSVGEEERVMMEMIEAVEPCLPKEKPRYLMGVGKPSQILKAIARGVDLFDCVLPTRVARHGTLWTSRGLIRINRAEFSADIRPVDALCRCRTCRDYSRAFLRHLYRLGDPLYVRLASLHNLTYLLEILAEVRRYLSDGEEGWVDLLHRNRMIAP

SEQ ID NO: 53304 - protein, 370 aa, Hydrothermae bacterium
  misc_feature (1)..(370): tr|A0A496U2C7|A0A496U2C7_9BACT Queuine tRNA-ribosyltran sferase OS=Candidatus Hydrothermae bacterium OX=2250085 GN=tgt PE=3 SV=1
MVKFELIKIEKHTGARLGILHTPHGDVETPNFMPVGTQATVKTISPRELEEIGVQIIVSNTYHLHLRPGEDLIKEAGGLHKFMSWSGSILTDSGGFQVYSLADLRALKDEGVEFRSHIDGSKVFFTPEKVVDIQVTLGSDIAMILDWPTPYPATKKEALDHMKLTTKWAERAKEYRDRVAPEQALFGIVQGGTYIDLRKENAREMMEMDFDGYAIGGLALGEPKIERDKIVEVVTAILPEEKVRYLMGVGYPEDIISSVINGVDLFDCVLPTRNARTGTVFTSRGKLTIRNAEYRADFKPLDRECDCYTCRNFTRAYIRHLFNAGEILGPRLTTYHSLYFFMKLMREIREAIKGDYLLDWKEEFLKKYRS

SEQ ID NO: 53305 - protein, 386 aa, Ishikawaella capsulata
  misc_feature (1)..(386): tr|C5WCN8|C5WCN8_9ENTR Queuine tRNA-ribosyltransferase OS=Candidatus Ishikawaella capsulata Mpkobe OX=476281 G N=tgt PE=3 SV=1
MIMINEGNVKFELKATDGYARCGQIIINRGIIDTPAFAPVGTYGTVKSITSEEIIKSGAQFILANAFHLWLRPGEKIIQTHGNLHNFMNWQKPILTDSGGFQVFSLSKIRKVTKQGVYFRNPINGNPIFLTPEKSIDIQHTLGSDIVMIFDECISYPAEWDYAKFSVEMSLCWAERCYERFYSLENTNALFGIIQGGIYKDLRDISIKGLMNLGFDGYAIGGLAVGETKQELYEILKHVCGQIPFNQPRYLMGVGKPEDIVESVRLGIDLFDCVLPTRNARNGHLFVSNGIIKIRNSKYKYDTSPLDEECDCYTCSNYSKSYLHHLDKCNEILGARLNILHNLRYYQRLMDNLREMISNHQLEIFVNEFYQKIGKVAPSLLIRERT

SEQ ID NO: 53306 - protein, 370 aa, Izimaplasma sp.
  misc_feature (1)..(370): tr|A0A088TNU2|A0A088TNU2_9BACT Queuine tRNA-ribosyltran sferase OS=Candidatus Izimaplasma sp. HR1 OX=1541959 GN =tgt PE=3 SV=1
MAIKYELIHEDKQTGARLGILHTPHGSFETPIFMPVGTKATVKTLENSEIKEVSDGLILGNTYHLWLEPGDEIVKDHGGIRGFSKWDGALLTDSGGFQVFSLSDIRKITEEGVEFRHHKSGAKLFMSPEDSISVQNNLGADIMMSFDECPPFSSTYEYMKESVERTIRWAKRGKDAHKNTETQALFGIVQGGPYMDIRKMCAEELIKMDFPGYSIGGLSVGETKEEMYTVLDGLKDIMPKNKPRYLMGVGTPDDLIEGVIRGIDMFDCVNPTRMARHGSAMTSEGRIPIKNKTYQKDMTPLDANCTCKVCTTYTRSYIRHLFKAEEYLGPRLVSYHNLFFLKNLMKNVRNAIRNDRLLEFKEEFFSKYYK

SEQ ID NO: 53307 - protein, 371 aa, Izimaplasma sp.
  misc_feature (1)..(371): tr|A0A094IP65|A0A094IP65_9BACT Queuine tRNA-ribosyltran sferase OS=Candidatus Izimaplasma sp. HR2 OX=1541960 GN =tgt PE=3 SV=1
MAIKYELKHICKQTGARYGILHTKHGSFETPIFMPVGTKATVKTLENSEIKEASDGLILGNTYHLWLEPGDEIVKNHGGIRGFSKWDGALLTDSGGFQVFSLSDIRKIKEEGVEFRHHKSGAKLFMSPEDSIRIQNNLGADIIMSFDECPPFNSTYEYMKESVERTLRWAKRGQIEHKNTADQALFGIVQGGPHKDLRIMCAEALKEMDFPGYSIGGLSVGESKEEMYKVLDYLKDVMPEDKPRYLMGVGTPDDIIEGVIRGMDMFDCVNPTRLARHGSAMTSLGRIPIKNQLYAKNMESLDPNCDCKVCTTYTKSYIRHLFKSEEYLGQRLVSYHNLYFLKDLMKNIREAIQNDSLLDFRKNLYKKYYKR

SEQ ID NO: 53308 - protein, 386 aa, Jacksonbacteria bacterium
  misc_feature (1)..(386): tr|A0A1G2A715|A0A1G2A715_9BACT Queuine tRNA-ribosyltran sferase OS=Candidatus Jacksonbacteria bacterium RIFCSPL OWO2_02_FULL_44_20 OX=1798460 GN=tgt PE=3 SV=1
MSNFQIIQEDLSARARLAYLRTDHGVIETPVFMPVATQAVFKGGLDSDDARSIGAPIILANTYHLYLRGAVPIIKRAGGLHKFMNWDRPILTDSGGFQVWSLGKGARKNSLCKIDDDGATFVSHLDGNAHRFTPEIAVQIQHDLGADIIMAFDEASDEASSYSYTKEAMDRTHKWAERCIAAMSNYKSQITNRQLLFGIIQGGRFKTLRKKSARIISSMNFDGVAIGGESIGYNMKRTAEILEYLAPQIPKEKPIYAMGVGFSPADFFTVIERGVDMFDCVAPARIARHGLLYSKGAGSKRGHRINLMNARYKDDFSRVCDWCDCRVCVTYTRAYLRHLFKADEMTAFRLATIHNLRFMLKVMEEIRASLKDREFARLKREWILRA

SEQ ID NO: 53309 - protein, 386 aa, Jacksonbacteria bacterium; identical to SEQ ID NO: 53308
  misc_feature (1)..(386): tr|A0A3D0PG27|A0A3D0PG27_9BACT Queuine tRNA-ribosyltran sferase OS=Candidatus Jacksonbacteria bacterium OX=2053 562 GN=tgt PE=3 SV=1

SEQ ID NO: 53310 - protein, 367 aa, Jettenia caeni
  misc_feature (1)..(367): tr|I3III5|I3III5_9BACT Queuine tRNA-ribosyltransferase OS=Candidatus Jettenia caeni OX=247490 GN=tgt PE=3 SV=1
MDFKVLAHDKQTKARCGEIRIANHRIPTPVFMPVGTQGTVKTLTPLHLKEVNTKIILCNAYHLCLRPGEQVIKRVGGLHKFIGWDGAIITDSGGYQVFSLAKLTKVSDNGVEFQSPIDGTKLFLTPERMTQIQNDIGADIIMAFDECVPYPCEQDRASVAVKRTLSWAERCLNTHKNKQQILFGIVQGSVFRELRIECARNLVEMGFDGYAIGGLSVGEGAFLMNEVLEYTGNYLPQDKPRYLMGVGFPGDILDAIEQGIDMFDCVVPTRNGRNGCAFTSTGKVKILNNQYKEDLKPLDEMCNCYTCQNFTKSYLRHLFLANEILGLTLMSLHNIYYFQNLMQQARESIRKGEFKDFKANFLGRQSQ

SEQ ID NO: 53311 - protein, 367 aa, Jettenia ecosi
  misc_feature (1)..(367): tr|A0A533QE22|A0A533QE22_9BACT Queuine tRNA-ribosyltran sferase OS=Candidatus Jettenia ecosi OX=2494326 GN=tgt PE=3 SV=1
MDFKVLTYDKKTKARCGEIRIANHRIPTPVFMPVGTQGTVKTLTPLHLKEVNTKIILCNAYHLCLRPGEQIIKRMGGLHKFIGWDGAIITDSGGYQVFSLARLTKVSDNGVEFQSPIDGTKLFLTPERMTQIQNDIGADIIMAFDECVPYPCEQDRASVAVKRTLRWAERCLNTHKNKQQTLFGIVQGSVFRELRIECARNLVEMGFDGYAIGGLSVGEGAFLMNEVLEYTGDCLPRDKPRYLMGVGFPGDILDAIEQGIDMFDCVVPTRNGRNGCAFTSTGKVKILNNQYKEDLKPLDEMCNCYTCQNFTKSYLRHLFLANEILGLTLMSLHNVYYFQNLMQQARESIQKGEFKDFKANFLVRQSE

SEQ ID NO: 53312 - protein, 364 aa, Jidaibacter acanthamoeba
  misc_feature (1)..(364): tr|A0A0C1QIN9|A0A0C1QIN9_9RICK Queuine tRNA-ribosyltran sferase OS=Candidatus Jidaibacter acanthamoeba OX=86105 GN=tgt_2 PE=3 SV=1
MSLKYKVLAKDGNARLGVLETAHGEVRTPAFMPVGTAATVKAMFPEDIKATGADIILGNTYHLMLRGAAERIHKFGGLRKFMNWHGPILTDSGGFQVLSLTKLRKITEEGVTFRSHLDGTKYELTPERSMEIQYFLGSNVTMILDECPPYPISYMKAKKSMELSLRWAERSKAAFIKREGHGIFGIVQGSVFEDLRAKSAQTLVDMDFDGYALGGVAIGEMQELMFQTLEFTVPLLPQEKPRYLMGIGKPKDIVGSVMRGVDMFDCVLPSRSGRNGQAFVRGGTINIKNAKYSEDTKPLDDKCECYTCKNYSRAYLYHLVRCKEILGAMLVTMHNLTYYQDLMQALRKAIEEKRLSSFESQGFI

SEQ ID NO: 53313 - protein, 395 aa, Jorgensenbacteria bacterium
  misc_feature (1)..(395): tr|A0A0G1UCG8|A0A0G1UCG8_9BACT Queuine tRNA-ribosyltran sferase OS=Candidatus Jorgensenbacteria bacterium GW201 1_GWA1_48_11 OX=1618660 GN=tgt PE=3 SV=1
MFQVIKSADDSRARLGLLKIGHGVVETPAYVVVGTHAAVRTLAPADLVATKIQVVIANTYHLWRTLGDELDRFEGLHKKMDWPGPIMTDSGGFQVFSLGFAREHGVGKIANIFPAEGDRVMRMSPAANLVRITDEGVYFRDGGEELFLDAEKSIRIQERLGADIVLAFDECTSPTVSYEYQKEALDRTHRWAQRSLEAHLKNKESSSKQGLFGIVQGGQYEDLRQESAKFLAEMDDLAGFGIGGSFSKNDLGQAIKVVTEILPENKPRHLLGIGEPEDIFLGVEAGMDTFDCVAPTRIARNGTLYTKAGKINILNNKFKTDFTKVETDCTCYTCSNYTAAYLAHLFRSHEMLGATLASVHNLHFLVSLVDNIRQSILDDNFEGYKKEFLGLYLTK

SEQ ID NO: 53314 - protein, 393 aa, Jorgensenbacteria bacterium
  misc_feature (1)..(393): tr|A0A1F6BQ50|A0A1F6BQ50_9BACT Queuine tRNA-ribosyltran sferase OS=Candidatus Jorgensenbacteria bacterium RIFCS PHIGHO2_02_FULL_45_20 OX=1798470 GN=A3D55_03100 PE=3 SV =1
MFCITHKDSDSRARAGVLETKSGKKLETPAYAIVGTNAEVRCIDAREAERAGTRLIIANTYHLWRELGDSLNSFEGLPARIDMPGSIIMTDSGGFQVFSFGFGREHNTGKVGILRTADFPRAAASQENLVRVTENGAFFTDGRDERFLGPEESMKIQERLGADIMFAFDECTSPWSDYEYTKKAMNRTHRWAEVCLSKKTNASQMLYGIVQGGVFSDLRAESAKFIGSLPFDGFGIGGSFGENGMGGMVAAVNDLLPEQKPRHLLGIGTVRDVFKGVDAGVDTFDCVVPTREARHGALWTRDGRIDLKKSGYVNSTEPLEMECSCEACSSRISRGELRKMFKLKDRRAGKLATIHNVFFFNNLMCKIRKAIKEGKYKEFKSEFLGIISRYGIV

SEQ ID NO: 53315 - protein, 385 aa, Kaiserbacteria bacterium
  misc_feature (1)..(385): tr|A0A1F6DEI1|A0A1F6DEI1_9BACT Queuine tRNA-ribosyltran sferase OS=Candidatus Kaiserbacteria bacterium RIFCSPHI GHO2_01_FULL_56_24 OX=1798487 GN=tgt PE=3 SV=1
MLREMFKFEILKQSKKSRARLGVISTPHGEIETPSFIPVATRATIRTLDSNEVAEAGSQALIANTYHLHLAPGEDIVKKAGGIHGYMQWKKPLMTDSGGFQVFSLGFGRDHGIGKILKDEKERSITEGAQPVAVKITEEGVHFRSPIDGKQHFLSPKVSTYIQEKLGADIIFAFDECPSPLANEEYMRISLEKTHRWAAESLKSRTNQKKQAMYGIVQGGAFKDLRIESAKIIGAMEGFEGFGFGGEFGYNKAQTKKGISEVSDVLPYEKPRHVLGIGHPEDFPIIASAGGDTFDCIAPTHYARRGIIFTSKGRLDLRKPRFLKELKPLDPKCACEICKTYTRSYISHLIRGKELSGLKLATYHNLYFFNELAARMRKRIKNGDL

SEQ ID NO: 53316 - protein, 378 aa, Kaiserbacteria bacterium
  misc_feature (1)..(378): tr|A0A1F6DWT3|A0A1F6DWT3_9BACT Queuine tRNA-ribosyltran sferase OS=Candidatus Kaiserbacteria bacterium RIFCSPHI GHO2_02_FULL_55_20 OX=1798497 GN=tgt PE=3 SV=1
MFEFRILKRSKKSRARLGVISTPHGEIETPAFVTVATRATVRTLESDEVAAAGSQVLICNTYHLHTAPGEKNVKRAGGLHEFMQWKRPLMTDSGGFQVFSLGFGKDHGVGKILKEEQERRIPEGTQPTHIKITDDGVHFRSPIDGTELFLNPKESIRIQEALGADIMFAFDECPSPLADEDYLRTSLDRTHRWAAQCLKVRKTSQALYGIVQGGCFKNMRIESARLIGALPFEGFGIGGEFGYDKRSLKKMLEHVHDELPENKPRHVLGVGHPEDFPYIASAGGDTFDCIAPTHYARRGTVFTSKGRFQIRNQRYLTDQRPLDPSCKCDICKTYSRAYISHLMRAYELTGMKLVSFHNLHFFNAQASLLRKRIKNGEI

SEQ ID NO: 53317 - protein, 380 aa, Kapabacteria sp.
  misc_feature (1)..(380): tr|A0A1M3L2P9|A0A1M3L2P9_9BACT Queuine tRNA-ribosyltran sferase OS='Candidatus Kapabacteria' thiocyanatum OX=18 95771 GN=tgt PE=3 SV=1
MHERPFFTLDHVDADGRARAGTIETDHGSIPTPIFMPVGTQGAVKAIDHRSLVELDSKIILGNTYHLYLRPGTETLRTMGGLHRFANWERPILTDSGGFQVFSLRELRKMSEKGVEFRSHLDGSKHLFTPESVVDAQRAIGSDIFMVLDECTPHPATYTEARTSMELTMRWAERSMTHHRANPFLYGHRQFQFAIGQGSTYPDLRMACMEHLVGMDFDGYAIGGLAVGEPADSMYSMIETSTAVMPASKPRYLMGVGTPENILRAIDLGVDMFDCVMPTRNARNGTIYTTKGKLNIKNARYKVADEALDDGLDTYVGHNVSLAYLRHLFQAGEILGLMIATMQNLALYLWLTKMARRKILEGTFRPWALATIEQLNQSRQ

SEQ ID NO: 53318 - protein, 404 aa, Kentron sp.
  misc_feature (1)..(404): tr|A0A451C9G6|A0A451C9G6_9GAMM Queuine tRNA-ribosyltran sferase OS=Candidatus Kentron sp. G OX=2126341 GN=tgt P E=3 SV=1
MNPDENPAQFGIFFFANRLISCGAPNSIPDMIPDFHFQLLATDGPARRGRIHLARGTVETPVFMPVGTYATVKAMTPEELRGIGTRLIVANTFHLLLRPGTQVIAAHGGLHGFMHWAGPILTDSGGFQVFSLGDRRTIGEEGVHFRSPIDGASVFLDPEGSLRIQRALAADINMVFDDCTPYPATQDEARRSMELSMRWAARSKAAHAGAPSALFGIVQGGMYPALRADSLAKLVDLGFHGYAIGGLSVGEPPEERRAILGQLLPLMPRDRPRYLMGVGTPADIVNAVQDGVDMFDCVLPTRNARNGHLFVSHGVIRIRNSQYKTDTRPLDAACSCYTCRHYTRAYLHHLDRTREILASRLNTLHNLHYYQTLLSGLRKAIETGVLGEFVEEFHRRTTTARDDE

SEQ ID NO: 53319 - protein, 383 aa, Kentron sp.
  misc_feature (1)..(383): tr|A0A451A9Z7|A0A451A9Z7_9GAMM Queuine tRNA-ribosyltran sferase OS=Candidatus Kentron sp. UNK OX=2126344 GN=tgt PE=3 SV=1
MQNPFDFQVLATDGPARRGRMRLEHGVVETPVFMPVGTYATVKAMTPEELTDLGTRLIVANTFHLLLRPGTQVIADHGGLHGFMHWNAPILTDSGGFQVFSLGKRRAISEEGVHFRSPIDGASLFLDAEGSIRVQRALQSDINMVFDDCTPYPATKDEARRSMELSMRWAERSYRAHAGSSSALFGIAQGGIYPDLRAESLDSLMAIGSGALDGYAIGGLSVGEPPAERRVVLQDLLPRMPRDKPRYLMGVGTPEDIVAAVLLGVDMFDCVLPTRNARNGHLFVSTGVIRIRNSQYKTDTRPLDEACSCYTCRHYSRAYLHHLDRAHEILASRLNTVHNLAYYQSLLSGLRRAIADGSIADFAADFYRTRGTEPRSELGSNLD

SEQ ID NO: 53320 - protein, 379 aa, Kerfeldbacteria bacterium
  misc_feature (1)..(379): tr|A0A1G2B2G3|A0A1G2B2G3_9BACT Queuine tRNA-ribosyltran sferase OS=Candidatus Kerfeldbacteria bacterium RIFCSPL OWO2_01_FULL_48_11 OX=1798543 GN=tgt PE=3 SV=1
MIRFHITKKSKKSNARLGLLKTPHGAIETPALIPVATQAVVKALTTEEVVQTGTQALIANTFHLHLKPGEKIVKRHGGLHRFMRWQRPLMTDSAGYQVFSLGFGMDHKVGKILKKRSENKVSHPSAQPQNVKITETGVHFRSPVDGSPLFIGPKESIRIQESLGADIIFAFDECTPPTASHAYTEKSLERTHRWAEQCLEYKKTKQALFGIVQGGRFKDLRVESAKMVAGLPFDGFGIGGEFGGDKKRMMHMIRWVIDELPEDKPRHLLGIGYLEDIPKVIKSGVDTFDCIVPTHFARHGAAFTSVGQLDMRKKIFLNDTKPLDPRCACEVCQTYSRGYITHLLRAKEITPLRLLTSHNLFFFNTFVARIREGIRQGII

SEQ ID NO: 53321 - protein, 379 aa, Kerfeldbacteria bacterium; identical to SEQ ID NO: 53320
  misc_feature (1)..(379): tr|A0A3D3HV97|A0A3D3HV97_9BACT Queuine tRNA-ribosyltran sferase OS=Candidatus Kerfeldbacteria bacterium OX=2053 565 GN=tgt PE=3 SV=1

SEQ ID NO: 53322 - protein, 379 aa, Kinetoplastibacterium galatii
  misc_feature (1)..(379): tr|M1LTI1|M1LTI1_9PROT Queuine tRNA-ribosyltransferase OS=Candidatus Kinetoplastibacterium galatii TCC219 OX=1 208921 GN=tgt PE=3 SV=1
MTNNLNFKIINTDGRARNGLLHLNHGTLKTPTFMPVGTGGCVKAMLKRDLEEIGAHIILGNTFHLWMRPGIDIINHHEGLHNFIKWQKPILTDSGGFQVFSLKELCKITEEGVRFSSPINGSKLFLTPEKSIQIQSILNSDITMIFDECTPYQIGSHIINREEARSSMHLSLRWAKRSLDEFKRQENKNSMFGIVQGGIYEDLREESINGLLDIGFNGYAIGGLSVGEPKEYLHKILEFVSPKIPDNFPKYLMGVGTPEDIVNAVSNGIDMFDCVMPTRNARNGWLFTRYGNIKIKNSRYKNDTNGLDPTCACYTCRNFTRSYLHHLQITKEINSSILNTIHNLHFYLNMMKEIRESINEKKFDIWKNNFLEDRSSNSY

SEQ ID NO: 53323 - protein, 376 aa, Kinetoplastibacterium desouzaii
  misc_feature (1)..(376): tr|M1L1P1|M1L1P1_9PROT Queuine tRNA-ribosyltransferase OS=Candidatus Kinetoplastibacterium desouzaii TCC079E O X=1208919 GN=tgt PE=3 SV=1
MNFKILNTDNNARTAIISLLHGEIKTPVFMPVGTYGSVKSIMPNELKDIGAQIVLGNTFHLWLRPGTDIIKLHNGLHNFMHWDKPILTDSGGFQVFSLSKKRKITEEGVAFSSPINGAKMFLTPEKSMQIQNILNSDIVMAFDECTPFKIADTIITKKEVYNSMTLSSRWAKRSFDEFQYQKNMNMLFGIVQGGMHEDLRDESIDKLLNIGFNGYAIGGLSVGEPKEDMIRILKHTARNLPKYSPRYLMGVGTPEDIVNGVENGIDMFDCVMPTRNARNGWIFTRYGNIKIRNSAYKKDLLPLDEECTCYTCNNFSRSYLHHLQIIKEINGARLNTIHNLHFYLTIMNEMRDAINNNEFNAWKTKFIIDRQQLNKK

SEQ ID NO: 53324 - protein, 368 aa, Komeilibacteria bacterium
  misc_feature (1)..(368): tr|A0A1G2BY23|A0A1G2BY23_9BACT Queuine tRNA-ribosyltran sferase OS=Candidatus Komeilibacteria bacterium RIFOXYC 1_FULL_37_11 OX=1798555 GN=tgt PE=3 SV=1
MFELLKKSKKSKARLGVLNTARGKVDTPFFMPIATKAAIKSMEASEVKNLGAQIILSNTYHNLLRPGLDVIKKFGGLHKFMDSDLPILTDSGGYQVFSLAKLRKIIGNDIKFQSHIDGSTHILNPRRVIDIQVVLGSDIMMVLDECVGLPTTWDKALEALERTSRWAQLAVDYKNKLNKKSTKIKKQLIFGIVQGADFKDLRLRSAKELVAMNFDGYAIGGLAVGETAKVMYQVLDYTVDQLPENKARYLMGVGYPENIIEAVKRGIDMFDCVIPTREARHGKLYIWRTQPNVSKKNFYTTININNAKFRKDKTPINNTTLKNYSRAYLHHLFKTGEPLSLKLATLNNLEFYLTLMAQIRQAIRANKL

SEQ ID NO: 53325 - protein, 389 aa, Komeilibacteria bacterium
  misc_feature (1)..(389): tr|A0A1G2BTR5|A0A1G2BTR5_9BACT Queuine tRNA-ribosyltran sferase OS=Candidatus Komeilibacteria bacterium RIFCSPL OWO2_01_FULL_53_11 OX=1798552 GN=tgt PE=3 SV=1
MSFKLLKTSKKSRARTGILTTAHGAIRTPFFMPIATKGAVKGLEAHEVADLGAEIILSNTYHLYLQPGLSVLKKYGGVRNFMKATLPILTDSGGFQIFSLSKLRLVDEHGVTFRSHIDGSKHRLTPKKAIAIQAALGSDIMMVLDYFPGYPATEKQTAEAVRLTTAWAKQCFEYKKVLSKKYTAVRKQMLFGIVQGSTFRELRKRSASELTALPFNGYAIGGLAVGEPAAEMYKVLDHTVPLLPTDKPRYLMGVGYPEQIVEAVKRGIDMFDCVIPTREGRHGRLFVWKRKDKNPLALALSHPRKLPLGKGEGEGVRTFYDTLNIRNSEFRSDTRPVDPSCDCQLCKNYSRAFLYQMFKTEDWLGPRLATIHNLRFYLVLMERVRSGIR

SEQ ID NO: 53326 - protein, 381 aa, Kryptonium thompsoni
  misc_feature (1)..(381): tr|A0A0P1LJT5|A0A0P1LJT5_9BACT Queuine tRNA-ribosyltran sferase OS=Candidatus Kryptonium thompsoni OX=1633631 G N=tgt PE=3 SV=1
MFKFELVALDSKTSARAGLIYTDHGVIETPVFMPVGTQGTVKAVEQRELVEIGAQIILGNTYHLYLRPGTDVIFKAGGLHKFIGWERGILTDSGGFQIFSLAQFRKISKEGVKFQSHIDGSYHFFTPESIIDIQRILGSDIMMCLDECTPYPCDYDYAFKSNQLTIEWAKRSRERFDNTKPLYGHTQAIFGIVQGSIYPEIRAKSVEELVKLDLDGYAIGGLAVGEPIETMYQIAEFTASLLPVDKPRYLMGVGTPENILEAISRGIDMFDCVIPTRNGRNATLYTREGKFSIKNAIYKEDFTPVDKDCDCYTCRSFTRAYLRHLFNADEILALQLASIHNLAFYLWLVREARSHIIQGDFLEWKDKMLQKIGEKAKIANH

SEQ ID NO: 53327 - protein, 372 aa, Kuenenbacteria bacterium
  misc_feature (1)..(372): tr|A0A1F6GKJ8|A0A1F6GKJ8_9BACT Queuine tRNA-ribosyltran sferase OS=Candidatus Kuenenbacteria bacterium RIFCSPHI GHO2_12_FULL_42_14 OX=1798563 GN=A3E04_03755 PE=3 SV=1
MTLSRRKIIATPHGKISTPFFMPDATQGAVKLIESAKIKTIGVPAMVVNTLHLYLQPGLHIIKKASGIHQFMNWPGPLLSDSGGYQVFSLIYKTKGRAGKVYEDKVVFRSPIDGSRHELTPEKSIQIQFALGTDMLVCLDDVRPNDTDRGEAEAAVERTLKWARRCKKEYEKKVKSQKSKVKNYNRPLLFGVVQGGVFPDLRQHCAEELVKIGFDGLGFGARPIDEQGKFLTEVLKATTAAIPENYLRFALGVGAPEDIVYFARLGWDMFDCVIPTREGRHGRLYQMQKSKAQSQKFGKDFYIILNITNAKFAKDFSPINADSKLPELREHSKAYLHHLFKVSESLGQRLASLNNLEFYARLMKTVRQKPNQ

SEQ ID NO: 53328 - protein, 431 aa, Kuenenbacteria bacterium
  misc_feature (1)..(431): tr|A0A2N1UND1|A0A2N1UND1_9BACT Queuine tRNA-ribosyltran sferase OS=Candidatus Kuenenbacteria bacterium HGW-Kuen enbacteria-1 OX=2013812 GN=tgt PE=3 SV=1
MMNLYKILFQHPMTKFQLIKKSKKSKARLSLFKTSHGDIEGPFFMPIATRGAIKNLTPDEMKSLKNQIILSNTYYLMLRPGMKVIKKAGGLHKFMNWNGPILTDSGGYQAYSLGSLKFKVQSSKLQIENNKFQSKSPSEVLQMGQGIFKERNPLNIPLQRDLSVKFSEQGVEFYSEVDGEKIFLSPEKAVEIQIILGSDIIMVLDQCVALPCDYKKIKQALELTTRWAKRSNEYFLKNKKEHQMLFGIVQGGTYKKLRLQSAKELVNIDFDGYAIGGLAVGEPRKKMFDVLNCTVPILPENKPHYLMGVGKPEEIIEAVKRGIDMFDCVIPTRNARHGTLYKFKVKSVKLKVKEEDFYEIIRITNAKFEYDLQPIDSNCSCYTCQNYSRAYLRHLFMTNESLGFRLATIHNLAFYLELMEKIRKGILEGRI

SEQ ID NO: 53329 - protein, 381 aa, Lambdaproteobacteria bacterium
  misc_feature (1)..(381): tr|A0A1F6GBG2|A0A1F6GBG2_9PROT Queuine tRNA-ribosyltran sferase OS=Candidatus Lambdaproteobacteria bacterium RI FOXYD2_FULL_50_16 OX=1817772 GN=tgt PE=3 SV=1
MNQPLTFDLLKTDPSGARRGRMTTAHGVIETPIFMPVGTAAAMKALTPAQVGEAGAQIILSNAYHLENQPGSELIEKLGGIHKFMNWNGPILTDSGGYQVFSLDKKTVHEDGVTFRYSKGGQEVKLNPELSMAIQNRLGADIIMAFDECVEFPTTHTYARESLERTLRWAKRCKAAHQNPNQALFGISQGALYEDLRKRSFEGLIELDFPGYAIGGLSVGEGLEHMKRALDFTTPLMPVEKPRYLMGIGLPEDIIEAIERGIDMMDCVIPTKFARSGVLFTHVGRIRVTDTKFRRDKFPVDTNCDCYCCKNYSRAYLHHLFAGNEILGATLTSIHNVHFYMNLTAKIRDAIEQGEFLKFKGEFLETYQRAEGKKQKSSRPR

SEQ ID NO: 53330 - protein, 368 aa, Lambdaproteobacteria bacterium
  misc_feature (1)..(368): tr|A0A1F6GBA9|A0A1F6GBA9_9PROT Queuine tRNA-ribosyltran sferase OS=Candidatus Lambdaproteobacteria bacterium RI FOXYD2_FULL_50_16 OX=1817772 GN=tgt PE=3 SV=1
MGRLKFQLEAEDGQARAARFWLGPKQIQTPLFMPVGTAATVKAMTSEELTQIGFPLILGNTYHLFLRPGDSLIKELGGLHKFMNWPGAILTDSGGFQVFSLAKLTKITEAGVTFQSHLDGTKLAFTPESVIQTQENLGSDIMMVLDECLPIPSEREQVKESIALTHRWAERSLKARRSENAMFGIVQGADFEELRRESALGLVDLGFDGYAIGGLSVGESKSIMAEVCGYTTPLLPKDKPRYLMGVGDPVDLLNGIEAGIDLFDCVLPTRNARNGGLFTSLGKINIKHSSHRTNPGPLDPNCGCSVCQNYSRAYLRHLFQSGEILASRLNTYHNLHFLHDLMNQARQAILANRFAQFKRDWLARYLGD

SEQ ID NO: 53331 - protein, 356 aa, Latescibacteria bacterium
  misc_feature (1)..(356): tr|A0A3D2RHP8|A0A3D2RHP8_9BACT Queuine tRNA-ribosyltran sferase OS=Candidatus Latescibacteria bacterium OX=2053 570 GN=tgt PE=3 SV=1
MPDRLTHISTPHGALQLPAFLPDATRGVVRTLDANDARSCGVECLMVNTLHLSMQPGTTVIRDAGGIHKFAGWAGPIVSDSGGFQVYSLATGGAKGVSISSEGVTFKIQAQKKKRALTPEKCIQYQVQMGSDILFSLDDCPPDNADFSALEESVYRTLGWGRGCRDAFDRMTDSMDTAPLLYGVIQGGSDLDLRRRCIEGLLEIGFDGFGFGGWPIADDGSLVDEVGRVAEMIPDGKPLHGLGIGKPNNLVQAYHLGYDTFDCTIPTRDARRGRLYVEKEDGVAGDFDYVRIEREAYARDNEPVEAGCDCSTCGRYSRAYLHHLFRIGESAGHRLATIHNLRFFTRVINSLRASDA

SEQ ID NO: 53332 - protein, 384 aa, Latescibacteria bacterium
  misc_feature (1)..(384): tr|A0A3D2Z3H6|A0A3D2Z3H6_9BACT Queuine tRNA-ribosyltran sferase OS=Candidatus Latescibacteria bacterium OX=2053 570 GN=tgt PE=3 SV=1
MSEGAPFRFELVAEDPASGARAGVLHTPHGAIETPVFMPVGTQATVKALSQQDLLTLDADIILGNAYHLYLRPGHERIERFGGLHGFMNWPRPILTDSGGFQVFSLQELRKITEEGVQFRSHLDGSAHLFTPESVMEIEHALGADIIMAFDECTPYPATEEYARESMERTQRWAQRCLSRHEQLQSAQVAAGRPPQALFGIVQGGVYRQLRQRSARDLVGLDLPGYAIGGLAVGESRAERLATIEDTVPELPAHKPRYLMGVGLPQDLIDGVVGGIDMFDCVIPTRNARNSTLFTSTGRVRMKNAIHADDDSPLDAACECITCTQYHRGYLRHLFQTNELLALHLATYHNIHFYLRLMRSMRAAIIDGDFTDWQQAFFATYQDG

SEQ ID NO: 53333 - protein, 426 aa, Levybacteria bacterium
  misc_feature (1)..(426): tr|A0A0G0K1A5|A0A0G0K1A5_9BACT Queuine tRNA-ribosyltran sferase OS=Candidatus Levybacteria bacterium GW2011_GWB 1_37_8 OX=1618463 GN=tgt PE=3 SV=1
MNKIQDFKFKFEILKKDKKSKARVGKITTAHGIIETPAFVAVGTQATVKGLSPKDLQETGVQVLFGNTYHLHLRPGEDLVKDFGGLAKFMSWNGPTITDSGGFQVFSLGQRKIKILQGDEEANLVKITEDGVEFRSHIDGSKHFFTPEISIEIQKKLGADIILAFDECAPQPSDHDYTKEAMERTHKWALRSLAAFKSEIRSTKSETNSNVQNPNNKTVSNFDIRYSNFYHNWQQALYGIIQGGVYRDLREESAKFISALPFDGIAIGGVAVGESKKEMREAVDWSYPFLPEDKPRHLLGIGEIDDIFDVIERGMDTFDCVIPTRFGRYGIVFVDPPVGNLKNRFRIDLNKVVFAKDAGPISKTCSCYVCTNFTKGYIHHLVRAQELLAYRLASYHNMFFINNLVKKIRESILEDKFQELKRNWLG

SEQ ID NO: 53334 - protein, 443 aa, Levybacteria bacterium
  misc_feature (1)..(443): tr|A0A1F6KMF3|A0A1F6KMF3_9BACT Queuine tRNA-ribosyltran sferase OS=Candidatus Levybacteria bacterium RIFCSPLOWO 2_01_FULL_39_10 OX=1798622 GN=tgt PE=3 SV=1
MKPSFKVLVKDKNARAGVIKTSHGDIETPAFIPVGTKATVKSLTSEQIREIGPQVVLVNTYHLHLQPGEDVIKKLGGLHSFMNWDKPMMSDSGGFQVFSLGIGLEKPGVKFLKDLDDGRSKVESRNLKIEDRKLIHRPSSIINNLSSTIYPLSSNDEPRPRLNKITEEGVEFQSHIDGSRRKLTPESSIAIQEKLGADLIIAFDDLESPTYSYEQTKKSLDLTNRWELRSLKAHLTFQGEAFQGEALRGKRPNQLLYGVTHGGEFEELRRKSAKFVNSNFDAVALGGAHKNKKNLYEVVEWTVCELDEDKPRHLLGVGEVDDIFESVARGIDTFDCVIPTRLGRMGHVFAGPPLGNIRNRFRYDITKSKFVSDEKSIDPKCQCWVCQNFSRAYVNHLFRSRELLAYTLATYHNVYFMVNLTNQIRDSILNSQFEKLKKVWIKS

SEQ ID NO: 53335 - protein, 377 aa, Liberibacter solanacearum
  misc_feature (1)..(377): tr|A0A424FLI1|A0A424FLI1_9RHIZ Queuine tRNA-ribosyltran sferase OS=Candidatus Liberibacter solanacearum OX=5562 87 GN=tgt PE=3 SV=1
MDKNFCFNIKAKSGNARLGEIITPRGIIKTPAFMPVGTSGAVKAMYFDQVRDLGADVILGNAYHLMLQPGADRIARLGGLHQFIRWFKPILTDSGGFQVMSLSKLCSIDEQGVSFRSHIDGSLHRVSPEDSIEIQNLLGSDIQMQLDECLALPADEKELKRAMELSLRWAERSLVAFGNQPGKALFGIVQGGDNISLRSFSAARLKELDLKGYAIGGLAVGEPQEVMLHILSNILPILPVEKPHYLMGVGTPDDILKSVSYGVDMFDCVMPTRAGRHGLSFTRFGKINLRNARHTDDMRPLDAESNCPALRDYSRAYLHHLLHVNESLAGMILSWANLFYYQDLMREIRNAIAQDCFADFMMQTQENWRKGDIPPLF

SEQ ID NO: 53336 - protein, 379 aa, Liberibacter europaeus
  misc_feature (1)..(379): tr|A0A2T4VYJ5|A0A2T4VYJ5_9RHIZ Queuine tRNA-ribosyltran sferase OS=Candidatus Liberibacter europaeus OX=744859 GN=tgt PE=3 SV=1
MDLDKVFCFKIQSRSDSARLGNITTSRGSIRTPAFMPVGTCGAVKAMYFDQVRNLGTDVILGNAYHLMLRPGAERISRLGGMHKFIRWPRPILTDSGGFQVMSLSKLCSVDEQGVSFRSHIDGSLHYMSPEDSIDIQNLLGSDIQMQLDECLALPANYKEIKRAMELSLRWAERSLVAFGNQPNKAMFGIVQGGDNIELRSFSAERLKELDLKGYAIGGLAVGEPQHVMLHILSNVVPILPVEKPRYLMGVGTPDDILKSVSYGIDMFDCVMPTRAGRHGLSFTRFGKINLRNARHADDMRPLDETSDCPALCDYSRAYLHHLLRVNESLAGMIISWANLAYYQDLMANIRHAIAEDRFAEFMIQTQENWLKGDIPPLV

SEQ ID NO: 53337 - protein, 360 aa, Lindowbacteria bacterium
  misc_feature (1)..(360): tr|A0A1F6LV56|A0A1F6LV56_9BACT Queuine tRNA-ribosyltran sferase OS=Candidatus Lindowbacteria bacterium RIFCSPLO WO2_12_FULL_62_27 OX=1817870 GN=tgt PE=3 SV=1
MKFQVLQTSGRARLGRLEIAGQVIETPAFMPVGTLGTVRTLEAEEVLELGYRLILGNTYHLWLRPGLEVISRFGGLKRFMGWPGALLTDSGGFQIFSLSKIRKLDDDGVTFSAPEDGGDVHRLTPERALEIQRDLGADIAMVLDECPPFPCEAEALRKAVERTIDWARRSARWLGENPLGGCVFAITQGSTDLDLRRQCLDALQSLKFSGYAVGGLAVGEPNEVMYETLDRILPDYPADRPRYLMGVGAPADLETCARLGVDLFDCVLPTRNARRGQLLTSQGPVNIRNSEHERSESPPDPACACRVCRKYSRAYLRHLFQCDEILGLKLATYHNLFYVQSVMESVRNGIRSGGSAGAAQ

SEQ ID NO: 53338 - protein, 406 aa, Liptonbacteria bacterium
  misc_feature (1)..(406): tr|A0A1G2CKL3|A0A1G2CKL3_9BACT Queuine tRNA-ribosyltran sferase OS=Candidatus Liptonbacteria bacterium RIFCSPLO WO2_01_FULL_53_13 OX=1798651 GN=A2946_04230 PE=3 SV=1
MTLVFELVHKDTRSRARIGRITTPHGVIETPSYVIVGTDAAVRCLEPEDIPKTNTQAIIANTYHLWRSLGDEGLANFPGVHKEMQWNGPIMTDSGGFQVFSMGASREHGVGKKPQIADRKSLIADEPVEKGVVRVTESGVYFDDPSTSSGNNNGEEVYLDAELSMKIQEQLDADIVFAFDEPSSPLHDKEYTRDAMERTHRWAVRSLEAKTSLQKIYGIVQGGTFEDLRKESAEYIGALPFDGIGIGGSFGSSFGSSTENTLKELEWTIPFLPERKPRHLLGMGKIADLFYGVEAGIDTFDCVIPTREARHKSLWTSRGRMDIGKGVHGTDGGVIAEDCGCPVCADLRVERRELHQMFKIKNPEAGRLATIHNVYFFNDLMSQMRDALREGRFGEFKGEYLGRLAK

SEQ ID NO: 53339 - protein, 398 aa, Liptonbacteria bacterium
  misc_feature (1)..(398): tr|A0A1G2CSV6|A0A1G2CSV6_9BACT Queuine tRNA-ribosyltran sferase OS=Candidatus Liptonbacteria bacterium RIFOXYD1 _FULL_36_11 OX=1798656 GN=A2604_02465 PE=3 SV=1
MFEFKEEKRSKFCGARVGIIKTEYGEFETPLYVFAGTDAEIRTLDKKSLKEVKALVANTYHLGVRTNKIKEMEKSGGLHKYMNFKGLIMTDSGGFQVFSYGFSREHGIGKIGFFPGKSKVKTVKEENLAQITEKGVFFKDESGKKKFLGPEESIKIQEKLGADIILAFDECTSPFHEYEYTKKSLERTNRWAKKCLKIKKSGQALYGIIQGGFFKDLREESARFINSLDFQGIAVGGPLGKDRSDMIQVLDWIQPFLEEKPELPRHMLGIGKPEDLFCGIERGMDTFDCVIPTREARHGSVYTKNRRIDLTRGSMKFKKGERIEKKCLCQTCLDFSVLELREMIKSENPRKTEVAKLLTVHNIFWFQNLMDKIRKSILEGKFKEFKKEFLKEYIRKII

SEQ ID NO: 53340 - protein, 406 aa, Lloydbacteria bacterium
  misc_feature (1)..(406): tr|A0A1G2CTQ9|A0A1G2CTQ9_9BACT Queuine tRNA-ribosyltran sferase OS=Candidatus Lloydbacteria bacterium RIFCSPHIG HO2_01_FULL_41_20 OX=1798657 GN=tgt PE=3 SV=1
MQFKIEKKLKGSLGRVGIIKTVHGTINTPAFAVVGTKATVKALSPEQVRDLGAQVVLANTYHLYLQPGSKLVEKAGGFSKFMRWNGPTITDSGGFQVFSLGSAYGKTVSKISNSESDYSSILQNTRIGNDEEGITEKLVKINNDGVTFKSYIDGSEHRFTPESSMKIQKELGADIIFAFDECTTPYASYEYQKEAMERTHEWARRSLAEHERLSGKRHLKQALFGIVQGGRFKDLREESARVISKMPFDGFGIGGSFDKEDMYSVVGWVNQILPEDKPRHLLGIGEPADLFGGVENGADLFDCVAPTRIARNGTLYTENGRINILNAKFIEDFTPIDETCECYTCKNYTRAYLSHLFRAKEMFAATLASIHNLYFIVNLMKRIRQSILDEKFFEFKEEFLASYYSK

SEQ ID NO: 53341 - protein, 385 aa, Lloydbacteria bacterium
  misc_feature (1)..(385): tr|A0A1G2DFN9|A0A1G2DFN9_9BACT Queuine tRNA-ribosyltran sferase OS=Candidatus Lloydbacteria bacterium RIFCSPHIG HO2_02_FULL_51_22 OX=1798663 GN=tgt PE=3 SV=1
MIRFRITKKSERSRARLGILETPHGTVETPAFVPVATAASLRTLTSEEAAEAGSQLFIANTFHLHVRPGEEIVRNAGGIHRFMNWKRPLMTDSGGFQVFSLGFGRDFDTGKFSKDRTAQGGLPEIKRGRNPSSLKITDDGAEFRSPLDGRKLFIGPRESIAIQEAIGADMIFAFDECTPAHASRGYIEHSLARTHRWAKDCLAAKKSEQALFGIVQGSHFEDLRKESAGFIGALPFDGFGIGGDLGDIKESKREMFQILEWTVPLLPDEKPRHLLGIGYPEDMEPIITHGIDLFDCITPTHFARRGVAFTREGRLNLRQKRFLSEFQALDDTCACGVCGAYSRAYIAHLIRAREITGLRLLTYHNLFFWNTLVARLREKIARGEL

SEQ ID NO: 53342 - protein, 371 aa, Macondimonas diazotrophica
  misc_feature (1)..(371): tr|A0A4Z0FAH4|A0A4Z0FAH4_9GAMM Queuine tRNA-ribosyltran sferase OS=Candidatus Macondimonas diazotrophica OX=230 5248 GN=tgt PE=3 SV=1
MKFELLGQSGAARRGRVTLAHGQVETPAFMPVGTYGTVKSLTPEEVADCGAKIVLGNTFHLWLRPGLDVIAAHGGLHGFMNWSGPILTDSGGFQVFSLAELRRLTEEGVHFRSPIDGDAVFLSPERSMEIQRVLNSDIVMVFDECTPYPADPDQARRSMELSLRWAARSRAAHEGNPNALFGIVQGGMYPDLRYESLQGLQAIGFDGYAIGGLSVGEPLVERLAVLEALLPEMPTDRPRYLMGVGTPSDLVDAVARGVDLFDCVMPTRNARNGHLFTHEGVVRIRNQVHRLDTGPLDPLCECMTCRNYSRAYLRHLERSQEILFARLASYHNTYYYQNLMARMRAAIAEHRFDAFRREFAAREGRMAAAVP

SEQ ID NO: 53343 - protein, 412 aa, Magasanikbacteria bacterium
  misc_feature (1)..(412): tr|A0A2H0N309|A0A2H0N309_9BACT Queuine tRNA-ribosyltran sferase OS=Candidatus Magasanikbacteria bacterium CG11_ big_fil_rev_8_21_14_0_20_43_7 OX=1974654 GN=tgt PE=3 SV =1
MSMNFFDIISKSTECAARTGVIHTDHGDIETPCFMPVGTQATVKTLDSEDLKTLDPEVILANTYHLHLRPSEDLIEKFGGLHKFMNWDGPILTDSGGFQVFSLGLQKTKKQESKKANAHSTLVEIDDNGVTFRSHIDGSIHRFTAESAIETQRKLGADIIMAWDECTPDDADEVYARQALDRTHRWAKESLHAHQKNTTYQGYNQYLFGIIQGAGHRDLREESARVISAMDFDGIAIGGESVGYNMNATKEILEWVMPLIPEDKPHYTMGVGYSPMDLFTVVENGIDMFDCVAPTRIARNGTLYTSEKKVAENVSILTKEGLEEVPIQNKYTLNINNAQFREDKSPIDPTCACHTCKNYSRAYLHHLFKVQEMLAYRLATIHNVHFMLELMREMRVAIREDRFFGLKQSWTQ

SEQ ID NO: 53344 - protein, 423 aa, Magasanikbacteria bacterium
  misc_feature (1)..(423): tr|A0A0G1MWE9|A0A0G1MWE9_9BACT Queuine tRNA-ribosyltran sferase OS=Candidatus Magasanikbacteria bacterium GW201 1_GWC2_45_8 OX=1619050 GN=tgt PE=3 SV=1
MQKRPIVILKLTQKIILFKALPFLTNLLQSRHKTMNIFSPFKLIKKDPHTRARLGRITTAHGVIETPEFMPVGTQATVKTLDVHDLYSSGAQVILGNTYHLHLRPGEKIIKKLGGLHKFMNWHKPILTDSGGFQVFSLKNGEHTNKQLVTIDEDGVNFRSYINGSLHRFTPESAIKIQHDLGADIIMAFDECTSDTVPHAIALAAMERTHRWAVRCIAAHKKLKKGGSAGPLLFGIIQGGSHQDLRVKSAQFITSLPFDGIAIGGESIGYNMEATGTIMEYLAPYLPENKPRYTMGLGASPGDFFKAVAAGADMFDCVAPTRIARNGGLFIHPRNGGAPANKYRLCITNAAYLTDKKPIDVWCDCFTCTHHSRAYLHHLFKADEILGLRLASIHNVHFALKVMREIRESIANGTFVALYKKWK

SEQ ID NO: 53345 - protein, 364 aa, Magnetobacterium bavaricum
  misc_feature (1)..(364): tr|A0A0F3GW22|A0A0F3GW22_9BACT Queuine tRNA-ribosyltran sferase OS=Candidatus Magnetobacterium bavaricum OX=292 90 GN=tgt PE=3 SV=1
MKCFSLLNVTGNARAGMLQVGQWSLPTPMFMPVATQGTVKAMTPLALREVGAEIILCNTYHLYLRPGHDVVEAAGGLRGFTSWDGPILTDSGGFQVYSLSPLRKIKEAGVQFKSHIDGSTHFIGPKEAMQIQRALGADIVMAFDECPPYPATYEYVLGSLQLTTRWAKQCKEVHDGQQMLFGIIQGGQYKDLRLQSASELKALDFDGYALGGVSVGEPKDMMYDIVGYMASELPQDKPRYLMGVGFPQDILHAVEAGFDMFDCVIPTRTARHGTILTHSGRITIKAQRYKTDPAPLDPQCGCYTCKNFSRAYLNHLFRAKEILAITLNSIHNLHFYFEFMRDIRAAITQGRFKEFKDRWLKNCG

SEQ ID NO: 53346 - protein, 376 aa, Magnetoglobus multicellularis
  misc_feature (1)..(376): tr|A0A1V1P637|A0A1V1P637_9DELT Queuine tRNA-ribosyltran sferase OS=Candidatus Magnetoglobus multicellularis str . Araruama OX=890399 GN=tgt PE=3 SV=1
MFINQQVEDKYMFTINKTCPKTGARAGTLTTLHGTIETPVFMPVGTAGTVKSLCPRDLTNLEVQILLGNTYHLYLRPGCNVIELFGGLHEFMQWHGPILTDSGGFQVYSLAKLRKVTSQGVIFQSHIDGSKHMLSPQSVIDTQTCLGSDIMMCLDDVVPYPCENSQIKAALDRTHQWAKECKIIWQNSDSENILFGIVQGGMIKSYRKQSIQVLSDLDFPGYAIGGLSVGEPSEMMYDIGAYCLDLLPSEKPRYIMGVGTPADLIQLVASGCDMFDCVMPTRNARNGQLFTSQGTINIKNADYRNDMAPVDSSCTCYTCEQFSRAYLNHLYRSRELLAYRLNSIHNIHFYIQLMKQMRRAILSGCFDRFVADRLLL

SEQ ID NO: 53347 - protein, 381 aa, Magnetomorum sp.
  misc_feature (1)..(381): tr|A0A0N0D3S1|A0A0N0D3S1_9DELT Queuine tRNA-ribosyltran sferase OS=Candidatus Magnetomorum sp. HK-1 OX=1509431 GN=tgt PE=3 SV=1
MVKTEDYFQQFQFNLDKKCQKTNARAGTLNTSHGVVETPIFMPVGTAGTVKSLCPRDLVDLKVQLLLGNTYHLYLRPGCDIIRIFGGLHEFMQWHGPILTDSGGFQVFSLAKLRKVNDDGVIFQSHIDGSKHILNPQSVIDIQDCLGSDILMCLDDVVPYPCDEKRIKEALYRTHKWAKECKDAWQEKNTHNALFGIVQGGMFKDLRKQSIQALCEIDFPGYAIGGLSVGEPQNLMYEIGSYCLELLPQDKPRYIMGVGTPADLVHLVSAGCDMFDCVMPTRNARNGQLFTSKGTINIKNAHFREDPNPIDPECNCYTCLQFSRAYLNHLYRSRELLAYRLNTIHNIHFYIQLMKGMREAILEDRFESFSKSLLSIYEGHK

SEQ ID NO: 53348 - protein, 355 aa, Margulisbacteria bacterium
  misc_feature (1)..(355): tr|A0A1F6QJ37|A0A1F6QJ37_9BACT Queuine tRNA-ribosyltran sferase OS=Candidatus Margulisbacteria bacterium GWE2_3 9_32 OX=1817872 GN=tgt PE=3 SV=1
MKFEIIKKSKHSNARIGKLETAHGIINTPVFMPVGTQATVKTLTPEMLHNTQAQIILSNTYHLYLRPGVDIIKAAGGLHRFMNWKKPILTDSGGFQIFSLEGLRNINDNGVIFSSHHDGSKHLLTPESVLQLQLDFGSDIIMQLDECVPANAEYDKTLEALKRTTNWARRTKKYFLESGRQNQEVFAIIQGGMFSDLRKKSAEELGELDFFGYAIGGLSVGEEKPLMYDLMASTSLILPEQKPKYLMGVGGPEDIAWGIQCGIDMFDCVLPTRLARHGTLLTNNGKINIKKQLYAKDFTPIDESCDCYTCQNYTKGYLRHLFRAKEILGLTLMTIHNIRFLVKLTEEIKRNIELE

SEQ ID NO: 53349 - protein, 355 aa, Margulisbacteria bacterium
  misc_feature (1)..(355): tr|A0A2W4I5N2|A0A2W4I5N2_9BACT Queuine tRNA-ribosyltran sferase OS=Candidatus Margulisbacteria bacterium OX=205 3573 GN=tgt PE=3 SV=1
MKFEIIKKSKHSNARIGKLETAHGIINTPVFMPVGTQATVKTLTPEMLHNTQAQIILSNTYHLYLRPGVDIIKAAGGLHRFMNWKKPILTDSGGFQIFSLEGLRNINDNGVIFSSHHDGSKHLLTPESVLQLQLDFGSDIIMQLDECVPANAEYDKTLEALKRTTNWARRTKKYFLESGRQNQEVFAIIQGGMFSDLRKKSAEELGELDFFGYAIGGLSVGEEKPLMYDLMASTSLILPEQKPKYLMGVGGPEDIAWGIQCGIDMFDCVLPTRLARHGTLLTNNGKINIKKQLYAKDFTPIDECCDCYTCQNYTKGYLRHLFRAKEILGLTLMTIHNIRFLVKLTEEIKRNIELE

SEQ ID NO: 53350 - protein, 276 aa, Marinamargulisbacteria bacterium
  misc_feature (1)..(276): tr|A0A328RJR5|A0A328RJR5_9BACT Queuine tRNA-ribosyltran sferase (Fragment) OS=Candidatus Marinamargulisbacteria bacterium SCGC AG-439-L15 OX=2184346 GN=tgt PE=3 SV=1
FMNWDKPILTDSGGYQVFSLETNRTISKEGVTFKSHLDGSLHMFTPKSVVDLQLGFNSDIMMPLDICTPYPSEKEQVDQDLEQTYLWERDAREYWDQTDQKNLLFGLVQGGAFKDLRQKSAEQLIGLDFPGYAIGGLSVGEPRPILEEMTEYTTALLPKEKPRYLMGVGLPENMKKSIDSGVDMFDCVAPTRLARHGQFFLGLDRINIKKAEFREDKEPLDPHCSCYACQNFSRSYIRHLFVANELLSHILLSTHNLHALIHLVKGYRQAILDGSD

SEQ ID NO: 53351 - protein, 358 aa, Marinamargulisbacteria bacterium
  misc_feature (1)..(358): tr|A0A328QZL0|A0A328QZL0_9BACT Queuine tRNA-ribosyltran sferase OS=Candidatus Marinamargulisbacteria bacterium SCGC AG-333-B06 OX=2184342 GN=tgt PE=3 SV=1
MIHYSFTIKQRCSKTNARLGELRTPHGILETPVFMPVGTQATIKSLTPDQIISTKSQILLANTYHLSLRPGIDIIKKHGGLHSMMNWHGPILTDSGGYQVFSLAKRRQVDPNGITFQSHIDGSLVRFTPKHVIDLQCGFNSDIMMVLDICTAYGKTKEQTARDLILTHQWAKESQQYWFDKHIANWCFAIVQGGFYMDLRKESADFLSSLNFPGYAIGGLSVGEPQALLHDYITNCAPLLPDNKPRYVMGIGLPENIKVAIENGIDMFDCVIPTRIARHGQFFHENERINIKKEMFKDDLAPLSDHCSCYTCQHFSRSYIRHLFIAKEMLAATLLTIHNIFYLNHYVEMIKNKIFNNS

SEQ ID NO: 53352 - protein, 369 aa, Marinimicrobia bacterium
  misc_feature (1)..(369): tr|A0A2M7U5Q3|A0A2M7U5Q3_9BACT Queuine tRNA-ribosyltran sferase OS=Candidatus Marinimicrobia bacterium CG_4_10_ 14_0_2_um_filter_48_9 OX=1975522 GN=tgt PE=3 SV=1
MQFKLHAVDRSGARRGEFKTAHGIVQTPTFMPVGTAGFIRSTTPRDIAETGAEVILANTYHMSLGDRLQTVVRAGGLHNFMGWQKTILTDSGGFQVFSLPDTTITDDGVSFSFEESGERIELTPEKSMLIQRELGSDIVMAFDECVGFPADEAEVRKSIHHTTEWGKRCREVELQDHQFLFGIVQGGTYQALRRQSAQEIAKIDFDGFAIGGVSVGEGHQLLREITGMTAPLLPPKKPRYLMGVGLPEDILAAVHRGVDMMDCVIPTRYARQGTLFTRTGKLRIMDKTFRKDKYPLDTKCQCYTCQTYTRMVLRYLFFTKDPLAETLATIHNVTFYEDLMGDIRKAIENNDYENFQSRWLNAYLKKGQK

SEQ ID NO: 53353 - protein, 260 aa, Marinimicrobia bacterium
  misc_feature (1)..(260): tr|A0A4Y8I1V0|A0A4Y8I1V0_9BACT Queuine tRNA-ribosyltran sferase (Fragment) OS=Candidatus Marinimicrobia bacteri um MT.SAG.3 OX=2552982 GN=tgt PE=3 SV=1
HVDGTKHRFTPSIVMNVERTIGADIIMAFDECAPYPSSLDYVSKAERRTAKWAALSKESFESSKPFYGDEQFLFGIVQGGTYKDLREKSAKEIVSLGFDGYAVGGLAVGEPEDIMYEICGFNTSLLPNDKPRYLMGVGRPKDLIECVARGIDMFDCVIPTRNGRKGTVYTKSGKLNLNNSKYKTDKDPIEEGCTCSSCKSYSKGYLRHLFRMKETLAGRAATLHNLHYFNTLMRDMRKAIVGGNFDDFRAEFYSEIGEKE

SEQ ID NO: 53354 - protein, 375 aa, Melainabacteria bacterium
  misc_feature (1)..(375): tr|A0A1F6RB55|A0A1F6RB55_9BACT Queuine tRNA-ribosyltran sferase OS=Candidatus Melainabacteria bacterium RIFOXYA 2_FULL_32_9 OX=1801611 GN=tgt PE=3 SV=1
MLSQQKYFDYQLLKKCSNSHARAGVFQTPHGVINTPVFMPVGTNSAVKMMTQDHLYATQAEIILSNSYHLFLRPGHKLIEKAGGLHKWMNWNKPILTDSGGFQVFSLSDLRNLTEEGVTFKDPKDGRSYFMSPEISMEVQNSLGADIIMAFDECAPYPCDYAQAKEAMERTHRWLERCLKSHKREDQALFPIVQGSVYDDLRAESARVIASVNSHGYAIGGVSVGEPKELKNRIVEITAPLLPENKPRYLMGVGTPEDLLDGVLRGIDMFDCVMPTRIARHGSFFTPWGRGVIKNKEFEEDFSPLVEGCDCYACQNHSKAYIRHLFRVKEATASILMTIHNIHYLVKLMHDARSAILNDEFAEFYKEKMSLIESK

SEQ ID NO: 53355 - protein, 383 aa, Melainabacteria bacterium
  misc_feature (1)..(383): tr|A0A431LDI8|A0A431LDI8_9BACT Queuine tRNA-ribosyltran sferase OS=Candidatus Melainabacteria bacterium OX=2052 166 GN=tgt PE=3 SV=1
MSTALKFELEAVCPWSGARAGRFTTPHGVVETPVFMPVGTNGALKAVTFDQVRNCDAQIVLSNSYHLYLRPGHELVREAGGLHKFISWDKPILTDSGGFQVFSLDMLRRITEDGVFFKDHRTGREHFIGPAKSMEIQNYIGADIIMAFDDCVKNPATYDEALASMERTHRWLEKCVEHHARKDDQALFGIVQGSMYEELRARSVDAVTGFDLPGFAIGGVAVGEDRSTIERIVKYTTPLLPTDKPRYLMGVGTPWDISYAIRCGIDMFDCVSPTRLARHGAAFTRQGRISLRTSKYNKDFTPLEDDCECFTCKMHTKAYLHHLFRVREQAGGTLLSIHNIHHLIRQAVECREAILNGTFKEYFEKQIVLHEQDQEARAAAQTR

SEQ ID NO: 53356 - protein, 376 aa, Methylomirabilis oxyfera
  misc_feature (1)..(376): tr|D5MIU8|D5MIU8_9BACT Queuine tRNA-ribosyltransferase OS=Candidatus Methylomirabilis oxyfera OX=671143 GN=tgt PE=3 SV=1
MTFDLLKTDPTTGARRGRLTTPHGTVETPVFMPCGTGGAVKALTPYELEVEGVQLALCNTYHLYLRPGHRLIEELGGLHRFMAWSGSILTDSGGFQVYSLARLRQISEEGVRFRSHLDGSLHFLSPELAIQVQESLGADIIMPLDECAPYPSTTDYLQRSLELTLTWAERSRTAHSDGQSGLFGILQGGTDKALREQAATALQKIGFDGYALGGLAVGEPKAVMYETVAHVTPLLPADQPRYLMGVGTPEDLVENVMRGVDMFDCVMPTRHGRTGSLFTSQGRINIKGAAYTSDERPADPACDCYTCRHFSRAYLRHLFMTGEILGLRLNTLHNLHFYVTLMRQIRQAIEAGDLAAFRTRFLEQIGTLNHDNTIVS

SEQ ID NO: 53357 - protein, 375 aa, Methylomirabilis lanthanidiphila
  misc_feature (1)..(375): tr|A0A564ZGB5|A0A564ZGB5_9BACT Queuine tRNA-ribosyltran sferase OS=Candidatus Methylomirabilis lanthanidiphila OX=2211376 GN=tgt PE=3 SV=1
MTFELLKIDTATGARRGRLTTPHGTVETPVFMPCGTGGTVKALTPHELEIEGVQLALCNTYHLYLRPGHRLIEKLGGLHRFMAWSGSILTDSGGFQVYSLAQLRRISDEGVSFRSHLDGSLHVLSPELAIQIQQSLGADIIMPLDECAPYPSTIDYLQRSLELTLQWAERSRAAHPNGQPALFGIVQGGTDKALREQAATALQQIGFDGYALGGLAVGEPKAVMYETVAHVTPLLPADRPRYLMGVGTPEDLVENVMRGVDMFDCVMPTRHGRTGSLFTSLGRINIKGAVYASDERPPDLDCDCYTCRHFSRAYLRHLFMAGEILGLRLNTLHNLHFYVTLMRQIRQAIEDGSLAAFRTRFLEKTKTSNHNDTAA

SEQ ID NO: 53358 - protein, 368 aa, Methylopumilus rimovensis
  misc_feature (1)..(368): tr|A0A5B8DF79|A0A5B8DF79_9PROT Queuine tRNA-ribosyltran sferase OS=Candidatus Methylopumilus rimovensis OX=2588 535 GN=tgt PE=3 SV=1
MQFNLIQKDGEARRGELKLQHGTVQTPVFMPVGTYGAVKSLSPQDLESIGFEIILGNTFHLWLRPGLETISTFKGLHDFIQWRRSILTDSGGFQVWSLGKMRKITEEGVEFKSPINGDSCFLSPEESMRIQKALNSDIVMIFDECTPYPASYEEAKTSMQLSLKWAYRSKVAHESNQNALFGIIQGGMFEDLREHSLDELKKINFDGYAIGGLSVGEPKEEMQKVIAFIAPKMPEDKPRYLMGVGTPEDIVEAIAHGIDMFDCVMPTRNARNGWLFTRYGDLKLKNTQYKNDTNPIDSDCDCYTCQNFSRAYLHHLFRLGEMLGSRLNTIHNLFYYQKIVQEARLAIETGTFETYRKIFHQNRKRGIQ

SEQ ID NO: 53359 - protein, 368 aa, Methylopumilus universalis
  misc_feature (1)..(368): tr|A0A5B8CYD6|A0A5B8CYD6_9PROT Queuine tRNA-ribosyltran sferase OS=Candidatus Methylopumilus universalis OX=258 8536 GN=tgt PE=3 SV=1
MQFKLIKKDGEARRGELKLQHGTVQTPVFMPVGTYGAVKSLSPQDLESIGFEIILGNTFHLWLRPGLETISAFKGLHDFIQWHRSMLTDSGGFQVWSLGKMRKITEEGVEFKSPINGDTCFLSPEESMRIQKTLNSDIVMIFDECTPYPASHEEAKASMELSLKWAYRSKVAHETNKNALFGIIQGGMFEDLREHSLDELKKINFDGYAIGGLSVGEPKEEMRKVISFIAPKMPEEKPRYLMGVGTPEDIIEAIAHGIDMFDCVMPTRNARNGWLFTKYGDLKLKNTQYKNDTNPIDSDCGCYTCQNYSRAYLHHLFRIGEMLGSRLNTIHNLSYYQKIIQEARVAIENGTFETYRKIFHQNRQRGIQ

SEQ ID NO: 53360 - protein, 370 aa, Methyloumidiphilus alinensis
  misc_feature (1)..(370): tr|A0A2W4R3K8|A0A2W4R3K8_9GAMM Queuine tRNA-ribosyltran sferase OS=Candidatus Methyloumidiphilus alinensis OX=2 202197 GN=tgt PE=3 SV=1
MQYHLTNTDGKARLGELVFPRGKVATPAFMPVGTYGTVKALTPEEVRSIGAEIILGNTFHLMLRPGMEVIRAHGGLHGFMHWGGPILTDSGGFQVFSLGGMRKITEAGVKFRSPVDGSPIFMGPEESMAVQRDLGSDIVMIFDECTPYPATYAEARASMELSLRWAERSKAAHSDNLSALFGIVQGGVYDDLRLESSNGLQQIGFDGFAIGGLSVGEPKEDRRRVLETLLPHLPNDKPRYLMGVGTPEDIVEAVCLGLDMFDCVMPTRNARNGHLFTRQGVIRIRNSQYQNDTRPLDETCGCYTCRNYSRAYLRHLDKCGEMLGARLNTIHNLYYYQWLMAGLREAIGSGELKEFAVDFYQQRRNVAPDV

SEQ ID NO: 53361 - protein, 395 aa, Microgenomates bacterium
  misc_feature (1)..(395): tr|A0A3A4Z808|A0A3A4Z808_9BACT Queuine tRNA-ribosyltran sferase OS=Candidatus Microgenomates bacterium OX=20933 73 GN=tgt PE=3 SV=1
MGKFSFEVLKEDKNSRARTGIIKTLHGQIETPAFVPVGTQATVKSIDNRELKEIGVQLFFVNTYHLYLRPGLEMIKNFGSLHEFIGWKGPLITDSGGFQVFSLGRRNTKRRLGIIHEETEPALVKITEDGVSFRSHLDGSKHFFSPEFSIEAQSILGADLIIAFDECTYYPATKEYAKSAMERTHRWALRSLEAYKKVGRDYQALYGVIQGGVYRELREQSAKYIVSLDFPGIAIGGVSVGESKKEMQEVLDWTVPYLPDKKPRHLLGVGEIDDIFALVERGIDSFDCVMPTRLGRMGHLLCRPYKDTKNEVKYSYDVTKPAFKASKEPLEKDCGCAVCRNYSRGYLNHLFKSNELLAYKLATYHNLSFMEKLVRKIRESINQGSFHKLKSEWVL

SEQ ID NO: 53362 - protein, 455 aa, Microgenomates bacterium
  misc_feature (1)..(455): tr|A0A3A4VTK4|A0A3A4VTK4_9BACT Queuine tRNA-ribosyltran sferase OS=Candidatus Microgenomates bacterium OX=20933 73 GN=tgt PE=3 SV=1
MDSFKFKILKKDTRSKARVGEIHTAHGVINTPAFVAVGTRATVRGLTPEDLKEVGVELLFGNTYHLHLTPGEETVKNFGGLGKFMNWNGPTITDSGGFQVFSLGRKSFGRLSHVADDARLGDYNSQTQTRSLNESRLQTKTLSGEESGSTFSSSASGQAPNGEGELNLVKIKDDGVDFRSHIDGSLHTFTPEVSIGIQQKLGADIILAFDECAPHPSTYEYTKEAMERTHGWAVRCLTQHHSQNSKLKTQKSKMQVKTQNFEQALYGIIQGGIYKDLREESAKFISALDFDGIAIGGVSVGESKKEMRDVIDWVWPYLPENKPRHLLGIGEIDDIFDAVSGGMDTFDCVIPTRFGRYGIILASPPEGNAGNRFRFDINKSIYAKDQSTIAKGCGCYVCKNFTRAYLHHLFRTKELLAYRLASYHNLYFTINLVKEIREAIMDDSFEKMRKDWLGN

SEQ ID NO: 53363 - protein, 378 aa, Micropelagos thuwalensis
  misc_feature (1)..(378): tr|U2WV75|U2WV75_9PROT Queuine tRNA-ribosyltransferase OS=Candidatus Micropelagos thuwalensis OX=1397666 GN=tg t PE=3 SV=1
MDFILHSKDKNARRGKVITPRGEIRTPAFMPVGTAGTVKAMYMEQVKDLGADIVLGNTYHLMLRPGAEEVAELGGLHDFMKWEGPILTDSGGFQVMSLSKLRKMSEEGVNFQSHIDGKSYMLTPERSIEIQTLLGANIRMILDECTPFPATEKQARDSMALSTRWAERSKKAFQLYDKGEGDALFGIVQGGVYENLRLESVSNLLDIGFDGYAVGGLAVGEGQEEMLKVLEFTVPALPEDKPRYLMGVGTPEDLVLSVAKGIDMFDCVMPTRAGRHGLAYTRKGKVNLKNARHANDPRPLDEECDCPAASQYSRAYLHHLVRCGEYLAAMLLTWNNLHYYQSLMQEMRQNIEAGSFEAFVAAFYRDQNEGDIPPFEKA

SEQ ID NO: 53364 - protein, 365 aa, Microthrix parvicella
  misc_feature (1)..(365): tr|A0A359A5F5|A0A359A5F5_9ACTN Queuine tRNA-ribosyltran sferase OS=Candidatus Microthrix parvicella OX=41950 GN =tgt PE=3 SV=1
MRLQLDIAATDGAARTGRVATAKGGFQTPVFMPVGTRGTIRAATTAQLADLGAEFMLGNTYHLMLRPGADVVAELGGLGRFAGWDGHLLTDSGGFQVFSLSPKVTDEGVRFKSVYDGSAVHCTPESIVSTQELLGADIQMVLDVCLPLPAERGDLARAVRRTAEWAARARSAHSRREDQALFGIVQGGVDADLRRESAQRTVALDFDGYAIGGLSVGEERGLMMHGLEAAIAELPADQPRYLMGVGDPLSMVEAVARGVDMFDCVLPTRLGRHGTLLTGRGRVNAKRAEFARRDDPVDPECPCKVCGTYSAGYLRHLLVVGEPAGRTLCVLHNLAWMLGFVDRMRTSISRGEFGALRAEVANFWA

SEQ ID NO: 53365 - protein, 365 aa, Microthrix parvicella; identical to SEQ ID NO: 53364
  misc_feature (1)..(365): tr|R4Z2L4|R4Z2L4_9ACTN Queuine tRNA-ribosyltransferase OS=Candidatus Microthrix parvicella RN1 OX=1229780 GN=t gt PE=3 SV=1

SEQ ID NO: 53366 - protein, 374 aa, Mikella endobia
  misc_feature (1)..(374): tr|A0A143WQA0|A0A143WQA0_9ENTR Queuine tRNA-ribosyltran sferase OS=Candidatus Mikella endobia OX=1778264 GN=tgt PE=3 SV=1
MNYKLLKTIGQARRGRLIFDRGLVETPAFMPVGTCGTIKGITPEELKEIGAQIILSNTFHLWIQPGQEVIKLHDNLHNFMNWHSPILTDSGGFQVFSLSKLRKITEDGVYFRNPINGNAIFLNPEKSMEIQYDLDSDIVMIFDECTSYPSNCSYVKQSMERSLRWAVRSHQRFKELKNTNALFGIIQGGIYEKLRDLSVENLVNIGFDGYAVGGLAVGEPKEDMYRIIAHICLQIPVNKPRYLMGVGKPEDLVEGIRRGIDIFDCVIPTRNARNGYLFVTNGILKIRNAMYKHDRAPLDVECDCYTCHNYSRAYLHHLNRCHEMLGARLNTIHNLRYYHRLMANIRHALDEDKLDDFIVEFYHRKGKLVSSFSY

SEQ ID NO: 53367 - protein, 366 aa, Moanabacter tarae
  misc_feature (1)..(366): tr|A0A2Z4AH70|A0A2Z4AH70_9BACT Queuine tRNA-ribosyltran sferase OS=Candidatus Moanabacter tarae OX=2200854 GN=t gt PE=3 SV=1
MSGLEARAGRLQTQHGDVATPIFMPVGTQASVKSLTPVHLHEVGARVILGNTYHLNLRPGSDTIHKLGGLHQFMGWGGPILTDSGGYQVFSLSRLRKITDQGVFFRSHIDGEVVFLGPVEVMNIQRNLGSDIAMVLDECSPSQSKRDVCAQAVERTVYWADRCLTIANETGFRKEGGQVFGIVQGSVFEDLRTECSKALVSMGFDGFAIGGVSVGESESKMFKQVKWVSSQVPKDYPLYVMGVGTPPQMLRMVAMGVDMFDCVMPTRAARHGMVFTPSGPINISNSKYREDDRPLVDGVDNYTCRNFSRSYLRHLVTSKELLAHTLLSIHNLHFYIEIMRQARQHIIEGDFDLWHKEWISIYEGNK

SEQ ID NO: 53368 - protein, 368 aa, Moduliflexus flocculans
  misc_feature (1)..(368): tr|A0A081BR13|A0A081BR13_9BACT Queuine tRNA-ribosyltran sferase OS=Candidatus Moduliflexus flocculans OX=149996 6 GN=U14_05118 PE=3 SV=1
MKFTINAEAKNSLARAGEFETTRNVLHTPCFMPVGTHGAVNGMLPSALLDMGAEIIVSNAFRLSEHPGKAIISKYEGLHEFMGWPRTILTDSGGFQSRLREHAINEKGIQFYDENAEEIWTPEDAIAMQIVLNSDFVMPLDICVELPTTYPQAKDAMERTLRWAKRCKHAFQGRTGQILFGIVQGAIYPDLRQKCVDALEQLGFPAYAIGGLNVGESPEDYRNALTITSEMLPREKLRYIMGVGRPEAMLEAVNGGVDIMDSIIPTKYAREKTLFTYRGTINLGKKKQYRKDKYPIDPNCQCYTCRTVSRAYLYHLYHTTTTTAIIYAGIHNTTFCVRLLQDARQAILEDRFDRFYRDFMANYTKNDA

SEQ ID NO: 53369 - protein, 382 aa, Moduliflexus flocculans
  misc_feature (1)..(382): tr|A0A081BNW4|A0A081BNW4_9BACT Queuine tRNA-ribosyltran sferase OS=Candidatus Moduliflexus flocculans OX=149996 6 GN=tgt PE=3 SV=1
MTTFRVTQTDAHSHARLGTFTTAHGDIPTPIFMPVGTAGTVKAMLPTMLKEIDAKIILGNTYHLYLRPGHELVRQLGGLHKFMVWDRPILTDSGGFQVYSLGDLRKITDEGVTFRSHLDGSLHTLSPEISIEIQQALGSDIMMCFDECTPYPADRGYAAKSLALSMAWAARCKRCHGEAQQTPERLVNQGQLLFGIAQGGMYADLRKQSVEQLAEIGFDGYAIGGLSVGEPKPLMFEVLEQTTPLLPQDAPRYLMGVGTPLDLVRGVAMGVDMFDCVLPTRNARNGALFTRRGQLSIKQAQYRDDPRPIDEACVCYTCRNFSRAYLRHLFMSKEILSSMLNTIHNLHFYLDLMSRIRNAITESAFHEFHAAFTREYVEEEGA

SEQ ID NO: 53370 - protein, 386 aa, Moranbacteria bacterium
  misc_feature (1)..(386): tr|A0A0G0T8N0|A0A0G0T8N0_9BACT Queuine tRNA-ribosyltran sferase OS=Candidatus Moranbacteria bacterium GW2011_GW C2_40_12 OX=1618699 GN=tgt PE=3 SV=1
MHGTVKTPFFLPIATKGAVKNLSPEELRDLGAEIILGNTYHLWLRPGEKIVKKAGGLHRLMNWDRPILTDSGGYQVFSLSNKKGVRPSKSAGVGGKRSASPLNGVKISEKGVEFRDPLDGKKYFMTPEKSIDIQLALGSDVIMVLDECPPYPCSREYARMSLERTTRWAERCKKYFDKNFHKSSAFSFRERSSRNSSKPSFRPLLFGIVQGSVYKDLRQESARQLLKLGFDGYAVGGVAVGEPREKMKNILEWILPMLPKEKPRYLMGLGKPEEIVFAARLGIDMFDCVIPTRNARHGSLFIWSKKYDKSRALVRRFYRTINITNQKFKKDFSPVDMICKCHTCRNYSRAYLRHLFSVGEPLAGRLATIHNLKFYLDLMKILQNRN

SEQ ID NO: 53371 - protein, 387 aa, Moranbacteria bacterium
  misc_feature (1)..(387): tr|A0A349PIH5|A0A349PIH5_9BACT Queuine tRNA-ribosyltran sferase OS=Candidatus Moranbacteria bacterium OX=204521 7 GN=tgt PE=3 SV=1
MFKLISETNTRRKGVIKTKNGEIKTPFFMPDATRGFVKSISGEDLKKSGVQPMVVNTYHLYLNPGMETIKKSGGINNFMNWSYPLLSDSGGYQVFSLIHKNPKLGKITEDEVIFRSPVDGAKHILTPEKAIQIQFDLGVDMMVCLDDVPPNNYPEEKIKEAVERTIIWAQRCKIEYEKQIKKRKISDSERPLLFGVIQGGKYGDLRKYCADELVRLDFDGYGFGARHVDENGVFMEDMIRETAQMIPKDKLRFALGVGTPEDIARCVKMGWDIFDCVIPTREGRHGRLFVWDKQSEFSIFNFQFSNNFEISNSKIQKFYNTININNEKFKEDFSSLDTHCDCELCENHSKSYLHHLFAIKDPLAQRLASMHNLKFYMDLMKELRYEK

SEQ ID NO: 53372 - protein, 373 aa, Muproteobacteria bacterium
  misc_feature (1)..(373): tr|A0A1F6TPJ2|A0A1F6TPJ2_9PROT Queuine tRNA-ribosyltran sferase OS=Candidatus Muproteobacteria bacterium RIFCSP HIGHO2_01_FULL_65_16 OX=1817764 GN=tgt PE=3 SV=1
MKFDLLNTDGAARRGRMTFDRGAVETPAFMPVGTYGTVKAMTPEELRECGAEIILGNTFHLMLRPGVEVIKAHGGLHRFMHWDGPILTDSGGFQVWSLGKLRKLTEQGVWFQSPVDGARIFLGPEESIAVQQAFAADIIMVFDECTHHPATEPEARASMELSLRWAERSKIAHGAHPSALFGIVQGGMYEHLRDISLTGLKQIGFDGYAVGGLSVGESKDEMFRIVAHIAPRMPADRPRYLMGVGTPEDLVEAVKRGMDMFDCVLPTRNARNGWLFTHRGSLKIRNSAHARDTAPVDDRCGCYTCRNYSRAYLRHLQRANEILGARLATIHNLYYYQSLMRGLREAIAEKRLDDFSEKFYRMRRPDGRAELEI

SEQ ID NO: 53373 - protein, 417 aa, Muproteobacteria bacterium
  misc_feature (1)..(417): tr|A0A1F6V948|A0A1F6V948_9PROT Queuine tRNA-ribosyltran sferase OS=Candidatus Muproteobacteria bacterium RBG_16 _60_9 OX=1817755 GN=tgt PE=3 SV=1
MKFELLATDGAARQGRMIFDRGAVQTPAFMPVGTYGTVKGMTPEELRAIGAEIILGNTFHLMLRPGVDVVRSHGGLHGFMHWDGPILTDSGGFQVFSLGAPRAAQGRTSVAEGSAPMATKITEEGVHFQSPVDGAPVFLGPEQAIAVQQGLGADIIMVFDECTPYPATEAEARASMELSLRWAQRCRAAHGNGAGALFGIVQGGMYTQLRDASLAGLTQIGFDGYAIGGLSVGEPKAEMFRMIAHIAPRMPADRPRYLMGTGTPEDLVEAVRGGMDMFDCVLPTRNARNGWLYTAGGDLKIRNSRYARDVGPIDPSCQCYTCRNYSRAYLRHLQQANEILGARLATIHNLHYYQALMRDLRAAISQKTLDDFVEKFYRMRRRGFPADNGRSPSDSGSDPDGAAEPAPDAEPPLGLPS

SEQ ID NO: 53374 - protein, 405 aa, Nanopelagicus limnes
  misc_feature (1)..(405): tr|A0A249JX23|A0A249JX23_9ACTN Queuine tRNA-ribosyltran sferase OS=Candidatus Nanopelagicus limnes OX=1884634 G N=tgt PE=3 SV=1
MSFSFKVEKTLKGALGRSGVITTPHGQIKTPAFIPVGTKATLKSVLPESLKDLGAQAVLANSYHLYLQPGPEIVDQAGGLAKFMNWQGPTFTDSGGFQVLSLGVGFKKVIAMDENTFQADDVIADDKERLAHVDDDGVTFKSHLDGSLHRFTPEVSMQVQHQIGADIIFAFDECTTLHNTRSYQEKALERTRLWAIRCLKEHDALTKKREGKPYQALFGVLQGAQYEDLRRKAAKDLALMNVDGVTFDGFGIGGALDKQTLGDILKWVNEELPVEKPRHFLGIGEPDDLFVGVENGADTFDCVAPSRQARTSSVFTKDGRLNISNAPHKNEFFPIEKDCTCYTCRNYTRAYLCHLFRAKEMVAATLATIHNQHFIVGLVDQMRLSIEDGTFFDFKAQFMARYYGK

SEQ ID NO: 53375 - protein, 407 aa, Nanopelagicus abundans
  misc_feature (1)..(407): tr|A0A249L3N9|A0A249L3N9_9ACTN Queuine tRNA-ribosyltran sferase OS=Candidatus Nanopelagicus abundans OX=1884916 GN=tgt PE=3 SV=1
MGSEFKFKVGTSLKNRLGRTGQISTPHGVIKTPAFIPVGTKATLKSVLPESLKELGSQAVLANAYHLYLQPGSELIDRAGGLAKFMNWNGPTFTDSGGFQVLSLGVGFKKVIAMDENTFQADDVIADDKQRLAHVDDDGVTFKSHLDGSLHRFTPEVSMQVQHHIGADIIFAFDECTTLHNTRSYQEKALERTRLWAQRCLSEHDRLTKARSDKPYQALFGVIQGAQYEELRRKSAKDLATMSQSGISFDGFGIGGALDKQTLGDILKWVNEELPADKPRHFLGIGEPDDLFVGVENGADTFDCVAPSRQARTSSVFTKDGRVNISNAPHKDEFFPIEKDCTCYTCRNYTRAYLCHLFRAKEMVAATLATIHNQHFIVGLVDQMRESIEKGTFFEFKDAFMARYYKK

SEQ ID NO: 53376 - protein, 382 aa, Nealsonbacteria bacterium
  misc_feature (1)..(382): tr|A0A2M7UVC2|A0A2M7UVC2_9BACT Queuine tRNA-ribosyltran sferase OS=Candidatus Nealsonbacteria bacterium CG_4_10 _14_0_2_um_filter_39_15 OX=1974681 GN=tgt PE=3 SV=1
MVNFKVIKKAKNSQARLGVLKTSHGLVETPALVPVATQAVVKTLTAEEVKETKSQILICNTYYLHLRPGEDVVAKVGGLHQFMNWRGPLMTDSGGFQVFSLGFGKDFGVGKILKERRKEEIGYGQQPKLLKITDRGVVFRSLLDGKKTFLGPKESIKIQEKLRADIIFAFDECTSPIADYKYTKKSLERTHQWAIKSLETLNFKPKTQSLFGIVQGGRYKDLRIESAKFIGALPFDGFGIGGEFGADKKKMIQMLNWTTKELPVDKPRHLLGIGYLEDIPKIIKTGIDLFDCNVPTHYARRGVAFTSQGELDLSKTRFLKDKAPLDKKCSCSVCQNYSRAYIAHLFRAKEITALKLLTFHNLYFFNAFVEKIREKIKNGKLS

SEQ ID NO: 53377 - protein, 402 aa, Nealsonbacteria bacterium
  misc_feature (1)..(402): tr|A0A1G2EQB4|A0A1G2EQB4_9BACT Queuine tRNA-ribosyltran sferase OS=Candidatus Nealsonbacteria bacterium RIFCSPL OWO2_12_FULL_39_31 OX=1801676 GN=tgt PE=3 SV=1
MIDFKILKKSKKSKARLGILRTKHGVVETPCLVPVATQAVVKTLNSEEVLKTKTQILIANSFHLHLKPGEKIVEKSKGLHKFMNWPKPLMTDSGGFQVFSLGFGRDFNIGKIMAPPATFRKRASSLAPLPASLRVATRAGDLPLIKEGGHPKSLRINNDGVFFKSPIDGREIFLGPRESIKIQEALGADIIFSFDECTPPNADYDYTKKSLLKTHKWAEICIKTKESEQSIFGIVQGGKYYDLREESARFIASLDFDGFGIGGEFGDDKKIMKNMIARVVNNLPQERPRHLLGIGHLEDIENIIRSGVDFFDCTVPTHYARRGIAFTKTGKLNLSQAKFLNDEKPLDLTCSCSVCWNYKRNYISHLMKAKEITGLALLTFHNIYFFNSFVEGIRKKIKTGKI

SEQ ID NO: 53378 - protein, 396 aa, Neoehrlichia lotoris
  misc_feature (1)..(396): tr|A0A0F3NLT4|A0A0F3NLT4_9RICK Queuine tRNA-ribosyltran sferase OS=Candidatus Neoehrlichia lotoris str. RAC413 OX=1359163 GN=tgt PE=3 SV=1
MYKNFSFTISCQVNNSRVGIINTPHGQIHTPAFTFCATKAAIKSLDIRTVKECNTQIILSNTYHLMLQPGENIIQKLGGLHKILGWNKPILTDSGGYQIFSLGYGSVSDEIKGKRNNKRPKTLLEINENGAIFRSYINGQKYYLTPEKSINIQKKLGADLIIVLDECTPFNINYEYTKQSMHMSNRWAIRSFEEFKKNYHGTQALYGVVQGGIYQDLRKTSCDFLNNMSFFGYAIGGSLGASKQQMYNTVSFTMEHLNKNKPIHLLGIGNINDIFYGVKHGIDTFDCVHPTRIARHGAALVKVKNRCENTKHKEYINLYNSKFQEDLSPIEDDCLCFTCLNHSRGYIHHLLKAQELLAYSLITAHNIYFMNNLMQNIRNAIINNTFEQEKNNWVYM

SEQ ID NO: 53379 - protein, 371 aa, Nitrosoglobus terrae
  misc_feature (1)..(371): tr|A0A1Q2SLL1|A0A1Q2SLL1_9GAMM Queuine tRNA-ribosyltran sferase OS=Candidatus Nitrosoglobus terrae OX=1630141 G N=tgt PE=3 SV=1
MKFELLAKSRAARRGRLSFPRGTIETPAFMPVGTCGTVKAMTPEELIAGGAEIVLGNTFHLMLRPGVDVIMEHGGLHGFMHWDRPILTDSGGFQVWSLGKMRNITEHGVSFRSPIDGRLVFLGPEESMAIQRGLGADIVMIFDDCTAYPVDEKVARYSMDLSLRWAARSQEAHGDCQAALFGIIQGGMYEHLRDQSLQGLITFGFDGYAIGGLSVGEPKEDMLRILTHITPQMPVDKPRYLMGVGRPEDIVEAVWRGIDMFDCVMPTRNARNGHLFVQEGIVRIRNSRYRNDVRPLDDSCTCYTCRHYSRAYLHHLDKSREILGARLNTIHNLYYYQQLMNQLGKAIEENRLEEFVTEFYAMRVPSLLPVT

SEQ ID NO: 53380 - protein, 399 aa, Nitrospira inopinata
  misc_feature (1)..(399): tr|A0A0S4KWU3|A0A0S4KWU3_9BACT Queuine tRNA-ribosyltran sferase OS=Candidatus Nitrospira inopinata OX=1715989 G N=tgt PE=3 SV=1
MIQYRLQQQDRQSKARVGRLCTARAVIDTPTFMPVGSLGPVKGLAPDDLQLMGFRLLLNNAYHLYLRPGHKIVAEMGGLHAFTGWPGAILTDSGGFQVFSLAKLCKVTDEGVVFQSHIDGSSHFITPEIAVEIQEALGADIIMAFDHCVALPASREAVVDSVRRTKLWAERCLAGRRRNDQALFGIVQGGLDADLRVRSARDLTAMGFDGYAVGGLSVGESKAEMYAMLDATVPELPENKPRYLMGVGYPEDLIEGVFRGIDLFDCVAPSRHGRTGSLFTTAGRVVIKQARYARDERPVDPDCGCPVCGRYSRAYLHHLFSVKEMLASRLNTIHNLWYFSDLMRRVRAAVEQGTFSEFRAAFYRSHAQEPSSAAAREDPEVVAAGDSVHNKERGDRSLC

SEQ ID NO: 53381 - protein, 392 aa, Nitrospira nitrosa
  misc_feature (1)..(392): tr|A0A0S4LD02|A0A0S4LD02_9BACT Queuine tRNA-ribosyltran sferase OS=Candidatus Nitrospira nitrosa OX=1742972 GN= tgt PE=3 SV=1
MMQYHIHQRDSHSKGRIGRLTTGHGTIETPAFMPVGSLGPVKGLEPQDLQELGFGLMLNNAYHLYLRPGHKIVADMGGLHAFTGWSGAILTDSGGFQIFSLAKLCAITDDGVTFQSHIDGSTHVITPEKAIEIEEALGADIMMVLDQCVALPAGREVVQEGVRRTRLWAERCQAARRRTDQALFGIVQGGLEADLRVLSARDLVTLGFEGYAIGGLSVGESKADMYRMLDVTVPELPESKPRYLMGVGLPEDLVEGVARGVDLFDCVVPSRHGRTGSLFTTSGRVVIKQAKYAGDERPIDSDCGCPVCARYSRAYLHHLFMVKEMLGARLNTIHNLWYFAELMRGIREAVRENKFPAFREAFYHHRDRQAAGERSGEGEPNTHQECENSYQT

SEQ ID NO: 53382 - protein, 367 aa, Nitrotoga sp.
  misc_feature (1)..(367): tr|A0A3E1DAP5|A0A3E1DAP5_9PROT Queuine tRNA-ribosyltran sferase OS=Candidatus Nitrotoga sp. MKT OX=2184311 GN=t gt PE=3 SV=1
MKFCLNATDGSARRGTLSLAHGIVETPAFMPVGTYGTVKAMSPIELREIGAQIVLGNTFHLWLRPGLDVIEAHGGLHGFMGWDGPILTDSGGFQVFSLGTLRKITEEGVRFQSPVNGDKCFLTPEESIRIQKVLNSDIVMIFDECTPYPADENRAADSMHLSLRWAERSKHAHQGNINALFGIVQGGMFESLRDESLRELVNIGFDGYAIGGLSVGEPKEDMLRILKHTSPQLPIDKPRYLMGVGTPEDLVAAVAYGIDMFDCVMPTRNARNGMLFTRHGDIKIKNAKYCLDIQPVDKQCSCYTCRNFTRAYLHHLHRIGEILGARLNTIHNLHYYHELMSEIRAAIMIRQFDEFVTRFRQARASSC

SEQ ID NO: 53383 - protein, 367 aa, Nitrotoga sp.
  misc_feature (1)..(367): tr|A0A3E1DJM9|A0A3E1DJM9_9PROT Queuine tRNA-ribosyltran sferase OS=Candidatus Nitrotoga sp. SPKER OX=2184312 GN =tgt PE=3 SV=1
MKFCLNTTDGFARRGTLSLAHGIVETPAFMPVGTYGTVKAMSPMELREIGAQIVLGNTFHLWLRPGLEVIEAHGGLHGFMGWDGPILTDSGGFQVFSLGALRKITEEGVRFQSPVNGDKCFLTPEESIRIQKVLNSDIVMIFDECTPYPADENRAADSMHLSLRWAERSKHAHAGNTNALFGIVQGGMFENLRDESLRELVNIGFDGYAIGGLSVGEPKEDMLRILKHTSPQLPVDKPRYLMGVGTPEDLVAAVAHGIDMFDCVMPTRNARNGMLFTRHGDIKIKNAKYRLDTQPLDQQCICYTCRNFTRAYLHHLHRIGEILGARLNTIHNLHYYHELMSEIRAAITIHQFDQFVTRFRQARASSC

SEQ ID NO: 53384 - protein, 381 aa, Niyogibacteria bacterium
  misc_feature (1)..(381): tr|A0A1G2EUJ0|A0A1G2EUJ0_9BACT Queuine tRNA-ribosyltran sferase OS=Candidatus Niyogibacteria bacterium RIFCSPLO WO2_01_FULL_45_48 OX=1801724 GN=tgt PE=3 SV=1
MEFKVLKKSKKSKARLGILETEHGVVETPALVPVATQAAVKTLTSEDAVAAGCQILITNTFHLHLKPGEGIVKSAGGLHEFMSWPRSLMTDSGGFQVFSLGFGHDLGVGKKIKFFPKEKEILVSEHSQPKSVKITDDGVRFRSPFDGRSLFLGPKESIKIQEALGADIIFAFDECTAPLSSKEYIKKSLARTHGWAKICLESKKNKKQSLFGITQGSNFKDLRQESAKFINSLGFDGFGIGGDLGTSKKTTRDILSWTLPHLDEKKPRHLLGIGKLEDMELIIKSGVDTFDCTVPTHYARSGVVFTSSGPLNLRQSVFLKDKKPIDANCPCFVCEKYARNYISHMLRAKEITPLRLLTFHNLFYFNGFIRKIRLKIKNGTL

SEQ ID NO: 53385 - protein, 381 aa, Niyogibacteria bacterium; identical to SEQ ID NO: 53384
  misc_feature (1)..(381): tr|A0A1G2EZZ4|A0A1G2EZZ4_9BACT Queuine tRNA-ribosyltran sferase OS=Candidatus Niyogibacteria bacterium RIFCSPLO WO2_02_FULL_45_13 OX=1801725 GN=tgt PE=3 SV=1

SEQ ID NO: 53386 - protein, 452 aa, Nomurabacteria bacterium
  misc_feature (1)..(452): tr|A0A1F6X312|A0A1F6X312_9BACT Queuine tRNA-ribosyltran sferase OS=Candidatus Nomurabacteria bacterium RIFCSPLO WO2_01_FULL_41_21 OX=1801776 GN=tgt PE=3 SV=1
MQFKIEKKLKGFLGRAGVLETLHGVILTPAFVPVGTKATVKALIPEQVAELGAEVVLGNTYHLYLQPGDEIVRDAGGLGKFMNWQGPTMTDSGGFQVFSLGVAFGKDPEGKQASYGAGISKIMKTAEIEKSISERPAPYQAKGFGSGFDDSDAPRLAKIGADGVSFKSHLDGTLHYITPEKSIEIQHNLGADIIFAFDECTSPAEDLRYQEEALERTHRWAERSLMEHQRLSIGAKYFSAGSLSGSTEPALPLGASACETPRIENFAPMLFGIVQGGRNERLRKKSAEFVGSLDFDGFGIGGSFAKEDMSTAVKWVNETLPEGKPRHLLGIGEPEDLFMGVENGVDLFDCVAPTRNARNGTLYTKEGKINISNAKYKSDHSPIEKNCECYTCKNYTTSYLNHLFRGKEMLAGTLATIHNLYFIINLVKKIRQSIIEENFFEFKKSFLNKYNT

SEQ ID NO: 53387 - protein, 475 aa, Nomurabacteria bacterium
  misc_feature (1)..(475): tr|A0A352BU96|A0A352BU96_9BACT Queuine tRNA-ribosyltran sferase OS=Candidatus Nomurabacteria bacterium OX=20521 52 GN=tgt PE=3 SV=1
MQFKIEKKLENSLARAGTITTSHGVIHTPAFVAVGTKATVKSLNPEQVKDIGVEMVLGNTYHLYLQPGDETVREAGGIGKFMNWPGPTMTDSGGFQVFSLGAAYGKGVSKITTITTPEPLLRKEGRNSSRPAKGEWPEAEGVGSLAKVDDDGVSFKSHLDGSIHYITPEKSIQIQYNLGADIIFAFDECTSPAEDLKYQAEALERTHRWAERSLAEHQRICSAEENIFSRSSLTPSLRDGTPPPVASQKIFSSAAKPVTDFFERRVGERERQGEKISNGVAIFGIVQGGREESLRKKSAKIIAKTNVDGKYFDGFGIGGSFAKKDMSSAVKWVNEILPEDKPRHLLGIGEPEDLFMGVENGVDLFDCVAPTRLGRNGTLYTKSGKIIIMNKQYRNDYSPVEKDCGCYTCSPRLGGAGYTKAYLAHLFHGKEMLAGTLASIHNLYFIVNLVKNIRQSILDGTFFDFKNKFLYNYRN

SEQ ID NO: 53388 - protein, 402 aa, Nucleicultrix amoebiphila
  misc_feature (1)..(402): tr|A0A1W6N307|A0A1W6N307_9PROT Queuine tRNA-ribosyltran sferase OS=Candidatus Nucleicultrix amoebiphila FS5 OX= 1414854 GN=tgt PE=3 SV=1
MNSLYPRFSFQTQYQDKFSKAKVATLVTPHGAVTTPNFIFCATKAAIKGLTPAQMKEAGTEIILSNTYHLMLQPGGKRVERRGGLHRFMGWDGPMLTDSGGFQIFSLGHGSVANEIKGKRLTHRQKTLLKISEEGAVFKSYLDGALHTLTPESSIEIQRQLGADLIVVLDECTPFHVDKSYTEKSMHLTHRWGLRSLEEFKRTNSGQQAIYGIVQGGVYPDLRKIAAAFVNSHPFFGIAVGGSLGATKEQMAEVVNSVMNEISPQRPVHLLGIGGISDIFNGVREGIDTFDCVHPTRLARHGGALVRPDFWLKNDGSGGEHISLKGSRFKDDDLPIDESCPCSTCKTFSRAYLHHLIKAQELLVYQALTIHNVTFMNRLMRAIRTAIIENRLEEEQKNWMQV

SEQ ID NO: 53389 - protein, 380 aa, Omnitrophica bacterium
  misc_feature (1)..(380): tr|A0A419DXQ8|A0A419DXQ8_9BACT Queuine tRNA-ribosyltran sferase OS=Candidatus Omnitrophica bacterium OX=2035772 GN=tgt PE=3 SV=1
MFELIKKDKNTKARLGKIKTAHGSIDTPCFMPVGTQATVKGLSPEELTLSGAQIILSNAYHVFLRPGMELIKKAGGLHNFMSWKGPILTDSGGYQVFSLALLRKLNDNGVEFQSHIDGLRHVFTPEDIMDIQYILGSDIIMPLDECVHYPASRDNALVAMQRTIDWARRSKIKKAELDRANKGYERLLFGIIQGSTYQDLRITCANKLTEIGFDGYAIGGVSVGEPWDLVYNIVSLTADVLPETCPRYVMGVGTPSDIIEAIDLGIDMFDCVIPTRYGRNGTAFSRQGKLVIRNAAFSQDFSPIDSGCACYACRNFSRAYIRHLFNTEEILGLRLVSLHNIYFYLDLMRQARKAIAEGSFPEFKRCFLSTYQNGGIQNAR

SEQ ID NO: 53390 - protein, 373 aa, Omnitrophica bacterium
  misc_feature (1)..(373): tr|A0A496SBT3|A0A496SBT3_9BACT Queuine tRNA-ribosyltran sferase OS=Candidatus Omnitrophica bacterium OX=2035772 GN=tgt PE=3 SV=1
MFDVLKEDSATKARLGLLKTPHGKVTTPAFFPVATQGTIKGLSSKEIEEIGIEGILVNAYHLFLRPGTKIIKEAGGIHKFMDFHKSIASDSGGYQIFTLEGLRKVREEGVEFQSHLDGRKFFLTPQEVVKIQLEIGSDIILPLDECVKFPTPFDYARLASYRTVQWARKSKCFWENSGKKNSLFFGIVQGATYPSLREYSLKEILNIGVDGVAIGGLSVGEPQNLRYNILSFITKILMKEKKNYLVYFMGYGKPQDILDAISLGADLFDCVVPTRFARTGTAFTNQGKIVVRNAVYSEDYSPLDRECDCFVCKRFTRAYLRHLFNAKEMSAAYLLTYHNLWWYNKFMEKIRESIKEGSFLAFKEEFLKEFEES

SEQ ID NO: 53391 - protein, 406 aa, Omnitrophus magneticus
  misc_feature (1)..(406): tr|A0A0F0CV19|A0A0F0CV19_9BACT Queuine tRNA-ribosyltran sferase OS=Candidatus Omnitrophus magneticus OX=1609969 GN=tgt PE=3 SV=1
MTNNTNFWDLSSFAARLTRDKNDCPMEDILNKNFFVIDHKSSSSKARAGRALTAHGEFLTPVFMPVATQATVKSLSSEELENAGVNMIISNAYHLFMRPGGDIIKKAGGLHKFMNWTRPITTDSGGFQVFSLALLRKIHNEGVEFRSHLDGTSHFFTPENIVDFQLVLDSDILMPLDECVKYPADEKYVEKSVDITCAWAKKSKDRFNEIQNNSFLFGIIQGSTYHNLRKKCANFLVELNMDGYALGGIGVGEGRELMDEITDYTCAILPENKIRYLMGVGTPSDILSAISRGVDMFDCVVPTRNARNGQAFTFDGELQLRNANFKEDFNPIEKDCACNACKNYSRAYIRHLFNTGEILAIRLITEHNIFFYAKLMNSAREAILRDNFEIYKKDFLTRFNANKTLG

SEQ ID NO: 53392 - protein, 384 aa, Ornithobacterium hominis
  misc_feature (1)..(384): tr|A0A383TZ11|A0A383TZ11_9FLAO Queuine tRNA-ribosyltran sferase OS=Candidatus Ornithobacterium hominis OX=24979 89 GN=tgt PE=3 SV=1
MNSLNLRYMNFKIEATDALSAARAGELITAHGKVKTPIFMPVGTVASVKSVHQRELKEDIQAQIILGNTYHLYLRPGIEILNAAGGLHRFMNWDAPILTDSGGFQVYSLSDIRKVSEEGVRFQSHIDGSYHLFSPEYSMEIQRNIGADIIMAFDELTGIPATYQNAKKAMEVTHRWLERCRNWLRENPPLYGYPQTLFPIVQGNSYKDLRTESAKYIADFNADGNAIGGLSVGEPEEMMYEITDLVCGILPQEKPRYLMGVGTPWNILECISLGVDMFDCVMPTRNARNGMLFTWNGVINIKNARWKDDFSPLDENGTSYVDQQYSKAYLRHLFIAKEYLAKQIASIHNLAFYLDLVRTARQKIMEESFEAWKNQVIPQLKNRL

SEQ ID NO: 53393 - protein, 379 aa, Ozemobacter sibiricus
  misc_feature (1)..(379): tr|A0A367ZPN1|A0A367ZPN1_9BACT Queuine tRNA-ribosyltran sferase OS=Candidatus Ozemobacter sibiricus OX=2268124 GN=tgt PE=3 SV=1
MTEPFFSFHLEYESRECLARVGVLRTRRGEVRTPVYMPVGTAGSVKTLSPEEVRAAGASIILGNTYHLYLRPGTEVLERFGGLHRFMAWDRPLLTDSGGFQVFSLKKLNKITDEGVLFASHLDGARHWLTPEESMRIQRAIGAEIMMVLDECCPYPADEATARSALERSARWAARCRRDHPPGRNGQALFGIVQGSTYLPLRLESLARTAELGFEGLAIGGLSVGEPKAEMIRILDGLMPAMPRELPRYLMGVGSPEDLFYGVARGIDMFDCVLATRIARHGAVFTRRGRIDLTALPWRMSDEPIDPRCACYACRTFSRGYLRHLFKAKELLALRMASLHNLTFLINLMEEIRAAIVQGNFLTLQREFLAGYLNQEDLS

SEQ ID NO: 53394 - protein, 396 aa, Pacebacteria bacterium
  misc_feature (1)..(396): tr|A0A2H0T124|A0A2H0T124_9BACT Queuine tRNA-ribosyltran sferase OS=Candidatus Pacebacteria bacterium CG10_big_f il_rev_8_21_14_0_10_40_26 OX=1974767 GN=tgt PE=3 SV=1
MANKEFSFKLLKTKGKMRAGTMTTPHGVVQTPIFMPVGTVGSVKALDSADVKNTQAHIILGNTYHLYLRPGMQTMQEMGGLHAFMQWDKPILTDSGGFQVLSLGDAIAHKQDGSSQKSGPSVKISDDGVEFRSHLDGSKHTFTPEKSIQIQREIGSDIMMAFDEALPDSKPHEYAVDSLAKTNRWATACYEYWEKHDRRSVYGTYQSLFGIIQGGLFEDLRREAVEHIVSLDFDGVALGGETVGYDLDGTRRVMEWIEPLMPKEKPRYAMGMGMNPIDLVDGVKMGFDMFDCVAPARLARNGSLYVGSLEIENGEPVFQSEFKNGRMSIGAAAYTTDSGLIQEGCDCETCKAGYTRGYLRHLYKTKELSYFRLATQHNLRFMIRLTEQLRSYILEQ

SEQ ID NO: 53395 - protein, 445 aa, Pacebacteria bacterium
  misc_feature (1)..(445): tr|A0A2M7MC92|A0A2M7MC92_9BACT Queuine tRNA-ribosyltran sferase OS=Candidatus Pacebacteria bacterium CG_4_10_14 _3_um_filter_34_15 OX=1974761 GN=tgt PE=3 SV=1
MTKKNFSFTLEATKGKMRAGVIKTQRGEIKTPMFMPVGTLATVKSLDTKDIKDLQAPIILANTYHLYLRPGMERLQAMGGVHKFMGWNRPMLSDSGGFQVFSLGRQQLHSRAKKKSEQDELAVKKEFTAQGEFTANKKASRLNKAGYSSKFDTAPQKQPKQITRSLGVRISEKGAEFVSHLDGSKHFFSPEISIEIQRQIGADIVMALDECVSDSESKEYVKNSIDRTHRWAKRCYDYWIKNKRLSVYGEYQALFGIIQGAMYEDLRKESAEFISSLDFDGIAVGGETTGYNMSGTREMMGWIEKILPADKPRYAMGLGRDPQDLLDAVSVGFDMFDCVGPTRLARNGALYYGQLVEKNGKPEFKSEYKNGRLNIGNQKFFTDEKVIQEGCDCYTCENRYSRGYLNHLYRTKELAYYRLASIHNVRFMVRLAENLRIMIFNAQET

SEQ ID NO: 53396 - protein, 375 aa, Pandoraea novymonadis
  misc_feature (1)..(375): tr|A0A2P6UX15|A0A2P6UX15_9BURK Queuine tRNA-ribosyltran sferase OS=Candidatus Pandoraea novymonadis OX=1808959 GN=tgt PE=3 SV=1
MLKFELITTDGQARRGRITLNHGIVETPIFMPVGTYGSVKAMSPTELRENKAQIILGNTFHLWLNPGLKTIATHGGLHKFIGWNYPLLTDSGGFQVFSLGNLRKISEEGVKFASPVNGDSLFLSPEISIQIQHVLDSDIVMQFDECTPYKIEGRTATEDEAEKSMRMSLRWAKRSLEEFSRLQNTNSLFGIVQGGMYEHLRYESLQGLTNLNFDGYAIGGLSVGEPKEEMLRVLKYIAPYLPTNKPHYLMGVGTPEDLVAGVSASIDMFDCVMPTRNARNGWLFTRFGDLKIRNAVHKNDTRPLDETCDCYACLNFSRAYLHHLQRAGEILGARLNTIHNLHYYLTLMQEIRTAIEAHQFSSFKVKFHAERARGV

SEQ ID NO: 53397 - protein, 380 aa, Pantoea carbekii
  misc_feature (1)..(380): tr|U3U8F6|U3U8F6_9GAMM Queuine tRNA-ribosyltransferase OS=Candidatus Pantoea carbekii OX=1235990 GN=tgt PE=3 S V=1
MKFELDNTDGYGRRGRLIFNCGIVDTPVFIAVATYGSVKSISPEELENSGTKIILGNTFHLWLRPGEKTIKLHGGLHDFMHWKGPILTDSGGFQIFSLNTISQVNEAGVHFRNPINGDTVFLDPEKSMEIQHNLNSNIVMILDECIPYQTNWQHAKNSMEMSLRWAKRSREHFDYLNNKNTLFGIIQGSVYTDLRDISLKGLLKIGFDGYAIGGLAVGEPKEHMHKILDFICPKMPYNKPRYLMGVGKPEDLIEGVRRGIDMFDCVMPTRNARNGHLFVTNGVVKIRNSKYKYDLSPLDYQCDCYTCCHYTRAYLHHLDRCNEMLGARLNTIHNLRYYQRLMIGLREAIEKKRLQNFINTFYQQRRININNLNKVPSSSN

SEQ ID NO: 53398 - protein, 387 aa, Paraburkholderia kirkii
  misc_feature (1)..(387): tr|G4M2N4|G4M2N4_9BURK Queuine tRNA-ribosyltransferase OS=Candidatus Paraburkholderia kirkii UZHbot1 OX=105552 6 GN=tgt PE=3 SV=1
MTAGHFTPPDNGLKFELLTTDGQACRGRLTLNHGVVETPIFMPVGTYGTVKAIQPRELEEIRAQIILGNTFHLWLRPGLETIGAHGGLHQFMGWKRPILTDSGGFQVFSLGDLRKITEDGVTFASPINGDKLFLSPEVSMQIQKVLNSDIVMQFDECTPYATNGVPTSHKDAADSMRTSMRWAKRSIDEFNRLGNPNALFGIVQGGMFEDLRDESLAGLSEIGFHGLAIGGLSVGELKEDMMRVLNHIGPKLPAGKPHYLMGVGTPEDLVAGVAAGVDMFDCVMPTRNARNGWLFTRFGDLKIKNATHKNSMKPLDESCGCYTCQNFTRGYLHHLHRVCEILGAQLNTIHNLHYYLQLMSEVRESIETHSFDAFRKTFGENRARGVD

SEQ ID NO: 53399 - protein, 399 aa, Paraburkholderia sp.
  misc_feature (1)..(399): tr|A0A4R5M854|A0A4R5M854_9BURK Queuine tRNA-ribosyltran sferase OS=Candidatus Paraburkholderia sp. 4M-K11 OX=25 28715 GN=tgt PE=3 SV=1
MTDGHQNNARAEHGAYLGERPQNGLKFELLGTDGLARRGRVTLNHGVVETPIFMPVGTYGTVKATQPRELEEMHAQIILGNTFHLWLRPGLETIEAHGGLHRFMGWNRPILTDSGGFQVFSLGDLRKISEDGVRFASPVNGDKLFLSPEVSMQIQKVLNSDIVMQFDECTPYATNGVPTTHKEAADSMRMSMRWAQRSIDEFNALGNPNALFGIVQGGMFEDLRDESLAGLSQMPFHGYAIGGLSVGEPKEDMMRVLEHIAPKLPADKPHYLMGVGTPEDLVAGVASGVDMFDCVMPTRNARNGWIFTRFGDVKIRNAVHRNSLRPLDEQCGCYTCRNFTRGYLHHLHRVGEILGAQLNTIHNLHHYLELMSEMRTAIETKTFGAFRKRFAEQRARGVD

SEQ ID NO: 53400 - protein, 397 aa, Paracaedibacter acanthamoebae
  misc_feature (1)..(397): tr|A0A077AWH4|A0A077AWH4_9PROT Queuine tRNA-ribosyltran sferase OS=Candidatus Paracaedibacter acanthamoebae OX= 91604 GN=tgt PE=3 SV=1
MTKFSFTFHRPDPNSRARLGRLETPHGVVETPAFIFCATKAAIKGVTSEQMQAEGTQFILSNTYHLMLQPGSDIIHKAGGLHKFMGWKGPMLTDSGGFQIFSLGHGSVAEEIKGRRNSNRPRTMLKITEEGAKFKSYINGQTYLLTPERSVQIQRELGPDFVVVLDECTPFHVDKRYTARSMHMSHRWAVRSLEEFRRHDDDTQKLYGILQGGVYEDLRLEACDFVNNQDFFGHAVGGSLGASKSQMYDVVAMTMANLREDRPVHLLGIGGVQDIFNGVRHGIDTFDCVHPTRLARHGGALVRPENNPKPAREHIVLTNSQFREDYTPIEPDCSCHTCRNYTKAYLHHLLKAQELAAYTLITLHNVNFMNRLLAAVRQGIADKNLDTVEKSWVPEKT

SEQ ID NO: 53401 - protein, 381 aa, Parcubacteria bacterium
  misc_feature (1)..(381): tr|A0A1W9QMG6|A0A1W9QMG6_9BACT Queuine tRNA-ribosyltran sferase OS=Candidatus Parcubacteria bacterium 4484_255 OX=1970769 GN=tgt PE=3 SV=1
MFKIIKKSNISQARLAELKTKHGIINTPFFMPIATQGTIKGLTISQIKDLNAQILLSNTYHLFLRPGLSVIKKAGGLHRFMGWRGPILTDSGGYQVFSLSKKRKVSDMGVEFQSDIDGKTVFLSPSRAIKIQNILGSDIVMSLDECPVWPCPKAQAEKAVRRTSAWAKICKATYNQQLTINNQQLLFGIVQGSIYKDLRAQSAKRLVNIGFDGYAIGGLMLGESIKETYKAIQSAVQELPLSKPRYLMGAGKPEQIIEAVKMGIDMFDCVIPTRNARHGVLYINSKSEILNPKQYQNSKFQILNKNFYKKIHITNAKYKNDFKPLDANCSCYACQNFSRAYIRHLFMAKEQLGKTLATIHNLAFYLSLMKDIRIMIKKGKL

SEQ ID NO: 53402 - protein, 378 aa, Parcubacteria bacterium
  misc_feature (1)..(378): tr|A0A3A4UYW6|A0A3A4UYW6_9BACT Queuine tRNA-ribosyltran sferase OS=Candidatus Parcubacteria bacterium OX=205330 9 GN=tgt PE=3 SV=1
MIEFKVIKKSNKSRARIGILKTTFGEIETPSLVTVATQGVVKTLDSREVKETKTQVLISNTFHLHLRPGEDVVKKNGGLHKFMNWDGPLMTDSGGFQVFSLGFGKDFGIGKILKEKPQTEIKIQKQPKMVKIMEDGVSFRSPIDGKLLFLGPKESIKIQEKLGADIIFAFDECPPPNASYDYMRESVARTHRWAKASLDSKKTKQALYGIVQGGEFKDLRIESANFLSALPFDGFGIGGEFGYEKEKMSNMLGWVTDKLPENKPRHLLGVGYLEDIPTIVTGGMDTFDCTVPTHFARHGVAFTSEGRIDMGKSKFLNDLEPLDKNCKCMVCQYYKRSYIAHLFKAREITALKFLSFHNLFYFNTVVEQTREDIKRGKI

SEQ ID NO: 53403 - protein, 368 aa, Pelagibacter sp.
  misc_feature (1)..(368): tr|A0A2D7TVV9|A0A2D7TVV9_9PROT Queuine tRNA-ribosyltran sferase OS=Candidatus Pelagibacter sp. OX=2024849 GN=tg t PE=3 SV=1
MSAKFSLINEDRGARLGQIITPRGVIDTPAFMPVGTAATVKALTVEQINQTNSQIILCNTYHLHLRPGIERIQRVGGLHNFMNFQKPILTDSGGFQVMSLSKNTKITEDGAIFNSHVDGKKIFISPEISIDIQKKLNSDIIMVFDECPKYSKEKRMIKDSMNLSTRWAIRSKKEFGINSNKMLFGIVQGGIFNDLRLESLNKLKEIEFDGYALGGLAVGEPQVEMFNTVEAISSLMDKNKPRYLMGSGTPGDLLGAIKRGIDMFDCVLPTRSGRNGLAFTWEGKINLRNAKYQNDDTPLDKNIHCPASNLYSKNYLNHLINCNEILASTLITWHNVAFFQDLMKKIRNAIKNSKFIEFHNQHFKRLNA

SEQ ID NO: 53404 - protein, 370 aa, Pelagibacter sp.
  misc_feature (1)..(370): tr|A0A3R7VZB6|A0A3R7VZB6_9PROT Queuine tRNA-ribosyltran sferase OS=Candidatus Pelagibacter sp. TMED165 OX=19868 04 GN=tgt PE=3 SV=1
MKIKEFSFELKTQDEEARLGKILTPKGCIDTPAFMPVGTQGTVKGVFTDDLLDTGSQIILGNTYHLMIRPGVNIIKKFNGLHKFMNWKKPILTDSGGYQIMSLSKLNKIDKDIGAIFRSHIDGKKIILSPEKSIKVQKALNSDIIMVLDECPKLTNDKKILSNAIDTSIKWASRCKVEFGNNKSKALFGITQGGLYKDLRKDSIERLKEINFDGYAMGGLAVGESQSEMFKILSETVYLLPKNKPRYLMGVGTPSDILGAVKYGIDMFDCVLPTRSGRTGVAFTWDGKLNLKNSKYQNDKSPLDQNCKIRGLNQFSKSYLNHLIKSNEMMASMLISLHNIYFYQQFMLKIRGSIRSGTFSSFYKKYIDYF

SEQ ID NO: 53405 - protein, 371 aa, Peregrinibacteria bacterium
  misc_feature (1)..(371): tr|A0A0G0C6Z9|A0A0G0C6Z9_9BACT Queuine tRNA-ribosyltran sferase OS=Candidatus Peregrinibacteria bacterium GW201 1_GWC2_33_13 OX=1619061 GN=tgt PE=3 SV=1
MFKFEISSKCSKTLARTGSFTTPHGVIKTPTFMPVGTKATVKTLDSKDLNDLNAEIILANTYHLAMRPGEDLIKKMGGLHKWMNFNKPILTDSGGFQVFSLKDKLKITDDGVEFQSHLDGNKHFFTPEKAMEIQNKLGADIIMAFDECAPADSDQSYAKKAMERTHDWVLRCKKFHKNESQALFPIIQGVIYKDLRVESTKFMTELDLPGIAIGGLSVGEGKKTMYEILETIAPLLPENKPHYLMGVGTPEDLFECISRGMDMFDCVLPTRLARHGSFYGDNQVEHLKNLKNRDNENPLRKDCTCETCQNFTRSYLRHLIIENEITGLRLLTIHNIYFLFELIKKIRKSIKENQFPHFKKEFLNNWIGMEK

SEQ ID NO: 53406 - protein, 375 aa, Peregrinibacteria bacterium
  misc_feature (1)..(375): tr|A0A2H0C8D2|A0A2H0C8D2_9BACT Queuine tRNA-ribosyltran sferase OS=Candidatus Peregrinibacteria bacterium CG22_ combo_CG10-13_8_21_14_all_49_11 OX=1974796 GN=tgt PE=3 SV=1
MFSLYTSSLAGRRGQLCTAHGTIETPFFFPVATAGAMKGISHQELLDLGAEVLLCNTYHLHLRPGEHVVADAGGLHKFIGWEKPILTDSGGFQVFSLRKIRSLDDSGVTFQSHLDGKELFLGPREAMEIQHALGADIIMVLDECPPSTADRSEIEQAVERTLRWAKECKRVHEELCRSVALRQAQCDTPLLFGIVQGGLEKDLREYCARELIAMDFDGYAIGGLAVGESEEEMYQVLDWVCPLLPEDKPRYLMGVGKLSQLPVCVSKGIDMFDCVLPMREARHGTVYVQEAKDSKDCVSFMYDTIRITNEKYMNDHSLIDPQSPSLLSRKHSKSYLCHLLRSGERYGETIACMQNMGMTLKVMKDVRENIRHPVE

SEQ ID NO: 53407 - protein, 369 aa, Peribacter riflensis
  misc_feature (1)..(369): tr|A0A0S1SGP3|A0A0S1SGP3_9BACT Queuine tRNA-ribosyltran sferase OS=Candidatus Peribacter riflensis OX=1735162 G N=tgt PE=3 SV=1
MDEFRKAKSSSLWPMFTCKTLGNLGRRGVLKTPHGVIETPFFLPVGTAGAMRGITHTDLLDLQAQVLLCNTYHLHLHPGEDTVQQAGGLHRYIGWEKPILTDSGGYQVFSLRGLRHISERGVEFRAHTDGSRHVLGPQEATEIQWKFGSDIIMCFDECPPSTASRREIETAVDRTLRWAKICKTTHDQLKQSANGPLLFGIVQGGLHFDLRKKCAEELRAIGFDGYALGGLAVGESEEEMLGILREVAPLLPEEYPRYLMGVGVLHQLRACVALGIDMFDCVLPMRIARHGTILLSDGSEIRITNAEFKQAHVPLDPDSPSDLSRTHLKSYLHHLFKVNERLAETIACKQNLGVTLKMMRDLRTKMDTP

SEQ ID NO: 53408 - protein, 301 aa, Peribacteria bacterium
  misc_feature (1)..(301): tr|A0A1F7D9B6|A0A1F7D9B6_9BACT Queuine tRNA-ribosyltran sferase (Fragment) OS=Candidatus Peribacteria bacterium RIFOXYB1_FULL_57_12 OX=1801935 GN=A2398_03795 PE=3 SV= 1
CNTYHLHLHPGEDTVQQAGGLHRYIGWEKPILTDSGGYQVFSLRGLRHISERGVEFRAHTDGSRHVLGPQEATEIQWKFGSDIIMCFDECPPSTASRREIETAVDRTLRWAKICKTTHDQLKQSANGPLLFGIVQGGLHFDLRKKCAEELRAIGFDGYALGGLAVGESEEEMLGILREVAPLLPEEYPRYLMGVGVLHQLRACVALGIDMFDCVLPMRIARHGTILLSDGSEIRITNAEFKQAHVPLDPDSPSDLSRTHLKSYLHHLFKVNERLAETIACKQNLGVTLKMMRDLRTKMDTP

SEQ ID NO: 53409 - protein, 365 aa, Peribacteria bacterium
  misc_feature (1)..(365): tr|A0A1F7BE34|A0A1F7BE34_9BACT Queuine tRNA-ribosyltran sferase OS=Candidatus Peribacteria bacterium RIFCSPHIGH O2_01_FULL_51_35 OX=1801914 GN=tgt PE=3 SV=1
MFQLLKETPIGRRGVLTTPNGAIQSPFFMPVGTAGAMKGITHEDLVTLGAEILLCNTYHLHLQPGEKIVEEAGGLHSFVGWNKPILTDSGGFQVFSLRNISKITDEGVNFRSHLNGDPLFLGPEEAMRIQHALGADIIMCFDHCPPSTAPRSEIEKAVDRTIRWAAECKKHHKQLSSASSESSASSDSSPFLFGIIQGGLERDLREKCAEELIAMGFDGYAIGGLAVGETEDEMYDILDCVCPLLPKDKPRYLMGVGRLEQLKTAVAKGIDMFDCVSPMREARHGTLYLSDGSKIRIDSNPYTTDHSVIDANSPSPLSRTHLKSYLSHLLRAHERLGETIACMQNLGITLECMRNLQNEIEKFAG

SEQ ID NO: 53410 - protein, 379 aa, Phaeomarinobacter ectocarpi
  misc_feature (1)..(379): tr|X5MND8|X5MND8_9RHIZ Queuine tRNA-ribosyltransferase OS=Candidatus Phaeomarinobacter ectocarpi OX=1458461 GN =tgt PE=3 SV=1
MTSFDFHLDATDGEARTGRIETPRGTIRTPAFMPVGTAGTVKAMTTDTVKSTGADIVLGNTYHLMLRPGAEEVAALGGLHRFMNWDKPILTDSGGFQVWSLAKLRKMTDEGVTFQSHIDGSTHSLTPERSIEIQCLLGADIQMILDECTDYPATREQAQSSMDLTTRWAKRSKQAFADQPHRKEGQALFGIVQGSTYPDLRLQHAQALVDIGFHGYALGGLSVGEEQGAMLETVEAVAPALPKQQPRYLMGVGTPEDLVEAVRRGIDMFDCVMPTRSGRHGQAFTRHGRVALKNARHGADPRPLDADSPCEASNLYSRAYLHHLYKSGEYLAAMLITWNNVAYYQWLMAQMRAAIAEGRFEAFVADFYAQREASDIDPI

SEQ ID NO: 53411 - protein, 375 aa, Photodesmus blepharus
  misc_feature (1)..(375): tr|A0A084CPC9|A0A084CPC9_9GAMM Queuine tRNA-ribosyltran sferase OS=Candidatus Photodesmus blepharus OX=1179155 GN=tgt PE=3 SV=1
MKFKYELRKKNDGARCGQLVFERGVVKTPAFMPVGTYGTVRGITPDEVKSTGAAMLLANTFHLWLRPGEEVVKMHGDLHNFMNWHHPILTDSGGFQVFSLGATCKVSEEGVRFCNPVNGDKVFMTAEKSMEIQKDLGSDIVMVFDECTSYPAAYNEANKSMQMSLRWAERSREHFDKLGNVNSLFGIVQGSMYKDLRDASVKGLIEIGFDGYAIGGLAVGESKKDMYSILKHTCHQLPEDKPRYLMGVGKPEDLVEGVRRGVDMFDCVMPTRNARNGNLFITDCVIKIRNAQHKTDTTQLDSHCDCYTCQNYSKSYLHHLDRCNEILGVRLNTIHNLRYYQRLMQSIRTAIRENCFELFVKKFYTCRNKAVPPLG

SEQ ID NO: 53412 - protein, 344 aa, Photodesmus katoptron
  misc_feature (1)..(344): tr|S3DJQ3|S3DJQ3_9GAMM Queuine tRNA-ribosyltransferase OS=Candidatus Photodesmus katoptron Akat1 OX=1236703 GN =tgt PE=3 SV=1
MPVGTYGTVKGVTPEEIKNTGAEILLGNTFHLWLRPGQDVIKMHGDLHHFMNWKRPILTDSGGFQVFSLSAIRKVTEDGVYFRNPVNGNKIFLSAEKSMEIQKNLGSDIVMIFDECTPYPTTYEDANNSMRMSLRWAQRSRIHFNKIGNTNSLFGIVQGSIYNELRDISVKELVKIGFDGYAIGGLSVGESKSVMYRVLDHTCTLLPENKPRYLMGVGKPEDLVEGVRRGVDMFDCVIPTRNARNGHLFIDTGIIRLRNAKHKMDNKPIDPNCDCYTCQNYSISYLHHLDRCKEILGMRLNTIHNLHYYQRLMKDIRRAINENYFNLFVENFYLSQNKNVPEFN

SEQ ID NO: 53413 - protein, 359 aa, Phycorickettsia trachydisci
  misc_feature (1)..(359): tr|A0A2P1P8M8|A0A2P1P8M8_9RICK Queuine tRNA-ribosyltran sferase OS=Candidatus Phycorickettsia trachydisci OX=21 15978 GN=tgt PE=3 SV=1
MFNFQVLKTHNKSRRGVITTAHGKIQTPAFMPVGTYGSVKAMLPEQVDETGADIILSNTYHLMLRPGEELIAKMGGLHKFMNWDKPILTDSGGFQVMSLANLRKVEEQGVAFRSPFDGSSYFLTPEKATYIQYLLGSTITMAFDECLEFPASYERSNESMELSMRWAERSRNSFIKRAGYGQFGIMQGGVYDDLRQISAKQLVDMDFEGYAIGGLAVGEGQEIMFKTLDTATSYLPDHKPKYLMGVGKPDDIIGAVARGVDMFDCVLPTRSGRNGQAFTKQGAINIRNAKYKEDPAPIEEDCACYTCKNFSKSYIHHLVRVKEITGSILMTWHNLHYFQDLMHRIRTYIEKGKDFDFTA

SEQ ID NO: 53414 - protein, 374 aa, Phycosocius bacilliformis
  misc_feature (1)..(374): tr|A0A2P2E7Q3|A0A2P2E7Q3_9PROT Queuine tRNA-ribosyltran sferase OS=Candidatus Phycosocius bacilliformis OX=1445 552 GN=tgt PE=3 SV=1
MRFTFTCHATDGHARTGVLSTPRGDIRTPAFMPVGTAATVKAMSIDQVKSTGADILLGNTYHLMLRPGGERLARLGGLHHFMGWDKPILTDSGGFQVWSLAGLRKMTEAGVEFRSHIDGSRHMLTPERSIELQADLIGSDIIMQLDECTTFGSSHEEALVSLELSARWGERSKVAFGGTRATQALFGIVQGSVFPDLRKRSADALKSIGFDGYAIGGLAVGEGHQLMCQTLDVTVPELPMDRPRYLMGVGKPIDLVEAVHRGVDMFDCVLPTRAGRHGQAWTWDGPINIRNARFAEDPDPIDPTSTCPASSRPSKAYLHHLFKAEEILGQTLLSWHNLGFYQDLMAAMRAAIAKGQFQDLRARLRQRWGFAPLD

SEQ ID NO: 53415 - protein, 405 aa, Planktophila sulfonica
  misc_feature (1)..(405): tr|A0A249KIJ9|A0A249KIJ9_9ACTN Queuine tRNA-ribosyltran sferase OS=Candidatus Planktophila sulfonica OX=1884904 GN=tgt PE=3 SV=1
MTHAAESGLARAGVITTPHGKIHTPAFIPVGTKANVKTVLPEAMEELGAQALLANAYHLYLQPGPSVLDEAGGLGKFMNWDKPTFTDSGGFQVLSLGVGFKKVLAMDAQTFRSDQVIAKNKERLAHVDDEGVTFKSHLDGSMHRFTAEVSMQIQHQLGADIMFAFDECTTLHNTRPYQELAMSRTYDWAIRCLDEHKRLTESRAEKPYQALFGVIQGAQYEDLRKKASSDLGSMSSSGIEFDGFGIGGALDKDSLGTIVGWVNSTLPENKPKHLLGIGAPEDLFVGVENGVDTFDCVLASRIARTSSVYTMTGRFNVSNAPFVRDFNPIDDECDCYTCKNYTRAYLCHLFRGKEMLAGTLATIHNERFIVRLVDQMRQALVDGTFQEMKTEFMGRYKHKSGQARD

SEQ ID NO: 53416 - protein, 397 aa, Planktophila vernalis
  misc_feature (1)..(397): tr|A0A249KUX4|A0A249KUX4_9ACTN Queuine tRNA-ribosyltran sferase OS=Candidatus Planktophila vernalis OX=1884907 GN=tgt PE=3 SV=1
MARVGTITTPHGAIQTPAFIPVGTKATVKAVLPEAMADLGAQALLANAYHLYLQPGSDVLDEAGGLAQFMNWPGPTITDSGGFQVLSLGVGFKKVLAMDAQTFRRDDVIADNKERLAHVDDEGVTFKSHIDGSMHRFTPEVSMKVQHEIGADIIFAFDECTTLHNTRRYQELAMDRTLAWAVRCLDEHKRLTDERTTKPYQALFGVIQGAQYEDLRKKAAGDLGGLESSGQSFDGFGIGGALDKDSLGTIVSWVNQMLPENKPKHLLGIGAPEDLFVGVENGIDTFDCVLASRIARTSAVYTMEGRFNLSNSAYKRDFTAIDDECDCYTCTHYTRAYMHHVFRGKEIIAATLATIHNERFIVRLVDQMRQALLDGNFTEMKHDFLGRYKHRSGQAND

SEQ ID NO: 53417 - protein, 380 aa, Poribacteria bacterium
  misc_feature (1)..(380): tr|A0A2E3HWG7|A0A2E3HWG7_9BACT Queuine tRNA-ribosyltran sferase OS=Candidatus Poribacteria bacterium OX=2026781 GN=tgt PE=3 SV=1
MAQNKFRLIKEDEETCARLGQLRTAHGVVNTPIFMPVGTRATVKTCSPRTLIEMGTEIILGNTYHLYLRPGHQIIQRAGGLHKFMGWKKPILTDSGGFQVFSLGERRKITEKGVEFQSGIDGSKHMISPERAIEIQNALGADVIMTFDECPAHTTDREYIEKSMHMTLRWAKRCKETHKNANQLLFGIIQGGFFHDLRRESAEKTVEMGFPGYAIGGLSVGEEKELMYQTVAYTAPLLPKEKPRYLMGVGTPQDLVYSVSCGIDMFDCVMPTRNARNGSLFTSTGTVKIRNAKYRSDFTPLDPNCNCYTCQNFTSAYLRHLDSENEMLGHHLKTVHNLHFYISLMRGIRQSIKIGTFSKLKNDIPMLFQTGQNRSVADSA

SEQ ID NO: 53418 - protein, 380 aa, Poribacteria bacterium
  misc_feature (1)..(380): tr|A0A2D6RZD0|A0A2D6RZD0_9BACT Queuine tRNA-ribosyltran sferase OS=Candidatus Poribacteria bacterium OX=2026781 GN=tgt PE=3 SV=1
MAQNKFRLIKEDEKTCARLGQLRTAHGVVNTPIFMPVGTRATVKTCSPRDLIEMGVEIILGNTYHLYLRPGHQVIQRAGGLHKFMGWKKPILTDSGGFQVFSLGERRKITESGVEFQSGIDGSKHMISPERAIEIQNALGADVIMAFDECPAHTTDREYIENSMKMTLRWAKRCKETHKNANQLLFGIVQGGFFNDLRKESVERTVEIGFPGYAIGGLSVGEEKELMYQTTAYTAPLLPKEKPRYLMGVGTPQDLIYSVSCGIDMFDCVMPTRNARNGTLFTSFGTVKIRNAKYRSDFTPLDPNCNCYTCQNFTSAYLRHLDSENEMLGHRLKTVHNLYFYISLMRGIRQSIKIGTFSKLKNDILMLFQTGQNRSVADSS

SEQ ID NO: 53419 - protein, 382 aa, Portnoybacteria bacterium
  misc_feature (1)..(382): tr|A0A2M7UHP1|A0A2M7UHP1_9BACT Queuine tRNA-ribosyltran sferase OS=Candidatus Portnoybacteria bacterium CG_4_10 _14_0_2_um_filter_44_20 OX=1974799 GN=tgt PE=3 SV=1
MSIEFKILKKSKKSRARLGILKTEHGIIETPSLVPVATQATLKALTSEEALETKSQILIANTFHLHLKPGEKIVKAAGGLHKFMNWSGPLMTDSGGFQVFSLGFGKDFQVGKILKYFPGSKKEVIMPKANPKSLKITPDGVRFKSFLGGHELFIGPRESIKIQEALGADIIFTFDECTAPLVSFKYAKEAIERTHRWAKICLETRKTRQALFGIVQGSRFKSLREESAKFINSLDFDGFGIGGDLGSTKEQMNKILDWVLPHLDEQKPRHLLGIGRLEDLKNNVQNGMDLFDCTAPTQYGRHGVAFTSFGKLNLRQTKFLKDKKPLDSKCHCSVCQTYKRNYLAHLIRAGEITGLRMLSFHNLHFFNTIVENLRKEIKRENI

SEQ ID NO: 53420 - protein, 382 aa, Portnoybacteria bacterium
  misc_feature (1)..(382): tr|A0A1G2FNV6|A0A1G2FNV6_9BACT Queuine tRNA-ribosyltran sferase OS=Candidatus Portnoybacteria bacterium RIFCSPL OWO2_02_FULL_40_15 OX=1802002 GN=tgt PE=3 SV=1
MPSFLKIIKKSKKSAARLGILKTSHGLIHTPAFLPCATQAAVKTLTPKEIKEIGFEGVLCNTYHLYLRPGEKNIKKLGGLHKFMNWFGPIATDSGGFQVFSLGFGLEHRVGKVLKGRDENNFNEEKAKGQQAKLAEIDENGVSFISHLDGSIHRFTPEKSIRIQEDLGADIIFAFDECTSPLASYGYTKKAMIRTHRWAKRCLKAKKRKDQLLFGVVQGGPFKDLRKESAKFISDLPLDGIGIGGSFGKDEMKKTLDWIRPYLPENKPRHLLGIGYLDDLKQAIKRGMDLFDCVYPTRLARHGTFLTNEREMNIFKAVYRLDKAPIVKNCACYTCQNFSRAYLRHLFKAGEILGSRLATFHNLWFMRQFIEEIKQAIKDNKF

SEQ ID NO: 53421 - protein, 377 aa, Profftella armatura
  misc_feature (1)..(377): tr|S5R3Y8|S5R3Y8_9PROT Queuine tRNA-ribosyltransferase OS=Candidatus Profftella armatura OX=669502 GN=tgt PE=3 SV=1
MLNFKILTTSGNARSGIIKLNNFFVKTPIFMPVGTYGSVKAISPLELIEMKYNIILNNSFHLWMRPGLDVISKFGGLHKFINWNRLILTDSGGFQVFSLSKRNKITEKGIYFFSPINGDKLFLSPEISMKIQKILNSDIVMQLDECTPYKIYNRILSENEVENSMKMSLRWAQRSKEEFYKINNKNSLFCIVQGGMFKNLRDESLEKLKEIGFDGFAIGGLSVGEPKKKMIKILQYIGPKLPIDKPHYLMGAGTPEDIIMAVSNGIDMFDCIIPTRNARNGLLFTNFGNIKIKNARYKFDKNPLDYSCNCYTCKNFSRSYLHYLHRKGEILGSRLNTIHNLYYYFQLMRKIRLSINNNIFEKFVKDFCENRKYENKF

SEQ ID NO: 53422 - protein, 377 aa, Promineofilum breve
  misc_feature (1)..(377): tr|A0A1A9C9B6|A0A1A9C9B6_9CHLR Queuine tRNA-ribosyltran sferase OS=Candidatus Promineofilum breve OX=1806508 GN =tgt PE=3 SV=1
MSFEFTLLAQDGAARLGRFDTPHGPLETPVFAPVGTAATVKAMRPRDLVELGASLVLANTYHLYLRPGDELIRDLGGLHRFMGWDGPILTDSGGFQVFSLSDARRIDDDGVTFKSHLDGSSHRFTPEKSIAVQENLGADVIMVFDECPPPNDYDYVRQSLGRTHAWAARCLAAKTRADQALFGIVQGGIFRDLREASARFLLDLDLPGYAIGGLAVGETKPEMHAVLEWLHPLLPADKPRYLMGVGAPEDLVNGVLRGIDIFDCVLPTRIARNGAALLLGGRINLRNAQYAADPLPIDPACTCYACAHFSRAYIRHLVKADEILASILLTTHNLHFLLHLMDDLRKAIRKGTLAEYADEFLSHYPVGGAGEQERTDH

SEQ ID NO: 53423 - protein, 365 aa, Promineofilum breve
  misc_feature (1)..(365): tr|A0A160T6Q5|A0A160T6Q5_9CHLR tRNA-guanine transglycos ylase, various specificities OS=Candidatus Promineofilu m breve OX=1806508 GN=CFX0092_A3080 PE=4 SV=2
MTNVKTLSLPHGDLPLPAFLPDGTQGVVRAVSAEDLEAVGVRAVQMNVYHLMQRPGTSTIQALGGLHRLAGWSRPIFTDSGGFQVYSLIRGNPKAGSITDRGATFRPGGDRKYILTPEKSIQLQFAYGSDMLICLDDCTGPDDPPARQADSVRRTIRWAAECKRAYLRLVEQKRLGEAQRPRLMAVIQGGLSPELRRECATALLDIGFDAYGYGGWPLDAGGNLLTEMVSLVRELVPPAYPVHALGIGHPANVVACVGMGYELFDSTMPTRDARHGRLLLFTRDPAAAPLGPGGDWFAYVYPGDDKHVKTAAPVSAYCDCPACARYSLAYLHHLFKLNDSLYFRLATLHNLRFMTMLMERLKNNN

SEQ ID NO: 53424 - protein, 392 aa, Protochlamydia amoebophila
  misc_feature (1)..(392): tr|A0A0C1HC33|A0A0C1HC33_9BACT Queuine tRNA-ribosyltran sferase OS=Candidatus Protochlamydia amoebophila OX=362 787 GN=tgt PE=3 SV=1
MNCNFLFYSFCKVGQYMTYFKFELIHRSKKSRARVGRIHTPHGIIDTPNFVAVGTNGTVKALNNTMLHDIGLQLMFCNTYHMMLQPGTDIVRQAGGLHSFIQRKLPIITDSGGFQVFSLAYGSVADELKSRGTKKQGGCVLKITEEGVLFRSYRDGSKVLLTPESSIKAQKDLGADIIIPFDELPPYHIARDALKKSLDRTHRWEKRSLEAHLKNPQEQAMYAVVHGGIDPDLRKESCAILTELPFDGFAVGGSMGKTKDEMHTLLSLTLPLLPEDKPNHLLGIGDLPSIERSVPLGIDTFDSSYPTRAARHGILLTKQGPLNITKSEYATNFNSIEKGCLCPACHHFSLAYIHHLFKARELTCMSLATVHNLYFMVQLMEKYRKQIQEDLI

SEQ ID NO: 53425 - protein, 376 aa, Protochlamydia naegleriophila
  misc_feature (1)..(376): tr|A0A0U5JF92|A0A0U5JF92_9BACT Queuine tRNA-ribosyltran sferase OS=Candidatus Protochlamydia naegleriophila OX= 389348 GN=tgt PE=3 SV=1
MKSFHFELIHRSKRSRARVGRIHTPHGIIDTPNFVAVGTNGTVKALDNSMLHDIGLQLMFCNTYHLLLQPGTETVRQAGGLHQFIHRKLPIITDSGGFQVFSLAYGGVADELKSRGTKKQGGCVLKITEEGVLFRSYRDGSKVLLTPESSIKAQKDLGADIIIPFDELPPYHIAPEALKKSLARTHRWEQRSLEAHLKNPQQQAMYAVIHGGVDPELRQASCSFLTGLPFDGFAIGGSMGKTKDEMHTLLSHTLPLLPQEKPNHLLGIGDLPSIDRSIPLGIDTFDSSYPTRAARHGILLTSQGGLNITKSEYAKNFSPIEKDCGCPACAKFTLAYIHHLFKARELTSMSLATIHNLYFMVQLMQKYREDIMEDKV

SEQ ID NO: 53426 - protein, 374 aa, Pseudomonas adelgestsugas
  misc_feature (1)..(374): tr|A0A481QMN5|A0A481QMN5_9PSED Queuine tRNA-ribosyltran sferase OS=Candidatus Pseudomonas adelgestsugas OX=1302 376 GN=tgt PE=3 SV=1
MSHMSFKLLAVDGKARRGRLTFPRGNVETPAFIPVGTYGTIKGILPRDIVTTGTEIILSNTFHLWQRPGTAVIKRHGDLHDFMKWQGPILTDSGGFQVFSLGAIRKIKEEYVTFISPVDGSKVFISPEESMQVQRDLGSDIVMIFDECTMYPADEGVARISMELSLRWAQRSKSAHGDNIAALFGIVQGGMHENLRKLSLEGLDKIGFDGLAIGGLSVGEPKHEMIAVLDYLPGLMPANKPRYLMGVGKPEDLVEGVRRGIDMFDCVIPTRNARNGYLFIDTGVLRIRNALHRHDDSLLDSSCDCYTCQNFSRAYLHHLNKCGEILGSMLNTIHNLRYYQVLMASLRDAIQQGTLTAIVAAFYAKRGLTVPPLD

SEQ ID NO: 53427 - protein, 379 aa, Puniceispirillum sp.
  misc_feature (1)..(379): tr|A0A1Z8UVC2|A0A1Z8UVC2_9PROT Queuine tRNA-ribosyltran sferase OS=Candidatus Puniceispirillum sp. TMED52 OX=19 86639 GN=tgt PE=3 SV=1
MTNPDFQFSLLNSDGGARRGRLNTAHGVIETPVFMPVGTAATVKAMTVDDVWATGAMIILANTYHLMLRPGAERVERLGGVRRMMGWDGPLLTDSGGFQVMSLGNLRKIDEDGVTFKSHLDGSKHRLTPERSTDIQRMLDATITMAFDECTPFPAEHDVAATSMRLSMDWAERCRAAFVKRQGYGQFGIVQGSIYPDLREESVKRLEQIDFDGYAVGGLAVGEGQDAMFATLDVTTPMMRADKPRYLMGVGKPDDIVGAVARGIDMFDCVLPTRSGRTGQAFTPRGTVNMKNARHADDPRPLDETCACSACRRYSRAYLHHLFKADEVLGLMLLTQHNITYYQHLTAAIRTAIDHGQFADFADQFYETKALGDIPPLDG

SEQ ID NO: 53428 - protein, 380 aa, Puniceispirillum sp.
  misc_feature (1)..(380): tr|A0A3R7ZJV2|A0A3R7ZJV2_9PROT Queuine tRNA-ribosyltran sferase OS=Candidatus Puniceispirillum sp. TMED213 OX=1 986634 GN=tgt PE=3 SV=1
MTKNDRPAFGFEVLQQDGAARRGRVTSGFGVVDTPAFMPVGTAASVKAMMPEQVASTGAQIILSNTYHLMLRPGPERVERLGGVRKLMGWDGPLLTDSGGFQVMSLGPLRNISEQGVSFKSHLDGSIFDLTPERSTQIQHMLDATITMAFDECTPFPATYDEARASMELSMRWAARSRSAYVARTGYGQFGIVQGSVFEDLRHHSIKALTDIGFEGYAIGGLAVGEGQEAMFSTLNATCPAMPPDKPRYLMGVGKPADIVGAVQRGVDMFDCVMPTRSGRTAQGFTRRGPVNIRNARHAEDMRPLDESCSCPACMKFSRAYLHHLFKADEIQGLMLLTWHNLQHYQDLMAGLRSAIDTGLLDDFAAGFAEEQARGDIPPF

SEQ ID NO: 53429 - protein, 378 aa, Raymondbacteria bacterium
  misc_feature (1)..(378): tr|A0A1F7FFE5|A0A1F7FFE5_9BACT Queuine tRNA-ribosyltran sferase OS=Candidatus Raymondbacteria bacterium RIFOXYD 12_FULL_49_13 OX=1817890 GN=tgt PE=3 SV=1
MDAETFKFKLEGQDPATSARAGKITTSRGEIETPVFMPVGTAGAVKTLCSEDLLALDAKIILSNTYHLVVRPGLDVIEKAGGLHKFMNWNRPILTDSGGYQVFSLKETRKVTDEGVEFRSHVNGDKLMFTPESVIAAQKTIGSDIIMPFDECVMHPCPKDDAAKAMVRTHEWLARSMAAHEKNNGSQALFGIVQGSVHPDLREESAKFIAAADVAGSAIGGLSVGEPAETMYAMLDCICPHLPQDKPRYLMGVGTPENIVEAVSRGVDMFDCVIPTRNARNGQVFTSRGRVHYKAGEYKNSADIALDPDCGCFVCKNYSRAYLRHLFNANEITALRLATYHNLYFYLNMMQEIRAAIVAGNFAAWRKTFLAGVTEENH

SEQ ID NO: 53430 - protein, 673 aa, Raymondbacteria bacterium
  misc_feature (1)..(673): tr|A0A1F7F3M2|A0A1F7F3M2_9BACT Queuine tRNA-ribosyltran sferase OS=Candidatus Raymondbacteria bacterium RIFOXYD 12_FULL_49_13 OX=1817890 GN=tgt PE=3 SV=1
MIDTNNRLKFTIDAEADNSSARACTFTTLHNTVQTPVFMPVATFASLRNQTLDIPREIGYTVLLANTYHLLLRPGTEVFRKIGGIHRFMNWNRSVLTDSGGFQLFSLSESSVISEEGARFKSYVNGDTLLLSPESSIETQKIISSDIMMALDQCISSASNEKQCRESVDITARWAERSLIARGDSSQSVFGIIQGACFQNLRKISAQQITSLPFDGFAIGGLAVGESADERNDITELTAQLMPANRPRYLMGVGTPIDLLEAVHRGVDMFDCIVPTAMAQQGVAYTSTGKIKLHRSVYKLADEPLDGICDCPACKNYTRAYLHHLVRINEYLGGYLIGQHNLTYYHRLMNDMRNHIISGDFRSFYNRKKEELILSDDVNPKTVPTKKFRKNIRELGNYEVIQQEAGFHSIYDKVSGETMHSVIDPMIESKVLYVDQSDLNQHLSKDLCEPLVIWDVGLGAATNAMAAVREIERLRKECGFKRAVQIISFENDLDSIRLALQNPFHFLHIKHAAPFSIAKTGYWENSASGIQWTLVVGDFAESHKKAPAPDIIYYDMYSQKTNKSLWSLQLFKKTFDHCQGKNARLITYSASTRVRAALLAAGFFVCYGTGTGFIADTTIAFTSFEEVKSHPKPIGKEWLARWERSTAKTDSNLSEEENETFNQKVLNHRQFVS

SEQ ID NO: 53431 - protein, 377 aa, Regiella insecticola
  misc_feature (1)..(377): tr|G2GWK8|G2GWK8_9ENTR Queuine tRNA-ribosyltransferase OS=Candidatus Regiella insecticola 5.15 OX=1005043 GN=t gt PE=3 SV=1
MKFELLNTDGNARRGRLVFDRGTVETPAFMPVGTYGTVKGMTPEEVKTSGAQILLGNTFHLWLRPGEQIIKKHGDLHNFMQWQEPILTDSGGFQVFSLGAMRKIKEEGVHFNSPIDGSKVFLSPEKSMEIQTALGSDIVMIFDECTPYPADWDYAKKSMELSLRWAQRSRQRFNELNNQNALFGIIQGGIYPGLRDTSLNRLLEIGFDGYAVGGLAVGEPKADMHRILEHICRQIPQEKPRYLMGVGKPEDLVEAVRRGIDMFDCVMPTRNARNGHLFVTEGVIKIRNAKHKEDDSTLDKDCDCYTCRHYSRAYLHHLDRCNEMLGARLNTIHNLRYYQRLMTALRQAIENKKLEDFVKEFYYQIGISTVLEISDTV

SEQ ID NO: 53432 - protein, 367 aa, Regiella insecticola
  misc_feature (1)..(367): tr|E0WS92|E0WS92_9ENTR Queuine tRNA-ribosyltransferase OS=Candidatus Regiella insecticola LSR1 OX=663321 GN=tg t PE=3 SV=1
MKFELLNTDGNARRGRLVFKRGTVETPAFMPVGTYGTVKGMTPEEVKTSGAQILLGNTFHLWLRPGEQIIKKHGDLHDFMRWQSPILTDSGGFQVFSLGAMRKIKEEGVYFNSPIDGSKVFLSPEKSMEIQKELGSDIVMIFDECTPYPADWDYAKKSMELSLRWAQRSRQRFDELNNQNALFGIIQGGIYPDLRDISLNQLLEIGFDGYAVGGLAVGEPKAEMHRILEHICPQIPQEKPRYLMGVGKPEDLVEGVCRGIDMFDCVMPTRNARNGHLFVTEGVIKIRNAKHKEDDSTLDKNCDCYTCCHYSRAYLHHLDRCNEMLGARLNTIHNLRYYQRLMAALRQAIEDKKLEDFVKEFYYQIGI

SEQ ID NO: 53433 - protein, 375 aa, Rhabdochlamydia sp.
  misc_feature (1)..(375): tr|A0A486XJS9|A0A486XJS9_9BACT Queuine tRNA-ribosyltran sferase OS=Candidatus Rhabdochlamydia sp. T3358 OX=2099 795 GN=tgt PE=3 SV=1
MTFRFELLHTSTKSKARVGKIYTPHGVIDTPNFVGVGTNGTIKALDNQSVHEIGLQLMFCNTYHLLLQPGTSIVKQAGGLHSFINRSLPIITDSGGFQVFSLAYGSIADELKGKGTKKQAGHVLKISEEGVVFRSYRDGKKVLLTPESSIEAQKDLGADIIIPLDELPPYHIEKKALEDSLARTHRWEERSLHTHLKNPNNQAMYAVIHGGVDAALREKSCRYLTKLPFDGFSIGGSMGRTKQEMFEVLRSTMSHLPLEKPNHLLGIGDLTSIEMCIPMGIDTFDSSYPTRAARHGILLTQEGHLKIGKSSHAQMFSPPEKNCSCSTCSRFSLAYLHHLFKAKEATCMILATIHNLHFMVQLMQRYRTKILHNDI

SEQ ID NO: 53434 - protein, 335 aa, Rhodobacter lobularis
  misc_feature (1)..(335): tr|A0A0J9H011|A0A0J9H011_9RHOB Queuine tRNA-ribosyltran sferase OS=Candidatus Rhodobacter lobularis OX=1675527 GN=tgt PE=3 SV=1
MKAMLPESVRATGADILLGNTYHLMLRPTAERIARLGGLHGFMNWDRPILTDSGGFQVMSLADLRKLTEEGVSFKSHIDGSKHMLSPERSMEIQRLLGSDIVMCFDECPALPAERAQIAESMRLSMRWAQRSRDAFGDRPGHALFGIQQGGLEQDLRAESAEALRGIGFDGYAIGGLAVGEGQEAMFGCLDYAPDQLPSDKPRYLMGVGKPDDIVGAVKRGVDMMDCVLPSRSGRTGQAWTRRGPVAIKNARHADDPRPLDETCTCPACTGYSRAYLHHVFRAGEMISGMLLTWHNLHYFQELMSGMRAAIASGTFEAWEAEFHAQRALGDIERV

SEQ ID NO: 53435 - protein, 383 aa, Rickettsiella isopodorum
  misc_feature (1)..(383): tr|A0A1J8NJK2|A0A1J8NJK2_9COXI Queuine tRNA-ribosyltran sferase OS=Candidatus Rickettsiella isopodorum OX=12254 76 GN=A1D18_01400 PE=3 SV=1
MNNQFNCELLKSSKNSQARVTKITTAHGSVLTPAFMPVGTRAFVNHMMPQDLRDAGSQIILGGNTYHMLLNPGMEVILASGGMHRLMAWDKPMLTDSGGFQVFSLSKNSKICHIDAKGAHFKHPTTGKVIHLTPKSSIEAQRIIGADIIMAFDECTPENGGRDAALAAMDRTHRWLLTSKETYLVSDSVYGHQQALFGIIQGGSFRDLRELSTQFILAAELDGIAIGGEVIGFDMQKTVEVIDWIRPLLPDNKVRYTMGVGLNPQDLIDVAAKGIDLFDCVAPTRNARHGALYHGNVIKKDNGLEFVSEENQSRILIKKSIYAKDETPILAGCLCYTCRHFTRAYLHFLFKQGSSLYNQLACIHNLYIMHHVCEQIRRLIFDE

SEQ ID NO: 53436 - protein, 388 aa, Rickettsiella viridis
  misc_feature (1)..(388): tr|A0A2Z5UW57|A0A2Z5UW57_9COXI Queuine tRNA-ribosyltran sferase OS=Candidatus Rickettsiella viridis OX=676208 G N=tgt PE=3 SV=1
MNNQFSSRLIKASKATSARVMEITTPHGILTTPTFMPVGTRAFVNHMTPDDLIHAGSQIILGGNTYHMLLNPGMDVIKASGGMHRLMAWNKPMLTDSGGFQVFSLSKNSKICRIDSEGAHFKHPINGKVIHLTPKSSIETQKIIGADIIMAFDECTPEQGGREAALPAMERTHRWLLESKETYLASPYSAYGYKQALFGIVQGGSFQDLREQSARFIVDADLEGIAIGGEVIGFNMQKTGEVIDWVRPLLPANKVRYTMGVGLNPQDLIDVVKKGIDLFDCVAPTRNARHGGLYHGKISKTADWITFLSEEQNGRLFIGKAIYAKDDRPILEGCLCYTCLHFSRAYLRFLFKQGSSLYSQLACIHNIFIMQTVCEQLRALILAERTEE

SEQ ID NO: 53437 - protein, 676 aa, Riflebacteria bacterium
  misc_feature (1)..(676): tr|A0A2N1TI05|A0A2N1TI05_9BACT Queuine tRNA-ribosyltran sferase OS=Candidatus Riflebacteria bacterium HGW-Rifle bacteria-1 OX=2013829 GN=tgt PE=3 SV=1
MTRLNFTIDKSAHGSRARAARFTTLHSEVITPVFMPVGTRATVKGMTVESLVENGSQVLLANTYHLLLRPGPEVFKKIGGIHRFMNWKGSVLTDSGGFQIFSLPHSREMTEDGARFTSYVDGKTFMLTPELSIEMQKAIGSDIMMVLDQCINSTSGYDEAKAAMELTHRWALRSLAARGDSKQAMFGIVQGACHPELRQQSAEFLRAQPFDGLAIGGLAVGETHSERYDFTELVTGYLPENLPRYLMGVGTPIDILEAVHRGVDMFDCIIPSQLAHRGVVFTSHGKLQFRRTVYRFSEEPIDAECDCYACKNYSRAYVHHLVKAEEPLAWRLLTCHNIRFYHQLMARIRDAIMHDRFVEFYEKMRHELVRHDGDNPQNPPKRRTANPPTLGDYEIVKFAQGFSSIRQRSSGEIMHSVNKPAEEAEKLYVEQSHLAERLLKTPGNDSELIVWDVGLGAATNAMAAVHCFEKTLAEHGSEKMRSMRLISFECDLDPLTLACRDNANFHYLRHGAPHHILRSGQWQHHSKLLLWELIKGDFLELFDKSPAPDLIYYDPFSAKTDSALWTSEAFTRLFKSCGGRSVELYTYSAATAVRVAMLRAGFFVAEGMATGPKSATTVAFNQASGAGEHPEKPNLLDERWLERWRRSGSRFPPDISQHEKDQITQVIEQHPQFKTA

SEQ ID NO: 53438 - protein, 377 aa, Riflebacteria bacterium
  misc_feature (1)..(377): tr|A0A3B9I0A0|A0A3B9I0A0_9BACT Queuine tRNA-ribosyltran sferase OS=Candidatus Riflebacteria bacterium OX=205358 6 GN=tgt PE=3 SV=1
MNTSEFTFTVEHKSEECLGRAGVINTRRGQIETPVFMPVGTAGTVKTLSPQELRESDTSIILGNTYHLMLRPGTPVLDHFGGLHNMMGWDRPMLTDSGGFQVFSLKKLNKISDDGVEFASHIDGSKHWLSPEESMRIQRSIGAEIMMVFDECCPYPSEESLARRAMERSVAWAKRCRADHPRMRNGQALFGIVQGSMYLPQRLESIERTAEVGFEGLAIGGLSVGEPKPLMIEILDGMMPHMPTHLPRYLMGVGTPEDLLTGVERGVDMFDCVHPTRIARHATVFTRNGRISLLNARWQISDQPIDESCTCYACRTFSRGYLRHLFKAREILGLRMASLHNVTFMVNLMSEIRQALIAGRFIEFRDRFLANYLSKEI

SEQ ID NO: 53439 - protein, 404 aa, Roizmanbacteria bacterium
  misc_feature (1)..(404): tr|A0A1F7GG03|A0A1F7GG03_9BACT Queuine tRNA-ribosyltran sferase OS=Candidatus Roizmanbacteria bacterium RIFCSPH IGHO2_01_FULL_39_12c OX=1802031 GN=tgt PE=3 SV=1
MIKFFKVLKKSKKSKARLGLISTPHGKIQTPAFVPVATKGTLKSLIPYQLKKIGIQAAFVNTYHLVSHPGADVIAAAGGIHNFSRLDIPLMSDSGGFQVFSLAKRNPQGSGNPEGSLIKKADIRGEEQPLIVKISDGGVKFRSLYDGRLIEFTPEKSMQFQQKIGADIIMAFDECTYYPAAHAYSRMAMIRTHNWLNRCIAQNQNLKIKNQNDKSKLKNNQFLYGIIQGGTYEDLRKGSAKFVTSQGVDGVAIGGVSVGETKKEMRNQVKWVSEYLPEDKPVHLLGVGHIDDIADLVKYGIDTFDCVEPTRLARLGQLYRISNAQIPASNLKEIDILTGKYKFDLSPVDEDCACYTCKNFTKAYLHHLFKQKELTAYTLATVHNLCVMERLMTNLRKAIAENKI

SEQ ID NO: 53440 - protein, 416 aa, Roizmanbacteria bacterium
  misc_feature (1)..(416): tr|A0A2M7QCQ7|A0A2M7QCQ7_9BACT Queuine tRNA-ribosyltran sferase OS=Candidatus Roizmanbacteria bacterium CG_4_10 _14_0_8_um_filter_39_9 OX=1974829 GN=tgt PE=3 SV=1
MSQFFKVTSRSKKACLPAGRSKARLATITTDHGVIQTPAFVPVGTKGTIKALPQSFFKDIGIQLSFVNTYHLVTHPGVEVFKKAGGIHNLADYNIPLMSDSGGFQVFSLAKNEKRRAAVRGDEQPLVEKISDDGVKFRSVYDGQLIEFTPEKSMEYQKIIGADMNMAFDECTYYPATHEYTEKAMKRTHEWLKRCISYRMSNHQLQITNQSQISKSQPPTTNYQLPTINQYLYGIIQGGTYEDLRLASAKFIQTQDVSGVAIGGVSVGETKSEMRDQVRWVAPYLPQDKPVHLLGVGQVDDIIDLVKYGIDTFDCVEPTRVARMGSIYQLRSILLQLEDKKEPYEIDIQKSVYKTDVSSLDEDCDCYVCKNYTKAYLHHLFKQREIIGYTLATYHNLWVMERLMEKIREMITENLL

SEQ ID NO: 53441 - protein, 375 aa, Rokubacteria bacterium
  misc_feature (1)..(375): tr|A0A1Q7IJI9|A0A1Q7IJI9_9BACT Queuine tRNA-ribosyltran sferase OS=Candidatus Rokubacteria bacterium 13_1_40CM_ 4_67_11 OX=1805361 GN=tgt PE=3 SV=1
MTFALLATDGAARRARLTTAHGAVDTPAFMPVGTRGTVKALGPDDLIAAGAQIVLANTYHLLLRPGHDLIRDLGGLHRFMAWDGPILTDSGGFQVFSLAKIRTMSENGVEFRSPIDGSTHLLTPERSIEIQHALGADIIHPLDECLAYPATREATERSLALTLRWARRAQAAHAEGASQAALFGIVQGGAWDDVRERAVAETVALGFDGYAIGGMAVGEPKPLMYTLTASVAARLPAAQPRYLMGVGKPEDLIEAVSQGVDLFDCVLPTRNARNGQCFTTEGPLVIKHAEYARDARPLQDDCGCYACRRFSRAYLRHLFLSEELLAFRLLSLHNVHFFLGLMASLRSAIAERRLEAFKTRFFDRYPVPAAERSSD

SEQ ID NO: 53442 - protein, 386 aa, Rokubacteria bacterium
  misc_feature (1)..(386): tr|A0A2V6SJD6|A0A2V6SJD6_9BACT Queuine tRNA-ribosyltran sferase OS=Candidatus Rokubacteria bacterium OX=2053607 GN=tgt PE=3 SV=1
MTAPVSFELLARDGAARAGRLATPHGTVETPAFMPVATVGSVKSLSPADVRVSGGQIVLANTYHLSLRPGHEVIRELGGLHRFMGWDGPVLTDSGGFQVFSLSKLRRLGEEGVEFRSHIDGSLRLLTPESCVEIQHALGVDILHPLDECLPYPATETDTERSLGLTLRWLARAVATHAKGDGGRALFGIVQGGTSSVLRRSAVEAVCAYDLPGYSIGGLAVGEDIGRLYDVAELTATLLPSDRPRYLMGVGKPRDLVEAVARGIDLFDCVLPTRNARNGQAFTADGPLTITHARYARDPAPLDADCPCEACRLFSRAYLRHLFASRELLAYRLLTLHNLTFYHGLLTGARRAISEGRFSSFRSRLLERYGVESVGGSDPISTATEA

SEQ ID NO: 53443 - protein, 380 aa, Ryanbacteria bacterium
  misc_feature (1)..(380): tr|A0A1G2GAQ6|A0A1G2GAQ6_9BACT Queuine tRNA-ribosyltran sferase OS=Candidatus Ryanbacteria bacterium RIFCSPHIGH O2_02_FULL_45_13b OX=1802117 GN=tgt PE=3 SV=1
MLAFTILKKSKKSRARLGLLATKHGMVETPAFVGVATQAVVKTLSSEEAEAMGCQMLIANTYHLHIRPDEKIVKAHGGLHAFMNWRHPLMTDSGGFQVFSLGFGKDLGMSKMLKHKVGKREELDAKAKPTSLRITEDGVVFRSYVDGKEIFLGPKESMNIQGALGADIIFAFDECPPPVASHEYMKQSVERTHRWAEICLREKKKTQALYGIVQGGKHADLRTMSATFFASKPFDGYGIGGEFGVGGAERSRMLRLTIDTLPDEKPRHLLGTGYIEDIARLIKEGVDTFDSIVPTHYARHGTAFTSAGKLDLGKSVFLKDTSPLDPTCACPICKHYSRGYIAHLFRAHEITPLKLLTMHNLWFFNAYVASLREKIKKGQM

SEQ ID NO: 53444 - protein, 378 aa, Ryanbacteria bacterium
  misc_feature (1)..(378): tr|A0A1G2G646|A0A1G2G646_9BACT Queuine tRNA-ribosyltran sferase OS=Candidatus Ryanbacteria bacterium RIFCSPHIGH O2_01_FULL_48_27 OX=1802115 GN=tgt PE=3 SV=1
MIHFSILKKSKKSRARLGLLETPHGVVETPAFVGVATQATVKAMTMDQVRSTGMQLLIANTYHLHIRPGEDVVKKGGGLHKFMDWDRPLMTDSGGFQVFSLGFGKDRGTGKILKEKSDEKIREGEQPRTVRITEDGVEFRSYVDGRKLFIGPRESMRIQEKLGADIIFNFDECTSPIADHAYTKKSLDKTHRWARVCIDSKKSKQALYGVVQGGKFKDLRIESAEFMNKLPFAGFGIGGEFGDDKRQMTKMIDWVVSELDEARPRHLLGIGYLEDMPKIIASGIDTFDCIVPTHYARRGVAFTSRGRLDIGRTEFLSDKKPLDPKCSCFVCQNHTRSYLSHLLRAHEITPLTLLSFHNMHYFNAYVSMLREDIKKGNL

SEQ ID NO: 53445 - protein, 402 aa, Saccharibacteria bacterium
  misc_feature (1)..(402): tr|A0A1F7Q1Y8|A0A1F7Q1Y8_9BACT Queuine tRNA-ribosyltran sferase OS=Candidatus Saccharibacteria bacterium RIFCSP HIGHO2_01_FULL_46_30 OX=1802133 GN=tgt PE=3 SV=1
MKKALEFTIHHRLDGTLARTGTITTPHGVIETPAFIPVGTKATLKALTPEQLEEVGAQAVLANAYHLYLRPGHEIIDKAGGLGQFMHWNKPTFTDSGGFQVMSLGVGFKKIIDMDGKTDERPLSKKEKLAWIDNDGVTFKSHLDGSYHKFTPELSMQIQHGIGADITFAFDELTTLHHDYNYQVESLHDRTHPWAVRSLEEHKRLNEERSHRPPQALFGVVQGANYEDLRRECSRFLGAMDFDGFGLGGAFTKENIGEITGWMCQELPEDKPRHMLGISEPDDIFDCIENGADTFDCVSPARVGRNGALYTKFGRVNVTRLQYKEDFTSFDETCDCYTCQNYTSAYLHHLFKAGELLANTLATIHNERFIIKLVDDIRGSIADGSFYEFKKEFLDNYYSKKQ

SEQ ID NO: 53446 - protein, 400 aa, Saccharibacteria bacterium
  misc_feature (1)..(400): tr|A0A1F7QUQ1|A0A1F7QUQ1_9BACT Queuine tRNA-ribosyltran sferase OS=Candidatus Saccharibacteria bacterium RIFCSP HIGHO2_12_FULL_44_22 OX=1802140 GN=tgt PE=3 SV=1
MKKALEFEIHDRLPGALARTGTITTPHGIIQTPAFIPVGTKATLKALTPEQLSETGAQAVLANAYHLYLRPGHDIIDQAGGLNEFMHWDKPTFTDSGGFQVMSLGVGFKKIIDMDGKTDERPLGKKEKLAWIDNDGVKFKSHLDGSMHKFTPELSMQIQHGIGADITFAFDELTTLHHNYEYQVESLHERTHPWAVRSLVEHQRLNEVRTHRPPQALFGVVQGANYEDLRRECSKFLGAMDFDGYGLGGAFTKENIGEITGWMCQELPENKPRHMLGISEPDDIFDCIENGADTFDCVSPARVGRNGALYTKFGRVNVTRAQYATDFTSFDADCDCYTCQNFTSAYLHHLFKSGELLSNTLATIHNERFIIRLVDDIRRSISDGTFYDFKQVFLNNYYSK

SEQ ID NO: 53447 - protein, 372 aa, Saccharicenans subterraneum
  misc_feature (1)..(372): tr|A0A3E2BLB9|A0A3E2BLB9_9BACT Queuine tRNA-ribosyltran sferase OS=Candidatus Saccharicenans subterraneum OX=25 08984 GN=tgt PE=3 SV=1
MSNSFTITARDSSCQARTGILETLHGQIETPVFMPVASQGTVKALTHDILNQLDCQIILVNSYHLFLRPGVELIRKMGGLHRFISWPKAILSDSGGFQVYSLSPLVKISEEGVQFSSHLDGKKIFLTPEEAVRIQAGLGTDIMMCLDYFPSFPYTEEQVAYSVGLTGRWARRCREEYDHLQPGTQLWGITQGGVFWSYREKSIEEIVSCDFHGYALGGLGIGEPKSQLYEILEESNRLLPQDRPRYLMGMGYIEDILEAVERGVDFFDCVLPTRNARNGTLFTSQGRIVIKNQKYADDPRPPDENCSCYTCRNFSRAYLRHLYERNEISSAILNTIHNLYYYLDMFKKIRQSIQSNSFRSFKKAIIEKILSE

SEQ ID NO: 53448 - protein, 415 aa, Saccharimonas aalborgensis
  misc_feature (1)..(415): tr|R4PX68|R4PX68_9BACT Queuine tRNA-ribosyltransferase OS=Candidatus Saccharimonas aalborgensis OX=1332188 GN= tgt PE=3 SV=1
MKHALTFEITDRLEGTLARAGIIHTPHGAIETPAFIVGGTKATVKAITPEQIKEYGGQAVLANTYHLMLRPGTAIIKQAGGLSKFMNWNGPTFTDSGGFQVFSLGVAYKKGIDAVAHTERGDAAKAVKSSDQLVKITERGAHFRSHYDGQKLLMTPESSMELQHEIGADIHMAFDECPAPLAPPYYLVEALERTHAWAERCLTRHQELNKEHEKNGEPLQALYGVVQGARDEKPRKQSAAFLGARDFDGYGIGGVFETSEIPTVVKWVDETLPDDKPRHLLGMGAQPADLFLGVEYGVDTFDCVAPTRQARNGALYTYDGRINIINTRYKTDFAPIDGECDCYTCLHYTRAYINHLFKSDEILGATLASIHNERFVVRTVDQIRQSLKDKTFFELKKRFLHRYYGDTPPVGVIVE

SEQ ID NO: 53449 - protein, 370 aa, Scalindua brodae
  misc_feature (1)..(370): tr|A0A0B0EJQ6|A0A0B0EJQ6_9BACT Queuine tRNA-ribosyltran sferase OS=Candidatus Scalindua brodae OX=237368 GN=tgt PE=3 SV=1
MQFRLLANDNKTKARCGEITTNHGIIPTPAFMPVGTQATVKALTPCQLKETNAHALLCNAYHLYLRPGEDIVKKLGGLHKFMNWDGAIITDSGGYQVFSLARLTKVTDDGVEFQSPIDGSRRFLDPEKVMKIQHSLGADIIMAFDECLPYPCERDRVKQSMHRTVKWANRCLNAHNSEDQDLFAIVQGSVFKDIREECADRLVEIGFNGYAIGGLSVGEGNHLMNEVLEYTVPRLPADKPRYLMGVGFPLDILDGIEHGIDMFDCVIPTRNGRNGCAFTMDGKLKIRNSCYKEDERPLDKDCHCYTCKNFSRGYIRHLLTANEILGLSLMSFHNIYFFENMMEKARKSIIEGNFSNFKSHFLSLTVEKSC

SEQ ID NO: 53450 - protein, 367 aa, Scalindua sp.
  misc_feature (1)..(367): tr|A0A523CUQ3|A0A523CUQ3_9BACT Queuine tRNA-ribosyltran sferase OS=Candidatus Scalindua sp. AMX11 OX=2555784 GN =tgt PE=3 SV=1
MRFRLLASDKNTNARCGELVTNHGLVETPVFMPVGTQATVKSLTPEQLKGAGVSALLCNAYHLHLRPGEEIVRDHGGLHDFMNWDGMIVTDSGGYQVFSLASLTCVTDDGVEFKSPVNGSKIFFSPEKVIEIQRSLGADIVMVFDECLPYPCEKDRAYLSMKRTVEWARRCRDVLLNESQSLFCIVQGSVFQDIRQECVHRLVDMGFDGYAVGGLSVGEGNSLMNEVLEYTVPHLPEEKPRYLMGVGFPKDILDGIEHGIDMFDCVIPTRNGRNGCVFTSEGKINILNSRFKVDKGPLDDSCHCYTCRNFSRAYVKHLFAANEILGLNLVSFHNICFFQELMKKARQAIMDGVFKGFKTSFLSKLEN

SEQ ID NO: 53451 - protein, 375 aa, Schekmanbacteria bacterium
  misc_feature (1)..(375): tr|A0A1F7RNX4|A0A1F7RNX4_9BACT Queuine tRNA-ribosyltran sferase OS=Candidatus Schekmanbacteria bacterium RBG_16 _38_10 OX=1817879 GN=tgt PE=3 SV=1
MFKFNVLKKDKNSRARLGKISTPHGEIQTPAFMPVGTQGTVKAVCSEDLLEAGAEIILSNTYHLYLRPGHELIKEFGGLHKFMNWGKPLLTDSGGFQIYSLARFRKIQDEGVMFQSHIDGASHFITPEKAVEIQEAIGADIIMVFDECIPYPAEYEYCKSSTEMTLRWALRCLKAQKRNDQALFGIVQGGMYEDLRKYCAEELGEMGFAGFAIGGLSVGEPKEIMWDIVNYTEEYLPEDRPRYLMGVGTPEDILDAVAKGMDMFDCIIPTRQARNGSLFTSKGKVVIKNSKYVKDESPADIDCSCYTCRNYSRAYLRHLYMSKEILSLRLNTIHNLHFYLGLMKEIRSAIKKDSLESMVKEYKKAYETEITEIVN

SEQ ID NO: 53452 - protein, 371 aa, Schekmanbacteria bacterium
  misc_feature (1)..(371): tr|A0A1F7RDF9|A0A1F7RDF9_9BACT Queuine tRNA-ribosyltran sferase OS=Candidatus Schekmanbacteria bacterium GWA2_3 8_11 OX=1817876 GN=tgt PE=3 SV=1
MFKFGVLKTDKSSKARLGRLLTPHGEISTPAFIPVGTQGTVKALCSKDLVDLDAEIILSNTYHLYLRPGDELIKELGGLHKFMNWERPILTDSGGFQVYSLAQFRRINEEGVMFQSHIDGSSHFITPEKAVEIQEFLGADIIMAFDECIPYPAEYDYCKKSTEMTLRWAERCLKAQKRDDQVLFGIVQGGMYNDLRKICAEELCNLGFSGFAIGGLSVGEPKEIMWDIADYTASILPEDKPKYLMGVGTPEDIIDGAMRGIDMFDCIIPTRQARNGSLFASTGKVVIKNSKYTRDENPVDPECDCYTCRNYSRAYLRHLFMAKEILSLRLNTIHNLHFYLNLMKRIRQAIENDSLESLVKEYKEIYGKVMC

SEQ ID NO: 53453 - protein, 380 aa, Schmidhempelia bombi
  misc_feature (1)..(380): tr|A0A484GBN7|A0A484GBN7_9GAMM Queuine tRNA-ribosyltran sferase OS=Candidatus Schmidhempelia bombi str. Bimp OX =1387197 GN=tgt PE=3 SV=1
MKFELDNTDGMARRGRMKFDRRGIECTVETPAFMPVGTYGTVKGMTPEEVAATGAQILLGNTFHLWLRPGQAIMRQHGDLHDFMQWSGPILTDSGGFQVFSLGDIRKIKEEGVYFRNPINGDSIFLSPEISMEIQKDLGSDIVMIFDECAPYPADWDYVKKSMEMSLRWAKRSRQRFDELQNPNALFGIVQGGVHQELRDISIKGLTEIGFDGYAVGGLAVGEPKEDMHRILEGTCPQLPADKPRYLMGVGKPEDLVEGVRRGIDMFDCVMPTRNARNGHLFVTNGVIKIRNAKYKDDITPLDPECDCYTCQHYTKAYLHHLDKCGEILGARLNTIHNLRYYQRLMAEIREAVADQRYEEFVTEFYQRMGRTPAPMQLKK

SEQ ID NO: 53454 - protein, 332 aa, Shapirobacteria bacterium
  misc_feature (1)..(332): tr|A0A2M6YRJ2|A0A2M6YRJ2_9BACT Queuine tRNA-ribosyltran sferase (Fragment) OS=Candidatus Shapirobacteria bacter ium CG07_land_8_20_14_0_80_39_18 OX=1974882 GN=tgt PE=3 SV=1
MSKFNFEILGKDVKSDARAGVIHTVHGDIKTPSFVPVGTQATVKSMSNEDLQEIGVQVFFVNTYHLYLRPGLEAIEKGNGLHSFIGWGKPLMTDSAGFQIFSLGDVNRQRKLCLQGDPLEIPLVKISEEGVKFRSHLDGSEHLFTPEKSIEVQRILGADIMIAFDECCYYPATHDYAKKAMERTHRWALRCLERSSKFHLEEIPQGGQVQSSKLGKSPQALYGVVQGGVFEDLRKESAKFISNLPFEGVAIGGVAVGESKKEMEKVLDWVVPLLPKEKPRHLLGVGEIDDIFTLVEKGIDSFDCVMPTRLGRMGHLLVRKVENREWKLDITK

SEQ ID NO: 53455 - protein, 381 aa, Shapirobacteria bacterium
  misc_feature (1)..(381): tr|A0A2M7BF19|A0A2M7BF19_9BACT Queuine tRNA-ribosyltran sferase OS=Candidatus Shapirobacteria bacterium CG03_la nd_8_20_14_0_80_40_19 OX=1974880 GN=tgt PE=3 SV=1
MERKFNFKITARDKKTQARIGIIYTAHGKIKTPAFVPVGTQASVKSLDNRDLAEIGSQLFFANTYHLYLRPGIEAIKRLGGLHSFTGWTKPLISDSAGFQVFSLNKKENTSLVKIKEDGVSFRSHLDGSSHFFTPEKSIKVQIILGADIMIAFDECTFYPASHEYSLLAMERTHRWAVRSLKEAEKRHDVQALYGVVQGGVYKDLRQNSAEYINGLPFEGTAIGGVSVGESKKEMVKVLDWTIPKLSPEKPRHLLGVGEISDIFELVQRGIDSFDCVMPTRLGRMGFCLTKIKKDGEFLIDLNKSAFAFDEKPIEKDCKCFVCKSYCRAYLHHLFRTRELLAYRLASYHNLWFIERLVDNIREAIDRGEFLNLKKQWLGSL

SEQ ID NO: 53456 - protein, 382 aa, Staskawiczbacteria bacterium
  misc_feature (1)..(382): tr|A0A1G2HLY0|A0A1G2HLY0_9BACT Queuine tRNA-ribosyltran sferase OS=Candidatus Staskawiczbacteria bacterium RIFC SPHIGHO2_01_FULL_36_16 OX=1802200 GN=A2812_02705 PE=3 S V=1
MYLMQFKILKKSKNSRARLGFLETEHGVVETPCLVPVATQAVVKTLTSEEAAETKSQILIANTFHLHLKPGEKIVEKAGKLHKFMNWKKPLMTDSGGFQVFSLGFGKDYGVSKFLGKGMSDKKIIGESGRPKSLKITQDGVFFKSFVDGSELFLGPKESIKIQEKLGADIIFAFDECTAPLASYDYVKKSLERTHKWAEISLKTKKSKQAIFGIIQGSEFKDLREESAKFIDSLDFDGFGIGGDLWRERGGTKKILDWFIPSINEKKPRHMLGVGYLENIEDIIKSGIDLFDCTVPTHYARRGIAFGSEGKLDLKNKKFFKKHEPLDKGCICEVCLNYKKDYIAHLLRAGEITALKLITFHNLWYFNTFVEGLRMKIKNGKM

SEQ ID NO: 53457 - protein, 382 aa, Staskawiczbacteria bacterium; identical to SEQ ID NO: 53456
  misc_feature (1)..(382): tr|A0A1G2IHW4|A0A1G2IHW4_9BACT Queuine tRNA-ribosyltran sferase OS=Candidatus Staskawiczbacteria bacterium RIFC SPLOWO2_01_FULL_37_25b OX=1802213 GN=A2998_01585 PE=3 S V=1

SEQ ID NO: 53458 - protein, 389 aa, Stoquefichus sp.
  misc_feature (1)..(389): tr|A0A139TDB8|A0A139TDB8_9FIRM Queuine tRNA-ribosyltran sferase OS=Candidatus Stoquefichus sp. KLE1796 OX=15742 63 GN=tgt PE=3 SV=1
MYNGGWLKRGEKMEGFWYELKHVCKQSGARYGILHTPHGDVETPMFMPVGTLATVKGISPEQLKEMNSQVILANTYHLWLRPGEDVVKQAGGLHKFMNYDGPILTDSGGFQVFSLGKTRKIEEEGVTFKSIVDGKKLFLSPEKAIQIQNDLGADIIMSFDECAPYPCTHDYMKQSVERTLRWAKRGKDAHQRDDQALFGIVQGGEYEDLRELSAKELVKMDFPGYSIGGTSVGEPKDVMYKMIDDAIKWLPEDKPRYLMGVGNPIDLIEGAIRGIDMFDCVLPTRVARHGALMTHSGRMNINNEKYKYDFTPVDDKCHCYTCRNYTRAYLRHLHKCDEIFGKSLLSIHNVAFLLQLSEDIRTAIKEDRLLDFKEEFSNSYGRDVYERAF

SEQ ID NO: 53459 - protein, 371 aa, Sulfobium mesophilum
  misc_feature (1)..(371): tr|A0A2U3QF10|A0A2U3QF10_9BACT Queuine tRNA-ribosyltran sferase OS=Candidatus Sulfobium mesophilum OX=2016548 G N=tgt PE=3 SV=1
MDFKVINTDGKARRCSIGTKRGSIDTPAFMPVGTNGTVKAMSPDEMKDIGAEILLGNTYHLYLRPGTDVISKLGGLHKFMNWEKPILTDSGGFQVFSLSTLRKIEEKGVQFRSHIDGSPHFIGPKEAMKIQGLLGSDIAMTFDECIPYPSTYEYAVKSVELTTTWAKRCRELQNEGQALFGIVQGGMFKDLRHKSAEEILGIGFDGYAIGGVSVGETKEEMHEIIDYSAPLLPSGRPRYLMGIGDLGDMLRAVDAGFDMFDCVMPTRNARNGTLFTSAGRISIKREEFKYDDRPLDPDCSCYACRNFSRGYLRHLFLSREILSMRLNTYHNLCFYLDFFRKMRTAIEEGGFNQFKDRWQPVFDKSYPDNGS

SEQ ID NO: 53460 - protein, 385 aa, Sulfopaludibacter sp.
  misc_feature (1)..(385): tr|A0A2U3KX44|A0A2U3KX44_9BACT Queuine tRNA-ribosyltran sferase OS=Candidatus Sulfopaludibacter sp. SbA4 OX=204 3165 GN=tgt PE=3 SV=1
MSPVSFEVVAECPHTRARAGLLHTAHGAIETPVFMPVGTQATVKGLTQRDLAEDLGVKILLANTYHLYLRPGHELIRKMGGLHRFMSWPNAILTDSGGFQVFSLSGLRKIAEHGVVFQSHLDGDLHTFTPESTVDAQLAFGSDILMVLDECTEYPVSHESARESMHRTLRWARQADAHFRRRMAECPAPHALFPIVQGSMFPGLRRECAAALADLDSDGYAIGGLSVGEPRPLSMEMVEATETILPRSKPRYAMGVGMPAELPEYVARGVDMMDCVLPSRNARNGCLFTSQGRLIIKHARYKDDERPLDEKCRCYTCSRYSRAYLRHLFQSGEILYAVLATRHNIRRYLDIMAEIRSAIISESFPEYLRCVRSVSVSGVEADDAG

SEQ ID NO: 53461 - protein, 145 aa, Sulfopaludibacter sp.
  misc_feature (1)..(145): tr|A0A2N9MT34|A0A2N9MT34_9BACT tRNA-guanine transglycos ylase OS=Candidatus Sulfopaludibacter sp. SbA6 OX=20431 66 GN=SBA6_910004 PE=4 SV=1
MSPVSFEVVAECPHTRARAGLLHTAHGTIETPVFMPVGTQATVKGLPHRDLAEELGVRILLANTYHLYLRPGHELIRKMGGLHRFMSWPNAILTDSGGFQVFSLSGLRKITEHGVVFQSHLDGSLHTFTPESTVDVQLAFGSEIT

SEQ ID NO: 53462 - protein, 407 aa, Sulfotelmatobacter kueseliae
  misc_feature (1)..(407): tr|A0A2U3KVA5|A0A2U3KVA5_9BACT Queuine tRNA-ribosyltran sferase OS=Candidatus Sulfotelmatobacter kueseliae OX=2 042962 GN=tgt PE=3 SV=1
MSFSFNIEKASGRARAGRLVTPHGEIETPVFMPVGTLASVKGVPQDTLEELGTQIILGNTYHLYLRPGVETVRRMGGLHGFMAWPRAILTDSGGFQVFSLNQLRKVTEEGVDFRSHLDGSSHFFSPESAMDAQIGLGADIIMAFDECTEYPADHDRMRASMELTLRWAARSKKCFEAHKSEVPWSRPRTSDVGPQQERIPRFARNDNEEGQNELRTGNWQLATGGCSTQSLFGIVQGGMDRELRKESAERTIEIGFPGYAIGGLSVGEPRALTREIVESTLEHLPADRPRYLMGVGTPEEIVEYASLGVDMMDCVLPTRAARHGLLFMSEGKISIKQARYAQDQGPLDPNCGCRVCRRYSRAYLRHLYASNEVLAQVLNTIHNLSFYLDTMRRVRHSISLGEVRFPF

SEQ ID NO: 53463 - protein, 396 aa, Sulfotelmatobacter sp.
  misc_feature (1)..(396): tr|A0A2N9N8F5|A0A2N9N8F5_9BACT Queuine tRNA-ribosyltran sferase OS=Candidatus Sulfotelmatobacter sp. SbA7 OX=20 43160 GN=tgt PE=3 SV=1
MSVHLQIEATRGSARAGKLLTPHGEVETPVFMPVGTLGSVKGVSQDVLEELGVEILLSNTYHLYLRPGVETVRQMGGLHRFMAWDRAILTDSGGFQVFSLNDLRKVSEEGVAFRSHLDGSPHFLSPEKAMEIQIGLGADIIMAFDECTEYPADAQRARASMELTLRWAGRCKNYFEEHKGEVPWASGRQPSALDKETQVLRFAQDDNLGIGHSRTQSLFGIVQGGMDRDLRRESAERTIDIGFPGYAIGGLSVGEPRELTRDIVESTLEHLPSNQPRYLMGVGTPEEIAQYAQAGVDMMDCVLPTRAARHGLLFTSEGKVSIKQVRYAQDDNALDPACDCRVCQRYSRAYLRHLYASNELLAQVLNTVHNLHYYLATMRTVRAWIRAGSGTAPQVS

SEQ ID NO: 53464 - protein, 411 aa, Sulfotelmatomonas gaucii
  misc_feature (1)..(411): tr|A0A2N9LAG6|A0A2N9LAG6_9BACT Queuine tRNA-ribosyltran sferase OS=Candidatus Sulfotelmatomonas gaucii OX=20431 61 GN=tgt PE=3 SV=1
MTPSFQLIAQTAAGGRRGRLHLPHATVETPVFMPVGTAGSVKAVAQETLESLGAEIILGNTYHLYLRPGHEAIRRMGGLHKFMSWPRALLTDSGGFQVFSLNELRKVSEEGVHFRSHLDGSSHFFSPEHSIEVQIALGADIIMAFDECTEYPADRNRAEESLRFTMAWARRSLDYFRAHKDEVPWHAQGEFHQQGVPHPRGPRGQVLARGVDPSSAWVGSRNPQQLSARTQSLFGIVQGGMYPDLRRQCTEQLIEMEFDGYAIGGLSVGEPRDLTLEMISEVLPLLPQDKPRYVMGVGYPDEIEMYARMGVDMMDCVLPTRAARHALLFTSEGRLNIKNKQYAEDQSPPDPVCDCPVCRRYTRAYLRHLVQAGEPLAATLNSIHNLAFYLGIMQRVRGSLESAAAPMTSDH

SEQ ID NO: 53465 - protein, 373 aa, Sulfuricurvum sp.
  misc_feature (1)..(373): tr|K7S449|K7S449_9HELI Queuine tRNA-ribosyltransferase OS=Candidatus Sulfuricurvum sp. RIFRC-1 OX=1249480 GN=t gt PE=3 SV=1
MEFKVDATCGKARACTITTAHSTIQTPIFMPVGTVGSVKALDMADMTELLDTQIILANTYHMYLRPGDETVAKLGGLHGYTTYPNSFLTDSGGFQAFSLSDISKPTESGIEFRSHIDGSKHFFTPEKVIDIQNNLNSDIMMILDDLVALPATQERIKTSIQRTTQWAQQSIDYHRNNQTKGIGVNQNIFAIIQGGTDFNFRTQSAEELCAMDYDGFAIGGLSVGEANNLMYDTVEHTTPLMPADKPRYLMGVGTPEDLVENIERGVDMFDCVMPTRNARNGTLFTTFGKVNIKGARYKFDAEPIDPECQCYTCRRYSRAYLHHLFRSKELTYFRLASLHNLHYYLWLVKQARVAILSGQFIQFKKDFYARRQS

SEQ ID NO: 53466 - protein, 375 aa, Sumerlaea chitinovorans; identical to SEQ ID NO: 53302
  misc_feature (1)..(375): tr|A0A2Z4Y595|A0A2Z4Y595_9BACT Queuine tRNA-ribosyltran sferase OS=Candidatus Sumerlaea chitinovorans OX=225025 2 GN=tgt PE=3 SV=1

SEQ ID NO: 53467 - protein, 386 aa, Sungbacteria bacterium
  misc_feature (1)..(386): tr|A0A1G2K5P2|A0A1G2K5P2_9BACT Queuine tRNA-ribosyltran sferase OS=Candidatus Sungbacteria bacterium RIFCSPHIGH O2_01_FULL_47_32 OX=1802264 GN=tgt PE=3 SV=1
MDKFSFSITQTSKKSRARTGTLRTPHGSVETPSFVAVGTHASVKALGPDDVHMADSSIVLANTYHLFLSKTHAVIKKTGGLSRFMRWDGPTMTDSGGFQVFSLGFAKDHDIGRNSSIFPGENLKKISKAKDIKESQHVKILDEGAVFRLPDGTRTVLTPEKSISIQEDIGADIMFAFDECTSPLATWEYSKEAMERTHQWATRSLEAKKRGDQALYGIVQGGEWDDLREESAQKISSLPFDGFGIGGSLGKTKKRMFELIGFVHERLPEQKPRHVLGVGYPEDIPELIRLGADTFDCVAPTREARNGTLYIKEGRLSVEKAENREDFSPIDSSCVCFTCQNFTRAYLHHLFRSRELLYFRLASIHNLSYINAITRDIREKIKQGRF

SEQ ID NO: 53468 - protein, 383 aa, Sungbacteria bacterium
  misc_feature (1)..(383): tr|A0A1G2L7E0|A0A1G2L7E0_9BACT Queuine tRNA-ribosyltran sferase OS=Candidatus Sungbacteria bacterium RIFCSPLOWO 2_01_FULL_47_10 OX=1802276 GN=tgt PE=3 SV=1
MKFIITHKSKSSMARVGVLETAHGRIETPAFVTVGTKASVKSLGPDDLEMVGTSVVLANTYHLYAAKTYDVIRKAGGLSRFMNWNGITMTDSGGFQVFSLGFSKDHDIGRSSTLFPGEDLQKMVRAEAVKESQYIKIMDEGVVFRMPDGTRTVLTPEKSIQIQEAIGADIIFSFDECTSPLASKEYSAEAMGRTHRWAERCLEAKTREDQAIFGIIQGGEWDDLKEESVRAISGMPFDGFGLGGALGKTKERMWELVDFINKRLPEEKPRHLLGVGYPEDIPKAIRRGVDTFDCVAPTREARNGTLYVKNGRISIQKAEYREDFSPIEEGCDCYTCKNFTRTYLWHLAREKELLFYRLASIHNLYFTNNCVREIRERIKRGEV

SEQ ID NO: 53469 - protein, 408 aa, Symbiobacter mobilis
  misc_feature (1)..(408): tr|U5N7S4|U5N7S4_9BURK Queuine tRNA-ribosyltransferase OS=Candidatus Symbiobacter mobilis CR OX=946483 GN=tgt PE=3 SV=1
MHGTNVCVDGTPLRFDIQATDPLQATDTGSQARAGVLTLRRGVVHTPAFMPVGTYGTVKGVLPNALEAMGAEIILGNAFHLWLRPGLEVIERFGGLHAFEGWHRPILTDSGGFQVWSLGAMRKLTEEGAHFASPINGDKLFLSPEVSIRIQTVLDADICMQLDECTPYRDPQAPERLTTERQARTSMELSLRWARRSQDAFRALENPNALFGIVQGGMYENLRSASVDALIAMDFPGYAIGGVSVGEPKEEMLRILAHTPRLLPAHKPRYLMGVGTPEDLVEGVLQGVDLFDCVLPTRNARNGTLLTRYGNLKIRNARYKSDPAPIDEGCTCYACAGRTALDSSVRGGFSRAYLHHLDRCGEMLGPMLASIHNLHYLVQLMREMRTAILESRVESFRTRFAQDRLRGV

SEQ ID NO: 53470 - protein, 367 aa, Synechococcus spongiarum
  misc_feature (1)..(367): tr|A0A0G2HLS6|A0A0G2HLS6_9SYNE Queuine tRNA-ribosyltran sferase OS=Candidatus Synechococcus spongiarum SP3 OX=1 604020 GN=tgt PE=3 SV=1
MRHRCPVTQARLGHLQTPHGPVDTPRFMPVGTRATVKGLTTEQLGQTQAQMVLANAYHLHLQPGEDCVAAAEGLHRFMAWDGPILTDSGGYQVFSLAGCNRVDDHGVTFRSPRDGRTIRMTPERSMAIQNRLGADVIMAFDQCPPAQASRQEVEAATDRTHRWLERCIAAHSNRDQALFGIVQGGRHGELRRWSAATVCSHDLPGFAIGGVSVGESTADIHQVVRLVSPLLPEHKPRYLMGVGSLAEMAQAVAQGVDLFDCVLPTRLGRHGTALVQGDTWSLKRAGFRNDHRPLDGSCPCWTCRHHSRAYLHHLIHSQELLAASLLSLHNLTHLQRFCNAMGQAIVEGTFAERFTPWDSASPAANTW

SEQ ID NO: 53471 - protein, 373 aa, Synechococcus spongiarum
  misc_feature (1)..(373): tr|A0A171DHW1|A0A171DHW1_9SYNE Queuine tRNA-ribosyltran sferase OS=Candidatus Synechococcus spongiarum OX=43104 1 GN=tgt PE=3 SV=1
MGFCFAVRHRCPVTQARRGHLQTRHGPVDTPRFMPVGTSATVKGLTTEQLGRTRAQMVLANAYHLHLQPGEDRVAAAGGLHRFMAWDGPILTDSGGYQVFSLAGCNQVEDHGVTFRSPRDGRTIRMTPERSMAIQNRLGADVVMAFDHCPPAQASRQEVETATDRTHRWLERCIAAHNNRDQALFGIVQGGRHGDLRRWSAATVCSQDLPGFAIGGVSVGESTAHIHQVVKLVSPLLPEHKPRYLMGVGSLAEMAQAVAQGVDLFDCVLPTRLGRHGTALVQGDTWSLKRACFRDDHRPLDDSCPCWTCRHHSRAYLHHLIHSRELLAASLLSLHNLTHLQRFCNAMGQAIVEGTFAERFTPWDSASPAANTW

SEQ ID NO: 53472 - protein, 369 aa, Syntrophonatronum acetioxidans
  misc_feature (1)..(369): tr|A0A424YHC6|A0A424YHC6_9FIRM Queuine tRNA-ribosyltran sferase OS=Candidatus Syntrophonatronum acetioxidans OX =1795816 GN=tgt PE=3 SV=1
MAVTYQLIKRCSKTGARVGKLHTPHGTVDTPVFMPVGTQGTVKAMTPEELESLGIQIILSNTYHLYLRPGHQVIEEAGGLHNFMNWKHPILTDSGGFQIFSMGNLRKLTEEGALFRSHIDGSEHFLSPELAVEIQNSLGSDIAMVLDECPPYPCDYEYLQKSLERNNRWAERCIKAHKRKDQALFAIIQGGVYRELRRESAQALLKLDLPGYALGGLSVGEPKDLMYQVLEDTVPLLPDNKPRYLMGVGTADCLVEGVARGVDMFDCVMPTRIARNGRVMTREGYLTVRNAEYARDHTPLEEDCDCYTCRNYTRAYIRHLIKAGEILGLRLTTLHNLHYLNTLMFQARKAIIEDRFDKFKESFFSYYKC

SEQ ID NO: 53473 - protein, 369 aa, Syntrophosphaera thermopropionivorans
  misc_feature (1)..(369): tr|A0A4R5JSA3|A0A4R5JSA3_9BACT Queuine tRNA-ribosyltran sferase OS=Candidatus Syntrophosphaera thermopropionivo rans OX=2593015 GN=tgt PE=3 SV=1
MFKFQLEKVSNKARAATITTSHGKIKTPVFMPVGTVGTVKAMSPEELEKCHTQIILGNTYHLYMRPGYELIQQAGGLHKFIAWKHPILTDSGGFQVMSLAGLRKITNEGVKFQSHLDGSTHFFTPESVIAIQEALGADIIMSFDECPPFPSTREYVEKSLQRTLKWAERGKAAFHNYKNQALFGIVQGGIYEDLREKAAKTLMEMDFPGYAIGGLAVGEDKADMFRITNFLNDILPADKPRYLMGVGTPSDLLLNIANGVDMFDCVMPTRNARKGSIFTRQGKMIIKAARYKDDFQPIDKQCGCYTCKHFSRAYIRHLITMNEILGMRLTTIHSLYFYNELMEMARQAIMEDRYEEFLAEMLPVLDRVI

SEQ ID NO: 53474 - protein, 370 aa, Tachikawaea gelatinosa
  misc_feature (1)..(370): tr|A0A090AM67|A0A090AM67_9ENTR Queuine tRNA-ribosyltran sferase OS=Candidatus Tachikawaea gelatinosa OX=1410383 GN=tgt PE=3 SV=1
MKFKIDAICGKARCGRLIINNNVIDTPTFMPVGTYGTIKSLSIDEITNTGSQIILCNALHLFLRPGTKIIKSYNGLHNFIQWKKPILTDSGGFQVFSLKKFRRINEKGVKFKSPINGEYFFLNPEKSISIQNDLGSDIFMIFDECTSYPVTWKDAKKSMERSLKWAERSKICFQTITTKKKLLFGIIQGSIYKDLRLFSLKELLDINFDGYAIGGLSVGEPKKDINNILSYICSKIPSKKPRYLMGIGKPEDIITAVLNGVDMFDCVIPTRNARNGYLFTNKKIIKIRNTKYKTDLRPLDYECLCYTCQNYSRGYLHHLDKCNETLGMRLNTIHNLHYYQFFMRNIRMAIINNNLEKFINDFYIKNNILR

SEQ ID NO: 53475 - protein, 423 aa, Tagabacteria bacterium
  misc_feature (1)..(423): tr|A0A2M8L8G5|A0A2M8L8G5_9BACT Queuine tRNA-ribosyltran sferase OS=Candidatus Tagabacteria bacterium CG10_big_f il_rev_8_21_14_0_10_40_13 OX=1975022 GN=tgt PE=3 SV=1
MTRLWRLKKLWRAKKFPKRRQIVNIAPTAKKPTGLNMIEFKILKRSKKSRARLGLLKTAHGEVETPSLVPVATQAAVKTLTSEEAVKAGCQILIANTFHLHLKPGEKIIKSGGGIHKFMNWPHPLMTDSGGFQVFSLGFGKDTGVGKIVRDRISNKIEKGDKSKGVKITDKGAWFRSPLDGSKLFLGPEESMKIQQAIGADIMFSFDECTSPLATRGYIEKSLERTHRWAQICLKENEKPPSPRLRRSKQALFGIVQGSYYKDLRRRSAEFINSLGFDGFGIGGDLGKTKTDSRNILRWTIPYLDKNKPRHLLGIGHPEDIEPIIKEGIDTFDCIAPTHYGRRGIAFVKNGRLNLNQSKFLRDKKPLDSNCDCFVCRNYKRNYICHLFRAKEITAMSLLTFHNLHFFNNYVAGVRKKIRQEKI

SEQ ID NO: 53476 - protein, 381 aa, Tagabacteria bacterium
  misc_feature (1)..(381): tr|A0A1G2LRS5|A0A1G2LRS5_9BACT Queuine tRNA-ribosyltran sferase OS=Candidatus Tagabacteria bacterium RIFCSPLOWO 2_01_FULL_39_11 OX=1802295 GN=tgt PE=3 SV=1
MIKFEILKKSKISGARVGILKTPHGEIETPSLVPVATRAAVKTLSSEEVKKTKSQMLIANTFHLHLKPGEKIIKQAGGIHKFMNWQGPLMTDSGGFQVFSLGFGHDLQIGKILKYFPGNSEKLIQEDNRPKFLKITEEGVYFRSPLDGRKLFLGPKESIKIQEKVGADIIFAFDECTAPLVSFRYAEKSLERTHDWAKICFKTKKSGQAIFGIIQGSRFKVLREKSADFINFLGFDGFGIGGDLGADKQTMGNILKWVVPRLEESKPRHLLGIGYLEDIEMIIKNGIDLFDCTVPTHYARRGIAFTGPGKLNLKQSDFLKDKKPLDSRCACFVCKNYKRNYISHLFRAKEITALKLLTFHNLFFFNSFVENIRKKIKQGKI

SEQ ID NO: 53477 - protein, 397 aa, Taylorbacteria bacterium
  misc_feature (1)..(397): tr|A0A1G2M6H9|A0A1G2M6H9_9BACT Queuine tRNA-ribosyltran sferase OS=Candidatus Taylorbacteria bacterium RIFCSPHI GHO2_01_FULL_46_22b OX=1802301 GN=tgt PE=3 SV=1
MGNSFRIESSTDGSLARAGVIETAHGAIETPAFIPVGTKATVKAVTPEALGTLRTQAVLANTYHLYLQPGPELLESAGGLGKFMGWHGPTMTDSGGFQVFSLGAAFGKRLSKFGNRKEESEKIEESLPLAKVDDEGVTFRSHRDGSEHRFTPERSIEIQHAIGADIIFAFDECPSPETDHDYQREAMERTHRWALRSLARHKELGEGSAGDQLLFGIVQGGRFEDLRRESAKAIGEMGFDGFGIGGTFLKEDMGNAVRWVNELLPKDKPRHLLGIGEPLDVLIAIENGCDTFDCVAPTRAGRTGTIYTGEGKINIGNAKFEKDFSALEVGCDCYTCKNFTRAYLHHLFDAHEMLAATLASIHNLRFIVRLVENAREAIVRGEFKKFSEEFLSRYIKI

SEQ ID NO: 53478 - protein, 395 aa, Taylorbacteria bacterium
  misc_feature (1)..(395): tr|A0A1G2P5I2|A0A1G2P5I2_9BACT Queuine tRNA-ribosyltran sferase OS=Candidatus Taylorbacteria bacterium RIFCSPLO WO2_12_FULL_47_20 OX=1802335 GN=tgt PE=3 SV=1
MIFEVKERLRGSMARAGVIKTAHGVIETPAFVAVGTKATVKALTPREIADCGANVVLANTYHLYLEPGIEILKSAGGLGKFMGWGGPTMTDSGGFQIFSLSGKNRGLKVSSKSGESLEDGEESKTAGGGRSENLVKVSEDGVKFRSFIDGSEHFFTPEKSIEIQNAIGADIIFAFDHFEYPDAPYDKHEASLERTSRWAKRCLERHSAALEKKEAPEDQALFGIVQGGRHEALRKRSAREIAGLEFSGFGIGGSFDKEDMGTAVRWVNEILPEDKPRHLLGIGEPQDIVEAVKNGCDTFDCVAPTRAGRTGTLYTSKGKINIKNAAFRNSFERIDPACDCYTCSNFTRAYLSHLYRNGEMLAGVLGTIHNLKYIIGVTKSLRESILKGDESIFSN

SEQ ID NO: 53479 - protein, 401 aa, Tectomicrobia bacterium
  misc_feature (1)..(401): tr|A0A1F7T619|A0A1F7T619_9BACT Queuine tRNA-ribosyltran sferase OS=Candidatus Tectomicrobia bacterium RIFCSPLOW O2_12_FULL_69_37 OX=1802343 GN=tgt PE=3 SV=1
MSAPVRFQVRASEPGGLARCGRLETPHGAFETPAFLAVGTQATVKTLDPRDLREAGCRIILANAYHLALRPGAERISRLGGLHRFMGWEGPILTDSGGYQLFSLAPLARATDEGVDFQSHLDGARQTLTPERAVEIQEALGPDIAMVLDEPLGFPHTREEAEAALARTTAWARRSRSAQRRSDQALFGIVQGGAFEDLRRRSAEELVPLDFPGYAVGGLCLGENKRETDALLAAAADVLPEEKPRYVMGMGTPADLIRSVRLGADMFDCVMPTRHARRGNLFTWGGRLSIKRNEFAEDPSPIDPACGCPACRGGFSRAYLRHLFQAEETLGQRLMTLHNVFFYQELAGRMRERIRAGGFASWAAETLAGPLGQDPEGPPRGQGLRRGPAGKLLRPTPPGED

SEQ ID NO: 53480 - protein, 401 aa, Tectomicrobia bacterium; identical to SEQ ID NO: 53479
  misc_feature (1)..(401): tr|A0A1F7T531|A0A1F7T531_9BACT Queuine tRNA-ribosyltran sferase OS=Candidatus Tectomicrobia bacterium RIFCSPLOW O2_02_FULL_70_19 OX=1802342 GN=tgt PE=3 SV=1

SEQ ID NO: 53481 - protein, 368 aa, Tenderia electrophaga
  misc_feature (1)..(368): tr|A0A0S2TBN3|A0A0S2TBN3_9GAMM Queuine tRNA-ribosyltran sferase OS=Candidatus Tenderia electrophaga OX=1748243 GN=tgt PE=3 SV=1
MKFDLLTSDGAARRGTLNFARGTVQTPAFMPVGTYGTVKAMTPEELSELGAEIILGNTFHLMLRPGTEIIRAHGDLHDFMHWQGPILTDSGGFQVFSLGEMRKITEAGVTFRSPVNGDKVFLDPERSMQVQRALGADIVMIFDECTPYPASEQQARASMELSLRWAARSRTAHGDNPAALFGIIQGGMYPELRAVSLDGLVEIGFDGYAIGGLSVGESEAERIMILDHLQPRLPLDKPRYLMGVGRPEDIVEAVRRGVDMFDCVMPTRNARNGHLFTQQGEIRIRNARYEHDTRPLDEACGCYTCRNYSRAYLRHLDKCREILGSRLNTIHNLYYYQELMRDLRDAIEAGELEDFVTRFYAKRLAGMS

SEQ ID NO: 53482 - protein, 376 aa, Terasakiella magnetica
  misc_feature (1)..(376): tr|A0A1C3RLG6|A0A1C3RLG6_9RHIZ Queuine tRNA-ribosyltran sferase OS=Candidatus Terasakiella magnetica OX=1867952 GN=tgt PE=3 SV=1
MTTDFNFELLGTDGTARRGRVHTAHGAINTPAFMPVGTAATVKAMMPESVAETGAEILLGNTYHLMLRPGAERIEKLGGLHKFMNWDKPILTDSGGFQVMSLAQLRKITEEGVRFRSHIDGAYYDLTPESSTEIQRQLDADITMCFDECPALPASKERVNEAMQLSMRWAKRSRDAFVERQGYGQFGIVQGGTEEDLRKESVEKLVDIGFEGYAIGGLAVGEGQELMFQTLDYTTPVMPVDKPRYLMGVGKPDDLVGAVARGVDMFDCVLPSRSGRTAEAWTRRGSVNLRNARHKDDPRPLDEHCTCPCCKSYSRAYLYHLTKTKEILGLMLLTWHNLHYYQELMAGMRTAIEEGTFEKFVVDFHALREQGDIERV

SEQ ID NO: 53483 - protein, 359 aa, Termititenax persephonae
  misc_feature (1)..(359): tr|A0A388TES5|A0A388TES5_9BACT Queuine tRNA-ribosyltran sferase OS=Candidatus Termititenax persephonae OX=22185 25 GN=tgt PE=3 SV=1
MKFTVVKKSVKSAARAGLLETAHGVIETPVFMPVGTLGTVKSLTPDLVAEQGAQIILANTYHLFLRPGADLIARAGGLHQFMHWDKPLLTDSGGFQVFSLAKLRRIDRDGVEFQSPLDGGARHKFTPELVVDIQRQLGSDIMMPLDVCSNPHDPKEKIAEDLQITLAWARRARLAARNGEAAGRPALFGIVQGGLHEDLRQEAAARLRELDFPGYAVGGVSVGEPEEDLYRIAQSTAALLPVEKPRYLMGVGLPQNLLQCVPFGIDMFDAVLPTRLARHNSFFTPLGLASILNAAYAEDWAPLVDGCDCYACRHFSRAYLRHLARAKEILAIVLLTMHNIRYLVNLMRDLRQKILCGEV

SEQ ID NO: 53484 - protein, 356 aa, Termititenax aidoneus
  misc_feature (1)..(356): tr|A0A388T7E3|A0A388T7E3_9BACT Queuine tRNA-ribosyltran sferase OS=Candidatus Termititenax aidoneus OX=2218524 GN=tgt PE=3 SV=1
MKFTLVHKSARSGARAGLLETVHGAIETPVFMPVGTLGAVKALTPELTAEQGAQIILSNTYHLFLRPGADLIARAGGLHKFMHWDKPILTDSGGFQVFSLAKLCKITQDGVEFRSPFDGGVKHKFTPELVVDIQRQLGSDIMMPLDVCSPHTAAKEKVAEDLRLTLDWEKRALEHFAQNQVQAFFGIVQGGLHEDLRQESAEYLRGLDFAGYAIGGVSVGEPEADLYRVAQYTAALLPPDKPRYLMGVGLPQNLQQCVPFGIDMFDAVLPTRLARHNTFFAPDGLENILNAKSAADFAPLVETCDCYACRHFSRAYIRHLAQAKEILAIILMTIHNIRYLVNLTRDLRRKILNDEI

SEQ ID NO: 53485 - protein, 350 aa, Terrybacteria bacterium
  misc_feature (1)..(350): tr|A0A2M8L9Z2|A0A2M8L9Z2_9BACT Queuine tRNA-ribosyltran sferase (Fragment) OS=Candidatus Terrybacteria bacteriu m CG10_big_fil_rev_8_21_14_0_10_41_10 OX=1975026 GN=tgt PE=3 SV=1
GFIKSLDDKEHKLATPEITISNTFHLYVTGKVNEVKKAGGLHKRFKIKNPIMTDSGGFQVFSLGWGKIHKIGKISSTILLSTSNVDSSKNPVKITSNGAMFTYDGKKYALNPKKSIKIQEDLGADIIFAFDECTSPLHDYEYNKKSLIKTHKWAAECLKAKKKNGQMLFGIVQGGIYEDLRKESSKAIGEMSFDGFGIGGSFGEKQMGKVIEWALSGLPEDKPKHLLGIGAIEDIFIGVKKGIDTFDCVIPTREARHGALYSKAGRLDIKKGLFAKDRKAVEKGCECFACAKGLKRKDFHLLFNADKEKARKLATLHNIFFYKTLFARIREAINSGKKNALDKLEKEYRV

SEQ ID NO: 53486 - protein, 385 aa, Terrybacteria bacterium
  misc_feature (1)..(385): tr|A0A1G2PFM9|A0A1G2PFM9_9BACT Queuine tRNA-ribosyltran sferase OS=Candidatus Terrybacteria bacterium RIFCSPHIG HO2_01_FULL_43_35 OX=1802361 GN=tgt PE=3 SV=1
MSMISFQIIKKSKRSRARIGILETEHGFVETPSLVPVATQAAVKTLSSQEVLQTRSQMLIANTFHLHLKSGEKYVKQAGGLHKFMNWTRPLMTDSAGFQVFSLGFGSDLQVGKVTKYFPRDRNKRDVITKNSQPKTVKITPDGVFFRSPLDGRQLFIGPKESMAIQQALGADIIFAFDECTSPFSTPAYVKDALKRTHKWAKTCLESKKSRQALFGIVQGSKYKELRIQSAKYISSLPFDGFGIGGDLGDSKETMKKILNWTIPYLSDRKPRHLLGIGYLEDMENIIKAGIDLFDCTVPTHYGRRGIAFTSVGKLNMRQVRFLTDKKPLDPKCSCVVCQEYRRNYISHLFRAGEISGMKFLTLHNLYYFNTFVENIRENIKNGKI

SEQ ID NO: 53487 - protein, 380 aa, Thermochlorobacter aerophilum
  misc_feature (1)..(380): tr|A0A395LZX9|A0A395LZX9_9BACT Queuine tRNA-ribosyltran sferase OS=Candidatus Thermochlorobacter aerophilum OX= 1868324 GN=tgt PE=3 SV=1
MQFELQKKDLHSAARAGKIITAHGEILTPVFMPVGTRGAVRAVEPRELVEIGAQIILANTYHLYLRPSTDLLFKAGGLHKFMSWSKPILTDSGGYQVFSLSELRQVSEEGVIFKSHLDGSKHIFTPESVIETQRYIGSDIMMVLDECPPYNAEREYIKASSELTLRWAARAQAHLMKTAPLYGYEQTLFAITQGGTFDDLRQESTKRLVEMDFEGYAIGGLAVGEPEEAMYRMLELSHPLLPEHKPRYLMGVGTPINILNAIERGIDMFDCVMPTREGRNGRVYTRYGTLNIRAAKYADDFRSLDEGFENYVCQNFSRAYIRHLLNVNEILGLQLCSLQNLSFFLWLTRTAREHILNGTFKAWKEEFIEQFQSGEKVGMI

SEQ ID NO: 53488 - protein, 380 aa, Thermochlorobacteriaceae bacterium
  misc_feature (1)..(380): tr|A0A081SJ32|A0A081SJ32_9BACT Queuine tRNA-ribosyltran sferase OS=Candidatus Thermochlorobacteriaceae bacteriu m GBChlB OX=1519464 GN=tgt PE=3 SV=1
MSFDLIATDAQSDARAGKLTTAHGEILTPIFMPVGTRASVRAIEQRELHEMGAQIILGNTYHLYLRPSTQILHKAGGLHKFMSWTKPILTDSGGYQVFSLSDLRHIDEQGVVFKSHLDGSKHHFTPESVVDIQRLIGSDVMMVLDECPPHDAPKEYIKQSNDLTIRWAARAQHHAANTTPHYGYDQTLFAITQGGTFDDLRADSTKRLVGMNFDGYAIGGLAVGESEDAMYRMIELSHPLLPQTKPRYLMGVGTPTNILNAIERGVDMFDCVLPTREGRNGRVYTRYGAINIRAAKYADDFRPLDDGFENYVCQQFSRAYIRHLLNVDEIFGLQLCSLQNISFFLWLTREARAQILAGRFKAWKEEFLERYRSGEKLGVI

SEQ ID NO: 53489 - protein, 380 aa, Thermofonsia Clade
  misc_feature (1)..(380): tr|A0A2M8PF35|A0A2M8PF35_9CHLR Queuine tRNA-ribosyltran sferase OS=Candidatus Thermofonsia Clade 1 bacterium OX =2364210 GN=tgt PE=3 SV=1
MFKFELQAQSGQARAGIFHTPHGAIPTPVFAPVGTQATVKAMQPRELYELGATLILANTYHLYLRPSDTLIARLGGLHRFMAWERPILTDSGGFQVFSLDGLRRIDEDGVTFRSHLDGSIHRFTPEKSIQIQHNLGADVIMCFDECPKPHNRAEVRAACDRTHAWAVRCLEAHLRHGDPNRQALFGIVQGGIFPDLRAESVAFLTALDFVGYAIGGLAVGETKSEMLATLDYTVPLLPADRPRYLMGVGSPEDLVNGVARGVDIFDCVLPTRMARHGTALTRQGRLNLRNLEHAEDSRPLEADCACYTCTHFSRAYLRHLVKANELLGHQLLTLHNLHLLLTLMREMRAAILGGTFEAYAANFLAAYRPKSKEASAPPSL

SEQ ID NO: 53490 - protein, 373 aa, Thermofonsia Clade
  misc_feature (1)..(373): tr|A0A2M8QAL0|A0A2M8QAL0_9CHLR Queuine tRNA-ribosyltran sferase OS=Candidatus Thermofonsia Clade 3 bacterium OX =2364212 GN=tgt PE=3 SV=1
MCFSFALTCTDGRARAGVLHTPHGAVRTPAFMPVGTQATVKAIPPRDLEELGAQIILANTYHLYLRPGDELIARRGGLHRFMSWPHPILTDSGGFQVFSLSEMRKIDDDGVTFKSHLDGSMHRFTPEKSIRIQENLGADIIMCFDECPPPTDREYNAIALARTHAWAARCREAHTRTDQALFGIAQGGIFRDLREQSARFLTSLDFPGYAIGGLAVGEEKADMFQVIAWMDDALPAHKPRYLMGVGEPTDLIRAVQRGVDMADCVLPTRLARHGAAFTRDGRINMRNRIYAEDERPIDPECDCYTCRNFSRAYIRHLLQAGEILGLYLMSVHNIAFLLNLMRAAREAIVQQRFAAFAQNWLARYERTENPTHL

SEQ ID NO: 53491 - protein, 381 aa, Thermokryptus mobilis
  misc_feature (1)..(381): tr|A0A0S4ND72|A0A0S4ND72_9BACT Queuine tRNA-ribosyltran sferase OS=Candidatus Thermokryptus mobilis OX=1643428 GN=tgt PE=3 SV=1
MLKFELVAVDGKTSARAGLIYTDHGIIETPVFMPVGTQATVKAVEQRELIEIGAQIILGNAYHLYLRPGIEVIRKAGGLHKFMNWERAILTDSGGFQIFSLAQFRKITKEGVRFQSHIDGSYHFFTPESVIEIQRVLGSDIMMCLDECTPYPCDFEYAFKSNQLTIEWAKRAKEKFEKTEPLYGHSQFLFGIVQGSVYPEIRAKSAEELIKLDFDGYAIGGLAVGEPVDVMYQITEFTASLLPVNKPRYLMGVGTPENIIESISRGIDMFDCVIPTRNGRNATLYTRNGKFSIKNAVYKDDFSPVDPECDCYTCKNFTRAYLRHLFNADEILALQLASIHNLAFYFWLVQEARRHIISGDFAEWKNHFLVRSQNKTNSKTD

SEQ ID NO: 53492 - protein, 368 aa, Thiodiazotropha endoloripes
  misc_feature (1)..(368): tr|A0A1E2UQV8|A0A1E2UQV8_9GAMM Queuine tRNA-ribosyltran sferase OS=Candidatus Thiodiazotropha endoloripes OX=18 18881 GN=tgt PE=3 SV=1
MKFSIFQTDGAARRGQLSFPRGSIETPAFMPVGTYGTVKAMTPEELVDLGAEIILGNTFHLMLRPGTEVIRAHGDLHDFMHWQKPILTDSGGFQVFSLGDMRKITEKGVDFRSPIDGSKVFMGPEESMQVQRKLGSDIVMVFDECTPYPATEEEAKQSMELSLRWAGRSRDAHGDNPSALFGIVQGGMYEGLREASLEGLKQIGFDGYAVGGLSVGEPPADRWRVLDHLSSRLPGDKPHYLMGVGTPEDIVESVARGIDMFDCVMPTRNARNGHLFTHQGAVRIRHAAHQYDNSPVDPLCECYTCRNYSRSYLRHLDKCNEILGARLNTIHNLHYYQKLMRDIRGAIESGRFEAFRREFYEMRTGDGA

SEQ ID NO: 53493 - protein, 371 aa, Thiodictyon syntrophicum
  misc_feature (1)..(371): tr|A0A2K8UFU3|A0A2K8UFU3_9GAMM Queuine tRNA-ribosyltran sferase OS=Candidatus Thiodictyon syntrophicum OX=11669 50 GN=tgt PE=3 SV=1
MEFDLLATQDLARRARLSFPRGVVETPAFMPVGTYGTVKAMTPEELIALGAQIVLGNTFHLMLRPGVEVIRRCGDLHRFMHWEGPILTDSGGFQVFSLGELRKITEAGVRFRSPVDGSPVFLGPEESMAVQRALGSDIVMIFDECTPYPADFDTAGASMELSLRWAARSRAAHADNPAALFGIVQGGMHESLRERSLAGLVEIGFDGYAIGGLSVGEPEADRLRVLDFLADRLPADRPRYLMGVGTPEDIVAAVCRGIDMFDCVMPTRHARNGWLFTHQGTVKIRNAVHRTDEGPLDPRCDCTTCRNYSRAYLYHLDKCHEILGARLNTIHNLHYYQALMRGLRDAIAAGTLEGFIAEFRDLRAPRAAAPG

SEQ ID NO: 53494 - protein, 167 aa, Thioglobus sp.
  misc_feature (1)..(167): tr|A0A432TXJ9|A0A432TXJ9_9GAMM tRNA guanosine(34) trans glycosylase Tgt (Fragment) OS=Candidatus Thioglobus sp. OX=2026721 GN=tgt PE=4 SV=1
LVDMDFDGYAIGGLSVGEPKDEMIKVLDYLPEQLPDDKPRYLMGVGTPKDLVEAVERGIDMFDCVMPTRNARNGYLFTSVGVVKIRNAQYKLDTRPLDENCGCYTCQNYSRSYLHHLQRKNEILGARLSTIHNLYYYQDLMQQMRDAIEHNAFSEFKQNFYALQEGK

SEQ ID NO: 53495 - protein, 368 aa, Thioglobus sp.
  misc_feature (1)..(368): tr|A0A432U9I0|A0A432U9I0_9GAMM Queuine tRNA-ribosyltran sferase OS=Candidatus Thioglobus sp. OX=2026721 GN=tgt PE=3 SV=1
MKFKLNNTDQKARRGQMTFERGEVETPAFMPVGTYGTVKAMTPEEVHEIGAQIILGNTFHLDITPGTQVIEAHGDLHDFMHWQGPILTDSGGFQVFSLGDMRKISEKGVDFRSPKNGDKIFMGPEESMQIQKKLGSDIVMIFDECTPFPADKATADQSMQLSLRWAKRSKAEHEKLDNKNALFGIVQGGMFEDLRRESSQALVDMDFDGYAIGGLSVGEPKEEMIKVLDYLPGQLPNDKPRYLMGVGTPKDLVEAVERGIDMFDCVMPTRNARNGYLFTSVGIVKIRNAQYKLDTQPLDENCDCYTCQNYSRSYLHHLQRKNEILGARLNTIHNLYYYQDLMAQMRDAIECNTFSKFKQNFYALQEGK

SEQ ID NO: 53496 - protein, 363 aa, Thiomargarita nelsonii
  misc_feature (1)..(363): tr|A0A176S5Y2|A0A176S5Y2_9GAMM Queuine tRNA-ribosyltran sferase OS=Candidatus Thiomargarita nelsonii OX=1003181 GN=tgt PE=3 SV=1
MQFKIFATDGYARRAQLDFPRGTVETPAFMPVGTYGTVKAMTPQQVDATGAEIILGNTFHLMLRPGTQVIKAHDSLHKFMQWHKPILTDSGGFQVFSLGELRKISEQGVTFRSPIDGAKVFLGPEESMAVQRALGADIVMIFDECTPYPATEQQALDSMALSLRWAARSKAAHDDNPAALFGIVQGGMYEHLRQASLAGLIDIGFDGYAIGGLSVGEPKEEKQRILAALAPQLPPNKPHYLMGVGTPADIVEAVRYGIDMFDCVMPTRHARNGHLFTSVGVVRIRNSQYRHDIAPLDPDCDCYTCQNYTRAYLHHLDKAREILGAHLNTVHNLRYYQNLMQGLRKAIVKHRLEDFVRDFYLAN

SEQ ID NO: 53497 - protein, 364 aa, Thiomargarita nelsonii
  misc_feature (1)..(364): tr|A0A0A6P7K3|A0A0A6P7K3_9GAMM Queuine tRNA-ribosyltran sferase OS=Candidatus Thiomargarita nelsonii OX=1003181 GN=tgt PE=3 SV=1
MQFKIFATDGYARRAQLYFPRRGTIETPAFMPVGTYGTVKAMTPQQVRATGAEIILGNTFHLMLRPGTQVIKAHGSLHKFMQWHKPILTDSGGFQVFSLGELRKISEQGVTFRSPIDGAKVFLGPEESMAVQRALGADIVMIFDECTPYPATEQQALDSMALSLRWAARSKAAHDDNPAALFGIVQGGMYEHLRQASLAGLIDIGFDGYAIGGLSVGEPKEEKHRILAALAPQLPPNKPHYLMGVGTPADIVEAVRYGIDMFDCVMPTRHARNGHLFTSVGVVRIRNSQYRHDTAPLDPHCDCYTCQNYTRAYLHHLDKAREILGAHLNTVHNLHYYQNLMQRLRKAIVKHRLEDFARDFYSDY

SEQ ID NO: 53498 - protein, 379 aa, Tokpelaia sp.
  misc_feature (1)..(379): tr|A0A367ZYL5|A0A367ZYL5_9RHIZ Queuine tRNA-ribosyltran sferase OS=Candidatus Tokpelaia sp. JSC189 OX=2079010 G N=tgt PE=3 SV=1
MMTENFAFRLLACERNARHGEILTSRGIVRTPAFMPVGTTGTVKAMYMEQVRELGTDIILGNTYHLMLRPGAERITRLGGLHKFIRWNGPILTDSGGFQVMSLAGLRKLNENGVIFQSHIDGAYYEMTPERSIEIQGLLDSDIQMQLDQCIALPASLDEMQRAMEMSLRWAERCKIAFGLQSGKAMFGIVQGGDDEKLREYSAQALKMMDLKGYAIGGLAVGESQEVMLRVLDFICPLLPNKKPRYLMGVGTPDDILRSVACGIDMFDCVMPTRAGRHGLAFTRFGKINLLNVRHAEDPRPLDEQSSCPAARGYSRAYLHHLVKSGETLGGMLLTWNNLAYYQQLMQGIRDAIEEGRFAAFDTEVRTLWTKGDIPVYCG

SEQ ID NO: 53499 - protein, 375 aa, Tokpelaia sp.
  misc_feature (1)..(375): tr|A0A367ZZL4|A0A367ZZL4_9RHIZ Queuine tRNA-ribosyltran sferase OS=Candidatus Tokpelaia sp. JSC085 OX=2079008 G N=tgt PE=3 SV=1
MTENFTFKLIARDGMARCGKITTPRGVVCTPAFMPVGTGGTIKAMYLNQVRDLGTDIILSNTYHLMLRPGAERTARLGGLHKFICWDRPILTDSGGFQIMSLAGLLCKLNENGVTFRSHIDGVYHEMTPERSIYIQNLLDSDIQMQLDQCIALPASFYEMAKAVELSLCWAERCKNAFGVQPGKAMFGIVQGGDNQRLREHSAEALSMMDLKGYAIGGLAVGEPQDVMLRMLDCVCPVLPDEKPRYLMGVGTPDDLLQSVARGIDMFDCVMPTRAGRHGLAFTKFGKINLRNARYAEDLHPLDAESSCPAAYDYSRAYLHHLVKSREALGAMLLTWNNLSYYQQLMQGVRDAIEKGCFAAFNTAVRIRWSKGETT

SEQ ID NO: 53500 - protein, 453 aa, Uhrbacteria bacterium
  misc_feature (1)..(453): tr|A0A1F7UNL7|A0A1F7UNL7_9BACT Queuine tRNA-ribosyltran sferase OS=Candidatus Uhrbacteria bacterium RIFCSPLOWO2 _01_FULL_47_24 OX=1802401 GN=tgt PE=3 SV=1
MMNPFRVLHQSKKSRARVGELRTAHGKVRTPFFMTIATRGAVKTLAAEDMREIGALARRDAGATEPKRSGGMSGGGRGGPILLSNTYHLYVRPGMEVIKKAGGLHKFMGWNGPILTDSGGYQVFSLANKNRNPSPVLRTPSPAGRGGSNQFPSPRGRGEGEGQDYDVRITKDGAEFIDRISGRKDMFTPERVLEIQKVIGSDIAMVLDVCAPYPISKEGAREAMERTTSWAERSMKVLKHESIKTLVFGIVQGSVYKDLREQSARDLVALDFDGYAIGGVAVGEPQKEKYQVVDWVAPMLPEDKPRYLMGLGQPEELVEAVRRGIDMFDCVLPTRNARHGNLYVWRHNPPQPSLTLREGDRPLLPLRVRGSERGLRGNFYDTMRITNEKYRADFKPIDPYCECFTCTHHSRAYLRHLFKINEPLALRLATIHNVKFYLDFMVGLQNAVVEGTL

SEQ ID NO: 53501 - protein, 380 aa, Uhrbacteria bacterium
  misc_feature (1)..(380): tr|A0A1F7TK41|A0A1F7TK41_9BACT Queuine tRNA-ribosyltran sferase OS=Candidatus Uhrbacteria bacterium RIFCSPHIGHO 2_01_FULL_63_20 OX=1802385 GN=tgt PE=3 SV=1
MFKVKNKVGKARRGRLTLAHGIVETPAFMPIATRGAVKSITLPEVKALGAQIILNNTYHLLLRPGLEAMKKLGGSHKLMNWDKPILTDSGGFQVFSLSKLNRIGEDGVEFQSHIDGAKITITPESSMEMQRAIGSDIVMQFDDVADGQSTRERFEDAMERSLRWARRCRVAFDTAHTNSQLPTPNSQNLFGIVQGGIHEDLRERSAKGLMDIGFDGYAIGGLSVGEPREDMYRIVEKTCAVLPEDKPRYFMGGGMPEEIVRNVFAGVDMFDCVLPTRNARHGTLFTWNKDPKEFGRELVSGSWELGSSDFYQKLNITSERFAFDQTPIDPHCDCSTCKTVSRAYLRHLFAVGEPVAQHLATIHNLRFYLRLMEELRSVLE

SEQ ID NO: 53502 - protein, 375 aa, Veblenbacteria bacterium
  misc_feature (1)..(375): tr|A0A1G2Q5B9|A0A1G2Q5B9_9BACT Queuine tRNA-ribosyltran sferase OS=Candidatus Veblenbacteria bacterium RIFOXYA2 _FULL_43_9 OX=1802425 GN=tgt PE=3 SV=1
MAYFEITNIDKTTQARVGRINTAHGVVNTPAFMPIGTKGAVKAITPQELKDNGADIILANTYHLWQRPGDDLIKRAGGLHKFMGWDGPILTDSGGFQVFSLAKTRKITEEGVNFRFDMDGRQELLSPEKSIDIQANLGSDIALILDSFPGYPFEYQKSEESVALTKRWAERAIKQHKKIMSHGKTVNPGQKLWGIVQGANFTELREQSARGMVELGFPGFAIGGVAVGESPEEMLKAVDKAVPYLPAEAPRHLLGVGKPQDIVEAVARGCDTFDCVIPTREARHGRLYIDGLTTLDIRLEKFREDFTPPDENCDCYMCRHFTKAYMRHLFAMAEPLAIRLFTMHNLMFYLKLMADIRRAISSGTFTDILQSYAAL

SEQ ID NO: 53503 - protein, 285 aa, Veblenbacteria bacterium
  misc_feature (1)..(285): tr|A0A3D0FV71|A0A3D0FV71_9BACT Queuine tRNA-ribosyltran sferase (Fragment) OS=Candidatus Veblenbacteria bacteri um OX=2053636 GN=tgt PE=3 SV=1
TDSGGFQVFSLAKTRKITEEGVNFRFDMDGRQELLSPEKSIDIQANLGSDIALILDSFPGYPFEYQKSEESVALTKRWAERAIKQHKKIMSHGKTVNPGQKLWGIVQGANFPELRERSARDMVELGFPGFAIGGVAVGESPEEMLKAVDKAVPYLPAEAPRHLLGVGKPQDIVEAVARGCDTFDCVIPTREARHGRLYIDGLTTLDIRLEKFREDFTPPDENCDCYMCRHFTKAYMRHLFAMAEPLAIRLFTMHNLMFYLKLMADIRRAISSGTFTDILQSYAAL

SEQ ID NO: 53504 - protein, 367 aa, Vecturithrix granuli
  misc_feature (1)..(367): tr|A0A081C1B4|A0A081C1B4_9BACT Queuine tRNA-ribosyltran sferase OS=Candidatus Vecturithrix granuli OX=1499967 G N=U27_05343 PE=3 SV=1
MQFTITAESQGSRVRAAEFQTSRNVLHTPCFMPVGTHGAVNGITPQILLDMGAEILVSNAFRLSEHPGKAILSKFENLHEFMAWPYTILTDSGGFQSRLREHAITEKGIQFYDEKAHEIWTPEDAIDMQSVLGSDFVMPLDICADLPTTYPIAREAMERTLRWAVRCKKAFKARPGQILFGIVQGAVYPDLRQQCVDALEQIGFPAYAIGGLNVGETPQEYLATLTTTTALLPREKLRYIMGVGRPEAMLEAVNAGVDIMDSIIPTKYAREKTLFTYRGTINLGKNRKYRKDKYPIDPNCDCYTCRHVSRAYLHHLYQTTTTTAHVYAAIHNIHFCVRLLQNARKAIVEQRFEQFYAEFMNNYTNDD

SEQ ID NO: 53505 - protein, 377 aa, Vecturithrix granuli
  misc_feature (1)..(377): tr|A0A081BYR9|A0A081BYR9_9BACT Queuine tRNA-ribosyltran sferase OS=Candidatus Vecturithrix granuli OX=1499967 G N=tgt PE=3 SV=1
MSFEILAKDARTLARAGKLTMTHGEVLTPIFMPVGTQGTVKGMTPEVLYAIDAQILLGNTYHLYLRPGHELIQSFGGLHRFMGWDRPILTDSGGFQVYSLGDLRKISEEGVTFRSHLDGSLHTLSPEKSIEVQQGLGSDVMMCFDECAPYPASHEYVTHSMDMSMLWAERCKIAHEQAKERKIALINPAQHLFGIVQGGMYPDLRARSVERLQAIGFDGYAIGGLSVGEPKPLMFEMLEQTAPLLPENAPRYLMGVGTPLDLVRGAALGIDMFDCVMPTRNARNGSLFTKQGKMTIKQAQYRDDQRPIEPDCQCYTCRNFSRAYLRHLFISKEILASILNTIHNLYFYLDLMSRIRKAIAENRFDEFKVRFEREYVE

SEQ ID NO: 53506 - protein, 409 aa, Viridilinea mediisalina
  misc_feature (1)..(409): tr|A0A2A6RNC8|A0A2A6RNC8_9CHLR Queuine tRNA-ribosyltran sferase OS=Candidatus Viridilinea mediisalina OX=202455 3 GN=tgt PE=3 SV=1
MPPAFHVIARDPVSRARAGVVTTAHGSVATPVFMPVGTRGTVKSLTPSELSDHGAQIILGNTYHLYLQPGHELLARRGGLHRFMGWDGPILTDSGGFQVFSLIYGGIADELKGRRPQHAERMPDMVRVTEDAVIFKSYLDGSRHVFTPERSIQVQHGIGADIMVCFDELPPFRAGYDYTAQSMERTHRWAARCLAAHHERDPATLPNPHQLLFGIVHGGVFPELRQTSAEVISTMGFDGLCIGGSLGADKPQMYAVVEMTVPHLPDGLARHLLGVGDVDDLLEGVARGIDMFDCVSPTRLGRHGTALVRDPARRWKLNVSNAALREDDRPLQPDCPCYACRHFSRAYIHYLYRAKELLGIRLVSLHNVAFLLNLMAEVRNAIVEGRFAACYAEWLGKPLEVYSPSDKES

SEQ ID NO: 53507 - protein, 400 aa, Viridilinea halotolerans
  misc_feature (1)..(400): tr|A0A426TQ74|A0A426TQ74_9CHLR Queuine tRNA-ribosyltran sferase OS=Candidatus Viridilinea halotolerans OX=24917 04 GN=tgt PE=3 SV=1
MPPAFQITARDSASCARAGVVTTAHGPVMTPVFMPVGTRGTVKSLTPHELRDHGAQIILGNTYHLYLQPGHELIARRGGLHHFMAWDGPILTDSGGFQVFSLVYGGIADEIKGRRPQHAERLTDMVRVTEDAVIFKSYLDGSRHVFTPERSIQVQHGIGADIMVCFDELPPFRAGYDYTAQSMERTHRWAARCLAAHHERPRATLPNRDQLLFGIVHGGVFPALRQASAEHISSMGFDGICIGGSLGADKPQMYDVVAMTVPHLPENLARHLLGVGDVDDLFEGVARGIDMFDCVSPTRLGRHGTALVRDPARRWKLNVSNAALREDDGPLQSDCPCYTCRTFSRAYIHYLYRAKELLAIRLLSLHNVAFLLNLMAEVRQALAEGRFADCYAAWLGKPLG

SEQ ID NO: 53508 - protein, 396 aa, Vogelbacteria bacterium
  misc_feature (1)..(396): tr|A0A352JLE7|A0A352JLE7_9BACT Queuine tRNA-ribosyltran sferase OS=Candidatus Vogelbacteria bacterium OX=205363 8 GN=tgt PE=3 SV=1
MHFTVEKRDSNSLARAGILKTPHGNIKTPAFVAVATKATVKSLTPEMLTELGAQMVLGNTYHLYFEPGEGVVKAAGGLGKFMHWDGPTMTDSGGFQAFSLGAAYKKGVSKIAREMTEVRLQSDAEPALAVITEDGVTFKSHLDGSEHLFTPERSIQIQHDIGADIIFAFDECTSPHASDSYQREALARTHRWATRSLVQHRMLDNAQLLFGIVQGGRVQELREESARVIGGICPPAGGFDGFGIGGSFTKDDVHTAVGWVNTLLPEDKPRHLLGIGEPEDIVLAVEQGCDLFDCVTPTRNARNGSLYTREGKMNIGNARYRKDFFPIQQDCDCYTCNNFTKSYLAHLFRAHEMLAGTLATIHNLRFIIHLTEELRAAILDGTLSEYKNKFLTRYKK

SEQ ID NO: 53509 - protein, 433 aa, Vogelbacteria bacterium; identical to SEQ ID NO: 52256
  misc_feature (1)..(433): tr|A0A2H0RI31|A0A2H0RI31_9BACT Queuine tRNA-ribosyltran sferase OS=Candidatus Vogelbacteria bacterium CG10_big_ fil_rev_8_21_14_0_10_49_38 OX=1975043 GN=tgt PE=3 SV=1

SEQ ID NO: 53510 - protein, 384 aa, Wallbacteria bacterium
  misc_feature (1)..(384): tr|A0A352M134|A0A352M134_9BACT Queuine tRNA-ribosyltran sferase OS=Candidatus Wallbacteria bacterium OX=2053640 GN=tgt PE=3 SV=1
MHKNNHFEILRKAENGIAARAGVLKTWRGDIQTPVFMPVGTCATVKAQTSRDLKLAGAQIILANTYHLFIRPGHELIREAGGLHEFMRWDRPILTDSGGYQVFSLSGTRKITDEKVVFKSFKDGAKMEFSPEKVIRIQQAFGSTIMMVLDECVKYPETEKKAEIAVERTFRWAKRSYDEYLKIMEETEGGHKDMVFGIVQGSTYRNLRKRSAEQITSIPFHGYAIGGLSVGEPNEMMYEMLDYMKEFMPVEKPRYLMGVGEVNDIIEGIKNGVDMFDCVIPTRLGRHGVLMTPYTKLLIKNAGYRKDFTPPMANCSCYTCSNFTRAYLHHLFRSEEILSPILNSIHNVHFLIKLAALCREAILEGRYGEFYSDYKTGNLTKYQF

SEQ ID NO: 53511 - protein, 265 aa, Wallbacteria bacterium
  misc_feature (1)..(265): tr|A0A1F7WXI4|A0A1F7WXI4_9BACT Queuine tRNA-ribosyltran sferase (Fragment) OS=Candidatus Wallbacteria bacterium GWC2_49_35 OX=1817813 GN=A2008_01460 PE=3 SV=1
SFKDGAKMEFSPEKVIRIQQAFGSTIMMVLDECVKYPETEKKAEIAVERTFRWAKRSYDEYLKIMEETEGGHKDMVFGIVQGSTYRNLRKRSAEQITSIPFHGYAIGGLSVGEPNEMMYEMLDYMKEFMPVEKPRYLMGVGEVNDIIEGIKNGVDMFDCVIPTRLGRHGVLMTPYTKLLIKNAGYRKDFTPPMANCSCYTCSNFTRAYLHHLFRSEEILSPILNSIHNVHFLIKLAALCREAILEGRYGEFYSDYKTGNLTKYQF

SEQ ID NO: 53512 - protein, 389 aa, Wildermuthbacteria bacterium
  misc_feature (1)..(389): tr|A0A1G2QWQ7|A0A1G2QWQ7_9BACT Queuine tRNA-ribosyltran sferase OS=Candidatus Wildermuthbacteria bacterium RIFC SPHIGHO2_01_FULL_48_27b OX=1802447 GN=tgt PE=3 SV=1
MKFFEVKNPPAGGKKSKARVGVIHTAHGDIHTPAFVPVATKGTLKTIPPREFQEIGVEVAFVNTFHLVAHPGAKVIQKFGGIHAYAKLGIPLMSDSAGFQVFSLGGGDSQKRIKTHEGEEVPVKKISEEGVLFRAPRDGKEILFTPELSMKYQQQIGADLIMAFDECIYHGADYQYTKQATERTHRWLQRCIKAQKKSASAKGYGEAKQYLYGIIQGGTFKDLRQESAKFVAEQATPGVAIGGVAIGETKKEIREQLRWVAPYLPEDKPVHLLGIGQSDDILDAVRYGVDTFDCVEPTRLARNGIVYCSKSDFEQFARVDLGASKYLKEKGPIQKGCRCYTCQNFSLSFIHHLFKERELLGYYLATWHNLYSFAEFFRNLREQIAAGKI

SEQ ID NO: 53513 - protein, 373 aa, Wildermuthbacteria bacterium
  misc_feature (1)..(373): tr|A0A3D3G4P2|A0A3D3G4P2_9BACT Queuine tRNA-ribosyltran sferase OS=Candidatus Wildermuthbacteria bacterium OX=2 053642 GN=tgt PE=3 SV=1
MTFFQIERRSKKTRARLGKITTPRGEILTPAFVPVATKGTLKAIPPKDIKELGVQVAFVNTFHLVDDPGLEVIEKFGGIHKYAKLDIPLMSDSGGFQVFSLGGKKIGVPRSEEKGTPVLEIDEQGVCFRSPKNGEEVLFTPEFSIQAQKDIGADIIMAFDECIFYGADKKYTEKATERTHRWLLRCIKAKKRKDQTLYGIIQGGVFKDLRIDSAKFVAKQNIDGIAIGGVSVGETHKELRDQVKWVALYLPEHLPCHLLGVGRIEDITEFIKLGIDTFDCAEPTRIARHGQVFRRQGQKIMRLDAMKGSLRGDKNPIDKNCVCYTCQNFSLSFLHHLFQERELIAYYLASYHNLFFFEQIFRELRRQIATGKI

SEQ ID NO: 53514 - protein, 376 aa, Wirthbacteria bacterium
  misc_feature (1)..(376): tr|A0A1J5IXV7|A0A1J5IXV7_9BACT Queuine tRNA-ribosyltran sferase OS=Candidatus Wirthbacteria bacterium CG2_30_54 _11 OX=1817892 GN=tgt PE=3 SV=1
MPFELLKTDTNTKARLGRISTPHGDVLTPAFMPDATRGAVQTISSRQLRDTGTPMLVSNTVHLYLKPGHELIGSFGGLHKFMQWDGPILTDGGGFQIYSLIHSSNLKGKVTEQGMYFQSPSDGSSHLLTPELSQEVQFALGADIKMAFDDCVHTDVTSKKNRESVELTTLWSRRARKRFDELSEATGQTSEIYAIVQGGADLELRKKSFDELHAIGFDGYAYGGWPVDSEGNFLEDLIGYTADLMPLKKPRYAMGVGTPSDVVRSVALGYDLFDCVLPTRNARHGYFYTSEGILRIKKQEYREDQRPLDSECDCYTCRTYSRAYLRHLYNVGEHLAGTLGTIHNLRYYARLMERIRFAIQDGTYERLTRQIRAWAI

SEQ ID NO: 53515 - protein, 385 aa, Woesebacteria bacterium
  misc_feature (1)..(385): tr|A0A1F7X7Q1|A0A1F7X7Q1_9BACT Queuine tRNA-ribosyltran sferase OS=Candidatus Woesebacteria bacterium RBG_13_46 _13 OX=1802479 GN=A2Y68_02785 PE=3 SV=1
MDFSFEVSKKDKKSLARAGVIHTSHGDILTPAFSPVATKASVKTLTPDDLRAAKTQVVLGNTYHLYLKPGTETLKKFGGFGPFMRWHGPTISDSGGYQVSFLRSKSEDGRLVKITDKGAIFSSYLDGSRHLITPEKSMEIQKILAADIIMAFDQPLGSDYSPLKKKEAFERTMKWEERSFSAWKKLKSNQALYGIVQGDIDRSLRRKSLKFVLSLGFPGIAMGGESIGVSPKITAETLDAVADILPLDKPLHALGLGGGPEGIFTAVQRGVDTFDNTSITRMARTGLLFIYPEDGGSISNKFRIDIEKSKFKNARAPISNKCSCYTCKNFSAAYLHHLFLTRELLGLRLASIHNVFFVNDLMERIRNSILEGDFRAFKKYWLNRG

SEQ ID NO: 53516 - protein, 389 aa, Woesebacteria bacterium
  misc_feature (1)..(389): tr|A0A1F7YYY8|A0A1F7YYY8_9BACT Queuine tRNA-ribosyltran sferase OS=Candidatus Woesebacteria bacterium RIFCSPHIG HO2_01_FULL_44_21 OX=1802503 GN=A2803_04620 PE=3 SV=1
MQKFSFELIKKDNKTKARAAIIHTPHGDIETPAFSVVGTKASVKGLDETDLKNAGSQVVLANTYHLYLRPGVDVIKKFGDLRNFMKWDGPMITDSGGYQVSYLWTKGEEVGQSVKITDKGAKFRSHIDGSIHEITPEKSMQIQKILGADIIMAFDQPIKLANSDRKNKEALRRTFDWEERSFKEHKKLKSDQALYGILHGGLNKKIRKNFLDYILTAGFDGIAFGDETIGADPNFTAKGMDTVSEFLPDDKPVHALGLGGGPEGIFVAVERGMDTFDNTGITRMARTGLLFTYPEDGGLSLNKFRIDINKSKFKDVKKPISKTCNCHTCNNYSSAYIHHLLVSGEPLGVRLTTIHNVYFINDLMREVRRSIINGHFNALKKHWLGERKY

SEQ ID NO: 53517 - protein, 435 aa, Wolfebacteria bacterium
  misc_feature (1)..(435): tr|A0A2M8DAI3|A0A2M8DAI3_9BACT Queuine tRNA-ribosyltran sferase OS=Candidatus Wolfebacteria bacterium CG_4_9_14 _0_8_um_filter_39_46 OX=1975064 GN=tgt PE=3 SV=1
MFEFKIKNSYKKARSGFFNTPHGKLETPNLAIVATHGKIKLLNKTEHLRANPDLIIANTFHLFVNNKVKEIKGSGGLHQWSSFQKPIMTDSGGFQVFSLGWGKIHGIGKVLEQKNFFSLNPLRSPQRGELTCSPACAEASAGRSARSSIFGGHRARSPAQVSDKRNFSVPEKLVKISEDGVIFDFNGKNFELTPEKSIKIQKDLGADIIFTFDECTSPFNSYAYTKKAMERTHRWAIRCLNFFHSHSHGHSQSLFGIVQGGIFEDLRKKSSKFIGSLAFNGFGIGGSFGEKQMRKVLNWSLSGLAEDKPRHLLGIGKIKDIFIAVKQGIDLFDCVVPTREARHAVLYTKAGKLNIEKEIFVKDKKMIEKNCQCWVCRQEISRQEIRHYFKTERIYGQRLATLHNIYFFKNLFREIREAIIDKRLEKLEEEYYNYR

SEQ ID NO: 53518 - protein, 378 aa, Wolfebacteria bacterium
  misc_feature (1)..(378): tr|A0A1F8DQW0|A0A1F8DQW0_9BACT Queuine tRNA-ribosyltran sferase OS=Candidatus Wolfebacteria bacterium RIFCSPLOW O2_01_FULL_38_11 OX=1802556 GN=tgt PE=3 SV=1
MFEFKISKKSKKNNARLGILKTAHGEIETPAFVPVATQAAIKTLDSQEVLKTKSQILICNTFHLHLKPGEKIIKSSGGLHKFMNWPKPLMTDSAGFQVFSLGFGRDFGMGKILKEKNGGKIKSGQQPKLLKITSEGVLFRSPNDGRKIFIGPKESIKIQESLGADIIFAFDECTPPIANYAYTKKSLKLTHQWAQICLNAKKSKQALFGIVQGGKFKDLRIESAKFIGNLPFDGFGIGGEFGDDKKIMEKMINWVNKELPENKPRHLLGIGYLEDIPKIIKAGVDTFDCIVPTHYGRRGIAFTSSGELDLNKSKFLQDKKALDKKCPCFVCQNYSRSYLCHLFRAKEISALKFLTFHNLYFFNSFVENIRNAIKKGKF

SEQ ID NO: 53519 - protein, 408 aa, Woykebacteria bacterium
  misc_feature (1)..(408): tr|A0A1G1WS67|A0A1G1WS67_9BACT Queuine tRNA-ribosyltran sferase OS=Candidatus Woykebacteria bacterium RIFCSPHIG HO2_02_FULL_43_16b OX=1802601 GN=tgt PE=3 SV=1
MSFFDITHKDNRSSARVGVIRTDHGDIETPVFMPVGTQATVKALTPEDLLDLGAEIILNNTYHLYLRPGTGVIESFGGVHGFQHWSRPILTDSGGFQVFSLGLGKLTKQRKVKHDLLAESLAEFTVEEVALKNPKILAKVDEDGVTFRSHLDGSTHRFTPEISLEIQHKLGADIILAFDECVPYPSNRKYALESLERTHNWAKRSLETHKLNKNQPYKQFVFGIVQGSVYPDLRAKSARFIGGLGFDGFCIGGVSVGEPKSEMYKAIESSVPFLDACKPRHLLGVGDIDDIFEAIERGVDMFDCVSPTRLGRNGSLYHSQASRASKFRVNILGEGYKTQTDPLDPECSCYTCANYSAAYLSHLYRADELLAYRLGSLHNVHFIVNLVKKIRQSILNGDFPLLKQKWLS

SEQ ID NO: 53520 - protein, 408 aa, Woykebacteria bacterium; identical to SEQ ID NO: 53519
  misc_feature (1)..(408): tr|A0A1G1WWC3|A0A1G1WWC3_9BACT Queuine tRNA-ribosyltran sferase OS=Candidatus Woykebacteria bacterium RIFCSPLOW O2_01_FULL_43_14 OX=1802605 GN=tgt PE=3 SV=1

SEQ ID NO: 53521 - protein, 379 aa, Yanofskybacteria bacterium
  misc_feature (1)..(379): tr|A0A1F8H4V7|A0A1F8H4V7_9BACT Queuine tRNA-ribosyltran sferase OS=Candidatus Yanofskybacteria bacterium RIFCSP LOWO2_02_FULL_45_18 OX=1802707 GN=tgt PE=3 SV=1
MLEFKVLKQSEKSKARLGLLKTANGIVETPTLVPVATQAVVKTLTSEEAAAAGSQMLICNTFHLRLKPGEKFVKSAGGLHKFMNWPRPLMTDSGGFQVFSLGFGKDLGVGKIIKEKTGEIVRLGQQPKLLKITDEGVHFTSFLDGSRLFLGPEESMKIQQALGADIIFAFDECPPPAAEHAYIKKSLERTHRWAKVCLKAKRNKHQALFGIVQGGRYKDLRQESARFINSQPFDGFGIGGEFGEDKKSMMQMLGWVTEELDPKKPRHLLGVGYLEDIPKIIKQGIDTFDCIVPTHYARHGIAFISSGTLDLLKSVFLKDKKPLDPKCSCAVCANYSRSYISHLFRAKEITALKLLTFHNLFFFNQYVSKIREDIRNNKV

SEQ ID NO: 53522 - protein, 399 aa, Yanofskybacteria bacterium
  misc_feature (1)..(399): tr|A0A1F8ECX6|A0A1F8ECX6_9BACT Queuine tRNA-ribosyltran sferase OS=Candidatus Yanofskybacteria bacterium RIFCSP HIGHO2_01_FULL_41_26 OX=1802661 GN=A2649_04335 PE=3 SV= 1
MNETCFKVLKKDKKSKARLGLLSTPHGNIQTPSYVFVGTYGKFRHLTPRDIKRTKTQLVIANTFHLWEEALQGLPLQQGQSLLIKKLGLNIPTMTDSGGFQVLSLAFGDKNKIGKFMTKNIAVDNRLRKSVIHSRKNVKITQKGVYFNFKGQKMFLGPELSMKIQKKIGADIIFTFDHITSPLDSFKYNKKAVELTNKWALRCFRTNKNNNQALFGIVQGGIYKSLRIKSAKFIGSLPFDGFGIGGSYTKKQISKILKWVIPYLPEEKPRHLLGVGKVADIFEAVQNGIDTFDCVIPTREARHGRLYTKTRHIDIRKGKYIKDKKVIEKGCACQTCSNKIPRFKIRKLLTNEDRKQNATGQRYCLMHNMWFFNNLLEEIRESIQKDKFTEFKKKFLKNY

SEQ ID NO: 53523 - protein, 406 aa, Yonathbacteria bacterium
  misc_feature (1)..(406): tr|A0A1G2SK92|A0A1G2SK92_9BACT Queuine tRNA-ribosyltran sferase OS=Candidatus Yonathbacteria bacterium RIFOXYD1 _FULL_52_36 OX=1802730 GN=tgt PE=3 SV=1
MGKPIRFSIEKKMPGALGRAGTITTPHGEIRTPAFVTVGTKATVKALTPEMVRDLGAQVVLANTYHLYLEPGERIVRDAGGIHKFMNWSGPTMTDSGGFQAFSLGAAFGKGVSKIAKGGESENGSTAGDEGSQEEPRLARIDEDGVTFKSHLNGSEHKFTPERSIGIQHNIGADMIFAFDECTSPHAPHEYQEEALNRTHRWAQRSLDAHHANESAAGKQGLLGIVQGGRHKDLREESARVVGAMDFDGFGIGGSFDKEDMYTAVGWVNALLPEEKPRHLLGIGEPMDLFGGVENGCDIFDCVAPTRMARNGTIHTADGRINILNAQFVRDFTPLDPGCECYTCRTYTRAYLAHLFRAKEMLAGTLASIHNLHFIIKLVANIRQAILDDTFSEFKAAFLARYYKSL

SEQ ID NO: 53524 - protein, 418 aa, Yonathbacteria bacterium
  misc_feature (1)..(418): tr|A0A2M7Q607|A0A2M7Q607_9BACT Queuine tRNA-ribosyltran sferase OS=Candidatus Yonathbacteria bacterium CG_4_10_ 14_0_8_um_filter_43_17 OX=1975099 GN=tgt PE=3 SV=1
MKPISFTIEKKMPGQKALGRAGTIITPHGDIKTPAFVTVGTKATVKALTPEMVRDLGAQVVLANTYHLYLEPGDELVRDAGGFGKFMNWKGPTMTDSGGFQVFSLGAAFGSKVGKLSKVPQANQQIRVLGVDSIVEEVEKEDEAGKLAKIDEDGVTFKSYKDGSVYRFTPERSIEIQHNLGADMFFAFDECTSPMAPYEYQKEAMERTHRWAKRSLDAHLNLETRRPSGENPQALLGVLQGGRHKDLREESARVLGAMDFDGYGIGGSFDKDDMTTAVGWVNAILPEDKPRHLLGIGEPEDLFGGVENGCDLFDCVAPTRMGRNGTLHTRDGKINIRGAKFVRDFAPVDSECDCYTCKNYTRAYLAHLFRSNEMLAGTLGSIHNLRFLVSVVDQMREAILEGTFDTLKTDFLNRYYRK

SEQ ID NO: 53525 - protein, 422 aa, Zambryskibacteria bacterium
  misc_feature (1)..(422): tr|A0A1G2UHH5|A0A1G2UHH5_9BACT Queuine tRNA-ribosyltran sferase OS=Candidatus Zambryskibacteria bacterium RIFCS PLOWO2_02_FULL_39_14 OX=1802769 GN=tgt PE=3 SV=1
MAPIKFSIEKELVNPTGRQLGRAGTLETPHGVIHTPAFVAVGTKATVKALTPEQVKSTGAEVILANTYHLYLEPGAERIRSFGHRHDGVGLRPDAVGGLHKFMNWQGPTMTDSGGFQVFSLGVAYGKELSKITKITDPSQMIALRSLDSEVPRLANIGADGVSFRSHHDGSLHYITPEKSIEIQHDLGADIIFAFDECTSPAEDFRYQEEALERTHRWAKRSLDHHHSLIRANGGINKQALFGIVQGGREESLRKRSAEFMKGLDFDGFGIGGSFSKDDMETVVKWVNEILPKDKPRHLLGIGEPEDLFMGVENGVDLFDCVAPTRNGRGGTLYTSRGKINIRNAEFREDTGPVDIECGCDVCKNYSRAYLCHLYRAHEMLGGTLGSIHNLYFIINLVKNMRQAILDNTFIQFREKFLDKYF

SEQ ID NO: 53526 - protein, 403 aa, Zambryskibacteria bacterium
  misc_feature (1)..(403): tr|A0A2H0QWH8|A0A2H0QWH8_9BACT Queuine tRNA-ribosyltran sferase OS=Candidatus Zambryskibacteria bacterium CG10_ big_fil_rev_8_21_14_0_10_42_12 OX=1975115 GN=tgt PE=3 S V=1
MSQPISFTKTKDIPDALGRAGIIHTQHGDIETPAFVTVGTKATVKSLTPEQVKDLGAQVVLANTYHLYLEPGDEIVKEAGGLHAFMNWKGPTITDSGGFQVFSLGEALGKGVSKVATGEAVTDAGDVARTDEFTNKRAKIDEEGVTFVSHKDGKKHRMTPEDSMRIQHNIGADIMFAFDECTSPHAKKEYQKEAMERTHRWAERCIAYHKESGQDKTQGLFAVVQGGRFEELRKESAKVLSEMDFAGFGVGGSFVKEDMDTAVGWVNEILPADKPRHLLGIGEPLDILKGVEQGCDTFDCVAATRMARNGGVYIDGGKINLLNAQFKKDFTPIMDTCDCYTCAHYTRAYIAHLFRAKEMLAATLASIHNLRFIIRFTDEIRESIKEGTFTEHKKEILQKYGLL

SEQ ID NO: 53527 - protein, 378 aa, Candidimonas bauzanensis
  misc_feature (1)..(378): tr|A0A1M5YTE7|A0A1M5YTE7_9BURK Queuine tRNA-ribosyltran sferase OS=Candidimonas bauzanensis OX=658167 GN=tgt PE =3 SV=1
MTGIQFKLLATDGAARRGQITLSHGVVETPIFMPVGTYGSVKAMLPHELEEIGAQIVLGNTFHLWLRPGTEVMEKHGGLHGFMQWNKPILTDSGGFQVFSLHGMRKITEEGVKFASPIDGARLFLTPEESMRIQRALNSDIAMVFDECTPYTIDGRPATSEEAAASMRMSLRWARRSRQAFQQQENPNALFGIVQGGMFEQLRDESLAGLLDIGFEGYAIGGLSVGEPKEDMMRVLAHVAPRLPEHAPRYLMGVGTPEDLVEGVSRGVDMFDCVMPTRNARNGWLFTRFGDIKIRNARYRDDTRPLEPGCSCHTCRHFSRAYLHHLQRAKEITGSRLNTLHNLHFYLTIMQEMRDAIAAGRFEAWRAQFARDRARGIE

SEQ ID NO: 53528 - protein, 378 aa, Candidimonas nitroreducens
  misc_feature (1)..(378): tr|A0A225MLL4|A0A225MLL4_9BURK Queuine tRNA-ribosyltran sferase OS=Candidimonas nitroreducens OX=683354 GN=tgt PE=3 SV=1
MSGLQFELLATDGAARRGRITLNHGIVETPIFMPVGTYGSVKAMLPHELEQIGAQIVLGNTFHLWLRPGTEVMQAHGGLHGFMQWQKPILTDSGGFQVFSLNGLRKITEEGVKFASPIDGARLFLTPEESMRIQRALNSDIAMVFDECTPYAIDGRPATAEEAARSMRMSLRWARRSRTAFDELGNPNALFGIVQGGMFEALRDESLQGLVDIGFHGYAIGGLSVGEPKEEMLRVLAHVAPRLPVAAPRYLMGVGTPEDLVEGVSRGVDMFDCVMPTRNARNGWLFTRYGDIKIRNARYRSDTRPLDASCGCHTCGHFSRAYLHHLQRANEITGARLNTLHNLHFYLNLMQEMRQAIEAGTFAQWRAGFEHDRARGIE

SEQ ID NO: 53529 - protein, 378 aa, Candidimonas sp.
  misc_feature (1)..(378): tr|A0A3S0N158|A0A3S0N158_9BURK Queuine tRNA-ribosyltran sferase OS=Candidimonas sp. SYP-B2681 OX=2497686 GN=tgt PE=3 SV=1
MTGLQFQLLATDGAARRGQITLNHGVVQTPIFMPVGTYGSVKAMLPHELDEVGAQIILGNTFHLWLRPGTEVLDKHNGLHGFMQWKKPILTDSGGFQVFSLHGMRKITEEGVKFASPIDGSRLFLTPEESMRIQRALNSDIAMVFDECTPYTIEGRPATSEEAARSMRMSLRWARRSRVAFQEQENPNALFGIVQGGMFEDLRDESLAGLVDIGFEGYAIGGLSVGEPKEDMMRVLAHVAPRLPANAPRYLMGVGTPEDLVEGVSRGVDMFDCVMPTRNARNGWLFTRFGDIKMRNARYRDDTQPLDPSCTCHTCQHFSRSYLHHLQRANEITGSRLNTLHNLHFYLTIMQEMREAIEEGRFESWRSQFARDRAVGIQ

SEQ ID NO: 53530 - protein, 378 aa, Candidimonas sp.
  misc_feature (1)..(378): tr|A0A522PAA1|A0A522PAA1_9BURK Queuine tRNA-ribosyltran sferase OS=Candidimonas sp. OX=1912597 GN=tgt PE=3 SV=1
MTGLQFELLATEGAARRGRITLNHGIVETPMFMPVGTYGSVKAMLPHELTEVGAQIVLGNTFHLWLRPGVEVIDKHQGLHGFMQWDKPVLTDSGGFQVFSLKGMRKISEDGVKFASPIDGARLFLTPEESMRIQTVLNSDIAMVFDECTPYIIEGRPATHDEAAQSMRMSLRWARRSRLAFDQLQNPNALFGIVQGGMFENLRDESLAGLVDTGFHGYAIGGLSVGEPKDEMMRVLAHIAPRLPADAPRYLMGVGTPEDLVAGVALGVDMFDCVMPTRNARNGWLFTRYGDIKIRNARYRDDTRPLDSGCACHTCRFFSRAYLHHLQRANEITGARLNTLHNLHFYLTLMQEMREAIAAGTFEPWQREFARNRAHGIE

SEQ ID NO: 53531 - protein, 376 aa, Capnocytophaga canimorsus
  misc_feature (1)..(376): tr|F9YPB1|F9YPB1_CAPCC Queuine tRNA-ribosyltransferase OS=Capnocytophaga canimorsus (strain 5) OX=860228 GN=tg t PE=3 SV=1
MQFELLKTDPHTKARAGKIITDHGIIETPIFMPVGTVASVKGVHQRELKEDINPDIILGNTYHLYLRPTTSILEKAGGLHKFMNWDRNILTDSGGYQVYSLSDTRKIKEEGVKFKSHIDGSYHFFSPENVMETQRSIGADIIMAFDECTPYPCDYQYAKKSMQMTHRWLDRCISHLEKVPPKYGYSQSLFPIVQGSVYKDLREQSAEYIASKGADGNAIGGLSVGEPAEDMYEMTDLVCDILPKDKPRYLMGVGTPVNILENIALGVDMFDCVMPTRNARNGMLFTSQGIINIKNKKWEDDFSPIDPDGHTYVDTYYTKAYLRHLFAANEFLGKQIASIHNLGFYLWLVREARKHILAGDFAFWKEKMVKQLGQRL

SEQ ID NO: 53532 - protein, 376 aa, Capnocytophaga canimorsus
  misc_feature (1)..(376): tr|A0A0B7H2Y8|A0A0B7H2Y8_9FLAO Queuine tRNA-ribosyltran sferase OS=Capnocytophaga canimorsus OX=28188 GN=tgt PE =3 SV=1
MQFELLKTDPHTKARAGKITTDHGIIETPIFMPVGTVASVKGVHQRELKEDINPDIILGNTYHLYLRPTTSILEKAGGLHKFMNWDRNILTDSGGYQVYSLSDTRKIKEEGVKFKSHIDGSYHFFSPENVMETQRSIGADIIMAFDECTPYPCDYQYAKKSMQMTHRWLDRCISHLEKVPPKYGYSQSLFPIVQGSVYKDLREQSAEYIASKGADGNAIGGLSVGEPAEDMYEMTDLVCDILPKDKPRYLMGVGTPINILENIALGVDMFDCVMPTRNARNGMLFTSQGIINIKNKKWEDDFSPIDPDGHTYVDTYYTKAYLRHLFAANEFLGKQIASIHNLGFYLWLVREARKHILAGDFAFWKEKMVKQLGQRL

SEQ ID NO: 53533 - protein, 376 aa, Capnocytophaga canis
  misc_feature (1)..(376): tr|A0A0B7I3B3|A0A0B7I3B3_9FLAO Queuine tRNA-ribosyltran sferase OS=Capnocytophaga canis OX=1848903 GN=tgt PE=3 SV=1
MQFELLKTDEKTKARAGKITTDHGVIETPIFMPVGTVASVKGVHQRELKEDINPDIILGNTYHLYLRPQTAILEKAGGLHKFMNWDRNILTDSGGYQVYSLAANRKIKEEGVKFKSHIDGSYHFFSPENVMEIQRSIGADIIMAFDECTPYPCDYQYAKRSLAMTHRWLDRCISHLEKVPPKYGYSQSLFPIVQGSVYKDLRQQSAEYIASKGADGNAIGGLSVGEPAEEMYAMTEVVCDILPKDKPRYLMGVGTPINILENISLGVDMFDCVMPTRNARNGMLFTSQGVINIKNKKWEDDFSPIDPDGHTFVDVQYTKAYLRHLFAANEYLGKQIASIHNLGFYLWLVREARQRILAGDFSIWKEQMIRQMTTRL

SEQ ID NO: 53534 - protein, 376 aa, Capnocytophaga canis
  misc_feature (1)..(376): tr|A0A0B7ITY7|A0A0B7ITY7_9FLAO Queuine tRNA-ribosyltran sferase OS=Capnocytophaga canis OX=1848903 GN=tgt PE=3 SV=1
MQFELLKTDEKTKARAGKITTDHGVIETPIFMPVGTVASVKGVHQRELKEDINPDIILGNTYHLYLRPQTAILEKAGGLHKFMNWDRNILTDSGGYQVYSLAANRKIKEEGVKFKSHIDGSYHFFSPENVMEIQRSIGADIIMAFDECTPYPCDYQYAKRSLAMTHRWLDRCISHLEKVPPKYGYSQSLFPIVQGSVYKDLRQQSAEYIASKGADGNAIGGLSVGEPAEEMYAMTEVVCDILPKDKPRYLMGVGTPINILENISLGVDMFDCVMPTRNARNGMLFTSQGVINIKNKKWEDDFSPIDPDGHTFVDVQYTKAYLRHLFAANEYLGKQIASIHNLGFYLWLVREARQRILAGDFSIWKEQMIRQMSTRL

SEQ ID NO: 53535 - protein, 376 aa, Capnocytophaga cynodegmi
  misc_feature (1)..(376): tr|A0A0B7HH94|A0A0B7HH94_9FLAO Queuine tRNA-ribosyltran sferase OS=Capnocytophaga cynodegmi OX=28189 GN=tgt PE= 3 SV=1
MQFELLKTDPHTKARAGKITTDHGIIETPIFMPVGTVASVKGVHQRELKEDINPDIILGNTYHLYLRPTTSILEKAGGLHKFMNWDRNILTDSGGYQVYSLSDTRKIKEEGVKFKSHIDGSYHFFSPENVMETQRSIGADIIMAFDECTPYPCDYQYAKKSMQMTHRWLDRCISHLEKVPPKYGYSQSLFPIVQGSVYKDLREQSAEYIASKGADGNAIGGLSVGEPAEDMYEMTDLVCNILPKDKPRYLMGVGTPINILENIALGVDMFDCVMPTRNARNGMLFTSQGIINIKNKKWEDDFSPIDPDGHTYVDTYYTKAYLRHLFAANEFLGKQIASIHNLGFYLWLVREARKHILAGDFAFWKEKMVKQLGQRL

SEQ ID NO: 53536 - protein, 376 aa, Capnocytophaga cynodegmi
  misc_feature (1)..(376): tr|A0A250E850|A0A250E850_9FLAO Queuine tRNA-ribosyltran sferase OS=Capnocytophaga cynodegmi OX=28189 GN=tgt PE= 3 SV=1
MQFELLKTDQHTKARAGKITTDHGIIETPIFMPVGTVASVKGVHQRELKEDINPDIILGNTYHLYLRPTTSILEKAGGLHKFMNWDRNILTDSGGYQVYSLSDTRKIKEEGVKFKSHIDGSYHFFSPENVMETQRSIGADIIMAFDECTPYPCDYQYAKKSMQMTHRWLDRCISHLEKVPPKYGYSQSLFPIVQGSVYKDLREQSAEYIASKGADGNAIGGLSVGEPAEDMYEMTDLVCDILPKNKPRYLMGVGTPVNILENIALGVDMFDCVMPTRNARNGMLFTSQGIINIKNKKWEDDFSPIDPDGHTYVDTYYTKAYLRHLFAANEFLGKQIASIHNLGFYLWLVREARKHILAGDFAFWKEKMVKQLGQRL

SEQ ID NO: 53537 - protein, 376 aa, Capnocytophaga gingivalis
  misc_feature (1)..(376): tr|C2M515|C2M515_CAPGI Queuine tRNA-ribosyltransferase OS=Capnocytophaga gingivalis OX=553178 GN=tgt PE=3 SV=1
MNFELQTTDTTTKARAGRITTDHGVIETPIFMPVGTVASVKGVQQRELTEDINADIILGNTYHLYLRPTTSILEQAGGLHKFMHWDRNILTDSGGYQVYSFSSTRKIKEEGVRFKSHIDGSYHFFSPEKSMEIQRSIGADIIMAFDECTPYPCEYGYAKRSMHMTHRWLDRCIAYLGENAPKYGYNQSLFPIVQGSVYPDLRKISAEYIASKGADGNAIGGLSVGEPAEKMYEITEIVCDILPKDKPRYLMGVGTPINILENIALGVDMMDCVMPTRNARNGMLFTAHGTINIKNKKWENDFSPIDENGYTFVDTYYTKAYLRHLFAAEESLGKQIASIHNLGFYLWLVREARRHIMEGDFSQWKDQMVRQMNNRL

SEQ ID NO: 53538 - protein, 376 aa, Capnocytophaga gingivalis; identical to SEQ ID NO: 53537
  misc_feature (1)..(376): tr|A0A250FS39|A0A250FS39_9FLAO Queuine tRNA-ribosyltran sferase OS=Capnocytophaga gingivalis OX=1017 GN=tgt PE= 3 SV=1

SEQ ID NO: 53539 - protein, 384 aa, Capnocytophaga granulosa
  misc_feature (1)..(384): tr|A0A381E390|A0A381E390_9FLAO Queuine tRNA-ribosyltran sferase OS=Capnocytophaga granulosa OX=45242 GN=tgt PE= 3 SV=1
MHPEKESYMNFELLSTDAATHARAGRITTDHGVIETPIFMPVGTVASVKGVQQRELSEDICADIILGNTYHLYLRPTTSILEQAGGLHKFMHWDRNILTDSGGYQVYSFSSTRKIKEEGVRFKSHIDGSYHFFSPEKSMEIQRSIGADIIMAFDECTPYPCEYPYAKRSMHMTHRWLDRCINYLQENAPKYGYNQSLFPIVQGSVYADLRRASAEYIASKGADGNAIGGLSVGEPAEKMYEITELVCDILPKDKPRYLMGVGTPINILENIALGVDMFDCVMPTRNARNGMLFTAHGTINIKNKKWENDFSPIDENGYTFVDTYYTKAYLRHLFAAEESLGKQIASIHNLGFYLWLVREARKHILQGDFSQWKNQMVRQMNNRL

SEQ ID NO: 53540 - protein, 376 aa, Capnocytophaga haemolytica
  misc_feature (1)..(376): tr|A0A0X8JBH6|A0A0X8JBH6_9FLAO Queuine tRNA-ribosyltran sferase OS=Capnocytophaga haemolytica OX=45243 GN=tgt P E=3 SV=1
MEFELLTTDAATKARAGRITTAHGVIETPIFMPVGTVGTVKGVHQRELKEDINADIILGNTYHLYLRPQTDILEAAGGLHRFMNWDRSILTDSGGYQVYSLSATRKIKEEGVKFKSHIDGSYHVFSPEKVMEIERSIGADIMMAFDECTPYPCDYAYAKRSMAMTHRWLDRCIAHLEKVPPKYGYAQSLFPIVQGATYRDLRTQSAEYIASKGADGNAIGGLSVGEPAEKMYEITELVCDILPKDKPRYLMGVGTPVNILENIALGVDMMDCVMPTRNARNGMLFTSEGIINIKNKKWEADFSPIDADGHTYVDTYYTKAYLRHLFAANEFLGKQIASIHNLGFYLWLVREARRQILAGSFASWKAAMVPRLENRL

SEQ ID NO: 53541 - protein, 376 aa, Capnocytophaga leadbetteri
  misc_feature (1)..(376): tr|A0A250FC02|A0A250FC02_9FLAO Queuine tRNA-ribosyltran sferase OS=Capnocytophaga leadbetteri OX=327575 GN=tgt PE=3 SV=1
MNFDILKTDELTKARAGKITTAHGVIETPIFMPVGTVGSVKGVHQRELKEDINADIILGNTYHLYLRPQMPILERAGGLHKFINWDRNILTDSGGYQVYSLAANRKIKEEGVKFKSHIDGSYHFFSPENVMEIERSIGADIMMAFDECTPYPCEYGYAKRSMHLTHRWLDRCIAHLEKVPPKYGYEQSLFPIVQGSVYKDLRIQSAEYIASKGADGNAIGGLSVGEPVEQMYEMTELVCDILPKDKPRYLMGVGTPINILENIALGVDMMDCVMPTRNARNGMLFTSKGIINIKNKKWEDDFSPLDPDGHTYVDTYYTKAYLRHLFAANEFLGKQIASIHNLGFYLWLVREARRQIIAGTFSQWKTKMVNDMSNRL

SEQ ID NO: 53542 - protein, 376 aa, Capnocytophaga leadbetteri
  misc_feature (1)..(376): tr|A0A2T5XTS9|A0A2T5XTS9_9FLAO Queuine tRNA-ribosyltran sferase OS=Capnocytophaga leadbetteri OX=327575 GN=tgt PE=3 SV=1
MNFDILKTDELTKARAGKITTAHGVIETPIFMPVGTVGSVKGVHQRELKEDINADIILGNTYHLYLRPQMPILEKAGGLHKFINWDRNILTDSGGYQVYSLAANRKIKEEGVKFKSHIDGSYHFFSPENVMEIERSIGADIMMAFDECTPYPCEYGYAKRSMHLTHRWLDRCIAHLEKVPPKYGYEQSLFPIVQGSVYKDLRMQSAEYIASKGADGNAIGGLSVGEPVEQMYEMTELVCDILPKDKPRYLMGVGTPINILENIALGVDMMDCVMPTRNARNGMLFTSKGIINIKNKKWEDDFSPLDPDGHTYVDTYYTKAYLRHLFAANEFLGKQIASIHNLGFYLWLVREARRQIIAGTFSQWKTKMVNDMSNRL

SEQ ID NO: 53543 - protein, 376 aa, Capnocytophaga ochracea
  misc_feature (1)..(376): tr|A0A2X2T3P8|A0A2X2T3P8_CAPOC Queuine tRNA-ribosyltran sferase OS=Capnocytophaga ochracea OX=1018 GN=tgt PE=3 SV=1
MDFEILKTDEHTKARAGKITTSHGVIETPIFMPVGTVGSVKGVHQRELKNDINADIILGNTYHLYLRPQTPILEKAGGLHKFINWDRNILTDSGGYQVYSLAANRKIKEEGVKFKSHIDGSFHFFSPEKVMEIERSIGADIMMAFDECTPYPCEYGYAKRSMHLTHRWLDRCIAHLEKVPPKYGYHQSLFPIVQGSVYKDLRTQSAEYIASKNADGNAIGGLSVGEPVEQMYEITELVCDILPKNKPRYLMGVGTPVNILENIALGVDMMDCVMPTRNARNGMLFTAKGIINIKNKKWEDDFSPIDPDGHTYVDTYYTKAYLRHLFAANEFLGKQIASIHNLGFYLWLVREARRQIVAGTFLTWKTKMVTDMSNRL

SEQ ID NO: 53544 - protein, 376 aa, Capnocytophaga ochracea
  misc_feature (1)..(376): tr|C7M900|C7M900_CAPOD Queuine tRNA-ribosyltransferase OS=Capnocytophaga ochracea (strain ATCC 27872 / DSM 727 1 / JCM 12966 / NCTC 12371 / VPI 2845) OX=521097 GN=tgt PE=3 SV=1
MDFEILKTDEHTKARAGKITTSHGVIETPIFMPVGTVGSVKGVHQRELKDDINADIILGNTYHLYLRPQTPILEKAGGLHKFINWDRNILTDSGGYQVYSLAANRKIKEEGVKFKSHIDGSFHVFSPEKVMEIERSIGADIMMAFDECTPYPCEYGYAKRSMHLTHRWLDRCIAHLEKVPPKYGYHQSLFPIVQGSVYKDLRTQSVEYIASKNADGNAIGGLSVGEPVEQMYEITELVCDILPKNKPRYLMGVGTPVNILENIALGVDMMDCVMPTRNARNGMLFTAKGIINIKNKKWEDDFSSIDPDGHTYVDTYYTKAYLRHLFAANEFLGKQIASIHNLGFYLWLVREARRQIVAGTFLTWKTKMVTDMSNRL

SEQ ID NO: 53545 - protein, 376 aa, Capnocytophaga sp.
  misc_feature (1)..(376): tr|I9P9C7|I9P9C7_9FLAO Queuine tRNA-ribosyltransferase OS=Capnocytophaga sp. oral taxon 412 str. F0487 OX=1125 721 GN=tgt PE=3 SV=1
MDFEILKTDEHTKARAGKITTSHGVIETPIFMPVGTVGSVKGVHQRELKDDINADIILGNTYHLYLRPQTTILEKAGGLHKFINWDRNILTDSGGYQVYSLAANRKIKEEGVKFKSHIDGSFHVFSPEKVMEIERSIGADIMMAFDECTPYPCEYGYAKRSMHLTHRWLDRCIAHLEKVPPKYGYHQSLFPIVQGSVYKDLRTQSAEYIASKNADGNAIGGLSVGEPVEQMYEITELVCDILPKDKPRYLMGVGTPVNILENIALGVDMMDCVMPTRNARNGMLFTAKGIINIKNKKWEDDFSSIDPDGHTYVDTYYTKAYLRHLFAANEFLGKQIASIHNLGFYLWLVREARRQIVAGTFLTWKTKMVTDMSNRL

SEQ ID NO: 53546 - protein, 376 aa, Capnocytophaga sp.
  misc_feature (1)..(376): tr|A0A0M3RI24|A0A0M3RI24_9FLAO Queuine tRNA-ribosyltran sferase OS=Capnocytophaga sp. oral taxon 323 OX=1705617 GN=tgt PE=3 SV=1
MDFEILKTDEHTKARAGKITTSHGVIETPIFMPVGTVGSVKGVHQRELKDDINADIILGNTYHLYLRPQTPILEKAGGLHKFINWDRNILTDSGGYQVYSLAANRKIKEEGVKFKSHIDGSFHVFSPEKVMEIERSIGADIMMAFDECTPYPCEYGYAKRSMHLTHRWLDRCIAHLEKVPPKYGYHQSLFPIVQGSVYKDLRTQSAEYIASKNADGNAIGGLSVGEPVEQMYEITELVCDILPKNKPRYLMGVGTPVNILENIALGVDMMDCVMPTRNARNGMLFTAKGIINIKNKKWEDDFSPIDPDGHTYVDTYYTKAYLRHLFAANEFLGKQIASIHNLGFYLWLVREARRQIVAGTFLTWKTKMVTDMSNRL

SEQ ID NO: 53547 - protein, 376 aa, Capnocytophaga sputigena
  misc_feature (1)..(376): tr|A0A2A3N2P9|A0A2A3N2P9_CAPSP Queuine tRNA-ribosyltran sferase OS=Capnocytophaga sputigena OX=1019 GN=tgt PE=3 SV=1
MEFELLKTDEHTKARAGKITTSHGVIETPIFMPVGTVGSVKGVHQRELKNDINADIILGNTYHLYLRPQTSILEKAGGLHKFINWDRNILTDSGGYQVYSLAANRKIKEEGVKFKSHIDGSFHFFSPESVMEIERSIGADIMMAFDECTPYPCEYSYAKRSMHLTHRWLDRCIAHLEKVPPKYGYHQSLFPIVQGSVYKDLRTQSAEYIASKNADGNAIGGLSVGEPVEQMYEMTELVCDILPKDKPRYLMGVGTPINILENIALGVDMMDCVMPTRNARNGMLFTAKGIINIKNKKWEDDFSPIDPDGHTYVDTYYTKAYLRHLFAANEFLGKQIASIHNLGFYLWLVREARRQIIAGTFLQWKTKMVTDMSNRL

SEQ ID NO: 53548 - protein, 376 aa, Capnocytophaga sputigena
  misc_feature (1)..(376): tr|A0A250F6I3|A0A250F6I3_CAPSP Queuine tRNA-ribosyltran sferase OS=Capnocytophaga sputigena OX=1019 GN=tgt PE=3 SV=1
MEFELLKTDEHTKARAGKITTSHGVIETPIFMPVGTVGSVKGVHQRELKNDINADIILGNTYHLYLRPQTSILEKAGGLHKFINWDRNILTDSGGYQVYSLAANRKIKEEGVKFKSHIDGSFHFFSPESVMEIERSIGADIMMAFDECTPYPCEYSYAKRSMHLTHRWLDRCIAHLEKVPPKYGYHQSLFPIVQGSVYKDLRTQSAEYIASKNADGNAIGGLSVGEPVEQMYEMTELVCDILPKDKPRYLMGVGTPINILENIALGVDMMDCVMPTRNARNGMLFTAKGIINIKNKKWEDDFSPIDPDGHTYVDTYYTKAYLRHLFAANEFLGKQIASIHNLGFYLWLVREARRQIIAGTFLQWKTKMVADMSNRL

SEQ ID NO: 53549 - protein, 376 aa, Capnocytophaga stomatis
  misc_feature (1)..(376): tr|A0A250FZ73|A0A250FZ73_9FLAO Queuine tRNA-ribosyltran sferase OS=Capnocytophaga stomatis OX=1848904 GN=tgt PE =3 SV=1
MQFELLKTDPHTKARAGKITTDHGVIETPIFMPVGTVASVKGVHQRELKEDINPDIILGNTYHLYLRPTTHILEQAGGLHKFMNWDRNILTDSGGYQVYSLSDTRKIKEEGVKFKSHIDGSYHFFSPENVMETQRSIGADIIMAFDECTPYPCDYQYAKKSMHMTHRWLDRCISHLEKVPPKYGYSQSLFPIVQGSVYKDLRQQSAEYIASKGADGNAIGGLSVGEPAEDMYEMTDLVCDILPKDKPRYLMGVGTPINILENIALGVDMFDCVMPTRNARNGMLFTSQGIINIKNKKWENDFSPIDPDGHTYVDTYYTKAYLRHLFAANEFLGKQIASIHNLGFYLWLVREARRRILAGDFPIWKENMVKQMANRL

SEQ ID NO: 53550 - protein, 376 aa, Caproiciproducens galactitolivorans
  misc_feature (1)..(376): tr|A0A4Z0Y980|A0A4Z0Y980_9FIRM Queuine tRNA-ribosyltran sferase OS=Caproiciproducens galactitolivorans OX=64258 9 GN=tgt PE=3 SV=1
MYKLIRNEGTARRGELVTPHGTVQTPAFMNVATCGAIKGGLSALDLKELKCQVQLCNTYHLHLRPGDETVKKLGGLHRFTRWDGPILTDSGGFQVFSLAKLRNIQEEGVTFASHIDGHRIFMGPEESMRIQSNLASTIAMAFDECVENPAEYDYARKSCQRTVRWLYRCKAEMDRLNSLPDTINRKQMLWGINQGSTYEDLRIENMRQIRELDLDGYAIGGLAVGESTEEMYCIIEAVEPEMPKDKPRYLMGVGTPENILEAVKRGVDIFDCVMPSRNARHGHVFTWEGCRNLFNAKYTLDEAPLDESCDCPTCRDFSRAYIHHLFKSGEMLAMRLCVTHNIYFYNTLLERIRKSLDEGNFQEFYNNNIRKLDTRI

SEQ ID NO: 53551 - protein, 376 aa, Caproiciproducens sp.
  misc_feature (1)..(376): tr|A0A410Q328|A0A410Q328_9FIRM Queuine tRNA-ribosyltran sferase OS=Caproiciproducens sp. NJN-50 OX=2507162 GN=t gt PE=3 SV=1
MFHLIQNCDAARRGEFTTPHGKIQTPAFMNVATAGAIKGAVSALDLKDLKCQVQLCNTYHLHLRPGDETVRKLGGLHRFTRWDGPILTDSGGFQVFSLAKLRNITEEGVTFASHIDGRKIFMGPEESMKIQSNLASTIAMAFDECVQNPAPYEYARDSCARTVRWLCRSKEAMNRLNREPGTINPRQMLFGINQGSTYEDLRVDCMKRIRDLDLDGYAIGGLAVGESSEEMYRIIEAVVPEMPMDKPRYLMGVGTPGNILEAVRRGVDLFDCVMPTRNARHGHVFTRQGRRNLFNAKYELDDTSLDPDCDCPVCKNFSRAYLHHLFKSGEMLAMRLCVMHNIYFYNSFFEKIRDSLQNETFERFYRENLEVLNRRI

SEQ ID NO: 53552 - protein, 382 aa, Capsulimonas corticalis
  misc_feature (1)..(382): tr|A0A402CSA8|A0A402CSA8_9BACT Queuine tRNA-ribosyltran sferase OS=Capsulimonas corticalis OX=2219043 GN=tgt PE =3 SV=1
MTSFTLKGVSSDTGARRGELRLPHASLPIQTPVFMPVGTLGTVKAMTQEELSGLGFSLILGNTYHLYLRPGHELVRKAGGLHKFIAWDGAMLTDSGGFQVFSLQDLRKITENGAAFKSHIDGSEHFFSPERSIEVQHALGADIIMAFDECPPYPSTYEQTQSATERTHRWLTRCVAYHKEQASEQLLFGIAQGGTYESLRIESAQFIAAQDTPGIAIGGVSVGEPPEKMLEAVSWSMPYIPKEKPRYLMGVGTPQDILQAVAQGVDMFDCVLPTRLGRTGTFYTMRGRINIKGSRYTEDFGPVDPECSCAVCRRYSAAYLRHLYKCNEILASRLTTYHNLAHYAQLMADIRDAIERDDYASFMQTRLAQYGRKNDMKIEEVA

SEQ ID NO: 53553 - protein, 373 aa, Carboxydocella sporoproducens
  misc_feature (1)..(373): tr|A0A1T4PHW4|A0A1T4PHW4_9FIRM Queuine tRNA-ribosyltran sferase OS=Carboxydocella sporoproducens DSM 16521 OX=1 121270 GN=tgt PE=3 SV=1
MPVRYELIKECKETKARVGRLHTPHGVIDTPVFMPVGTQATVKTMTPEELKEIGAQIILANTYHLYLRPGHELIKEAGGLHRFMHWDRPILTDSGGFQVFSLGPLRNITEEGVTFKSHLDGSSHFLSPEKVMEIEMALGSTIAMAFDECAPYPSSYEYARAAMERTTRWAKRCKAAHHKEDQALFGIVQGVTYRDLREQSAAEIVEIDFPGYAIGGLSVGEPKPLMYEVLDYTVPLLPKDKPRYLMGVGSPDCLLEGVALGVDMFDCVLPTRIARNGTCLTSRGKVVIRNAAYARDFSPLDPECDCYTCRNYSRAYLRHLFKAEEVLALRLATIHNLYFLLRLMEGIRQAILEDRFVEFKRQFMAKYEGDQEE

SEQ ID NO: 53554 - protein, 373 aa, Carboxydocella thermautotrophica; identical to SEQ ID NO: 53553
  misc_feature (1)..(373): tr|A0A2R4N312|A0A2R4N312_9FIRM Queuine tRNA-ribosyltran sferase OS=Carboxydocella thermautotrophica OX=178899 G N=tgt PE=3 SV=1

SEQ ID NO: 53555 - protein, 371 aa, Carboxydothermus hydrogenoformans
  misc_feature (1)..(371): tr|Q3ABY7|Q3ABY7_CARHZ Queuine tRNA-ribosyltransferase OS=Carboxydothermus hydrogenoformans (strain ATCC BAA-1 61 / DSM 6008 / Z-2901) OX=246194 GN=tgt PE=3 SV=1
MFSFKLLKKDPNTRARLGLLKTFHNVVETPVFMPVGTLATVKTMSPEELKGIGAQIILSNTYHLYLRPGEELIAKAGGLHKFMNWDRAILTDSGGFQVFSLGPLRTISEEGVTFKSHIDGSTHFMSPEKAVKIQEALGSDIAMVFDECAPYPSEYSYAKEAMKRTYRWAKRCKEVHRREDQVLFGIVQGSIYPDLRVESAKYLTELDFPGYAVGGLSVGEPKPLMYEMLEVLEPHLPQDKPRYLMGVGSPDALIEGVIRGIDMFDCVLPTRIARNGTVFTRYGKLVVRNAAYKEDFRPIEEDCQCYTCRNYSRAYIRHLLHNDEVLGIRLTTIHNLHFLINLMKEIRKAIKEERLLVFAREFLQNYEQGKE

SEQ ID NO: 53556 - protein, 371 aa, Carboxydothermus islandicus
  misc_feature (1)..(371): tr|A0A1L8D1I8|A0A1L8D1I8_9THEO Queuine tRNA-ribosyltran sferase OS=Carboxydothermus islandicus OX=661089 GN=tgt PE=3 SV=1
MFSFKLLKKDPSTKARLGLLKTFHNVVETPVFMPVGTLATVKTMSPEELKGIGAQIILANTYHLYLRPGEELIAKAGGLHKFMNWDRAILTDSGGFQVFSLGPLRTISEEGVTFKSHIDGSTHFMSPEKAVKIQEALGSDIAMVFDECAPYPSEYSYAKEAMKRTHRWAKRCKEAHRREDQVLFGIVQGSVYPDLRVESARYLTELDFPGYAVGGLSVGEPKPLMYEMLEVLEPHLPQDKPRYLMGVGSPDALIEGVIRGIDMFDCVLPTRIARNGTVFTRYGKLVVRNAAYKDDFRPLEEDCQCYTCRNYSRAYIRHLLHNDEVLGIRLTTIHNLHFLINLMKEIRKAIKEERLLAFAREFLQNYEQGKE

SEQ ID NO: 53557 - protein, 371 aa, Carboxydothermus pertinax
  misc_feature (1)..(371): tr|A0A1L8CXY8|A0A1L8CXY8_9THEO Queuine tRNA-ribosyltran sferase OS=Carboxydothermus pertinax OX=870242 GN=tgt P E=3 SV=1
MFSFKVLKKDPKTRARLGLLKTFHNAVETPVFMPVGTLATVKTMSPEELKELGAEIILSNTYHLYLRPGEQLIAKAGGLHKFMNWDRAILTDSGGFQVFSLGPLRTITEEGVTFKSHIDGSTHFMSPEKAVKIQEALGSDIAMVFDECAPYPADYSYAREAMLRTHRWAKRCKEVHQREDQVQFGIIQGSTYADLRVESAKYLTELDFPGYAIGGLSVGEPKPLMYEMLEVLEPHLPADKPRYLMGVGSPDALIEGVIRGIDMFDCVLPTRIARNGTVFTKYGKLVVRNAIFKEDFRPIEEDCQCYTCRNYSRAYIRHLLHNDEVLGIRLTTIHNLHFLINLMREIKKAIREDRLLSFAWEFLQNYEQGKE

SEQ ID NO: 53558 - protein, 376 aa, Carboxylicivirga sp.
  misc_feature (1)..(376): tr|A0A553GPV6|A0A553GPV6_9BACT Queuine tRNA-ribosyltran sferase OS=Carboxylicivirga sp. M1479 OX=2594476 GN=tgt PE=3 SV=1
MKFELQHTDAKSSARAGKVTTDHGTIETPIFMPVGTVGSVKGVHFRDLEDDVKAQIILGNTYHLYLRPGLDILKAAGGLHKFNGWDKPVLTDSGGYQVFSLSDNRKLTEEGAVFRSHLDGSKHLFTPENVVDTQRVIGADIIMALDECPPGDAEYAYAKKSMELTHRWLKRGVDHFDQTEPLYGHSQTFFPIVQGAGYRDLRTQSAEFIASQNREGNAIGGLAVGEPTEVMYEMVELVNGILPKDKPRYLMGVGTPANLLENIALGVDMFDCVMPTRNGRNGMLFTSEGILNMRNEKWKNDFSPVDPNGTSFVDQRYSKAYLRHLYVSKEMLAAQIGSQHNLTFYLWLVGEARKHILAGDFAQWKEVMVKKLTTRL

SEQ ID NO: 53559 - protein, 374 aa, Cardinium endosymbiont
  misc_feature (1)..(374): tr|K0P028|K0P028_9BACT Queuine tRNA-ribosyltransferase OS=Cardinium endosymbiont cEper1 of Encarsia pergandiel la OX=1231626 GN=tgt PE=3 SV=1
MQFSVIHEDQHSKARAGLITTSKGIIRTPIFMPVGTIGSVKSIPQGVLRDQINADIILGNTYHLYLRPGTKVLDAAGGLHTFMGWHRPILTDSGGYQVYSLADRRQLTEAGVTFRSHIDGSRHLFTPELVVDIQRSIGSDIMMVLDECTPYPCSYHYAKASMERTHRWLKRGINYFDATLTNQHAHQALFPIVQGSIYKDLRIQSAETIAAADRPGNAIGGVCHPDGQLYEITELVCSILPRSKPRYLMGVGTPLDLLECIALGVDMFDCIMPTRNGRNGTLFTTQGILNIRNKKWAYDFSPIDGALGGPVSGYYSKAYLRHLITSKELLGAQLASVHNLTFYLWLVRQAREQIQQNSFVAWKNHIVKTIMAKI

SEQ ID NO: 53560 - protein, 374 aa, Cardinium endosymbiont
  misc_feature (1)..(374): tr|A0A345PNA4|A0A345PNA4_9BACT Queuine tRNA-ribosyltran sferase OS=Cardinium endosymbiont of Sogatella furcifer a OX=650378 GN=tgt PE=3 SV=1
MQFLVEHVDRHSKARAGLITTSRGTIRTPIFMPVGTIGSVKSVTQQVLQDQLDADIILGNTYHLYLRPGTKVLDAAGGLHPFMGWHRPILTDSGGYQVYSLAGNRKLTEAGVTFRSHIDGSTHLFTPEGVIDIQRSIGSDIMMVLDECTPYPCSYHYAKASMERTHRWLKRGIDYFDATLTESYAHQTLFPIVQGSIYKDLRIQSAETIAAADRPGNAIGGVCHPTGQLYELTELVCSILPSTKPRYLMGVGTPMDLLECIALGVDMFDCVMPTRNGRNGTLFTTQGILNIKNKKWAYDFSPIDATLGGPVSGYYSKAYLRHLITAKERLGAQLASVHNLTFYLWLVRQARAQIQQGTFVAWKNRIRQTIMEKI

SEQ ID NO: 53561 - protein, 368 aa, Cardiobacterium hominis
  misc_feature (1)..(368): tr|C8N9K5|C8N9K5_CARH6 Queuine tRNA-ribosyltransferase OS=Cardiobacterium hominis (strain ATCC 15826 / DSM 833 9 / NCTC 10426 / 6573) OX=638300 GN=tgt PE=3 SV=1
MQYQLFTQDGSARRGRITFPNGQTVETPVFMPVGTLGTVKGLAPEELHAMGAEIILGNTFHLMLRPGEDIVAAHGGLHQFMHWDKPILTDSGGFQVFSLAKIRKLTEEGARFRSPVDGSEVFLSPERSMQVQRALNSNIVMQLDECTPYPATHEEAEKSMRLSLRWAARSKAAHAGNPNHLFGIVQGGIYPDLRRESAEGLVALDLPGYAVGGLAVGEPLEMRNATLEHTLPHLPVTKPRYLMGVGKPEDIVEGVRRGVDMFDCVMPTRNARNAYLFTRFGTLKLRNTIHKRDLRPIEEGCDCYTCRHYSRAYLHHLDKCNEMLGARLNTIHNLRYYIRLMHDMRAAIEQGRFASFADDFYAMRRQGA

SEQ ID NO: 53562 - protein, 368 aa, Cardiobacterium hominis; identical to SEQ ID NO: 53561
  misc_feature (1)..(368): tr|A0A1C3H2K1|A0A1C3H2K1_9GAMM Queuine tRNA-ribosyltran sferase OS=Cardiobacterium hominis OX=2718 GN=tgt PE=3 SV=1

SEQ ID NO: 53563 - protein, 371 aa, Cardiobacterium valvarum
  misc_feature (1)..(371): tr|A0A381ED00|A0A381ED00_9GAMM Queuine tRNA-ribosyltran sferase OS=Cardiobacterium valvarum OX=194702 GN=tgt PE =3 SV=1
MHYTLITQDGDARRGYITFPGGQVVQTPVFMPVGTLGTVKGLAPEELHAIGAEIILGNTFHLMLRPGADIVAAHGGLHQFMHWDKPILTDSGGFQVFSLAKIRKLTEEGARFRSPVDGSEVFLSPERSMQVQRALNSNIVMQLDECTPYPATHEEAAKSMRLSLRWAARSKAAHEGNPNHLFGIVQGGIYPDLRRESAEGLVALDLPGYAVGGLAVGEPLEARNDTLDHTLPHLPAHKPRYLMGVGKPEDIVEGVRRGIDMFDCVMPTRNARNAYLFTRFGTLKLRNSVHKRDLRPIEEGCDCYTCRHYSRAYLHHLDKCNEMLGARLNTIHNLRYYIRLMHDMRAAIEAGRFASFAADFYAMRRAGASTL

SEQ ID NO: 53564 - protein, 381 aa, Carnobacterium alterfunditum
  misc_feature (1)..(381): tr|A0A1N6G9J1|A0A1N6G9J1_9LACT Queuine tRNA-ribosyltran sferase OS=Carnobacterium alterfunditum OX=28230 GN=tgt PE=3 SV=1
MTEPAIKYRLIKKEKHTGARLGEIITPHGTFQTPMFMPVGTLATVKSIAPEELESMGADIILSNTYHLWLRPGEDIVEEAGGLHKFMNWDKGILTDSGGFQVFSLSDMRKIEEEGVHFRNHLNGSKMFLSPEKAINIQNKLGPDIMMSFDECPPFDESFDYVKKSVERTSRWAERGLKAHGKPNSQGLFGIIQGAGFKELRQQSARDLVSMDFPGYSIGGLSVGEPKQSMNRVLEYTTPFIPEDKPRYLMGVGTADSLIDGVIRGVDMFDCVLPTRIARNGTCMTSKGRVVIKNAQYERDFGPLDAKCDCYTCRNYTRAYIRHLIKANETFGLRLTSYHNLYFLLNVMKEVRQAIMDDNLLEYRESFFEEYGFNKPNARNF

SEQ ID NO: 53565 - protein, 381 aa, Carnobacterium divergens
  misc_feature (1)..(381): tr|A0A2R8A231|A0A2R8A231_CARDV Queuine tRNA-ribosyltran sferase OS=Carnobacterium divergens OX=2748 GN=tgt PE=3 SV=1
MTEPAIKYRLIKKEKHTGARLGEIITPHGTFPTPMFMPVGTLATVKSIAPEELDAMGAGIILSNTYHLWLRPGEDIVQEAGGLHKFMNWDKGILTDSGGFQVFSLSDMRRIEEEGVHFRNHLNGSKMFLSPEKAIDIQNKLGPDIMMSFDECPPFEESFEYVKKSIERTSRWAERGLKAHANPSTQGLFGIIQGAGYKELRQQSARDLISMDFPGYSIGGLSVGEPKHLMNEVLEYTTPLIPEDKPRYLMGVGSADSLIDGVIRGVDMFDCVLPTRIARNGTCMTSAGRLVVKNAQYERDFRPIDEKCDCHTCKNYSRAYIRHLIKADETFGLRLTSYHNLYFLQNLMKNVRQAIMDDNLLEFREAFFEEYGFNKPNAKNF

SEQ ID NO: 53566 - protein, 387 aa, Carnobacterium divergens
  misc_feature (1)..(387): tr|A0A0R2HQ80|A0A0R2HQ80_CARDV Queuine tRNA-ribosyltran sferase OS=Carnobacterium divergens DSM 20623 OX=144933 6 GN=tgt PE=3 SV=1
MKVGEKMTEPAIKYRLIKKEKHTGARLGEIITPHGTFPTPMFMPVGTLATVKSIAPEELDAMGAGIILSNTYHLWLRPGEDIVQEAGGLHKFMNWDKGILTDSGGFQVFSLSDMRRIEEEGVHFRNHLNGSKMFLSPEKAIDIQNKLGPDIMMSFDECPPFEESFEYVKKSIERTSRWAERGLKAHANPSTQGLFGIIQGAGYKELRQQSARDLISMDFPGYSIGGLSVGEPKHLMNEVLEYTTPLIPEDKPRYLMGVGSADSLIDGVIRGVDMFDCVLPTRIARNGTCMTSAGRLVVKNAQYERDFRPIDEKCDCHTCKNYSRAYIRHLIKADETFGLRLTSYHNLYFLQNLMKNVRQAIMDDNLLEFREAFFEEYGFNKPNAKNF

SEQ ID NO: 53567 - protein, 381 aa, Carnobacterium iners
  misc_feature (1)..(381): tr|A0A1X7NQL2|A0A1X7NQL2_9LACT Queuine tRNA-ribosyltran sferase OS=Carnobacterium iners OX=1073423 GN=tgt PE=3 SV=1
MPEPAIKYRLIKKEKHTGARLGEIITPHGTFETPMFMPVGTLATVKSIAPEELESMGANIILSNTYHLWLRPGEDIVEEAGGLHKFMNWDKGILTDSGGFQVFSLSDLRQIEEKGVHFRNHLNGSKMFLSPEKAIQIQNKLGPDIMMSFDECPPFDESFDYVKKSVERTTRWAERGLKAHTKPNSQGLFGIIQGAGYKELREQSAKELVAMDFPGYSIGGLSVGEPKHSMNEVLEYTTPLIPENKPRYLMGVGTADSLIDGVIRGVDMFDCVLPTRIARNGTVMTSQGRVVIKNAKYERDFGPLDPKCDCYTCKNYSRAYIRHLIKADETFGLRLTSYHNLYFLLNVMKDVRQAIREDNLLEYRESFFEEYGYNKPNAKNF

SEQ ID NO: 53568 - protein, 381 aa, Carnobacterium inhibens
  misc_feature (1)..(381): tr|U5S8A1|U5S8A1_9LACT Queuine tRNA-ribosyltransferase OS=Carnobacterium inhibens subsp. gilichinskyi OX=12668 45 GN=tgt PE=3 SV=1
MPEPAIKYRLIKKEKHTGARLGEIITPHGTFPTPMFMPVGTLASVKSLAPEELESMGASIILSNTYHLWLRPGEDIVEEAGGLHKFMNWDKGILTDSGGFQVFSLSDLRRIEEEGVHFRNHLNGSKMFLSPEKAINIQNKLGPDIMMSFDECPPFDESFDYVKKSVERTSRWAERGLKAHAKPDSQGLFGIIQGAGFKELRQQSARDLVSMDFPGYSIGGLSVGEPKESMNKVLEYTTPFIPEDKPRYLMGVGTADSLIDGVMRGVDMFDCVLPTRIARNGTCMTSKGRVVIKNAQYERDFGPLDDKCDCYTCRNYTRAYIRHLIKADETFGLRLTSYHNLYFLLNVMKDVRQAIMDDNLLEYRESFFEEYGYNKPNARNF

SEQ ID NO: 53569 - protein, 381 aa, Carnobacterium maltaromaticum
  misc_feature (1)..(381): tr|A0A0R2IBC9|A0A0R2IBC9_CARML Queuine tRNA-ribosyltran sferase OS=Carnobacterium maltaromaticum DSM 20342 OX=1 449341 GN=tgt PE=3 SV=1
MTEPAVKYRLIKKEKHTGARLGEIITPHGTFQTPMFMPVGTLATVKSIAPEELDAMGAGIILSNTYHLWLRPGEDIVEEAGGLHKFMNWDKGILTDSGGFQVFSLSDMRRIEEEGVHFRNHLNGSKMFLSPEKAINIQNKLGPDIMMSFDECPPFDESFDYVKKSVERTSRWAERGLKAHANPDYQGLFGIIQGAGYRELREQSARDLVSMDFPGYSIGGLSVGEPKHLMNEVLEYTTPLIPEHKPRYLMGVGSADSLIDGVIRGVDMFDCVLPTRIARNGTCMTSAGRLVVKNAQYERDFRPLDEKCDCHTCKNYTRAYIRHLIKADETFGLRLTSYHNLYFLQNLMKNVRQAIMDDNLLEFREAFFEEYGFNKPNAKNF

SEQ ID NO: 53570 - protein, 381 aa, Carnobacterium maltaromaticum; identical to SEQ ID NO: 53569
  misc_feature (1)..(381): tr|A0A494QSC2|A0A494QSC2_CARML Queuine tRNA-ribosyltran sferase OS=Carnobacterium maltaromaticum OX=2751 GN=tgt PE=3 SV=1

SEQ ID NO: 53571 - protein, 381 aa, Carnobacterium sp.
  misc_feature (1)..(381): tr|A8U9M4|A8U9M4_9LACT Queuine tRNA-ribosyltransferase OS=Carnobacterium sp. AT7 OX=333990 GN=tgt PE=3 SV=1
MAEPAIKYRLIKKEKHTGARLGEIITPHGTFQTPMFMPVGTLATVKSIAPEELESMGASIILSNTYHLWLRPGEDIVEEAGGLHKFMNWDKGILTDSGGFQVFSLSDLRRIEEEGVHFRNHLNGSKMFLSPEKAINIQNKLGPDIMMSFDECPPFDESFDYVKKSVERTSRWAERGLNAHAKPNSQGLFGIIQGAGFKELRQQSARDLISMDFPGYSIGGLSVGEPKESMNRVLEYTTPLIPDDKPRYLMGVGTADSLIDGVMRGVDMFDCVLPTRIARNGTCMTSKGRVVIKNAQYERDFGPLDDKCDCYTCRNYTRAYIRHLIKADETFGLRLTSYHNLYFLLNVMKNVRQAIMDDNLLEYRESFFEEYGYNKPNARNF

SEQ ID NO: 53572 - protein, 380 aa, Carnobacterium sp.
  misc_feature (1)..(380): tr|A0A5C1LLT3|A0A5C1LLT3_9LACT Queuine tRNA-ribosyltran sferase OS=Carnobacterium sp. PL26RED25 OX=2592352 GN=t gt PE=3 SV=1
MTSSALKYTLHKKEKHTGARLGQVETPHGTIETPVFMPVGTQASVKAVSPEELTDMNAQIILSNTYHLWLRPGDDLVKEAGGLHQFMNWDKPILTDSGGFQVFSLADSRKIEEEGVTFKSHLDGKKLFLSPEKAIHIENNLGADIIMSFDECPDFNHDHNYVEKSIHRTTRWAERGLNAHQRPDDQALFGILQGAGYKDLRLQHAKDMIGLDFPGYSIGGLSVGESKEDMYKVLDYITPVMPEDKPRYLMGVGSPDALIEGVIRGIDMFDCVLPTRIARNGTTMTSQGRVVIKNAQYARDFTPLDPNCDCYTCRNYTRAYIRHLLKANETFALRLTSIHNLHFLINLMEQIKDAIREDRLLDFRDEFFLQYYGKVQKTAF

SEQ ID NO: 53573 - protein, 381 aa, Carnobacterium viridans
  misc_feature (1)..(381): tr|A0A1H1BC15|A0A1H1BC15_9LACT Queuine tRNA-ribosyltran sferase OS=Carnobacterium viridans OX=174587 GN=tgt PE= 3 SV=1
MSEPAIKYRLIKKEKHTGARLGEIITPHGTFPTPMFMPVGTLATVKSIAPEELESMGANIILSNTYHLWLRPGEDIVEEAGGLHKFMNWDKGILTDSGGFQVFSLSDLRRIEEEGVHFRNHLNGSKMFLSPEKAINIQNKLGPDIMMSFDECPPFDESFDYVKKSVERTSRWAERGLKAHAKPDSQGLFGIIQGAGFKELRQQSARDLVSMDFPGYSIGGLSVGEPKESMNKVLEYTTPLIPDDKPRYLMGVGTADSLIDGVMRGVDMFDCVLPTRIARNGTCMTSKGRVVIKNAQYERDFGPLDDKCDCYTCRNYTRAYIRHLIKADETFGLRLTSYHNLYFLLNVMKDVRQAIMDDNLLEYRESFFEEYGYNKPNARNF

SEQ ID NO: 53574 - protein, 381 aa, Caryophanon latum
  misc_feature (1)..(381): tr|A0A1C0Z5D1|A0A1C0Z5D1_9BACL Queuine tRNA-ribosyltran sferase OS=Caryophanon latum OX=33977 GN=tgt PE=3 SV=1
MTQLPIRYELIKTCAQTGARLGIVHTPHGSFETPTFMPVGTQATVKAMSPEELKEMNAGIILSNTYHLWLRPGNDIVKEAGGLHKFMNWDRPILTDSGGFQVFSLSKFRKIEEEGVHFRNHLNGDKLFLSPEKAMEIQNDLGSDIMMAFDECPPFPATYEYMEASVDRTTRWAKRCKEAHKRPDEQGLFGIIQGGEFEELRRKSAEALVELDFPGYAIGGLSVGEPKDIMNKVLDFTAPLMPADKPRYLMGVGSPDSLIDGAIRGIDMFDCVLPTRIARNGTLMTSEGRMVIKNAKFARDFRPIDENCDCYTCKNYSRAYVRHLMRTEETFGLRLTSFHNLRFLINLMEQVRQAIREDRLGDFKEEFFEKYGYNVPNPKNF

SEQ ID NO: 53575 - protein, 381 aa, Caryophanon tenue
  misc_feature (1)..(381): tr|A0A1C0YMS0|A0A1C0YMS0_9BACL Queuine tRNA-ribosyltran sferase OS=Caryophanon tenue OX=33978 GN=tgt PE=3 SV=1
MTQPPIRYELIKTCAQTGARLGIVHTPHGSFETPTFMPVGTQATVKAMSPEELKEMNAGIILSNTYHLWLRPGNDIVKEAGGLHKFMNWDRPILTDSGGFQVFSLSKFRKIEEEGVHFRNHLNGDKLFLSPEKAMEIQNDLGSDIMMAFDECPPFPATHEYMLKSVDRTTRWAKRCKEAHQRPDEQGLFGIIQGGEYEDLRRRSAEALIELDFPGYAIGGLSVGEPKDIMNKVLDFTAPMMPADKPRYLMGVGSPDSLIDGAMRGIDMFDCVLPTRIARNGTLMTSEGRMVIKNAKFARDFRPIDENCDCYTCKNYTRAYVRHLLRTEETFGLRLTSYHNLRFLINLMEQVREAIREDRLGDFKEEFFEKYGYNVPNPKNF

SEQ ID NO: 53576 - protein, 378 aa, Castellaniella defragrans
  misc_feature (1)..(378): tr|W8X5E0|W8X5E0_CASDE Queuine tRNA-ribosyltransferase OS=Castellaniella defragrans 65Phen OX=1437824 GN=tgt P E=3 SV=1
MTGLRFDLLHTDGAARRGRLTLNHGVVQTPIFMPVGTYGSVKAMLPHELEEIGAQIVLGNTFHLWLRPGTDILDRHGGLHGFMQWDRPILTDSGGFQVFSLDGMRKITEEGVRFASPIDGARLFLTPEESMRIQRSLNSDIAMVLDECTPYRIGERPATHEEAAASMRMSLRWARRSRQAFLELGNPNALFGIIQGGMYEDLRDESLAGLTEIGFEGYAIGGLSVGEPKEDMMRVLAHVTPRMPAQAPRYLMGVGTPEDLVEGVSRGVDMFDCVMPTRNARNGWLFTRHGDLKIRNARYRDDTRPLDPACGCHTCRHFSRAYLHHLQRAGEITGARLNTLHNLHFYLRLMAEMRTAIEEDRFESWRAAFHRDRARGIE

SEQ ID NO: 53577 - protein, 378 aa, Castellaniella sp.
  misc_feature (1)..(378): tr|A0A522TYT4|A0A522TYT4_9BURK Queuine tRNA-ribosyltran sferase OS=Castellaniella sp. OX=1955812 GN=tgt PE=3 SV =1
MTGLHFELLHTDGAARRGCLTLNHGTIQTPIFMPVGTYGSVKAMLPDELESIGAQIVLGNTFHLWLRPGTEVLDAHGGLHGFMQWPRPILTDSGGFQVFSLNGMRKITEEGVKFASPIDGSRLFLSPEESMRIQHSLNSDIAMVLDECTPYQISGRPATHEEAATSMRMSLRWARRSRTAFQERQNPNALFGIIQGGMYEDLRDESLAGLTDIGFEGYAIGGLSVGEPKEDMMRMLAHVTPRMPAQAPRYLMGVGTPEDLVEGVRTGVDMFDCVMPTRNARNGWLFTRHGDIKIRNARYRNDTRPLDPSCACHTCRHFSRAYLHHLQRVGEITGARLNTLHNLHFYLNLMTEMRTAIENDRFETWRAQFQVDRASGIS

SEQ ID NO: 53578 - protein, 373 aa, Catabacter hongkongensis
  misc_feature (1)..(373): tr|A0A0M2NK42|A0A0M2NK42_9FIRM Queuine tRNA-ribosyltran sferase OS=Catabacter hongkongensis OX=270498 GN=tgt PE =3 SV=1
MGYNRNFDFKVEAVDGFSRARTGVLKTPHGEIKTPVFMPVGTQATVKAMTNDQVLECGAQIILGNTYHLYMRPGHELIREAGGLHQFMNWKKPILTDSGGFQVFSLGDLRKLTEEGAAFQSHLDGSRHMFTPEKVVAIQEALGSDIMMVLDECTPYPADFAYTKHSMERTHRWAKRCRDAQQNDKQALFGIVQGGMYPELRKISAEEIARLDFIGNAIGGLSVGEPKPMMYEMLDAVTEILPEDKPRYLMGVGSADCLVEGVARGVDMFDCVLQTRIARNGTALVRNGKLVIRNAEYAKDFRPIDESCDCYACRNHTRAYIRHLVKTNEILGAILLSIHNTRFTIRLMEEIRGHIQTGTFEEFRREFMADFQI

SEQ ID NO: 53579 - protein, 376 aa, Catalinimonas alkaloidigena
  misc_feature (1)..(376): tr|A0A1G9UA16|A0A1G9UA16_9BACT Queuine tRNA-ribosyltran sferase OS=Catalinimonas alkaloidigena OX=1075417 GN=tg t PE=3 SV=1
MKFTLVGTDLHSKARLGQVETAHGTIETPIFMPVGTVGTVKAVQQRELQTDIDAQIILGNTYHLFLRPGLPILEKAGGLHRFMNWNGPILTDSGGYQVYSLAGTRKIKEEGVTFRSHIDGSKHTFTPEGVMDIQRSIGADIIMAFDECPPYPCDFRYARESLDMTHRWLKRCCDRFDTTSGRYGYEQTLFPIVQGGVYPELRRHSAETIAALGREGNAIGGLSVGEPTEQMYEMTELVCDILPTDKPRYLMGVGTPANILEAIALGVDMFDCVMPTRNARNGMLFTTQGIMNMRNEKWKNDFTPLDEGLGGHVSTTYSRAYVRHLFASKEMLGPQIASIHNLTFYLWLVREARRHIQEGTFLAWKNQMVEQLMRRL

SEQ ID NO: 53580 - protein, 381 aa, Catellicoccus marimammalium
  misc_feature (1)..(381): tr|K8ZKG4|K8ZKG4_9ENTE Queuine tRNA-ribosyltransferase OS=Catellicoccus marimammalium M35/04/3 OX=1234409 GN=t gt PE=3 SV=1
MTEHPIRYRLIKKEKYTGARLGELITPHGTFPTPMFMPVGTLATVKTMSPEELKEMGAGVILSNTYHLWLRPGDEIVKEAGGLHSFMNWDQPILTDSGGFQVWSLSDMRQIEEEGVHFRNHLNGEKLFLSPEKAIQIQNNLGSDIMMSFDECPPFYESYDYVKKSIERTSRWAERGLKANQNPDRQGLFGIVQGAGFEDLRRQSAHDLVNMDFAGYSIGGLSVGESKQEMNEVLEYTTPLLPENKPRYLMGVGTADSLIDGVIRGVDMFDCVLPTRIARNGTCMTHNGRLVVKNAKYARDFRPIDEHCNCHVCRNYSRAYIRHLIKCNESFGMRLTSYHNLYFLLDVMRDIRQAIMDDNLLEFREAFFEQYGFNAENPKNF

SEQ ID NO: 53581 - protein, 392 aa, Catenibacterium mitsuokai
  misc_feature (1)..(392): tr|E2NVU7|E2NVU7_CATMR Queuine tRNA-ribosyltransferase OS=Catenibacterium mitsuokai (strain DSM 15897 / JCM 10 609 / CIP 106738 / RCA14-39) OX=451640 GN=tgt PE=3 SV=1
MAIFSYNRQGYRGDIMKDFWYECKHVCKQTGARYGILHTPHGDVETPMFMPVGTLATVKGISPEQLKEMGSQVVLANTYHLWLRPGSDIVRDAGGLHQFMNYDGPILTDSGGFQVFSLGKTRKIEEEGVTFKSIVDGSKLFLSPEKSIAIQEDLGADIIMSFDECAPYPCTHDYMKNSVERTLRWAKRGQEAHKREDQALFGIVQGGEFADLRELSAKTLVDMDFPGYSIGGTSVGEPKPIMYKMIEDSVKWLPEDKPRYLMGVGNPIDLIEGAMRGIDMFDCVLPTRVARHGALMTHHGRMNINNEKYKRDFTPIDDKCHCYACRNYTRAYLRHLHKCDEIFGKSLLSIHNVAFLLDLAADIRKAIQEDRLADFKEEFLEQYGRDVYERAF

SEQ ID NO: 53582 - protein, 377 aa, Catenibacterium sp.
  misc_feature (1)..(377): tr|A0A373I5D8|A0A373I5D8_9FIRM Queuine tRNA-ribosyltran sferase OS=Catenibacterium sp. AM22-15 OX=2292991 GN=tg t PE=3 SV=1
MKDFWYECKHVCKQTGARYGILHTPHGDVETPMFMPVGTLATVKGISPEQLKEMGSQVVLANTYHLWLRPGSDIVRDAGGLHQFMNYDGPILTDSGGFQVFSLGKTRKIEEEGVTFKSIVDGSKLFLSPEKSIAIQEDLGADIIMSFDECAPYPCTHDYMKNSVERTLRWAKRGQEAHKREDQALFGIVQGGEFADLRELSAKTLVDMDFPGYSIGGTSVGEPKPIMYKMIEDSVKWLPENKPRYLMGVGNPIDLIEGAIRGIDMFDCVLPTRVARHGALMTHHGRMNINNEKYKRDFTPIDDKCHCYACRNYTRAYLRHLHKCDEIFGKSLLSIHNVAFLLDLAADIRKAIQEDRLADFKEEFLEQYGRDVYERAF

SEQ ID NO: 53583 - protein, 377 aa, Catenibacterium sp.
  misc_feature (1)..(377): tr|R7GNT8|R7GNT8_9FIRM Queuine tRNA-ribosyltransferase OS=Catenibacterium sp. CAG:290 OX=1262767 GN=tgt PE=3 S V=1
MKDFWYECKHVCKQTGARYGILHTPHGDVETPMFMPVGTLATVKGISPEQLKEMGSQVVLANTYHLWLRPGSDIVRDAGGLHQFMNYDGPILTDSGGFQVFSLGKTRKIEEEGVTFKSIVDGSKLFLSPEKSIAIQEDLGADIIMSFDECAPYPCTHDYMKNSVERTLRWAKRGQEAHKREDQALFGIVQGGEFADLRELSAKTLVDMDFPGYSIGGTSVGEPKPIMYKMIEDSVKWLPEDKPRYLMGVGNPIDLIEGAMRGIDMFDCVLPTRVARHGALMTHHGRMNINNEKYKRDFTPIDDKCHCYACRNYTRAYLRHLHKCDEIFGKSLLSIHNVAFLLDLAADIRKAIQEDRLADFKEEFLEQYGRDVYERAF

SEQ ID NO: 53584 - protein, 374 aa, Catenovulum agarivorans
  misc_feature (1)..(374): tr|W7QDX1|W7QDX1_9ALTE Queuine tRNA-ribosyltransferase OS=Catenovulum agarivorans DS-2 OX=1328313 GN=tgt PE=3 SV=1
MKFEKMAEDGQARRGRLHFERGVVETPAFMPVGTYGTVKGMSPDELEAIGAHICLGNTFHLMLRPGTEIIRMHGDLHDFMNWQKPILTDSGGFQVFSLGELRKITEQGVIFRSPINGERIELTPEKAMQVQRELGSDIVMIFDECTPYPATEEQARTSMELSLRWAKRSKDAHEGNPSALFGIVQGGMYPHLREESLNGLEEIGFDGYAIGGLSVGEPKEDMINILNNLTDKMPTNKPRYLMGVGKPEDIVEAVRRGIDMFDCVMPTRNARNGHIFVSDGVVKLRNAKHKTDTGPLDENCDCYTCKNYSRAYLHHLDKCNEILGARLNTIHNLRYYQRLMEQLRDAIAAGELEQFVEEFYAARGLPVPPLDNQD

SEQ ID NO: 53585 - protein, 372 aa, Catenovulum maritimum
  misc_feature (1)..(372): tr|A0A0J8GW85|A0A0J8GW85_9ALTE Queuine tRNA-ribosyltran sferase OS=Catenovulum maritimum OX=1513271 GN=tgt PE=3 SV=1
MKFEKLATDGKARRGRITFARGVVETPAFMPVGTYGTVKGLSPDEVKDTGAHICLGNTFHLMLRPGTEIIKMHGDLHDFMNWSGPILTDSGGFQVFSLGDLRKISEEGVVFRSPINGERIELTPEKAMHVQRDLGSDIVMIFDECTPYPATEEEARSSMELSLRWAQRSKDAHDGNPSALFGIVQGGMYPHLRQESLNGLEQIGFDGYAIGGLSVGEPKEDMINILDEIAYKLPEDKPRYLMGVGKPEDLVEAVRRGIDMFDCVMPTRNARNAHIFVSDGVLKLRNAKHKTDTDPLDKNCDCYTCKNYSRAYLHHLDKCNEILGSRLNTIHNLHFYQKVMQGLRDAIEQGRLEEHVEEFYAARGLPVPPLKD

SEQ ID NO: 53586 - protein, 381 aa, Catenovulum sp.
  misc_feature (1)..(381): tr|A0A2S0VMT9|A0A2S0VMT9_9ALTE Queuine tRNA-ribosyltran sferase OS=Catenovulum sp. CCB-QB4 OX=2172099 GN=tgt PE =3 SV=1
MKFEKITTEGKARRGRLIFERGVVETPAFMPVGTYGTVKGMSPDEIKDIGAHIVLGNTFHLMLRPGTEIIRQHGDLHDFMNWQGPILTDSGGFQVFSLGDLRKINEDGVIFRSPINGERIELTPEKAMQVQRELGSDIVMIFDECTPYPATEKEARDSMELSLRWAQRSKDAHDGNPNALFGIVQGGMYPHLRDESLEGLVNIEFDGYAIGGLSVGEPKEDMINILDHLAWKMPEDKPRYLMGVGKPEDLVEAVRRGIDMFDCVMPTRNARNGHIFVSDGVLKLRNARHKTDTGPLDENCDCYTCKNYSRAYLHHLDKCNEILGARLNTIHNLRFYQKLMSDMRDALEAGAFAKFVEDFYAARDLPVPPLADIGFNKAESN

SEQ ID NO: 53587 - protein, 376 aa, Catonella morbi
  misc_feature (1)..(376): tr|V2Y945|V2Y945_9FIRM Queuine tRNA-ribosyltransferase OS=Catonella morbi ATCC 51271 OX=592026 GN=tgt PE=3 SV= 1
MYRLLCKDGSAKRGEFTTVHGVIQTPVFMNVGTAAAIKGAVSTEDLGNLKTQVELSNTYHLHLRPGDEVIKKLGGIHKFMVWDKPVVTDSGGFQVFSLAKLRKIKEEGVKFSSHIDGRKIFMGPEESMQIQSNIASTIAMAFDECPGLPCERKYMEQSVARTERWLLRCKNELNRLNSLPDTINKHQLLFGINQGGVYSDIRIENAKRISDMDLAGYAIGGLAVGETHEEMYQTLETVVPYLPENKPTYLMGVGTPENILESVERGVDFFDCVYPSRNGRHGNAYTNHGKMNLNNAKYELDDRPLDSACDCPVCKRYSRAYIRHLLKAGEMLGMRFLVMHNLYFYNNMMEEIRSAIEKGEFQVYKKAKLDGFKAGE

SEQ ID NO: 53588 - protein, 371 aa, Caulobacter flavus
  misc_feature (1)..(371): tr|A0A2N5D388|A0A2N5D388_9CAUL Queuine tRNA-ribosyltran sferase OS=Caulobacter flavus OX=1679497 GN=tgt PE=3 SV =1
MAAFPFEIQATDGKARTGVLKTPRGDIRTPAFMPVGTAATVKALTVDQVKDTGADIILGNTYHLMLRPTAERVKRLGGLHKFMRWDKPILTDSGGFQVMSLSGISKVTEEAVTFASHIDGTKHVLSPERSMEIQADLLGSDIVMQLDECVAWPAEEKRAREGMELSARWGLRSKTAFGARDTQALFGIQQGSTFENLRRESSERLQEIGFDGYAIGGLAVGEGHEAMCEVLDYAPGLLPADRPRYLMGVGKPIDLVEAVYRGVDMFDCVLPTRSGRHGQAWTWDGAINIKNARFAEDESPLDPTSDCPASRDYSKAYLRHLFKAEEILGQVLLSWHNIAFFQALTAAMRDAIAQGRFEQFRRDFAARQKGG

SEQ ID NO: 53589 - protein, 370 aa, Caulobacter henricii
  misc_feature (1)..(370): tr|A0A0P0NYM8|A0A0P0NYM8_9CAUL Queuine tRNA-ribosyltran sferase OS=Caulobacter henricii OX=69395 GN=tgt PE=3 SV =1
MAFPFEISATDGKARTGVLKTPRGDIRTPAFMPVGTAGTVKALTVDQVKDTGADIILGNTYHLMLRPTAERVKRLGGLHRFMRWDKPILTDSGGFQVMSLSGISKVTEEAVTFASHIDGSKHVLSPERSMEIQADLLGSDIVMQLDECVAWPAEEARARQGMELSARWGARSKAAFGTRDSQVLFGIQQGSTFENLRRESSQRLQDIGFDGYAIGGLAVGEGHAAMCEVLDYAPDMLPSDKPRYLMGVGKPIDLVEAVARGVDMFDCVLPTRSGRHGQAWTWDGAINIKNARYAEDDTPLDPDSDCPASRDYSKAYLRHLFKAEEILGQVLLSWHNIAFFQALTAAMRAAIAEGRFEAFRQDFARRHNAG

SEQ ID NO: 53590 - protein, 370 aa, Caulobacter mirabilis
  misc_feature (1)..(370): tr|A0A2D2AZK7|A0A2D2AZK7_9CAUL Queuine tRNA-ribosyltran sferase OS=Caulobacter mirabilis OX=69666 GN=tgt PE=3 S V=1
MAAFPFELKATDGAARTGVLRTPRGDIRTPAFMPVGTAGTVKALTVDQVKATGADIILGNTYHLMLRPTAERVKRLGGLHRFMRWDRPILTDSGGFQVMSLSGISKVTEEAVTFASHLDGSKHKLTPERSIEIQADLLGSDIVMQLDECVAWPAEEQRAREGMELSARWGARSKAAFGERETQALFGIQQGSTFETLRRESSERLIETGFDGYAIGGLAVGEGHEGMVEVLEYAPAMLPADRPRYLMGVGKPIDLVEAVARGVDMFDCVLPTRSGRHGQAWTWDGPINLKNARFAEDESPLDETSDCPASRDYSKAYLHHLVRSDEILGQVLLSWHNIAHFQALTAAMRAAIAEGRFEAFRKAFRDRQRK

SEQ ID NO: 53591 - protein, 371 aa, Caulobacter radicis
  misc_feature (1)..(371): tr|A0A2T9JFJ9|A0A2T9JFJ9_9CAUL Queuine tRNA-ribosyltran sferase OS=Caulobacter radicis OX=2172650 GN=tgt PE=3 S V=1
MAAFPFEIKATDGKARTGVLKTPRGDIRTPAFMPVGTAGTVKALTVDQVKDTGADIILGNTYHLMLRPTAERVKRLGGLHKFMRWDKPILTDSGGFQVMSLSGISKVTEEAVTFASHIDGTKHVLSPERSMEIQADLLGSDIVMQLDECVAWPAEEKRAREGMELSARWGLRSKTAFGTRDTQALFGIQQGSTFENLRRESSERLQEIGFDGYAIGGLAVGEGHEAMCEVLDYAPGLLPADKPRYLMGVGKPIDLVEAVWRGVDMFDCVLPTRSGRHGQAWTWDGAINIKNARFAEDESPLDPTSDCPASRDYSKAYLRHLFKAEEILGQVLLSWHNIAFFQALTAAMRDAIAEGRFEQFRREFAARQKGG

SEQ ID NO: 53592 - protein, 371 aa, Caulobacter radicis
  misc_feature (1)..(371): tr|A0A2T9K527|A0A2T9K527_9CAUL Queuine tRNA-ribosyltran sferase OS=Caulobacter radicis OX=2172650 GN=tgt PE=3 S V=1
MAAFPFEIKATDGKARTGVLKTPRGDIRTPAFMPVGTAGTVKALTVDQVKDTGADIILGNTYHLMLRPTAERVKRLGGLHKFMRWDKPILTDSGGFQVMSLSGISKVTEEAVTFASHIDGTKHVLSPERSMEIQADLLGSDIVMQLDECVAWPAEEKRAREGMELSARWGLRSKTAFGTRDTQALFGIQQGSTFENLRRESSERLQEIGFDGYAIGGLAVGEGHEAMCEVLDYAPGLLPADKPRYLMGVGKPIDLVEAVYRGVDMFDCVLPTRSGRHGQAWTWDGAINIKNARFAEDESPLDPTSDCPASRDYSKAYLRHLFKAEEILGQVLLSWHNIAFFQALTAAMRAAIEEGRFEQFRRDFAARQKGG

SEQ ID NO: 53593 - protein, 371 aa, Caulobacter rhizosphaerae
  misc_feature (1)..(371): tr|A0A561MWF0|A0A561MWF0_9CAUL Queuine tRNA-ribosyltran sferase OS=Caulobacter rhizosphaerae OX=2010972 GN=tgt PE=3 SV=1
MVAFLFEIKATDGAARTGVLKTPRGDIRTPAFMPVGTAATVKALMVDQVKATGADIILGNTYHLMLRPTAERVKRLGGLHKFMRWDRPILTDSGGFQVMSLSGISKVTEEAVTFSSHIDGSKHVLSPERSMEIQADLLGSDIVMQLDECVAWPAEEARARQGMELSARWGARSKAAFGDRDTQALFGIQQGSTFRNLRQESSDRLREIGFDGYALGGLAVGEGHEAMCEVLDYAPAMLPADRPRYLMGVGKPIDLVEAVWRGVDMFDCVLPTRSGRHGQAWTWDGAINIKNARYAEDEDPLDPASDCPASRDYSKAYLRHLFKAEEILGQVLLSWHNIAFFQALTAAMRAAITEGRFEQFRRDFAARQQGG

SEQ ID NO: 53594 - protein, 371 aa, Caulobacter segnis
  misc_feature (1)..(371): tr|A0A2W5WC90|A0A2W5WC90_9CAUL Queuine tRNA-ribosyltran sferase OS=Caulobacter segnis OX=88688 GN=tgt PE=3 SV=1
MAAFPFEIKATDGKARTGVLKTPRGDIRTPAFMPVGTAATVKAMTVDQVKDTGADIILGNTYHLMLRPSAERVARLGGLHKFMRWDKPILTDSGGFQVMSLSGISKLTEEAVTFSSHVDGSKHVLTPERSIEIQADLLGSDIVMQLDECVAWPAEEARARKGMELSARWARRSKDAFGTRDTQALFGIQQGSTFENLRRESSEKLQEIGFDGYAIGGLAVGEGHEAMCEVLDYAPGLLPHDRPRYLMGVGKPIDLVEAVARGVDMFDCVLPTRSGRHGQAWTWDGPINLKNAKYAEDDTPLDPTSDCPASRDYSKAYLRHLFKAEEILGQVLLSWHNIAFFQALTAAMRAAIAEGRFEQFRRDFAARHLAQ

SEQ ID NO: 53595 - protein, 371 aa, Caulobacter segnis
  misc_feature (1)..(371): tr|D5VKP3|D5VKP3_CAUST Queuine tRNA-ribosyltransferase OS=Caulobacter segnis (strain ATCC 21756 / DSM 7131 / J CM 7823 / NBRC 15250 / LMG 17158 / TK0059) OX=509190 GN =tgt PE=3 SV=1
MAAFPFEIKATDGKARTGVLKTPRGDIRTPAFMPVGTAATVKAMTVDQVKDTGADIILGNTYHLMLRPSAERVARLGGLHKFMRWDKPILTDSGGFQVMSLSGISKLTEDAVTFSSHVDGSKHVLTPERSIEIQADLLGSDIVMQLDECVAWPAEEARARKGMELSARWAKRSKDAFGTRDSQALFGIQQGSTFENLRRESSEKLREIGFDGYAIGGLAVGEGHTAMCEVLDYAPGLLPEDRPRYLMGVGKPIDLVEAVARGVDMFDCVLPTRSGRHGQAWTWDGPINLKNAKYAEDDTPLDPTSDCPASRDYSKAYLRHLFKAEEILGQVLLSWHNIAFFQALTAAMREAIAQGRFEQFRRDFAARHLAQ

SEQ ID NO: 53596 - protein, 371 aa, Caulobacter sp.
  misc_feature (1)..(371): tr|A0A3S9VEY1|A0A3S9VEY1_9CAUL Queuine tRNA-ribosyltran sferase OS=Caulobacter sp. FWC26 OX=69665 GN=tgt PE=3 S V=1
MAAFPFEIKATDGKARTGVLRTPRGDIRTPAFMPVGTAATVKALTVDQVKDTGADIILGNTYHLMLRPSAERVKRLGGLHKFMRWDKPILTDSGGFQVMSLSGISKLTEEAVTFSSHVDGSKHVLTPERSIEIQADLLGSDIVMQLDECVAWPAEEARARKGMELSARWAKRSKDAFGTRDTQALFGIQQGSTFEPLRRESSERLREIGFDGYAIGGLAVGEGHEAMCEVLDYAPGLLPEDRPRYLMGVGKPIDLVEAVARGVDMFDCVLPTRSGRHGQAWTWDGPINLKNAKYAEDDTPLDPDSDCPASRDYSKAYLRHLFKAEEILGQVLLSWHNIAFFQALTAAMRVAIAEGRFEQFRRDFAVRHLGR

SEQ ID NO: 53597 - protein, 371 aa, Caulobacter sp.
  misc_feature (1)..(371): tr|A0A4R3H5V4|A0A4R3H5V4_9CAUL Queuine tRNA-ribosyltran sferase OS=Caulobacter sp. BK020 OX=2512117 GN=tgt PE=3 SV=1
MVAFPFEIKATDGAARTGVLKTPRGDIRTPAFMPVGTAATVKAMTVDQVKATGADIILGNTYHLMLRPTAERVKRLGGLHRFMRWDRPILTDSGGFQVMSLSGISKVTEEAVTFSSHIDGSKHVLSPERSMEIQADLLGSDIVMQLDECVAWPAEEARARQGMELSARWGKRSKAAFGTRDTQALFGIQQGSTFRNLRQESSDRLQEIGFDGYALGGLAVGEGHEAMCEVLDYAPAMLPADRPRYLMGVGKPIDLVEAVWRGVDMFDCVLPTRSGRHGQAWTWDGAINIKNARYAEDEDPLDPTSDCPASRDYSKAYLRHLFKAEEILGQVLLSWHNIAFFQALTAAMRNAIAEGRFEQFRRDFAARQQGA

SEQ ID NO: 53598 - protein, 371 aa, Caulobacter vibrioides
  misc_feature (1)..(371): tr|A0A0H3C9Y7|A0A0H3C9Y7_CAUVN Queuine tRNA-ribosyltran sferase OS=Caulobacter vibrioides (strain NA1000 / CB15 N) OX=565050 GN=tgt PE=3 SV=1
MAAFPFEIEATDGKARTGVLKTPRGDIRTPAFMPVGTAATVKAMTVDQVKDTGADIILGNTYHLMLRPSAERVKRLGGLHKFMRWDKPILTDSGGFQVMSLSGISKLTEEAVTFSSHVDGSKHVLTPERSIEIQADLLGSDIVMQLDECVAWPAEEARARKGMELSARWAKRSKDAFGTRDTQVLFGIQQGSTFENLRRESSERLREIGFDGYAIGGLAVGEGHQAMCEVLDYAPGFLPEDRPRYLMGVGKPIDLVEAVARGVDMFDCVLPTRSGRHGQAWTWDGPINLKNAKYAEDETPLDPDSDCPASRDYSKAYLRHLFKAEEILGQVLLSWHNIAFFQALTAAMRAAIAEGRFEQFRRDFAARHLGG

SEQ ID NO: 53599 - protein, 371 aa, Caulobacter vibrioides; identical to SEQ ID NO: 53598
  misc_feature (1)..(371): sp|Q9A7Y1|TGT_CAUVC Queuine tRNA-ribosyltransferase OS= Caulobacter vibrioides (strain ATCC 19089 / CB15) OX=19 0650 GN=tgt PE=3 SV=1

SEQ ID NO: 53600 - protein, 371 aa, Caulobacter zeae
  misc_feature (1)..(371): tr|A0A2N5DQP3|A0A2N5DQP3_9CAUL Queuine tRNA-ribosyltran sferase OS=Caulobacter zeae OX=2055137 GN=tgt PE=3 SV=1
MAAFPFEIKATDGKARTGVLKTPRGDIRTPAFMPVGTAGTVKALTVDQVKDTGADIILGNTYHLMLRPTAERVKRLGGLHKFMRWDKPILTDSGGFQVMSLSGISKVTEEAVTFASHIDGTKHVLSPERSMEIQADLLGSDIVMQLDECVAWPAEEKRAREGMELSARWGLRSKTAFGARYTQALFGIQQGSTFENLRRESSERLQEIGFDGYAIGGLAVGEGHEAMCEVLDYAPGLLPADRPRYLMGVGKPIDLVEAVYRGVDMFDCVLPTRSGRHGQAWTWDGAINIKNARFAEDESPLDPTSDCPASRDYSKAYLRHLFKAEEILGQVLLSWHNIAFFQALTAAMRAAIEEGRFEQFRRDFAARQKGG

SEQ ID NO: 53601 - protein, 370 aa, Caulobacteraceae bacterium
  misc_feature (1)..(370): tr|A0A1B1ADM1|A0A1B1ADM1_9CAUL Queuine tRNA-ribosyltran sferase OS=Caulobacteraceae bacterium OTSz_A_272 OX=175 9059 GN=tgt PE=3 SV=1
MNFPFEIKARDGDARTGVLRTTRGDIRTPAFMPVGTAGTVKGLTVDQVASTGADIILGNTYHLMLRPGGERMTRLGGLHKFMRWDKPILTDSGGYQVMSLAQLRKLDADGVTFRSHVDGSQHRLTPESAMQIQADQIGADIVMQLDECPALPAPREDVEKAMRLSLGWAKRCKVAFGEREKQNLFAIVQGGIDPALRRISAEALVAEKFDGYAIGGLAVGEGHEAMLATLDVTTPLLPQDRPRYLMGVGKPIDIVESVVRGVDMFDCVLPTRSGRHGQAWTDEGPLNITNARYVEDSSPLDANIDCPASRDYSKAYLHHLFKAGELLGQVLLSWHNVAYYQFLMARLRDAIAEGRLTQFVSDFKAKSAAG

SEQ ID NO: 53602 - protein, 373 aa, Caulobacteraceae bacterium
  misc_feature (1)..(373): tr|A0A4V1UD24|A0A4V1UD24_9CAUL Queuine tRNA-ribosyltran sferase OS=Caulobacteraceae bacterium OX=1978230 GN=tgt PE=3 SV=1
MMTFPFEISATDGAARTGALKTPRGDIRTPAFMPVGTAATVKALTVDQVKESGADIILGNTYHLMLRPTAERVQRLGGLHRFMRWDKPILTDSGGFQVMSLSNIAKVKEDAVTFASHIDGSKHVLSPERSIEIQADLLGSDIVMQLDECVSWPAERDRAEAAMQLSARWGQRSKAAFGTRDTQALFGIQQGSTFEALRRESSERLIETGFDGYAIGGLAVGEGHAAMCDVLDYAPGLLPADRPRYLMGVGKPIDIVEAVARGVDMFDCVLPTRSGRHGQAWTWDGPINLKNARFAEDDNPIDPDIAGPAGTSYSRAYLHHLVKADEILGQVLLSWHNIAFFQTLTAALRSAIAEGRLEQFRREFAARQSKPTS

SEQ ID NO: 53603 - protein, 373 aa, Caulobacterales bacterium
  misc_feature (1)..(373): tr|A0A1F8I2U6|A0A1F8I2U6_9PROT Queuine tRNA-ribosyltran sferase OS=Caulobacterales bacterium RIFCSPHIGHO2_01_FU LL_70_19 OX=1797585 GN=tgt PE=3 SV=1
MPFPFDISATDGRARTGLLRTPRGDIRTPAFMPVGTAATVKALTVEQVRQTGADILLGNTYHLMLRPGPERMERLGGLHRFMRWDRPILTDSGGFQVMSLSGISKLTEEAVTFSSHVDGSKHVLSPERSIEIQADRLGSDIVMQLDECVAWPAEESRAREGMELSARWAKRSKAAFGTRDAQALFGIQQGSTFEHLRRESSDRLQEIGFDGYAIGGLAVGEGHAAMCEVLDYAPEMLPADRPRYLMGVGKPVDLVEAVWRGVDMFDCVLPTRAGRHGQAWTWAGPINLKNARFAEDEEPLDPEVPCPASQDYSKAYLHHLVRTDEILGKVLLSWHNIAFFQALTAAMRAAIAEGRFEQFRRDFQARHVSNGRG

SEQ ID NO: 53604 - protein, 250 aa, Caulobacterales bacterium
  misc_feature (1)..(250): tr|A0A1F8IGF4|A0A1F8IGF4_9PROT Queuine tRNA-ribosyltran sferase (Fragment) OS=Caulobacterales bacterium RIFCSPH IGHO2_01_FULL_67_30 OX=1797584 GN=A2795_11150 PE=3 SV=1
MPFPFEISAKEGRARTGVLKTARGDIRTPAFMPVGTAATVKAMTVDQVKATGADIILGNTYHLMLRPGPERMERLGGLHKFMGWDKPILTDSGGFQVMSLAGISKVKEEAVTFSSHIDGSKHVLTPERSIEIQADRIGADISMQLDQCVAYPAEKDAARKAMELSIRWGARSKARFGERENQALFGIQQGSTFEDLRRQSSDQLREIGFDGYAIGGLAVGEGHQAMCEVLDYAPEMLPADRPRYLMGVGK

SEQ ID NO: 53605 - protein, 380 aa, Caviibacterium pharyngocola
  misc_feature (1)..(380): tr|A0A2M8RTA6|A0A2M8RTA6_9PAST Queuine tRNA-ribosyltran sferase OS=Caviibacterium pharyngocola OX=28159 GN=tgt PE=3 SV=1
MQFKLHKTDGVARRGTMTFHRPQGEFTVETPAFMPVGTYGTVKGMTPEEVRATGAEILLGNTFHLWLRPGQEVMRKHGDLHDFMQWHRPILTDSGGFQVFSLGKLRKITEEGVKFQNPINGERIFLSPEKSMEIQYDLGSDIVMIFDECAPYPSTFDYTKKSMEMSLRWAQRSRDRFDELGNKNALFGIVQGGVFEELRQVSLEGLVNIGFDGYAVGGLAVGEPKEDMHRILEYVCPQLPADKPRYLMGVGKPEDLVEGVRRGIDMFDCVMPTRNARNGHLFVSDGIVKIRNAKYRDDTSPLDPECDCYTCKHYTKSYLYHLDKCGEILGARLNTIHNLRYYQRLMAQIRQAIEEDRFDDFVVEFYAKIGKPVPPLQSEK

SEQ ID NO: 53606 - protein, 376 aa, Cecembia calidifontis
  misc_feature (1)..(376): tr|A0A4Q7P5M5|A0A4Q7P5M5_9BACT Queuine tRNA-ribosyltran sferase OS=Cecembia calidifontis OX=1187080 GN=tgt PE=3 SV=1
MKFKLEHTDSKSKARAGMIKTDHGDIQTPIFMPVGTAGSVKAVHQRELMYDVKAQIILGNTYHLYLRPGLDILEKAGGLHKFNGWSKPILTDSGGYQVFSLAENRKLTEEGAVFKSHIDGSKHLFSPERVMDIQRIIGADIIMAFDECPPYPCDFAYARKSMELTHRWLKRCIDRFDSTEGKYGYSQTLFPIVQGSVFPELRKQSAEFIASCEREGNAIGGLSVGEPVEEMYAMTDMVTDILPKDKPRYLMGVGTPANILEGIALGVDMFDCVMPTRNARNGMLFTSEGIINIRNEKWKDDFSPIDPHINSYVSSFYSKAYLRHLTIAKEILAAQIASIHNLSFYLWLVGQAREHIIAGDFAVWKNQMVEKVSRRL

SEQ ID NO: 53607 - protein, 376 aa, Cecembia lonarensis
  misc_feature (1)..(376): tr|K1L0W7|K1L0W7_9BACT Queuine tRNA-ribosyltransferase OS=Cecembia lonarensis LW9 OX=1225176 GN=tgt PE=3 SV=1
MKFKLEHTDSKSKARAGTIKTDHGDIQTPIFMPVGTAGSVKAVHQRELMYDVKAQIILGNTYHLYLRPGLDILEKAGGLHKFNGWSKPILTDSGGYQVFSLAENCKLTEEGAVFKSHIDGSKHLFSPERVMDIQRIIGADIIMAFDECPPYPCDFGYARKSMELTHRWLKRCIDRFDSTEGKYGYSQTLFPIVQGSVFPELRKQSAEFVASCDREGNAIGGLSVGEPVEEMYAMTDMVTDILPKDKPRYLMGVGTPANILEGIALGVDMFDCVMPTRNARNGMLFTSEGIINIRNEKWKDDFSAIDPHINSYVSSFYSKAYLRHLTIAKEILAAQIASIHNLSFYIWLVGQAREHIIAGDFAVWKNQMVEKVSRRL

SEQ ID NO: 53608 - protein, 398 aa, Cecembia rubra
  misc_feature (1)..(398): tr|A0A2P8E891|A0A2P8E891_9BACT Queuine tRNA-ribosyltran sferase OS=Cecembia rubra OX=1485585 GN=tgt PE=3 SV=1
MSAIKYQSLRSKEKALNDQFIKMKFRLEHTDSKSKARAGTIKTDHGDIQTPIFMPVGTAGSVKAVHQRELIYDVKAQIILGNTYHLYLRPGLDILEKAGGLHKFNGWSKPILTDSGGYQVFSLAENRKLTEEGAVFKSHIDGSKHLFSPERVMDIQRIIGADIIMAFDECPPYPCDFAYARKSMELTHRWLKRCIDRFDNTEGKYGYSQTLFPIVQGSVFPELRKQSAEFVASCEREGNAIGGLSVGEPVEEMYAMTDMVTDILPKDKPRYLMGVGTPANILEGIALGVDMFDCVMPTRNARNGMLFTSEGIINIRNEKWKDDFSPIDPHINSYVSSFYSKAYLRHLTIAKEILAAQIASIHNLSFYLWLVGQAREHIIAGDFAVWKNQMVEKVSRRL

SEQ ID NO: 53609 - protein, 375 aa, Cedecea davisae
  misc_feature (1)..(375): tr|S3K1J5|S3K1J5_9ENTR Queuine tRNA-ribosyltransferase OS=Cedecea davisae DSM 4568 OX=566551 GN=tgt PE=3 SV=1
MKFELDTTDGRARRGRLVFERGTVETPAFMPVGTYGTVKGMTPEEVKDTGAQIILGNTFHLWLRPGQEIMKLHGDLHDFMQWKGPILTDSGGFQVFSLGDIRKITEAGVHFRNPINGDPIFLDPEKSMEIQYDLGSDIVMIFDECTPYPADWDYAKRSMEMSLRWAQRSRDRFDSLGNKNALFGIIQGSVYEDLRDISVKGLVEIGFDGYAVGGLAVGEPKEDMHRILEHVCPQIPADKPRYLMGVGKPEDLVEGVRRGVDMFDCVMPTRNARNGHLFVTDGVVKIRNAKYKADTAPLDAECDCYTCRNYSRAYLHHLDRCNEILGARLNTIHNLRYYQRLMAGLRKAIEEGKLEHFVTDFYERTGKPVPPLNVD

SEQ ID NO: 53610 - protein, 375 aa, Cedecea lapagei
  misc_feature (1)..(375): tr|A0A447V5W5|A0A447V5W5_9ENTR Queuine tRNA-ribosyltran sferase OS=Cedecea lapagei OX=158823 GN=tgt PE=3 SV=1
MKFELDTTDGRARRGRLVFERGTVETPAFMPVGTYGTVKGMTPEEVEATGAQIILGNTFHLWLRPGQEIMKLHGDLHDFMQWKGPILTDSGGFQVFSLGDIRKITEAGVHFRNPINGDPIFLDPEKSMEIQYDLGSDIVMIFDECTPYPADWDYAKRSMEMSLRWAQRSRDRFDSLGNKNALFGIIQGSVYEDLRDISVKGLVEIGFDGYAVGGLAVGEPKEDMHRILEHVCPQIPADKPRYLMGVGKPEDLVEGVRRGVDMFDCVMPTRNARNGHLFVTDGVVKIRNAKHKDDTAPLDAECDCYTCRNYSRAYLHHLDRCNEILGARLNTIHNLRYYQRLMAGLRKAIEEGKLEHFVTDFYERTGKPVPPLNVD

SEQ ID NO: 53611 - protein, 375 aa, Cedecea lapagei
  misc_feature (1)..(375): tr|A0A2N0CM43|A0A2N0CM43_9ENTR Queuine tRNA-ribosyltran sferase OS=Cedecea lapagei OX=158823 GN=tgt PE=3 SV=1
MKFELDTTDGRARRGRLVFDRGVVETPAFMPVGTYGTVKGMTPEEVEATGAQIILGNTFHLWLRPGQEVMKLHGDLHDFMQWKGPILTDSGGFQVFSLGDIRKITEQGVHFRNPINGDPIFLDPEKSMEIQYDLGSDIVMIFDECTPYPADWDYAKRSMEMSLRWAKRSRDRFDGLENKNALFGIIQGSVYEDLRDISVKGLVEIGFDGYAVGGLAVGEPKEDMHRILEHVCPQIPADKPRYLMGVGKPEDLVEGVRRGIDMFDCVMPTRNARNGHLFVTDGVVKIRNAKHKNDTSTLDAECDCYTCRHYSRAYLYHLDRCNEILGARLNTIHNLRYYQRLMAGLRKAIEEGKLESFVTDFYQRQGRDVPPLNVD

SEQ ID NO: 53612 - protein, 375 aa, Cedecea neteri
  misc_feature (1)..(375): tr|A0A089Q1W3|A0A089Q1W3_9ENTR Queuine tRNA-ribosyltran sferase OS=Cedecea neteri OX=158822 GN=tgt PE=3 SV=1
MKFELDTTDGRARRGRLVFERGTVETPAFMPVGTYGTVKGMTPEEVEATGAQIILGNTFHLWLRPGQEIMKLHGDLHDFMQWKGPILTDSGGFQVFSLGDIRKITEAGVHFRNPINGDPIFLDPEKSMEIQYDLGSDIVMIFDECTPYPADWDYAKRSMEMSLRWAQRSRDRFDSLENKNALFGIIQGSVYEDLRDISVKGLVEIGFDGYAVGGLAVGEPKEDMHRILEHVCPQIPADKPRYLMGVGKPEDLVEGVRRGIDMFDCVMPTRNARNGHLFVTDGVVKIRNAKHKDDTAPLDAECDCYTCRNYSRAYLHHLDRCNEILGARLNTIHNLRYYQRLMAGLRKAIEEGKLEHFVTDFYERTGKPVPPLNVD

SEQ ID NO: 53613 - protein, 375 aa, Cedecea sp.
  misc_feature (1)..(375): tr|A0A1X7J0Z0|A0A1X7J0Z0_9ENTR Queuine tRNA-ribosyltran sferase OS=Cedecea sp. NFIX57 OX=1566286 GN=tgt PE=3 SV =1
MKFELDTTDGRARRGRLVFERGTVETPAFMPVGTYGTVKGMTPEEVEATGAQIILGNTFHLWLRPGQEIMKLHGDLHDFMQWKGPILTDSGGFQVFSLGDIRKITEAGVHFRNPINGDPIFLDPEKSMEIQYDLGSDIVMIFDECTPYPADWDYAKRSMEMSLRWAQRSRDRFDSLGNKNALFGIIQGSVYEDLRDISVKGLVEIGFDGYAVGGLAVGEPKEDMHRILEHVCPQIPADKPRYLMGVGKPEDLVEGVRRGIDMFDCVMPTRNARNGHLFVTDGVVKIRNAKHKDDTAPLDAECDCYTCRNYSRAYLHHLDRCNEILGARLNTIHNLRYYQRLMAGLRQAIEEGKLDHFVTDFYERTGKPVPPLNVD

SEQ ID NO: 53614 - protein, 381 aa, Celeribacter baekdonensis
  misc_feature (1)..(381): tr|K2INU4|K2INU4_9RHOB Queuine tRNA-ribosyltransferase OS=Celeribacter baekdonensis B30 OX=1208323 GN=tgt PE=3 SV=1
MTQDAQTPRFSFSLNATDGRARTGVISTPRGDIRTPAFMPVGTAATVKAMMPESVRATGADILLGNTYHLMLRPTAERIARLGGLHKFMNWERPILTDSGGFQVMSLSDLRKLTEKGVTFRSHIDGSKHELTPERSMEIQKLLGSDIVMCFDECPALPADRDRIASSMRLSMRWAERSREAFGDRPGHALFGIQQGGLERDFREESAEALKKIGFDGYALGGLAVGEGQEAMFGCLDFAPDMLPTDKPRYLMGVGKPDDIVGAVKRGIDMMDCVLPSRSGRTGQAWTRRGQVNIKNARHADDPRPLDEHCSCPACSHYSRAYLHHVFRAQEMISGMLLTWHNLHYFQEIMQDMRDAIAGGTFAAWEAEFHAKRAMGDIDPL

SEQ ID NO: 53615 - protein, 381 aa, Celeribacter baekdonensis
  misc_feature (1)..(381): tr|A0A2R4M217|A0A2R4M217_9RHOB Queuine tRNA-ribosyltran sferase OS=Celeribacter baekdonensis OX=875171 GN=tgt P E=3 SV=1
MTQDAQTPRFSFSLNATDGRARTGVISTPRGEIRTPAFMPVGTAATVKAMMPESVRATGADILLGNTYHLMLRPTAERIARLGGLHKFMNWERPILTDSGGFQVMSLSDLRKLTEKGVTFRSHIDGSKHELTPERSMEIQKLLGSDIVMCFDECPALPADRDRIASSMRLSMRWAERSKEAFGDRPGHALFGIQQGGLERDFREESAEALKNIGFDGYALGGLAVGEGQELMFQTLDFAPEFLPQDKPRYLMGVGKPDDIVGAVKRGIDMMDCVLPSRSGRTGQAWTRRGQVNIKNARHADDPRPLDETCTCPACSNYSRAYLHHVFRAQEMISGMLLTWHNLHYFQEIMQGMRDAIAAGTFAIWEADFHANRAMGDIDPL

SEQ ID NO: 53616 - protein, 376 aa, Celeribacter ethanolicus
  misc_feature (1)..(376): tr|A0A291GHI5|A0A291GHI5_9RHOB Queuine tRNA-ribosyltran sferase OS=Celeribacter ethanolicus OX=1758178 GN=tgt P E=3 SV=1
MPQRFSFSVNATDGKARTGVISTPRGDIRTPAFMPVGTAATVKAMMPESVRATGADILLGNTYHLMLRPTAERIAALGGLHKFMNWDRPILTDSGGFQVMSLSDLRKLTEEGVTFRSHVDGSKHFLSPERSMEIQKLLGSDIVMCFDECPALPADRDRIASSMRLSMRWAARSKEAFGDRPGHALFGIQQGGLERDFREESASALKEIGFDGYAIGGLAVGEGQELMFQTLDFAPGFLPEDKPRYLMGVGKPDDIVGAVKRGVDMMDCVLPSRSGRTGQAWTRRGQVNIKNARHADDPRPLDEHCTCPACRNYSRAYLHHVFRSQEIISSMLLTWHNLHYFQEIMQGMRDAIAGGTFEAWEKDFHDTRALGDIEPI

SEQ ID NO: 53617 - protein, 395 aa, Celeribacter halophilus
  misc_feature (1)..(395): tr|A0A1I3Q7T2|A0A1I3Q7T2_9RHOB Queuine tRNA-ribosyltran sferase OS=Celeribacter halophilus OX=576117 GN=tgt PE= 3 SV=1
MLWSRAGFTGKSGGMTQNIQPQRFSFSLNATDGKARTGVISTPRGEIRTPAFMPVGTAATVKAMMPESVRATGADILLGNTYHLMLRPTAERIANLGGLHKFMNWERPILTDSGGFQVMSLSELRKLTEKGVTFRSHVDGSKHELTPERSMEIQKLLGSDIVMCFDECPALPADRGRIAESMRLSMRWAARSKEAFGDRPGYALFGIQQGGLERDFREESAEALKEIGFDGYALGGLAVGEGQEAMFDTLDFAPDMLPTDKPRYLMGVGKPDDIVGAVKRGIDMMDCVLPSRSGRTGQAWTRRGQVNIKNARHADDPRPLDEHCTCPACRNYSRAYLHHVFRSHEIISSMLLTWHNLHYFQEIMQGMRDAIAGGRFAAWEKEFHDTRALGDIEPL

SEQ ID NO: 53618 - protein, 376 aa, Celeribacter indicus
  misc_feature (1)..(376): tr|A0A0B5E3H9|A0A0B5E3H9_9RHOB Queuine tRNA-ribosyltran sferase OS=Celeribacter indicus OX=1208324 GN=tgt PE=3 SV=1
MTQRFSFSLHATDGHARTGAISTPRGEIRTPAFMPVGTAATVKAMMPESVRATGADILLGNTYHLMLRPTAERIDRLGGLHRFMNWDRPILTDSGGFQVMSLSDLRKLTEEGVTFRSHVDGSKHFLSPERSMEIQRLLGSDIVMCFDECPALPADRDRIAQSMRLSMRWAERSREAFGDRPGHALFGIQQGGLERDFREESAAALKEIGFDGYAIGGLAVGEGQEAMFSALDFAPGMLPHDKPRYLMGVGKPDDIVGAVKRGVDMMDCVLPSRSGRTGQAWTRRGQVNIKNARHADDPRPLDEACTCPACSHYSRAYLHHVFRAGEMISGMLLTWHNLHYFQQIMAEMRAAIAAGTFAGWEAGFHGTRAAGDIEPL

SEQ ID NO: 53619 - protein, 376 aa, Celeribacter manganoxidans
  misc_feature (1)..(376): tr|A0A291M3D5|A0A291M3D5_9RHOB Queuine tRNA-ribosyltran sferase OS=Celeribacter manganoxidans OX=1411902 GN=tgt PE=3 SV=1
MSQKFSYAVHATDGSARLGTISTPRGDIRTPAFMPVGTAATVKAMRPESVRETGADILLGNTYHLMLRPTAERIDRLGGLHRFMNWDRPILTDSGGFQVMSLADLRKLTEEGVTFRSHVDGSRHHLTPERSMEIQKLLGSDIVMCFDECPALPADEMRVAESMRLSMRWAQRSRDAFGDRPGHALFGIQQGGVTQHLRAESAEKLREIGFDGYAVGGLAVGEGQEAMFGVLDYACDMLPEDRPRYLMGVGKPDDIVGAVKRGIDMMDCVLPSRSGRTGQAFTRRGVVNIKNARHQDDPRPLDEDCTCPACRSYSRAYLHHVFRSQEIISSMLLTWHNLHYYQELMGDMRAAIGQGRFAAFEAQFHADRADGDIERL

SEQ ID NO: 53620 - protein, 376 aa, Celeribacter marinus
  misc_feature (1)..(376): tr|A0A0P0ADD3|A0A0P0ADD3_9RHOB Queuine tRNA-ribosyltran sferase OS=Celeribacter marinus OX=1397108 GN=tgt PE=3 SV=1
MTQRFSFSLAATDGKARTGVISTPRGDIRTPAFMPVGTAATVKAMMPESVAATGADILLGNTYHLMLRPTAERIDRLGGLHKFMNWDKPILTDSGGFQVMSLAELRKLTEKGVTFRSHIDGSKHELTPERSMEIQRLLGSDIVMAFDECPALPADRARITESMRLSMRWAERSREAFGDRPGHALFGIQQGGLEQDLRGESAEALTKIGFEGYAIGGLAVGEGQEAMFDCLDYAPDQLPQDKPRYLMGVGKPDDIVGAVKRGVDMMDCVLPSRSGRTGQAFTRRGVVNIKNARHADDPRPLDEACTCPACSKYSRAYLHHVFRAGEMISGMLLTWHNLHYYQEIMQGMRDAIAAGTFAAWEKQFHDTRALGDIEPV

SEQ ID NO: 53621 - protein, 381 aa, Celeribacter neptunius
  misc_feature (1)..(381): tr|A0A1I3LIW3|A0A1I3LIW3_9RHOB Queuine tRNA-ribosyltran sferase OS=Celeribacter neptunius OX=588602 GN=tgt PE=3 SV=1
MTQDAQTQRFSFSLHATDGKARTGVISTPRGEIRTPAFMPVGTAATVKAMMPESVRATGADILLGNTYHLMLRPTAERIANLGGLHKFMNWERPILTDSGGFQVMSLSDLRKLTEKGVTFRSHIDGSKHELTPERSMEIQKLLGSDIVMCFDECPALPADRDRIAESMRLSMRWAARSKEAFGDRPGHALFGIQQGGLEQDFRAESAEALKEIGFDGYAIGGLAVGEGQEAMFGALDFAPDMLPTDRPRYLMGVGKPDDIVGAVKRGVDMMDCVLPSRSGRTGQAWTRRGQVNIKNARHADDPRPLDEHCTCPACSNYSRAYLHHVFRSQEIISSMLLTWHNLHYFQEIMQGMRDAIAEGGFAAWEAEFHATRALGDIEPI

SEQ ID NO: 53622 - protein, 385 aa, Celeribacter persicus
  misc_feature (1)..(385): tr|A0A2T5HBK7|A0A2T5HBK7_9RHOB Queuine tRNA-ribosyltran sferase OS=Celeribacter persicus OX=1651082 GN=tgt PE=3 SV=1
MACAMTQNTTPQRFSFSVSATDGKARTGVISTPRGEIRTPAFMPVGTAATVKAMMPESVRATGADILLGNTYHLMLRPTAERIAALGGLHKFMNWERPILTDSGGFQVMSLSDLRKLTEEGVTFRSHVDGSKHFLSPERSMEIQKLLGSDIVMCFDECPALPADRDRIATSMRLSMRWAARSKEAFGDRPGHALFGIQQGGLERDFREESASALKEIGFDGYAIGGLAVGEGQELMFQTLDFAPDFLPEDKPRYLMGVGKPDDIVGAVKRGVDMMDCVLPSRSGRTGQAWTRRGQVNIKNARHADDPRPLDEHCTCPACRNYSRAYLHHVFRSHEIISSMLLTWHNLHYFQEIMQGMRDAIAGGRFEAWEKDFHDTRALGDIEPL

SEQ ID NO: 53623 - protein, 381 aa, Celerinatantimonas diazotrophica
  misc_feature (1)..(381): tr|A0A4R1JLL4|A0A4R1JLL4_9GAMM Queuine tRNA-ribosyltran sferase OS=Celerinatantimonas diazotrophica OX=412034 G N=tgt PE=3 SV=1
MKYELLKTDGKARRGQLTFERGSVQTPAFMPVGTYGTVKGMTPEEVRSTGAEILLGNTFHLWLRPGQAVMRKHGDLHDFMNWHGPILTDSGGFQVFSLGDIRKITEEGVHFRNPVSGEKIFLSPEKSMEIQNDLGSDIVMIFDECTPYPATEEQAQRSMQMSLRWAARSRQRFDELNNPNALFGIIQGGVYEHLRDVSLEGLLKVGFDGYAIGGLAVGEPKAEMHRILDYITPKIPDDKPRYLMGVGKPEDLVEGVRRGIDMFDCVMPTRNARNGHLFTADGVVKIRNARHRDDTSPLEEECDCYTCRNYSRAYLHHLDKCNEILGARLNTIHNLRYYQRLMAGLRDAIEQGKLDAFVTEFYSRIGREVPPLTDTTDFNNN

SEQ ID NO: 53624 - protein, 376 aa, Cellulophaga algicola
  misc_feature (1)..(376): tr|E6X9Q8|E6X9Q8_CELAD Queuine tRNA-ribosyltransferase OS=Cellulophaga algicola (strain DSM 14237 / IC166 / AC AM 630) OX=688270 GN=tgt PE=3 SV=1
MKFTLKYTDPHSKARAGEMITDHGKIETPIFMPVGTVASVKGVHQKELKEEINPDIILGNTYHLYLRPKTQILEKAGGLHKFMGWDRNILTDSGGYQVYSLSDNRKIKEEGVKFKSHIDGSYHTFTPESVMEVQRIIGADIIMAFDECTPYPCDYKYAQRSMHMTHRWLERCIKHLEKLPYKYDYSQSFFPIVQGSTYKDLRRQSAEYIAGVGAEGNAIGGLSVGEPADEMYAMTEVVCEILPEDKPRYLMGVGTPINILENIALGIDMFDCVMPTRNARNGMLFTAHGTINIKNKKWEDDFSPVDEMAITFVDTEYSKAYLRHLFAANEYLGKQIATIHNLGFYLWLTREARKHILAGDFTEWKNKMVKQMDKRL

SEQ ID NO: 53625 - protein, 376 aa, Cellulophaga baltica
  misc_feature (1)..(376): tr|A0A0A7K7B6|A0A0A7K7B6_9FLAO Queuine tRNA-ribosyltran sferase OS=Cellulophaga baltica 18 OX=1348584 GN=tgt PE =3 SV=1
MKFTLKHTDPHSKARAGEMITDHGKIETPIFMPVGTVASVKGVHQKELKEEINPDIILGNTYHLYLRPKTQILEKAGGLHKFMGWDRNILTDSGGYQVYSLSENRKIKEEGVKFKSHIDGSYHTFTPESVMEIQRIIGADIIMAFDECTPYPCDYKYAQRSMHMTHRWLERCIKHLETLPYKYDYSQSFFPIVQGSTYKDLRRQSAEYIAGVGAEGNAIGGLSVGEPADEMYAMTEVVCEILPEDKPRYLMGVGTPINILENIALGIDMFDCVMPTRNARNGMLFTAHGTINIKNKKWEDDFSPIDDMAITFVDTEYSKAYLRHLFAANEYLGKQIATIHNLGFYLWLTREARKHILAGDFTEWKNKMVKQMDKRL

SEQ ID NO: 53626 - protein, 376 aa, Cellulophaga baltica; identical to SEQ ID NO: 53625
  misc_feature (1)..(376): tr|A0A1G7L2S0|A0A1G7L2S0_9FLAO Queuine tRNA-ribosyltran sferase OS=Cellulophaga baltica OX=76594 GN=tgt PE=3 SV =1

SEQ ID NO: 53627 - protein, 376 aa, Cellulophaga fucicola
  misc_feature (1)..(376): tr|A0A1K1R1S0|A0A1K1R1S0_9FLAO Queuine tRNA-ribosyltran sferase OS=Cellulophaga fucicola OX=76595 GN=tgt PE=3 S V=1
MKFTIEKKDAQSKARAATMVTDHGVIETPIFMPVGTVASVKGVHQRELKEEINPDIILGNTYHLYLRPKLDILEAAGGLHKFMGWDRNILTDSGGYQVYSLSANRKIKEEGVKFKSHIDGSFHFFTPENVMETQRTIGADIIMAFDECTPYPCDYNYAKRSMHMTHRWLDRCMNHLETLPFKYGYEQTFFPIVQGSTYKDLRKQSAEYIANAGAEGNAIGGLSVGEPAEEMYAMTEVVCDILPEDKPRYLMGVGTPINILENIALGVDMFDCVMPTRNARNGMLFTAHGTINIKNKKWEADFSPIDEMAITFVDTEYSKAYLRHLFAANEYLGKQIATIHNLGFYLWLTREARKHIKAGDFTEWKNMMVKQMDKRL

SEQ ID NO: 53628 - protein, 376 aa, Cellulophaga lytica
  misc_feature (1)..(376): tr|F0RIA6|F0RIA6_CELLC Queuine tRNA-ribosyltransferase OS=Cellulophaga lytica (strain ATCC 23178 / DSM 7489 / JCM 8516 / NBRC 14961 / NCIMB 1423 / VKM B-1433 / Cy l2 0) OX=867900 GN=tgt PE=3 SV=1
MKFTLEKKDPQSKARAATMVTDHGVIETPIFMPVGTVASVKGVHQRELKEEINPDIILGNTYHLYLRPKLDILEAAGGLHKFMGWDRNILTDSGGYQVYSLSANRKIKEEGVKFKSHIDGSYHFFTPENVMEIQRTIGADIIMAFDECTPYPCDYNYAKRSMHMTHRWLDRCMSHLEKLPFKYGYEQTFFPIVQGSTYKDLRKQSAEYIANAGAEGNAIGGLSVGEPAEEMYAMTEVVCDILPEEKPRYLMGVGTPINILENIALGVDMFDCVMPTRNARNGMLFTAHGTINIKNKKWEADFSPIDEMGITFVDTEYSKAYLRHLFAANEYLGKQIATIHNLGFYLWLTREARKHIIAGDFTEWKNMMVKQMDKRL

SEQ ID NO: 53629 - protein, 376 aa, Cellulophaga sp.
  misc_feature (1)..(376): tr|A0A559N765|A0A559N765_9FLAO Queuine tRNA-ribosyltran sferase OS=Cellulophaga sp. RHA_52 OX=1250036 GN=tgt PE =3 SV=1
MKFTLEKKDPQSKARAATMVTDHGVIETPIFMPVGTVASVKGVHQRELKEEINPDIILGNTYHLYLRPKLDILEAAGGLHKFMGWDRNILTDSGGYQVYSLSANRKIKEEGVKFKSHIDGSYHFFTPENVMEIQRTIGADIIMAFDECTPYPCDYNYAKRSMHMTHRWLDRCMNHLEKLPFKYGYEQTFFPIVQGSTYKDLRKQSAEYIANAGAEGNAIGGLSVGEPAEEMYAMTEVVCDILPEEKPRYLMGVGTPINILENIALGVDMFDCVMPTRNARNGMLFTAHGTINIKNKKWEADFSPIDEMGITFVDTEYSKAYLRHLFAANEYLGKQIATIHNLGFYLWLTREARKHIIAGDFTEWKNMMVKQMDKRL

SEQ ID NO: 53630 - protein, 383 aa, Cellulophaga tyrosinoxydans
  misc_feature (1)..(383): tr|A0A1W2C6Y8|A0A1W2C6Y8_9FLAO Queuine tRNA-ribosyltran sferase OS=Cellulophaga tyrosinoxydans OX=504486 GN=tgt PE=3 SV=1
MRLFTKDLKFTLKHTDPHSKARAGEMITDHGKIETPIFMPVGTVASVKGVHQRELKDEINPDIILGNTYHLYLRPKTDIIEKAGGLHKFMGWDRNILTDSGGYQVYSLSGNRKIKEEGVKFKSHIDGSYHVFTPENVMEIQRVIGADIIMAFDECTPYPCDYKYAQRSMHMTHRWLERCIKHLAKTPLKYDYSQTFFPIVQGSTYKDLRKQSAEYIAGVGAEGNAIGGLSVGEPAEEMYAMTEVVCAVLPEDKPRYLMGVGTPINILENIALGIDMFDCVMPTRNARNGMLFTAHGTINIKNKKWEDDFSPIDEMGITFVDTEYSKAYLRHLFAANEYLGKQIATIHNLGFYLWLTREARKHILAGDFYEWKNKMVKQMDKRL

SEQ ID NO: 53631 - protein, 376 aa, Cellulosilyticum lentocellum
  misc_feature (1)..(376): tr|F2JLS1|F2JLS1_CELLD Queuine tRNA-ribosyltransferase OS=Cellulosilyticum lentocellum (strain ATCC 49066 / DS M 5427 / NCIMB 11756 / RHM5) OX=642492 GN=tgt PE=3 SV=1
MYELLKVEGRAKRGRFHTPHGVIETPVFMNVATVAAIKGALSTEDLETIDTQVVLSNTYHLHLRPGDKLIKELGGLHKFMVCNKPILTDSGGFQVFSLAAMRKIKEEGVYFSSHIDGRKIFMGPEESMQIQSNLGSTIAMAFDECPPALADRAYIMPSVERTTRWLKRCMDEMNRLNSLEDTVNKQQMLFGINQGGILPDVRIEHAKIISEFDLPGYAVGGLAVGESHEDMYHVLEAVVPYLPQNKPTYLMGVGTPENILEAVDRGIDFFDCVLPARNGRHGHVYTNEGKLNLFNQKHEKDMGPIAADCKCPTCQKYSRAYIRHLLKAKEMLGMRLCVMHNLHYFNNLMTEIRDALDKGEFAAYKKMRLEGYKNNK

SEQ ID NO: 53632 - protein, 376 aa, Cellulosilyticum sp.; identical to SEQ ID NO: 53631
  misc_feature (1)..(376): tr|A0A5B9YGN4|A0A5B9YGN4_9FIRM Queuine tRNA-ribosyltran sferase OS=Cellulosilyticum sp. WCF-2 OX=2497860 GN=tgt PE=3 SV=1

SEQ ID NO: 53633 - protein, 378 aa, Cellvibrio japonicus
  misc_feature (1)..(378): tr|B3PDJ7|B3PDJ7_CELJU Queuine tRNA-ribosyltransferase OS=Cellvibrio japonicus (strain Ueda107) OX=498211 GN=t gt PE=3 SV=1
MSRTSFMQFELDKQVGKARRGRLKFPRGVVETPAFMPVGTYGTVKGMTPRDIKDIGAQIILGNTFHLMLRPGTQVVKAHGDLHDFMQWDGPILTDSGGFQVFSLGKLRKITEAGVTFKSPINGSSVFLDPETSMQVQRDLGSDIVMIFDECTPYPATADQARQSMELSLRWAARSKTAHGESPSALFGIVQGGMYEHLRSESLKGLVDIGFDGYAIGGLSVGEPKEDMLRILDHITPEMPTDKPRYLMGVGKPIDLVEGVRRGVDMFDCVLPSRNARNAHLFTREGVIKLRNAKYREDTGPLDSECQCYTCRHFSRSYLHHLDKCNEMLGAQLNTIHNLHYYQDLMAEMREALGSDTFDGFLSRFYGRQGLEVPPLAQ

SEQ ID NO: 53634 - protein, 373 aa, Cellvibrio mixtus
  misc_feature (1)..(373): tr|A0A266Q4I9|A0A266Q4I9_9GAMM Queuine tRNA-ribosyltran sferase OS=Cellvibrio mixtus OX=39650 GN=tgt PE=3 SV=1
MEFELDSQTGRARRGRLKFPRGTVETPAFMPVGTYGTVKGMTPRDVEDIGAHIILGNTFHLMLRPGTEVIKAHGDLHDFMQWKGPILTDSGGFQVFSLGKLRKITEEGVTFKSPINGSKVFMGPEESMQVQRDLGSDIVMIFDECTPYPATIHEARDSMELSLRWAKRSKVAHGDNPSALFGIVQGGMYENLRTESLTGLVEIGFDGYAIGGLSVGEPKEDMLRILESLTPQMPKHKPRYLMGVGKPADLVEGVRRGVDMFDCVMPTRNARNGHLFTSEGVIKLRNAKYRDDTGPLDPLCDCYTCKNFSRSYLHHLDKCNEMLGAQLNTIHNLRYYQRIMVDMRTALSEGTFDAFLADFYGRQGLEVPPAPSV

SEQ ID NO: 53635 - protein, 373 aa, Cellvibrio sp.; identical to SEQ ID NO: 53634
  misc_feature (1)..(373): tr|A0A1U9N6S5|A0A1U9N6S5_9GAMM Queuine tRNA-ribosyltran sferase OS=Cellvibrio sp. PSBB023 OX=1945512 GN=tgt PE= 3 SV=1

SEQ ID NO: 53636 - protein, 373 aa, Cellvibrio sp.
  misc_feature (1)..(373): tr|A0A5J6PE80|A0A5J6PE80_9GAMM tRNA guanosine(34) trans glycosylase Tgt OS=Cellvibrio sp. KY-GH-1 OX=2303332 GN =D0C16_05010 PE=4 SV=1
MQFELDGQIGRARRGRLKFPRGTVETPAFMPVGTYGTVKGLTPRDVEDIGAQIILGNTFHLMLRPGTEVVKAHGDLHDFMQWKGPILTDSGGFQVFSLGKLRKITEEGVTFKSPINGSKVFLDPETSMQVQRDLGSDIVMIFDECTPYPASIHEARDSMELSLRWAKRSKAAHGDNPSALFGIVQGGMYDNLRGESLRGLTEIGFDGYAIGGLSVGEPKEDMLRILENLTPQMPKYKPRYLMGVGKPGDIVEAVRRGVDMFDCVMPTRNARNGHLFTSEGVVKLRNAKYRDDTGPLDSLCDCYTCKNFSRSYLHHLDKCNEMLGATLNTIHNLRYYQRIMADMRKALSENTFDEFLNEFYGRQGLEVPPAPPQ

SEQ ID NO: 53637 - protein, 380 aa, Cellvibrionaceae bacterium
  misc_feature (1)..(380): tr|A0A545U8G5|A0A545U8G5_9GAMM Queuine tRNA-ribosyltran sferase OS=Cellvibrionaceae bacterium R142 OX=2591008 G N=tgt PE=3 SV=1
MRTCHMRFELDTPGQAAGARRGRLHFPRGVVETPAFMPVGTYGSVKGMLPRDIGATGAQIILGNTFHLMLRPGTEVVRAHGDLHDFMQWPGPILTDSGGFQVFSLGKLRKITEAGVSFKSPIDGSPVYLDPETSIQVQRDLGADIVMIFDECTPYPATAAEARDSMALSLRWAARSKAAHGDSAAALFGIVQGGMYPELRAESLAGLTAIGFDGYAIGGLSVGEPKAEMLRVLEELTPLMPAAQPRYLMGVGKPEDIVEAVRRGVDMFDCVMPTRNARNGHLFTGAGVIKIRNARHRHDTGPLDPDCTCYTCANFSRAYLHHLDKCGEILGSQLNTIHNLHYYQALMAGLREAIAGGRLDGFLETFYGGLGQSVPELRAG

SEQ ID NO: 53638 - protein, 370 aa, Cellvibrionales bacterium
  misc_feature (1)..(370): tr|A0A1Z8YN74|A0A1Z8YN74_9GAMM Queuine tRNA-ribosyltran sferase OS=Cellvibrionales bacterium TMED79 OX=1986768 GN=tgt PE=3 SV=1
MKFSVSAKDGLARRGTMTFARGEVQTPAFMPVGTYGTVKGMTPDDVRATGAQILLGNTFHLWLRPGTDIISKHGDLHDFMGWDGPILTDSGGFQVFSLGEVRKVEESGVTFKSPVNGDKVFLDPETSMKIQRDLGSDIVMIFDECTPYPATEEEARRSMELSLRWAKRSKDAHAGNASALFGIVQGGMYKHLREASLAGLVDIGFDGYALGGLSVGEPKDEMVQVLDDVAHQLPDDKPRYLMGVGTPADLLEAVRRGVDMFDCVMPTRNARNGHLFTSHGVIKLRNARHKTSTRPLDENCECYTCSNFSRAYLHHLDRCNEILGSQLCTIHNLTYYQKHMQGIRDAIEAGTLDEFADAFYAAQEAGDPHV

SEQ ID NO: 53639 - protein, 376 aa, Cellvibrionales bacterium
  misc_feature (1)..(376): tr|A0A2E8KFE0|A0A2E8KFE0_9GAMM Queuine tRNA-ribosyltran sferase OS=Cellvibrionales bacterium OX=2026722 GN=tgt PE=3 SV=1
MKFSVSTTDGLARRGQLHFDRGVVQTPAFMPVGTYGTVKAMLPKDIEAVGAEIILGNTFHLMLRPGTEVVRAHGDLHDFIGWEKPILTDSGGFQVWSLGDLRKITEAGVKFRSPIDGSPIFIDPEKSISVQHDLGSDIVMIFDECTPYPATETEAKVSMDLSLRWAARSKQAHGDNPAALFGIVQGGMYQDLRAESLQGLVDIGFDGYAIGGLSVGEPKEAMLHVLDGLAPLMPVDSPRYLMGVGTPSDLVEAVLRGVDMFDCVMPTRNARNGHLFTSTGVIKIRNAVHRHDTSPVDSACDCYSCQNFSRAYLHHLDKCREMLGAQLNTIHNLRYYQNLMRGMRDAISNKTLSAFVDAFYHQQSQQGRSDSTGKEV

SEQ ID NO: 53640 - protein, 373 aa, Centipeda periodontii
  misc_feature (1)..(373): tr|F5RLQ4|F5RLQ4_9FIRM Queuine tRNA-ribosyltransferase OS=Centipeda periodontii DSM 2778 OX=888060 GN=tgt PE=3 SV=1
MPAIIYELIRKDETTGARAGVIHTPHGSFPTPIFMPVGTQATVKGVSPDELHDLGAGIILSNTYHLFLRPGMELVREAGGLHKFMHWDGAILTDSGGFQVFSLGDLRKITEEGATFRSHIDGSKKFLSPEVSMEVQKALGSDIVMAFDECIPYPADHGYAKASTERTQRWLVRCRAAMANATGQGLFGIVQGGMYRDLRAWHAAEVTVLDLPGYAIGGLSVGEPHELMEEILSYTVELLPENKPRYLMGVGTPDYLLTGVRHGIDMFDCVFPTRVARNGMAMTWTGRLVMKNAVHTHDHTVLEEGCGCYACRNGYTRAYIRHLVRADEIFGLRLLTLHNLYFLQEFMRRMRAAIIAGTFPVFYQDFMNHYHKK

SEQ ID NO: 53641 - protein, 377 aa, Cephaloticoccus capnophilus
  misc_feature (1)..(377): tr|A0A139SNG5|A0A139SNG5_9BACT Queuine tRNA-ribosyltran sferase OS=Cephaloticoccus capnophilus OX=1548208 GN=tg t PE=3 SV=1
MTDDCPHFHVLKTDSDTGARRARLHTRHGAIETPIFMPVGTQGTVKAMTPVQLREIGAQVILGNTYHLNLRPTSELIAELGGLHRFMGWDGPILTDSGGFQVFSLAKLRKLRDDGVAFQSHLDGKKLFLGPREVVDIQSRLGSDIAMVLDECPPWPCERGPCAEAVARSARWAEQCLAHARDTGFFERGQLLFGIAQGSTYDDLRREAAESLAALPFSGYAVGGVSVGEPEDEMLKQVAATIPHLPAHKPRYTMGLGTPPQMLKMIALGVDMFDCVLPSRVARHGLVFTPDGPLNLRNAVHTRDPRPISEEVVNYTTQFSRSYLRHLIQAGEILGCTLLTLHNLHFYLDLMAQARAHIEAGDYASWHRAWCARYEAQ

SEQ ID NO: 53642 - protein, 381 aa, Cephaloticoccus primus
  misc_feature (1)..(381): tr|A0A139SSM0|A0A139SSM0_9BACT Queuine tRNA-ribosyltran sferase OS=Cephaloticoccus primus OX=1548207 GN=tgt PE= 3 SV=1
MSATASHFHLIKTDSGTAARRGRLQTAHGTIETPIFMPVGTQATVKALTPAQLREIGAQIILGNTYHLNLRPTSELIAELGGLHRFMRWDGPILTDSGGFQVFSLAKLRKLRDDGVEFHSHLDGRRLFLGPREVVAIQSNLGSDIAMVLDECPPWPCERAACEAAVARSARWAAQCLAAARETGFFERGQLLFAIVQGSTYDDLRRGAAESLAALDFSGYAVGGVSVGEPEPEMLKQVGATTPFLPAHKPRYTMGLGTPPQMLKMIAQGVDMFDCVLPSRVARHGLAFTPDGPLNLRNEKHRRDPRPISEEVVNYTTQFSRSYLRHLVQAGEILGCTLLTLHNLHFYLDLMAQARAHIEAGDYASWHRAWCERYESGAQRV

SEQ ID NO: 53643 - protein, 379 aa, Cerasibacillus quisquiliarum
  misc_feature (1)..(379): tr|A0A511V0W9|A0A511V0W9_9BACI Queuine tRNA-ribosyltran sferase OS=Cerasibacillus quisquiliarum OX=227865 GN=tg t PE=3 SV=1
MGPIKYELIKTCKQTGARLGRVTTPHGSFETPIFMPVGTLATVKTMSPEDLKSMDAHIILSNTYHLWLRPGEDIIEEAGGLHRFMNWDGSILTDSGGFQVFSLSDMREIEEEGVHFRNHLNGEKLFLSPEKATQIQNVLGSDIMMAFDECPPYPATYDYMKTSVERTSRWAERCLKAHTRSYDQGLFGIVQGGEFEDLRKQSVRDLVSLDFPGYAIGGLSVGEPKDVMNRVLEFTTPELPANKPRYLMGVGSPDSLIDASIRGVDMFDCVLPTRIARNGTCMTSTGRLVVRNAKFARDFRPIDENCDCHVCQNYSRAYIRHLIKCNETFGFRLTTYHNLYFLLNLMKQVREAIKEDRLGDFREAFFELYGLNKPNAKNF

SEQ ID NO: 53644 - protein, 379 aa, Cerasibacillus sp.
  misc_feature (1)..(379): tr|A0A5C8P458|A0A5C8P458_9BACI Queuine tRNA-ribosyltran sferase OS=Cerasibacillus sp. CC-CFT480 OX=2498845 GN=t gt PE=3 SV=1
MGPIKYELIKTCKQTGARLGRVTTPHGSFETPIFMPVGTLATVKTMSPEDLHSMNAHIILSNTYHLWLRPGEDIIDEAGGLHSFMNWDGSILTDSGGFQVFSLSDMREIEEEGVHFRNHLNGEKLFLSPEKAMQIQNKLGSDIMMAFDECPPYPASYDYMKKSVERTSRWAERCLKAHQRQDVQGLFGIVQGGEYEELRKQSAKDLISLDFPGYAIGGLSVGEPIDVMNRVLEFTTPLLPANKARYLMGVGSPGSLIDGSIRGIDMFDCVLPTRIARNGTCMTSTGRLVVRNAKYARDFRPIDENCDCHVCKNYSRAYIRHLVKCNETFGFRLTSYHNLYFLLNLMKQVREAIKNDRLGDFKEAFFEQYGLNKPNAKNF

SEQ ID NO: 53645 - protein, 375 aa, Cereibacter changlensis
  misc_feature (1)..(375): tr|A0A2T4JQ44|A0A2T4JQ44_9RHOB Queuine tRNA-ribosyltran sferase OS=Cereibacter changlensis JA139 OX=1188249 GN= tgt PE=3 SV=1
MDRFSFQVSATDGAARSGVISTPRGEIRTPAFMPVGTAATVKAMLPESVRATGADILLGNTYHLMLRPTAERIARLGGLHKFMNWDRPILTDSGGFQVMSLAALRKLTEEGVKFSSHIDGSKHMLSPERSMEIQKLLGSDIVMCFDECPALPATDEVVAKSMRLSMRWAQRSRDAFGDRPGHALFGIMQGGVTRELREESAAALTAIGFDGYAVGGLAVGEGQEAMFGVLDYATDMLPADKPRYLMGVGKPDDIVGAVERGIDMMDCVLPSRSGRTGQAWTRRGQVNMKNARHMDDPRPLDEACSCPTCRSYSRAYLHHVLRSQEIIASMLLTWHNLHYYQELMQGLRDAIAAGRLAAFVQGFHSQRAEGDIPPV

SEQ ID NO: 53646 - protein, 375 aa, Cereibacter changlensis
  misc_feature (1)..(375): tr|A0A4U0Z1W5|A0A4U0Z1W5_9RHOB Queuine tRNA-ribosyltran sferase OS=Cereibacter changlensis OX=402884 GN=tgt PE= 3 SV=1
MDRFSFQVSATDGAARSGVISTPRGEIRTPAFMPVRTAATVKAMLPESVRATGADILLGNTYHLMLRPTAERIARLGGLHRFMNWDRPILTDSGGFQVMSLAALRKLTEEGVKFSSHIDGSKHMLSPERSMEIQKLLGSDIVMCFDECPALPATDEVVAKSMRLSMRWAQRSRDAFGDRPGHALFGIMQGGVTRELREESAAALTAIGFDGYAVGGLAVGEGQEAMFGVLDYATDLLPADKPRYLMGVGKPDDIVGAVERGIDMMDCVLPSRSGRTGQAWTRRGQVNMKNARHMDDPRPLDEACSCPTCRSYSRAYLHHVLRSQEIIASMLLTWHNLHYYQELMQGLRDAIAAGRLAAFVQGFHAQRAEGDIPPI

SEQ ID NO: 53647 - protein, 376 aa, Cesiribacter andamanensis
  misc_feature (1)..(376): tr|M7N387|M7N387_9BACT Queuine tRNA-ribosyltransferase OS=Cesiribacter andamanensis AMV16 OX=1279009 GN=tgt PE =3 SV=1
MQFTLETTDPKSRARAGRLTTGHGTIETPIFMPVGTAGTVKAVHQRELRQDIGAQIILGNTYHLYLRPGLDTLYKAGGLHQFGGWDGPILTDSGGYQVFSLSDIRKITEEGVKFRSHIDGSKIDFTPEGVMDIQRIIGADIIMAFDECPPYPSDYEYARKSMELTHRWLKRCIERLDSTEPHYGYEQQLFPIVQGSTYSDLRQQSAEFIASQNRAGNAIGGLSVGEPAEEMYRITELVCGILPADKPRYLMGVGTPANILECIALGVDMFDCVMPTRNARNGMLFTTQGIINIRNEKWKQDFSPIDPGLSNYASSFYTKAYLRHLIHSKEMLGAQIASVHNLSFYLWLVGQAREQIKAGTFSAWKERIIPTLMQRL

SEQ ID NO: 53648 - protein, 372 aa, Cetia pacifica
  misc_feature (1)..(372): tr|A0A3N1YMR4|A0A3N1YMR4_9PROT Queuine tRNA-ribosyltran sferase OS=Cetia pacifica OX=1424653 GN=tgt PE=3 SV=1
MDFKIDAVDNKARACTIKTAHSEIKTPIFMPVGTAAAVKSLDAIDMTEILDAPIILGNTYHLYLRPGDEVIAKLGGLHGFSGYKRSFLTDSGGFQAFSLGNNVKFTDEGIWFKSHIDGSKHFFSPEKVIDIEYNLNSDIMMVLDDLIPLPNTKERIKKSIERTTQWAYRSLVHHVKKGKKNNLFAIIQGGTDFEFRKISAESLVSLEYEGHTFDGFAIGGLSVGEENQLMYDTIEATTPYMPEDKPRYLMGVGTPEDIIEAIDRGVDMFDCVMPTRNARNGYLFTSFGTLRIKNAQYKLDDSPIDPECDCYTCKNFSRAYLNHLFKAKELTYFRLASIHNLHYYLNLVKKARKAIIEGRFKEFKKEFYSKRQ

SEQ ID NO: 53649 - protein, 388 aa, Cetobacterium ceti
  misc_feature (1)..(388): tr|A0A1T4JZA2|A0A1T4JZA2_9FUSO Queuine tRNA-ribosyltran sferase OS=Cetobacterium ceti OX=180163 GN=tgt PE=3 SV= 1
MEKKLPVEYELLKKDGKARAGVITTPHGKIETPVFMPVGTQATVKSMTPEELEEMGAEIILGNTYHLYLRPTDELVAKFGGLHKFMNWKHPILTDSGGFQVFSLGDLRKIKEEGVHFRSHIDGSKHFISPEKSINIQNNLGSDIVMLFDECPPGLSSREYLIPSIERTTRWARRCVEAHKRPNEQGLFAIVQGGIYEDLRDKSYNELKEMDEYFSGYAVGGLAVGEPREDMYRILDYIVEKLPSNKPRYLMGVGEPVDMLEAVESGIDMMDCVQPTRIGRHGTVFTKYGRLVIKNASYAEDDRPLDEGCQCYVCRNYTRGYIRHLFKTEEILGARLATYHNLYFLLKLMKDARKAILEDRFIEYKEEFLKNYSMGKSSEWIKPRKIGE

SEQ ID NO: 53650 - protein, 388 aa, Cetobacterium somerae
  misc_feature (1)..(388): tr|U7V846|U7V846_9FUSO Queuine tRNA-ribosyltransferase OS=Cetobacterium somerae ATCC BAA-474 OX=1319815 GN=tgt PE=3 SV=1
MSKKLPVTYELYDKDGKARTGKITTPHGEIETPVFMPVGTQATVKGMTPEELEEMGAEIILGNTYHLYLRPGDELVAKFGGLHKFMNWKKPILTDSGGFQVFSLGDLRNIKEEGVYFRSHLDGSKHFISPEKSINIQNNLGSDIVMLFDECPPGMSSKEYLIPSIERTTRWAKRCVEAHKRPDEQGLFAIVQGGIYEDLRDKSLSELSEMDEYFSGYAVGGLAVGEPREDMYRVLDYIVEKLPEDKPRYLMGVGEPLDMLEAVASGIDMMDCVQPSRIGRHGTIFTKYGRLVVKNASYSEDTRPLDEGCDCYVCRNYTRGYIRHLFKAQEILGGRLATYHNLYFLLKLMKDSRTAIKEKRFNEFKAEFEKNYAMGKNSDWIKPIKFDK

SEQ ID NO: 53651 - protein, 381 aa, Chamaesiphon minutus
  misc_feature (1)..(381): tr|K9UMT3|K9UMT3_CHAP6 Queuine tRNA-ribosyltransferase OS=Chamaesiphon minutus (strain ATCC 27169 / PCC 6605) OX=1173020 GN=tgt PE=3 SV=1
MNKPNFTFDCVGKCSHTHARAGVFHTPHGIVETPRFMPVGTTATVKTLTSAHIEDAGAQMVLSNTYHLHLRPGEDIIKEAGGLHKFMNWKGPMLTDSGGFQVFSLSKTRKITEEGVTFKSPLDGRTIFISPEKSIEIQNALGADVIMAFDECPPYPATRDEVIAATERTYRWLERCIQAHQRPEDQALFPIVQGGVHLDLRAQAAKSLQEFDLHGYAIGGVSVGEPSHFIHKIVRATAPLLPENKPRYLMGVGTYKEMAIAIASGIDLFDCVIPTRVARHGAAFVRGERWNLKNAPFKRDFTPLDDTCPCYTCQNFTRAYLCHLVRCGEITGFTLLSLHNITELIRFTQQIRDAILRDRFVEEFGHWLTSEEEEVIDESEN

SEQ ID NO: 53652 - protein, 381 aa, Chamaesiphon polymorphus
  misc_feature (1)..(381): tr|A0A2T1FG83|A0A2T1FG83_9CYAN Queuine tRNA-ribosyltran sferase OS=Chamaesiphon polymorphus CCALA 037 OX=210769 2 GN=tgt PE=3 SV=1
MNKPHFTFDCVGKCSHTHARAGVFHTPHGIVETPRFMPVGTTATVKTLTSAHIEDAGAQMVLSNTYHLHLRPGEDIIKEAGGLHKFMNWNKPMLTDSGGFQVFSLSKTRKITEEGVTFKSPLDGRTIFISPEKSIEIQNALGADVIMAFDECPPYPATRDEVIAATERTYRWLERCIQAHQRPEDQALFPIVQGGVHLDLRAQAAKSLQEFDLHGYAIGGVSVGEPSHFIHKIVRATAPLLPENKPRYLMGVGTYKEMAIAIASGIDLFDCVIPTRVARHGAAFVRGERWNLKNAPFKRDFTPLDDTCPCYTCQNFTRAYLCHLVRCGEITGFTLLSLHNITELIRFTQQIRNAILRDRFVEEFGHWLTSEDPESSEESQH

SEQ ID NO: 53653 - protein, 375 aa, Chania multitudinisentens
  misc_feature (1)..(375): tr|W0LHI4|W0LHI4_9GAMM Queuine tRNA-ribosyltransferase OS=Chania multitudinisentens RB-25 OX=1441930 GN=tgt PE =3 SV=1
MKFELQTTDGRARRGRLVFERGVVETPAFMPVGTYGTVKGMTPEEVKETGAQILLGNTFHLWLRPGQEIMKLHGDLHDFMQWHGPILTDSGGFQVFSLGAMRKIKEEGVYFRNPINGDKVFLSPEKSMEIQYDLGSDIVMIFDECTPYPADWDYAKRSMEMSLRWAQRSRQRFDELSNKNALFGIIQGGVYEDLRDVSVKGLVDIGFDGYAVGGLAVGEPKEDMHRILEHVCPQIPADKPRYLMGVGKPEDLVEGVRRGIDMFDCVMPTRNARNGHLFVTDGVVKIRNAKHKDDTSPLDKDCDCYTCRHYSRAYLYHLDRCNEILGARLNTIHNLRYYQRLMAGLRRAIEDSKLEQFVADFYGRIGKPVPSLNTL

SEQ ID NO: 53654 - protein, 376 aa, Chelativorans sp.
  misc_feature (1)..(376): tr|Q11IH3|Q11IH3_CHESB Queuine tRNA-ribosyltransferase OS=Chelativorans sp. (strain BNC1) OX=266779 GN=tgt PE= 3 SV=1
MSDTFTFRVLATDGKARRGEISMPRGNIRTPAFMPVGTGGTVKAMYMDQVRALGSDIILGNTYHLMLRPGAERVARLGGLHEFARWPYPILTDSGGFQVMSLSALRKVREEGVTFRSHVDGEVHEMSPERSIEIQGLLDSDIQMQLDECIALPSPEKEIERAMELSLRWAERCKIAFGDQPGKAMFGIVQGGDNRRLRLRSAEALAAMGLKGYAVGGLAVGEPQEVMLDILDATCPALPANKPRYLMGVGTPDDILKSVARGIDMFDCVMPTRAGRHGLAFTRRGKINLKNARHAEDTRPLDEESDCPAARDYSRAYLHHLVKSGEALGGMLLTWNNLAYYQGLMADIRAAIEAGRLGERTAEIQEEWVRGDLPAL

SEQ ID NO: 53655 - protein, 383 aa, Chelatococcus asaccharovorans
  misc_feature (1)..(383): tr|A0A2V3U551|A0A2V3U551_9RHIZ Queuine tRNA-ribosyltran sferase OS=Chelatococcus asaccharovorans OX=28210 GN=tg t PE=3 SV=1
MSESFTFSVTGTDGTARTGEIRMPRGVIRTPAFMPVGTAATVKAMYPEQVKALGADVVLGNTYHLMLRPGAERVAALGGLHKFMNWPYPILTDSGGFQVMSLSKLRKIDESGVTFQSHVDGATHVLTPERSIEIQGLLGADIQMQLDECVKLPASPQDTERAMRLSLRWAERCRRAFGEQPGKALFGIVQGGEDRALRIESARALVDMDFKGYAIGGLAVGEPQATMLAMIETVVPYLPTTKPRYLMGVGTPDDLVAAVTRGIDMFDCVMPTRAGRHGLAYTRFGKINLKNARHADDPAPLDPTSSCPAANSYSRAYLHHLVKSGEILGMMLLTWANLAYYQDLMASLRKAIVDNTLADVSAAIRADWGAGAADAPGEADQAS

SEQ ID NO: 53656 - protein, 379 aa, Chelatococcus sambhunathii
  misc_feature (1)..(379): tr|A0A0K6H6N5|A0A0K6H6N5_9RHIZ Queuine tRNA-ribosyltran sferase OS=Chelatococcus sambhunathii OX=363953 GN=tgt PE=3 SV=1
MTVSFTFTPGKTSGSARTGEIRMPRGVIRTPAFMPVGTAATVKAMYPDQVKALGADVVLGNTYHLMLRPGAERVAALGGLHKFMNWPYPILTDSGGFQVMSLAQLRKIDENGVTFQSHLDGSTHVLTPERSIEIQGLLGSDIQMQLDECVKLPCEEAVAEKAMRLSLRWAERCKVAFGTQPERALFGIVQGGEVPRLRIESARELVDMGLDGYAIGGLAVGEPQPVMLAMIETVMPHLPAGKPRYLMGVGTPDDIVEAVRRGIDMFDCVMPTRAGRHGLAYTRFGRINLRNACHAEDSRPLDPDSKCPASNTYSRAYLHHLVKAGEILGMMLLTWNNLAYYQDLMSGLRRAIADDRLDDFIAETKAAWARGEKGGDATA

SEQ ID NO: 53657 - protein, 380 aa, Chelatococcus sp.
  misc_feature (1)..(380): tr|A0A0K2DGA0|A0A0K2DGA0_9RHIZ Queuine tRNA-ribosyltran sferase OS=Chelatococcus sp. CO-6 OX=1702325 GN=tgt PE= 3 SV=1
MTVSFTFTPGKTSGAARTGEIRMPRGVIRTPAFMPVGTAATVKAMYPDQVKALGADVVLGNTYHLMLRPGAERVAALGGLHKFMNWPYPILTDSGGFQVMSLAQLRKIDENGVTFQSHLDGSTHVLTPERSIEIQGLLGSDIQMQLDECVKLPCEEAVAEKAMQLSLRWAERCKVAFGTQPERALFGIVQGGEVPRLRIESARELADMGLDGYAIGGLAVGEPQHVMLAMIETVMPHLPAGKPRYLMGVGTPDDIVEAVRRGIDMFDCVMPTRAGRHGLAYTRFGRINLRNACHAEDSRPLDPDSKCPASNTYSRAYLHHLVKAGEILGMMLLTWNNLAYYQDLMSGLRRAIADDRLDDFIAETKAGWARGEKGGDASAG

SEQ ID NO: 53658 - protein, 384 aa, Chelatococcus sp.
  misc_feature (1)..(384): tr|A0A2W6Y5E1|A0A2W6Y5E1_9RHIZ Queuine tRNA-ribosyltran sferase OS=Chelatococcus sp. OX=1953771 GN=tgt PE=3 SV= 1
MTAQPKTTPLASDRFAFHLLARDGAARTGEIRMPRGTIRTPAFMPVGTAATVKGMYPEQVRALGADVVLGNTYHLMLRPGAERVARLGGLHRFMNWPHPILTDSGGFQVMSLSQLRKLTEEGVTFQSHIDGSKHMLSPERSVEIQNLLGSDIVMQLDECVSLPCEDKVAEKAMRLSLRWAERCKAAFGNPEGRALFGIVQGGAVPRLRVESARELVAMDLKGYAIGGLAVGEPQDVMLAMIETVEPHLPQEKPRYLMGVGTPDDIVQAVARGIDMFDCVMPTRAGRHGQIFTRFGRMNLKNAKHAEDPRPIDEASSCPAAKDWSRAYLHHLVKAEEMLGKMLLTWVNLAYYQDLMAGLRAAIAAGRLDDFIAETKEGWARGEPA

SEQ ID NO: 53659 - protein, 386 aa, Chelonobacter oris
  misc_feature (1)..(386): tr|A0A0A3AKA6|A0A0A3AKA6_9PAST Queuine tRNA-ribosyltran sferase OS=Chelonobacter oris OX=505317 GN=tgt PE=3 SV= 1
MKYELQKTDGRARRGRLTFQRPHGEYHVETPAFMPVGTYGTVKGMTPEEVQASGAQILLGNTFHLWLRPGQEVMRKHGDLHDFMQWHGPILTDSGGFQVFSLGDIRKIKEEGVHFRNPINGEKIFLSPEKSMEIQYDLGSDIVMIFDECTPYPAEFDYAKNSMEMSLRWAKRSRERFDALGNKNALFGIIQGGVYEELRKVSVEGLVDIGFDGYAVGGLAVGEPKEDMHRILEYVCPQIPQDKPRYLMGVGKPEDLVEGVRRGIDMFDCVMPTRNARNGHLFTADGVIKIRNAKYRDDTSPLEAECDCYTCKKYTKSYLYHLDKCGEILGARLNTIHNLRYYQRLMAQLRTAIENGELEQFVARFYARIGKPVPPLNEYHAFDQTK

SEQ ID NO: 53660 - protein, 407 aa, Chishuiella changwenlii
  misc_feature (1)..(407): tr|A0A1M6YXX2|A0A1M6YXX2_9FLAO Queuine tRNA-ribosyltran sferase OS=Chishuiella changwenlii OX=1434701 GN=tgt PE =3 SV=1
MRVKFALLSFFNYFFSETNSPHTKQLISLRIMKFSIDKKDEFSKARAGVVETDHGTIQTPIFMPVGTVGTVKSVHQRELEEDIKAQIILGNTYHLYLRPGTDILHKAGGLHQFINWQKPILTDSGGFQVYSLATSRKKSEEGVKFKSHIDGSYHMFTPEKSMEIQRYIGADIFMAFDELTGIPAKYHDAKRAMHVTHRWLERCRTWLNNNPEYYGHKQTLFPIVQGNDFKDLRQESAKYIADFGAEGNAIGGLSVGEPEPIMYEMTDIVTEILPQDKPRYLMGVGTPWNIIECIALGVDMFDCVMPTRNARNGMLFTWNGVMNMKNAKWKDCFEPLDETGTSYVDSYYTKAYVRHLFNANESLGKQIASIHNLAFYLDLVKVAREHILAGDFAQWKEQIVPQLKQRM

SEQ ID NO: 53661 - protein, 375 aa, Chitinimonas sp.
  misc_feature (1)..(375): tr|A0A2G3K5J1|A0A2G3K5J1_9BURK Queuine tRNA-ribosyltran sferase OS=Chitinimonas sp. BJB300 OX=1559339 GN=tgt PE =3 SV=1
MPENGLKFILKTTSHGARRGSVELNHGVVETPVFMPVGTYGTVKAMSPLELNEIGAQIVLGNTFHLWLRPGLEVIDAHGGLHDFMGWDKPILTDSGGFQVFSLGALRKITEEGVKFSSPVNGDKLFLTPEISMQIQKSLNSDIVMIFDECTPYPADEKTAAASMRMSARWARRSKDEFERLDNPNALFGIVQGGMHERLRDESLAGLEEIGFHGYAIGGLSVGEPKEEFTRVLAYTAPKLPVDKPRYLMGVGTPEDLVYGVSQGVDMFDCVMPTRNARNGWLFTRFGDAKIKNARFKNDIRPLDESCACYACQNFSRAYLHHLFRAGEILGARLNTVHNLHYYQWLMAGMRAAIEADEFDQFVQRFHAERARGVE

SEQ ID NO: 53662 - protein, 375 aa, Chitinimonas sp.
  misc_feature (1)..(375): tr|A0A516SH50|A0A516SH50_9MICO Queuine tRNA-ribosyltran sferase OS=Chitinimonas sp. R3-44 OX=2594795 GN=tgt PE= 3 SV=1
MPDNGLKFTLKTTSHGARRGSVELNHGTVETPVFMPVGTYGTVKAMAPNELNEMGAQIVLGNTFHLWLRPGLEVVAKHEGLHRFMGWDKPILTDSGGFQVFSLGALRKITEEGVKFQSPVNGDRLFLTPEESMRIQTVLNSDIVMIFDECTPYPADEQTAAISMRLSARWARRSRDEFDRQQNPNALFGIVQGGMHERLREESLAGLEEIGFHGYAIGGLSVGEPKEEFTRILAHTAPRLPVDKPRYLMGVGTPEDLVYGVSQGIDMFDCVMPTRNARNGWLFTRWGDAKVKNARYKDDVRPLDESCGCYACSNFSRAYLHHLFRTGEILGARLNTIHNLFYYQWLMAEMRTAIEADQFDQFVVRFHAERARGIA

SEQ ID NO: 53663 - protein, 375 aa, Chitinimonas taiwanensis
  misc_feature (1)..(375): tr|A0A1K2HFV7|A0A1K2HFV7_9BURK Queuine tRNA-ribosyltran sferase OS=Chitinimonas taiwanensis DSM 18899 OX=112127 9 GN=tgt PE=3 SV=1
MPDNGLKFTLKTTSGGARRGSVELNHGVVETPVFMPVGTYGTVKAMAPNELNEIGAQIVLGNTFHLWLRPGLDVIAAHQGLHRFMGWDKPILTDSGGFQVFSLGALRKITEEGVKFSSPVNGDKLFLTPEISMQIQTTLNSDVVMIFDECTPYPADEKTAAASMRMSARWARRSKDEFERLNNPNALFGIVQGGMHERLRDESLAGLQEIGFHGYAIGGLSVGEPKDEFTRILAYTAPKLPSDKPRYLMGVGTPEDLVFGVSQGVDMFDCVMPTRNARNGWLFTRFGDAKIKNARFKNDARPLDESCACYACQNFSRAYLHHLFRAGEILGARLNTIHNLYYYQWLMAQMRAAIEADRFADFVTTFHAERARGVD

SEQ ID NO: 53664 - protein, 370 aa, Chitiniphilus sp.
  misc_feature (1)..(370): tr|A0A4U0QCN2|A0A4U0QCN2_9NEIS Queuine tRNA-ribosyltran sferase OS=Chitiniphilus sp. HX-2-15 OX=2571148 GN=tgt PE=3 SV=1
MQFMLRKTSGGARRGTLQLNHGVVETPVFMPVGTYGTVKAMTPRDLGDIGAQIVLGNTFHLWLRPGLDVIGEFGGLHRFMGWDKPILTDSGGFQVFSLGDLRKISEEGVKFQSPVNGDKLFLTPEESMRIQTVLNSDIVMIFDECTPYPADLRQAADSMRMSLRWARRSKDEFTARQNPNALFGIVQGGMHETLRDESLAGLDDIGFHGMAIGGLSVGEPKEDFARILAHTAPRLPVNKPRYLMGVGTPEDLVFGVSQGIDMFDCVMPTRNARNGMLFTRYGDVRIKNARYRADTRPLDESCDCYTCRHFSRAYLHHLFRSGEILSSQLNTIHNLHYYQVVMREMRAAIDADDFAGHVARFHADRARGVD

SEQ ID NO: 53665 - protein, 378 aa, Chitinivibrio alkaliphilus
  misc_feature (1)..(378): tr|U7D5H4|U7D5H4_9BACT Queuine tRNA-ribosyltransferase OS=Chitinivibrio alkaliphilus ACht1 OX=1313304 GN=tgt P E=3 SV=1
MGNTFSFELHGRSGDARAGVFYTDHGPVETPVFMPVGTQGCVKTLSPHDVSQTGASIILGNTYHLHLRPGSEVIRSAGGLHRFENWGGALLTDSGGFQVFSLKDISRITEEGVEFSSHLDGSRHFFSPEKVMEIEHNIGADIIMAFDECPSSTASREVIYAAVERTLRWAERSLEAHHRLPLHFGYEQALFGIVQGGIHRDYRAYCAEKLVAMDFPGYAIGGLAVGESTQQLYDISRYTASLLPVDKPRYLMGVGKPENILEAIGAGIDMFDCVMPTRNARNSSVFTSQGRLNIKNSAHRLDFSTPLDPACTCYTCTHFSRAYLRHLYKAGEILALRLLSLHNIHFYVNLVAEARRRIVDNSFLEWKEETVHAVAGKA

SEQ ID NO: 53666 - protein, 376 aa, Chitinophaga arvensicola
  misc_feature (1)..(376): tr|A0A1I0QSP1|A0A1I0QSP1_9BACT Queuine tRNA-ribosyltran sferase OS=Chitinophaga arvensicola OX=29529 GN=tgt PE= 3 SV=1
MNFELITTDSGSNARAGKITTDHGEIETPIFMPVGTVGSVKAVTQEQLRDAVQAQIILGNTYHLYLRPGLEVLSMAGGLHKFNGWDRPILTDSGGYQVFSLAANRKIKEEGVVFQSHIDGSRHLFTPENVMDIQRTIGADIIMAFDECPPYPSEYRYARKSMELTHRWLDRCIQRLGETQPAYGHEQTLFPIVQGSTYKDLRKASAEYIASRNCAGNAIGGLSVGEPENEMYEMCGHVCEVLPADKPRYLMGVGTPWNILENIALGIDMFDCVMPTRNGRNGMLFTWNGVINIRNKKWATDFSPVDANSPCFATSQYSRAYLRHLFVAGEILGMTLASIHNLAFYLELVKEARKQILAGTFATWKTSMVNQLKTRL

SEQ ID NO: 53667 - protein, 375 aa, Chitinophaga barathri
  misc_feature (1)..(375): tr|A0A3N4MFS5|A0A3N4MFS5_9BACT Queuine tRNA-ribosyltran sferase OS=Chitinophaga barathri OX=1647451 GN=tgt PE=3 SV=1
MQFDLITTDPSGARAGTITTAHGTIQTPIFMPVGTVGSVKAVTQEQLRTDVNAQIILGNTYHLYLRPGTDVLKQAGGLHKFNGWERPILTDSGGYQVFSLAANRKIKEEGVLFQSHIDGSRHLFTPENVMDIQRTIGADIVMAFDECPPYPSEYAYAKRSMELTHRWLDRCIKRLGETSPEYGHEQTLFPIVQGSTYKDLRKISAEAIASRNCAGNAIGGLSVGEPEAEMYEMCGLVTELLPVEKPRYLMGVGTPWNILNNIELGIDMFDCVMPTRNGRNGMLFTWQGVINIRNKKWATDFSPLDEQNPCTASQNYSKAYVRHLFIAGEILGMTLASIHNLCFYLELVKVAREQILQGTYGSWKREVVPQLKTRL

SEQ ID NO: 53668 - protein, 376 aa, Chitinophaga caeni
  misc_feature (1)..(376): tr|A0A291R113|A0A291R113_9BACT Queuine tRNA-ribosyltran sferase OS=Chitinophaga caeni OX=2029983 GN=tgt PE=3 SV =1
MKFELLHKDPASKARAGKLTTAHGEIETPIFMPVGTVGSVKAVTQEQLREEINAQIILGNTYHLYLRPGLEILRQAGGLHGFNGWERPLLTDSGGYQVFSLANNRKIKEEGCVFQSHIDGSRHLFTPENVMDTQRVIGADIIMAFDECPPYPSEYKYAKQSMELTHRWLDRCIRRFKGTDPIYGYEQALFPIVQGSTYKDLRKISAEVIASKDCLGNAIGGLSVGEPEEDMYEMCELVCDILPTEKPRYLMGVGTPWNILENISLGVDMFDCVMPTRNGRNGMLFTWQGVINIKNKKWATDFTPIDANSPCIATSKYTKAYLRHLFAAGEILGMQLASIHNLAFYLELVKEARKRILEGTFAAWKEGMVKQLRQRL

SEQ ID NO: 53669 - protein, 376 aa, Chitinophaga costaii
  misc_feature (1)..(376): tr|A0A1C4BYI2|A0A1C4BYI2_9BACT Queuine tRNA-ribosyltran sferase OS=Chitinophaga costaii OX=1335309 GN=tgt PE=3 SV=1
MNFELTGTDPASRARAGVLTTGHGVINTPIFMPVGTVGSVKALTQEQLRQDVQAQIILGNTYHLYLRPGLEVLSAAGGLHKFNGWERPILTDSGGYQVFSLAANRKIKEEGVVFQSHIDGSRHLFTPESVMDIQRTIGADIIMAFDECPPYPSTYAYARKSMELTHRWLDRCIQRLAETSPAYGHEQTLFPIVQGSTFKDLRTISATEIAARECAGNAIGGLSVGEPEQDMYEMCELVCDILPKDKPRYLMGVGTPWNILENIALGVDMFDCVMPTRNGRNGMLFTWNGVINIRNKKWATDFSPIDAQSSCFASRNYSRAYLRHLFVAGEYLSLTLASMHNLRFYLELVAEARQQILAGTFAAWKASMIPQLKTRL

SEQ ID NO: 53670 - protein, 399 aa, Chitinophaga cymbidii
  misc_feature (1)..(399): tr|A0A512RK46|A0A512RK46_9BACT Queuine tRNA-ribosyltran sferase OS=Chitinophaga cymbidii OX=1096750 GN=tgt PE=3 SV=1
MYVRLWKNYLPNIQYLCPLKKSDVLNFDLITTDPSGARAGVITTAHGAIQTPIFMPVGTVGSVKAVTQEQLRQDINAQIILGNTYHLYLRPGMDVLREAGGLHKFNGWERPILTDSGGYQVFSLAANRKIKEEGVVFQSHIDGSRHLFTPENVMDIQRTIGADIIMAFDECPPYPSEYRYAKKSMELTHRWLDRCIKRLNETSPAYGHEQTLFPIVQGSTYKDLRKISAEAIAARNCAGNAIGGLSVGEPEAEMYEMCGLVTEILPKEKPRYLMGVGTPWNILENIELGIDMFDCVMPTRNGRNGMLFTWNGVINIRNKKWAADFSPVDEMNPCDASRNYSKAYLRHLFVAGEFLGLTLASIHNLCFYLDLVKAAREQILQGTYGAWKQRMIPQLKTRL

SEQ ID NO: 53671 - protein, 376 aa, Chitinophaga dinghuensis
  misc_feature (1)..(376): tr|A0A327VJ55|A0A327VJ55_9BACT Queuine tRNA-ribosyltran sferase OS=Chitinophaga dinghuensis OX=1539050 GN=tgt P E=3 SV=1
MNFELITKDNGSKARAGKITTAHGEIETPIFMPVGTVGSVKAVTQEQLKEAVQAQIILGNTYHLYLRPGLEVLSKAGGLHKFNGWDRPILTDSGGYQVFSLAANRKIKEEGCVFQSHIDGSRHLFTPENVMDIQRTIGADIIMAFDECPPYPSEYRYARKSMDLTHRWLDRCIQRLADTMPAYGHEQTLFPIVQGSTFKDLRKASAEYIASRGAAGNAIGGLSVGEPEQDMYEMCELVCDILPVDKPRYLMGVGTPWNILENISLGVDMFDCVMPTRNGRNGMLFTWNGVINIRNKKWADDFTPIDENSPCFATNTYSKAYLRHLFIAGEILGMTLASIHNLAFYLELVKEARRQILAGTFSAWKPKMISQLKTRL

SEQ ID NO: 53672 - protein, 376 aa, Chitinophaga eiseniae
  misc_feature (1)..(376): tr|A0A1T4Q814|A0A1T4Q814_9BACT Queuine tRNA-ribosyltran sferase OS=Chitinophaga eiseniae OX=634771 GN=tgt PE=3 SV=1
MNFELITTDSGSNARAGKITTAHGTIETPIFMPVGTVGSVKAVTQEQVRDDVQAQIILGNTYHLYLRPGLEVLSLAGGLHKFNGWERPILTDSGGYQVFSLAANRKIKEEGVVFQSHIDGSKHLFTPENVMDIQRTIGADIIMAFDECPPYPSEYRYARKSMDLTHRWLDRCIQRLKDTQPAYGHEQTLFPIVQGSTYKDLRKASAEYIASRGAAGNAIGGLSVGEPENEMYEMCGLVTEILPKDKPRYLMGVGTPWNILENIALGVDMFDCVMPTRNGRNGMLFTWNGVINIRNKKWATDFNPIDANSECFATRDYSRAYLRHLFVAGEILGMTLASIHNLAFYLELVKEARRQILAGTFATWKTGMVQQLKTRL

SEQ ID NO: 53673 - protein, 376 aa, Chitinophaga filiformis
  misc_feature (1)..(376): tr|A0A1G7GIP8|A0A1G7GIP8_CHIFI Queuine tRNA-ribosyltran sferase OS=Chitinophaga filiformis OX=104663 GN=tgt PE= 3 SV=1
MNFELITTDSNSKARAGEITTGHGKIETPIFMPVGTVGSVKAVTQEQLREDVQAQIILGNTYHLYLRPGMDVLSQAGGLHKFNGWDRPLLTDSGGYQVFSLAANRKIKEEGVLFQSHIDGSRHLFTPENVMDIQRTIGADIVMAFDECPPYPSEYRYAKKSMELTHRWLDRCIKRLAETQPAYGHEQTLFPIVQGSTYKDLRTISATEIAARECAGNAIGGLSVGEPEEDMYEMCGLVCDILPVQKPRYLMGVGTPWNILENIALGVDMFDCVMPTRNGRNGMLFTWNGVINIKNKKWATDFTPIDENSDCFASKRYTKAYLRHLFAAGEILGMQLASIHNIAFYLELVKEARKQILAGNYASWKNTMVPQLKQRL

SEQ ID NO: 53674 - protein, 376 aa, Chitinophaga flava
  misc_feature (1)..(376): tr|A0A365Y1V8|A0A365Y1V8_9BACT Queuine tRNA-ribosyltran sferase OS=Chitinophaga flava OX=2259036 GN=tgt PE=3 SV =1
MNFELITTDSGSNARAGKITTAHGEIETPIFMPVGTVGSVKAITQEQVRDDVQAQIILGNTYHLYLRPGLEVLSLAGGLHKFNGWDRPILTDSGGYQVFSLAANRKIKEEGVVFQSHIDGSKHLFTPENVMDIQRTIGADIIMAFDECPPYPSEYRYARKSMELTHRWLDRCIQRLGDTQPAYGHEQTLFPIVQGSTYKDLRKASAEYIASRGAAGNAIGGLSVGEPENEMYDMCGLVCDILPKDKPRYLMGVGTPWNILENIALGVDMFDCVMPTRNGRNGMLFTWNGVMNIRNKKWATDFSPIDENSDCFATSGYSRAYLRHLFVAGEILGMTLASIHNLAFYLELVKEARRQILAGTFATWKTGMVQQLKTRL

SEQ ID NO: 53675 - protein, 376 aa, Chitinophaga ginsengisegetis
  misc_feature (1)..(376): tr|A0A1T5NLK2|A0A1T5NLK2_9BACT Queuine tRNA-ribosyltran sferase OS=Chitinophaga ginsengisegetis OX=393003 GN=tg t PE=3 SV=1
MNFELITTDSGSNARAGKITTAHGEIETPIFMPVGTVGSVKAVTQEQLRADVQAQIILGNTYHLYLRPGLEVLSLAGGLHKFNGWDRPILTDSGGYQVFSLAANRKIKEEGVVFQSHIDGSRHLFTPENVMDIQRTIGADIIMAFDECPPYPSEYRYARKSMELTHRWLDRCITRLNDTQPAYGHEQTLFPIVQGSTYKDLRKASAEYIASRNCAGNAIGGLSVGEPENEMYEMCGLVCESLPTDKPRYLMGVGTPWNILENIGLGIDMFDCVMPTRNGRNGMLFTWNGVINIRNKKWATDFSPVDANSPCFATNTYSKAYLRHLFVAGEILGMTLASIHNLAFYLELVKEARKQILAGTFATWKTGMINQLKTRL

SEQ ID NO: 53676 - protein, 392 aa, Chitinophaga ginsengisoli
  misc_feature (1)..(392): tr|A0A2P8GGL3|A0A2P8GGL3_9BACT Queuine tRNA-ribosyltran sferase OS=Chitinophaga ginsengisoli OX=363837 GN=tgt P E=3 SV=1
MPPENGRNSLKHSDTEMNFELITTDSNSKARAGEITTGHGKIETPIFMPVGTVGSVKAVTQEQLRDDVQAQIILGNTYHLYLRPGMDVLSQAGGLHKFNGWERPLLTDSGGYQVFSLAANRKIKEEGVLFQSHIDGSRHLFTPENVMDIQRTIGADIIMAFDECPPYPSEYRYAKKSMELTHRWLDRCIKRMAETQPAYGHEQTLFPIVQGSTYKDLRTISATEIAARECAGNAIGGLSVGEPEQDMYEMCGLVCDILPEQKPRYLMGVGTPWNILENIALGVDMFDCVMPTRNGRNGMLFTWNGVINIKNKKWATDFTPVDENSACFASNRYTKAYLRHLFAAGEILGMQLASIHNIAFYLELVKEARKQILAGNYASWKNTMVPQLKQRL

SEQ ID NO: 53677 - protein, 376 aa, Chitinophaga japonensis
  misc_feature (1)..(376): tr|A0A562TCA6|A0A562TCA6_CHIJA Queuine tRNA-ribosyltran sferase OS=Chitinophaga japonensis OX=104662 GN=tgt PE= 3 SV=1
MQFDLITTDHNSRARAGVLTTDHGAIATPIFMPVGTVGSVKAVTQEQLRSDVQAQIILGNTYHLYLRPGLEVLSAAGGLHRFNGWDRPLLTDSGGYQVFSLAANRKIKEEGVVFQSHIDGSRHLFTPENVMDIQRTIGADIIMAFDECPPYPSEYRYARKSMELTHRWLDRCIQRMRETQPAWGHQQSLFPIVQGSTFKDLRTISATEIAARECDGNAIGGLSVGEPEAEMYDMCGLVCDILPAHKPRYLMGVGTPWNILENIALGVDMFDCVMPTRNGRNGMLFTWQGVINIKNKKWATDFSPLDEQTDCFASNHYTRAYLRHLFAAGEILGMQLASIHNLAFYLQLVKAAREQILAGNYAAWKTTMVKQLQTRL

SEQ ID NO: 53678 - protein, 376 aa, Chitinophaga jiangningensis
  misc_feature (1)..(376): tr|A0A1M6W0C4|A0A1M6W0C4_9BACT Queuine tRNA-ribosyltran sferase OS=Chitinophaga jiangningensis OX=1419482 GN=tg t PE=3 SV=1
MNFELITTDNGSKARAGKITTAHGEIETPIFMPVGTVGSVKAVTQEQLRDAVQAQIILGNTYHLYLRPGLEVLSKAGGLHKFNGWNRPILTDSGGYQVFSLANNRKIKEEGVVFQSHIDGSRHLFTPENVMDIQRTIGADIIMAFDECPPYPSEYRYARKSMDLTHRWLDRCIKRLGETMPAYGHEQTLFPIVQGSTYKDLRKASAEYIASRGAAGNAIGGLSVGEPEEDMYEMCELVCDILPVEKPRYLMGVGTPWNILENISLGVDMFDCVMPTRNGRNGMLFTWNGVINIKNKKWADDFTPIDANSECFATRDYSKAYIRHLFAAGEILGMTLASIHNLAFYLELVKEARKQILAGTFSTWKPKMIAQLKTRL

SEQ ID NO: 53679 - protein, 375 aa, Chitinophaga niabensis
  misc_feature (1)..(375): tr|A0A1N6HA90|A0A1N6HA90_9BACT Queuine tRNA-ribosyltran sferase OS=Chitinophaga niabensis OX=536979 GN=tgt PE=3 SV=1
MNFELTKTDPSGARAGTLTTDHGVIQTPIFMPVGTVGSVKAVTQEQLRNDIDARIILGNTYHLYLRPGLDVLKQAGGLHKFNGWDRPLLTDSGGYQVFSLAANRKIKEEGCLFQSHIDGSRHLFTPENVMDIQRVIGADIIMAFDECPPYPSEYQYAKRSMELTHRWLDRCIKRLNETTPEYGHEQTLFPIVQGSTYKDLRKISAEAIASRNCAGNAIGGLSVGEPEADMYEMCGLVTEILPKEKPRYLMGVGTPWNILQNIELGIDMFDCVMPTRNGRNGMLFTWQGVINIRNKKWATDFSQLDAENPCFASQNYTKAYVRHLFVAGEILGMTLASIHNLCFYLELVKAAREQILQGTYGPWKTKMIPQLKTRL

SEQ ID NO: 53680 - protein, 376 aa, Chitinophaga niastensis
  misc_feature (1)..(376): tr|A0A2P8HVC4|A0A2P8HVC4_9BACT Queuine tRNA-ribosyltran sferase OS=Chitinophaga niastensis OX=536980 GN=tgt PE= 3 SV=1
MNFELITTDSGSNARAGKITTAHGEIETPIFMPVGTVGSVKAVTQEQLRDAVQAQIILGNTYHLYLRPGLEVLSLAGGLHKFNGWDRPILTDSGGYQVFSLAANRKIKEEGVVFQSHIDGSRHLFTPENVMDIQRTIGADIIMAFDECPPYPSDYRYARKSMDLTHRWLDRCIQRLSDTQPAYGHEQTLFPIVQGSTYKDLRKASAEYIASRNCAGNAIGGLSVGEPENEMYEMCGLVCESLPVDKPRYLMGVGTPWNILENIALGVDMFDCVMPTRNGRNGMLFTWNGVINIRNKKWATDFNPIDGNSACFATRDYSRAYLRHLFVAGEILGMTLASIHNLAFYLELVQEARRQILAGTFATWKTGMVNQLKTRL

SEQ ID NO: 53681 - protein, 376 aa, Chitinophaga parva
  misc_feature (1)..(376): tr|A0A2T7BNK6|A0A2T7BNK6_9BACT Queuine tRNA-ribosyltran sferase OS=Chitinophaga parva OX=2169414 GN=tgt PE=3 SV =1
MNFELISTDSASSARAGVLTTDHGVINTPIFMPVGTVGSVKAVTQEQLRQDVKAQIILGNTYHLYLRPGLEVLSAAGGLHKFNGWEKPILTDSGGYQVFSLAANRKIKEEGVVFQSHIDGSRHLFTPENVMDIQRTIGADIIMAFDECPPYPSEYRYAKKSMELTHRWLDRCIKRLGETTPRYGHEQTLFPIVQGSTFKDLRTISATEIAARGCAGNAIGGLSVGEPEQDMYEMCALVCNILPADKPRYLMGVGTPWNILENIALGVDMFDCVMPTRNGRNGMLFTWNGVINIKNKKWATDFTPVDEHSPCFASRDYSKAYLRHLFAAGEYLGLTLASIHNLAFYLELITEARAQILAGTYTAWKNKMIPVLKTRL

SEQ ID NO: 53682 - protein, 376 aa, Chitinophaga pinensis
  misc_feature (1)..(376): tr|A0A5C6LZD6|A0A5C6LZD6_9BACT Queuine tRNA-ribosyltran sferase OS=Chitinophaga pinensis OX=79329 GN=tgt PE=3 S V=1
MIFELTTTDSNSKARAGLITTDHGKIETPIFMPVGTVGSVKAVTQEQLRDDVKAQIILGNTYHLYLRPGMEVLSQAGGLHKFNGWERPMLTDSGGYQVFSLAANRKIKEEGCLFQSHIDGSRHLFTPENVMDIQRTIGADIIMAFDECPPYPSEYRYAKKSMELTHRWLDRCIKRLAETQPVYGHEQTLFPIVQGSTYKDLRTISATEIAARECAGNAIGGLSVGEPEQDMYEMCGLVCDILPTEKPRYLMGVGTPWNILENIALGVDMFDCVMPTRNGRNGMLFTWNGVINIKNKKWATDFTPIDENSPCFASNRYTKAYLRHLFAAGEILGMQLASIHNIAFYLELVQEARKQILAGNYASWKNSMVPQLKQRL

SEQ ID NO: 53683 - protein, 376 aa, Chitinophaga pinensis
  misc_feature (1)..(376): tr|C7PR80|C7PR80_CHIPD Queuine tRNA-ribosyltransferase OS=Chitinophaga pinensis (strain ATCC 43595 / DSM 2588 / NCIB 11800 / UQM 2034) OX=485918 GN=tgt PE=3 SV=1
MIFELITTDSNSKARAGLITTDHGKIETPIFMPVGTVGSVKAVTQEQLRDDVKAQIILGNTYHLYLRPGMEVLSQAGGLHKFNGWERPMLTDSGGYQVFSLAANRKIKEEGCLFQSHIDGSRHLFTPENVMDIQRTIGADIIMAFDECPPYPSEYRYAKKSMELTHRWLDRCIKRLAETQPVYGHEQTLFPIVQGSTYKDLRTISATEIAARECAGNAIGGLSVGEPEQDMYEMCGLVCDILPTEKPRYLMGVGTPWNILENIALGVDMFDCVMPTRNGRNGMLFTWNGVINIKNKKWATDFTPIDENSPCFASNRYTKAYLRHLFVAGEILGMQLASIHNIAFYLELVQEARKQILAGNYASWKNSMVPQLKQRL

SEQ ID NO: 53684 - protein, 376 aa, Chitinophaga polysaccharea
  misc_feature (1)..(376): tr|A0A561Q5F4|A0A561Q5F4_9BACT Queuine tRNA-ribosyltran sferase OS=Chitinophaga polysaccharea OX=1293035 GN=tgt PE=3 SV=1
MNFELITTDSGSNARAGKITTAHGEIETPIFMPVGTVGSVKAVTQEQLRADVQAQIILGNTYHLYLRPGLEVLSQAGGLHKFNGWDRPILTDSGGYQVFSLAANRKIKEEGVVFQSHIDGSRHLFTPENVMDIQRTIGADIIMAFDECPPYPSEYRYARKSMELTHRWLDRCIQRLSDTQPAYGHEQTLFPIVQGSTYKDLRKASAEFIASRNCAGNAIGGLSVGEPEEDMYEMCGLVCEVLPSDKPRYLMGVGTPWNILENIALGIDMFDCVMPTRNGRNGMLFTWNGVMNIRNKKWATDFSPIDENSPCFATSRYSRAYLRHLFVAGEILGMTLASIHNLAFYLELVQEARKQILAGTFATWKTGMVQQLKTRL

SEQ ID NO: 53685 - protein, 376 aa, Chitinophaga rupis
  misc_feature (1)..(376): tr|A0A1H8BNC3|A0A1H8BNC3_9BACT Queuine tRNA-ribosyltran sferase OS=Chitinophaga rupis OX=573321 GN=tgt PE=3 SV= 1
MNFDLLTTDNNSQARAGMLTTAHGSIETPIFMPVGTVGSVKAVTQEQLRNDVQAQIILGNTYHLYLRPGLEVLSAAGGLHSFNGWQRPILTDSGGYQVFSLAANRKIKEEGVVFQSHIDGSRHLFTPESVMDIQRTIGADIIMAFDECPPYPSEFVYARKSMELTHRWLDRCIKRLAETQPAYGHEQTLFPIVQGSTYKELRTISATEIAARECAGNAIGGLSVGEPEAEMYEMCGLVCEILPVHKPRYLMGVGTPWNLLENIALGIDMFDCVMPTRNGRNGMLFTWQGVINIKNKKWATDFSVIDEQTNCFASNNYTKAYLRHLFAAGEILGMQLASIHNLSFYLQLVKAAREQILAGTYAAWKAAMVPQLQTRL

SEQ ID NO: 53686 - protein, 376 aa, Chitinophaga sancti
  misc_feature (1)..(376): tr|A0A1K1REI2|A0A1K1REI2_9BACT Queuine tRNA-ribosyltran sferase OS=Chitinophaga sancti OX=1004 GN=tgt PE=3 SV=1
MIFELTTTDSESKARAGVITTGHGVIETPIFMPVGTVGSVKALTQEQIKNDVQAQIILGNTYHLYLRPGMDILSRAGGLHKFNGWDRPILTDSGGYQVFSLAANRKIKEEGCLFQSHIDGSRHLFTPENVMDIQRTIGADIIMAFDECPPYPSEYRYAKKSMELTHRWLDRCIARLKETQPVYGHEQTLFPIVQGSTYKDLRTISATEIAARDCAGNAIGGLSVGEPEADMYEMCGLVCDILPKEKPRYLMGVGTPWNILENIALGVDMFDCVMPTRNGRNGMLFTWNGVINIKNKKWADDFSPIDENSPCFASSQYSKAYLRHLFVAGEILGMTLASIHNLAFYLELVKEARKQILTGNYAQWKTRMVPQLKQRL

SEQ ID NO: 53687 - protein, 376 aa, Chitinophaga skermanii
  misc_feature (1)..(376): tr|A0A327Q5B5|A0A327Q5B5_9BACT Queuine tRNA-ribosyltran sferase OS=Chitinophaga skermanii OX=331697 GN=tgt PE=3 SV=1
MKFELLHTDAGSKARAGKLTTAHGEIETPIFMPVGTVGSVKAVTQEQLRTDINAQIILGNTYHLYLRPGLDIIKQAGGLHKFNGWERPLLTDSGGYQVFSLANNRKIKEEGCVFQSHIDGSRHLFTPENVMDTQRIIGADIIMAFDECPPYPSDYRYAKKSMELTHRWLDRCIKRFAETEPVYGYEQNLFPIVQGSTYKDLRKISAEVIASKECAGNAIGGLSVGEPEADMYEMCELVCDVLPTDKPRYLMGVGTPWNILQNISLGVDMFDCVMPTRNGRNGMLFTWNGVINIKNKKWADDFTPIDENSACVATSKYTKAYLRHLFVAGEILGMQLASIHNLAFYLDLVKEARKQILAGTFATWKEGMVKQLQVRL

SEQ ID NO: 53688 - protein, 375 aa, Chitinophaga sp.
  misc_feature (1)..(375): tr|A0A5B9WTC5|A0A5B9WTC5_9BACT Queuine tRNA-ribosyltran sferase OS=Chitinophaga sp. XS-30 OX=2604421 GN=tgt PE= 3 SV=1
MNFDLITTDPSGARAGVITTAHGSIQTPIFMPVGTVGSVKAITQEQLREDINAQIILGNTYHLYLRPGMDVLREAGGLHGFNGWERPILTDSGGYQVFSLAANRKIKEEGVVFQSHIDGSRHLFTPENVMDIQRTIGADIIMAFDECPPYPSEYRYAKKSMELTHRWLDRCIKRLNETAPAYGYEQTLFPIVQGSTFPDLRKLSAEAIASRNCAGNAIGGLSVGEPEADMYEMCGLVTAILPKEKPRYLMGVGTPWNILENIGLGIDMFDCVMPTRNGRNGMLFTWNGVINIRNKKWATDFSPIDEMNPCNASRNYSKAYLRHLFVAGEFLALTLASIHNLCFYLDLVKVAREQILQGTYEAWKRNMVPQLKTRL

SEQ ID NO: 53689 - protein, 376 aa, Chitinophaga sp.
  misc_feature (1)..(376): tr|A0A1I0NBJ8|A0A1I0NBJ8_9BACT Queuine tRNA-ribosyltran sferase OS=Chitinophaga sp. YR573 OX=1881040 GN=tgt PE= 3 SV=1
MIFELKTTDSGSKARAGVITTGHGVIETPIFMPVGTVGSVKAVTQEQLRTDINAQIILGNTYHLYLRPGLEVLSKAGGLHKFNGWDRPLLTDSGGYQVFSLAANRKIKEEGCMFQSHIDGSRHLFTPENVMDIQRTIGADIIMAFDECPPYPSEYRYARKSMELTHRWLDRCIKRMAQTEPAYGHEQTLFPIVQGSTYKDLRTISATEIAARECAGNAIGGLSVGEPEEDMYEMCGLVCDILPAHKPRYLMGVGNPWNILENIALGVDMFDCVMPTRNGRNGMLFTWEGVINIKNKKFATDFTPIAESTDCFASRQYSKAYLRHLFAAGEILGMQLASIHNLAFYLELVKEARKQILAGTFAPWKEKMVPQLKTRL

SEQ ID NO: 53690 - protein, 376 aa, Chitinophaga terrae
  misc_feature (1)..(376): tr|A0A1H4DD92|A0A1H4DD92_9BACT Queuine tRNA-ribosyltran sferase OS=Chitinophaga terrae Kim and Jung 2007 OX=408 074 GN=tgt PE=3 SV=1
MNFELITTDTHSKARAGKITTDHGEIATPIFMPVGTVGSVKAVTQEQLRDAVQAQIILGNTYHLYLRPGLEVLSKAGGLHKFNGWNRPILTDSGGYQVFSLAANRKIKEEGVVFQSHIDGSRHLFTPENVMDIQRTIGADIIMAFDECPPYPSEYRYARKSMDLTHRWLDRCIQRLKDTQPAYGHEQTLFPIVQGSTYKDLRKASAEYIAGRGCAGNAIGGLSVGEPEQEMYEMCGLVCEILPTEKPRYLMGVGTPWNILENIALGVDMFDCVMPTRNGRNGMLFTWNGVINIKNKKWATDFTPIDEHSACFATRDYTKAYLRHLFVAGEILGMTLASIHNLAFYLELVTEARKQILQGTFASWKASMVNQLKTRL

SEQ ID NO: 53691 - protein, 377 aa, Chitinophagaceae bacterium
  misc_feature (1)..(377): tr|A0A257HZK4|A0A257HZK4_9BACT Queuine tRNA-ribosyltran sferase OS=Chitinophagaceae bacterium BSSC1 OX=2015574 GN=tgt PE=3 SV=1
MAALRFNLEASAGKARAGTIQTDHGTIQTPIFMPVGTVGTVKAVTQQQLKLDVQAQIILGNTYHLYLRPGTEVLEAAGGLHKFMGWDRPILTDSGGYQVFSLAANRKIKEEGVVFQSHIDGSKHLFSPESVMDIQRNIGADIIMAFDECPPYPSDYAYAKKSMELTHRWLTRCVNRLAETPDKYGYTQNLFPIVQGSTFPDLRKASCEFIASKGAVGNAIGGLSVGEPMDMMYEFTNLCCEILPADKPRYLMGVGTPWNLLECIDLGIDMFDCVMPTRNGRNGMLFTTQGVINIRNKKWFKDFSPIDPGLPSETSQYYTKAYLRHLFVGEEILGLQLASIHNLSFYLWLVGEARRNIIEGNYVSWKQQILPILQQRL

SEQ ID NO: 53692 - protein, 376 aa, Chitinophagaceae bacterium
  misc_feature (1)..(376): tr|A0A1Z5SES2|A0A1Z5SES2_9BACT Queuine tRNA-ribosyltran sferase OS=Chitinophagaceae bacterium IBVUCB1 OX=198517 3 GN=tgt PE=3 SV=1
MEFELSAKDNNSKARAGIITTAHGQIETPIFMPVGTVGSVKAVTQQQLDAEVKAQIILGNTYHLYLRPGIEVLEQAGGLHKFNGWSKPILTDSGGYQVFSLANNRKLKEEGAVFQSHIDGSKHLFTPENVIDIQRSIGADIIMAFDECPPYPSDYEYARKSMELTHRWLARCVQRMNDTEPKYGYEQTLFPIVQGSTYKDLRVASSQFIADMDCDGNAIGGLSVGEPEEMMYEMCALCCNNLPEEKPRYLMGVGTPWNILENIALGIDMFDCVMPTRNGRNGMLFTSKGVVNIKNKRWATDFSPIDDGIDCPTSNYYSKAYLRHLFVANEILGLQIASIHNLAFYLHLVRQAREHILLGDYNSWKNEMIPILKQRL

SEQ ID NO: 53693 - protein, 372 aa, Chlamydia abortus
  misc_feature (1)..(372): sp|Q5L5T1|TGT_CHLAB Queuine tRNA-ribosyltransferase OS= Chlamydia abortus (strain DSM 27085 / S26/3) OX=218497 GN=tgt PE=3 SV=1
MALKFHVLHQSKKSRARVGRIETAHGIIDTPAFVPVATNGALKGVVDHSNIQLMFCNTYHLLVHPGTEAIAAMGGLHKFIHRNSPIITDSGGFQIFSLAYGSVAEEIKSCGKKKGSSSILEVTDEGVWFKSYRDGSKLFLSPEVSVQAQKDLGADIIIPLDELLPFHSDTTYFLSSCARTYVWEKRSLDYHKKDPRHQSMYGVIHGGIDPKQRKIGCAFVEDHPFDGFAIGGSLGRNLNEMVPIVDITTSYLSKDRPVHLLGIGDLPSIQATIGFGIDSFDSSYPTKAARHGLILSSQGPIKIANQAYTNDLSPIDPECTCLTCTSKISRAYLRHLFKVHEPNASIWASIHNLHYMQEFMKNIREQILHDRI

SEQ ID NO: 53694 - protein, 372 aa, Chlamydia abortus; identical to SEQ ID NO: 53693
  misc_feature (1)..(372): tr|A0A1X6RB40|A0A1X6RB40_CHLAO Queuine tRNA-ribosyltran sferase OS=Chlamydia abortus OX=83555 GN=tgt PE=3 SV=1

SEQ ID NO: 53695 - protein, 372 aa, Chlamydia avium
  misc_feature (1)..(372): tr|W8JGE2|W8JGE2_9CHLA Queuine tRNA-ribosyltransferase OS=Chlamydia avium 10DC88 OX=1229831 GN=tgt PE=3 SV=1
MALKFHVLHQSKKSQARVCQIETAHGTIDTPAFVPVATNGALKGVLDHSRIPLMFCNTYHLLVHPGTQHIAAMGGLHKFINRHAPIITDSGGFQIFSLAYGSVTEEIKSKGKKKHSSSILNITDDGVWFKSYRDGSKLFLSPETSVQAQKDLGADIIIPLDELLPFHTDTNYFLSSCSRTYIWEKRSLDYHRQSPGYQSMYGVIHGGIDPKQRKIGCQFVEEHPFDGFAIGGSLGRNFQEMVNVVDITMRYLSKDRPVHLLGIGDLPSIRAAVKFGIDSFDSSYPTKIARHGLILSSPKPIKIDNHAYSQDPTPIDPNCHCLTCTSNISKAYLHHLFKVHEPNAGIWASIHNLHYMQEVMKTIREQILNDEI

SEQ ID NO: 53696 - protein, 372 aa, Chlamydia felis
  misc_feature (1)..(372): sp|Q254U7|TGT_CHLFF Queuine tRNA-ribosyltransferase OS= Chlamydia felis (strain Fe/C-56) OX=264202 GN=tgt PE=3 SV=1
MALKFHVIHQSKKSRARVGRIETDHGIIDTPAFVPVATNGALKGVVDHSNIPLMFCNTYHLLVHPGTESIAAMGGLHKFINRDAPIITDSGGFQIFSLAYGSVAEEIKSHGKKKGSSSILEITDEGVWFKSYRDGHKLFLSPEVSVQAQKDLGADIIIPLDELLPFHSDQQYFLSSCSRTYVWEKRSLDYHRNDPRHQSMYGVIHGGIDPEQRKIGCQFVEDHPFDGFAIGGSLGRNLNEMVPVVDITTSHLSKDRPVHLLGIGDLPSIQATVKFGIDSFDSSYPTKAARHGLILSSQGPIKIANQAYANDLSPIDPKCTCLTCSSNLSRAYLRHLFKVHEPNAGIWASIHNLHHMQEVMKNIRKQILNDEI

SEQ ID NO: 53697 - protein, 372 aa, Chlamydia gallinacea
  misc_feature (1)..(372): tr|A0A173E097|A0A173E097_9CHLA Queuine tRNA-ribosyltran sferase OS=Chlamydia gallinacea 08-1274/3 OX=1143323 GN =M787_004550 PE=3 SV=1
MALKFRILHQSKKSRARVCQIETAHGVIDTPAFVPVATNGALKGVLDHSQIPLIFCNTYHLLVHPGTKHIAAMGGLHKFIHRQAPIITDSGGFQIFSLAYGSVEEEIKSKGKKKHTSSILSITDDGVWFKSYRDGSKLFLSPEVSIQAQKDLGADIIIPLDELLPFHTETAYFLSSCSRTYRWEKRSLDYHKKNPGYQSMYGVIHGGTDPEQRKIGCQFVEDHAFDGFAIGGSLGRNSKEMIDIVDITTRFLSKDRPIHLLGIGDLTSIQATVKFGIDSFDSSYPTKAARHGLILSSPKPIKISHRAYAQDPLPIDPECSCLTCTSNISKAYLHHLFKVHEPNAGIWASIHNLHYMQKIMQTIRKQILNDEM

SEQ ID NO: 53698 - protein, 372 aa, Chlamydia ibidis
  misc_feature (1)..(372): tr|S7J5I6|S7J5I6_9CHLA Queuine tRNA-ribosyltransferase OS=Chlamydia ibidis OX=1405396 GN=tgt PE=3 SV=1
MSLKFRVIHKSKISRARVGQIETAHGVIDTPAFVPVATNGALKGVIDHAKIPLIFCNTYHLIIHPGTEAIAQLGGIHKFINRNAPIITDSGGFQIFSLAYGSVVEEIKSQGKKKGTSSILKITDDGVWFKSYRDGRKLFLSPEVSIEAQKNLGADIIIPLDELLPFHTEKKYFLDSCSRTYIWEKRSLDYHKRNPGYQSMYGVIHGGIDPEQRKIGCQFVEDNPFDGFAIGGSLGRNIKELIDVVNVTTSHLTWERPVHLLGIGDLPSIRSTISFGIDSFDSSYPTKAARHGLILSSQGPIKIENRIYANDLSPIDNSCTCLTCSSKISRAYLRHLFKASEPNAVIWASIHNLHYMQQFMQDLRQKILEDKI

SEQ ID NO: 53699 - protein, 372 aa, Chlamydia muridarum
  misc_feature (1)..(372): sp|Q9PKK0|TGT_CHLMU Queuine tRNA-ribosyltransferase OS= Chlamydia muridarum (strain MoPn / Nigg) OX=243161 GN=t gt PE=3 SV=1
MALRFEILHQSKKSRARVGRIETEHGCIDTPAFVPVATNGALKGVLDHSNIPLMFCNTYHLIVHPGAEAVAAMGGLHQFIGRNAPIITDSGGFQIFSLAYGSVAEEIKSCGKKKGENSIIKINDEGVWFKSYRDGRKLFLSPEVSVQAQKHLGADIIIPLDELLPFHTDPAYFQQSSQRTYAWEKRSLDYHLANPGYQSMYGVIHGGTFPDQRKLGCQFVEDLPFDGSAIGGSLGKNLRDIVGVVDVTTANLSIERPRHLLGIGDLPSIWATVGFGIDSFDSSYPTKAARHGMILTSQGSLKINNQRYASDLNPIEPGCACPACSQGISRAYLRHLFKVHEPNAGIWASIHNMHYMQKIMSKIREKILNDQL

SEQ ID NO: 53700 - protein, 372 aa, Chlamydia muridarum; identical to SEQ ID NO: 53699
  misc_feature (1)..(372): tr|A0A069ZZG9|A0A069ZZG9_CHLMR Queuine tRNA-ribosyltran sferase OS=Chlamydia muridarum OX=83560 GN=tgt PE=3 SV= 1

SEQ ID NO: 53701 - protein, 372 aa, Chlamydia pecorum
  misc_feature (1)..(372): tr|V8TPG0|V8TPG0_9CHLA Queuine tRNA-ribosyltransferase OS=Chlamydia pecorum DBDeUG OX=1427370 GN=tgtB PE=3 SV= 1
MALKFHLLHQSTRSRARVGQIETAHGVIDTPAFVPVATHGALKGVIDHSFIPLVFCNTYHLLLHPGTAEIAKLGGLHTFIGRNAPIITDSGGFQIFSLAYGSVAAEIKSCGKKQGAPSLLKVTDEGAWFKSYRDGRQLFLSPEVSVQAQKDLGADIIIPLDELLPFHSEKEYFLSSCSRTYVWEKRSLDYHKKNPGYQSMYGVVHGGTDFEQRRVGCKFVEDEPFDGVAIGGSLGRNREEMHSVVQATTSCLSQERPVHLLGIGDLPSIEALVKCGIDSFDSSYPTKAARHGLILSRQGAIKILHQQYSHDLETLDPQCSCITCSSGISRAYLRHLFKVHEPNAAIWASIHNLHYMQQVMKNLREAILCNEI

SEQ ID NO: 53702 - protein, 372 aa, Chlamydia pneumoniae
  misc_feature (1)..(372): sp|Q9Z8W5|TGT_CHLPN Queuine tRNA-ribosyltransferase OS= Chlamydia pneumoniae OX=83558 GN=tgt PE=3 SV=1
MALKFHLIHQSKKSQARVGQIETSHGVIDTPAFVPVATHGALKGVIDHSDIPLLFCNTYHLLLHPGPEAVAKLGGLHQFMGRQAPIITDSGGFQIFSLAYGSVAEEIKSCGKKKGMSSLVKITDEGAWFKSYRDGRKLFLSPELSVQAQKDLGADIIIPLDELLPFHTDQEYFLTSCSRTYVWEKRSLEYHRKDPRHQSMYGVIHGGLDPEQRRIGVRFVEDEPFDGSAIGGSLGRNLQEMSEVVKITTSFLSKERPVHLLGIGDLPSIYAMVGFGIDSFDSSYPTKAARHGLILSKAGPIKIGQQKYSQDSSTIDPSCSCLTCLSGISRAYLRHLFKVREPNAAIWASIHNLHHMQQVMKEIREAILKDEI

SEQ ID NO: 53703 - protein, 372 aa, Chlamydia pneumoniae; identical to SEQ ID NO: 53702
  misc_feature (1)..(372): tr|A0A0F7XJ36|A0A0F7XJ36_CHLPN Queuine tRNA-ribosyltran sferase OS=Chlamydia pneumoniae OX=83558 GN=tgt PE=3 SV =1

SEQ ID NO: 53704 - protein, 372 aa, Chlamydia psittaci
  misc_feature (1)..(372): tr|A0A0E2JBQ8|A0A0E2JBQ8_CHLPS Queuine tRNA-ribosyltran sferase OS=Chlamydia psittaci 01DC11 OX=1112252 GN=tgt PE=3 SV=1
MALKFHVLHQSKKSRARVGRIETAHGTIDTPAFVPVATNGALKGVVDHSNIQLMFCNTYHLLVHPGIEAIAAMGGLHKFIHRNAPIITDSGGFQIFSLAYGSVAEEIKSCGKKKGSSSILEVTDEGVWFKSYRDGSKLFLSPEVSVQAQKDLGADIIIPLDELLPFHSDTTYFLSSCARTYVWEKRSLDYHKKDPRHQSMYGVIHGGIDPQQRKIGCKFVEDHPFDGFAIGGSLGRNLNEMVPTVDITTSYLSKDRPVHLLGIGDLPSIQATIGFGIDSFDSSYPTKAARHGLILSSQGPIKIANQAYTNDLSPIDPECTCLTCTSKISRAYLRHLFKVHEPNAGIWASIHNLHYMQEFMKNIRKQILNDEI

SEQ ID NO: 53705 - protein, 372 aa, Chlamydia psittaci
  misc_feature (1)..(372): tr|S7IJU0|S7IJU0_CHLPS Queuine tRNA-ribosyltransferase OS=Chlamydia psittaci 08-2626_L3 OX=1112246 GN=tgt PE=3 SV=1
MALKFHVLHQSKKSRARVGKIETAHGVIDTPAFVPVATNGALKGVVDHSNIQLMFCNTYHLLLHPGAQVIAAMGGLHKFINRNAPIITDSGGFQIFSLAYGSVAEEIKSCGKKKGSSSILEVTDEGVWFKSYRDGSQFFLSPEVSVQAQKDLGADIIIPLDELLPFHSNTADFLSSCARTYVWEKRSLDYHKKDPGYQSMYGVIHGGIDLKQRKIGCEFVEDHPFDGFAIGGSLGRNRNEMVPIVEITTSYLSKDRPIHLLGIGDLPSIQATVSFGIDSFDSSYPTKAARHGLILSSQGPIKITNQAYTNDLSPIDPECRCLTCTSKISRAYLRHLFKVHEPNAGIWSSIHNLHYMQEFMKNIRKQILNDTI

SEQ ID NO: 53706 - protein, 372 aa, Chlamydia sp.
  misc_feature (1)..(372): tr|A0A1A9HVG8|A0A1A9HVG8_9CHLA Queuine tRNA-ribosyltran sferase OS=Chlamydia sp. 2742-308 OX=1806891 GN=tgt PE= 3 SV=1
MALKFRILHKSKKSQARVGQIETAHGIIDTPAFVPVATHGALKGVIDHSHVPLLFCNTYHLLLHPGTEAIAKLGGLHQFMGRQMPIITDSGGFQIFSLAYGSVAAEIKSCGKKKDISSLVQITDEGAWFKSYRDGRKLFLSPEISIEAQKNLGADIIIPLDELLPFYADREYFLSSCARTYVWEKRSLDYHKKNPKCQSMYGVIHGGLDPEQRCIGCRFVEEEPFDGFAIGGSLGRNLKEMVDIVRITTAFLAKDRPIHLLGIGDAPSITATVGFGVDSFDSSYPTKAARHGLILSIGGGIKIAQQKYMYDSTPLDPSCSCLTCSSGISRAYLRHLFKVREPNAAIWASIHNLHYMQQVMAEIRERILRDEI

SEQ ID NO: 53707 - protein, 366 aa, Chlamydia sp.
  misc_feature (1)..(366): tr|A0A1M3BCQ7|A0A1M3BCQ7_9CHLA Queuine tRNA-ribosyltran sferase OS=Chlamydia sp. 32-24 OX=1895742 GN=tgt PE=3 S V=1
MKFSVTKQDATSSARIGKLETSHGVIETPIFMPVGTRGAVKTLTNQHLIDIGAQIILGNTYHLMLRPGMEIMEKAGGLHRFMNWNKPILTDSGGFQVFSLSGLNKITEDGVYFQSHIDGAKYFLGPNESMQIQKTLGSDIVMAFDQCPPYPCSAIEMEHALDRTHRWAEKCLQFPLQEHQSLFGIVQGGVYSQYRRQSAQTLAAMNFPGYAIGGLSVGEPAAYMYEMVEETTAFLPQEKPRYLMGVGTPRNMIEAVMRGIDMFDCVMPTRNARNGTAFTWEGKVNIKAGRYAQDFSPLDPKTNCYTSQFTKAYIRHLLNVEEITALTLVTLQNLAFYLNFMEAIREAIRSNTLQELYNKTCEIYPI

SEQ ID NO: 53708 - protein, 372 aa, Chlamydia suis
  misc_feature (1)..(372): tr|A0A1T4J023|A0A1T4J023_9CHLA Queuine tRNA-ribosyltran sferase OS=Chlamydia suis OX=83559 GN=tgt PE=3 SV=1
MALRFEILHQSKKSRARVGRIETAHGCIDTPAFVPVATNGALKGVLDHKNIPLMFCNTYHLIVHPGTEAIAAMGGLHQFIGRNAPIITDSGGFQIFSLSYGSVAEEIKSCGKKKGDSGIIKIDDEGVWFKSYRDGRKLFLSPEVSVQAQKNLGADIIIPLDELLPFHTDPTYFHQSSLRTYAWEKRSLDYHLKNPGYQSMYGVIHGGILPDQRKLGCQFVESLPFDGSAIGGSLGKTLQDIVGVVDVTTANLCPERPRHLLGIGDLPSIWATVGFGIDSFDSSYPTKAARHGMMLTSQGPLKIHNQRYASDLNPIEPGCSCLACSQGISRAYLRHLFKVHEPNAGIWASIHNMHYMQQVMREIREKILADQI

SEQ ID NO: 53709 - protein, 372 aa, Chlamydia trachomatis
  misc_feature (1)..(372): sp|O84196|TGT_CHLTR Queuine tRNA-ribosyltransferase OS= Chlamydia trachomatis (strain D/UW-3/Cx) OX=272561 GN=t gt PE=3 SV=1
MALRFEILHQSKKSRARVGRIETAHGYIDTPAFVPVATNGALKGVLDHSNIPLMFCNTYHLIVHPGAEAIAAMGGLHQFIGRNAPIITDSGGFQIFSLAYGSVAEEIKSCGKKKGGNTIIKVNDDGVHFKSYRDGRKLFLSPEISVQAQKDLGADIILPLDELLPFHADPTYFHQSSQRTYVWEKRSLDYHLKNPGIQSMYGVIHGGTFPDQRKLGCKFVEDLPFDGSAIGGSLGKNLQDIVEVVGVTAANLSAERPRHLLGIGDLPSIWATVGFGIDSFDSSYPTKAARHGMILTSQGPLKINNQRYSSDLNPIEPGCSCLACSQGITRAYLRHLFKVHEPNAGIWASIHNMHHMQKVMREIREGILNDRI

SEQ ID NO: 53710 - protein, 372 aa, Chlamydia trachomatis; identical to SEQ ID NO: 53709
  misc_feature (1)..(372): sp|B0BBH3|TGT_CHLTB Queuine tRNA-ribosyltransferase OS= Chlamydia trachomatis serovar L2b (strain UCH-1/proctit is) OX=471473 GN=tgt PE=3 SV=1

SEQ ID NO: 53711 - protein, 375 aa, Chlamydiae bacterium
  misc_feature (1)..(375): tr|A0A0S8D977|A0A0S8D977_9BACT Queuine tRNA-ribosyltran sferase OS=Chlamydiae bacterium SM23_39 OX=1704235 GN=t gt PE=3 SV=1
MTFSFKILHKSKKSKARVGKIYTPHGIVDTPNFVGVATNGTIKALDNKILEDLGMQLIFCNTYHLMIHPGEDIIAKAGGLHKFINRNLPIITDSGGFQVFSLLYGTVFDELKKKGKKRSDKLVLKIEEEGVLFRSYRDGKKILLTPEKSIQIQKALHSDIIIPLDELPPYYLKEKNLKKSFERTHRWEKRSLDEHIKNKKGQAIYGVIHGGIDKELRKKSCNILQDFPFDGFAIGGSIGKNKKEMVDIVKHTVKYLPEEYPKHLLGIGDSVSFEKIIPLGIDTFDSSYPTKAARHALLFKKEKNIKISKKKYSYIYKPIDERCNCFTCKNYTLAYMHHLFKTRELVFYSLATIHNIFFMINLMKEYREKILKGIF

SEQ ID NO: 53712 - protein, 375 aa, Chlamydiae bacterium
  misc_feature (1)..(375): tr|A0A317JE31|A0A317JE31_9BACT Queuine tRNA-ribosyltran sferase OS=Chlamydiae bacterium OX=2081524 GN=tgt PE=3 SV=1
MTFRFELIHTSTKSKARVGKIYTPHGIIDTPSFVGVGTNGTMKALDNQAVHEIGLQLMFCNTYHLLLQPGTAIVKQAGGLHSFINRSLPIITDSGGFQVFSLAYGSIADELKGKGTKKQAGHVLKISEEGVTFRSYRDGQKVLLTPESSIEAQKDLGADIIIPLDELPPYHIEKKALEDSLARTHRWEERSLHTHLKNPNNQAMYAVIHGGIDAVLREKSCRYLTKLPFDGFSIGGSMGRTKQEMFEVLRSTMSHLPLEKPNHLLGIGDLTSIEMCIPMGIDTFDSSYPTRAARHGILLTQEGHIKIGKSSHAHLFSPPEKNCSCSTCSRFTLAYLHHLFKAKEATCMILATIHNLHFMVQLMQSYRAKILNNNV

SEQ ID NO: 53713 - protein, 376 aa, Chlamydiales bacterium
  misc_feature (1)..(376): tr|A0A1M3CRU4|A0A1M3CRU4_9CHLA Queuine tRNA-ribosyltran sferase OS=Chlamydiales bacterium 38-26 OX=1895743 GN=t gt PE=3 SV=1
MRPFYFELLHRSKKSRARVGRIHTPHGIINTPNFVAVGTNGTIKALDNTLVHDIGLQLMFCNTYHMLLQPGTKVVKQAGGLHTFINRKLPIITDSGGFQVFSLAYGSVADELKSRGTKKQTTSVVKITEEGVHFRSYRDGSKVMLTPESSIQAQKDLGADIIIPFDELPPYHIAPDALKRSLDRTHRWEKRSLDEHLKNPQGQAMYAVIHGGIDPELRKASCDYLTKLPFEGFAIGGSMGKNKEEMHTLLSYTLPLLPEEKPNHLLGIGDLASIDRSVPLGIDTFDSSYPTRAARHGVLFTAKGGLNVTKAENATKFEPIEKDCTCPTCSRFTLAYLHHLFKAREMTCMSLATAHNLYFMVQLMERYRNHILEDRI

SEQ ID NO: 53714 - protein, 366 aa, Chlamydiales bacterium
  misc_feature (1)..(366): tr|A0A1M3CVF5|A0A1M3CVF5_9CHLA Queuine tRNA-ribosyltran sferase OS=Chlamydiales bacterium 38-26 OX=1895743 GN=t gt PE=3 SV=1
MKFHIHKSDGHTKARVGVIDTVHGSIETPIFMPVGTRGAVKTLTNQQLLDIQAQIILANTYHLMLRPGTQILSKAGGLHAFMNWQKPLLTDSGGFQVFSLSSMNKITEKGVHFQSHIDGSRHFLGPDESMSIQKIIGADIVMAFDECTAYPAEKSKVEDGLERTHRWATRCRNYELLPHQNLFGIVQGGVHADLRQYSAKTLTDMNFDGYAVGGLSVGEPASIMYEVLDQTVPFLPEDKPRYLMGVGTPRNLIESVMRGIDMFDCVMPTRNARNGMAFTWSGKVQIKAARYAEDFTPLDSQTPCYTSQFSKAYIRHLLNVDEVTGLTLVTLQNLAFYLDFMQKLRLAIKNDTLATFYEKVCAVYPQ

SEQ ID NO: 53715 - protein, 372 aa, Chlamydophila caviae
  misc_feature (1)..(372): sp|Q822U8|TGT_CHLCV Queuine tRNA-ribosyltransferase OS= Chlamydophila caviae (strain ATCC VR-813 / DSM 19441 / GPIC) OX=227941 GN=tgt PE=3 SV=1
MALKFHVLHQSKKSRARVGKIETAHGIIDTPAFVPVATNGALKGVIDHSNIPLMFCNTYHLLVHPGTEAIAAMGGLHKFMNRNAPIITDSGGFQIFSLAYGSVAEEIKSRGKKKGSSSILEVNDEGVWFKSYRDGHKLFLSPEVSVQAQKDLGADIIIPLDELLPFHSDEKYFLSSCSRTYVWEKRSLDYHKKDPRHQSMYGVIHGGIDPEQRKIGCQFVEDHPFDGFAIGGSLGRNLQEMLPVVDVTTSYLSKDRPVHLLGIGDLPSIHATVGLGIDSFDSSYPTKAARHGLILSSQGPIKIANQAYANDLSSLDPECTCATCTSNISRAYLRHLFKVHEPNAAIWASIHNLHYMQEVMKNIREQILNDEI

SEQ ID NO: 53716 - protein, 372 aa, Chlamydophila psittaci
  misc_feature (1)..(372): tr|A0A2D2DY33|A0A2D2DY33_CHLPS Queuine tRNA-ribosyltran sferase OS=Chlamydophila psittaci OX=83554 GN=tgt PE=3 SV=1
MALKFHVLHQSKKSRARVGRIETAHGTIDTPAFVPVATNGALKGVVDHSNIQLMFCNTYHLLVHPGIEAIAAMGGLHKFIHRNAPIITDSGGFQIFSLAYGSVAEEIKSCGKKKGSSSILEVTDEGVWFKSYRDGSKLFLSPEVSVQAQKDLGADIIIPLDELLPFHSDTTYFLSSCARTYVWEKRSLDYHKKDPRHQSMYGVIHGGIDPQQRKIGCKFVEDHPFDGFAIGGSLGRNLNEMVPTVDITTSYLSKDRPVHLLGIGDLPSIQATIGFGIDSFDSSYPTKAARHGLILSSQGPIKIANQAYTNDLSPIDPECTCLTCTSKISRAYLRHLFKVHEPNAGIWASIHNLHYMQEFMKNISKQILNDEI

SEQ ID NO: 53717 - protein, 380 aa, Chloracidobacterium sp.
  misc_feature (1)..(380): tr|A0A257B9W6|A0A257B9W6_9BACT Queuine tRNA-ribosyltran sferase OS=Chloracidobacterium sp. CP2_5A OX=2012633 GN =tgt PE=3 SV=1
MSLRFEVLARDCATEARRGRLTTARSVIETPVFMPVGTAATVKALTQEMLEALDARIILGNTYHLFLRPGHGVIRELGGLHRFMSWPRSILTDSGGYQVFSLGELRTISEAGVAFRSHLDGSQLFISPEVSMDAQIALGADIVMAFDECPPYPATHEQARVSLELTERWARRCRTHFDAQADRERQSLFGIVQGGIYADLRARSLEGLLEIGFDGYAIGGLSVGEEKHHMYDTTAFIAPRLPADKPRYLMGVGTPADLVESVARGVDMFDCVMPTRHARNGTVFTSAGKLNLRNARYIRDDQPLDAACACFVCRRYSRAYVAHLTRAGEILASVLATYHNVHHYLDLMGRIRHALERGEFGRFVAEFRRQQPSSEESDSL

SEQ ID NO: 53718 - protein, 380 aa, Chloracidobacterium thermophilum
  misc_feature (1)..(380): tr|G2LGP3|G2LGP3_CHLTF Queuine tRNA-ribosyltransferase OS=Chloracidobacterium thermophilum (strain B) OX=98122 2 GN=tgt PE=3 SV=1
MSLRFELLASDAGTAARRGRITTTRSVIETPVFMPVGTAATVKALTQDMLEALDARIILANTYHLFLRPGHEVIRELGGLHRFMSWPRSILTDSGGYQVFSLGELRTISEEGVTFRSHLDGTRLLLSPEVSMEVQIALGSDIVMAFDECPPYPASPEQVRHSLELTERWARRCRTYFDTHADRERQSLFGIVQGSVYPELRARSLEGLLEIGFEGYAIGGLSVGEEKHLMYDTTEFIAPRLPADKPRYLMGVGTPADLVESVARGVDMFDCVMPTRHARNGTVFTTTGRLNLRNARYVRDEQPLDPDCTCAVCRRYSRAYLAHLLRTGEILASILATYHNVHHYLDLMRQIRHALERAEFSRFRADFHRRQLSSEESLST

SEQ ID NO: 53719 - protein, 377 aa, Chlorobaculum limnaeum
  misc_feature (1)..(377): tr|A0A1D8CYZ1|A0A1D8CYZ1_CHLLM Queuine tRNA-ribosyltran sferase OS=Chlorobaculum limnaeum OX=274537 GN=tgt PE=3 SV=1
MNFSVTAKDSRSAARCGVLSTAHGDIPTPIFMPVGTRASVKSVEPDELKALEAKIILANTYHLYLKPGNDILFKAGGIHRFMNWDGPLLTDSGGYQVYSLTDLRKISEEGVMFKSHLDGSKLHFTPENVVDTQRIIGSDIMMPLDECPPWPAEREYVRKSGELTLRWAERARKHFLSTRPHYGYEQFQFGITQGGTFEDLRAHSSRELVDMDFDGYAVGGMAVGEPAEEMYRMLDLSHTILPESKPRYLMGVGTPSNILNAIERGIDMFDCVIPTREGRNGRVYTRKGTINLRAGKYADDFRPIDEGFDNHVCRNYSRAYIRHLLNVGEILGLKLCTMHNLSFYLWLTSTARQHIQAGTFKDWKEAFLMEFNGNDKN

SEQ ID NO: 53720 - protein, 377 aa, Chlorobaculum parvum
  misc_feature (1)..(377): tr|B3QMN1|B3QMN1_CHLP8 Queuine tRNA-ribosyltransferase OS=Chlorobaculum parvum (strain NCIB 8327) OX=517417 GN =tgt PE=3 SV=1
MKFSVTAKDSSSAARCGVLSTAHGDIPTPIFMPVGTRASVKSVEPDELKALDAKIILANTYHLYLKPGNDILFKAGGVHRFMNWDGPLLTDSGGYQVYSLTDLRKISEEGVMFKSHLDGSKLHFTPENVVDTQRIIGSDIMMPLDECPPWPAEREYVQKSGELTLRWAERARKHFLSTRPHYGHEQFQFGITQGGTFDDLRAHSSRELIGMDFDGYAVGGMAVGEPAEEMYRMLELSHTILPESKPRYLMGVGTPSNILNAIERGVDMFDCVIPTREGRNGRVYTRKGTLNLRSAKYADDFRPIDEGFDNHVCRNYSRAYIRHLLNVGEILGLKLCTMQNLSFYLWLTRTAREHIAAGDFTDWKESFLMEFNRNGNK

SEQ ID NO: 53721 - protein, 377 aa, Chlorobaculum sp.
  misc_feature (1)..(377): tr|A0A4Q1D2K1|A0A4Q1D2K1_9CHLB Queuine tRNA-ribosyltran sferase OS=Chlorobaculum sp. 24CR OX=2508878 GN=tgt PE= 3 SV=1
MEFSVTSKDSRSAARCGVLSTAHGSIPTPIFMPVGTRASVKSIEPDELKALDAKIILANTYHLFLKPGNDILFKAGGVHRFMNWDGPLLTDSGGYQVYSLTDLRKISEEGVMFKSHLDGSKLHFTPENVVDTQRIIGSDIMMPLDECPPWPAERDYVQKSGELTLRWADRARKHFLSTRPHYGCEQFQFGITQGGTFDDLRAHSSRELVKMEFDGYAVGGMAVGEPAEQMYRMLELSHTILPESKPRYLMGVGTPSNILNAIERGIDMFDCVIPTREGRNGRIYTRKGAINLRAAKYADDFRPIDEGFDNHVCRNYSRAYIRHLLNVGEILGLKLCTMQNLSFYLWLTRTAREQIAAGDFTDWKESFLMEFNSNGNK

SEQ ID NO: 53722 - protein, 377 aa, Chlorobaculum tepidum
  misc_feature (1)..(377): tr|Q8KCL8|Q8KCL8_CHLTE Queuine tRNA-ribosyltransferase OS=Chlorobaculum tepidum (strain ATCC 49652 / DSM 12025 / NBRC 103806 / TLS) OX=194439 GN=tgt PE=3 SV=1
MKFSVLSTDRHSAARCGVLSTSHGDIPTPIFMPVGTRASVKSVEPNELKALDAKIILANTYHLYLKPGNDILFKAGGVHRFMNWDGPLLTDSGGYQVYSLTDLRKISEEGVMFKSHLDGSKLHFTPENVVDTQRIIGSDIMMPLDECPPWPAEKEYVQKSGELTLRWAERARKHFLSTRPHYGYEQFQFGITQGGTFDDLRAHSSRALVDMDFDGYAVGGMAVGEPAEEMYRMLELSHTILPESKPRYLMGVGTPANILNAIERGIDMFDCVIPTREGRNGRVYTRKGTINLRAGKYADDFRPIDEGFDNHVCRNYSRAYIRHLLNVGEILGLKLCTMQNLSFYLWLTRTAREHIAAGDFTDWKESFLMEFNSNDKN

SEQ ID NO: 53723 - protein, 377 aa, Chlorobaculum thiosulfatiphilum
  misc_feature (1)..(377): tr|A0A5C4S5Q0|A0A5C4S5Q0_CHLTI Queuine tRNA-ribosyltran sferase OS=Chlorobaculum thiosulfatiphilum OX=115852 GN =tgt PE=3 SV=1
MNFSVTAKDSRSAARCGVLSTAHGDIPTPIFMPVGTRASVKSIEPDELKALDAKIILANTYHLYLKPGNDILFKAGGVHRFMNWDGPLLTDSGGYQVYSLTDLRKISEEGVMFKSHLDGSKLHFTPENVVDTQRIIGSDIMMPLDECPPWPAEREYVRKSGELTLRWAERARNHFLSTRPHYGYEQFQFGITQGGTFDDLRAHSSRMLVEMDFDGYAVGGMAVGEPAEQMYRMLDLSHTILPESKPRYLMGVGTPSNILNAIERGIDMFDCVIPTREGRNGRVYTRKGTINLRAGKYADDFRPIDEGFDNHVCRNYSRAYIRHLLNVGEILGLKLCTMQNLSFYLWLTSTAREHIAAGTFTDWKESFLMEFNSNGNK

SEQ ID NO: 53724 - protein, 378 aa, Chlorobi bacterium
  misc_feature (1)..(378): tr|A0A136NU80|A0A136NU80_9BACT Queuine tRNA-ribosyltran sferase OS=Chlorobi bacterium OLB5 OX=1617412 GN=tgt PE =3 SV=1
MFFKVLSQSGNCKARVSEITTSHGSFQTPIFMPVGTQATVKAIEQRELEEIGAQIILGNTYHLYLRPGTEVLNRAGGLHKFMNWNKPILTDSGGFQVFSLSALRKITDDGAEFRSHLDGSSHMFTPEKVVNIQREIGSDIMMVLDECLENPAAYEKVEESVKLTGRWAKRSREEFMRTEEMYGFKQHQFGIIQGSTYNELRKRSVLELAEMDFEGYAIGGLAVGEANEVMYDIVEFTTEFMPADKPRYLMGVGTPEDLLNAIERGVDMFDCVMPTRNARNATLFTSKGKMRLRNLEHKFNFGSIDEEVSSYTSDNFTPAYLRHLFMCDEMLAAQLATIHNLRFYLNLVEKSREAILEDRFTEFKKNFLEKYNSGINNS

SEQ ID NO: 53725 - protein, 373 aa, Chlorobi bacterium
  misc_feature (1)..(373): tr|A0A4P5UUQ3|A0A4P5UUQ3_9BACT Queuine tRNA-ribosyltran sferase OS=Chlorobi bacterium OX=2268192 GN=tgt PE=3 SV =1
MSFFSLVHSDSESQARAGIITTDHGIIETPIFMPVGTVGSVKAIEQRELSEIGAQIILGNTYHLYLRPGEDVLSYFGGHHRFMSWNKPILTDSGGYQVFSLKELRKITEEGVQFRSHIDGSKHFFSPEKVIDIQRCIGSDIMMVLDECTEFPVSHKEAKTSMDLTLRWASRNKNAFDNSTPRYNHNQFLFGIGQGSTYKDLRRECMESLIDMNFDGYAIGGLAVGEPAFNMYDIIQHSTGIMPADKPRYLMGVGTPENILTAIEMGIDMFDCVMPTRNARNGTIFTTRGRMNIKNLKNKFNDECIDPGLDLYASQNYSLGYLRHLFTVGELLGLQLATMQNLGFYLWLVRTAREKILSNTYRQWKHSILDIIK

SEQ ID NO: 53726 - protein, 377 aa, Chlorobium chlorochromatii
  misc_feature (1)..(377): tr|Q3ASP2|Q3ASP2_CHLCH Queuine tRNA-ribosyltransferase OS=Chlorobium chlorochromatii (strain CaD3) OX=340177 G N=tgt PE=3 SV=1
MKFTLVAEDARSAARCGIVHTAHGDIPTPVFMPVGTRASVKSVEPHELDELQVPIILGNTYHLYLKPGNAIMHKAGGLHRFMNWQKPILTDSGGYQVYSLSELRKISEEGVIFKSHLDGSRLQFTPENVVDTERIIGSDIMMPLDECPPATAERSYVEASGELTIRWAERARQHFSKTAPLYGHEQYLFGITQGGIHADLRTRSTKALVELDFDGYAVGGMAVGEEASEMYRILELSHPLLPIHKPRYLMGVGTPANILNAIERGIDMFDCVIPTREGRNGRVYTRNGTINLRSARYADDFSSIDEGFENEVCRNYSRAYIRHLLNVGEILGLKLCTLQNISFFTWLTKTAQQEIQNGSFVDWKEDFLSRFTHGEKR

SEQ ID NO: 53727 - protein, 377 aa, Chlorobium ferrooxidans
  misc_feature (1)..(377): tr|Q0YP25|Q0YP25_9CHLB Queuine tRNA-ribosyltransferase OS=Chlorobium ferrooxidans DSM 13031 OX=377431 GN=tgt P E=3 SV=1
MKFTLLQTDPRSAARCGVLNTAHGAIPTPVFMPVGTRASVKSVEPHELKENNVHIILANTYHLYLKPGNDIILKAGGVHKFMNWDGPLLTDSGGYQVYSLSELRKISEEGVIFKSHLDGSMQQFTPENVVDTQRIIGSDIMMPLDECPPSMAEKEYIRKSGELTIRWAARAKKAFSSTSPLYGHDQYLFGITQGGIHNDLREVSIKALVDMDFDGYSIGGMAVGEPAPEMYRILELSHTLLPEQKPRYLMGVGTPENILNAIERGVDMFDCVIPTREGRNGRVYTRHGKMNLRSAKYATDFSPIDEGFDNDVCRNYSRAYIRHLLNVGEILGLKICTLQNISFFMWLTATARTHIQQGSFLEWKDDFLKRFNDNDKA

SEQ ID NO: 53728 - protein, 379 aa, Chlorobium limicola
  misc_feature (1)..(379): tr|B3EDL1|B3EDL1_CHLL2 Queuine tRNA-ribosyltransferase OS=Chlorobium limicola (strain DSM 245 / NBRC 103803 / 6330) OX=290315 GN=tgt PE=3 SV=1
MPLQFSVTCTDPHTAARCGVLHTDHGTIPTPVFMPVGTRASVKSVPTGLLAGLNVHIILANTYHLYLKPGNTIIRKAGGVHRFMNWNGPLLTDSGGYQVYSLSDLRKITEEGVTFKSHLDGSKLQFTPENVVDTQRVIGSDIMMPLDECPPSTAERSYIEKSGELTLRWAERARSHFVRTSPLYGHQQYQFGITQGGVHTDLRTISSKALVDLDFDGYAVGGMAVGEPAEAMYRVLELSHNLLPEHKPRYLMGVGTPENILNAIERGIDMFDCVIPTREGRNGRVYTRNGTMNLRSAKFAEDFRPIDEGFDNEISQSYSRAYIRHLLNVGEIFGLTLCTMQNISFFMWLTTTARTNIQNGTFTTWKEEFLRQFNSKQNR

SEQ ID NO: 53729 - protein, 377 aa, Chlorobium phaeobacteroides
  misc_feature (1)..(377): tr|B3EPX6|B3EPX6_CHLPB Queuine tRNA-ribosyltransferase OS=Chlorobium phaeobacteroides (strain BS1) OX=331678 G N=tgt PE=3 SV=1
MNFTVTHKDSGTASRSGILSTDHGDIPTPVFMPVGTRASVKSTEPEELKAQQVHIILANTYHLYLKPGNDIMGKAGGIHAFMNWDRPLLTDSGGYQVYSLSELRTISEEGVRFKSHLDGSMLQFTPENVIETQRLIGSDIMMPLDECPPSSAKKNYVKESGDMTVRWAERAKKHLSATKPHYGHAQALFGITQGGTYADLRTQISRELVDLDFEGYSIGGLAVGEPAEKMYRILELSHTILPENKPRYLMGVGTPENILNAIERGVDMFDCVIPTREARNGRVYTRNGYINLRSARYAEDFTAIDEGFDNHVCRNYSRAYIRHLLNVGELLGLKLCTLHNISFFMWLTRTAREQIINGSFREWKDDFLKTFNAGKQS

SEQ ID NO: 53730 - protein, 377 aa, Chlorobium phaeobacteroides
  misc_feature (1)..(377): tr|A1BH99|A1BH99_CHLPD Queuine tRNA-ribosyltransferase OS=Chlorobium phaeobacteroides (strain DSM 266) OX=2903 17 GN=tgt PE=3 SV=1
MNFTLTATDTKSSARCGVLETSHGTIPTPIFMPVGTRASVKSLEPHELTELGVSIILANTYHLYLRPGNDILRKAGGVHRFMNWNGPLLTDSGGYQVYSLSDLRKITEEGVTFRSHLDGSKQQFTPENVIDTERIIGSDIIMPLDECPPSTADREYVQTSGELTIRWAERAKKRFVSTSPLYGHSQFLFGITQGGIHADLRTISTKALVDLDFDGYAIGGMAVGEPAEAMYRVLELSDMLLPARKPRYLMGVGTPENILNAIERGVDMFDCVIPTREGRNGRVYTRNGTMNLRAAKYAADFRPLDEGFDNEVCRNFSRAYIRHLLNVGEILGLKLCTMQNISFYLWLTTTAREQIQNGTFTEWKNDFLSRFNSNEKT

SEQ ID NO: 53731 - protein, 375 aa, Chlorobium phaeovibrioides
  misc_feature (1)..(375): tr|A4SFH6|A4SFH6_CHLPM Queuine tRNA-ribosyltransferase OS=Chlorobium phaeovibrioides (strain DSM 265 / 1930) O X=290318 GN=tgt PE=3 SV=1
MNFRLLHTDTNTAARCAELYTDHGTIPTPVFMPVGTRASVKSVEPHELKEQQAHIILANTYHLYLKPGNAIMEKAGGVHRFMNWQGPLLTDSGGYQVYSLSELRKITEEGVTFKSHLDGSMLQFTPENVVDTQRIIGSDILMPLDECPSSTAEREYIRKSGEMTIRWAERAKQHFSLTRPLYGHGQMLFGITQGGTHADLRTISAKALVDLDFDGYATGGMAVGEPAEEMYRILELSHTLLPEHKPRYLMGVGTPENILNAIERGVDMFDCVIPTREGRNGRVYTRHGKMNLRSAKYSEDFSSIDEGFDNDVCRNYSRAYIRHLLNVGEILGLKLCTLQNISFFMWLTRTARTQIQNGSFREWKESFLEQYKRND

SEQ ID NO: 53732 - protein, 375 aa, Chlorobium phaeovibrioides; identical to SEQ ID NO: 53731
  misc_feature (1)..(375): tr|A0A3S0NAT8|A0A3S0NAT8_CHLPH Queuine tRNA-ribosyltran sferase OS=Chlorobium phaeovibrioides OX=1094 GN=tgt PE =3 SV=1

SEQ ID NO: 53733 - protein, 376 aa, Chlorobium sp.
  misc_feature (1)..(376): tr|A0A4R0QLY6|A0A4R0QLY6_9CHLB Queuine tRNA-ribosyltran sferase OS=Chlorobium sp. N1 OX=2491138 GN=tgt PE=3 SV= 1
MSFRLETTDPRSAARTGTLSTGHGEIRTPVFMPVGTRASVKSVEPHELLEQEAQIILANTYHLYLKPGNHIIAKAGGVHRFMDWQGPLLTDSGGYQVYSLSELRKITEEGVAFKSHLDGSMLQFTPENVVDTQRIIGSDIMMPLDECPSATAEREYIRKSGELTIRWAERARRRFLQTEPLYGHPQMLFAITQGGTHADLRTISAKALVELDFEGYAIGGMAVGEPAEEMYRILELSHTMLPEHKPRYLMGVGTPENILNAIERGVDMFDCVIPTREGRNGRVYTRKGKMNLRSAKYAEDFRPLDEGFESHVSGHYSRAYIRHLLNVGEILGLKLCTLQNIAFFMWLTRTARQEIEKGSFLEWKAAVLEEFNRGEA

SEQ ID NO: 53734 - protein, 374 aa, Chlorobium sp.
  misc_feature (1)..(374): tr|A0A533TE55|A0A533TE55_CHLSQ Queuine tRNA-ribosyltran sferase OS=Chlorobium sp. OX=1095 GN=tgt PE=3 SV=1
MKFTLTRQDSRTAARCGVLQTDHGTIPTPIFMPVGTRASVKSVEPHELRELNVHIILANTYHLYLRPGNDIIMKAGGIHRFMNWQGPLLTDSGGYQVYSLSDLRKISEEGVMFKSHLDGSKQHFTPENVVDTERIIGSDIMMPLDECPPSTAEKEYVRISGELTIRWAERARNHFSKTSPLYGHKQYLFGITQGGVHADLRSISSKALVDLDFDGYAIGGMAVGEPAAEMYRILELSHTLLPEEKPRYLMGVGTPENILNAIERGVDLFDCVIPTREGRNGRVYTRHGKMNLRSAKYSEDFSSIDEGFDNEVCRNYSRAYIRHLLNVEEILGLKLCTLHNISFFMWLTATARTEIQNGSFLEWKTDFLDQFNRQ

SEQ ID NO: 53735 - protein, 373 aa, Chloroflexi bacterium
  misc_feature (1)..(373): tr|A0A1F8TBI6|A0A1F8TBI6_9CHLR Queuine tRNA-ribosyltran sferase OS=Chloroflexi bacterium RBG_19FT_COMBO_62_14 O X=1797671 GN=tgt PE=3 SV=1
MTAFGWSLAGTDGRGRAGTFHTSHGDVCTPVFAPVGTQGTVKALTPDQLESLGAGLILANTYHLYLRPGHQVIARLGGLHGFMGWNGPILTDSGGYQVFSLADRRDVDGDGVTFRSHLDGTEHRLTPEKAIAIQEDLGADIIMALDECPVPNDRDAVEGAVIRTHNWAERCLEAHTRTDQALFGIVQGGIFPDLRTDSAEFIAGLDFPGNAIGGLSVGESKPETLAVLELLDQTLPEDRPRYLMGVGSPEDLVEGVVRGVDIFDCVLPTRMARNHAALTRQGRLNLRRAEYIEDTRPIDPACDCYTCLKFTRAYLRHLSVSGEMLAATLLSIHNLHALVHLMDDLRQAILELRLNAFAEEFRDGYQKHRDPEA

SEQ ID NO: 53736 - protein, 376 aa, Chloroflexi bacterium
  misc_feature (1)..(376): tr|A0A2N2M9W3|A0A2N2M9W3_9CHLR Queuine tRNA-ribosyltran sferase OS=Chloroflexi bacterium HGW-Chloroflexi-7 OX=2 013730 GN=tgt PE=3 SV=1
MTTSPFTYDIIATEKNARAGVFHTPHGDLLTPVFAPVGTQATVKSITPAQLKDTGASLVLSNTYHLYLRPGADLVAEMGGLHEFMQWPNPMLTDSGGFQVFSLSDTRKVDEEGVTFKSHIDGSSHRFTPESAIKVQEQLGADIIMAFDECATPNDLAYNKRAVVRTHNWLKRCVAAKTRSDQALFGIVQGGVFADLRRESAEFVSSMDLPGIAIGGLSVGETKTEMHAMLDVLHPILPANKPRYLMGVGSPEDLVNGVMRGVDIFDCVLPTRLARHQSAFTPTGRINLMNAGFAHDKLPIDQTCNCYACKNFTRAYIRHLVVAKEMLASTLISIHNISFLINLMNNIRAAIKAGNFELFAADFLRSYKTNIKQEPS

SEQ ID NO: 53737 - protein, 403 aa, Chloroflexus aggregans
  misc_feature (1)..(403): tr|B8GAI9|B8GAI9_CHLAD Queuine tRNA-ribosyltransferase OS=Chloroflexus aggregans (strain MD-66 / DSM 9485) OX= 326427 GN=tgt PE=3 SV=1
MTHFTITARDPHSRARTGRLRTAHGEVETPVFMPVGTRATVKSLSPHELREHGASIILGNTYHLYLQPGHELIARHGGLHGFMSWNGPILTDSGGFQVFSLVYGGIADEVKGRRPAHPTRLADMVTVTEEAVIFKSYLDGSRHVFTPERSIEVQHHLGADIIVCFDELPPFRAGYDYTAQSMARTHRWAERCLVAHQRRNRAALPNPDQLLFGIVHGGIFADLRRASAEFISSMPFDGLCIGGSLGANKAQMYEVVDMTVPYLPDGMARHLLGVGDVDDLLEGVARGIDMFDCVSPTRLGRHGAALIRNRERNWRLNVTNATLRDDPGPLQAGCPCYTCRHFSRAYIHHLYRSKELLGIRLVSLHNVAFLLNLMAEVRAAIAANRFGELYYEWLGKPLPDITP

SEQ ID NO: 53738 - protein, 372 aa, Chloroflexus aggregans
  misc_feature (1)..(372): tr|B8G769|B8G769_CHLAD tRNA-guanine transglycosylase, v arious specificities OS=Chloroflexus aggregans (strain MD-66 / DSM 9485) OX=326427 GN=Cagg_1116 PE=4 SV=1
MVKTLLVHHGQLTLPVFLPDATFGTVRSVDSRDVAEAGITALVMNVFHLMQRPGSSTIHALGGLHRMAAWNGPIVTDSGGFQAYSLIRSNPKQGKISDQGLVFQPEGAERPFHLTPEKSIQLQLSYGADIVICLDDCTHVDDPPAEQRRSVERTVRWAKRCRAEFDRQLAQRRPSGPPPLLFAVVQGGGDLRLRAECAAALLEIGFDGFGFGGWPLDAQGNLLHEILAFTRAQIPSHYPMHALGVGHPANVVACARMGYEMFDSALPTRDARQGRLLAFTTDPHHPSFRLEGEWFTYVYLADRKHIKADHPISPGCTCFTCRHYSLGYLHHLHKIGETLVLRLATIHNLHFMAQLMALIRRERYEEDGHGAN

SEQ ID NO: 53739 - protein, 405 aa, Chloroflexus aurantiacus
  misc_feature (1)..(405): tr|A9WBV8|A9WBV8_CHLAA Queuine tRNA-ribosyltransferase OS=Chloroflexus aurantiacus (strain ATCC 29366 / DSM 63 5 / J-10-fl) OX=324602 GN=tgt PE=3 SV=1
MAPFTITARDPESRARAGLLQTAHGTVATPVFMPVGTRATVKSLTPHELRDHGASIILGNTYHLYLQPGHELIARHGGLHSFMGWNGPILTDSGGFQVFSLVYGGIADEVKGRRPAHPTRLNDMVTVTEEAVIFKSYLDGSRHVFTPERSIEVQHHLGADIIVCFDELPPFRAGYDYTAQSMARTHRWAERCLIAHQRRDRSALPNPDQLLFGIVHGGIFPDLRRASACYISDMAFDGLCIGGSLGANKTQMYEVVDMTVPYLPDGMARHLLGVGDVDDLLEGVARGIDMFDCVSPTRLGRHGAALIRNRERNWRLNVTNAALRDDRQPLQEGCPCYTCRHFSRAYIHHLYRSKELLGIRLVSLHNVAFLLNLMADIRSALAAGRFGELYTEWLGKPLPVLPSPE

SEQ ID NO: 53740 - protein, 370 aa, Chloroflexus aurantiacus
  misc_feature (1)..(370): tr|A9WEM6|A9WEM6_CHLAA tRNA-guanine transglycosylase OS =Chloroflexus aurantiacus (strain ATCC 29366 / DSM 635 / J-10-fl) OX=324602 GN=Caur_2844 PE=4 SV=1
MTDFLTLQHGQLSLPTFLPDATFGTVRAVDSRDLSEAGIRALVMNVFHLMQRPGSSTITALGGLHQMTAWSGPIVTDSGGFQAYSLIRNNSKQGRITDQGLTFQPEGAERRFQLTPEKSIQLQLSYGADIVICLDDCTHVDDPPAEQRRSVERTIRWARRCRQEFDRQVAQRRRQGPPPLLFAVVQGGGDLHLRAECAAALLDIGFDGFGFGGWPLDAQGQLLDEVLAFTRDQIPARFPMHALGVGHPASVVACARMGYDIFDSALPTRDARQGRLLAFTADPQRPGFQLRGDWFTYVYLADRKHVKADTPISPGCQCFTCSRYSLGYLHHLHKLGETLVLRLATIHNLHFMAQLMELIRHERRGSQAND

SEQ ID NO: 53741 - protein, 403 aa, Chloroflexus islandicus
  misc_feature (1)..(403): tr|A0A178M9Q8|A0A178M9Q8_9CHLR Queuine tRNA-ribosyltran sferase OS=Chloroflexus islandicus OX=1707952 GN=tgt PE =3 SV=1
MSHFTITARDPDSRARAGVLQTAHGAVATPVFMPVGTRATVKSLSPHELRDHGASIILGNTYHLYLQPGHELIARHGGLHGFMSWDGPILTDSGGFQVFSLVYGGIADEVKGRRPAHPSRLSDMVTVTEEAVIFKSYLDGSRHVFTPERSIEVQHHLGADVIVCFDELPPFRAGYDYTAQSMARTHRWAERCLTAHQQRNRAALPNPDQLLFGIVHGGIFPDLRRASAEVISRMGFDGLCIGGSLGANKEQMYEVVDMTVPYLPDGMARHLLGVGDVDDLLEGVARGIDMFDCVSPTRLGRHGAALVRNRERNWRLNVTNASLRDDPGPLQAGCTCYTCRHFSRAYIHHLYRSKELLGIRLVSLHNVAFLLNLMADVRAALAAGRFGELYEEWLGKPLISVTR

SEQ ID NO: 53742 - protein, 376 aa, Chlorogloea sp.
  misc_feature (1)..(376): tr|A0A2T1EJN4|A0A2T1EJN4_9CHRO Queuine tRNA-ribosyltran sferase OS=Chlorogloea sp. CCALA 695 OX=2107693 GN=tgt PE=3 SV=1
MSEFSYQVLAKCSQTQARVGIFSTPHGIVETPRFMPVGTLANVKTLTPMQLEATGAQMVLSNTYHLHLQPGESIVGKAGGLHSFMNWQKPILTDSGGFQVFSLSQMRKISEAGVIFRSPHGGDIINFTPEFSIQVQNILGADVIMAFDECPPYPATKEEIAAATNRTNRWLERCIVAHERPDQALFGIVQGGVHLDLRAAAAQALAAYDLPGYAIGGVSVGEPPELIAKIVAATTPMLPVNKPRYLMGVGTYREMAQAIASGIDLFDCVIPTRLARHGAALVQGDRWNLKNAQFREDFTPLDSTCPCYTCQNFTRAYLSHLVRSQEILAYTLLSIHNVTELIGFTQKIRDSILANRFTTDFQHWLNPQIDESLLNE

SEQ ID NO: 53743 - protein, 354 aa, Chlorogloeopsis fritschii
  misc_feature (1)..(354): tr|A0A3S0Y2K4|A0A3S0Y2K4_CHLFR Queuine tRNA-ribosyltran sferase OS=Chlorogloeopsis fritschii PCC 6912 OX=211165 GN=tgt PE=3 SV=1
MFFTPHGLVETPRFMPVGTLANVKTLTPAQLRDTGAQMVLSNTYHLHLQPGEAIVAGGGGLHKFMGWNGPMLTDSGGFQVFSLSEMRKITEEGVTFRSPHDGQIIKLTPEKSIEIQNTLGADVIMAFDECPPATASRQEVEQATERTYRWLERCIAAHQRDDQALFGIVQGGVYLDLRCQATEALTKLDLPGYAIGGVSVGEEPELIHKIVQATAPLLPNHKPRYLMGVGTYREMVMAIASGVDLFDCVIPTRWARHGTAMVQGDRWNLKNAKFREDFTPLDETCPCYTCQNFTRAYISHLVRSQEILAYTLLSIHNITELIRFTQKIREAILRDTFATEFAHWLAPQEVGEGE

SEQ ID NO: 53744 - protein, 380 aa, Chloroherpeton thalassium
  misc_feature (1)..(380): tr|B3QU33|B3QU33_CHLT3 Queuine tRNA-ribosyltransferase OS=Chloroherpeton thalassium (strain ATCC 35110 / GB-78 ) OX=517418 GN=tgt PE=3 SV=1
MNFTLQGVDSQTAARAGVLETAHGTIETPIYMPVGTRASVKAIEQRELLELDAQIILGNTYHLYLKPGTAILQNAGGLHKFMNWPRPILTDSGGFQVFSLSELREISEEGATFKSHIDGTRHLFSPENVIDTQRLIGSDIMMAFDECPPHDADPDYLRKSHELTLRWAARCQNQFAKTSGVYGYEQSLFAITQGGTNEMLRAESTKRLVEMDFEGYAIGGLAVGEPAEEMYRMIEVSHPLLPANKPRYLMGVGTPENILNAIERGVDMFDCVIPTREGRNGRIYTRTGILNLRAAKYRDDFRPIDEGFDNYVCKNFSRAYIRHLLNVGEILGLQLCSLHNTSFFIWLTKTARAHILKGDFQTWKAEFFARYCHEQESDKR

SEQ ID NO: 53745 - protein, 370 aa, Chondrocystis sp.
  misc_feature (1)..(370): tr|A0A1Z4RL54|A0A1Z4RL54_9CHRO Queuine tRNA-ribosyltran sferase OS=Chondrocystis sp. NIES-4102 OX=2005460 GN=tg t PE=3 SV=1
MGFSFECQAVCNHTQARAGIFNTPHGIVETPRFMPVGTLATVKGIIPQQLEVAKAQMILANTYHLHLQPGEDIVREAGGLHSFMAWKQPILTDSGGFQVFSLSKLRKITETGVTFKSPRDGSIIEITPERSIQIQNALGADVIMAFDECPPADATKEQIQAATDRSYRWLQRCIEAHQNPQKQALFGIVQGGIHLDLRTRAVEQLVELNLPGYAIGGVSVGESPELINATVKHTAPLLPVNKPRYLMGVGTYREMAQAIAHGIDLFDCVIPTRLGRHGTALVQGHRINIKNAQYKRDYQPLDPTCSCYACQNFSRAYLNHMVRSREMLGYIMLSLHNITELIRFTQQIRQAIFNNTFAQEFSMWLMDASF

SEQ ID NO: 53746 - protein, 372 aa, Chondromyces apiculatus
  misc_feature (1)..(372): tr|A0A017T059|A0A017T059_9DELT Queuine tRNA-ribosyltran sferase OS=Chondromyces apiculatus DSM 436 OX=1192034 G N=tgt PE=3 SV=1
MHSPGYSFRETSRDGNARTGLLVTPHGEVETPTFMPVGTQGSVKTLSPTEVAATGARIVLGNTYHLWIRPGPDIIARAGGLHKFASWPHVMLTDSGGFQAFSLADRRTMTEDGFVFRSHIDGSRLALSPEVAMEVQGKIGADIAMQLDVCPPGMSARPELERACATTTRWARRCLAAKRPDQALFGIVQGGTDVALRKAHAEELAAMPFDGLALGGFSVGEPIERMHEVLGEVAPTLDRARPHYLMGVGTPSDLVRAIGTGVDMFDCVLPTRNARNGQALTQRGRIVIKQARYKEDFTPLDPTCSCPACTGGYTRAYLRHLYLAGEILVLRLITEHNLHLYGRLVREAREAIAAGRYASFARAWLGSDGDEP

SEQ ID NO: 53747 - protein, 374 aa, Chondromyces crocatus
  misc_feature (1)..(374): tr|A0A0K1ENX5|A0A0K1ENX5_CHOCO Queuine tRNA-ribosyltran sferase OS=Chondromyces crocatus OX=52 GN=tgt PE=3 SV=1
MAISTFGFEFRQTAQDGAARTGVLTTPHGEVETPTFMPVGTQGSVKTLTPEEVAATGARIVLGNTYHLWLRPGPEVIDKIGGLHKFTCWPHAMLTDSGGFQAFSLADRRTVSEEGFVFRSHLDGSRRVLTPEVAMQVQGALGADIAMQLDICPPGTASPREMDEACAVTTRWARRCLSAKRPDQALFGIVQGGTDVRRRLAHADELAAMSFDGLALGGFSVGEPIEKMHEVLAEVAPRLDASRPRYLMGVGTPTDLVRAIGAGVDMFDCVLPTRNARNGQALTKQGRIVIKQARYKEDFSPLDPGCECPTCTQGYSRAYLRHLFMAGEVVVLRMLTEHNLHLYGRLVREARAAIAAGRYAAFARSWLTKDVADS

SEQ ID NO: 53748 - protein, 369 aa, Christensenella minuta
  misc_feature (1)..(369): tr|A0A136Q6B5|A0A136Q6B5_9FIRM Queuine tRNA-ribosyltran sferase OS=Christensenella minuta OX=626937 GN=tgt PE=3 SV=1
MNFSFQVEKKDGGSKARAGRLATPHGEIKTPVFMPVGTQATVKAMTNDQVLRAGAQIILGNTYHLYMRPGHELIREAGGLHRFMNWKKPILTDSGGFQVFSLGDLRKLTEEGVEFQSHLDGSRHMFTPEKAVEIEEALGSDIMMVLDECTPYPADFDYTKHSMERTHRWAKRCKEAQTRDDQALFGIVQGGMYPDLRKKSAEEIARLDFIGNAIGGLSVGEPKPVMYEMLDVVTDTLPEEKPRYLMGVGTADCLVEGVARGVDMFDCVLQTRIARNGTALVRNGKLVIRNAEYAKDFRPIDEACDCYACRNHTRAYIRHLIKTGEILGAILLSIHNTRFTIRLMEEIRGHIEAGTFGEFRRGFMEDFRI

SEQ ID NO: 53749 - protein, 98 aa, Chromatiaceae bacterium
  misc_feature (1)..(98): tr|A0A3D4RS44|A0A3D4RS44_9GAMM tRNA guanosine(34) trans glycosylase Tgt (Fragment) OS=Chromatiaceae bacterium O X=2049432 GN=tgt PE=4 SV=1
NARNGHLFTHTGTVRIRNAEHKTSTDSLDPHCNCYTCRNYSRAYLHHLDKCNEILGARLNTIHNLTYYQTLMSGMRDAIAAGALHQFVADFFARRIVS

SEQ ID NO: 53750 - protein, 371 aa, Chromatiales bacterium
  misc_feature (1)..(371): tr|A0A257SVZ1|A0A257SVZ1_9GAMM Queuine tRNA-ribosyltran sferase OS=Chromatiales bacterium 21-64-14 OX=1970504 G N=tgt PE=3 SV=1
MNFDILATDGTARHGRMVFPRGAVATPAFMPVGTRGTVKAMTPDEVRGLGYELILGNTFHLMLRPGLEVIRAHGGLHGFMNWSAPILTDSGGYQVFSLAKMRRISEQGVTFRSPEDGATVFLGPEESMAVQRALDADVVMAFDECTPYPATPQQARESMELSARWALRSRRAHADNPAALFGIVQGGMYPELREASLSTLTEIGFDGYALGGLSVGEPKAERLGVLEYTVPRMPATAPRYLMGVGTPEDIVDAVCRGIDLFDCVLPTRNARNGFLFVGQGTLRIRNARYRNDLRPPDEACGCYTCRNYSRAYLRHLDQCNEILGARLNTIHNLYYYQGLLQGLREAIAAGRLAAFVRDFYAGRVQAAESVA

SEQ ID NO: 53751 - protein, 375 aa, Chromatiales bacterium
  misc_feature (1)..(375): tr|A0A524KIS9|A0A524KIS9_9GAMM Queuine tRNA-ribosyltran sferase OS=Chromatiales bacterium OX=2026725 GN=tgt PE= 3 SV=1
MRFEVSATDGAARCGRLTLAHGTVETPVFMPVGTYGTVKAMTPEDLVGLGAEIILGNTFHLMLRPGGEVVQSLGGLHGFMHWRKPILTDSGGFQVWSLETRSKVSEDGVEFRAPTDGSLVFLSPERAMEVQAQLGSDIQMIFDECTTYPATEAQARASMELSLRWAKRSRAAFDAGPAPARGSAVFGIVQGGMHGNLRSESLAGLVDIGFDGLAIGGLSVGEPEVDRLRILEHTLPRMPAAQPRYLMGVGTPSDIVQAVLRGVDMFDCVMPTRNARNGSLFVADGVVRIRNARYRDDPRPIEEGCECYTCRNYSRAYLRHLDQCGEMLGSHLNTIHNLHFYMQLMGNLRRSIGLGTLRGFAGDFLARQQSGASVP

SEQ ID NO: 53752 - protein, 372 aa, Chromatium okenii
  misc_feature (1)..(372): tr|A0A2S7XNI2|A0A2S7XNI2_9GAMM Queuine tRNA-ribosyltran sferase OS=Chromatium okenii OX=61644 GN=tgt PE=3 SV=1
MEFKLFNQDGLARRGQLQFERGTVETPAFMPVGTYGTVKAMTPEELRDVGAEIILGNTFHLMLRPGTEVIRHCGDLHRFMHWERPILTDSGGFQVFSLGALRKITEAGVHFQSPIDGSPVFLSPEVSMQVQRDLGADIVMIFDECTPYPATETQARASMELSLRWAARSRAAHGDNSAALFGIVQGGMHPQLRAESLAGLTQIGFDGYAIGGLSVGEPEAERLQVLDFLADKLPIDRPRYLMGVGTPEDLVAAVQRGIDMFDCVMPTRNARNGHLFTHQGTVKIRNAIHRSDNSPIDPLCDCETCRHYSRAYLHHLDKCKEILGARLATIHNLRYYQTLMRGLRDAIAAGQLAAFIQEFKRLRSQSANDHDA

SEQ ID NO: 53753 - protein, 367 aa, Chromatocurvus halotolerans
  misc_feature (1)..(367): tr|A0A4R2L061|A0A4R2L061_9GAMM Queuine tRNA-ribosyltran sferase OS=Chromatocurvus halotolerans OX=1132028 GN=tg t PE=3 SV=1
MRFEHLCSDGSARRGRLTFPRGVVETPAFMPVGTYGTVKGMLPRDVVATGAQMILGNTFHLWLRPGTEIIAAHGDLHDFMQWQGPILTDSGGFQVFSLGKMRRITEEGVSFRSPVDGAKVFLDPKTSMSIQRALGSDVVMIFDECTPYPATESEARVSMELSLRWAARSRAAHGDSAAALFGIVQGGMYPALRAESLQGLVDIGFDGYAVGGLSVGEPKDDMLMVLDAMQDALPADKPRYLMGVGTPADLIEGARRGIDMFDCVMPTRNARNGHLFTSRGIVKIRNARHKTSTQPLDDSCGCYTCSHFTRAYLHHLERCNEILGAQLNTLHNLHYYQRHMQGIRAAIERGALDEFARAYHASQGGDA

SEQ ID NO: 53754 - protein, 367 aa, Chromatocurvus sp.
  misc_feature (1)..(367): tr|A0A2N5XYT2|A0A2N5XYT2_9GAMM Queuine tRNA-ribosyltran sferase OS=Chromatocurvus sp. F02 OX=1905677 GN=tgt PE= 3 SV=1
MTFERTASDGAARRGRLQFPRGSVETPAFMPVGTYGTVKGMLPRDIRAIGAEIILGNTFHLWLRPGTDIIERHGDLHDFMGWDGPILTDSGGFQVFSLGAMRKITEQGVKFRSPVDGAPVFLDPETSMAIQRSLGSDIVMIFDECTPYPATEPEARASMELSLRWAARSKAAHGNSPSALFGIVQGGMYQGLREQSLAGLEAIGFDGYAIGGLSVGEPKDEMVAVLDGLQPLLPEHKPRYLMGVGTPADLLEGVRRGIDMFDCVMPTRNARNGFIFTSRGILKLRNARHKTSTLPLDERCDCYTCENFSRAYLHHLDKCNEILGSQLNTIHNLRFYQNHMAGIRMAIEQGRLEAFAADFHSAQAEGV

SEQ ID NO: 53755 - protein, 371 aa, Chromobacterium amazonense
  misc_feature (1)..(371): tr|A0A1S1X721|A0A1S1X721_9NEIS Queuine tRNA-ribosyltran sferase OS=Chromobacterium amazonense OX=1382803 GN=tgt PE=3 SV=1
MLKFTVHKTSGGARRGTLELNHGTVETPVFQPVGTYGSVKAMSPVELNDIGAQIILGNTFHLWLRPGLEIVEQFGGLHEFIGWDKPILTDSGGFQVFSLSDMRKLTEEGCTFQSPINGDKLFLSPEISMKIQTVLNSDIVMQLDECTPGQVDHATAQKSLQMSLRWAERSRRAFNDLNNPNALFGIVQGNLYTDLRQESLEGLMQIGFDGIAIGGLSVGEPKPEMYRMLTELKDMLPADKPHYLMGVGTPEDLVHGVANGVDMFDCVMPTRNARNGWIFTQWGDVKIKNARYKDDKKPLDEECGCYACRNFSRAYLHHLHRVGEILGARLNTIHNLYYYQELMRQMRQAIEEDRFEDFRLEFAAKRARGVN

SEQ ID NO: 53756 - protein, 371 aa, Chromobacterium haemolyticum
  misc_feature (1)..(371): tr|A0A2T5NU15|A0A2T5NU15_9NEIS Queuine tRNA-ribosyltran sferase OS=Chromobacterium haemolyticum OX=394935 GN=tg t PE=3 SV=1
MLKFTVHKTSGGARRGTLELNHGTVETPVFQPVGTYGSVKAMSPVELNDIGAQIILGNTFHLWLRPGLEIVEQFGGLHEFIGWDKPILTDSGGFQVFSLSDMRKLTEEGCTFQSPINGDKLFLSPEISMKIQTVLNSDIVMQLDECTPGQVDHATAQKSLQMSLRWAERSRRAFDDLKNPNALFGIVQGNLYTDLRQESLEGLMQVGFDGIAIGGLSVGEPKPEMYRMLTELKDMLPAEKPHYLMGVGTPEDLVHGVANGVDMFDCVMPTRNARNGWIFTQWGDVKIKNARYKDDKRPLDEECECYACRNFSRAYLHHLHRVGEILGARLNTIHNLHYYQELMRQMRRAIEEDRFEDFRLEFAAKRARGVN

SEQ ID NO: 53757 - protein, 371 aa, Chromobacterium haemolyticum
  misc_feature (1)..(371): tr|A0A1W0D4E6|A0A1W0D4E6_9NEIS Queuine tRNA-ribosyltran sferase OS=Chromobacterium haemolyticum OX=394935 GN=tg t PE=3 SV=1
MLKFTVHKTSGGARRGTLELNHGTVETPVFQPVGTYGSVKAMSPVELNDIGAQIILGNTFHLWLRPGLEIVEQFGGLHEFIGWDKPILTDSGGFQVFSLSDMRKLTEEGCTFQSPINGDKLFLSPEISMKIQTVLNSDIVMQLDECTPGQVDHATAQKSLQMSLRWAERSRRTFDDLKNPNALFGIVQGNLYTDLRQESLEGLMQVGFDGIAIGGLSVGEPKPEMYRMLTELKDMLPAEKPHYLMGVGTPEDLVHGVANGVDMFDCVMPTRNARNGWIFTQWGDVKIKNARYKDDKRPLDEECECYACRNFSRAYLHHLHRVGEILGARLNTIHNLHYYQELMRQMRRAIEEDRFEDFRLEFAAKRARGVN

SEQ ID NO: 53758 - protein, 371 aa, Chromobacterium sp.
  misc_feature (1)..(371): tr|A0A2K4MNG4|A0A2K4MNG4_9NEIS Queuine tRNA-ribosyltran sferase OS=Chromobacterium sp. MWU13-2610 OX=2077146 GN =tgt PE=3 SV=1
MLKFTVHKTSGGARRGTLELNHGTVETPVFQPVGTYGSVKAMSPVELNDIGAQIILGNTFHLWLRPGLEIVEQFGGLHEFIGWDKPILTDSGGFQVFSLSDMRKLTEEGCTFQSPINGDKLFLSPEISMKIQTVLNSDIVMQLDECTPGQVDHATAQKSLQMSLRWAERSRRAFDDLKNPNALFGIVQGNLYTDLRRESLEGLMQIGFDGIAIGGLSVGEPKPEMYRMLTELKDMLPAEKPHYLMGVGTPEDLVHGVANGVDMFDCVMPTRNARNGWIFTQWGDVKIKNARYKDDKKPLDEECACYACRNFSRAYLHHLHRVGEILGARLNTIHNLYYYQELMRQMRQAIEEDRFEDFRLEFAAKRARGVN

SEQ ID NO: 53759 - protein, 371 aa, Chromobacterium sp.
  misc_feature (1)..(371): tr|A0A2S5DKT4|A0A2S5DKT4_9NEIS Queuine tRNA-ribosyltran sferase OS=Chromobacterium sp. MWU14-2602 OX=2073169 GN =tgt PE=3 SV=1
MLKFTVHKTSGGARRGTLELNHGTVETPVFQPVGTYGSVKAMSPVELNDIGAQIILGNTFHLWLRPGLEIVEQFGGLHEFIGWDKPILTDSGGFQVFSLSDMRKLTEEGCTFQSPINGDKLFLSPEISMKIQTVLNSDIVMQLDECTPGQVDHATAQKSLQMSLRWAERSRRAFDDLKNPNALFGIVQGNLYTDLRQESLEGLMQVGFDGIAIGGLSVGEPKPEMYRMLTELKDMLPAEKPHYLMGVGTPEDLVHGVANGVDMFDCVMPTRNARNGWIFTQWGDVKIKNARYKDDKKPLDEECACYACRNFSRAYLHHLHRVGEILGARLNTIHNLHYYQELMREMRKAIEDDRFEDFRLEFAAKRARGVN

SEQ ID NO: 53760 - protein, 371 aa, Chromobacterium sphagni
  misc_feature (1)..(371): tr|A0A1S1X479|A0A1S1X479_9NEIS Queuine tRNA-ribosyltran sferase OS=Chromobacterium sphagni OX=1903179 GN=tgt PE =3 SV=1
MLKFTVHKTSGGARRGTLELNHGTVETPVFQPVGTYGSVKAMSPVELKDIGAEIILGNTFHLWLRPGLEIVEQFGGLHEFIGWDRPILTDSGGFQVFSLSDMRKLTEEGCTFQSPINGDKLFLSPEISMKIQTVLNSDIVMQLDECTPGQVDHATAQKSLQMSLRWAERSRRAFDDLNNPNALFGIVQGNLYTDLRQESLEGLMQVGFDGIAIGGLSVGEPKPEMYRMLTELKDMLPADKPHYLMGVGTPEDLVHGVANGVDMFDCVMPTRNARNGWIFTQWGDVKIKNARYKDDKKPLDEACECYTCKNFSRAYLHHLHRVGEILGARLNTIHNLFYYQELMRQVRKSIEDDRFEDFRLAFAANRARGVN

SEQ ID NO: 53761 - protein, 371 aa, Chromobacterium vaccinii
  misc_feature (1)..(371): tr|A0A2L2B9Z0|A0A2L2B9Z0_9NEIS Queuine tRNA-ribosyltran sferase OS=Chromobacterium vaccinii OX=1108595 GN=tgt P E=3 SV=1
MLKFTVHKTSGGARRGTLELNHGTVETPVFQPVGTYGSVKAMSPVELNDIGAQIILGNTFHLWLRPGLEIVEQFGGLHEFIGWDKPILTDSGGFQVFSLSDMRKLTEEGCTFQSPINGDKLFLSPEISMKIQTVLNSDIVMQLDECTPGQVDHATAQKSLQMSLRWAERSRRAFDDLKNPNALFGIVQGNLYTDLRQESLEGLMQVGFDGIAIGGLSVGEPKPEMYRMLTELKDMLPADKPHYLMGVGTPEDLVHGVANGVDMFDCVMPTRNARNGWIFTQWGDVKIKNARYKDDKKPLDEECACYACRNFSRAYLHHLHRVGEILGARLNTIHNLHYYQELMREIRKAIEEDRFEDFRLEFAAKRARGVN

SEQ ID NO: 53762 - protein, 371 aa, Chromobacterium vaccinii
  misc_feature (1)..(371): tr|A0A1D9LL77|A0A1D9LL77_9NEIS Queuine tRNA-ribosyltran sferase OS=Chromobacterium vaccinii OX=1108595 GN=tgt P E=3 SV=1
MLKFTVHKTSGGARRGTLELNHGTVETPVFQPVGTYGSVKAMSPVELNDIGAEIILGNTFHLWLRPGLEIVEQFGGLHEFIGWDKPILTDSGGFQVFSLSDMRKLTEEGCTFQSPINGDKLFLSPEISMKIQTVLNSDIVMQLDECTPGQVDHATAQKSLQMSLRWAERSRRAFDDLKNPNALFGIVQGNLYTDLRQESLEGLMQVGFDGIAIGGLSVGEPKPEMYRMLTELKDMLPAEKPHYLMGVGTPEDLVHGVANGVDMFDCVMPTRNARNGWIFTQWGDVKIKNARYKDDKKPLDEECACYACRNFSRAYLHHLHRVGEILGARLNTIHNLHYYQELMREIRKAIEEDRFEDFRLEFAAKRARGVN

SEQ ID NO: 53763 - protein, 371 aa, Chromobacterium violaceum
  misc_feature (1)..(371): sp|Q7NYC7|TGT_CHRVO Queuine tRNA-ribosyltransferase OS= Chromobacterium violaceum (strain ATCC 12472 / DSM 3019 1 / JCM 1249 / NBRC 12614 / NCIMB 9131 / NCTC 9757) OX= 243365 GN=tgt PE=3 SV=1
MLKFTVHKTSGGARRGTLELNHGTVETPVFQPVGTYGSVKAMSPVELNDIGAQIILGNTFHLWLRPGLEIVEQFGGLHEFIGWDKPILTDSGGFQVFSLSDMRKLTEEGCTFQSPINGDKLFLSPEISMKIQTVLNSDIVMQLDECTPGQVDHATAQKSLQMSLRWAERSRRAFDDLKNPNALFGIVQGNLYTDLRQESLEGLMQVGFDGIAIGGLSVGEPKPEMYRMLTELKDMLPADKPHYLMGVGTPEDLVHGVANGVDMFDCVMPTRNARNGWIFTQWGDVKIKNARYKDDKKPLDEECACYACRNFSRAYLHHLHRVGEILGARLNTIHNLFYYQELMREMRKAIEEDRFEDFRLEFAAKRARSVN

SEQ ID NO: 53764 - protein, 371 aa, Chromobacterium violaceum; identical to SEQ ID NO: 53762
  misc_feature (1)..(371): tr|A0A381EPE4|A0A381EPE4_CHRVL Queuine tRNA-ribosyltran sferase OS=Chromobacterium violaceum OX=536 GN=tgt PE=3 SV=1

SEQ ID NO: 53765 - protein, 378 aa, Chromohalobacter canadensis
  misc_feature (1)..(378): tr|A0A285VH57|A0A285VH57_9GAMM Queuine tRNA-ribosyltran sferase OS=Chromohalobacter canadensis OX=141389 GN=tgt PE=3 SV=1
MRNESFMRFERLAEDGMARRGRLSFPRGTVETPAFMPVGTYGTVKGMTPQSVKNIGAEIILGNTFHLWLRPGTEVIETHGDLHDFAQWDKPILTDSGGFQVFSLGDMRKITEEGVHFRSPVDGAKVFMGPEESMAVQRSLGSDIVMIFDECTPYPATEEEARRSMEMSLRWAQRSRTAHGDSPSALFGIIQGGMYPELRERSLKGLLDIGFDGLAIGGLSVGEPKEEMLKVLDYLPGWMPDDKPRYLMGVGKPEDLVEGVRRGVDMFDCVMPTRNARNGHLFTADGTVKIRNAQHRHSTQALEADCDCHTCRHFTRSYLHHLDRCGEMLGAMLNTVHNLRYYQRVMAGLRTAIEAGTLTAFVEDFYARRGMPVPPLSA

SEQ ID NO: 53766 - protein, 372 aa, Chromohalobacter japonicus
  misc_feature (1)..(372): tr|A0A1Q8TGH2|A0A1Q8TGH2_9GAMM Queuine tRNA-ribosyltran sferase OS=Chromohalobacter japonicus OX=223900 GN=tgt PE=3 SV=1
MRFERIAEDGMARRGRLSFPRGSVETPAFMPVGTYGTVKGMTPQSVKDIGAEIILGNTFHLWLRPGTEVIETHGDLHDFAQWDKPILTDSGGFQVFSLGDMRKITEEGVHFRSPVDGAKVFMGPEESMAVQRSLGSDIVMIFDECTPYPATEEEARRSMEMSLRWAQRSRTAHGDSPSALFGIIQGGMYPELRERSLKGLLDIDFDGLAIGGLSVGEPKEEMLKVLDYLPGWMPDDKPRYLMGVGKPEDLVEGVRRGVDMFDCVMPTRNARNGHLFTADGTVKIRNAQHRHSTQALEADCDCHTCRHFTRSYLHHLDRCGEMLGAMLNTVHNLRYYQRVMAGLRTAIEAGTLTAFVEDFYARRGMPVPPLSA

SEQ ID NO: 53767 - protein, 378 aa, Chromohalobacter marismortui
  misc_feature (1)..(378): tr|A0A4R7NFY0|A0A4R7NFY0_9GAMM Queuine tRNA-ribosyltran sferase OS=Chromohalobacter marismortui OX=42055 GN=tgt PE=3 SV=1
MRNDSFMRFERLAEDGMARRGRLSFPRGTVETPAFMPVGTYGTVKGMTPESVEQIGADIILGNTFHLWLRPGTEVIETHGDLHDFAQWQKPILTDSGGFQVFSLGDMRKITEEGVHFRSPVDGAKVFMGPEESMAVQRSLGSDIVMIFDECTPYPATEEEAKRSMEMSLRWAQRSRIAHGDSPSALFGIIQGGMHPALRERSLKGLLDIGFDGLAIGGLSVGEPKDEMLKVLDYLPGWMPDDKPRYLMGVGKPEDLVEGVRRGVDMFDCVMPTRNARNGHLFIAAGTVKIRNAQHRHSTQALEAGCDCHTCRHFTRSYLHHLDRCGEMLGAMLNTIHNLRYYQRVMAGLRTAIEAGTLTAFVEDFYARRGMPVPPLSA

SEQ ID NO: 53768 - protein, 372 aa, Chromohalobacter salexigens
  misc_feature (1)..(372): sp|Q1QTM9|TGT_CHRSD Queuine tRNA-ribosyltransferase OS= Chromohalobacter salexigens (strain DSM 3043 / ATCC BAA -138 / NCIMB 13768) OX=290398 GN=tgt PE=3 SV=1
MRFERLAQDGQARRGRLSFPRGTVETPAFMPVGTYGTVKGMTPQSVKDIGAEIILGNTFHLWLRPGTEVIETHGDLHDFAQWDKPILTDSGGFQVFSLGDMRKITEEGVHFRSPVDGAKVFMGPEESMAVQRSLGSDIVMIFDECTPYPATEAEAKRSMEMSLRWAERSRIAHGDSPSALFGIIQGGMYPELRERSLKGLLDIGFDGLAIGGLSVGEPKEEMLKVLDYLPGWMPDDKPRYLMGVGKPEDLVEGVRRGVDMFDCVMPTRNARNGYLFTAEGTVKIRNAQHRYSTQALEADCDCHTCQHFSRSYLHHLDRCGEMLGAMLNTIHNLRYYQRVMAGLRTAIEAGTLTAFVEDFYARRGMPVPPLAA

SEQ ID NO: 53769 - protein, 372 aa, Chromohalobacter salexigens
  misc_feature (1)..(372): tr|A0A4Q0HKU1|A0A4Q0HKU1_CHRSL Queuine tRNA-ribosyltran sferase OS=Chromohalobacter salexigens OX=158080 GN=tgt PE=3 SV=1
MRFERLAQDGQARRGRLSFPRGTVETPAFMPVGTYGTVKGMTPQSVKDIGAEIILGNTFHLWLRPGTEVIETHGDLHDFAQWDKPILTDSGGFQVFSLGDMRKITEEGVHFRSPVDGAKVFMGPEDSMAVQRSLGSDIVMIFDECTPYPATEAEAKRSMEMSLRWAERSRIAHGDSPSALFGIIQGGMYPELRERSLKGLLDIGFDGLAIGGLSVGEPKEEMLKVLGYLPGWMPDDKPRYLMGVGKPEDLVEGVRRGVDMFDCVMPTRNARNGHLFTAEGTVKIRNAQHRHSTQALEADCDCHTCQHFSRGYLHHLDRCGEMLGAMLNTIHNLRYYQRVMAGLRTAIEAGTLTAFVEDFYARRGMPVPPLAA

SEQ ID NO: 53770 - protein, 372 aa, Chroococcales cyanobacterium
  misc_feature (1)..(372): tr|A0A2G7GQR0|A0A2G7GQR0_9CHRO Queuine tRNA-ribosyltran sferase OS=Chroococcales cyanobacterium IPPAS B-1203 OX =2049454 GN=tgt PE=3 SV=1
MSEKFLFQVLAECSQTEARAGLFLTPHGIVETPRFMPVGTLANVKTITTAQLGETGAQMVLANTYHLHLQPGEEIVAKAGGLHSFMQWHGPMLTDSGGFQVFSLSELRQVTDEGVTFRSPRDGQVIHITPEKSIQIQNTLGADVIMAFDECPPYPASRTAVEAATNRTYQWLERCIATHQRQDQALFGIVQGGIHLDLRAQAAQALAKLNLPGYAIGGVSVGEPPELIHQIVKATAPFLPREKPRYLMGVGTYREMAQAVAAGVDLFDCVIPTRLARHGAALVQQGNRWNLKNAQFREDFTPLDETCPCYTCQNFTRAYLCHLVRSREILAYTLLSIHNITELVRFTQRMREAILSDSFTTEFAPWLTQAED

SEQ ID NO: 53771 - protein, 367 aa, Chroococcidiopsis cubana
  misc_feature (1)..(367): tr|A0A433V3M0|A0A433V3M0_9CYAN Queuine tRNA-ribosyltran sferase OS=Chroococcidiopsis cubana SAG 39.79 OX=388085 GN=tgt PE=3 SV=1
MTTQFSFQVSTRCSQTKARAGVFHTPHGAVETPRFMPVGTLANVKTVTPTQLQETGAQMVLANTYHLHLQPGERIVEKAGGLHQFMRWNQPILTDSGGFQVFSLSEMRQITDDGVIFRSPHDGQMINLTPERSIQIQNALGADVIMAFDECPPYPASREEVEAATQRTYRWLERCISAHQRPDQALFGIVQGGVYPDLRAAAAEALAGLDLPGYAIGGVSVGEPPELIAKIVQATTPMLPVDKPRYLMGVGTYKEMAQAIASGMDLFDCVIPTRLARHGAALVKGERWNLKNSQYREDFQPLDETCPCYTCQNFTRAYISHLVRSQEILAYTLLTIHNITELVRFTQKIREAIIGDRFTTEFAQWLS

SEQ ID NO: 53772 - protein, 367 aa, Chroococcidiopsis sp.
  misc_feature (1)..(367): tr|A0A2P8QL75|A0A2P8QL75_9CYAN Queuine tRNA-ribosyltran sferase OS=Chroococcidiopsis sp. CCALA 051 OX=869949 GN =tgt PE=3 SV=1
MTTQFSFQVSTRCSQTKARAGVFYTPHGAVETPRFMPVGTLANVKTVTPTQLQETGAQMVLANTYHLHLQPGERIVEKAGGLHQFMRWNQPILTDSGGFQVFSLSEMRQITDDGVIFRSPHDGQMINLTPERSIQIQNALGADVIMAFDECPPYPASREEVEAATQRTYRWLERCISAHQRPDQALFGIVQGGVYPDLRAAAAEALAGLDLPGYAIGGVSVGEPPELIAKIVQATTPMLPVDKPRYLMGVGTYKEMAQAIASGMDLFDCVIPTRLARHGAALVKGERWNLKNSQYREDFQPLDETCPCYTCQNFTRAYISHLVRSQEILAYTLLTIHNITELVRFTQKIREAIIGDRFTTEFAQWLS

SEQ ID NO: 53773 - protein, 378 aa, Chroococcidiopsis sp.
  misc_feature (1)..(378): tr|A0A2S6VE06|A0A2S6VE06_9CYAN Queuine tRNA-ribosyltran sferase OS=Chroococcidiopsis sp. TS-821 OX=1378066 GN=t gt PE=3 SV=1
MSEKFSFQVLAECSQTKARAGFFLTPHGCVATPRFMPVGTLANVKTMTTAQLGETGAQMVLANTYHLHLQPGEAIVAKAGGLHSFMQWHGPMLTDSGGFQVFSLSELRQVTDDGVTFRSPRDGQVINITPEKSIQIQNALGADVIMAFDECPPYPASREVVIDATNRTYRWLERCIAAHQRQDQALFGIVQGGVHLDLRAQAALEIAKLNLPGYAIGGVSVGEPPELIHQIVAATAPLLPREKPRYLMGVGTYREMAKAVAAGVDLFDCVIPTRLARHGAALVQQGDRWNLKNAQFREDFTPLDETCPCYTCQNFTRAYLCHLVRSREILAYTLLSIHNITELIRFTQRMREAILNDSFATEFAPWLTSSVTTDSSNV

SEQ ID NO: 53774 - protein, 415 aa, Chroococcidiopsis thermalis
  misc_feature (1)..(415): tr|K9U485|K9U485_CHRTP Queuine tRNA-ribosyltransferase OS=Chroococcidiopsis thermalis (strain PCC 7203) OX=251 229 GN=tgt PE=3 SV=1
MGKKYFHAPRRGFISEDASPTGARGSRGFLDIGAASRFTTHHSLLITELTTQFSFQVSTRCSQTKARVGVFYTPHGAVETPRFMPVGTLANVKTVTPTQLQETGAQMVLANTYHLHLQPGERIVEKAGGLHQFMRWNQPILTDSGGFQVFSLSEMRQITDDGVIFRSPHDGQMINLTPERSIQIQNALGADVIMAFDECPPYPASREEVEAATQRTYRWLERCISAHQRPDQALFGIVQGGVYPDLRAAAAEALAGLDLPGYAIGGVSVGEPPELIAKIVQATTPMLPVDKPRYLMGVGTYKEMAQAIASGMDLFDCVIPTRLARHGAALVKGERWNLKNSQYREDFQPLDETCPCYTCQNFTRAYISHLVRSQEILAYTLLTIHNITELVRFTQKIREAIISDRFTTEFAQWLS

SEQ ID NO: 53775 - protein, 378 aa, Chroogloeocystis siderophila
  misc_feature (1)..(378): tr|A0A1U7HW67|A0A1U7HW67_9CHRO Queuine tRNA-ribosyltran sferase OS=Chroogloeocystis siderophila 5.2 s.c.1 OX=24 7279 GN=tgt PE=3 SV=1
MSEKFSFQVLAECSQTKARAGFFITPHGRVATPRFMPVGTLANVKTITTAQLGETGAQMVLANTYHLHLQPGEAIVAKAGGLHSFMQWHGPMLTDSGGFQVFSLSELRQVTDDGVTFRSPRDGQVINITPEKSIQIQNTLGADVIMAFDECPPYPASREVVEDATNRTYRWLERCIATHQRQDQALFGIVQGGVHLDLRAQAALEVAKLNLPGYAIGGVSVGEPPELIHQIVEATVPLLPREKPRYLMGVGTYREMAKAVAAGVDLFDCVIPTRLARHGAALVQQGDRWNLKNTRFREDFTPLDETCPCYTCQNFTRAYLCHLVRSREILAYTLLSIHNITELIRFTQRMREAILSDTFATEFAPWLTQSAPTDSSNS

SEQ ID NO: 53776 - protein, 376 aa, Chryseobacterium angstadtii
  misc_feature (1)..(376): tr|A0A0J7IJQ0|A0A0J7IJQ0_9FLAO Queuine tRNA-ribosyltran sferase OS=Chryseobacterium angstadtii OX=558151 GN=tgt PE=3 SV=1
MKFFNIEKTSEGKARAGEITTDHGKIQTPIFMPVGTVASVKTVHQRELKEDIKAQIILGNTYHLYLRPTMDIMEQAGGLHKFMNWDLPILTDSGGFQVFSLSKSRKMSEEGVKFKSHIDGSYHLFTPEKSMEIQRQIGADIFMAFDECTPYPCEYNQAKTSMELTHRWLKRCIDWTEENKEIYGHKQRLFPIVQGSTYSDLRKISAEVIAEAGAEGNAIGGLSVGEPEEEMYRITDEVTDILPKEKPRYLMGVGTPWNILESIGLGIDMMDCVMPTRNARNAMLFTWQGVMNLKNEKWKNDFSPLDEFGTSFVDKEYSKAYLRHLFVSKEYLAKQIASVHNLAFYLDLVKVAREHIVAGDFYEWKKSVVPVLRQRL

SEQ ID NO: 53777 - protein, 378 aa, Chryseobacterium antarcticum
  misc_feature (1)..(378): tr|A0A448NSK2|A0A448NSK2_9FLAO Queuine tRNA-ribosyltran sferase OS=Chryseobacterium antarcticum OX=266748 GN=tg t PE=3 SV=1
MKSNFFEINQTTTGKARAGTITTDHGTIQTPIFMPVGTVASVKTVHQRELKDDIKAQIILGNTYHLNLRPKMEIMQAAGGLHKFMNWDLPILTDSGGYQVFSLSKSRKLNEAGVKFKSHIDGSTHFISPEISMEIQRQIGADIFMAFDECTPYPCEYNLAKKSMEMTHRWLKRCIKWTEENPEMYGYQQKLFPIVQGSTYSDLRKKSAEFISEQNAAGNAIGGLSVGEPEDEMYRITDEVTDILPKDKPRYLMGVGTPWNILETIGLGIDMMDCVMPTRNARNAMLFTWQGVMNMKNKKWESDFSPLDEFGTSYVDSDYSKAYVRHLFVAKEYLGKQIASVHNLAFYLDLVRVARQHILAGDFYEWKESIVPTLKQRL

SEQ ID NO: 53778 - protein, 377 aa, Chryseobacterium aquaticum
  misc_feature (1)..(377): tr|A0A0Q3KBR5|A0A0Q3KBR5_9FLAO Queuine tRNA-ribosyltran sferase OS=Chryseobacterium aquaticum OX=452084 GN=tgt PE=3 SV=1
MQQFFKIEKTSQGKARAGELMTDHGVVKTPIFMPVGTVASVKTVHQRELKEDIKAQIILGNTYHLYLRPGMEVMQEAGGLHKFMNWELPILTDSGGFQVFSLSGTRKMSEEGVKFKSHIDGSVHLFTPEKSMEIQRQIGADIFMAFDECVAYPSEYNQVKKSMEMTHRWLKRCIDWNEKNPELYGHKQRFFPIVQGSTFSDLRKISAEVISEAGAEGNAIGGLSVGEPEDELYRITDEVTDILPKEKPRYLMGVGTPWNILESIGLGIDMMDCVMPTRNARNAMLFTWQGVMNLKNEKWKKDFSPLDEFGTSFVDQEYSKAYVRHLFVSKEYLAKQIASIHNLAFYLDLVKVAREHIVAGDFYEWKNSVVPVLRQRL

SEQ ID NO: 53779 - protein, 376 aa, Chryseobacterium aquifrigidense
  misc_feature (1)..(376): tr|A0A543EC40|A0A543EC40_9FLAO Queuine tRNA-ribosyltran sferase OS=Chryseobacterium aquifrigidense OX=558021 GN =tgt PE=3 SV=1
MKFFNIEKTSEGKARAGEITTDHGKIQTPIFMPVGTVASVKTVHQRELKEDIKAQIILGNTYHLYLRPGMETMQDAGGLHKFMNWDLPILTDSGGFQVFSLASNRKMTEEGARFKSHIDGSYHMFSPERSMEIQRQIGADIFMAFDECTPYPCDYNQAKSSMELTHRWLKRCIDWTSDNPELYGHKQRLFPIVQGSTYSDLRKISAEVISEAGAEGNAIGGLSVGEPEEEMYRITDEVTDILPKEKPRYLMGVGTPWNILESIGLGIDMMDCVMPTRNARNAMLFTWQGVMNLKNEKWKRDFSPLDEFGTSFVDREYSKAYLRHLFVSKEYLAKQIASIHNLAFYLDLVKVAREHIMAGDFYEWKNSVVPVLRQRL

SEQ ID NO: 53780 - protein, 376 aa, Chryseobacterium arachidiradicis
  misc_feature (1)..(376): tr|A0A420DD90|A0A420DD90_9FLAO Queuine tRNA-ribosyltran sferase OS=Chryseobacterium arachidiradicis OX=1617282 GN=tgt PE=3 SV=1
MKFFEIEKTSESKARAGVITTDHGQIQTPIFMPVGTVASVKTVHQRELKEDIKAQIILGNTYHLMLRPAMDIMEQAGGLHRFMNWDRPILTDSGGYQVFSLAKSRKITEEGVKFKSHIDGSLRFMSPEISMQIQRQIGADIFMAFDECIAYPSDYNAVKTSMELTHRWLKRCIDWTNENKELYGHKQRLFPIVQGSCFSDLRKISAEVISEAGAEGNAIGGLSVGEPEEEMYRITNEVTDILPKEKPRYLMGVGTPWNILESIGFGIDMMDCVMPTRNARNAMLFTWQGVMNMKNEKWKTDFSPLDEFGTSFVDQEYSKAYVRHLFVAKEYLAKQIASIHNLAFYLDLVKVAREHIVAGDFYQWKDQIIPQLKTRL

SEQ ID NO: 53781 - protein, 377 aa, Chryseobacterium arachidis
  misc_feature (1)..(377): tr|A0A1M4XQY8|A0A1M4XQY8_9FLAO Queuine tRNA-ribosyltran sferase OS=Chryseobacterium arachidis OX=1416778 GN=tgt PE=3 SV=1
MQKFFNIEKTTGGKARAGELTTDHGKIQTPIFMPVGTVASVKTVHQRELKEDIKAQIILGNTYHLYLRPGMETMQAAGGLHKFMNWDLPILTDSGGFQVFSLASSRKMSEEGARFKSHIDGSYHMFSPEKSMEIQRQIGADIFMAFDECVAYPCEYNQAKTSMELTHRWLKRCIEWTENNPELYGYKQRLFPIVQGSTFSDLRKISAEVIAEAGAEGNAIGGLSVGEPEEEMYRITDEVTDILPKEKPRYLMGVGTPWNILESIGLGIDMMDCVMPTRNARNAMLFTWKGVMNMKNEKWKKDFSPLDEFGTSFVDREYSKAYLRHLFVSKEYLAKQIASIHNLAFYLDLVKAAREHILAGDFYEWKNSVVPVLRQRL

SEQ ID NO: 53782 - protein, 376 aa, Chryseobacterium arthrosphaerae
  misc_feature (1)..(376): tr|A0A1B8ZIX1|A0A1B8ZIX1_9FLAO Queuine tRNA-ribosyltran sferase OS=Chryseobacterium arthrosphaerae OX=651561 GN =tgt PE=3 SV=1
MKFFNIEKTSEGKARAGEITTDHGKIQTPIFMPVGTVASVKTVHQRELKEDIKAQIILGNTYHLYLRPGMETMQDAGGLHKFMNWDLPILTDSGGFQVFSLASNRKMTEEGARFKSHIDGSYHMFSPERSMEIQRQIGADIFMAFDECTPYPCDYNQAKSSMELTHRWLKRCIDWTNDNPELYGHKQRLFPIVQGSTYSDLRKISAEVISEAGAEGNAIGGLSVGEPEEEMYRITDEVTDILPKEKPRYLMGVGTPWNILESIGLGIDMMDCVMPTRNARNAMLFTWQGVMNLKNEKWKRDFSPLDEFGTSFVDREYSKAYLRHLFVSKEYLAKQIASIHNLAFYLDLVKVAREHILAGDFYEWKNSVVPVLRQRL

SEQ ID NO: 53783 - protein, 376 aa, Chryseobacterium artocarpi
  misc_feature (1)..(376): tr|A0A1B8ZDB0|A0A1B8ZDB0_9FLAO Queuine tRNA-ribosyltran sferase OS=Chryseobacterium artocarpi OX=1414727 GN=tgt PE=3 SV=1
MKFFNIEKTSEGKARAGEITTDHGKIQTPIFMPVGTVASVKTVHQRELKEDIKAQIILGNTYHLYLRPGMETMQDAGGLHKFMNWDLPILTDSGGFQVFSLASNRKMTEEGARFKSHIDGSYHMFSPERSMEIQRQIGADIFMAFDECTPYPCDYNQAKSSMELTHRWLKRCIEWTNDNPELYGHKQRLFPIVQGSTYSDLRKISAEVISEAGAEGNAIGGLSVGEPEEEMYRITDEVTDILPKEKPRYLMGVGTPWNILESIGLGIDMMDCVMPTRNARNAMLFTWQGVMNLRNEKWKRDFSPLDEFGTSFVDKEYSKAYLRHLFVSKEYLAKQIASIHNLAFYLDLVKVAREHILAGDFYEWKNSVVPILRQRL

SEQ ID NO: 53784 - protein, 376 aa, Chryseobacterium balustinum
  misc_feature (1)..(376): tr|A0A3G6TPI2|A0A3G6TPI2_9FLAO Queuine tRNA-ribosyltran sferase OS=Chryseobacterium balustinum OX=246 GN=tgt PE =3 SV=1
MNFFNIEKTSESKARAGVLTTDHGTVQTPIFMPVGTVASVKTVHQREIKDDIKAQIILGNTYHLYLRPGMEVMEAAGGLHKFMNWDLPILTDSGGFQVFSLSGSRKMSEEGVKFKSHIDGSYHLFTPEKSMEIQRQIGADIFMAFDECVAYPAHYNQVKKSMEMTHRWLKRCIDWNAENPELYGYKQRFFPIVQGSTYSDLRKISAEVISEAGAEGNAIGGLSVGEPEDELYRITNEVTDILPKDKPRYLMGVGTPWNILESIGLGIDMMDCVMPTRNARNGMLFTWQGVINMKNEKWKKDFSPLDEFGTSFVDQEYSKAYVRHLFVSKEYLAKQIASIHNLAFYLDLVKVAREHILAGDFYQWKDSVIPVLRQRL

SEQ ID NO: 53785 - protein, 376 aa, Chryseobacterium bernardetii
  misc_feature (1)..(376): tr|A0A3G6T4R2|A0A3G6T4R2_9FLAO Queuine tRNA-ribosyltran sferase OS=Chryseobacterium bernardetii OX=1241978 GN=t gt PE=3 SV=1
MKFFNIEKTSEGKARAGEITTDHGKIQTPIFMPVGTVASVKTVHQRELKEDIKAQIILGNTYHLYLRPGMETMQDAGGLHKFMNWDLPILTDSGGFQVFSLASNRKMTEEGARFKSHIDGSYHMFSPERSMEIQRQIGADIFMAFDECTPYPCDYNQAKSSMELTHRWLKRCIEWTNNNPELYGHKQRLFPIVQGSTYSDLRKISAEVISEAGAEGNAIGGLSVGEPEEEMYRITDEVTDILPKEKPRYLMGVGTPWNILESIGLGIDMMDCVMPTRNARNAMLFTWQGVMNLKNEKWKRDFSPLDEFGTSFVDREYSKAYLRHLFVSKEYLAKQIASIHNLAFYLDLVKVAREHIIAGDFYEWKNSVVPVLRQRL

SEQ ID NO: 53786 - protein, 376 aa, Chryseobacterium bovis
  misc_feature (1)..(376): tr|A0A1U7PPG2|A0A1U7PPG2_9FLAO Queuine tRNA-ribosyltran sferase OS=Chryseobacterium bovis DSM 19482 OX=1121284 GN=tgt PE=3 SV=1
MNFFQIEKTTESKARAGVITTDHGQIQTPIFMPVGTVASVKTVHQRELRDDIKAQIILGNTYHLMLRPTMDIMQQAGGLHQFMNWDRPILTDSGGYQVFSLAKSRKITEEGVKFKSHIDGSLRFMSPEVSMQIQRQIGADIFMAFDECIAYPSDYNAVKTSMELTHRWLKRCISWTEENKELYGHKQRLFPIVQGSCFSDLRKISAEVISEAGAEGNAIGGLSVGEPEEEMYRITNEVTDILPKEKPRYLMGVGTPWNILESIGLGVDMMDCVMPTRNARNAMLFTWQGIMNMKNEKWKSDFSPLDEFGTSFVDQEYSKAYVRHLFVAKEYLAKQIASIHNLAFYLDLVKVAREHIIAGDFYQWKDQVVPQLKKRL

SEQ ID NO: 53787 - protein, 376 aa, Chryseobacterium carnipullorum
  misc_feature (1)..(376): tr|A0A1M7CJT4|A0A1M7CJT4_9FLAO Queuine tRNA-ribosyltran sferase OS=Chryseobacterium carnipullorum OX=1124835 GN =tgt PE=3 SV=1
MKFFNIEKTSEGKARAGEITTDHGKIQTPIFMPVGTVASVKTVHQRELKEDIKAQIILGNTYHLYLRPTMDIMQKAGGLHQFMNWDLPILTDSGGFQVFSLSKSRKMSEEGVKFKSHIDGSYHMFTPEKSMEIQRQIGADIFMAFDECTPYPCEYNQAKTSMELTHRWLKRCIDWTEENKEIYGHKQRLFPIVQGSTYSDLRKISAEVIAEAGAEGNAIGGLSVGEPEEEMYRITDEVTDILPKDKPRYLMGVGTPWNILESIGLGIDMMDCVMPTRNARNAMLFTWQGVMNMKNEKWKSDFSPLDEFGTSFVDREYSKAYLRHLFVSKEYLAKQIASVHNLAFYLDLVKVAREHIVAGDFYEWKKTVVPVLRQRL

SEQ ID NO: 53788 - protein, 378 aa, Chryseobacterium carnis
  misc_feature (1)..(378): tr|A0A3G8XYS8|A0A3G8XYS8_9FLAO Queuine tRNA-ribosyltran sferase OS=Chryseobacterium carnis OX=1241979 GN=tgt PE =3 SV=1
MKSPFFEINKTTTGKARAGKITTDHGTIETPIFMPVGTVASVKTVHQRELKDDIKAQIILGNTYHLNLRPKMDIMQAAGGLHKFMNWDLPILTDSGGYQVFSLSKSRKLNEEGVKFKSHIDGSTHFISPEISMEIQRQIGADIFMAFDECTPYPCEYNLAKKSMEMTHRWLKRCIKWTDENSEIYGHQQRLFPIVQGSTYSDLRKKSAEFISEQNAAGNAIGGLSVGEPEDEMYRITDEVTDILPKDKPRYLMGVGTPWNILETIGLGIDMMDCVMPTRNARNAMLFTWQGVMNMKNKKWESDFSPLDEFGTSYVDSEYSKAYVRHLFVSKEYLGKQIASIHNLAFYLDLVRVARQHILAGDFYEWKDSVVPALKQRL

SEQ ID NO: 53789 - protein, 377 aa, Chryseobacterium chaponense
  misc_feature (1)..(377): tr|A0A1N7LDS7|A0A1N7LDS7_9FLAO Queuine tRNA-ribosyltran sferase OS=Chryseobacterium chaponense OX=713588 GN=tgt PE=3 SV=1
MSTFFEINKTSTGKARAGTITTDHGTIQTPIFMPVGTVASVKTVHQRELKDDIKAQIILGNTYHLNLRPKMDIMQSAGGLHKFMNWDLPILTDSGGYQVFSLSKSRKLNEAGVKFKSHIDGSTQFISPEISMEIQRQIGADIFMAFDECVAYPAEYKQVKKSMDLTHRWLKRCIKWNAENPELYGHKQAFFPIVQGSCYSDLRKKSAEFISEQNAVGNAIGGLSVGEPEEEMYRITDEVTDILPIDKPRYLMGVGTPWNIIETIGLGIDMMDCVMPTRNARNAMLFTWKGVMNMKNKKWESDFSPLDEFGTSYVDAEYSKAYVRHLFVAKEYLAKQIASIHNLAFYLDLVKVAREHIVAGDFYEWKDSIIPVLKQRL

SEQ ID NO: 53790 - protein, 376 aa, Chryseobacterium contaminans; identical to SEQ ID NO: 53785
  misc_feature (1)..(376): tr|A0A1M6W121|A0A1M6W121_9FLAO Queuine tRNA-ribosyltran sferase OS=Chryseobacterium contaminans OX=1423959 GN=t gt PE=3 SV=1

SEQ ID NO: 53791 - protein, 376 aa, Chryseobacterium culicis
  misc_feature (1)..(376): tr|A0A2S9CSI2|A0A2S9CSI2_9FLAO Queuine tRNA-ribosyltran sferase OS=Chryseobacterium culicis OX=680127 GN=tgt PE =3 SV=1
MKFFNIEKTSEGKARAGEITTDHGKIQTPIFMPVGTVASVKTVHQRELKEDIKAQIILGNTYHLYLRPGMETMQDAGGLHKFMNWDLPILTDSGGFQVFSLASNRKMTEEGARFKSHIDGSYHMFSPERSMEIQRQIGADIFMAFDECTPYPCDYNQAKSSMELTHRWLKRCIEWTNDNPELYGYKQRLFPIVQGSTYSDLRKISAEVISEAGAEGNAIGGLSVGEPEEEMYRITDEVTDILPKEKPRYLMGVGTPWNILESIGLGIDMMDCVMPTRNARNAMLFTWQGVMNLKNEKWKRDFSPLDEFGTSFVDREYSKAYLRHLFVSKEYLAKQIASIHNLAFYLDLVKVAREHIIAGDFYEWKNSVVPILRQRL

SEQ ID NO: 53792 - protein, 376 aa, Chryseobacterium culicis
  misc_feature (1)..(376): tr|A0A1H6HLT1|A0A1H6HLT1_9FLAO Queuine tRNA-ribosyltran sferase OS=Chryseobacterium culicis OX=680127 GN=tgt PE =3 SV=1
MKFFNIEKTSEGKARAGEITTDHGKIQTPIFMPVGTVASVKTVHQRELKEDIKAQIILGNTYHLYLRPGMETMQDAGGLHQFMNWDLPILTDSGGFQVFSLASNRKMTEEGARFKSHIDGSYHMFSPERSMEIQRQIGADIFMAFDECTPYPCDYNQAKSSMELTHRWLKRCIDWTNDNPELYGHKQRLFPIVQGSTYSDLRRISAEVISEAGAEGNAIGGLSVGEPEEEMYRITDEVTDILPKEKPRYLMGVGTPWNILESIGLGIDMMDCVMPTRNARNAMLFTWQGVMNLKNEKWKRDFSPLDEFGTSFVDREYSKAYLRHLFVSKEYLAKQIASIHNLAFYLDLVKVAREHIMAGDFYEWKNAVVPVLRQRL

SEQ ID NO: 53793 - protein, 377 aa, Chryseobacterium daecheongense
  misc_feature (1)..(377): tr|A0A3N0VTN6|A0A3N0VTN6_9FLAO Queuine tRNA-ribosyltran sferase OS=Chryseobacterium daecheongense OX=192389 GN= tgt PE=3 SV=1
MQKFFNIEKTSEGKARAGEITTDHGTIQTPIFMPVGTVASVKTVHQRELKEDIKAQIILGNTYHLYLRPTMDIMQEAGGLHQFMNWDLPILTDSGGFQVFSLASSRKMTEEGVKFKSHIDGSYHFISPEKSMEIQRQIGADIFMAFDECTPYPCEYNQAKSSMELTHRWLKRCIDWTEENKELYGHKQRLFPIVQGSTYSDLRKISAEVISEAGAEGNAIGGLSVGEPEEEMYRITDEVTDILPKEKPRYLMGVGTPWNILESIGLGIDMMDCVMPTRNARNAMLFTWKGVMNLKNEKWKRDFSPLDEFGTSYVDQEYSKAYLRHLFVSKEYLAKQIASIHNLAFYLDLVKVAREHIMAGDFYEWKKSVVPVLRQRL

SEQ ID NO: 53794 - protein, 376 aa, Chryseobacterium defluvii
  misc_feature (1)..(376): tr|A0A495SB41|A0A495SB41_9FLAO Queuine tRNA-ribosyltran sferase OS=Chryseobacterium defluvii OX=160396 GN=tgt P E=3 SV=1
MKFFNIEKTSEGKARAGEITTDHGTIQTPIFMPVGTVASVKTVHQRELKEDIKAQIILGNTYHLYLRPTMDIMQEAGGLHKFMNWDLPILTDSGGFQVFSLASSRKMTEEGVKFKSHIDGSYHFISPEKSMEIQRQIGADIFMAFDECTPYPCEYNQAKSSMELTHRWLKRCIEWTEENKELYGHKQRLFPIVQGSTYSDLRKISAEVISEAGAEGNAIGGLSVGEPEEEMYRITDEVTDILPKEKPRYLMGVGTPWNILESIGLGIDMMDCVMPTRNARNAMLFTWKGVMNLKNEKWKRDFSPLDEFGTSFVDQEYSKAYLRHLFVSKEYLAKQIASIHNLAFYLDLVKVAREHIIAGDFYEWKKSVVPVLRQRL

SEQ ID NO: 53795 - protein, 376 aa, Chryseobacterium elymi
  misc_feature (1)..(376): tr|A0A3D9DQL3|A0A3D9DQL3_9FLAO Queuine tRNA-ribosyltran sferase OS=Chryseobacterium elymi OX=395936 GN=tgt PE=3 SV=1
MKFFNIEKTSEGKARAGEITTDHGKIQTPIFMPVGTVASVKTVHQRELKEDIKAQIILGNTYHLYLRPTMDIMQEAGGLHKFMNWDLPILTDSGGFQVFSLSKSRKMSEEGVKFKSHIDGSYHMFTPEKSMEIQRQIGADIFMAFDECTPYPCEYNQAKTSMELTHRWLKRCIEWTEQNKEIYGYKQRLFPIVQGSTYSDLRKMSAEVISEAGAEGNAIGGLSVGEPEEEMYRITDEVTDILPKDKPRYLMGVGTPWNILESIGLGIDMMDCVMPTRNARNAMLFTWQGVMNLKNEKWKRDFSALDEFGTSYVDREYSKAYLRHLFVSKEYLAKQIASVHNLAFYLDLVKVAREHIVAGDFYEWKKSVVPVLRQRL

SEQ ID NO: 53796 - protein, 376 aa, Chryseobacterium flavum
  misc_feature (1)..(376): tr|A0A3D9CT37|A0A3D9CT37_9FLAO Queuine tRNA-ribosyltran sferase OS=Chryseobacterium flavum OX=415851 GN=tgt PE= 3 SV=1
MKFFNIEKTSEGKARAGEITTDHGKIQTPIFMPVGTVASVKTVHQRELKEDIKAQIILGNTYHLYLRPGMKTMQDAGGLHKFMNWDLPILTDSGGFQVFSLASNRKMTEEGARFKSHIDGSYHMFSPERSMEIQRQIGADIFMAFDECTPYPCDYNQAKSSMELTHRWLKRCIEWTENNPELYGHKQRLFPIVQGSTYSDLRKISAEVISEAGAEGNAIGGLSVGEPEEEMYRITDEVTDILPKEKPRYLMGVGTPWNILESIGLGIDMMDCVMPTRNARNAMLFTWQGVMNLKNEKWKRDFSPLDEFGTSFVDKEYSKAYLRHLFVSKEYLAKQIASIHNLAFYLDLVKVAREHIIAGDFYEWKNSVVPALRQRL

SEQ ID NO: 53797 - protein, 376 aa, Chryseobacterium formosense
  misc_feature (1)..(376): tr|A0A085Z2F2|A0A085Z2F2_9FLAO Queuine tRNA-ribosyltran sferase OS=Chryseobacterium formosense OX=236814 GN=tgt PE=3 SV=1
MNFFNIEKTSEGKARAGVLSTDHGTVQTPIFMPVGTVASVKTVHQREIKDDIKAQIILGNTYHLYLRPGMEVMEAAGGLHKFMNWDLPILTDSGGFQVFSLSGSRKMSEEGVKFKSHIDGSYHLFTPEKSMEIQRQIGADIFMAFDECVAYPCDYNQVKLSMEMTHRWLKRCIDWNAENPELYGHKQRFFPIVQGSTYSDLRKISAEVIAEAGAEGNAIGGLSVGEPEEEMYRITDEVTDILPKDKPRYLMGVGTPWNILESIGLGIDMMDCVMPTRNARNAMLFTWQGVMNMKNEKWKKDFSPLDEFGTSFVDQEYSKAYLRHLFVSKEYLAKQIASIHNLAFYLDLVKVAREHILAGDFYQWKESVVPVLRQRL

SEQ ID NO: 53798 - protein, 377 aa, Chryseobacterium frigidisoli
  misc_feature (1)..(377): tr|A0A1I3GPC2|A0A1I3GPC2_9FLAO Queuine tRNA-ribosyltran sferase OS=Chryseobacterium frigidisoli OX=1125876 GN=t gt PE=3 SV=1
MQKFFEIEKTSGGKARAGIITTDHGKVETPIFMPVGTVASVKTVHQRELKDDIKAQIILGNTYHLNLRPKMEIMQAAGGLHKFMNWDLPILTDSGGYQVFSLAKSRKLNEEGVKFKSHIDGSTMFISPEISMQIQRQIGADIFMAFDECVAYPEEYNKVRKSMDLTHRWLKRCIKWNAENPELYNYKQAFFPIVQGSCFSDLRKKSAEFISEQNAVGNAIGGLSVGEPEEEMYRITDEVTDVLPKDKPRYLMGVGTPWNILETIGLGIDMMDCVMPTRNARNAMLFTWQGVMNMKNKKWERDFSPLDEFGTSYVDSEYSKAYVRHLFVAKEYLAKQIASIHNLAFYLDLVKVAREHIIKGDFYEWKNSVVPNLRNRL

SEQ ID NO: 53799 - protein, 376 aa, Chryseobacterium gallinarum
  misc_feature (1)..(376): tr|A0A0G3M0R3|A0A0G3M0R3_9FLAO Queuine tRNA-ribosyltran sferase OS=Chryseobacterium gallinarum OX=1324352 GN=tg t PE=3 SV=1
MKFFNIEKTSEGKARAGEITTDHGKIQTPIFMPVGTVASVKTVHQRELKEDIKAQIILGNTYHLYLRPGMETMQDAGGLHKFMNWDLPILTDSGGFQVFSLAGSRKMTEEGARFKSHIDGSYHMFSPERSMEIQRQIGADIFMAFDECTPYPCDYNQAKSSMELTHRWLKRCIDWTNNNPELYGHKQRLFPIVQGSTYSDLRKISAEVISEAGAEGNAIGGLSVGEPEEEMYRITDEVTDILPKEKPRYLMGVGTPWNILESIGLGIDMMDCVMPTRNARNAMLFTWNGVMNLKNEKWKRDFSPLDEFGTSFVDREYSKAYLRHLFVSKEYLAKQIASVHNLAFYLDLVKVAREHILAGDFYEWKNAVVPILRQRL

SEQ ID NO: 53800 - protein, 377 aa, Chryseobacterium gambrini
  misc_feature (1)..(377): tr|A0A1N7MN25|A0A1N7MN25_9FLAO Queuine tRNA-ribosyltran sferase OS=Chryseobacterium gambrini OX=373672 GN=tgt P E=3 SV=1
MQKFFNIEKTSEGKARAGELTTDHGTIQTPIFMPVGTVASVKTVHQRELKEDIKAQIILGNTYHLYLRPGMEVMQEAGGLHKFMNWDLPILTDSGGFQVFSLASSRKMSEEGARFKSHIDGSYHMFSPEKSMEIQRQIGADIFMAFDECVAYPCEYNQAKTSMELTHRWLKRCIEWTENNPELYGHKQRLFPIVQGSTFSDLRKISAEVIAEAGAEGNAIGGLSVGEPEEEMYRITDEVTDILPKEKPRYLMGVGTPWNILESIGLGIDMMDCVMPTRNARNAMLFTWKGVMNMKNEKWKKDFSPLDEFGTSFVDREYSKAYVRHLFVSKEYLAKQIASIHNLAFYLDLVKVAREHIMAGDFYQWKNSVVPILRQRL

SEQ ID NO: 53801 - protein, 377 aa, Chryseobacterium geocarposphaerae
  misc_feature (1)..(377): tr|A0A2M9C1L0|A0A2M9C1L0_9FLAO Queuine tRNA-ribosyltran sferase OS=Chryseobacterium geocarposphaerae OX=1416776 GN=tgt PE=3 SV=1
MQKFFNIEKTSEGKARAGEITTDHGTIQTPIFMPVGTVASVKTVHQRELKEDIKAQIILGNTYHLYLRPGMETMQEAGGLHKFMNWDLPILTDSGGFQVFSLASSRKMTEEGARFKSHIDGSYHMFSPEKSMEIQRQIGADIFMAFDECVAYPCEYNQAKTSMELTHRWLKRCIEWTENNPELYGHKQRLFPIVQGSTYSDLRKISAEVIAEAGAEGNAIGGLSVGEPEEEMYRITDEVTDILPKEKPRYLMGVGTPWNILESIGLGIDMMDCVMPTRNARNAMLFTWKGVMNMKNEKWKKDFSPLDEFGTSFVDREYSKSYVRHLFVSKEYLGKQIASIHNLAFYLDLVKVAREHIIAGDFYEWKKSVVPVLRQRL

SEQ ID NO: 53802 - protein, 376 aa, Chryseobacterium glaciei
  misc_feature (1)..(376): tr|A0A172XU36|A0A172XU36_9FLAO Queuine tRNA-ribosyltran sferase OS=Chryseobacterium glaciei OX=1685010 GN=tgt P E=3 SV=1
MKFFNIEKTSEGKARAGELMTDHGKVQTPIFMPVGTVASVKTVHQRELKEDIKAQIILGNTYHLYLRPGMETMQNAGGLHKFMNWDLPILTDSGGFQVFSLSGSRKMSEEGVKFKSHIDGSYHLFTPEKSMEIQRQIGADIFMAFDECVAYPSGYNQVKASMEMTHRWLKRCIDWNEQNPELYGHKQRFFPIVQGSTYSDLRKISAEVISEAGAEGNAIGGLSVGEPEDELYRITDEVTDILPKDKPRYLMGVGTPWNILESIGLGIDMMDCVMPTRNARNAMLFTWQGVMNMKNEKWKNDFSPLDEFGTSFVDKEYSKAYVRHLFVSKEYLGKQIASIHNLAFYLDLVKVAREHIVAGDFYQWKNSVVPILRQRL

SEQ ID NO: 53803 - protein, 376 aa, Chryseobacterium gleum
  misc_feature (1)..(376): tr|A0A4U8WNJ9|A0A4U8WNJ9_9FLAO Queuine tRNA-ribosyltran sferase OS=Chryseobacterium gleum OX=250 GN=tgt PE=3 SV =1
MNFFNIEKTSEGKARAGVLSTDHGNVQTPIFMPVGTVASVKTVHQREIKEDIKAQIILGNTYHLYLRPGMEVIQEAGGLHKFMNWDLPILTDSGGFQVFSLSGSRKMSEEGVKFKSHIDGSYHLFTPEKSMEIQRQIGADIFMAFDECVAYPCDYNQVKLSMEMTHRWLKRCMEWNENNPELYGYKQRFFPIVQGSTYSDLRKISAEVIAEAGAEGNAIGGLSVGEPEEEMYRITDEVTDILPKEKPRYLMGVGTPWNILESIGLGIDMMDCVMPTRNARNGMLFTWQGVINMKNEKWKKDFSPLDEFGTSFVDQEYSKAYVRHLFVSKEYLAKQIASIHNLAFYLDLVKVAREHILAGDFYQWKDSVVPVLRQRL

SEQ ID NO: 53804 - protein, 376 aa, Chryseobacterium gleum; identical to SEQ ID NO: 53785
  misc_feature (1)..(376): tr|A0A448B644|A0A448B644_9FLAO Queuine tRNA-ribosyltran sferase OS=Chryseobacterium gleum OX=250 GN=tgt PE=3 SV =1

SEQ ID NO: 53805 - protein, 377 aa, Chryseobacterium greenlandense
  misc_feature (1)..(377): tr|A0A101CKA8|A0A101CKA8_9FLAO Queuine tRNA-ribosyltran sferase OS=Chryseobacterium greenlandense OX=345663 GN= tgt PE=3 SV=1
MQQFFKIEKTSQGKARAGELVTDHGVVKTPIFMPVGTVASVKTVHQRELKEDIKAQIILGNTYHLYLRPGMEVMQEAGGLHKFMNWDLPILTDSGGFQVFSLSGTRKMSEEGVKFKSHIDGSVHLFTPEKSMEIQRQIGADIFMAFDECVAYPSEYNQVKKSMEMTHRWLKRCIDWNEKNPELYGHKQRFFPIVQGSTFSDLRKISAEVISEAGAEGNAIGGLSVGEPEEELYRITDEVTDILPKEKPRYLMGVGTPWNILESIGLGIDMMDCVMPTRNARNAMLFTWQGVMNLKNEKWKKDFSPLDEFGISFVDQEYSKAYVRHLFVSKEYLAKQIASIHNLAFYLDLVKVAREHIVAGDFYEWKNSVVPVLRQRL

SEQ ID NO: 53806 - protein, 378 aa, Chryseobacterium hagamense
  misc_feature (1)..(378): tr|A0A511YI47|A0A511YI47_9FLAO Queuine tRNA-ribosyltran sferase OS=Chryseobacterium hagamense OX=395935 GN=tgt PE=3 SV=1
MMQKFFNIEKTSEGKARAGELTTDHGKIQTPIFMPVGTVASVKTVHQRELKEDIQAQIILGNTYHLYLRPGMETMQAAGGLHQFMKWDLPILTDSGGFQVFSLASSRKMSEEGARFKSHIDGSYHMFSPEKSMEIQRQIGADIFMAFDECVAYPCEYNQAKSSMELTHRWLKRCIEWTENNPELYGHKQRLFPIVQGSTFSDLRKISAEVIAEAGAEGNAIGGLSVGEPEEEMYRITDEVTDILPKDKPRYLMGVGTPWNILESIGLGIDMMDCVMPTRNARNAMLFTWKGVMNMKNEKWKQDFSPLDEFGTSFVDREYSKAYLRHLFVSKEYLAKQIASIHNLAFYLDLVKTARAHILAGDFYQWKDSVVPVLRQRL

SEQ ID NO: 53807 - protein, 377 aa, Chryseobacterium haifense
  misc_feature (1)..(377): tr|A0A246B9Z2|A0A246B9Z2_9FLAO Queuine tRNA-ribosyltran sferase OS=Chryseobacterium haifense DSM 19056 OX=14505 26 GN=tgt PE=3 SV=1
MSQFFEINNTTTGKARAGTITTDHGTIQTPIFMPVGTVASVKTVHQRELRDDIKAQIILGNTYHLNLRPKMDIMQAAGGLHKFMNWDLPILTDSGGYQVFSLSKSRKLTEEGVKFKSHIDGSLHFISPEKSMEIQRQIGADIFMAFDECTPYPCDYNLAKDSMEMTHRWLKRCIEWIEENPEIYGHKQRLFPIVQGSTFSDLRKISAEFISEQNAAGNAIGGLSVGEPEEEMYRITDEVTDILPKDKPRYLMGVGTPWNILESIGLGIDMMDCVMPTRNARNAMLFTWNGVMNMKNKKWESDFSPLDEFGTSYVDSEYSKAYVRHLFVAKEYLAKQIASVHNLAFYLDLVRVAREHIIAGDFYEWKNSVIPTLKTRL

SEQ ID NO: 53808 - protein, 377 aa, Chryseobacterium haifense
  misc_feature (1)..(377): tr|A0A3G6T3H0|A0A3G6T3H0_9FLAO Queuine tRNA-ribosyltran sferase OS=Chryseobacterium haifense OX=421525 GN=tgt P E=3 SV=1
MSQFFEINNTTTGKARAGTITTDHGTIQTPIFMPVGTVASVKTVHQRELRDDIKAQIILGNTYHLNLRPKMDIMQAAGGLHKFMNWDLPILTDSGGYQVFSLSKSRKLTEEGVKFKSHIDGSLHFISPEKSMEIQRQIGADIFMAFDECTPYPCDYNLAKDSMEMTHRWLKRCIEWTEENPEIYGHKQRLFPIVQGSTYSDLRKISAEFISEQNAAGNAIGGLSVGEPEEEMYRITDEVTDILPKDKPRYLMGVGTPWNILESIGLGIDMMDCVMPTRNARNAMLFTWNGVMNMKNKKWESDFSPLDEFGTSYVDSEYSKAYVRHLFVAKEYLAKQIASVHNLAFYLDLVRVARAHIIAGDFYEWKNSVIPTLKTRL

SEQ ID NO: 53809 - protein, 377 aa, Chryseobacterium halperniae
  misc_feature (1)..(377): tr|A0A085BMA7|A0A085BMA7_9FLAO Queuine tRNA-ribosyltran sferase OS=Chryseobacterium halperniae OX=421072 GN=tgt PE=3 SV=1
MQKFFEIEKTSESKARAGVINTDHGQIQTPIFMPVGTVASVKTVHQRELKEDIKAQIILGNTYHLMLRPTMDIMEKAAGLHQFMNWDLPILTDSGGYQVFSLAKSRKITEEGVKFKSHIDGSLHFMSPEVSMQIQRQIGADIFMAFDECIAYPSDYNAVKTSMELTHRWLKRCITWTEENKELYGHKQRLFPIVQGSCYSDLRKISAEVISEAGAEGNAIGGLSVGEPEPEMYRITNEVTDILPTDKPRYLMGVGTPWNILESIGFGVDMMDCVMPTRNARNAMLFTWQGVMNMKNERWKEDFSPLDEFGTSFVDSAYSKAYVRHLFVSKEYLAKQIASIHNLAFYLDLVKVAREHIVAGDFYQWKDSIIPQLKTRL

SEQ ID NO: 53810 - protein, 376 aa, Chryseobacterium hispanicum
  misc_feature (1)..(376): tr|A0A3D9D1W6|A0A3D9D1W6_9FLAO Queuine tRNA-ribosyltran sferase OS=Chryseobacterium hispanicum OX=358687 GN=tgt PE=3 SV=1
MKFFEIEKTSESKARAGVITTDHGQIQTPIFMPVGTVASVKTVHQRELKEDIKAQIILGNTYHLMLRPTMDIMEQAGGLHKFMNWDRPILTDSGGYQVFSLAKSRKITEEGVKFKSHIDGSLRFMSPEVSMQIQRQIGADIFMAFDECIAYPSDYNAVKTSMELTHRWLKRCIDWTEENKELYDHKQRLFPIVQGSCFSDLRKISAEVISEAGAEGNAIGGLSVGEPEEEMYRITNEVTDILPKDKPRYLMGVGTPWNIIESIGFGVDMMDCVMPTRNARNAMLFTWQGVMNMKNEKWKTDFSPLDEFGTSFVDQEYTKAYVRHLFVAKEYLAKQIASIHNLAFYLDLVKVAREHIIAGDFYQWKEQIIPQLKKRL

SEQ ID NO: 53811 - protein, 390 aa, Chryseobacterium hominis
  misc_feature (1)..(390): tr|A0A1H6M282|A0A1H6M282_9FLAO Queuine tRNA-ribosyltran sferase OS=Chryseobacterium hominis OX=420404 GN=tgt PE =3 SV=1
MTFGKNRRRNLLHTMKFFEIEKNSESKARAGIITTDHGTIQTPIFMPVGTVASVKTVHQRELKEDIKAQIILGNTYHLMLRPKMDIMEQAGGLHKFMNWDRPILTDSGGYQVFSLAKSRKITEEGVKFKSHIDGSLHFMSPEVSMQIQRQIGADIFMAFDECIAYPSDYNAVKTSMELTHRWLKRCISWTEENKELYGHKQRLFPIVQGSCFSDLRKISAEVISEAGADGNAIGGLSVGEPEDEMYRITNEVTDILPKDKPRYLMGVGTPWNILESIGFGVDMMDCVMPTRNARNAMLFTWQGVMNMKNEKWKTDFSPLDEFGTSFVDQEYSKAYVRHLFVAKEYLAKQIASIHNLAFYLDLVKVAREHIVAGDFYQWKEQIIPQLKTRL

SEQ ID NO: 53812 - protein, 376 aa, Chryseobacterium hominis
  misc_feature (1)..(376): tr|A0A3N0X6H8|A0A3N0X6H8_9FLAO Queuine tRNA-ribosyltran sferase OS=Chryseobacterium hominis OX=420404 GN=tgt PE =3 SV=1
MKFFEIEKNSESKARAGVITTDHGTIQTPIFMPVGTVASVKTVHQRELKEDIKAQIILGNTYHLMLRPKMDIMEQAGGLHKFMNWDRPILTDSGGYQVFSLAKSRKITEEGVKFKSHIDGSLHFMSPEVSMQIQRQIGADIFMAFDECIAYPSDYNAVKTSMELTHRWLKRCISWTEENKELYGHKQRLFPIVQGSCFSDLRKISAEVISEAGADGNAIGGLSVGEPEDEMYRITNEVTDILPKDKPRYLMGVGTPWNILESIGFGVDMMDCVMPTRNARNAMLFTWQGVMNMKNEKWKTDFSPLDEFGTSFVDQEYSKAYVRHLFVAKEYLAKQIASIHNLAFYLDLVKVAREHIVAGDFYQWKEQIIPQLKTRL

SEQ ID NO: 53813 - protein, 377 aa, Chryseobacterium humi
  misc_feature (1)..(377): tr|A0A1H5XYA5|A0A1H5XYA5_9FLAO Queuine tRNA-ribosyltran sferase OS=Chryseobacterium humi OX=493375 GN=tgt PE=3 SV=1
MQKFFEIEKTSEGKARAGIINTDHGKIETPIFMPVGTVASVKTVHQRELKDDIKAQIILGNTYHLNLRPKMDIMQAAGGLHKFMNWDLPILTDSGGYQVFSLSKSRKLNEEGVKFKSHIDGSTHFISPEISMEIQRQIGADIFMAFDECTPYPCDYRLAKKSMEMTHRWLKRCIDYNEKNKEIYGYKQHFFPIVQGSTYSDLRKISAEKIAESDQVGNAIGGLSVGEPEEEMYRITDEVTDFLPKEKPRYLMGVGTPWNILETIGLGIDMMDCVMPTRNARNAMLFTWQGVMNMKNKKWENDFSPLDEFGTSYVDREYSKAYVRHLFVAKEYLSKQIASIHNLAFYLDLVKVAREHIVAGDFYEWKNAVIPNLKNRL

SEQ ID NO: 53814 - protein, 376 aa, Chryseobacterium hungaricum
  misc_feature (1)..(376): tr|A0A1G7FP49|A0A1G7FP49_9FLAO Queuine tRNA-ribosyltran sferase OS=Chryseobacterium hungaricum OX=454006 GN=tgt PE=3 SV=1
MKFFEIEKTSESKARAGVITTDHGQIQTPIFMPVGTVASVKTVHQRELKEDIKAQIILGNTYHLMLRPKMDIMEQAGGLHKFMNWDRPILTDSGGYQVFSLAKSRKITEEGVKFKSHIDGSLQFMSPEISMQIQRQIGADIFMAFDECIAYPSDYNAVKTSMELTHRWLKRCIDWTEENKELYGHKQRLFPIVQGSCYSDLRKISAEVISEAGAEGNAIGGLSVGEPEEEMYRITNEVTDILPKDKPRYLMGVGTPWNIIESIGLGVDMMDCVMPTRNARNAMLFTWQGVMNMKNEKWKTDFSPLDEFGTSFVDQEYSKAYVRHLFVAKEYLAKQIASIHNLAFYLDLVKVAREHIIAGDFYQWKEQIIPQLKQRL

SEQ ID NO: 53815 - protein, 376 aa, Chryseobacterium indologenes
  misc_feature (1)..(376): tr|A0A411DRE9|A0A411DRE9_9FLAO Queuine tRNA-ribosyltran sferase OS=Chryseobacterium indologenes OX=253 GN=tgt P E=3 SV=1
MKFFNIEKTSEGKARAGEITTDHGKIQTPIFMPVGTVASVKTVHQRELKEDIKAQIILGNTYHLYLRPGMETMQDAGGLHKFMNWDLPILTDSGGFQVFSLASNRKMTEEGARFKSHIDGSYHMFSPERSMEIQRQIGADIFMAFDECTPYPCDYNQAKSSMELTHRWLKRCIDWTNDNPELYGHKQRLFPIVQGSTYSDLRKISAEVISEAGAEGNAIGGLSVGEPEEEMYRITDEVTDILPKEKPRYLMGVGTPWNILESIGLGIDMMDCVMPTRNARNAMLFTWQGVMNLKNEKWKRDFSPLDEFGTSFVDREYSKAYLRHLFVSKEYLAKQIASIHNLAFYLDLVKVAREHIMAGDFYEWKNSVVPVLRQRL

SEQ ID NO: 53816 - protein, 376 aa, Chryseobacterium indologenes
  misc_feature (1)..(376): tr|A0A1Z3W6U7|A0A1Z3W6U7_9FLAO Queuine tRNA-ribosyltran sferase OS=Chryseobacterium indologenes OX=253 GN=tgt P E=3 SV=1
MKFFNIEKTSEGKARAGEITTDHGKIQTPIFMPVGTVASVKTVHQRELKEDIKAQIILGNTYHLYLRPGMETMQAAGGLHKFMNWDLPILTDSGGFQVFSLASNRKMTEEGARFKSHIDGSYHMFSPERSMEIQRQIGADIFMAFDECTPYPCEYNQAKSSMELTHRWLKRCIEWTNDNPELYGHKQRLFPIVQGSTYSDLRKISAEVISEAGAEGNAIGGLSVGEPEEEMYRITDEVTDILPKEKPRYLMGVGTPWNILESIGLGIDMMDCVMPTRNARNAMLFTWQGVMNLKNEKWKQDFSPLDEFGTSFVDREYSKAYLRHLFVSKEYLAKQIASIHNLAFYLDLVKVAREHIIAGDFYEWKNSVVPVLRQRL

SEQ ID NO: 53817 - protein, 376 aa, Chryseobacterium indoltheticum
  misc_feature (1)..(376): tr|A0A381F704|A0A381F704_9FLAO Queuine tRNA-ribosyltran sferase OS=Chryseobacterium indoltheticum OX=254 GN=tgt PE=3 SV=1
MNFFNIEKTSESKARAGVLSTDHGTIQTPIFMPVGTVASVKTVHQREIKDDIKAQIILGNTYHLYLRPGMEVMQEAGGLHKFMNWDLPILTDSGGFQVFSLSGSRKMSEEGVKFKSHIDGSYHLFTPEKSMEIQRQIGADIFMAFDECVAYPSDYNRVKLSMEMTHRWLKRCIDWNAENPELYGHKQRFFPIVQGSTYSDLRKISAEVISEAGAEGNAIGGLSVGEPEEELYRITDEVTDILPKDKPRYLMGVGTPWNILESIGLGIDMMDCVMPTRNARNAMLFTWQGVMNMKNEKWKKDFSPLDEFGTSFVDHEYSKAYVRHLFVSKEYLAKQIASIHNLAFYLDLVKVAREHILAGDFYQWKDSVVPVLRQRL

SEQ ID NO: 53818 - protein, 376 aa, Chryseobacterium indoltheticum
  misc_feature (1)..(376): tr|A0A381FKC5|A0A381FKC5_9FLAO Queuine tRNA-ribosyltran sferase OS=Chryseobacterium indoltheticum OX=254 GN=tgt PE=3 SV=1
MNFFNIEKTSESKARAGVLSTDHGTIQTPIFMPVGTVASVKTVHQREIKDDIKAQIILGNTYHLYLRPGMEVMQEAGGLHKFMNWDLPILTDSGGFQVFSLSGSRKMSEEGVKFKSHIDGSYHLFTPEKSMEIQRQIGADIFMAFDECVAYPSDYNQVKLSMEMTHRWLKRCIDWNAENPELYGHKQRFFPIVQGSTYSDLRKISAEVISEAGAEGNAIGGLSVGEPEEELYRITDEVTDILPKDKPRYLMGVGTPWNILESIGLGIDMMDCVMPTRNARNAMLFTWQGVMNMKNEKWKKDFSPLDEFGTSFVDHEYSKAYVRHLFVSKEYLAKQIASIHNLAFYLDLVKVAREHILAGDFYQWKDSVVPVLRQRL

SEQ ID NO: 53819 - protein, 376 aa, Chryseobacterium jejuense
  misc_feature (1)..(376): tr|A0A2X2ZBU4|A0A2X2ZBU4_9FLAO Queuine tRNA-ribosyltran sferase OS=Chryseobacterium jejuense OX=445960 GN=tgt P E=3 SV=1
MKFFNIEKTSEGKARAGEITTDHGKIQTPIFMPVGTVASVKTVHQRELKEDIKAQIILGNTYHLYLRPGMETMQDAGGLHKFMNWDLPILTDSGGFQVFSLASNRKMTEEGARFKSHIDGSYHMFSPERSMEIQRQIGADIFMAFDECTPYPCEYNQAKSSMELTHRWLKRCIEWTNDNPELYGYKQRLFPIVQGSTYSDLRKISAEVISEAGAEGNAIGGLSVGEPEEEMYRITDEVTDILPKEKPRYLMGVGTPWNILESIGLGIDMMDCVMPTRNARNAMLFTWQGVMNLKNEKWKRDFSPLDEFGTSFVDREYSKAYLRHLFVSKEYLAKQIASIHNLAFYLDLVKVAREHIIAGDFYEWKNSVVPVLRQRL

SEQ ID NO: 53820 - protein, 378 aa, Chryseobacterium jeonii
  misc_feature (1)..(378): tr|A0A0C1FDW2|A0A0C1FDW2_9FLAO Queuine tRNA-ribosyltran sferase OS=Chryseobacterium jeonii OX=266749 GN=tgt PE= 3 SV=1
MISPFFEINKTSTGKARAGTITTDHGTIQTPIFMPVGTVASVKTVHQRELKDDIKAQIILGNTYHLNLRPKMDIMQAAGGLHKFMNWDLPILTDSGGYQVFSLSKSRKLNEAGVKFKSHIDGSTHFISPEISMEIQRQIGADIFMAFDECVAYPAEYNQVKKSMDLTHRWLKRCIKWNAENPELYGHKQAFFPIVQGSCYSDLRKKSAEFISEQNAVGNAIGGLSVGEPEEEMYRITDEVTDILPKDKPRYLMGVGTPWNIIETIGLGIDMMDCVMPTRNARNAMLFTWQGVMNMKNKKWESDFSPLDEFGTSYVDTEYSKAYVRHLFVAKEYLAKQIASIHNLAFYLDLVKVAREHIVAGDFYEWKDSIIPVLRQRL

SEQ ID NO: 53821 - protein, 376 aa, Chryseobacterium joostei
  misc_feature (1)..(376): tr|A0A1N7I9I6|A0A1N7I9I6_9FLAO Queuine tRNA-ribosyltran sferase OS=Chryseobacterium joostei OX=112234 GN=tgt PE =3 SV=1
MKFFNIEKTSEGKARAGEITTDHGKIQTPIFMPVGTVASVKTVHQRELKEDIKAQIILGNTYHLYLRPGMETMQDAGGLHKFMNWDLPILTDSGGFQVFSLASNRKMTEEGARFKSHIDGSYHMFSPERSMEIQRQIGADIFMAFDECTPYPCEYNQAKSSMELTHRWLKRCIDWTNDNPELYGHKQRLFPIVQGSTYSDLRKISAEVISEAGAEGNAIGGLSVGEPEEEMYRITDEVTDILPKEKPRYLMGVGTPWNILESIGLGIDMMDCVMPTRNARNAMLFTWQGVMNLKNEKWKRDFSPLDEFGTSFVDREYSKAYLRHLFVSKEYLAKQIASIHNLAFYLDLVKVGREHILAGDFYEWKNSVVPVLRQRL

SEQ ID NO: 53822 - protein, 377 aa, Chryseobacterium koreense
  misc_feature (1)..(377): tr|A0A0J7J2N9|A0A0J7J2N9_9FLAO Queuine tRNA-ribosyltran sferase OS=Chryseobacterium koreense CCUG 49689 OX=1304 281 GN=tgt PE=3 SV=1
MSPFFKINKTSTGKARAGTISTDHGTIQTPIFMPVGTVASVKTVHQHELKEDIKAQIILGNTYHLYLRPKMEIMQQAGGLHKFMNWDLPILTDSGGYQVFSLSASRKMSEEGVKFKSHIDGSYHFISPEKSMEIQRQIGGDIFMAFDECTPYPCEYNLAKTSMEMTHRWLKRCIDWTNENQEIYGHQQRLFPIVQGSTYSDLRKISAEFISEQNAEGNAIGGLSVGEPEEEMYRITNEVTDILPKDKPRYLMGVGTPWNILESIGLGIDMMDCVMPTRNARNAMLFTWNGVMNMKNEKWKNDFSPLDEFGTSYVDREYSKAYVRHLFVSKEYLAKQIASIHNLAFYLDLVKVAREHIFAGDFYEWKDSVVPVLKQRL

SEQ ID NO: 53823 - protein, 376 aa, Chryseobacterium kwangjuense
  misc_feature (1)..(376): tr|A0A135WDV3|A0A135WDV3_9FLAO Queuine tRNA-ribosyltran sferase OS=Chryseobacterium kwangjuense OX=267125 GN=tg t PE=3 SV=1
MKFFNIEKTSEGKARAGELTTDHGKIQTPIFMPVGTVASVKTVHQRELKEDIKAQIILGNTYHLYLRPTMDIMEEAGGLHKFMNWDLPILTDSGGFQVFSLSKSRKMSEEGVKFKSHIDGSYHMFTPEKSMEIQRQIGADIFMAFDECTPYPCEYNQAKSSMELTHRWLKRCIDWTEENKEIYGHKQRLFPIVQGSTYSDLRKISAEVISEAGAEGNAIGGLSVGEPEEEMYRITDEVTDILPKDKPRYLMGVGTPWNILESIGLGIDMMDCVMPTRNARNAMLFTWQGVMNLKNEKWKRDFSPLDEFGTSYVDREYSKAYLRHLFVSKEYLAKQIASVHNLAFYLDLVKVAREHIIAGDFYEWKKSVVPVLRQRL

SEQ ID NO: 53824 - protein, 376 aa, Chryseobacterium lactis
  misc_feature (1)..(376): tr|A0A3G6RUD4|A0A3G6RUD4_9FLAO Queuine tRNA-ribosyltran sferase OS=Chryseobacterium lactis OX=1241981 GN=tgt PE =3 SV=1
MKFFNIEKTSEGKARAGEITTDHGKIQTPIFMPVGTVASVKTVHQRELKEDIKAQIILGNTYHLYLRPGMETMQDAGGLHKFMNWDLPILTDSGGFQVFSLASNRKMTEEGARFKSHIDGSYHMFSPERSMEIQRQIGADIFMAFDECTPYPCEYNQAKSSMELTHRWLKRCIDWTNDNPEIYGHKQRLFPIVQGSTYSDLRKISAEVISEAGAEGNAIGGLSVGEPEEEMYRITDEVTDILPKEKPRYLMGVGTPWNILESIGLGIDMMDCVMPTRNARNAMLFTWQGVMNLKNEKWKRDFSPLDEFGTSFVDKEYSKAYLRHLFVSKEYLAKQIASIHNLAFYLDLVKVAREHIIAGDFYQWKDSVVPVLRQRL

SEQ ID NO: 53825 - protein, 376 aa, Chryseobacterium lathyri
  misc_feature (1)..(376): tr|A0A511YDM0|A0A511YDM0_9FLAO Queuine tRNA-ribosyltran sferase OS=Chryseobacterium lathyri OX=395933 GN=tgt PE =3 SV=1
MKFFNIEKTSEGKARAGEITTDHGKIQTPIFMPVGTVASVKTVHQRELKEDIKAQIILGNTYHLYLRPTMDIMQEAGGLHKFMNWDLPILTDSGGFQVFSLSKSRKMSEEGVKFKSHIDGSYHMFTPEKSMEIQRQIGADIFMAFDECTPYPCEYNQAKTSMELTHRWLKRCIEWTEQNKEIYGHKQRLFPIVQGSTYSDLRKISAEVISEAGAEGNAIGGLSVGEPEEEMYRITDEVTDILPKDKPRYLMGVGTPWNILESIGLGIDMMDCVMPTRNARNAMLFTWQGVMNLKNEKWKRDFSPLDEFGTSYVDREYSKAYLRHLFVSKEYLAKQIASVHNLAFYLDLVKVAREHIVAGDFYEWKKSVVPVLRQRL

SEQ ID NO: 53826 - protein, 376 aa, Chryseobacterium limigenitum
  misc_feature (1)..(376): tr|A0A1K2IF76|A0A1K2IF76_9FLAO Queuine tRNA-ribosyltran sferase OS=Chryseobacterium limigenitum OX=1612149 GN=t gt PE=3 SV=1
MKFFNIEKTSEGKARAGEIMTDHGKVQTPIFMPVGTVASVKTVHQRELKEDIKAQIILGNTYHLYLRPGMETMQNAGGLHKFMNWDLPILTDSGGFQVFSLSGSRKMSEEGVKFKSHIDGSYHLFTPEKSMEIQRQIGADIFMAFDECVAYPSGYNQVKASMEMTHRWLKRCIDWNEQNPELYGHKQRFFPIVQGSTYSDLRKISAEVISEAGAEGNAIGGLSVGEPEDELYRITDEVTDILPKDKPRYLMGVGTPWNILESIGLGIDMMDCVMPTRNARNAMLFTWQGVMNMKNEKWKNDFSPLDEFGTSFVDKEYSKAYVRHLFVSKEYLGKQIASIHNLAFYLDLVKVAREHIVAGDFYQWKNSVVPILRQRL

SEQ ID NO: 53827 - protein, 376 aa, Chryseobacterium luteum
  misc_feature (1)..(376): tr|A0A085ZX15|A0A085ZX15_9FLAO Queuine tRNA-ribosyltran sferase OS=Chryseobacterium luteum OX=421531 GN=tgt PE= 3 SV=1
MKFFNIEKTSEGKARAGEITTAHGKIQTPIFMPVGTVASVKTVHQRELKEDIKAQIILGNTYHLYLRPTMDIMQEAGGLHKFMNWDLPILTDSGGFQVFSLSKSRKMSEEGVKFKSHIDGSYHMFTPEKSMEIQRQIGADIFMAFDECVAYPCDYNQVKSSMEMTHRWLKRCIDWNEKNPELYGHKQTFFPIVQGSTYSDLRKISAEVISEAGAEGNAIGGLSVGEPEEEMYRITDEVTDILPKDKPRYLMGVGTPWNILESIGLGIDMMDCVMPTRNARNAMLFTWQGVMNLKNEKWKRDFSPLDEFGTSYVDREYSKAYLRHLFVSKEYLAKQIASIHNLAFYLDLVKVAREHIVAGDFYEWKKSVMPALRQRL

SEQ ID NO: 53828 - protein, 376 aa, Chryseobacterium molle
  misc_feature (1)..(376): tr|A0A1M6R2Y6|A0A1M6R2Y6_9FLAO Queuine tRNA-ribosyltran sferase OS=Chryseobacterium molle OX=216903 GN=tgt PE=3 SV=1
MKFFEIEKSSESKARAGVITTDHGQIQTPIFMPVGTVASVKTVHQRELKEDIKAQIILGNTYHLMLRPTMDIMEQAGGLHKFMNWDRPILTDSGGYQVFSLAKSRKMTEEGVKFKSHIDGSFHFISPEKSMEIQRQIGADIFMAFDECTPYPCEYAQAKTSMELTHRWLKRCIEWTEENKELYGHKQRLFPIVQGSTYSDLRKISAEVISEFGAEGNAIGGLSVGEPEEEMYRITNEVTDILSKEKPRYLMGVGTPWNIIESIGLGVDMMDCVMPTRNARNAMLFTWQGVMNMKNEKWKADFSPLDEFGTSFVDQEYSKAYVRHLFVAKEYLAKQIASIHNLAFYLDLVKVAREHIVAGDFYQWKEQIIPQLKQRL

SEQ ID NO: 53829 - protein, 377 aa, Chryseobacterium mucoviscidosis; identical to SEQ ID NO: 53800
  misc_feature (1)..(377): tr|A0A202C2Y7|A0A202C2Y7_9FLAO Queuine tRNA-ribosyltran sferase OS=Chryseobacterium mucoviscidosis OX=1945581 G N=tgt PE=3 SV=1

SEQ ID NO: 53830 - protein, 376 aa, Chryseobacterium nakagawai
  misc_feature (1)..(376): tr|A0A3S4UPC4|A0A3S4UPC4_9FLAO Queuine tRNA-ribosyltran sferase OS=Chryseobacterium nakagawai OX=1241982 GN=tgt PE=3 SV=1
MKFFNIEKTSEGKARAGEITTDHGKIQTPIFMPVGTVASVKTVHQRELKEDIKAQIILGNTYHLYLRPGMETMQDAGGLHKFMNWDLPILTDSGGFQVFSLASNRKMTEEGARFKSHIDGSYHMFSPERSMEIQRQIGADIFMAFDECTPYPCEYNQAKSSMELTHRWLKRCIEWTNDNPELYGHKQRLFPIVQGSTYSDLRKISAEVISEAGAEGNAIGGLSVGEPEEEMYRITDEVTDILPKEKPRYLMGVGTPWNILESIGLGIDMMDCVMPTRNARNAMLFTWQGVMNLKNEKWKRDFSPLDEFGTSFVDREYSKAYLRHLFVSKEYLAKQIASIHNLAFYLDLVKVAREHIIAGDFYEWKNSIVPVLRQRL

SEQ ID NO: 53831 - protein, 376 aa, Chryseobacterium nakagawai; identical to SEQ ID NO: 53782
  misc_feature (1)..(376): tr|A0A3N2ER50|A0A3N2ER50_9FLAO Queuine tRNA-ribosyltran sferase OS=Chryseobacterium nakagawai OX=1241982 GN=tgt PE=3 SV=1

SEQ ID NO: 53832 - protein, 376 aa, Chryseobacterium nematophagum
  misc_feature (1)..(376): tr|A0A3M7LHE2|A0A3M7LHE2_9FLAO Queuine tRNA-ribosyltran sferase OS=Chryseobacterium nematophagum OX=2305228 GN= tgt PE=3 SV=1
MKFFNIEKISQGKARAGEITTDHGKIQTPIFMPVGTVASVKTVHQRELKEDIKAQIILGNTYHLYLRPTMDIMQEAGGLHHFMNWDGPILTDSGGFQVFSLSKSRKMTEEGVKFKSHIDGSYHFISPEKSMEIQRQIGADIFMAFDECTPYPCEYNQAKSSMELTHRWLKRCIEWTEKNQELYGHKQRLFPIVQGSTYSDLRKISAEVISEAGAEGNAIGGLSVGEPEEEMYRITDEVTDILPKDKPRYLMGVGTPWNILESIGLGIDMMDCVMPTRNARNAMLFTWKGVMNLKNEKWKKDFSPLDEFGISFVDREYSKAYLRHLFVSKEYLAKQIASIHNLAFYLDLVKVAREHIIAGDFYEWKKSVVPVLKQRL

SEQ ID NO: 53833 - protein, 376 aa, Chryseobacterium nematophagum
  misc_feature (1)..(376): tr|A0A3M7TC84|A0A3M7TC84_9FLAO Queuine tRNA-ribosyltran sferase OS=Chryseobacterium nematophagum OX=2305228 GN= tgt PE=3 SV=1
MKFFNIEKISQGKARAGEITTDHGKIQTPIFMPVGTVASVKTVHQRELKEDIKAQIILGNTYHLYLRPTMDIMQEAGGLHHFMNWDGPILTDSGGFQVFSLSKSRKMTEEGVKFKSHIDGSYHFISPEKSMEIQRQIGADIFMAFDECTPYPCEYNQAKSSMELTHRWLKRCIEWTEKNQELYGHKQRLFPIVQGSTYSDLRKISAEVISEAGAEGNAIGGLSVGEPEEEMYRITDEVTDILPKDKPRYLMGVGTPWNILESIGLGIDMMDCVMPTRNARNAMLFTWKGVMNLKNEKWKKDFSPLDEFGTSFVDRDYSKAYLRHLFVSKEYLAKQIASIHNLAFYLDLVKVAREHIIAGDFYEWKKSVVPVLKQRL

SEQ ID NO: 53834 - protein, 376 aa, Chryseobacterium oleae
  misc_feature (1)..(376): tr|A0A1I5AM34|A0A1I5AM34_9FLAO Queuine tRNA-ribosyltran sferase OS=Chryseobacterium oleae OX=491207 GN=tgt PE=3 SV=1
MKFFNIEKTSEGKARAGEITTDHGKIQTPIFMPVGTVASVKTVHQRELKEDIKAQIILGNTYHLYLRPAMDTMEQAGGLHKFMNWDLPILTDSGGFQVFSLSKSRKMSEEGVKFKSHIDGSYHMFTPEKSMEIQRQIGADIFMAFDECVAYPSGYNEVKASMEMTHRWLKRCIDWNEANPELYGHKQRFFPIVQGSTYSDLRKISAEVISEAGAEGNAIGGLSVGEPEEELYRITDEVTDILPKEKPRYLMGVGTPWNILESIGLGIDMMDCVMPTRNARNAMLFTWQGVMNMKNEKWKQDFSPLDEFGTSYVDREYSKAYLRHLFVSKEYLAKQIASVHNLAFYLDLVKVAREHIVAGDFYEWKKSIVPVLKQRL

SEQ ID NO: 53835 - protein, 376 aa, Chryseobacterium oncorhynchi
  misc_feature (1)..(376): tr|A0A316WTS0|A0A316WTS0_9FLAO Queuine tRNA-ribosyltran sferase OS=Chryseobacterium oncorhynchi OX=741074 GN=tg t PE=3 SV=1
MKFFNIEKTSEGKARAGELTTDHGKIQTPIFMPVGTVASVKTVHQRELKEDIKAQIILGNTYHLYLRPGMETMQDAGGLHKFMNWDLPILTDSGGFQVFSLASNRKMTEEGARFKSHIDGSYHMFSPERSMEIQRQIGADIFMAFDECTPYPCEYNQAKSSMELTHRWLKRCIDWTNENPELYGHKQRLFPIVQGSTYSDLRKISAEVISEAGAEGNAIGGLSVGEPEEEMYRITDEVTDILPKEKPRYLMGVGTPWNILESIGLGIDMMDCVMPTRNARNAMLFTWQGVMNLKNEKWKRDFSPLDEFGTSFVDREYSKAYLRHLFVSKEYLAKQIASIHNLAFYLDLVKVAREHILAGDFYEWKNSVVPVLRQRL

SEQ ID NO: 53836 - protein, 376 aa, Chryseobacterium oranimense
  misc_feature (1)..(376): tr|A0A1M5PGE0|A0A1M5PGE0_9FLAO Queuine tRNA-ribosyltran sferase OS=Chryseobacterium oranimense OX=421058 GN=tgt PE=3 SV=1
MKFFNIEKTSEGKARAGELTTDHGKIQTPIFMPVGTVASVKTVHQRELKEDIKAQIILGNTYHLYLRPTMDIMQEAGGLHKFMNWDLPILTDSGGFQVFSLSKSRKMSEEGVKFKSHIDGSYHMFTPEKSMEIQRQIGADIFMAFDECTPYPCEYNQAKSSMELTHRWLKRCIDWTEENKEIYGHKQRLFPIVQGSTYSDLRKISAEVISEAGAEGNAIGGLSVGEPEEEMYRITDEVTDILPKDKPRYLMGVGTPWNILESIGLGIDMMDCVMPTRNARNAMLFTWQGVMNLKNEKWKRDFSPLDEFGTSYVDREYSKAYLRHLFVSKEYLAKQIASVHNLAFYLDLVKVAREHIVAGDFYEWKKSVVPVLRQRL

SEQ ID NO: 53837 - protein, 376 aa, Chryseobacterium piperi
  misc_feature (1)..(376): tr|A0A086BN19|A0A086BN19_9FLAO Queuine tRNA-ribosyltran sferase OS=Chryseobacterium piperi OX=558152 GN=tgt PE= 3 SV=1
MKFFNIEKTSEGKARAGELTTDHGKIQTPIFMPVGTVASVKTVHQRELKEDIKAQIILGNTYHLYLRPGMDVMQEAGGLHKFMNWDLPILTDSGGFQVFSLSGSRKMSEEGVKFKSHIDGSYHLFTPEKSMEIQRQIGADIFMAFDECTPYPCEYNQAKLSMELTHRWLKRCIDWTEQNPELYGHKQRLFPIVQGSTYSDLRKISAEVISEAGAEGNAIGGLSVGEPEEEMYRITDEVTDILPKDKPRYLMGVGTPWNILESIGLGIDMMDCVMPTRNARNAMLFTWQGVMNLKNEKWKRDFSPLDEFGTSFVDREYSKAYVRHLFVAREYLAKQIASIHNLAFYLDLVKVAREHIIAGDFYEWKKSVIPVLRQRL

SEQ ID NO: 53838 - protein, 376 aa, Chryseobacterium piscicola
  misc_feature (1)..(376): tr|A0A1N7K8Z3|A0A1N7K8Z3_9FLAO Queuine tRNA-ribosyltran sferase OS=Chryseobacterium piscicola OX=551459 GN=tgt PE=3 SV=1
MNFFTIEKTSQGKARAGELNTAHGKVQTPIFMPVGTVASVKTVHQRELKDDIKAQIILGNTYHLYLRPGMDVMQAAGGLHQFMNWDLPILTDSGGFQVFSLSGTRKMSEEGVKFKSHIDGSVHLFTPEKSMEIQRQIGADIFMAFDECVAYPAHYNQVKKSMDMTHRWLKRCMDWNEKNPELYGYKQTFFPIVQGSTFSDLRKISAEVIAEAGAEGNAIGGLSVGEPEDELYRITDEVTDILPKEKPRYLMGVGTPWNILESIGLGIDMMDCVMPTRNARNGMLFTWNGVMNMKNERWKNDFSQLDEFGTSFVDREYSKAYVRHLFVSKEYLGKQIASIHNLAFYLDLVKVAREHILAGDFYEWKNSVVPILRQRL

SEQ ID NO: 53839 - protein, 376 aa, Chryseobacterium piscium
  misc_feature (1)..(376): tr|A0A3D9BVD6|A0A3D9BVD6_9FLAO Queuine tRNA-ribosyltran sferase OS=Chryseobacterium piscium OX=333702 GN=tgt PE =3 SV=1
MNFFNIEKTSEGKARAGVLSTDHGTIQTPIFMPVGTVASVKTVHQREIKDDIKAQIILGNTYHLYLRPGMEVMEAAGGLHKFMNWDLPILTDSGGFQVFSLSGSRKMSEEGVKFKSHIDGSYHLFTPEKSMEIQRQIGADIFMAFDECVAYPSDYNQVKLSMEMTHRWLKRCIDWNAENPELYGHKQRFFPIVQGSTYSDLRKISAEVISEAGAEGNAIGGLSVGEPEEELYRITDEVTDILPKDKPRYLMGVGTPWNILESIGLGIDMMDCVMPTRNARNGMLFTWQGVINMKNEKWKKDFSPLDEFGTSFVDHEYSKAYVRHLFVSKEYLAKQIASIHNLAFYLDLVKVAREHILAGDFYQWKNSIVPVLRQRL

SEQ ID NO: 53840 - protein, 376 aa, Chryseobacterium polytrichastri
  misc_feature (1)..(376): tr|A0A1M6WYC2|A0A1M6WYC2_9FLAO Queuine tRNA-ribosyltran sferase OS=Chryseobacterium polytrichastri OX=1302687 G N=tgt PE=3 SV=1
MKFFNIEKTSEGKARAGEIMTDHGKVQTPIFMPVGTVASVKTVHQRELKEDIKAQIILGNTYHLYLRPGMETMQEAGGLHKFMNWELPILTDSGGFQVFSLSGSRKMSEEGVKFKSHIDGSYHLFTPEKSMEIQRQIGADIFMAFDECVAYPSGYNQVKASMEMTHRWLKRCIDWNEKNPELYGHKQRFFPIVQGSTYSDLRKISAEVIAEAGAEGNAIGGLSVGEPEDELYRITDEVTDILPKDKPRYLMGVGTPWNILESIGLGIDMMDCVMPTRNARNAMLFTWQGVMNMKNEKWKQDFSPLDEFGTSFVDREYSKAYVRHLFVSKEYLGKQIASIHNLAFYLDLVKVAREHIIAGDFYQWKDSVVPILRQRL

SEQ ID NO: 53841 - protein, 376 aa, Chryseobacterium rhizoplanae
  misc_feature (1)..(376): tr|A0A521BY72|A0A521BY72_9FLAO Queuine tRNA-ribosyltran sferase OS=Chryseobacterium rhizoplanae OX=1609531 GN=t gt PE=3 SV=1
MKFFNIEKTSEGKARAGEITTDHGKIQTPIFMPVGTVASVKTVHQRELKEDIKAQIILGNTYHLYLRPGMETMQDAGGLHKFMNWDLPILTDSGGFQVFSLASNRKMTEEGARFKSHIDGSYHMFSPERSMEIQRQIGADIFMAFDECTPYPCDYNQAKSSMELTHRWLKRCIEWTNDNPELYGYKQRLFPIVQGSTYSDLRKISAEVISEAGAEGNAIGGLSVGEPEEEMYRITDEVTDILPKEKPRYLMGVGTPWNILESIGLGIDMMDCVMPTRNARNAMLFTWQGVMNLKNEKWKRDFSPLDEFGTSFVDREYSKAYLRHLFVSKEYLAKQIASIHNLAFYLDLVKVAREHIIAGDFYEWKNSIVPVLRQRL

SEQ ID NO: 53842 - protein, 376 aa, Chryseobacterium rhizosphaerae
  misc_feature (1)..(376): tr|A0A3D9DK97|A0A3D9DK97_9FLAO Queuine tRNA-ribosyltran sferase OS=Chryseobacterium rhizosphaerae OX=395937 GN= tgt PE=3 SV=1
MKFFNIEKTSEGKARAGEITTDHGKIQTPIFMPVGTVASVKTVHQRELKEDIKAQIILGNTYHLYLRPGMETMQAAGGLHKFMNWDLPILTDSGGFQVFSLASNRKMTEEGARFKSHIDGSYHMFSPERSMEIQRQIGADIFMAFDECTPYPCEYNQAKSSMELTHRWLKRCIEWTNDNPELYGHKQRLFPIVQGSTYSDLRKISAEVISEAGAEGNAIGGLSVGEPEEEMYRITDEVTDILPKEKPRYLMGVGTPWNILESIGLGIDMMDCVMPTRNARNAMLFTWQGVMNLKNEKWKQDFSPLDEFGTSFVDREYSKAYLRHLFVSKEYLAKQIASIHNLAFYLDLVKVAREHILAGDFYEWKNSVVPVLRQRL

SEQ ID NO: 53843 - protein, 376 aa, Chryseobacterium scophthalmum
  misc_feature (1)..(376): tr|A0A1N6HNM2|A0A1N6HNM2_9FLAO Queuine tRNA-ribosyltran sferase OS=Chryseobacterium scophthalmum OX=59733 GN=tg t PE=3 SV=1
MNFFNIEKTSEGKARAGVLNTDHGTVQTPIFMPVGTVASVKTVHQREIKDDIKAQIILGNTYHLYLRPGMEVMEAAGGLHKFMNWDLPILTDSGGFQVFSLSGSRKMSEEGVKFKSHIDGSYHLFTPEKSMEIQRQIGADIFMAFDECVAYPAHYNQVKKSMEMTHRWLKRCIDWNAENPELYGYKQRFFPIVQGSTYSDLRKISAEVISEAGAEGNAIGGLSVGEPEEELYRITDEVTDILPKDKPRYLMGVGTPWNILESIGLGIDMMDCVMPTRNARNGMLFTWQGVINMKNEKWKKDFSPLDEFGTSFVDHEYSKAYVRHLFVSKEYLAKQIASIHNLAFYLDLVKVAREHILAGDFYQWKDSIVPVLRQRL

SEQ ID NO: 53844 - protein, 376 aa, Chryseobacterium sediminis
  misc_feature (1)..(376): tr|A0A5B2U3G2|A0A5B2U3G2_9FLAO Queuine tRNA-ribosyltran sferase OS=Chryseobacterium sediminis OX=1679494 GN=tgt PE=3 SV=1
MKFFNIEKTSEGKARAGEITTDHGKIQTPIFMPVGTVASVKTVHQRELKEDIKAQIILGNTYHLYLRPGMETMQDAGGLHKFMNWDLPILTDSGGFQVFSLASNRKMTEEGARFKSHIDGSYHMFSPERSMEIQRQIGADIFMAFDECTPYPCDYNQAKSSMELTHRWLKRCIEWTNDNPELYGYKQRLFPIVQGSTYSDLRKISAEVISEAGAEGNAIGGLSVGEPEEEMYRITDEVTDILPKEKPRYLMGVGTPWNILESIGLGIDMMDCVMPTRNARNAMLFTWQGVMNLKNEKWKRDFSPLDEFGTSFVDREYSKAYLRHLFVSKEYLAKQIASIHNLAFYLDLVKVAREHIIAGDFYEWKNSVVPVLRQRL

SEQ ID NO: 53845 - protein, 377 aa, Chryseobacterium shandongense
  misc_feature (1)..(377): tr|A0A3G6R2P7|A0A3G6R2P7_9FLAO Queuine tRNA-ribosyltran sferase OS=Chryseobacterium shandongense OX=1493872 GN= tgt PE=3 SV=1
MQKFFTIEKTSEGKARAGELTTDHGKIQTPIFMPVGTVASVKTVHQRELKEDIKAQIILGNTYHLYLRPGMDTMQEAGGLHKFMNWDLPILTDSGGFQVFSLASSRKMSEEGARFKSHIDGSYHMFSPEKSMEIQRQIGADIFMAFDECVAYPCEYNQAKSSMELTHRWLKRCIDWTENNPELYGHKQRLFPIVQGSTYSDLRKISAQVIAEAGAEGNAIGGLSVGEPEEEMYRITDEVTDILPKEKPRYLMGVGTPWNILESIGLGIDMMDCVMPTRNARNAMLFTWKGVMNMKNEKWKKDFSPLDEFGTSFVDREYSKAYVRHLFVSKEYLAKQIASIHNLAFYLDLVKVAREHILAGDFYEWKNSVVPVLRQRL

SEQ ID NO: 53846 - protein, 376 aa, Chryseobacterium shigense
  misc_feature (1)..(376): tr|A0A1N7IFB6|A0A1N7IFB6_9FLAO Queuine tRNA-ribosyltran sferase OS=Chryseobacterium shigense OX=297244 GN=tgt P E=3 SV=1
MKFFNIEKTSEGKARAGEITTDHGKIQTPIFMPVGTVASVKTVHQRELKEDIKAQIILGNTYHLYLRPTMDIMQAAGGLHQFMNWDLPILTDSGGFQVFSLSKSRKMSEEGVKFKSHIDGSYHMFTPEKSMEIQRQIGADIFMAFDECTPYPCEYNQAKTSMELTHRWLKRCIDWTEENKEIYGHKQRLFPIVQGSTYSDLRKISAEVIAEAGAEGNAIGGLSVGEPEEEMYRITDEVTDILPKDKPRYLMGVGTPWNILESIGLGIDMMDCVMPTRNARNAMLFTWQGVMNMKNEKWKNDFSPLDEFGTSFVDREYSKAYVRHLFVSKEYLAKQIASIHNLAFYLDLVKVAREHIVAGDFYEWKRSVVPVLRQRL

SEQ ID NO: 53847 - protein, 376 aa, Chryseobacterium shigense; identical to SEQ ID NO: 53787
  misc_feature (1)..(376): tr|A0A376EK88|A0A376EK88_9FLAO Queuine tRNA-ribosyltran sferase OS=Chryseobacterium shigense OX=297244 GN=tgt P E=3 SV=1

SEQ ID NO: 53848 - protein, 378 aa, Chryseobacterium soldanellicola
  misc_feature (1)..(378): tr|A0A1H1ACM5|A0A1H1ACM5_9FLAO Queuine tRNA-ribosyltran sferase OS=Chryseobacterium soldanellicola OX=311333 GN =tgt PE=3 SV=1
MMQRFFTIEKTSEGKARAGEITTDHGKIQTPIFMPVGTVASVKTVHQRELKEDIKAQIILGNTYHLYLRPGMETMQDTGGLHKFMNWDLPILTDSGGFQVFSLASSRKMSEEGARFKSHIDGSYHMFSPEKSMEIQRQIGADIFMAFDECVAYPCDYNQVKSSMEMTHRWLKRCIDWNEKNPELYGYKQTFFPIVQGSTYSDLRKISAEVISEAGAEGNAIGGLSVGEPEEEMYRITDEVTDILPKEKPRYLMGVGTPWNILESIGLGIDMMDCVMPTRNARNAMLFTWQGVMNMKNEKWKKDFSPLDEFGTSFVDREYSKAYLRHLFVSKEYLAKQIASIHNLAFYLDLVKVAREHIIAGDFYQWKNSVVPVLRQRL

SEQ ID NO: 53849 - protein, 376 aa, Chryseobacterium soli
  misc_feature (1)..(376): tr|A0A086ABI0|A0A086ABI0_9FLAO Queuine tRNA-ribosyltran sferase OS=Chryseobacterium soli OX=445961 GN=tgt PE=3 SV=1
MKFFNIEKTSEGKARAGELTTDHGKIQTPIFMPVGTVASVKTVHQRELKEDIKAQIILGNTYHLYLRPTMDTMQEAGGLHKFMNWDLPILTDSGGFQVFSLSKSRKMSEEGVKFKSHIDGSYHLFTPEKSMEIQRQIGADIFMAFDECVAYPSGYNEVKASMEMTHRWLKRCIDWNEANPELYGHKQRFFPIVQGSTYSDLRKISAEVISEAGAEGNAIGGLSVGEPEEELYRITDEVTDILPKDKPRYLMGVGTPWNILESIGLGIDMMDCVMPTRNARNAMLFTWQGVMNLKNEKWKKDFSPLDEFGTSFVDREYSKAYVRHLFVSKEYLAKQIASIHNLAFYLDLVKVAREHIVAGDFYQWKNSIVPILRQRL

SEQ ID NO: 53850 - protein, 378 aa, Chryseobacterium solincola
  misc_feature (1)..(378): tr|A0A0C1CUS9|A0A0C1CUS9_9FLAO Queuine tRNA-ribosyltran sferase OS=Chryseobacterium solincola OX=510955 GN=tgt PE=3 SV=1
MKSQFFTINNTTPGKARAGTLSTDHGDIQTPIFMPVGTIASVKTVHQRELKDDIKAQIILGNTYHLNLRPKMDVMQAAGGLHKFMNWDLPILTDSGGYQVFSLSKSRKLNEEGVKFKSHIDGSTHFISPEKSMEIQRQIGADIFMAFDECTPYPCDYNLAKSSMEMTHRWLKRCISWTEENPEIYGHKQRLFPIVQGSTYSDLRKASAEFISEQNAEGNAIGGLSVGEPEDEMYRITNEVTDVLPKEKPRYLMGVGTPWNILESIGLGIDMMDCVMPTRNARNAMLFTWGGIMNMKNEKWKDDFSALDELGTSYVDSEYSKAYVRHLFASKEYLGKQIASVHNLAFYLDLVRVAREHIVAGDFYEWKDSIIPQLKNRL

SEQ ID NO: 53851 - protein, 376 aa, Chryseobacterium sp.
  misc_feature (1)..(376): tr|A0A0T0MAR8|A0A0T0MAR8_9FLAO Queuine tRNA-ribosyltran sferase OS=Chryseobacterium sp. Leaf394 OX=1736361 GN=t gt PE=3 SV=1
MSFFSIEKTSQGKARAGELNTAHGKVQTPIFMPVGTVASVKTVHQRELKEDIKAQIILGNTYHLYLRPGMEVMQEAGGLHKFMNWDLPILTDSGGFQVFSLSGTRKMSEEGVKFKSHIDGSVHLFTPEKSMEIQRQIGADIFMAFDECVAYPEEYNQVKQSMEMTHRWLKRCMDWNEKNPELYGHKQTFFPIVQGSTFSDLRKISAEVISEAGAEGNAIGGLSVGEPEEEMYRITDEVTDILPKEKPRYLMGVGTPWNILESIGLGIDMMDCVMPTRNARNAMLFTWQGVMNMKNEKWKKDFSPLDEFGTSFVDREYSKAYVRHLFVSKEYLAKQIASVHNLAFYLDLVKVAREHILAGDFYEWKNSVMPVLRQRL

SEQ ID NO: 53852 - protein, 376 aa, Chryseobacterium sp.
  misc_feature (1)..(376): tr|A0A316X3S1|A0A316X3S1_9FLAO Queuine tRNA-ribosyltran sferase OS=Chryseobacterium sp. ISE14 OX=475075 GN=tgt PE=3 SV=1
MKFFNIEKTSEGKARAGEITTDHGKIQTPIFMPVGTVASVKTVHQRELKEDIKAQIILGNTYHLYLRPGMETMQAAGGLHKFMNWDLPILTDSGGFQVFSLASNRKMTEEGARFKSHIDGSYHMFSPERSMEIQRQIGADIFMAFDECTPYPCEYNQAKSSMELTHRWLKRCIEWTNDNPELYGHKQRLFPIVQGSTYSDLRKISAEVISEAGAEGNAIGGLSVGEPEEEMYRITDEVTDILPKEKPRYLMGVGTPWNILESIGLGIDMMDCVMPTRNARNAMLFTWKGVMNLKNEKWKQDFSPLDEFGASFVDQEYSKAYLRHLFVSKEYLAKQIASIHNLAFYLDLVKVAREHIIAGDFYEWKNSVVPVLRQRL

SEQ ID NO: 53853 - protein, 378 aa, Chryseobacterium taeanense
  misc_feature (1)..(378): tr|A0A1G8KSJ1|A0A1G8KSJ1_9FLAO Queuine tRNA-ribosyltran sferase OS=Chryseobacterium taeanense OX=311334 GN=tgt PE=3 SV=1
MMQKFFNIEKTSEGKARTGELTTDHGKIQTPIFMPVGTVASVKTVHQRELKEDIKAQIILGNTYHLYLRPGMEVMKEAGGLHKFMNWDLPILTDSGGFQVFSLASSRKMSEEGARFKSHIDGSYHMFSPEKSMEIQRQIGADIFMAFDECVAYPCEYNQAKSSMELTHRWLKRCIEWTENNPELYGHKQRLFPIVQGSTFSDLRKISAEVIAEAGAQGNAIGGLSVGEPEEEMYRITDEVTDILPKEKPRYLMGVGTPWNILESIGLGIDMMDCVMPTRNARNAMLFTWQGVMNMKNEKWKKDFSPLDEFGTSFVDREYSKAYVRHLFVSKEYLAKQIASIHNLAFYLDLVKVAREHIIAGDFYQWKNSVVPVLRQRL

SEQ ID NO: 53854 - protein, 377 aa, Chryseobacterium taichungense
  misc_feature (1)..(377): tr|A0A1H7ZKH8|A0A1H7ZKH8_9FLAO Queuine tRNA-ribosyltran sferase OS=Chryseobacterium taichungense OX=295069 GN=t gt PE=3 SV=1
MQKFFNIEKTSEGKARAGELTTDHGKIQTPIFMPVGTVASVKTVHQRELKEDIKAQIILGNTYHLYLRPGMEVMQEAGGLHKFMNWDLPILTDSGGFQVFSLASSRKMSEEGARFKSHIDGSYHMFSPEKSMEIQRQIGADIFMAFDECVAYPCEYNQAKTSMELTHRWLKRCIEWTENNPELYGYKQRLFPIVQGSTFSDLRKISAEVIAEAAAEGNAIGGLSVGEPEEEMYRITDEVTDILPKEKPRYLMGVGTPWNILESIGLGIDMMDCVMPTRNARNAMLFTWKGVMNMKNEKWKKDFSPLDEFGTSFVDREYSKAYVRHLFVSKEYLAKQIASIHNLAFYLDLVKVAREHILAGDFYQWKNSVVPVLRQRL

SEQ ID NO: 53855 - protein, 376 aa, Chryseobacterium taihuense
  misc_feature (1)..(376): tr|A0A1G9KY72|A0A1G9KY72_9FLAO Queuine tRNA-ribosyltran sferase OS=Chryseobacterium taihuense OX=1141221 GN=tgt PE=3 SV=1
MNFFNIEKASEGKARAGVLSTDHGNVQTPIFMPVGTVASVKTVHQREIKEDIKAQIILGNTYHLYLRPGMEVMQEAGGLHKFMNWDLPILTDSGGFQVFSLSGSRKMSEEGVKFKSHIDGSYHLFTPEKSMEIQRQIGADIFMAFDECVAYPCDYNQVKLSMEMTHRWLKRCMEWNENNPELYGYKQRFFPIVQGSTYSDLRKISAEVIAEAGAEGNAIGGLSVGEPEEEMYRITDEVTDILPKEKPRYLMGVGTPWNILESIGLGIDMMDCVMPTRNARNGMLFTWQGVINMKNEKWKKDFSPLDEFGTSFVDQEYSKAYVRHLFVSKEYLAKQIASIHNLAFYLDLVKVAREHILAGDFYQWKDSVVPVLRQRL

SEQ ID NO: 53856 - protein, 377 aa, Chryseobacterium taiwanense
  misc_feature (1)..(377): tr|A0A0B4EE70|A0A0B4EE70_9FLAO Queuine tRNA-ribosyltran sferase OS=Chryseobacterium taiwanense OX=363331 GN=tgt PE=3 SV=1
MQKFFNIEKTSEGKARAGELTTDHGKIQTPIFMPVGTVASVKTVHQRELKEDIKAQIILGNTYHLYLRPGMETMQEAGGLHKFMNWDLPILTDSGGFQVFSLASSRKMSEEGARFKSHIDGSYHMFSPEKSMEIQRQIGADIFMAFDECVAYPCEYNQAKTSMELTHRWLKRCIEWTENNPELYGYKQRLFPIVQGSTFSDLRKISAEVIAEAGAEGNAIGGLSVGEPEEEMYRITDEVTDILPKEKPRYLMGVGTPWNILESIGLGIDMMDCVMPTRNARNAMLFTWKGVMNMKNEKWKKDFSPLDEFGTSYVDREYSKAYVRHLFVSKEYLAKQIASVHNLAFYLDLVKVAREHILAGDFYEWKNSVVPVLRQRL

SEQ ID NO: 53857 - protein, 377 aa, Chryseobacterium takakiae
  misc_feature (1)..(377): tr|A0A1M4VGF5|A0A1M4VGF5_9FLAO Queuine tRNA-ribosyltran sferase OS=Chryseobacterium takakiae OX=1302685 GN=tgt PE=3 SV=1
MQKFFTIEKTSQGKARAGELTTDHGKIQTPIFMPVGTVASVKTVHQRELKEDIKAQIILGNTYHLYLRPGMDTMQEAGGLHQFMNWDLPILTDSGGFQVFSLASSRKMSEEGARFKSHIDGSYHMFSPEKSMEIQRQIGADIFMAFDECVAYPCEYNQAKSSMELTHRWLKRCIDWTENNPELYGHKQRLFPIVQGSTYSDLRKISAQVIAEAGAEGNAIGGLSVGEPEEEMYRITDEVTDILPKEKPRYLMGVGTPWNILESIGLGIDMMDCVMPTRNARNAMLFTWKGVMNMKNEKWKKDFSPLDEFGTSFVDREYSKAYVRHLFVSKEYLAKQIASIHNLAFYLDLVKVAREHILAGDFYEWKNSVVPILRQRL

SEQ ID NO: 53858 - protein, 378 aa, Chryseobacterium taklimakanense
  misc_feature (1)..(378): tr|A0A3G8WY80|A0A3G8WY80_9FLAO Queuine tRNA-ribosyltran sferase OS=Chryseobacterium taklimakanense OX=536441 GN =tgt PE=3 SV=1
MEKKFFEIEKTTESKARAGVITTDHGQVQTPIFMPVGTVASVKTVHQRELKEDIKAQIILGNTYHLYLRPKMDVMQEAGGLHKFMNWDLPILTDSGGYQVFSLSDTRKITEEGSKFKSHIDGSYHFISPEKSMEIQRQIGGDIFMAFDECTPYPCEYNQAKESMEMTHRWLKRCIKWCDENPEIYGHKQRLFPIVQGSTYSDLRRISAEFISEQNAEGNAIGGLSVGEPEDEMYRITNEVTDILPMEKPRYLMGVGTPWNILESIGLGVDMMDCVMPTRNARNGMLFTWQGVINIKNEKWKNDFSQLDEFGTSFVDREYSKAYVRHLFVSREYLAKQIASIHNLAFYLDLVRVAREHILAGDFYKWKDSVVPVLRHRL

SEQ ID NO: 53859 - protein, 378 aa, Chryseobacterium taklimakanense
  misc_feature (1)..(378): tr|A0A239XMC4|A0A239XMC4_9FLAO Queuine tRNA-ribosyltran sferase OS=Chryseobacterium taklimakanense OX=536441 GN =tgt PE=3 SV=1
MEKKFFEIEKTTESKARAGVITTDHGQVQTPIFMPVGTVASVKTVHQRELKEDIKAQIILGNTYHLYLRPKMDVMQEAGGLHKFMNWDLPILTDSGGYQVFSLSDTRKITEEGSKFKSHIDGSYHFISPEKSMEIQRQIGGDIFMAFDECTPYPCEYNQAKESMEMTHRWLKRCIKWCDENPEIYGHRQRLFPIVQGSTYSDLRKISAEFISEQNAEGNAIGGLSVGEPEDEMYRITNEVTDILPIEKPRYLMGVGTPWNILESIGLGVDMMDCVMPTRNARNGMLFTWQGVINIKNEKWKNDFSQLDEFGTSFVDREYSKAYVRHLFVSREYLAKQIASIHNLAFYLDLVRVAREHILAGDFYQWKDSVVPVLRHRL

SEQ ID NO: 53860 - protein, 378 aa, Chryseobacterium treverense
  misc_feature (1)..(378): tr|A0A1I3M4J0|A0A1I3M4J0_9FLAO Queuine tRNA-ribosyltran sferase OS=Chryseobacterium treverense OX=631455 GN=tgt PE=3 SV=1
MKSQFFTINNTTPGKARAGTLSTDHGNIQTPIFMPVGTVASVKTVHQRELKDDIKAQIILGNTYHLNLRPKMDVMQAAGGLHKFMNWDLPILTDSGGYQVFSLSKSRKLNEEGVKFKSHIDGSTHFISPEKSMEIQRQIGADIFMAFDECTPYPCDYNLAKSSMEMTHRWLKRCISWTEENSEIYSHKQRLFPIVQGSTYSDLRKASAEFISEQNAEGNAIGGLSVGEPEDEMYRITNEVTDVLPKEKPRYLMGVGTPWNILESIGLGIDMMDCVMPTRNARNAMLFTWGGIMNMKNEKWKDDFSALDELGTSYVDSEYSKAYVRHLFASKEYLGKQIASVHNLAFYLDLVRVAREHIIAGDFYEWKDSIIPQLKNRL

SEQ ID NO: 53861 - protein, 376 aa, Chryseobacterium ureilyticum; identical to SEQ ID NO: 53783
  misc_feature (1)..(376): tr|A0A1N7NBR8|A0A1N7NBR8_9FLAO Queuine tRNA-ribosyltran sferase OS=Chryseobacterium ureilyticum OX=373668 GN=tg t PE=3 SV=1

SEQ ID NO: 53862 - protein, 376 aa, Chryseobacterium viscerum
  misc_feature (1)..(376): tr|A0A316X3Q8|A0A316X3Q8_9FLAO Queuine tRNA-ribosyltran sferase OS=Chryseobacterium viscerum OX=1037377 GN=tgt PE=3 SV=1
MKFFNIEKTSEGKARAGEITTDHGKIQTPIFMPVGTVASVKTVHQRELKEDIKAQIILGNTYHLYLRPGMETMQDAGGLHKFMNWDLPILTDSGGFQVFSLASSRKMTEEGARFKSHIDGSYHMFSPERSMEIQRQIGADIFMAFDECTPYPCEYNQAKSSMELTHRWLKRCIEWTNNNPELYGYKQRLFPIVQGSTYSDLRKISAEVISEAGAEGNAIGGLSVGEPEEEMYRITDEVTDILPKDKPRYLMGVGTPWNILETIGLGIDMMDCVMPTRNARNAMLFTWQGVMNLKNEKWKRDFSPLDEFGTSFVDREYSKAYLRHLFVSKEYLAKQIASIHNLAFYLDLVKVAREHIIAGDFYEWKKSVVPVLRQRL

SEQ ID NO: 53863 - protein, 377 aa, Chryseobacterium wanjuense
  misc_feature (1)..(377): tr|A0A1I0RKT2|A0A1I0RKT2_9FLAO Queuine tRNA-ribosyltran sferase OS=Chryseobacterium wanjuense OX=356305 GN=tgt PE=3 SV=1
MQKFFTIEKTSEGKARAGELTTDHGKIQTPIFMPVGTVASVKTVHQRELKEDIKAQIILGNTYHLYLRPGMETMQDAGGLHKFMNWDLPILTDSGGFQVFSLASSRKMSEEGARFKSHIDGSYHMFSPEKSMEIQRQIGADIFMAFDECVAYPCEYNQAKLSMELTHRWLKRCIEWTENNPELYGYKQRLFPIVQGSTYSDLRKISAEVISEAGAEGNAIGGLSVGEPEEEMYRITDEVTDILPKEKPRYLMGVGTPWNILESIGLGIDMMDCVMPTRNARNAMLFTWKGVMNLKNEKWKKDFSPLDEFGTSFVDKEYSKAYLRHLFVSKEYLAKQIASIHNLAFYLDLVKVAREHIMAGDFYEWKNSVVPVLRQRL

SEQ ID NO: 53864 - protein, 376 aa, Chryseobacterium xixisoli
  misc_feature (1)..(376): tr|A0A4V3H2M1|A0A4V3H2M1_9FLAO Queuine tRNA-ribosyltran sferase OS=Chryseobacterium xixisoli OX=1476462 GN=tgt PE=3 SV=1
MKFFEIEKTSESKARAGVINTDHGQIQTPIFMPVGTVASVKTVHQRELKEDIKAQIILGNTYHLMLRPTMDIMEKAGGLHQFMNWDLPILTDSGGYQVFSLAKSRKITEEGVKFKSHIDGSLHFMSPEVSMQIQRQIGADIFMAFDECIAYPSDYNAVKTSMELTHRWLKRCITWTEENKELYGHKQRLFPIVQGSCFSDLRKISAEVISEAGAEGNAIGGLSVGEPEPEMYRITNEVTDILPKDKPRYLMGVGTPWNILESIGFGVDMMDCVMPTRNARNAMLFTWQGVMNMKNERWKEDFSPLDEFGTSYVDSAYSKAYVRHLFVSKEYLAKQIASIHNLAFYLDLVKVAREHIVAGDFYQWKDSIIPQLKTRL

SEQ ID NO: 53865 - protein, 376 aa, Chryseobacterium zeae
  misc_feature (1)..(376): tr|A0A1N6ISQ4|A0A1N6ISQ4_9FLAO Queuine tRNA-ribosyltran sferase OS=Chryseobacterium zeae OX=1416779 GN=tgt PE=3 SV=1
MKFFEIEKTSESKARAGVITTDHGQIQTPIFMPVGTVASVKAVHQRELKEDIKAQIILGNTYHLMLRPKMDIMEQAGGLHQFMNWDRPILTDSGGYQVFSLAKSRKITEEGVKFKSHIDGSMHFMSPEVSMQIQRQIGADIFMAFDECIAYPSDYNAVKTSMELTHRWLKRCIDWTEENKELYGHKQRLFPIVQGSCYSDLRKISAEVISEAGAEGNAIGGLSVGEPEDEMYRITNEVTDILPKDKPRYLMGVGTPWNILESIGFGVDMMDCVMPTRNARNAMLFTWQGVMNMKNEKWKADFSPLDEFGTSYVDQEYSKAYVRHLFVAKEYLAKQIASIHNLAFYLDLVKVAREHIVAGDFYQWKDQVIPQLKQRL

SEQ ID NO: 53866 - protein, 376 aa, Chryseolinea flava
  misc_feature (1)..(376): tr|A0A364XZ68|A0A364XZ68_9BACT Queuine tRNA-ribosyltran sferase OS=Chryseolinea flava OX=2059302 GN=tgt PE=3 SV =1
MKFQLTATDPRSWARAGTLQTDHGEIQTPIFMPVGTAGSVKAIHQRELEHDIQAQIILGNTYHLYLRPGTEILEKAGGLHKFNGWNKPILTDSGGYQVYSLAENRKIVEEGVTFKSHIDGSKHHFTPESVMDIQRTIGADIIMAFDECTPYPCEYRYAKSSMGLTHQWLKRCVERIRTTEPKYGYEQVLFPIVQGSVFKDLREESATFIASQDQPGNAIGGLSVGEPHEDMYAMTSLVCSILPKEKPRYLMGVGTPENILECIALGIDMFDCVLPTRNARNGMLFTTEGIINIRNEKWKSDFSPIDAALGGYASTFYSRAYLRHLVINKEILGAQIASIHNLTFYLWLVKEARQQIIAGTFASWKEMMVKKVSRRL

SEQ ID NO: 53867 - protein, 376 aa, Chryseolinea serpens
  misc_feature (1)..(376): tr|A0A1M5N8C7|A0A1M5N8C7_9BACT Queuine tRNA-ribosyltran sferase OS=Chryseolinea serpens OX=947013 GN=tgt PE=3 S V=1
MKFKLTSVDPKSAARTGILQTGHGEIQTPIFMPVGTAGSVKAVHQRELEYDVQAQIILGNTYHLYLRPGTDLLERAGGLHRFNGWSKPILTDSGGYQVYSLGANRKITEEGVIFKSHIDGSKHTFSPESVMDIQRIIGADIVMAFDECTPYPCEYAYAKNSMNMTHRWLKRCVDRMAETEPRYGYEQALFPIVQGSVYNDLRKMSAEFIASQDQPGNAIGGLSVGEPHEDMYAMTSLVCGILPQDKPRYLMGVGTPENILECIALGIDMFDCVMPTRNARNGMLFTTQGIINIRNERWKDDLSPIDATLGGYVSTFHSKAYLRHLIINKEILGAQIASIHNLTFYLWLVSEARKQIEAGTFTTWKNNMVKIVSQRL

SEQ ID NO: 53868 - protein, 376 aa, Chryseolinea sp.
  misc_feature (1)..(376): tr|A0A385SKD2|A0A385SKD2_9BACT Queuine tRNA-ribosyltran sferase OS=Chryseolinea sp. KIS68-18 OX=2321403 GN=tgt PE=3 SV=1
MKFKLTSVDPKSAARTGILQTGHGEIQTPIFMPVGTAGSVKAVHQRELELDVQAQIILGNTYHLYLRPGTELLERAGGLHRFNGWSKPILTDSGGYQVYSLGANRKITEEGVIFKSHIDGSKHTFSPESVMDIQRTIGADIVMAFDECTPYPCEYAYAKDSMNMTHRWLKRCVDRMAQTEPRYGYEQTLFPIVQGSVYNDLRKMSAEFIAAQDQPGNAIGGLSVGEPHEDMYAMTSLVCGILPQDKPRYLMGVGTPENILECIALGIDMFDCVMPTRNARNGMLFTTQGIINIRNERWKDDLSPIDATLGGYVSTFHSKAYLRHLIINKEILGAQIASIHNLTFYLWLVSEARKQIEAGTFTTWKNNMVKIVSQRL

SEQ ID NO: 53869 - protein, 379 aa, Chryseomicrobium excrementi
  misc_feature (1)..(379): tr|A0A2M9F262|A0A2M9F262_9BACL Queuine tRNA-ribosyltran sferase OS=Chryseomicrobium excrementi OX=2041346 GN=tg t PE=3 SV=1
MTAIRYELLKKDKQTGARLGIVHTPHGSFETPTFMPVGTQATVKTMSPEEIKGMDAGIILSNTYHLWLRPGHEIIREAGGLHKFMNWDRAILTDSGGFQVFSLSDMRKIEEEGVHFRNHLNGDKLFLSPEKSMEVQNALGSDIMMAFDECPPYPASHEYMKASVERTSRWAERCMTAHTNTDKQGLFGIIQGGEYEDLRRQSAQDIISLDFPGYAIGGLSVGEPKDVMNRVLEFTTPLMPDNKPRYLMGVGSPDSLIDGAIRGVDMFDCVLPTRIARNGTMFTKKGRLVIKGAKFARDFGPVDETCDCYTCKNYSRAYLRHLFKADETFGLRLASTHNLHFLMNLMKEVRQAIREDRLLDFKEEFFEEYGYNKPNAKNF

SEQ ID NO: 53870 - protein, 370 aa, Chrysiogenales bacterium
  misc_feature (1)..(370): tr|A0A524K2M7|A0A524K2M7_9BACT Queuine tRNA-ribosyltran sferase OS=Chrysiogenales bacterium OX=2528039 GN=tgt P E=3 SV=1
MFFEAIARDSRCSARTGRVTTKNGAFDTPAFMPVGTAGSVKALTPSQLDDAGAQIILANTYHLFLRPGTDVIKQFASLHRFMAWNKPILTDSGGFQIFSLQANARVSENGVRFKSHLDGTLFTLTPEDVVDIQNILDSDIQMVLDHFATHPASRAQDEKALKLTGLWAARARERFLKTKRGNFQFGIIQGGLHSDLRERSLYELAALDFEGYAIGGLSVGESLDDFQRILTPLAPQLPAAKPRYLMGSGTPEDILFAVENGIDMFDCVLPSRNARNGTLFTSRGIVKIKNQRYKCDQQPLDAGCDCYTCRNFSRAYLRHLFISREILASILNTIHNIHFYLDFMAKIRYAIKSHKFIEFKEDFLALYKGD

SEQ ID NO: 53871 - protein, 691 aa, Chthoniobacter flavus
  misc_feature (1)..(691): tr|B4D4C4|B4D4C4_9BACT Queuine tRNA-ribosyltransferase OS=Chthoniobacter flavus Ellin428 OX=497964 GN=tgt PE=3 SV=1
MDTSLSHGRLNFHVEAHATGSSARAGTFRTAHSHVLTPLFMPVGTQATVKGQLTQSLEDAGSQILLANTYHLLLRPGPEVFRRIGGIHEFMSWRHSVLTDSGGFQIFSLPHSRAMTEEGAAFKSYLDGRTILLSPELSIETQKAIGSDIMMALDQCIPSTADAATARAALGITQRWAARSLEARGDSPQALFAIVQGALFPELRRESAAGLCEMPFDGFAIGGLAVGESRSERQDTCELTTQFLPQDRPRYLMGVGTPLDILEAVHRGVDMFDCIIPTQVAQRGGAFTSRGFLQLRRGVYKFAEAPLDPLCHCPTCTHFSRAYLHHLTKTGEHLGWQLIGQHNIYFYHQLMRDIRQSIFEDRFLALYREKRAFLHEPDADHPIKKQKPRRQMAFHRGNYEVHRAPEGFCSIRQISSGEIMHSRTPPMVEAHRLYIEQSDLAARLQISAEENTGASPEPLVIWDVGLGAAANAMAAILCYESQAAAGPVRPMHLISFENDLDPLRLAFQHNREFTYLRHAATAGILDEGRWQSPRHPGLSWTLVQGDFLASISRAPAPPDLIFFDMFSSKTDGAQWTLSAFREIFAACAGRAAELFTYTCSTPIRAALLASGFHIARGCGTVDKTDTTIALTPAALRTLSHLGYELLGAEWLAKWTRSSAKFPADVPADQQPAFEQAILGHPQFRLSPSIST

SEQ ID NO: 53872 - protein, 368 aa, Chthoniobacter flavus
  misc_feature (1)..(368): tr|B4DAJ0|B4DAJ0_9BACT Queuine tRNA-ribosyltransferase OS=Chthoniobacter flavus Ellin428 OX=497964 GN=tgt PE=3 SV=1
MFTLLKADTATKARRGRLVTNHGVIETPIFMPVGTQGSVKAVSPAELREVHAQIILGNTYHLFVRPGMDVMKHFGGLHQFMNWDGPILTDSGGFQVFSLAKLRKITEEGVHFQNHLDGAPCFLGPREAMEIQAALGSDIAMLFDECPPFPCERDYAADSLARTLRWAARCKEVPTPGMKFGIVQGSSYPDLRRESAEALVSIGFDGYAVGGVSVGEPEPEMMAAIEASEPYLPADRPRYAMGLGTPPQMVEMVARGVDMFDCVLPTRLARNGTAFTAQGTVNLKNSPYIYDKGPIEEGCTCEACRNFSRGYLRHLVKAEEILGLRLISLHNLHFYLNLMWRMRQEIENGTFATFRQNFVTNYRHHREV

SEQ ID NO: 53873 - protein, 320 aa, Chthoniobacter sp.
  misc_feature (1)..(320): tr|A0A257X553|A0A257X553_9BACT Queuine tRNA-ribosyltran sferase (Fragment) OS=Chthoniobacter sp. 12-60-6 OX=197 0334 GN=B7Z47_04880 PE=3 SV=1
MSPSRLQFQLDAQASDSRARATTFHTLHGTIQSPLFMPVGTQATVKAQTPESLHTSGSQILLANTYHLLLRPGPDVFTKLGGIHKFMNWPGSVLTDSGGYQIFSLPHSRSMTEKGAVFQSYVDGQRILLSPELSIQTQRAIGSDIMMVLDQCIPSTADEKTTRAALQITQRWALRSLAAREDSPHSMFGIVQGALYPHLRRESAEGLMQIDFDGFAIGGLAVGEEKSEREDVCELTAALLPADRPRYLMGVGTPVDVLEAVHRGVDMFDCIIPTQVAKRGTAFTSRGIVELRRSAYKFSEDRLDPACTCPVCATHSRAYL

SEQ ID NO: 53874 - protein, 686 aa, Chthoniobacterales bacterium
  misc_feature (1)..(686): tr|A0A2W5Z0M0|A0A2W5Z0M0_9BACT Queuine tRNA-ribosyltran sferase OS=Chthoniobacterales bacterium OX=2201154 GN=t gt PE=3 SV=1
MESSRLNFHLDAQATGSRARAATFRTLHNEVLTPLFMPVGTQATVKAQLPQTLEEAGSQILLVNTYHLLLRPGPEVFRRTGGIHGFMSWNRSVLTDSGGFQIFSLPHSRAITEEGAVFQSYLDGQTILLSPEVSIETQKAIGSDIMMALDHCIASTADEATARSAIEMTHRWAARSLAARGDSAQSIFAIVQGALFPELRRESAAQLSAMAFDGYAIGGLAVGESKDEREEMCEFTTELLPRDKPRYLMGVGTPLDILEAVHRGVDMFDCIMPTQLAQRGAVFTSRGFLQMRRSVYKYSEEKLDPTCNCPTCSRYSRAYLHHLTKTGETLGWQLLGKHNIHFYHQLMREIRASILADRFLELYREKRAFLHEADMDNPIRAQKSKRTKVLRLGNYEVHKAWEGFASIRQISSGEIMHSRTAPMEEARTLYIEQSNLAERLRLAANEDPATATTLIIWDVGLGAAANAMAAISCYEEQAAAGPVRPLRVVSFENDLDSLRLAFRHNRDFPYLRHSGPAAILTDGHWQSRQLPGLSWSLVPGDFLATLAHAPGPPDLIFYDMFSTRTSADQWTLNAFHRVFESCEENAAELFTYSCSTSNRASLLAAGFYVAKGRNAGEKLETTIALTPSALHLSNSSRHELLSTDWIAKWNRSAAKFPDEISPNDYSAFEQAIRSHQQFENSSQKRN

SEQ ID NO: 53875 - protein, 385 aa, Chthoniobacterales bacterium
  misc_feature (1)..(385): tr|A0A2W5YPK8|A0A2W5YPK8_9BACT Queuine tRNA-ribosyltran sferase OS=Chthoniobacterales bacterium OX=2201154 GN=t gt PE=3 SV=1
MFELLKNEGKARRGRLTTAHGAIETPAFMPVGTQGSVKAVSPQELRELKAQIILGNTYHLFVRPGMEVIRYFGGLHRFMNWDGPILTDSGVYQIFSLAKLRKITEEGVAFQNHLDGTPTFISPEIAMEIQATLGSDIAMVLDECPPWPCEYDYAARSLEMTHRWAKRSKEISETGFRKPEYSDLSAIRNPKSQMVFGIVQGGTFEDLRRSSAQALAAMEFDGYAIGGVSVGEPEPEMMQAVEWSAPHLPENKPRYAMGLGTPPQLIELIARGVDMFDCVLPTRLARNGTAFTASGTLNLKNAEFTLQTGPLEEGCGCPACRDFSRGYIRHLVKAEEILGLRLITLHNLHFYLELMSRARDAIDHGTFPAFRAEFVSGYQKRAEPE

SEQ ID NO: 53876 - protein, 381 aa, Chthonomonas calidirosea
  misc_feature (1)..(381): tr|S0EWU1|S0EWU1_CHTCT Queuine tRNA-ribosyltransferase OS=Chthonomonas calidirosea (strain DSM 23976 / ICMP 18 418 / T49) OX=1303518 GN=tgt PE=3 SV=1
MITSPSREEGVLGRCGLLYLPHATVETPVFMPVGTQATVKAMTPDELEEIGFGLILGNVYHLHLRPGEQLIARAGGLHRFEGWSGALLTDSGGYQVFSLSGLRRIGEEGVEFQSHIDGSRHLFTPQIVIEIERQLGADIIMAFDECPASTVSEEYIRQAMERTHRWAKICLEEHIRHGRMAVGGWPQALFGIVQGGISYELRAESARVLTELDFDGFAIGGLAVGEEAAVRNEIVAWTVRFLPENKPRYLMGVGTPVDILEAVRRGVDMFDCVLPTRNARNAQAFISEGVINLRNARYEQDFTPLDPKCECRVCRRHTRAYIRHLFKAKEILGPRLVTYHNLAFYHRLMRSIRHHLREGTFEVFYKSFRSTYQTEEETIDE

SEQ ID NO: 53877 - protein, 376 aa, Ciceribacter sp.
  misc_feature (1)..(376): tr|A0A4Q2TFU4|A0A4Q2TFU4_9RHIZ Queuine tRNA-ribosyltran sferase OS=Ciceribacter sp. F8825 OX=2509717 GN=tgt PE= 3 SV=1
MHEKFEFKLKATSGKARLGEISMPRGVIRTPAFMPVGTVGTVKAMYLDQVRELGADIILGNTYHLMLRPGPERVARLGGLHELIRWPHPILTDSGGFQVMSLSGLRKLDEKGVTFKSHVDGSTHHMSPERSIEIQGLLDSDIQMQLDECVALPAEPKEIERAMEMSLRWAERCRIAFGEQPGKAMFGIVQGGDIPDLRIRSAEGLKQLDLKGYAVGGLAVGEPQAVMLDMLDITLPVLPSEKPRYLMGVGTPDDILKSVALGVDMFDCVMPTRSGRHGLAFTRRGKVNIRNARHAEDMRPLDEQSNCPASRDYSRAYLHHLVRSNEALGGMLLSWNNLAYYQELMQGIRKSIEEGRFADFMAETQEMWAKGDVEAA

SEQ ID NO: 53878 - protein, 375 aa, Citreicella sp.
  misc_feature (1)..(375): tr|A0A355QQ89|A0A355QQ89_9RHOB Queuine tRNA-ribosyltran sferase OS=Citreicella sp. OX=1960284 GN=tgt PE=3 SV=1
MSQTSFTLHATDGAARTGVIATPRGEIRTPAFMPVGTAATVKAMLPESVRATGADILLGNTYHLMLRPGAERIDRLGGLHRFMNWDRPILTDSGGFQVMSLAGLRKLTEQGVTFRSHVDGSKHMLSPERSMEIQRLLGSDIVMAFDECPALPADRARIESSMRLSMRWAQRSRDAFGDRPGHMLFGIQQGGLEPDLREESAKALTGIGFDGYAVGGLAVGEGQEAMFACLDHAPGHLPVDKPRYLMGVGKPDDIVGAVKRGIDMMDCVLPSRSGRTGQVFTRQGVVNIKNARHQDDPRPLDEACSCPACRGYSRAYLHHVFRAQEMISGMLLTWHNLHYYQDLMQGMRDAIAEGRFAAWEAKFHADRAQGDIPPL

SEQ ID NO: 53879 - protein, 375 aa, Citreicella sp.
  misc_feature (1)..(375): tr|D0D416|D0D416_9RHOB Queuine tRNA-ribosyltransferase OS=Citreicella sp. SE45 OX=501479 GN=tgt PE=3 SV=1
MTRTSFTLTATDGAARTGVISTPRGEIRTPAFMPVGTAATVKAMMPENVRATGADILLGNTYHLMLRPTAERIARLGGLHRFMNWERPILTDSGGFQVMSLAALRKLTEEGVSFRSHIDGSRHMLTPERSMEIQRLLGSDIVMAFDECPALPADRTRIEESMRLSMRWAQRSRDAFGDRPGHMLFGIQQGGLEPDLREESAAALKAIGFDGYAVGGLAVGEGQEAMFGCLDHAPGFLPEDKPRYLMGVGKPDDIVGAVKRGIDMMDCVLPTRSGRTGQAWTRHGVVNIKNARHSDDPRPLDEQCSCPACTGYSRAYLHHVYRAGEMISGMLLSWHNLQYFQEIMQGMRDAIAEGRFAAWEAEFHAGRAEGDIGPL

SEQ ID NO: 53880 - protein, 381 aa, Citreimonas salinaria
  misc_feature (1)..(381): tr|A0A1H3GVE6|A0A1H3GVE6_9RHOB Queuine tRNA-ribosyltran sferase OS=Citreimonas salinaria OX=321339 GN=tgt PE=3 SV=1
MPARDDMALTDFQVLARDGRARTGAITTPRGTIRTPAFMPVGTAATVKGMMPESVRDTGADILLGNTYHLMLRPGAERIDRLGGLHRFMNWDRPILTDSGGFQVMSLAGLRKLTEAGVTFKSHIDGSKHVLSPETSMENQRLLGSDIVMCFDECPALPADRARIEDSMRLSMRWAQRSRDAFGDRPGHMLFGIQQGGLEQDLREESAEALRAIGFDGYAIGGLAVGEGQEAMFGCLDFAPDQLPQDRPRYLMGVGKPDDIVGAVKRGVDMMDCVLPSRSGRTGQAWTRRGQVNLKNARHADDPRPLDEDCTCPACRNYSRAYLHHVQRAGEMIAGMLLTWHNLHYYQQLMNEMREAIAAGAFAAFENRFFAERAEGDIERR

SEQ ID NO: 53881 - protein, 459 aa, Citricoccus muralis
  misc_feature (1)..(459): tr|A0A3D9LHY3|A0A3D9LHY3_9MICC Queuine tRNA-ribosyltran sferase OS=Citricoccus muralis OX=169134 GN=tgt PE=3 SV =1
MTHQTSPRNPAHAPGTNATPDAGPAPAAATPRDFSFGVGSRLTGPDGQPRPGRTGTITTPHGTIQTPAFIPVATQATVKAVLPEAMAELGAQALLANAYHLYLQPGADLLDEAGGLGQFMNWHGPTFTDSGGFQVMSLGSGFKKVIDMAGPKAPSGQGADDAVAPGKERLANVDEDGVWFKSHLNGDQHRFTPEVSVGIQHQLGADIMFAFDELTTLHNSRGYQEEALERTRRWAQRCLDEHARLTGERAAKPYQALFGVIQGAQYEDLRRQACGDLAAMRTGFPDGGGSGGDALEHGFDGYGIGGALEKANLGTIVGWCAEELPEDKPRHLLGISEPDDLFTSVENGADTFDCVSPTRVARTGAFYTADGRFNLPGAKYKRDFSPLEEGCDCYTCAHYTRAYIHHLIKAKEMVAHTLISIHNERFTVRLVDRIRVSIQDGTFWDLKDEVLGRYYAPKA

SEQ ID NO: 53882 - protein, 444 aa, Citricoccus sp.
  misc_feature (1)..(444): tr|A0A4V1HEU7|A0A4V1HEU7_9MICC Queuine tRNA-ribosyltran sferase OS=Citricoccus sp. SGAir0253 OX=2567881 GN=tgt PE=3 SV=1
MTDPTPGGAPGPAPAPASPRQVGFAVGTRLAGPRGEARAGRTGTLTTPHGTIATPAFIPVATQATVKAVLPEAMAGLGAQALLANAYHLYLQPGPDILDEAGGLGRFMNWPGPTFTDSGGFQVMSLGSGFKKVIDMKGPEAPSGRGADDAVAPGKERLATVDEDGVWFRSHLNGDRHRFTPEVSVGIQHQLGADVMFAFDELTTLHNSRGYQEEALERTRRWAQRCLDEHARLTGERAARPYQALFGVIQGAQYEDLRRKACRDLAAMTADFPDGEGGRMAHGFDGYGIGGALEKENLGTIVGWCVEELPEDRPRHLLGISEPDDLFTAVENGADTFDCVSPTRVARTGAFYTADGRYNLPGARYKRDFAPLEEGCDCYTCAHYTRAYIHHLIKAKEMVSHTLISIHNERFTVRLVDRMRAAIEDGTFWDLKDAVLGRYYAASR

SEQ ID NO: 53883 - protein, 375 aa, Citrobacter amalonaticus
  misc_feature (1)..(375): tr|A0A2S4S0K7|A0A2S4S0K7_CITAM Queuine tRNA-ribosyltran sferase OS=Citrobacter amalonaticus OX=35703 GN=tgt PE= 3 SV=1
MKFELDTTDGRARRGRLVFDRGVVETPAFMPVGTYGTVKGMTPEEVEATGAQIILGNTFHLWLRPGQEIMKLHGDLHDFMQWKGPILTDSGGFQVFSLGDIRKITEQGVHFRNPINGDPIFLDPEKSMEIQYDLGSDIVMIFDECTPYPADRDYAKRSMEMSLRWAKRSRDRFDGLGNKNALFGIIQGSVYEDLRDISVKGLVEIGFDGYAVGGLAVGEPKEDMHRILEHVCPQIPADKPRYLMGVGKPEDLVEGVRRGIDMFDCVMPTRNARNGHLFVTDGVVKIRNAKYKSDTSPLDAECDCYTCRNYSRAYLHHLDRCNEILGARLNTIHNLRYYQRLMAGLRKAIEEGKLESFVTDFYQRQGRPVPPLNVD

SEQ ID NO: 53884 - protein, 375 aa, Citrobacter amalonaticus
  misc_feature (1)..(375): tr|A0A0X8S5R1|A0A0X8S5R1_CITAM Queuine tRNA-ribosyltran sferase OS=Citrobacter amalonaticus OX=35703 GN=tgt PE= 3 SV=1
MKFELDTTDGRARRGRLVFDRGVVETPAFMPVGTYGTVKGMTPEEVEATGAQIILGNTFHLWLRPGQEIMKLHGDLHDFMQWKGPILTDSGGFQVFSLGDIRKITEQGVHFRNPINGDPIFLDPEKSMEIQYDLGSDIVMIFDECTPYPADWDYAKRSMEMSLRWAKRSRDRFDGLGNKNALFGIIQGSVYEDLRDISVKGLVEIGFDGYAVGGLAVGEPKEDMHRILEHVCPQIPADKPRYLMGVGKPEDLVEGVRRGIDMFDCVMPTRNARNGHLFVTDGVVKIRNAKHKSDTSPLDAECDCYTCRNYSRAYLHHLDRCNEILGARLNTIHNLRYYQRLMAGLRKAIEEGKLESFVTDFYQRQGRPVPPLNVD

SEQ ID NO: 53885 - protein, 375 aa, Citrobacter braakii
  misc_feature (1)..(375): tr|A0A1R0G055|A0A1R0G055_CITBR Queuine tRNA-ribosyltran sferase OS=Citrobacter braakii OX=57706 GN=tgt PE=3 SV= 1
MKFELDTTDGRARRGRLVFDRGVVETPAFMPVGTYGTVKGMTPEEVEATGAQIILGNTFHLWLRPGQEIMKLHGDLHDFMQWKGPILTDSGGFQVFSLGDIRKITEQGVHFRNPINGDPIFLDPEKSMEIQYDLGSDIVMIFDECTPYPADWDYAKRSMEMSLRWAKRSRDRFDSLGNKNALFGIIQGSVYEDLRDISVKGLVDIGFDGYAVGGLAVGEPKEDMHRILEHVCPQIPADKPRYLMGVGKPEDLVEGVRRGIDMFDCVMPTRNARNGHLFVTDGVVKIRNAKHKSDTSPLDAECDCYTCRNYSRAYLHHLDRCNEILGARLNTIHNLRYYQRLMAGLRKAIEEGKLESFVTDFYQRQGRPVPPVNVD

SEQ ID NO: 53886 - protein, 375 aa, Citrobacter farmeri
  misc_feature (1)..(375): tr|A0A223JNC2|A0A223JNC2_9ENTR Queuine tRNA-ribosyltran sferase OS=Citrobacter farmeri OX=67824 GN=tgt PE=3 SV= 1
MKFELDTTDGRARRGRLVFDRGVVETPAFMPVGTYGTVKGMTPEEVEATGAQIILGNTFHLWLRPGQEIMKLHGDLHDFMQWKGPILTDSGGFQVFSLGDIRKITEQGVHFRNPINGDPIFLDPEKSMEIQYDLGSDIVMIFDECTPYPADWDYAKRSMEMSLRWAKRSRDRFDGLGNKNALFGIIQGSVYEDLRDISVKGLVEIGFDGYAVGGLAVGEPKEDMHRILEHVCPQIPADKPRYLMGVGKPEDLVEGVRRGIDMFDCVMPTRNARNGHLFVTDGVVKIRNAKYKSDTSPLDAECDCYTCRNYSRAYLHHLDRCNEILGARLNTIHNLRYYQRLMAGLRKAIEEGKLESFVTDFYQRQGRPVPPLNVD

SEQ ID NO: 53887 - protein, 375 aa, Citrobacter freundii
  misc_feature (1)..(375): tr|A0A4P7Q686|A0A4P7Q686_CITFR Queuine tRNA-ribosyltran sferase OS=Citrobacter freundii OX=546 GN=tgt PE=3 SV=1
MKFELDTTDGRARRGRLVFDRGVVETPAFMPVGTYGTVKGMTPEEVEATGAQIILGNTFHLWLRPGQEIMKLHGDLHDFMQWKGPILTDSGGFQVFSLGDIRKITEQGVHFRNPINGDPIFLDPEKSMEIQYDLGSDIVMIFDECTPYPADWDYAKRSMEMSLRWAQRSRDRFDSLGNKNALFGIIQGSVYEDLRDISVKGLVDIGFDGYAVGGLAVGEPKEDMHRILEHVCPQIPADKPRYLMGVGKPEDLVEGVRRGIDMFDCVMPTRNARNGHLFVTDGVVKIRNAKHKSDTSPLDAECDCYTCRNYSRAYLHHLDRCNEILGARLNTIHNLRYYQRLMAGLRKAIEEGKLESFVTDFYQRQGRPVPPVNVD

SEQ ID NO: 53888 - protein, 375 aa, Citrobacter freundii; identical to SEQ ID NO: 53885
  misc_feature (1)..(375): tr|A0A064E948|A0A064E948_CITFR Queuine tRNA-ribosyltran sferase OS=Citrobacter freundii MGH 56 OX=1439318 GN=tg t PE=3 SV=1

SEQ ID NO: 53889 - protein, 375 aa, Citrobacter gillenii
  misc_feature (1)..(375): tr|A0A3E2KWH1|A0A3E2KWH1_9ENTR Queuine tRNA-ribosyltran sferase OS=Citrobacter gillenii OX=67828 GN=tgt PE=3 SV =1
MKFELDTTDGRARRGRLVFDRGVVETPAFMPVGTYGTVKGMTPEEVEATGAQIILGNTFHLWLRPGQEIMKLHGDLHDFMQWKGPILTDSGGFQVFSLGDIRKITEQGVHFRNPINGDPIFLDPEKSMEIQYDLGSDIVMIFDECTPYPADWDYAKRSMEMSLRWAQRSRDRFDSLGNKNALFGIIQGSVYEDLRDISVKGLVDIGFDGYAVGGLAVGEPKEDMHRILEHVCPQIPADKPRYLMGVGKPEDLVEGVRRGIDMFDCVMPTRNARNGHLFVTDGVVKIRNAKHKSDTSPLDAECDCYTCRNYSRAYLHHLDRCNEILGARLNTIHNLRYYQRLMAGLRKAIEEGKLESFVTDFYQRQGRPVPPVNVY

SEQ ID NO: 53890 - protein, 207 aa, Citrobacter koseri
  misc_feature (1)..(207): tr|A0A447USM7|A0A447USM7_CITKO Queuine tRNA-ribosyltran sferase OS=Citrobacter koseri OX=545 GN=tgt_1 PE=3 SV=1
MKFELDTTDGRARRGRLVFDRGVVETPAFMPVGTYGTVKGMTPEEVEATGAQIILGNTFHLWLRPGQEIMKLHGDLHDFMQWKGPILTDSGGFQVFSLGDIRKITEQGVHFRNPINGDPIFLDPEKSMEIQYDLGSDIVMIFDECTPYPADWDYAKRSMEMSLRWAKRSRDRFDGLGNKNALFGIIQGSVYEDFTRYLRQRSGRDWL

SEQ ID NO: 53891 - protein, 375 aa, Citrobacter koseri; identical to SEQ ID NO: 53884
  misc_feature (1)..(375): sp|A8AK48|TGT_CITK8 Queuine tRNA-ribosyltransferase OS= Citrobacter koseri (strain ATCC BAA-895 / CDC 4225-83 / SGSC4696) OX=290338 GN=tgt PE=3 SV=1

SEQ ID NO: 53892 - protein, 375 aa, Citrobacter murliniae
  misc_feature (1)..(375): tr|A0A4S3RXQ2|A0A4S3RXQ2_9ENTR Queuine tRNA-ribosyltran sferase OS=Citrobacter murliniae OX=67829 GN=tgt PE=3 S V=1
MKFELDTTDGRARRGRLVFDRGVVETPAFMPVGTYGTVKGMTPEEVEATGAQIILGNTFHLWLRPGQEIMKLHGDLHDFMQWKGPILTDSGGFQVFSLGDIRKITEQGVHFRNPINGDPIFLDPEKSMEIQYDLGSDIVMIFDECTPYPADWDYAKRSMEMSLRWAKRSRDRFDGLGNKNALFGIIQGSVYEDLRDISVKGLVDIGFDGYAVGGLAVGEPKADMHRILEHVCPQIPADKPRYLMGVGKPEDLVEGVRRGIDMFDCVMPTRNARNGHLFVTDGVVKIRNAKHKSDTSPLDAECDCYTCRNYSRAYLHHLDRCNEILGARLNTIHNLRYYQRLMAGLRKAIEEGKLESFVTDFYQRQGRPVPPLNVD

SEQ ID NO: 53893 - protein, 375 aa, Citrobacter pasteurii; identical to SEQ ID NO: 53885
  misc_feature (1)..(375): tr|A0A0A1RWA3|A0A0A1RWA3_9ENTR Queuine tRNA-ribosyltran sferase OS=Citrobacter pasteurii OX=1563222 GN=tgt PE=3 SV=1

SEQ ID NO: 53894 - protein, 375 aa, Citrobacter portucalensis; identical to SEQ ID NO: 53885
  misc_feature (1)..(375): tr|A0A4P7USF1|A0A4P7USF1_9ENTR Queuine tRNA-ribosyltran sferase OS=Citrobacter portucalensis OX=1639133 GN=tgt PE=3 SV=1

SEQ ID NO: 53895 - protein, 375 aa, Citrobacter portucalensis
  misc_feature (1)..(375): tr|A0A5A9CK83|A0A5A9CK83_9ENTR Queuine tRNA-ribosyltran sferase OS=Citrobacter portucalensis OX=1639133 GN=tgt PE=3 SV=1
MKFELDTTDGRARRGRLVFERGVVETPAFMPVGTYGTVKGMTPEEVEATGAQIILGNTFHLWLRPGQEIMKLHGDLHDFMQWKGPILTDSGGFQVFSLGDIRKITEQGVHFRNPINGDPIFLDPEKSMEIQYDLGSDVVMIFDECTPYPADWDYAKRSMEMSLRWAKRSRDRFDSLGNKNALFGIIQGSVYEDLRDISVKGLVDIGFDGYAVGGLAVGEPKEDMHRILEHVCPQIPADKPRYLMGVGKPEDLVEGVRRGIDMFDCVMPTRNARNGHLFVTDGVVKIRNAKHKSDTSPLDAECDCYTCRNYSRAYLHHLDRCNEILGARLNTIHNLRYYQRLMAGLRKAIEEGKLESFVTDFYQRQGRPVPPVNVD

SEQ ID NO: 53896 - protein, 375 aa, Citrobacter rodentium
  misc_feature (1)..(375): tr|A0A482PUI7|A0A482PUI7_CITRO Queuine tRNA-ribosyltran sferase OS=Citrobacter rodentium OX=67825 GN=tgt PE=3 S V=1
MKFELDTTDGRARRGRLVFDRGVVETPAFMPVGTYGTVKGMTPEEVEATGAQIILGNTFHLWLRPGQEIMKLHGDLHDFMQWKGPILTDSGGFQVFSLGDIRKITEQGVHFRNPINGDPIFLDPEKSMEIQYDLGSDIVMIFDECTPYPADWDYAKRSMEMSLRWAKRSRERFDSLGNKNALFGIIQGSVYEDLRDISVKALVEIGFDGYAVGGLAVGEPKEDMHRILEHVCPQIPADKPRYLMGVGKPEDLVEGVRRGIDMFDCVMPTRNARNGHLFVTDGVVKIRNAKYKSDTSPLDAECDCYTCRNYSRAYLHHLDRCNEILGARLNTIHNLRYYQRLMAGLRKAIEEGKLESFVTGFYQRQGRPVPPLNVD

SEQ ID NO: 53897 - protein, 375 aa, Citrobacter sp.; identical to SEQ ID NO: 53884
  misc_feature (1)..(375): tr|A0A3S7D894|A0A3S7D894_9ENTR Queuine tRNA-ribosyltran sferase OS=Citrobacter sp. CFNIH10 OX=1920110 GN=tgt PE =3 SV=1

SEQ ID NO: 53898 - protein, 375 aa, Citrobacter sp.; identical to SEQ ID NO: 53885
  misc_feature (1)..(375): tr|A0A0J1KVK9|A0A0J1KVK9_9ENTR Queuine tRNA-ribosyltran sferase OS=Citrobacter sp. MGH103 OX=1686378 GN=tgt PE= 3 SV=1

SEQ ID NO: 53899 - protein, 375 aa, Citrobacter werkmanii; identical to SEQ ID NO: 53885
  misc_feature (1)..(375): tr|A0A4Q4BKK6|A0A4Q4BKK6_9ENTR Queuine tRNA-ribosyltran sferase OS=Citrobacter werkmanii OX=67827 GN=tgt PE=3 S V=1

SEQ ID NO: 53900 - protein, 375 aa, Citrobacter werkmanii; identical to SEQ ID NO: 53885
  misc_feature (1)..(375): tr|A0A090TYB8|A0A090TYB8_9ENTR Queuine tRNA-ribosyltran sferase OS=Citrobacter werkmanii NBRC 105721 OX=1114921 GN=tgt PE=3 SV=1

SEQ ID NO: 53901 - protein, 375 aa, Citrobacter youngae; identical to SEQ ID NO: 53885
  misc_feature (1)..(375): tr|D4BD60|D4BD60_9ENTR Queuine tRNA-ribosyltransferase OS=Citrobacter youngae ATCC 29220 OX=500640 GN=tgt PE=3 SV=1

SEQ ID NO: 53902 - protein, 375 aa, Citrobacter youngae; identical to SEQ ID NO: 53885
  misc_feature (1)..(375): tr|A0A549VAR7|A0A549VAR7_9ENTR Queuine tRNA-ribosyltran sferase OS=Citrobacter youngae OX=133448 GN=tgt PE=3 SV =1

SEQ ID NO: 53903 - protein, 376 aa, Citromicrobium sp.
  misc_feature (1)..(376): tr|A0A2P0B599|A0A2P0B599_9SPHN Queuine tRNA-ribosyltran sferase OS=Citromicrobium sp. RCC1897 OX=1812182 GN=tgt PE=3 SV=1
MSTRFQFQISARSGAARTGTIQMMRGEIRTPAFMPVGTAATVKGMKPESVRAAGADIILGNTYHLMLRPGAERVARLGGLHKFMNWDRPILTDSGGYQVMSLSDLNKLTEEGVEFRSHLDGSKHMLTPERSMEIQRLLGSDIVMAFDECPRADRPLAEIEASMEMSMRWAKRSRDAFDAGGEHAAHAALFGIQQGALDEGMRRRSAEALSEIGFDGYAIGGLAVGEGQEAMFATLDFAPGQLPDDAPRYLMGVGKPDDLVGAVERGVDMFDCVLPTRSGRNGQAFTWDGPMNLRNARFAEDTDPLDSRCACPTCATYSRAYLHHLIKSGEMLGAMLLTEHNIGFYQQLMQAMRDAIAQDRFAAFARGFRDTYLRTG

SEQ ID NO: 53904 - protein, 374 aa, Citromicrobium sp.
  misc_feature (1)..(374): tr|A0A2D8B2J9|A0A2D8B2J9_9SPHN Queuine tRNA-ribosyltran sferase OS=Citromicrobium sp. OX=2024827 GN=tgt PE=3 SV =1
MTTRFDFEISACSGLARTGTIRMQRGDIRTPAFMPVGTAATVKGMKPESVRAAGADIILGNTYHLMLRPGAERVARLGGLHKFMNWDRPILTDSGGYQVMSLSDLNKLTEEGVEFRSHLDGSKHMLSPERSMEIQRLLGSDIVMAFDECPRADRPLAEIEASMEMSMRWAKRSRNAFDAGGEHAGRAALFGIQQGALDERLRRRSADALTEIGFDGYAIGGLAVGEGQEAMFATLDFAPSQLPDDAPRYLMGVGKPDDLVGAVERGVDMFDCVLPTRSGRNGQAFTWNGALNLRNARFAEDTGPLDDRCACPTCATYSRAYLHHLIKSGEMLGAMLLTEHNIGFYQQLMAAMREAIAQDRFAAFASDFRRDYLG

SEQ ID NO: 53905 - protein, 408 aa, Clavibacter sp.
  misc_feature (1)..(408): tr|A0A388P1W3|A0A388P1W3_9MICO Queuine tRNA-ribosyltran sferase OS=Clavibacter sp. OX=1871044 GN=tgt PE=3 SV=1
MSFSFEMQKEISGQLGRAGVISTPHGQIATPAFIPVGTKASVKSLAPEALTDLGAQAVLANAYHLYLQPGSETLDQAGGLGKFMNWNKPTFTDSGGFQVMSLGAGFKKVIDMSLGSLDSDEAMAESKERLAHVDDEGVTFKSHLDGSMHRFTPEISMQVQHQIGADIIFAFDELTTLHNTRKYQEQSLERTRLWAIRCLDEHKRLTDQRSDKPYQALFGVLQGAQYEDLRRKAAKDLSAMNSSGISFDGFGIGGALDKASLGQIVSWMSSELPRDKPRHLLGIGEPADLFAGVENGADTFDCVAPSREARTSAVYSENGRFNVSSATYKKDFSPIDKDCNCYTCNNFSRAYLNHLFRAKEMLASTLATIHNLAFTVRLVDRMRQAILDETFIEFKTEFLGRYQAKILD

SEQ ID NO: 53906 - protein, 374 aa, Cloacibacillus porcorum
  misc_feature (1)..(374): tr|A0A1B2I9H1|A0A1B2I9H1_9BACT Queuine tRNA-ribosyltran sferase OS=Cloacibacillus porcorum OX=1197717 GN=tgt PE =3 SV=1
MFEYKLTAQCPETGARAGEFTTPHGVIKTPVFMPVGTQATVKAMTPPELEGLGAQIILGNTYHLHMRPGEDIVEEAGGLHRFMGWNHPILTDSGGFQVFSLANINKIKEDGVKFRSHIDGSRHFMRPEDSMAIQQKLGSDIAMAFDECVSLPTTPEYSREAMERTIRWAGRCREYHSRPDQALFGIVQGALYESQRIECIERLEEIGFPGYGIGGLSVGESHAEMYRVLDALSPHMPQDKPRYLMGVGFPTNLVEGIARGIDMFDCVLPTRNGRNGQLLTSFGKMNIKNLAFARDYTPVDPNCGCYVCRNFTRAYLRHLYTAGEILAARLCSWHNLYFLVNLVNDARQAIIEGRFPAFRRNFMENFMEGAYLNE

SEQ ID NO: 53907 - protein, 377 aa, Cloacibacillus sp.
  misc_feature (1)..(377): tr|A0A1Y4G9W4|A0A1Y4G9W4_9BACT Queuine tRNA-ribosyltran sferase OS=Cloacibacillus sp. An23 OX=1965591 GN=tgt PE =3 SV=1
MFEYKIVARCPETGARAGEFTTPHGVIETPVFMPVGTQATVKAMTPDELEGLGAQIILGNTYHLHMRPGEDTVEEAGGLHRFMNWKRPILTDSGGFQVFSLAKLNKITDEGVEFRSHIDGSRHFMRPEDSMTIQQKLGSDIAMSFDECVSLPTTPEYSREALGRTIRWARRCREFHSRRDQALFGIVQGALYEDQRIECIERLEEIGGFPGYGIGGLSVGESHAEMYRVLDALNPHMPQDKPRYLMGVGFPTNLVEGVARGIDMFDCVLPTRNGRNGQLLTRFGKMNIKNLAFARDFTPVDPQCGCYVCRNFTRAYLRHLYMAGEILAARLCSWHNLYFLVNLMKEARRAIIEGRFPAFRRGFMENFMGGAYLDGRQ

SEQ ID NO: 53908 - protein, 377 aa, Cloacibacterium normanense
  misc_feature (1)..(377): tr|A0A1E5UBW5|A0A1E5UBW5_9FLAO Queuine tRNA-ribosyltran sferase OS=Cloacibacterium normanense OX=237258 GN=tgt PE=3 SV=1
MQKFFEVEKNTSGKARAGKITTDHGEILTPIFMPVGTVASVKTVHQHELREDIKAQIILGNTYHLYLRPGMEIMQEAGGLHQFMNWEKPILTDSGGYQVFSLSSSRKMTEEGVKFKSHIDGSYHFISPEKSMEIQRQIGADIFMAFDECTPYPCEHNQAKLSMELTHRWLKRCIDWTNENQEIYGHKQHLFPIVQGSTYSDLRKISAEVISEAGADGNAIGGLSVGEPEEEMYRITDEVTDILPKDKPRYLMGVGTPWNIIESIGLGIDMMDCVMPTRNARNAMLFTWQGVMNMKNKKWEKDFSPLDEFGTSYVDRDYSKAYVRHLFVAKEYLAKQIASIHNLAFYLDLVKVAREHIIAGDFYEWKEQIIPQLKQRL

SEQ ID NO: 53909 - protein, 377 aa, Cloacibacterium normanense
  misc_feature (1)..(377): tr|A0A2S7I6Y1|A0A2S7I6Y1_9FLAO Queuine tRNA-ribosyltran sferase OS=Cloacibacterium normanense OX=237258 GN=tgt PE=3 SV=1
MQKFFEVEKNTSGKARAGKITTDHGEILTPIFMPVGTVASVKTVHQHELREDIKAQIILGNTYHLYLRPGMEIMQEAGGLHKFMNWEKPILTDSGGYQVFSLSSSRKMTEEGVKFKSHIDGSYHFISPEKSMEIQRQIGADIFMAFDECTPYPCEYNQAKLSMELTHRWLKRCIDWTNENQEIYGHKQHLFPIVQGSTYSDLRKISAEVISAAGADGNAIGGLSVGEPEEEMYRITDEVTDILPKDKPRYLMGVGTPWNIIESIGLGIDMMDCVMPTRNARNAMLFTWQGVMNMKNKKWEKDFSPLDEFGTSYVDRDYSKAYVRHLFVAKEYLAKQIASIHNLAFYLDLVKVAREHIIAGDFYEWKEQIIPQLKQRL

SEQ ID NO: 53910 - protein, 370 aa, Cloacimonas acidaminovorans
  misc_feature (1)..(370): tr|B0VFL3|B0VFL3_CLOAI Queuine tRNA-ribosyltransferase OS=Cloacimonas acidaminovorans (strain Evry) OX=459349 GN=tgt PE=3 SV=1
MFNFTLQKTSGKARAGIMKTEHGEILTPVFMPVGTLGTVKAMSPKELEEVQAQIILGNTYHLYIRPGHTLIQKAGGLHQFISWNHPILTDSGGFQVMSLAALRKISKEGVKFQSHIDGSPHIFTPEKVIEIQEALGADIIMSFDECPPYPSTRKYVEKSLATTLDWAERGKKAFTNYKHQALFGIVQGGIYEDLREKSALELMEMDFDGYGIGGLAVGEEKEDLLRITSFLNDILPIDKPRYLMGVGTPSDLLNNIDRGIDMFDCVMPTRNARKGSIFTRYGKMIIKAARYKDDFSPIDPLCGCYTCTHFSRAYIRHLITMNEILGMRLTTIHSLWFYQELMQMARKAIWENKWNEFLAEMLPTLDRIVQ

SEQ ID NO: 53911 - protein, 376 aa, Clostridia bacterium
  misc_feature (1)..(376): tr|A0A2V2CVM7|A0A2V2CVM7_9FIRM Queuine tRNA-ribosyltran sferase OS=Clostridia bacterium OX=2044939 GN=tgt PE=3 SV=1
MFKLLKQEGRARRGCFETPHGTVQTPVFMNVGTQGAIKGALSARDLKEIGCQVELSNTYHLHVRPGDELIKDMGGLHRFMTWDGPILTDSGGFQIFSLAKLRKINEDGVKFNSHVDGRHIFMGPEESMRIQANLGSDIAMAFDECIKIPSPKDYVSRSCDRTYRWLQRCKKALAEYNAMDDAVNPGQMLFGINQGAIFADIRVEHMKKIAELDLPGYAIGGLAVGESHQEMYDTIEAVEEYMPKDKPRYLMGVGTPGNIIECVHRGVDFFDCVMPARNGRHGHLFTWEGIINIKNEKYSRDTDPVDPQCRCPVCSRYSRAYLRHLFKAEEMLAMRLAVAHNLYFYNSLAERIRKSLESGNFEQFRHNFSEKLDKRI

SEQ ID NO: 53912 - protein, 384 aa, Clostridia bacterium
  misc_feature (1)..(384): tr|A0A523BPZ5|A0A523BPZ5_9FIRM Queuine tRNA-ribosyltran sferase OS=Clostridia bacterium OX=2044939 GN=tgt PE=3 SV=1
MSVSFTVERGCPETKARRGHLETRHGGVETPAFMPVGTQGTVKVMTPEELRDVGAQIVLSNTYHLMLRPGADLIARAGGLHRFMHWEGPILTDSGGFQVFSLGHLRQVTPEGVIFRSHLDGSIHRLTPQQAMAVQEALGSDIAMCLDQCVAYPASGEEFARAVELTTRWAEICQKAHSRPDQALFGIIQGGTSADLRRRSCEEIVGLDFPGYAIGGLSVGEPKELLFEMLAVLEPLLPADRPRYLMGVGSPDLLLGAIAMGVDLFDCVLPTRMARNGTVLTSTGRLVVRNAHYAEDFSPLEPGCGCYACRHYTRAYIRHLLKAGEILGVRLTTIHNLYFTLSLLDRARQAIAAGTFARFSREFLSVYEAGERARKKEAMAVGGE

SEQ ID NO: 53913 - protein, 273 aa, Clostridiaceae bacterium
  misc_feature (1)..(273): tr|A0A355SI87|A0A355SI87_9CLOT Queuine tRNA-ribosyltran sferase (Fragment) OS=Clostridiaceae bacterium OX=18982 04 GN=DD426_14235 PE=3 SV=1
MDAVTYELIKKSTETDARLGILHTPHGDIETPVFMPVGTQASVKTMTPEELKEIGAKIILSNTYHLYIRPGERIIEKAGGLHKFMHWDRAILTDSGGYQVFSLSNLRDIKEEGVTFKSHLDGSKHFFTPEKAVQIQNSLGADIIMCFDECLPYPCDKDYASLALKRTIRWAKRCKDTHKNIEKQSLFGIIQGGMYKDLRLQSVNEMTDMDFPGYSIGGLSIGEPKKIMYEVLDWITPVMPQNKPRYLMGVGSPDCLIEGAIRGIDMFDCVLPT

SEQ ID NO: 53914 - protein, 377 aa, Clostridiaceae bacterium
  misc_feature (1)..(377): tr|A0A316N996|A0A316N996_9CLOT Queuine tRNA-ribosyltran sferase OS=Clostridiaceae bacterium OX=1898204 GN=tgt P E=3 SV=1
MYKILCKDGSAKRGQLETVHGTVQTPVFMNVGTVGAMKGAVATTDLLNLKTQIVLSNTYHLHVRPGDDVVKKMGGIRKFMVWDNPVLTDSGGFQVFSLAGLRKIKEEGVYFHSHIDGKKIFMGPEESMQIQSNIASTIAMAFDECPPHPATREYMQNSVDRTTRWLERCKKEMARLNSLEDTLNPNQLLFGINQGGTFGDIRMEHAKRIADMDLDGYALGGLAVGETHQEMYDIIEKTVPYLPENKPTYLMGVGTPANILEAVERGVDFFDCVYPARNGRHGHAYTNHGKMNLLNAKYELDDRPLDETCDCPVCKHYSRAYIRHLLKAKETLGLRLMVTHNLYFYNTMMEEIRDAIEHKCFKEYKKKKLEQMKEETK

SEQ ID NO: 53915 - protein, 368 aa, Clostridiales bacterium
  misc_feature (1)..(368): tr|A0A3B9QEM1|A0A3B9QEM1_9FIRM Queuine tRNA-ribosyltran sferase OS=Clostridiales bacterium UBA9857 OX=2060923 G N=tgt PE=3 SV=1
MSQLEFRILHRSGNARVGKLKTAHGEISTPVFMPVGTQATVKALLPEDVWDTGSQIILCNAYHLFLRPGPDIVKAAGGLHQFMNWPGAILTDSGGFQIMSLAHLVSITDQEAVFRSHIDGSLVRFSPEDSIRVQAALGADIIMCLDHLTGWPVSRGDAREAMERTLLWARRAKKVEIGTHQSLFGIVQGSVYPELRRHCALELGAMDFPGYAVGGLSVGESKQQFYDILHYTCEFLPASKPRYLMGVGHPVDLIEGVMAGIDMFDCVLPTRNARHGRAFTFAGPLNLKNSKFATDFAPIEEGCDCRTCNSFSRAYVRHLFSAKESLAWTLVSIHNIRFFHRLMERTRQAVVDGSLANLRQQIQMLYPI

SEQ ID NO: 53916 - protein, 398 aa, Clostridiales bacterium
  misc_feature (1)..(398): tr|A0A133YEI0|A0A133YEI0_9FIRM Queuine tRNA-ribosyltran sferase OS=Clostridiales bacterium KA00274 OX=1497955 G N=tgt PE=3 SV=1
MRREEDMLSKNLTKEELAKKYPIWFELEHVCKQSGARAGILHTPHGDIATPTFMPVGTQATVKCMAPEEIWQMGSRILLANTYHLWMRPGEDIVAEAGGLHKFMNWPGAILTDSGGFQVWSLSDLRNIKEEGVHFRSELDGSAQFLSPEKAIQIENKLGADIIMAFDECAPYDADRNYIIDSASRTTRWLERCVKSHSRSKEQGLFGIIQGGMFADLRVQSAKEITSFDLPGYSVGGLSIGEPPALMNSMLDAVRPYLPGNKPHYLMGVGTPDYILEGALRGIDMFDCVLPTRIGRNGSALTWRGREIIRDAKNARCFEPIDANCTCYACKNYTRAYIRHLLKCKEIFGLRLMSWHNLQFLQDFTVALRKAIFADRSMDFRHDFYANSNYGAKQDFQS

SEQ ID NO: 53917 - protein, 358 aa, Clostridiales Family
  misc_feature (1)..(358): tr|A0A2V2FYB8|A0A2V2FYB8_9FIRM Queuine tRNA-ribosyltran sferase (Fragment) OS=Clostridiales Family XIII bacteri um OX=2137877 GN=DBX38_07675 PE=3 SV=1
MAVKNAVTYELIKTDSRTKARRGRIHTPHGDIETPVFMPVGTQGTVKAMRPEQVAEMGAKIILGNTYHLYLRPGHEIVKEAGGLHKFMNWNGAILTDSGGFQVFSLGKLRKITEEGVRFRSHIDGSLHMISPEKSMEIQNALGSDIMMAFDECAPYPADRSYVKDSFERTTRWLARCKEYHKNIENQSLFGIMQGGMYKDMRYESAMQIVEMDLPGYAIGGLSVGEPKEVMLDVMDDCVDYLPSDRPRYLMGVGSPDYLFEAVERGIDMCDCVLPTRIARHGLAMTSHGRVNIKNAKYERDWEPLDSECSCYTCRNYSRAYLRHLFKADEMLSSMLLSNHNLHFLINMMGKIREAIEE

SEQ ID NO: 53918 - protein, 379 aa, Clostridioides difficile
  misc_feature (1)..(379): tr|D5Q8U9|D5Q8U9_CLODI Queuine tRNA-ribosyltransferase OS=Clostridioides difficile NAP08 OX=525259 GN=tgt PE=3 SV=1
MIKENFMYAVRYELIKTCKQSGARLGRLHTPHGIIETPIFMPVGTQATVKSMTPEELKEIGSQIILSNTYHLYMRPGHELIKRAGGLHNFMNWDKPILTDSGGFQVFSLGPLRKIKEEGVEFRSHLDGSKHFLTPEKAMEIQNALGSDIMMAFDECAPYPADREYVKNSLERTTRWLKRCKDAHNNTDKQALFGIIQGGMYKDLREQSAKEITSIDLPGYAIGGLSVGEPKPLMYDVLEHTTPLMPKDKPRYLMGVGSPDDLVEGVIRGVDMFDCVLPTRIARNGTAMTSQGKVVVRNATYAEDFTPLDPECDCYACKNYSRAYIRHLIKANEILGARLITTHNLHFLLNLMKQIRQAIMEDRLLDFRNEFFAKYGYEI

SEQ ID NO: 53919 - protein, 373 aa, Clostridioides difficile
  misc_feature (1)..(373): tr|A0A449LLD8|A0A449LLD8_CLODI Queuine tRNA-ribosyltran sferase OS=Clostridioides difficile OX=1496 GN=tgt PE=3 SV=1
MYAVRYELIKTCKQSGARLGRLHTPHGIIETPIFMPVGTQATVKSMTPEELKEIGSQIILSNTYHLYMRPGHELIKRAGGLHKFMNWDKPILTDSGGFQVFSLGPLRKIKEEGVEFRSHLDGSKHFLTPEKAMEIQNALGSDIMMAFDECAPYPSDREYVKNSLERTTRWLKRCKDAHNNTDKQALFGIIQGGMYKDLREQSAKEITSIDLPGYAIGGLSVGEPKPLMYDVLEHTTPLMPQDKPRYLMGVGSPDDLVEGVIRGVDMFDCVLPTRIARNGTAMTSQGKVVVRNATYAEDFTPLDPECDCYACKNYSRAYIRHLIKANEILGARLITTHNLHFLLNLMKQIRQAIMEDRLLDFRNEFFAKYGYEI

SEQ ID NO: 53920 - protein, 372 aa, Clostridium aceticum
  misc_feature (1)..(372): tr|A0A0D8IDI6|A0A0D8IDI6_9CLOT Queuine tRNA-ribosyltran sferase OS=Clostridium aceticum OX=84022 GN=tgt PE=3 SV =1
MALRYELIKECKQSGARLGKIHTKRGIIETPIFMPVGTQATVKTMTPEELKEIKSQIILSNTYHLYLRPGHELIKKAGGLHKFMNWDKPILTDSGGFQVFSLGDLRKISEEGVEFRSHLDGSKHFISPEKAVEIQNALGSDIMMVFDECAPYPADRDYVKNSLERTTRWAKRCKEAHKNIEDQNLFGIIQGGMYADLRKQSAEELLELDFPGYAVGGLSVGEPKPLMYEVLEHTTPLMPKNKPRYLMGVGSPDCLIEGAIRGIDMFDCVLPTRIARNGTAMTSQGKVVIKNAKYTEDFQGLDPECGCYTCRNYSKAYLRHLFKANEVLGLRLLSYHNLYFLLKLMEEIREAIKEDRLLDYRKSFFEKYGYDV

SEQ ID NO: 53921 - protein, 376 aa, Clostridium acetireducens
  misc_feature (1)..(376): tr|A0A1E8EXM2|A0A1E8EXM2_9CLOT Queuine tRNA-ribosyltran sferase OS=Clostridium acetireducens DSM 10703 OX=11212 90 GN=tgt PE=3 SV=1
MYKLIKMCGKAKRGEFVTPHGTIQTPVFMNVGTLAAIKGAVSTMDLKKIGCQVELSNTYHLHLRPGDKIIKKMGGLHKFMNWDRPILTDSGGFQVFSLANIRKIQEKGVYFNSHIDGRKIFMGPEESMQIQSNLGSTIAMAFDECVANPSPREYVERSVERTTRWLERCKIELDRLNSLPDTINKKQILFGINQGGVYDDIRIEHAKTIAKMNLEGYAIGGLAVGESHEEMYRIIDAVVPHLPKDKPLYLMGVGTPINILEAVDRGVDFFDCVLPARNGRHAHVFTKYGKINLLNAKYELDEKPIDEGCQCPACRHYSRAYIRHLFKAKEMLAMRLCVLHNLYFYNNLMKEIREAIEGDYFSQYKTQKLEQWGGKA

SEQ ID NO: 53922 - protein, 376 aa, Clostridium acetobutylicum
  misc_feature (1)..(376): sp|Q97GT3|TGT_CLOAB Queuine tRNA-ribosyltransferase OS= Clostridium acetobutylicum (strain ATCC 824 / DSM 792 / JCM 1419 / LMG 5710 / VKM B-1787) OX=272562 GN=tgt PE= 3 SV=1
MYTLLKKTGKVRRGRFETVHGTIETPVFMNVGTLAAIKGAVSSMDLKEINCQVELSNTYHLSLRPGDDVVKKLGGLHKFMNWDRPILTDSGGFQVFSLAEIRKIKEEGVYFNSHIDGRKIFMGPEESMKIQSNLASTIAMAFDECVENPSPREYVERSVERTTRWLVRCKEELDRLNSLPDTINKKQMLFGINQGGVYDDIRIEHAKTIAKMDLDGYAIGGLAVGETHEEMYRIIDAVVPHLPQDKPIYLMGVGTPSNILEAVSRGVDFFDCVLPARNGRHGHVFTKHGKINLRNEKFELDASPIDEGCQCPTCKHYSRAYIRHLFKAKEMLAMRLCVLHNLYFYNTLMEDIRNAIDADCFEEFKNEKLKAWAGKA

SEQ ID NO: 53923 - protein, 376 aa, Clostridium acidisoli
  misc_feature (1)..(376): tr|A0A1W1XBF9|A0A1W1XBF9_9CLOT Queuine tRNA-ribosyltran sferase OS=Clostridium acidisoli DSM 12555 OX=1121291 G N=tgt PE=3 SV=1
MYKLLKKSGKVRRGEFTTPHGVVQTPVFMNVGTLAAIKGAVSSMDLKEIGCQVELSNTYHLSLRPGDKIVRELGGLHKFMNWDRPILTDSGGFQVFSLAKMRKIKEEGVYFSSHIDGRKIFMGPEESMQIQSNLGSTIAMAFDECVENPATREYVEDSVARTTRWLERCKNEMDRLNSLDNTVNKNQMLFGINQGGTYEDIRIEHAKTISKLNLDGYAIGGLAVGETHEEMYRVIDAVVPHLPQDKPIYLMGVGLPSNILEAVSRGVDFFDCVLPARNGRHGHVFTKHGKINLLNAKYELDASPIDEGCKCPACKNYTRAYIRHLFKAKELLALRLCVLHNLYFYNKLMKDIRDAIDGDYFEEFKSEKLNDWAGRA

SEQ ID NO: 53924 - protein, 381 aa, [Clostridium] aldenense
  misc_feature (1)..(381): tr|A0A3E2WBY3|A0A3E2WBY3_9FIRM Queuine tRNA-ribosyltran sferase OS=[Clostridium] aldenense OX=358742 GN=tgt PE= 3 SV=1
MKYQVITKDGRAKRARMETVHGVIETPVFMNVGTVGAIKGAVSTDDLREINTQVELSNTYHLHVRTGDRLIKEFGGLHRFMNWDRPILTDSGGFQVFSLTKLRRIKEEGVYFNSHIDGHKIFMGPEESMQIQSNLGSTIAMAFDECPPSHASDEYIRQSVDRTTRWLRRCKEEMERLNSLPDTVNREQLLFGINQGGVVDEIRVEHARTIREMNLDGYAVGGLAVGESHEEMYHILDVTVPHLPEEKPVYLMGVGTPANILEAVDRGVDFFDCVYPSRNGRHGHVYTNHGKLNLFNQKYELDARPIEEGCGCPACRSYSRAYIRHLLKAKEMLGMRLCTLHNLYFYNTMMKEIRDAIEEHRYAEYKAAKLAGMESSAKSNE

SEQ ID NO: 53925 - protein, 381 aa, [Clostridium] aldenense
  misc_feature (1)..(381): tr|A0A413W1T9|A0A413W1T9_9FIRM Queuine tRNA-ribosyltran sferase OS=[Clostridium] aldenense OX=358742 GN=tgt PE= 3 SV=1
MKYQVITKDGRAKRARMETVHGVIETPVFMNVGTVGAIKGAVSTDDLREINTQVELSNTYHLHVRTGDRLIKEFGGLHRFMNWDRPILTDSGGFQVFSLTKLRKIKEEGVYFNSHIDGHKIFMGPEESMQIQSNLGSTIAMAFDECPPSHASDEYIRQSVDRTTRWLHRCKEEMARLNSLPDTVNREQLLFGINQGGVVDEIRVEHARTIREMDLDGYAVGGLAVGESHEEMYHILDVTVPHLPEEKPVYLMGVGTPANILEAVDRGVDFFDCVYPSRNGRHGHVYTNHGKLNLFNQKYELDARPIEEGCGCPACRSYSRAYIRHLLKAKEMLGMRLCTLHNLYFYNTMMKEIRDAIEEHRYAEYKAAKLAGMESSAKANE

SEQ ID NO: 53926 - protein, 376 aa, Clostridium algidicarnis
  misc_feature (1)..(376): tr|A0A2S6G104|A0A2S6G104_9CLOT Queuine tRNA-ribosyltran sferase OS=Clostridium algidicarnis DSM 15099 OX=112129 5 GN=tgt PE=3 SV=1
MMYKLLKTTGKVRRGEFKTPHGTIQTPVFMNVGTLAAIKGAVSSMDLKEIECQVELSNTYHLHLRPGDKVIKELGGIHEFMNWDRPILTDSGGFQVFSLASMRKIKEEGVYFNSHIDGRKIFMGPEESMQIQSNLASTISMAFDECIPNPSPREYVEASVDRTTRWLIRCKNELDRLNSLDDTINKKQMLFGINQGGVYEDIRIEHAKTISKLDLDGYAIGGLAVGESHEDMYRIIDSVVPHLPQDKPIYLMGVGLPKNILEAVERGVDFFDCVLPARNGRHGHVFTKSGKINIMNAKFELDKRPIDEGCDCPACKNYTRAYIRHLFKAKEMLAMRLCVLHNLYFYNKLMEEVRDSIDGDYFRDFKKQKLTEWGEI

SEQ ID NO: 53927 - protein, 378 aa, [Clostridium] algidixylanolyticum
  misc_feature (1)..(378): tr|A0A419TBE7|A0A419TBE7_9FIRM Queuine tRNA-ribosyltran sferase OS=[Clostridium] algidixylanolyticum OX=94868 G N=tgt PE=3 SV=1
MNYKIIKKDGRAKRAELTTVHGTIQTPVFMNVGTVAAIKGAVSTDDLRDIKTQVQLSNTYHLHVRTGDKVIREFGGLHEFMNWDRPILTDSGGFQVFSLTGLRKIKEEGVYFQSHIDGHKIFMGPEESMQIQSNLGSTIAMAFDECPPHPATRKYMQDSVDRTTRWLDRSRIEMARLNSLPETLNKEQLLFGINQGGTYEDIRIAHAKTISAMDLDGYALGGLAVGESHFEMYRILEETVPYLPENKPIYLMGVGTPANILESVERGVDFFDCVYPSRNGRHGHVYTNYGKLNLFNSKFELDRRPIEEGCQCPACKSYSRAYIRHLLKAKEMLGMRLSVLHNLYFYNTMMEEIRDAIDNQCYGEYKERKLAKMAEGQS

SEQ ID NO: 53928 - protein, 378 aa, [Clostridium] aminophilum
  misc_feature (1)..(378): tr|A0A1I6JU71|A0A1I6JU71_9FIRM Queuine tRNA-ribosyltran sferase OS=[Clostridium] aminophilum OX=1526 GN=tgt PE= 3 SV=1
MEYKILATEGRAKRARMKTVHGTIETPVFMNVGTVAAIKGAVSTDDLRGIDTQVMLCNTYHLHVRTGDPLIHELGGLHSFTNWNKPILTDSGGFQVFSLAGLRKIKEEGVTFRSHIDGHKIFMGPEESMQIQSNLASTIAMAFDECPPALADREYVERSVARTVRWLKRCKTEMDRLNSLPETINKEQLLFGINQGGIIDDIRIRNAEEISELNLDGYAVGGLAVGESHEQMYHVLDEVVPHLPKEKPTYLMGVGTPANILEGVERGIDFFDCVYPSRNGRHANVYTNHGKMNLMNSKYAKDLRPMEEGCQCPACRSYTRAYIHHLFKAKEMLGMRLCVLHNLYFYNKMMEEIRDAIDSQRFAEYKKAKLESMAAGEQ

SEQ ID NO: 53929 - protein, 378 aa, [Clostridium] aminophilum
  misc_feature (1)..(378): tr|A0A1I0H0F1|A0A1I0H0F1_9FIRM Queuine tRNA-ribosyltran sferase OS=[Clostridium] aminophilum OX=1526 GN=tgt PE= 3 SV=1
MEYKILATEGRAKRARMKTVHGTIETPVFMNVGTVAAIKGAVSTDDLRGIDTQVMLCNTYHLHVRTGDPLIHELGGLHRFTNWNKPILTDSGGFQVFSLAGLRKIKEEGVTFRSHIDGHKIFMGPEESMQIQSNLASTIAMAFDECPPALADREYVERSVARTVRWLKRCKTEMDRLNSLPETINKEQLLFGINQGGIIDDIRIRNAEEISELNLDGYAVGGLAVGESHEQMYHVLDEVVPHLPKEKPTYLMGVGTPANILEGVERGIDFFDCVYPSRNGRHANVYTNHGKMNLMNSKYAKDLRPMEEGCQCPACRSYTRAYIHHLFKAKEMLGMRLCVLHNLYFYNKMMEEIRDAIDSQRFAEYKKAKLESMAAGEQ

SEQ ID NO: 53930 - protein, 376 aa, Clostridium amylolyticum
  misc_feature (1)..(376): tr|A0A1M6CVE8|A0A1M6CVE8_9CLOT Queuine tRNA-ribosyltran sferase OS=Clostridium amylolyticum OX=1121298 GN=tgt P E=3 SV=1
MYKLLKKKNSVRRGEFHTPHGTIQTPVFMNVGTLAAIKGAVSSMDLKEIGCQVELSNTYHLHLRPGDEVVRKMGGLHKFMNWDRPILTDSGGFQVFSLAKLRQIKEEGVYFNSHIDGRRIFMGPEESMRIQSNLGSTIAMAFDECIPNPSTREYVLKSVDRTTRWLERCKIEMDRLNSLEGTVNNKQMLFGINQGGTYDDIRIEHAKTISKMNLDGYAIGGLAVGETHEEMYRIISSVVPYLPQDKPIYLMGVGLPSNILEAVERGVDFFDCVLPARNGRHGHVFTSTGKINIMNAKYELDDNPIDKGCGCPTCQHYSRAYIRHLFKAKEMLAMRLCVLHNLYFYNKLMEEIRNAIDGDYFEDYKEEKLHAWSGNV

SEQ ID NO: 53931 - protein, 376 aa, Clostridium argentinense
  misc_feature (1)..(376): tr|A0A0C1RAL1|A0A0C1RAL1_9CLOT Queuine tRNA-ribosyltran sferase OS=Clostridium argentinense CDC 2741 OX=1418104 GN=tgt PE=3 SV=1
MYKLLKKSGNVRRGEFTTPHGVVQTPVFMNVGTLAAIKGAVSSMDLKEIGCQVELSNTYHLHLRPSDEVVKKMGGLHKFMNWDRPILTDSGGFQVFSLSSMRKIQEEGVYFNSHIDGKKIFMGPEESMQIQSNLASTIAMAFDECIPNPSSREYVEKSVARTTRWLERCKKEMDRLNSLPDTINKKQMLFGINQGGVYEDIRIEHAKTISKMNLDGYAIGGLAVGETHEEMYRIIEAVVPHLPEDKPIYLMGVGLPSNILEAVSRGVDFFDCVLPARNGRHGHVFTKYGKINLMNAKFELDDNPIDEGCQCPACKSYTRAYIRHLFKAKEMLAMRLCVLHNLYFYNKLMEDIRAAIDGDYFEDFKNEKLSQWGGKA

SEQ ID NO: 53932 - protein, 378 aa, [Clostridium] asparagiforme
  misc_feature (1)..(378): tr|C0CVK2|C0CVK2_9FIRM Queuine tRNA-ribosyltransferase OS=[Clostridium] asparagiforme DSM 15981 OX=518636 GN=t gt PE=3 SV=1
MEYKVITKDGRAKRAEMKTVHGTIQTPVFMNVGTVGAIKGAVSTDDLRQIGTQVELSNTYHLHVRTGDKLIREFGGLHRFMNWDRPILTDSGGFQVFSLTSLRKIKEEGVYFNSHIDGRKIFMGPEESMQIQSNLGSTIAMAFDECPPSHADEQYIRNSVERTTRWLARCKEEMDRLNALPDTINREQLLFGINQGGVVDSIRTWHADVIREMDLDGYAVGGLAVGESHEEMYHVLDVTVPHLPEEKPVYLMGVGTPANILEAVDRGVDFFDCVYPSRNGRHGHVYTNHGKLNLFNRKYELDARPIEEGCGCPACRSYSRAYIRHLLKAKEMLGMRLCTLHNLYFYNTMMEEIRDAIEEHRYADYKMRKLAGMEGSQE

SEQ ID NO: 53933 - protein, 378 aa, [Clostridium] asparagiforme; identical to SEQ ID NO: 53932
  misc_feature (1)..(378): tr|A0A413F9K5|A0A413F9K5_9FIRM Queuine tRNA-ribosyltran sferase OS=[Clostridium] asparagiforme OX=333367 GN=tgt PE=3 SV=1

SEQ ID NO: 53934 - protein, 374 aa, Clostridium autoethanogenum
  misc_feature (1)..(374): tr|A0A3M0S4I1|A0A3M0S4I1_9CLOT Queuine tRNA-ribosyltran sferase OS=Clostridium autoethanogenum OX=84023 GN=tgt PE=3 SV=1
MYKLLKKQGSARRGEFTTPHGVVQTPVFMNVGTLAAIKGAVSTCDLKEIGCQVELSNTYHLSLRPGDKIIRKLGGLHKFMNWDRPILTDSGGFQVFSLSKIRKIKEEGVYFNSHIDGSKIFMGPEESMQIQSNLASTVAMAFDECIENPSPKDYVQRSVERTTRWLKRCKVEMDRLNSLPDTINNKQMLFGINQGGVYDDIRIEHAKIISEMNLDGYAIGGLAVGETHEEMYRIIEKVVPHLPQDKPIYLMGVGTPANILEAVERGVDFFDCVLPARNGRHSHVFTSEGEINLLNAKYQLDDSPIDRGCQCPTCKNYTRAYIRHLFKAKEMLAMRLCVLHNLYFYNNLMKEIRDSIDGDYFPKYKKEKLEQWNQ

SEQ ID NO: 53935 - protein, 374 aa, Clostridium autoethanogenum; identical to SEQ ID NO: 53934
  misc_feature (1)..(374): tr|U5RVX1|U5RVX1_9CLOT Queuine tRNA-ribosyltransferase OS=Clostridium autoethanogenum DSM 10061 OX=1341692 GN= tgt PE=3 SV=1

SEQ ID NO: 53936 - protein, 377 aa, Clostridium baratii
  misc_feature (1)..(377): tr|A0A174Q0G2|A0A174Q0G2_9CLOT Queuine tRNA-ribosyltran sferase OS=Clostridium baratii OX=1561 GN=tgt PE=3 SV=1
MSKRYTLLKKDGKARRGRFVTPHGTIETPVFMNVGTLAAIKGAVSSMDLKDIGCQVELSNTYHLHLRPSDKVVKELGGLHEFMNWDRPILTDSGGFQVFSLAGIRKIKEEGVYFNSHIDGKKIFMGPEESMQIQSNLASTIAMAFDECIEIPSPREYVEKSVERTTRWLERCKKEMDRLNSLPDTINKEQMLFGINQGATFKDIRIEHAKTITKMDLDGYAIGGLAVGETHEEMYEVIDAVVPYLPEDKPIYLMGVGTPANILEAVDRGVDFFDCVLPARNGRHGHVFTKNGKINIMNKKFELDKSPIDEGCECPACKHYTRAYIRHLFKAKEMLAMRLCVLHNLYFYNKLMEDIRKAIDEGRFKEFKEQKLKEWNI

SEQ ID NO: 53937 - protein, 377 aa, Clostridium baratii
  misc_feature (1)..(377): tr|A0A0F3FMB0|A0A0F3FMB0_9CLOT Queuine tRNA-ribosyltran sferase OS=Clostridium baratii OX=1561 GN=tgt PE=3 SV=1
MSKRYTLLKKDGKARRGRFVTPHGTIETPVFMNVGTLAAIKGAVSSMDLKDIGCQVELSNTYHLHLRPSDKVVKELGGLHEFMNWDRPILTDSGGFQVFSLAGIRKIKEEGVYFNSHIDGKKIFMGPEESMQIQSNLASTIAMAFDECIEIPSPRDYVEKSVARTTRWLERCKKEMDRLNSLPDTINKEQMLFGINQGATFKDIRIEHAKTIAKMDLDGYAIGGLAVGETHEEMYEVIDTVVPYLPEDKPIYLMGVGTPANILEAVDRGVDFFDCVLPARNGRHGHVFTKNGKINIMNKKFELDKSPIDEGCECPACKHYTRAYIRHLFKAKEMLAMRLCVLHNLYFYNKLMEDIRNAIDEGRFKEFKEQKLKEWNI

SEQ ID NO: 53938 - protein, 373 aa, Clostridium bartlettii
  misc_feature (1)..(373): tr|R5X4Z0|R5X4Z0_9CLOT Queuine tRNA-ribosyltransferase OS=Clostridium bartlettii CAG:1329 OX=1263063 GN=tgt PE =3 SV=1
MSAIRYELIKTCKQSGARLGILHTPHGSIETPIFMPVGTQATVKAMTPEELKEIGSQIILSNTYHLYMRPGHELVKEAGGLHKFMNWDKPILTDSGGFQVFSLGPLRKITEEGVTFKSHLDGSRHFISPEKAMEIQNALGSDIMMAFDECAPYPADREYVKNSLERTTRWLQRCKDAHKNTENQALFGIIQGGMYKDLREQSAKEITAIDLPGYAIGGLSVGEPKPLMYEVLEYTTPLMPVDKPRYLMGVGSPDDLIEGVIRGVDMFDCVLPTRIARNGTAMTSQGKVVVRNAAYAKDFTPLDPECDCYCCKNYTKAYIRHLVKANEILAARLITTHNLRFLLKLMEQVRQAIREDRLLDFREEFFTKYGYEL

SEQ ID NO: 53939 - protein, 378 aa, Clostridium beijerinckii
  misc_feature (1)..(378): tr|A6LTM9|A6LTM9_CLOB8 Queuine tRNA-ribosyltransferase OS=Clostridium beijerinckii (strain ATCC 51743 / NCIMB 8052) OX=290402 GN=tgt PE=3 SV=1
MSKRYTLLKKDGKARRGQFETPHGTIQTPVFMNVGTLAAIKGAVSSMDLKEIGCQVELSNTYHLHLRPSDKVVKKLGGLHKFMNWDRPILTDSGGFQVFSLAKMRKIKEEGVYFNSHIDGKKIFMGPEESMQIQSNLASTIAMAFDECIENPAPREYVERSVERTTRWLERCKNEMDRLNSMPDTINKEQMLFGINQGGVYEDIRIKHAKEITKMDLDGYAIGGLAVGETHEEMYRVIDAVVPHLPEDKPIYLMGVGTPSNILEAVDRGVDFFDCVLPARNGRHGNVFCSEGKLNLMNAKYELDDRPIDDGCECPTCKNYTRAYIRHLFKAKEMLAMRLCVLHNLYFYNKLMKDIRDAIEGGYFKQFKEEKLSQWEGR

SEQ ID NO: 53940 - protein, 378 aa, Clostridium beijerinckii; identical to SEQ ID NO: 53939
  misc_feature (1)..(378): tr|A0A0K2MGJ9|A0A0K2MGJ9_CLOBE Queuine tRNA-ribosyltran sferase OS=Clostridium beijerinckii NRRL B-598 OX=14284 54 GN=tgt PE=3 SV=1

SEQ ID NO: 53941 - protein, 386 aa, [Clostridium] bolteae
  misc_feature (1)..(386): tr|N9YWY1|N9YWY1_9FIRM Queuine tRNA-ribosyltransferase OS=[Clostridium] bolteae 90B8 OX=997897 GN=tgt PE=3 SV= 1
MKYQVITKDGRAKRARMETVHGTVETPVFMNVGTVGAIKGAVSTDDLREIGTQVELSNTYHLHVRTGDKLIREFGGLHRFMNWDRPILTDSGGFQVFSLAGLRKIKEEGVYFNSHIDGHKIFMGPEESMQIQSNLGSTIAMAFDECPPSHASDDYIRHSVERTTRWLARCKTEMERLNSLPDTVNRQQLLFGINQGGVVDEIRMEHARTIREMDLDGYAVGGLAVGESHEEMYHILDVTVPCLPEDKPVYLMGVGTPANILEAVDRGVDFFDCVYPSRNGRHGHVYTNQGKLNLFNQKYELDSRPIEEGCGCPACRSYSRAYIRHLLKAKEMLGMRLCTLHNLYFYNTMMKEIRDAIEEHRYAEYKAAKLAGMEGSGRAISTASDE

SEQ ID NO: 53942 - protein, 386 aa, [Clostridium] bolteae; identical to SEQ ID NO: 53941
  misc_feature (1)..(386): tr|A0A412YY83|A0A412YY83_9FIRM Queuine tRNA-ribosyltran sferase OS=[Clostridium] bolteae OX=208479 GN=tgt PE=3 SV=1

SEQ ID NO: 53943 - protein, 386 aa, Clostridium bolteae; identical to SEQ ID NO: 53941
  misc_feature (1)..(386): tr|A8S1J2|A8S1J2_CLOBW Queuine tRNA-ribosyltransferase OS=Clostridium bolteae (strain ATCC BAA-613 / WAL 16351 ) OX=411902 GN=tgt PE=3 SV=1

SEQ ID NO: 53944 - protein, 386 aa, Clostridium bolteae
  misc_feature (1)..(386): tr|R5F6Y4|R5F6Y4_9CLOT Queuine tRNA-ribosyltransferase OS=Clostridium bolteae CAG:59 OX=1263064 GN=tgt PE=3 SV =1
MKYQVITKDGRAKRARMETVHGTVETPVFMNVGTVGAIKGAVSTDDLREIGTQVELSNTYHLHVRTGDKLIREFGGLHRFMNWDRPILTDSGGFQVFSLAGLRKIKEEGVYFNSHIDGHKIFMGPEESMQIQSNLGSTIAMAFDECPPSHAGDDYIRHSVERTTRWLARCKTEMERLNSLPDTVNRQQLLFGINQGGVVDEIRMEHARTIREMDLDGYAVGGLAVGESHEEMYHILDVTVPCLPEDKPVYLMGVGTPANILEAVDRGVDFFDCVYPSRNGRHGHVYTNQGKLNLFNQKYELDSRPIEEGCGCPACRSYSRAYIRHLLKAKEMLGMRLCTLHNLYFYNTMMKEIRDAIEEHRYAEYKAAKLAGMEGSGRAISTASDE

SEQ ID NO: 53945 - protein, 378 aa, Clostridium bornimense
  misc_feature (1)..(378): tr|W6S4A4|W6S4A4_9CLOT Queuine tRNA-ribosyltransferase OS=Clostridium bornimense OX=1216932 GN=tgt PE=3 SV=1
MAKYTLLKKDGNAKRGRFETVHGVIETPVFMNVGTLAAIKGAVSSMDLKDIGCQVELSNTYHLHLRPGDKVVKAMGGLHKFMNWDRPILTDSGGFQVFSLASMRKIKEEGVYFSSHIDGKKIFMGPEESMQIQSNLASTIAMAFDECIPNPSERPYVLDSVARTTRWLERCKNEMDRLNSLEDTINKDQLLFGINQGGIYEDIRIAHAKEIVKMDLDGYAIGGLAVGETHEEMYRTIDAVAPHMPENKPLYLMGVGLPSNILEAVDRGVDFFDCVLPARNGRHGHVFTAHGKINLKNAKYELDSTPIDEGCQCPACKHYSKAYIRHLFKAKELLAMRLCVLHNLYFYNKLMEDIRAAIDGGYFKSFKEEKLASWQGKA

SEQ ID NO: 53946 - protein, 376 aa, Clostridium botulinum
  misc_feature (1)..(376): sp|A5I6E9|TGT_CLOBH Queuine tRNA-ribosyltransferase OS= Clostridium botulinum (strain Hall / ATCC 3502 / NCTC 1 3319 / Type A) OX=441771 GN=tgt PE=3 SV=1
MYKLLKKSGKARRGEFTTPHGVIQTPVFMNVGTLAAIKGAVSSMDLKEIGCQVELSNTYHLHLRPGDEVVKKMGGLHKFMNWDRPILTDSGGFQVFSLSKIRKIQEEGVYFNSHIDGRKIFMGPEESMRIQSNLASTIAMAFDECVENPAPREYVEKSVERTTRWLHRCKDEMNRLNSLPDTINNKQMLFGINQGGTYEDIRIEHAKTIAKMDLDGYAIGGLAVGESHEDMYRIIDAVVPHLPEDKPIYLMGVGIPSNILEAVDRGVDFFDCVLPARNGRHAHVFTKEGKINLLNAKFELDDRPIDEGCQCPACKHYTRSYIRHLFKAKEMLAMRLCVLHNLYFYNNLMEEIRDAIDGNYFKEYKERKLKEWGGRA

SEQ ID NO: 53947 - protein, 376 aa, Clostridium botulinum
  misc_feature (1)..(376): sp|C3KTD0|TGT_CLOB6 Queuine tRNA-ribosyltransferase OS= Clostridium botulinum (strain 657 / Type Ba4) OX=515621 GN=tgt PE=3 SV=1
MYKLLKKSGKARRGEFTTPHGVIQTPVFMNVGTLAAIKGAVSSMDLKEIGCQVELSNTYHLHLRPGDEVVKKMGGLHKFMNWDRPILTDSGGFQVFSLSKIRKIQEEGVYFNSHIDGRKIFMGPEESMRIQSNLASTIAMAFDECVENPAPREYVEKSVERTTRWLHRCKDEMNRLNSLPDTINNKQMLFGINQGGTYEDIRIEHAKTIAKMDLDGYAIGGLAVGESHEDMYRIIDAVVPHLPEDKPIYLMGVGIPSNILEAVDRGVDFFDCVLPARNGRHAHVFTKEGKINLLNAKFELDDRPIDEGCQCPACKHYTRSYIRHLFKAKEMLAMRLCVLHNLYFYNNLMEEIRDAIDGDYFKEYKERKLKEWGGRA

SEQ ID NO: 53948 - protein, 378 aa, Clostridium butyricum
  misc_feature (1)..(378): tr|C4IKT5|C4IKT5_CLOBU Queuine tRNA-ribosyltransferase OS=Clostridium butyricum E4 str. BoNT E BL5262 OX=63224 5 GN=tgt PE=3 SV=1
MSKRYTLLKKDGKARRGQFVTPHGTIQTPVFMNVGTLAAIKGAVSSMDLKDIGCQVELSNTYHLHLRPTDTVVNKMGGLHKFMNWDRPILTDSGGFQVFSLSAMRKIKEEGVYFNSHIDGKKIFMGPEESMQIQSNLASTIAMAFDECIPNPSTREYVERSVARTTRWLERCKIEMDRLNSKDDTINKEQMLFGINQGGVYEDIRIAHAKEITKMDLDGYAIGGLAVGESHEDMYRIIDAVVPHLPEDKPIYLMGVGTPENILEAVDRGVDFFDCVLPARNGRHGNVYTSEGKLNLMNAKFELDEKPIDETCQCPACKHYTRSYIRHLFKAKEMLAMRLCVLHNLYFYNKLMEEIRTAIDGGYYKEFKEKKLQEWKVK

SEQ ID NO: 53949 - protein, 378 aa, Clostridium butyricum; identical to SEQ ID NO: 53948
  misc_feature (1)..(378): tr|A0A0N8VX66|A0A0N8VX66_CLOBU Queuine tRNA-ribosyltran sferase OS=Clostridium butyricum OX=1492 GN=tgt PE=3 SV =1

SEQ ID NO: 53950 - protein, 376 aa, Clostridium cadaveris
  misc_feature (1)..(376): tr|A0A1I2MQ54|A0A1I2MQ54_9CLOT Queuine tRNA-ribosyltran sferase OS=Clostridium cadaveris OX=1529 GN=tgt PE=3 SV =1
MYKLLKKSGKVRRGEFHTPHGVIQTPVFMNVGTLAAIKGAVSTMDLKEIGCQVELSNTYHLHLRPGDKVVKELGGLHQFMNWDRPILTDSGGFQVFSLASMRSIKEEGVYFNSHIDGRRIFMGPEESMQIQSNLASTIAMAFDECIPNPSSRDYVERSVARTTRWLERCKTEMDRLNDLPDTINKQQMLFGINQGGVYEDIRIEHAKTIAKMDLDGYAIGGLAVGETHEEMYRIIDAVVPYLPEDKPIYLMGVGTPENILEAVSRGVDFFDCVLPARNGRHGHVFTKNGKINLFNAKYELDKKPIDEGCQCPACKHYTRAYIRHLFKAKEMLAMRLCVLHNLYFYNTLFSDIRNAIDEDRFEEFKKEKLDQWSSRS

SEQ ID NO: 53951 - protein, 376 aa, Clostridium carboxidivorans
  misc_feature (1)..(376): tr|C6PXQ0|C6PXQ0_9CLOT Queuine tRNA-ribosyltransferase OS=Clostridium carboxidivorans P7 OX=536227 GN=tgt PE=3 SV=1
MYKLLKKCGKARRGEFATPHGVIQTPVFMNVGTLAAIKGGVSSMDLKEIGCQVELSNTYHLHLRPSDEVVKKMGGLHKFMNWDRPILTDSGGFQVFSLAKMRKIKEEGVYFNSHIDGRKIFMGPEESMRIQSNLASTIAMAFDECIHNPSPRDYVEQSVARTTRWLQRCKDEMDRLNSLPDTINNKQMLFGINQGGIFEDIRIEHAKTISKMSLDGYAIGGLAVGESHEEMYRVIDAVVPYLPEDKPIYLMGVGIPSNILEAVDRGVDFFDCVLPARNGRHGHVFTKEGKINLFNAKYELDSKPIDEGCQCPACKHYSRAYIRHLFKAKEILAMRLCVLHNLYFYNNMMQEIRDAIDGDYFAEYKSEKLKQWNGRA

SEQ ID NO: 53952 - protein, 378 aa, Clostridium carnis
  misc_feature (1)..(378): tr|A0A3P6JJ56|A0A3P6JJ56_9CLOT Queuine tRNA-ribosyltran sferase OS=Clostridium carnis OX=1530 GN=tgt PE=3 SV=1
MSKRYTLLKKDGKARRGQFETPHGTIQTPVFMNVGTLAAIKGAVSSMDLKEIGCQVELSNTYHLHLRPTDKVVRELGGLHEFMNWDRPILTDSGGFQVFSLSAMRKIKEEGVYFNSHIDGKKIFMGPEESMQIQSNLASTIAMAFDECIPNPSTREYVENSVARTTRWLERCKKEMDRLNSMPDTINKEQMLFGINQGGTYEDIRIAHAKEITKLDLDGYAIGGLAVGESHEDMYRIIDAVVPHLPEDKPIYLMGVGTPENILEAVSRGVDFFDCVLPARNGRHGNVYTKEGKLNLMNAKYELDKKPIEEGCECPACKHYTRAYIRHLFKAKEMLAMRLCVLHNLYFYNKLMAEIRDAIDDGCFEEFKEEKLKSWGNK

SEQ ID NO: 53953 - protein, 378 aa, Clostridium cavendishii
  misc_feature (1)..(378): tr|A0A1M6ABI3|A0A1M6ABI3_9CLOT Queuine tRNA-ribosyltran sferase OS=Clostridium cavendishii DSM 21758 OX=1121302 GN=tgt PE=3 SV=1
MSKRYTLIKKDGKARRGEFRTPHGVIQTPVFMNVGTLAAIKGAVSSMDLKDIRCQVELSNTYHLHLRPGDNVVKKMGGLHKFMNWDRPILTDSGGFQVFSLAGMRKIKEEGVYFSSHIDGRKIFMGPEESMQIQSNLASTIAMAFDECIPNPSTREYVEKSVERTTRWLERCKIEMDRLNSLEDTINKEQMLFGINQGGVYEDIRIEHAKTITKMDLDGYAIGGLAVGETHEEMYRVIDAVVPHLPEDKPIYLMGVGTPENILEAVERGVDFFDCVLPARNGRHGHLFTSEGSIKLMNAKYELDARPIDEKCDCPACKNYTRAYIRHLFKAKEMLAMRLCVLHNLYFYNKLMEEVRAAIDANCYSEFKEQKLKEWGKK

SEQ ID NO: 53954 - protein, 379 aa, Clostridium celatum
  misc_feature (1)..(379): tr|L1QDY1|L1QDY1_9CLOT Queuine tRNA-ribosyltransferase OS=Clostridium celatum DSM 1785 OX=545697 GN=tgt PE=3 S V=1
MSKRYTLLKKDGKARRGRFVTPHGTIETPVFMNVGTLAAIKGAVSSMDLKEIGCQVELSNTYHLHLRPSDRVVAKMGGLHKFMNWDRPILTDSGGFQVFSLSGMRKIKEEGVYFNSHIDGKKIFMGPEESMQIQSNLASTIAMAFDECIPNPSTREYVINSVARTNRWLDRCIAEMKRLNSLPETINKEQMLFGINQGGCYEDIRIEHAKHLAKLDMDGYAIGGLAVGETHEEMYRVIDAVVPHLPQDKPIYLMGVGTPENILEAVERGVDFFDCVLPARNGRHGHVFNSEGKINLMNAKFELDERPIDEGCQCPACKNYTRSYIRHLFKAKEMLAMRLCVLHNLYFYNKLMEEIREAIDNGNYAEFKAKKLKEWNIKK

SEQ ID NO: 53955 - protein, 379 aa, [Clostridium] celerecrescens
  misc_feature (1)..(379): tr|A0A084JRM6|A0A084JRM6_9FIRM Queuine tRNA-ribosyltran sferase OS=[Clostridium] celerecrescens OX=29354 GN=tgt PE=3 SV=1
MNYKIVAKDGRAKRAEVTTVHGTIQTPVFMNVGTVGAIKGAVSTDDLREIRTQVELSNTYHLHVRTGDKLIKEFGGLHKFMNWDRPILTDSGGFQVFSLTGLRKIKEEGVYFQSHIDGHKIFMGPEESMQIQSNLASTIAMAFDECPPHPATREYMQNSVDRTTRWLERCRVEMAKLNSHPDTLNKDQLLFGINQGGTYEDIRITHAKTISAMDLDGYALGGLAVGESHEEMYRILDETVPYLPENKPTYLMGVGTPANILEAVDRGVDFFDCVYPSRNGRHGHVYTNHGKMNLFNTKYELDHRPIEEGCGCPACRSYSRAYIRHLLKAKEMLGMRLCVLHNLYFYNTMMEEIRDAIENHRYGEYKEQKLSGMMAGQTT

SEQ ID NO: 53956 - protein, 379 aa, [Clostridium] celerecrescens
  misc_feature (1)..(379): tr|A0A2M8ZC12|A0A2M8ZC12_9FIRM Queuine tRNA-ribosyltran sferase OS=[Clostridium] celerecrescens 18A OX=1286362 GN=tgt PE=3 SV=1
MNYKIVAKDGRAKRAEVTTVHGTIQTPVFMNVGTVGAIKGAVSTDDLREIRTQVELSNTYHLHVRTGDKLIKEFGGLHKFMNWDRPILTDSGGFQVFSLTGLRKIKEEGVYFQSHIDGRKIFMGPEESMQIQSNLASTIAMAFDECPPHPATREYMQNSVDRTTRWLERCQAEMAKLNSQPDTLNKDQLLFGINQGGTFEDIRIAHAKTISAMDLDGYALGGLAVGESHEEMYRILDETVPHLPENKPTYLMGVGTPANILEAVDRGVDFFDCVYPSRNGRHGHVYTNHGKMNLFNTKYELDHRPIEEGCGCPACRSYSRAYLRHLLKAKEMLGMRLCVLHNLYFYNTMMEEIRDAIENHRYGEYKEQKLSGMMAGQTT

SEQ ID NO: 53957 - protein, 376 aa, [Clostridium] cellulosi
  misc_feature (1)..(376): tr|A0A078KST4|A0A078KST4_9FIRM Queuine tRNA-ribosyltran sferase OS=[Clostridium] cellulosi OX=29343 GN=tgt PE=3 SV=1
MFELIKMEGRARRGRLKTVHGEVETPAFMNVATSAAIKGGISALDLVGLKCQVALCNTYHLHLRPGDEVIRDLGGLHKFMNWQRPILTDSGGFQVFSLSSLRKITEEGVHFASHIDGRRIFMGPEESMRIQANLGSTIAMAFDECVANPAEYEYAKKSSERTIRWLYRCKEELDRLKADGVAVNKEQMLFGINQGATYDDLRIDNMKKIAELDLDGYAIGGLAVGESAEEMYHIIDCVEQYMPQNKVRYLMGVGTPLNIIEAVSLGVDIFDCVMPSRNARHAHVFTWSGKRNLMNAKYERDTLPIDPECDCPTCRNFSRAYIHHLFKAQEMLAMRLSVMHNLYFYNTLMQKIRNALDNGTFNEFRKRVSEKIDKRI

SEQ ID NO: 53958 - protein, 378 aa, Clostridium cellulovorans
  misc_feature (1)..(378): tr|D9SMV7|D9SMV7_CLOC7 Queuine tRNA-ribosyltransferase OS=Clostridium cellulovorans (strain ATCC 35296 / DSM 3 052 / OCM 3 / 743B) OX=573061 GN=tgt PE=3 SV=1
MAEYKLLKKEKNARRGEFKTVHGTIQTPVFMNVGTLAAIKGAVSSMDLKEIGCQVELSNTYHLHLRPGDNIVRDMGGLHKFMNWDRPILTDSGGFQVFSLAGMRKIKEEGVHFSSHIDGKKIFMGPEESMQIQNNLASTIAMAFDECIPNPSTREYVIDSVARTTRWLERCKTEMDRLNSLPETINKDQLLFGINQGGTYEDIRIEHAKTITKMNLDGYAIGGLAVGESHEEMYKVIDAVVPHLPEDKPIYLMGVGLPSNILEAVERGVDFFDCVLPARNGRHGHVFTKEGKINLLNAKYEKDSKPIDEGCQCPACKNYTRAYIRHLFKAKEMLALRLCVLHNLYFYNKLMEDIRNAIDNDNFHNFKAEKLEQWNGRG

SEQ ID NO: 53959 - protein, 379 aa, [Clostridium] cf.
  misc_feature (1)..(379): tr|D6DH52|D6DH52_CLOSC Queuine tRNA-ribosyltransferase OS=[Clostridium] cf. saccharolyticum K10 OX=717608 GN=t gt PE=3 SV=1
MEYKILAKDGRAKRAQMKTVHGTIQTPVFMNVGTVAAIKGAVSTDDLKTIGTQVELSNTYHLHVRTGDKLIREFGGLHKFMHWDRPILTDSGGFQVFSLAGLRKIKEEGVYFNSHIDGRKIFMGPEESMQIQSNLGSTIAMAFDECPPSKASREYVQNSVERTTRWLKRCKAEMERLNSLPDTVNREQLLFGINQGAVYEDIRIAHAEEIGALDLDGYAVGGLAVGESHEEMYRILDAVVPHLPENKPTYLMGVGTPANILEAVDRGVDFFDCVYPSRNGRHGHVYTNHGKLNMFNAKYELDPRPIEEGCQCPACRSYSRAYIRHLMKAKEMLGMRLCVLHNLYFYNKMMEEIRDAIDNHCYAEYKERKLSGMAAGEKN

SEQ ID NO: 53960 - protein, 380 aa, Clostridium chauvoei
  misc_feature (1)..(380): tr|S6F0E6|S6F0E6_9CLOT Queuine tRNA-ribosyltransferase OS=Clostridium chauvoei JF4335 OX=1351755 GN=tgt PE=3 S V=1
MSKKRYTLLKKDGAARRGRFETPHGTIETPVFMNVGTCAVIKGAVSTMDLKEIGCQVELSNTYHLHLRPSDKVVAKLGGLHEFMNWDRPILTDSGGFQVFSLSGMRKIKEEGVYFSSHIDGRKIFMGPEESMQIQSNLASTIAMAFDECIPNPSTREYVEKSVARTTRWLERCKVEMDRLNSLDDTINKEQMLFGINQGGCYEDIRIEHAKTITKMDLDGYAIGGLAVGETHEEMYRIIDAVVPYLPEDKPIYLMGVGTPENILEAVDRGVDFFDCVLPARNGRHGHVFTKNGKINLMNAKFELDTRPIDEGCQCPACRSYTRAYIRHLFKAKEMLAMRLCVLHNLYFYNKLMEDIRAAIDGGYYKEFKEQKIKEWNTKA

SEQ ID NO: 53961 - protein, 379 aa, Clostridium chromiireducens
  misc_feature (1)..(379): tr|A0A1V4IHN4|A0A1V4IHN4_9CLOT Queuine tRNA-ribosyltran sferase OS=Clostridium chromiireducens OX=225345 GN=tgt PE=3 SV=1
MSKRYTLLKKDGKARRGQFETPHGTIQTPVFMNVGTLAAIKGAVSSMDLKEIGCQVELSNTYHLHLRPGDKVVYKLGGLHEFMNWDRPILTDSGGFQVFSLAKMRKIKEEGVYFNSHIDGKKIFMGPEESMQIQSNLASTIAMAFDECIENPATREYVERSVERTTRWLERCKIEMDRLNSMPETINKEQMLFGINQGGVYEDIRIKHAKEITQMDLDGYAIGGLAVGETHEEMYRVIDAVVPYLPEDKPIYLMGVGTPSNILEAVDRGVDFFDCVLPARNGRHGNVFCSEGKLNLMNAKFELDTRPIDEGCECPTCRNYTRAYIRHLFKAKEMLAMRLCVLHNLYFYNKLMADIRDAIDGGYFKEFKEKKLAQWEGRA

SEQ ID NO: 53962 - protein, 381 aa, [Clostridium] citroniae
  misc_feature (1)..(381): tr|A0A3E2V8N3|A0A3E2V8N3_9FIRM Queuine tRNA-ribosyltran sferase OS=[Clostridium] citroniae OX=358743 GN=tgt PE= 3 SV=1
MKYQVITKDQKAKRARMETVHGVIETPVFMNVGTVGAIKGAVSTDDLREIGTQVELSNTYHLHVRTGDKLIKEFGGLHKFMSWDRPILTDSGGFQVFSLTKLRKIKEEGVYFNSHIDGHKIFMGPEESMQIQSNLGSTIAMAFDECPPSHASYEYIRQSVDRTTRWLARCKEEMARLNGLPDTVNREQLLFGINQGGVVDEIRIQHAKTIREMDLDGYAVGGLAVGESHEEMYHILDVTVPHLPEDKPVYLMGVGTPANILEAVDRGVDFFDCVYPSRNGRHGHVYTNHGKLNLFNQKYELDSRPIEEGCGCPACRSYSRAYIRHLLKAKEMLGMRLCTLHNLYFYNTMMKEIRDAIEEHRYSEYKAAKLAGMESSLKANE

SEQ ID NO: 53963 - protein, 381 aa, [Clostridium] citroniae
  misc_feature (1)..(381): tr|A0A0J9CG32|A0A0J9CG32_9FIRM Queuine tRNA-ribosyltran sferase OS=[Clostridium] citroniae WAL-19142 OX=742734 GN=tgt PE=3 SV=1
MKYQVITKDQKAKRARMETVHGVIETPVFMNVGTVGAIKGAVSTDDLREIGTQVELSNTYHLHVRTGDKLIKEFGGLHKFMSWDRPILTDSGGFQVFSLTKLRKIKEEGVYFNSHIDGHKIFMGPEESMQIQSNLGSTIAMAFDECPPSHASDEYIRQSVDRTTRWLARCKEEMARLNGLPDTVNREQLLFGINQGGVVDEIRIQHAKTIREMDLDGYAVGGLAVGESHEEMYHILDVTVPHLPEDKPVYLMGVGTPANILEAVDRGVDFFDCVYPSRNGRHGHVYTNHGKLNLFNQKYELDSRPIEEGCGCPACRSYSRAYIRHLLKAKEMLGMRLCTLHNLYFYNTMMKEIRDAIEEHRYSEYKAAKLAGMESSLKANE

SEQ ID NO: 53964 - protein, 386 aa, [Clostridium] clostridioforme
  misc_feature (1)..(386): tr|A0A227LPU2|A0A227LPU2_9FIRM Queuine tRNA-ribosyltran sferase OS=[Clostridium] clostridioforme OX=1531 GN=tgt PE=3 SV=1
MKYQVITKDGRAKRARMETVHGTVETPVFMNVGTVGAIKGAVSTDDLREIGTQVELSNTYHLHVRTGDKLIKEFGGLHRFMNWDRPILTDSGGFQVFSLAGLRKIKEEGVYFNSHIDGHKIFMGPEESMRIQSNLGSTIAMAFDECPPSHASDDYIRHSVERTTRWLARCKTEMERLNSLPDTVNREQLLFGINQGGVVEEIRMEHARTIREMDLDGYAVGGLAVGESHEEMYHILDVTVPCLPEDKPVYLMGVGTPANILEAVDRGVDFFDCVYPSRNGRHGHVYTNQGKLNLFNQKYELDSRPIEEGCVCPACRSYSRAYIRHLLKAKEMLGMRLCTLHNLYFYNTMMKEIRDAIEEHRYAEYKAAKLAGMEGSSRATGTASDE

SEQ ID NO: 53965 - protein, 386 aa, [Clostridium] clostridioforme
  misc_feature (1)..(386): tr|A0A174I3L6|A0A174I3L6_9FIRM Queuine tRNA-ribosyltran sferase OS=[Clostridium] clostridioforme OX=1531 GN=tgt PE=3 SV=1
MKYQVITKDGRAKRARMETVHGTVETPVFMNVGTVGAIKGAVSTDDLREIGTQVELSNTYHLHVRTGDKLIKEFGGLHRFMNWDRPILTDSGGFQVFSLAGLRKIKEEGVYFNSHIDGHKIFMGPEESMRIQSNLGSTIAMAFDECPPSHASDDYIRHSVERTTRWLARCKTEMERLNSLPDTVNREQLLFGINQGGVVEEIRMEHARTIREMDLDGYAVGGLAVGESHEEMYHILDVTVPCLPEDKPVYLMGVGTPANILEAVDRGVDFFDCVYPSRNGRHGHVYTNQGKLNLFNQKYELDSRPIEEGCGCPACRSYSRAYIRHLLKAKEMLGMRLCTLHNLYFYNTMMKEIRDAIEEHRYAEYKAAKLAGMEGSSRATGTASDE

SEQ ID NO: 53966 - protein, 386 aa, Clostridium clostridioforme
  misc_feature (1)..(386): tr|R7PLR0|R7PLR0_9CLOT Queuine tRNA-ribosyltransferase OS=Clostridium clostridioforme CAG:511 OX=1263066 GN=tg t PE=3 SV=1
MKYQVITKDGRAKRARMETVHGTVETPVFMNVGTVGAIKGAVSTDDLREIGTQVELSNTYHLHVRTGDKLIKEFGGLHRFMNWDRPILTDSGGFQVFSLAGLRKIKEEGVYFNSHIDGHKIFMGPEESMQIQSNLGSTIAMAFDECPPSHASDDYIRHSVERTTRWLARCKTEMERLNSLPDTVNREQLLFGINQGGVVEEIRMEHARTIREMDLDGYAVGGLAVGESHEEMYHILDVTVPCLPEDKPVYLMGVGTPANILEAVDRGVDFFDCVYPSRNGRHGHVYTNQGKLNLFNQKYELDSRPIEEGCGCPACRSYSRAYIRHLLKAKEMLGMRLCTLHNLYFYNTMMKEIRDAIEEHRYAEYKAAKLAGMEGSSRATGTASDE

SEQ ID NO: 53967 - protein, 386 aa, Clostridium clostridioforme; identical to SEQ ID NO: 53965
  misc_feature (1)..(386): tr|R6JTY3|R6JTY3_9CLOT Queuine tRNA-ribosyltransferase OS=Clostridium clostridioforme CAG:132 OX=1263065 GN=tg t PE=3 SV=1

SEQ ID NO: 53968 - protein, 376 aa, Clostridium cochlearium
  misc_feature (1)..(376): tr|A0A1G9HHZ3|A0A1G9HHZ3_CLOCO Queuine tRNA-ribosyltran sferase OS=Clostridium cochlearium OX=1494 GN=tgt PE=3 SV=1
MYTLIKKCGNAKRGRFETPHGTIETPVFMNVGTLAAIKGAVSTMDLKEIGCQVELSNTYHLHLRPGDEVIKKMGGLHKFMNWDRPILTDSGGFQVFSLAKIRKIQEEGVYFNSHIDGRRIFMGPEESMRIQSNIASTIAMAFDECIPNPSTREYVEQSVARTTRWLERCKKEMDRLNSLPDTINKKQMLFGINQGGTYEDIRKAHAKTIVDMDLDGYAIGGLAVGETHEEMYRIIEEVAPIFPDNKPLYLMGVGLPSNILEAVDRGVDFFDCVLPARNGRHGHVFTKYGKINLMNAKFELDENPIDEGCECPACKHYSRAYIRHLFKAKEMLAMRLCVLHNLYFYNKLMEDIRKAIEGDYFKEFKKEKLHNWNGKA

SEQ ID NO: 53969 - protein, 376 aa, Clostridium cochlearium
  misc_feature (1)..(376): tr|A0A240AQP3|A0A240AQP3_CLOCO Queuine tRNA-ribosyltran sferase OS=Clostridium cochlearium OX=1494 GN=tgt PE=3 SV=1
MYTLIKKCGNAKRGRFETPHGTIETPVFMNVGTLAAIKGAVSTMDLKEIGCQVELSNTYHLHLRPGDEVIKKMGGLHKFMNWDRPILTDSGGFQVFSLAKIRKIQEEGVYFNSHIDGRRIFMGPEESMRIQSNIASTIAMAFDECIPNPSTREYVEQSVARTTRWLERCKKEMDRLNSLPDTINKKQMLFGINQGGTYEDIRKAHAKTIVDMDLDGYAIGGLAVGETHEEMYRIIEEVAPIFPDNKPLYLMGVGLPSNILEAVDRGVDFFDCVLPARNGRHGHVFTKYGKINLMNAKFELDENPIDEGCECPACKHYSRAYIRHLFKAKEMLAMRLCVLHNLYFYNKLMEDIRKAIEGDYFKEFKKEKLQNWNGKA

SEQ ID NO: 53970 - protein, 378 aa, [Clostridium] cocleatum
  misc_feature (1)..(378): tr|A0A1I0C592|A0A1I0C592_9FIRM Queuine tRNA-ribosyltran sferase OS=[Clostridium] cocleatum OX=69824 GN=tgt PE=3 SV=1
MAAISYELKHICKQSGARYGILHTPHGDVETPMFMPVGTLATVKGISPEMLKEMHSQVILANTYHLWLRPGEDVIAQAGGLHKFMNYNGPMLTDSGGFQVFSLGKTRKIEEEGVKFKSIIDGSSLFLSPEKAIEIQNKLGADIIMSFDECAPYPCTYEYMKNSMERTLRWAKRGKEAHKNTDKQALFGIVQGGEFPDLREHCAKELVAMDFPGYSIGGTSVGEPKDVMYKMVDDAIKWLPEDKPRYLMGVGNPIDLIECAIRGIDMYDCVLPTRVARHGAVMTSQGRLNINNEKFKYDFTPLDPECDCYACKNYTKAYIRHLHKCDEIFGKTLLSIHNVNFLLQLAKDIREAIKEDRLLDFKEEFLNKYGHDVYKRAF

SEQ ID NO: 53971 - protein, 376 aa, Clostridium colicanis
  misc_feature (1)..(376): tr|A0A151ARA5|A0A151ARA5_9CLOT Queuine tRNA-ribosyltran sferase OS=Clostridium colicanis DSM 13634 OX=1121305 G N=tgt PE=3 SV=1
MFKLHKKEKRARRGEFITPHGVIQTPVFMNVGTLAAIKGAVSTMDLKDIRCQVELSNTYHLHLRPGDKIIKQLGGLHKFMNWDRPILTDSGGFQVFSLSKIREIEEEGVTFRSHIDGRRIFMGPEESMQIQSNLASTIAMAFDECIENPSPRDYVEKSVARTTRWLERCKIEMDRLNSLPDTINKKQMLFGINQGGVYEDIRIAHAKEISKMDLDGYAIGGLAVGETHEEMYRIIEAVDPYLPEDKPRYLMGVGIPSNILEAVSRGVDFFDCVLPARNGRHGHVFTKYGKINLMNAKFELDSRPIDEGCDCPACQHYTRAYIRHLFKAKEMLAMRLCVLHNLYFYNKLMEDIRDAIDGGYFEDFKAQKLEEWGGRA

SEQ ID NO: 53972 - protein, 377 aa, Clostridium collagenovorans
  misc_feature (1)..(377): tr|A0A1M5YD15|A0A1M5YD15_9CLOT Queuine tRNA-ribosyltran sferase OS=Clostridium collagenovorans DSM 3089 OX=1121 306 GN=tgt PE=3 SV=1
MGQYTLLKRDGKTRRGEFKTVHGTIQTPVFMNVGTLAAIKGAVSSMDLKEIGCQVELSNTYHLHLRPTDKVVGELGGLHKFMNWDRPILTDSGGFQVFSLAAMRKIKEEGVYFNSHIDGRKIFMGPEESMQIQSNLASTIAMAFDECIPNPSTREYVENSVARTTRWLERCKKEMDRLNSLPDTINKDQMLFGINQGGTYEDIRIEHAKTISKMDLDGYAIGGLAVGESHEDMYKVIDAVVPHLPVDKPIYLMGVGTPANILEAVERGVDFFDCVLPARNGRHGHLFTKDGKINIMNAKYELDTKPIDEGCQCPACKHYTRAYIRHLFKAKEMLAMRLAVLHNLYFYNNLMQEIRDAIDADNFAGFKAKKLQEWGIK

SEQ ID NO: 53973 - protein, 376 aa, Clostridium combesii
  misc_feature (1)..(376): tr|A0A2G7HK87|A0A2G7HK87_9CLOT Queuine tRNA-ribosyltran sferase OS=Clostridium combesii OX=39481 GN=tgt PE=3 SV =1
MYKLLKKSGKARRGEFTTPQGVIQTPVFMNVGTLAAIKGAVSSMDLKEIGCQVELSNTYHLHLRPGDEVVKKMGGLHKFMNWDRPILTDSGGFQVFSLSKIRKIQEEGVYFNSHIDGRKIFMGPEESMRIQSNLASTIAMAFDECVENPASREYVEKSVERTTRWLHRCKDEMNRLNSLPDTINNKQMLFGINQGGTYEDIRIEHAKTIAKMDLDGYAIGGLAVGESHEDMYRIIDAVVPHLPEDKPIYLMGVGIPSNILEAVDRGVDFFDCVLPARNGRHAHVFTKEGKINLLNAKFELDDKPIDEGCQCPACKHYTRSYIRHLFKAKEMLAMRLCVLHNLYFYNNLMEEIRDAIDGDYFKEYKERKLKEWGGRA

SEQ ID NO: 53974 - protein, 374 aa, Clostridium coskatii; identical to SEQ ID NO: 53934
  misc_feature (1)..(374): tr|A0A162LDT0|A0A162LDT0_9CLOT Queuine tRNA-ribosyltran sferase OS=Clostridium coskatii OX=1705578 GN=tgt PE=3 SV=1

SEQ ID NO: 53975 - protein, 378 aa, Clostridium cylindrosporum
  misc_feature (1)..(378): tr|A0A0J8DAD3|A0A0J8DAD3_CLOCY Queuine tRNA-ribosyltran sferase OS=Clostridium cylindrosporum DSM 605 OX=112130 7 GN=tgt PE=3 SV=1
MEPVVKYELIKRCKQSGARLGRIHTPHGVIETPIFMPVGTQATVKAMTPHELKDIGSQIILSNTYHLFLRPGHKLIERAGGLHKFMNWDRPILTDSGGFQVFSLTDLRKIEEEGVTFKSHIDGSKQFLSPEKAMEIQNSLGADIMMAFDECPPYEADYDYTKKSLAMTLRWAERCLKSHSRPNDQALFGIIQGGMYKDLREEALDEMVKMDFPGYALGGLSIGEPQETMVKVLSWVAEKMPEHKPRYLMGIGSPDYIFEAVLNGIDMFDCVLQTRIARNGTVFTSNGRLVIKNAQYAEDMRPLDEECDCYACQNFTRGYIRHLFKAQEILGARLTTIHNLRFTLKLVEQIREAIKGDYLLDFRDEFYRKFGYTQKYTK

SEQ ID NO: 53976 - protein, 378 aa, Clostridium diolis; identical to SEQ ID NO: 53939
  misc_feature (1)..(378): tr|A0A2P8RKU3|A0A2P8RKU3_9CLOT Queuine tRNA-ribosyltran sferase OS=Clostridium diolis OX=223919 GN=tgt PE=3 SV= 1

SEQ ID NO: 53977 - protein, 379 aa, Clostridium disporicum
  misc_feature (1)..(379): tr|A0A174HZM0|A0A174HZM0_9CLOT Queuine tRNA-ribosyltran sferase OS=Clostridium disporicum OX=84024 GN=tgt PE=3 SV=1
MSKRYTLLKKDGKARRGRFETPHGTIETPVFMNVGTLAAIKGGVSSMDLKEIGCQVELSNTYHLHLRPSDKVVAKMGGLHKFMNWDRPILTDSGGFQVFSLSSMRKIKEEGVYFNSHIDGKKIFMGPEESMQIQSNLASTIAMAFDECIPNPSTREYVLQSVARTNRWLERCKIEMDRLNSLPETINKEQMLFGINQGGCYEDIRIEHAKHIAKMDLDGYAIGGLAVGETHEEMYRVIDAVVPHLPEDKPIYLMGVGTPENILEAVDRGVDFFDCVLPARNGRHGHVFTGQGKINLMNAKFELDERPIDEGCECPACKHYTRSYIRHLFKAKEMLALRLCVLHNLYFYNKLMADIRTAIDNGTYSEFKEQKLREWNCKK

SEQ ID NO: 53978 - protein, 380 aa, Clostridium disporicum
  misc_feature (1)..(380): tr|A0A174DVL5|A0A174DVL5_9CLOT Queuine tRNA-ribosyltran sferase OS=Clostridium disporicum OX=84024 GN=tgt PE=3 SV=1
MSKKRYTLLKKDGNARRGRFETPHGTIETPVFMNVGTLAAIKGAVSSMDLKEIGCQVELSNTYHLHLRPTDKVVAKMGGLHEFMNWDRPILTDSGGFQVFSLAGMRKIKEEGVYFNSHIDGKKIFMGPEESMQIQSNLASTIAMAFDECIPNPSTREYVEKSVARTNRWLDRCIAEMNRLNSLPETINKEQMLFGINQGGCYEDIRIEHAKHLASLDMDGYAIGGLAVGETHEEMYRVIEAVVPHLPEDKPIYLMGVGTPENIIEAVDRGVDFFDCVLPARNGRHGHVFTGEGKINLFNAKFELDNRPIDEGCQCPACKHYTRAYIRHLFKAKEMLAMRLCVLHNLYFYNKLMEDIRAAIDAGNYKEFKEQKLREWNIKK

SEQ ID NO: 53979 - protein, 376 aa, Clostridium drakei
  misc_feature (1)..(376): tr|A0A2U8DWQ6|A0A2U8DWQ6_9CLOT Queuine tRNA-ribosyltran sferase OS=Clostridium drakei OX=332101 GN=tgt PE=3 SV= 1
MYKLLKKSGKARRGEFTTAHGVIQTPVFMNVGTLAAIKGGVSSMDLKEIGCQVELSNTYHLHLRPGDEVVKKMGGLHKFMNWDRPILTDSGGFQVFSLAKMRKIKEEGVYFNSHIDGRKIFMGPEESMRIQSNLASTIAMAFDECIHNPSPRDYVEQSVARTTRWLQRCKDEMDRLNSLPDTINDKQMLFGINQGGIFEDIRIEHAKTISKMNLDGYAIGGLAVGESHEEMYRVIDAVVPYLPEDKPIYLMGVGIPSNILEAVDRGVDFFDCVLPARNGRHGHVFTKEGKINLFNAKYELDSKPIDEGCQCPACKNYSRAYIRHLFKAKEILAMRLCVLHNLYFYNNMMQEIRDAIDGNYFAEYKSEKLKQWNGRA

SEQ ID NO: 53980 - protein, 376 aa, Clostridium estertheticum
  misc_feature (1)..(376): tr|A0A1J0GH58|A0A1J0GH58_9CLOT Queuine tRNA-ribosyltran sferase OS=Clostridium estertheticum subsp. esterthetic um OX=1552 GN=tgt PE=3 SV=1
MYKLLKKSGKVRRGEFTTPHGTIQTPVFMNVGTLAVIKGAVSTMDLKEINCQVELSNTYHLHLRPTDTVVRKMGGLHKFMNWDRPILTDSGGFQVFSLSKMRKIKEEGVYFNSHIDGKKIFMGPEESMQIQSNLASTIAMAFDECIPNPSTKEYVVDSVARTTRWLERCKIEMDRLNSLSDTINNKQMLFGINQGGTYEDIRIEHAKTISKMDLDGYAIGGLAVGESHEEMYRIIDAVVPHLPQDKPIYLMGVGYPSNILEAVSRGVDFFDCVLPARNGRHGNVFTKDGRINMFNAKFELDAGPIDEGCNCPTCKHYTRAYIRHLFKAKEMLAMRLCVLHNLYFYNKLMEDIRDAIDNDCFEEFKAEKLAQWNEGK

SEQ ID NO: 53981 - protein, 379 aa, Clostridium fallax
  misc_feature (1)..(379): tr|A0A1M4UBS2|A0A1M4UBS2_9CLOT Queuine tRNA-ribosyltran sferase OS=Clostridium fallax OX=1533 GN=tgt PE=3 SV=1
MSKDYTLLKKDGEARRGEFRTPHGTIQTPVFMNVGTLAAIKGAVSTMDLKEVGCQVELSNTYHLHLRPGDKVVKKMGGLHKFMNWDRPILTDSGGFQVFSLAGIRKIKEEGVYFNSHIDGKKIFMGPEESMQIQSNLASTIAMAFDECIEIPSPRDYVEKSVARTTRWLERCKKEMDRLNSLDDTINKKQMLFGINQGATFKDIRIEHAKTISKMDLDGYAIGGLAVGETHEEMYEIIETVVPYLPEDKPIYLMGVGLPSNILEAVDRGVDFFDCVLPARNGRHGHVFTKEGKINLFNAKFELDNRPIDEGCQCPACKNYTRAYIRHLFKAKEMLAMRLCVLHNLYFYNKLMEDIRNAIDNGNFKEFKKQKLEEWGGRA

SEQ ID NO: 53982 - protein, 376 aa, Clostridium felsineum
  misc_feature (1)..(376): tr|A0A1S8LKX8|A0A1S8LKX8_9CLOT Queuine tRNA-ribosyltran sferase OS=Clostridium felsineum DSM 794 OX=1121310 GN= tgt PE=3 SV=1
MYTLLKKTGKVRRGRFETVHGTIETPVFMNVGTLGAIKGAVSSMDLKEINCQVELSNTYHLSLRPGDDVIKKLGGLHKFMNWDRPILTDSGGFQVFSLAEIRKIKEEGVYFNSHIDGRKIFMGPEESMRIQSNIASTIAMAFDECIENPSPRDYVERSVERTTRWLVRCKEELDRLNSLPDTINKNQMLFGINQGGVYEDIRIEHAKTIAKMNLDGYAIGGLAVGETHEEMYRIIDAVVPHLPQDKPIYLMGVGTPTNILEAVSRGVDFFDCVLPARNGRHGHVFTKRGKINLRNEKFELDDTPIDEGCQCPTCKNYTRAYIRHLFKAKEMLAMRLCVLHNLYFYNTLMADIRKAIDEDRFEEFKNEKLEAWNGKA

SEQ ID NO: 53983 - protein, 380 aa, [Clostridium] fimetarium
  misc_feature (1)..(380): tr|A0A1I0QZC4|A0A1I0QZC4_9FIRM Queuine tRNA-ribosyltran sferase OS=[Clostridium] fimetarium OX=99656 GN=tgt PE= 3 SV=1
MENTYKLLKTDGLAKRGELHTVHGVIQTPVFMNVGTVAAIKGAVATTDLREIGTQVQLSNTYHLHVRPGDDVIRKMGGLHKFMNWDKPILTDSGGFQVFSLAGMRKIKEEGVTFHSHIDGRKIFMGPEESMQIQSNLASTIAMAFDECPPHPATREYMQDSVDRTTRWLNRCVIEMDRLNSLPDTLNKNQMLFGINQGGTYEDIRIEHAKVIADLNLPGYALGGLAVGESHEEMYRIIEQTVPYLPQNKPTYLMGVGTAANILESVDRGVDFFDCVYPSRNGRHGHLYTRFGKINIFNAKFETDSEPIEEGCQCPACKNYSRGYIRHLMKAKEMLGMRLCVLHNLYFYNHLMGEIRDAIDAGNYAQYKKDKLECLKTYDS

SEQ ID NO: 53984 - protein, 372 aa, Clostridium formicaceticum
  misc_feature (1)..(372): tr|A0A1D9FNJ0|A0A1D9FNJ0_9CLOT Queuine tRNA-ribosyltran sferase OS=Clostridium formicaceticum OX=1497 GN=tgt PE =3 SV=1
MALTYELIKECKQSGARLGKIHTKRGTIETPIFMPVGTQATVKTMAPEELKEIKSQIILSNTYHLYLRPGHELVKKAGGLHKFMNWDKPILTDSGGFQVFSLGDLRKISEEGVEFRSHLDGSKHFISPEKAVEIQNALGSDIMMVFDECAPYPADRDYVKKSLERTTRWAKRCKEAHKNIEDQNLFGIIQGGMYADLRKQSAQELLELDFPGYAVGGLSVGEPKPLMYEVLEHTTPLMPKNKPRYLMGVGSPDCLIEGAIRGIDMFDCVLPTRIARNGTAMTSRGKVVIKNAKYTEDFEGLDPECSCYTCRNYSKAYLRHLFKANEVLGLRLLSYHNLYFLLKLMEEIREAIKEDRLLDYRKSFFQKYGYEV

SEQ ID NO: 53985 - protein, 376 aa, Clostridium frigidicarnis
  misc_feature (1)..(376): tr|A0A1I0VMG6|A0A1I0VMG6_9CLOT Queuine tRNA-ribosyltran sferase OS=Clostridium frigidicarnis OX=84698 GN=tgt PE =3 SV=1
MYKLLKKSGKVRRGEFHTPHGVIQTPVFMNVGTLAAIKGAVSSMDLKDIGCQVELSNTYHLHLRPGDKVVRQMGGLHEFMNWDRPILTDSGGFQVFSLAGLRKIKEEGVYFSSHIDGRKIFMGPEESMQIQSNLGSTIAMAFDECIEIPSPREYVEKSVGRTVRWLERCKTEMDRLNSLPDTVNNKQMLFGINQGATFKDIRIEHAKTIAKMDLDGYAIGGLAVGETHEEMYDIIDTVVPYLPQDKPIYLMGVGLPSNILEAVSRGVDFFDCVLPARNGRHGHVFTKDGKINIMNAKFELDGSPIDEGCQCPACKNYTRSYIRHLFKAKEMLAMRLCVLHNLYFYNKLMEDIRNAIDGDYFEDFKKEKLEAWQGRA

SEQ ID NO: 53986 - protein, 380 aa, Clostridium gasigenes
  misc_feature (1)..(380): tr|A0A1H0UCW8|A0A1H0UCW8_9CLOT Queuine tRNA-ribosyltran sferase OS=Clostridium gasigenes OX=94869 GN=tgt PE=3 S V=1
MSKKRYTLLKKEGKARRGRFETPHGTIETPVFMNVGTLAVIKGAVSSMDLKEIGCQVELSNTYHLHLRPSDDVVYKLGGLHKFMNWDRPILTDSGGFQVFSLAGMRKIKEEGVYFSSHIDGRKIFMGPEESMQIQSNLASSIAMAFDECIPNPSTRDYVEKSVERTTRWLERCKVEIDRLNELPQTINKEQMLFGINQGGCYDDIRIEHAKTITKMDLDGYAIGGLAVGETHEEMYKVIDAVVPHLPEDKPIYLMGVGLPSNILEAVERGVDFFDCVLPARNGRHGQVFTKNGKINLRNAKFQLDATPIDEGCECPACKNYTRAYIRHMFVAKEMLAMRLCVLHNLYFYNKLMEDIRAALDNGCFKQFKAQKLKEWDGRA

SEQ ID NO: 53987 - protein, 376 aa, Clostridium grantii
  misc_feature (1)..(376): tr|A0A1M5SJV5|A0A1M5SJV5_9CLOT Queuine tRNA-ribosyltran sferase OS=Clostridium grantii DSM 8605 OX=1121316 GN=t gt PE=3 SV=1
MFKLKNTDNRARRGEFITPHGTIQTPVFMNVGTLAAIKGAVSSMDLKDIGCQVELSNTYHLHLRPGDEVIKKLGGLHKFMNWDQPILTDSGGFQVFSLSKMRKIKEEGVYFNSHIDGRKIFMGPEESMQIQSNLASTIAMAFDECIENPSPRNYVLNSVDRTTRWLERCKNEMDKLNSQEDTINKKQMLFGINQGGVYEDIRIQHAKTISQFDLDGYAIGGLAVGETHEEMYRVIEAVEPFLPKDKPRYLMGVGMPSNILEAVSRGVDFFDCVLPARNGRHGHVFTSEGKINLFNAKFELDDRPIDEGCQCPACQNYTRAYIRHLFKAKEMLAMRLCVLHNLYFYNKLMEDIRIAIDENRFEEFKNEKLFQWNGKA

SEQ ID NO: 53988 - protein, 376 aa, Clostridium haemolyticum
  misc_feature (1)..(376): tr|A0A0A0ITY2|A0A0A0ITY2_CLOHA Queuine tRNA-ribosyltran sferase OS=Clostridium haemolyticum NCTC 8350 OX=144311 5 GN=tgt PE=3 SV=1
MFKLHKKEGSARRGEFITPHGVIQTPVFMNVGTLAAIKGAVSTMDLKDIRCQVELSNTYHLHLRPGDKVIKKLGGLHKFMNWDRPILTDSGGFQVFSLAKMREIKEEGVYFRSHIDGRKIFMGPEESMQIQSNLASTIAMAFDECVENPSTREYVQKSVERTTRWLERCKKEMDRLNSLDDTINKKQMLFGINQGGVYDDIRIAHAKEISKLDLDGYAIGGLAVGETHEEMYRVIEAVEPYLPQDKPRYLMGVGIPSNILEAVSRGVDFFDCVLPARNGRHGHVFTKYGKINLLNAKFELDDKPIDEECDCPACKHYTRAYIRHLFKAKEMLAMRLCVLHNLYFYNKLMEDIRDAIDGGYFADFKAQKLEEWGGRA

SEQ ID NO: 53989 - protein, 376 aa, Clostridium haemolyticum; identical to SEQ ID NO: 53988
  misc_feature (1)..(376): tr|A0A1V2Y8U9|A0A1V2Y8U9_CLOHA Queuine tRNA-ribosyltran sferase OS=Clostridium haemolyticum OX=84025 GN=tgt PE= 3 SV=1

SEQ ID NO: 53990 - protein, 380 aa, Clostridium hathewayi
  misc_feature (1)..(380): tr|R5THW4|R5THW4_9CLOT Queuine tRNA-ribosyltransferase OS=Clostridium hathewayi CAG:224 OX=1263067 GN=tgt PE=3 SV=1
MNYKIIAKDGRAKRAEVNTVHGTIQTPVFMNVGTVGAIKGAVSTDDLKEIRTQVELSNTYHLHVRTGDKLIKEFGGLHRFMNWDRPILTDSGGFQVFSLTGLRKIKEEGVYFQSHIDGHRIFMGPEESMQIQSNLGSTIAMALDECPPHPATREYMINSVDRTTRWLERCKAEMARLNSLPDTINREQLLFGINQGGTYEDIRIRHAKTISAMDLDGYALGGLAVGESHEEMYRILDETVPYLPENKPTYLMGVGTPANILEAVDRGVDFFDCVYPSRNGRHGHVYTNQGKRNLFNSRYELDHSPIEEGCGCPACRSYSRAYIRHLLKAKEMLGMRLCVLHNLYFYNTMMEEIRDAIEQHRYAEYKAEKLAGMMAVQAEK

SEQ ID NO: 53991 - protein, 373 aa, [Clostridium] hiranonis
  misc_feature (1)..(373): tr|B6FYF6|B6FYF6_9FIRM Queuine tRNA-ribosyltransferase OS=[Clostridium] hiranonis DSM 13275 OX=500633 GN=tgt P E=3 SV=1
MYAVTYELIKTCKQSGARLGVLHTPHGDIETPIFMPVGTQATVKSMTPEELKEIGSQIILSNTYHLYLRPGHELVKKAGGLHEFMHWDKPILTDSGGFQVFSLGPLRKISEEGVEFRSHLDGSKHFLTPEKAMEIQNALGSDIMMAFDECAPYPASREYVKNSLERTTRWLERCKEAHKNPEKQALFGIIQGGMYKDLREQSAKEITAIDLPGYAIGGLSVGEPKPMMYDILEHTTPFMPVDKPRYLMGVGSPDDLIEGVIRGVDMFDCVLPTRIARNGTAMTSQGKVVVRNATYAEDFTPLDPECDCYTCRNYTKAYIRHLIKTNEMLGARLITTHNLHFLLKLMENIRQAIREDRLLDFREEFFTKYGYEL

SEQ ID NO: 53992 - protein, 373 aa, [Clostridium] hiranonis; identical to SEQ ID NO: 53991
  misc_feature (1)..(373): tr|A0A5C0T291|A0A5C0T291_9FIRM Queuine tRNA-ribosyltran sferase OS=[Clostridium] hiranonis OX=89152 GN=tgt PE=3 SV=1

SEQ ID NO: 53993 - protein, 376 aa, Clostridium homopropionicum
  misc_feature (1)..(376): tr|A0A0L6ZDM9|A0A0L6ZDM9_9CLOT Queuine tRNA-ribosyltran sferase OS=Clostridium homopropionicum DSM 5847 OX=1121 318 GN=tgt PE=3 SV=1
MFKLIKKNGNARRGEFTTTHGVIQTPVFMNVGTLAAIKGAVSSMDLYEIGCQVELSNTYHLHLRPGDEIIKKLGGLHKFMNWDRPILTDSGGFQVFSLSQMRKIQEEGVYFNSHIDGKRIFMGPEESMQIQSNLASTIAMAFDECVENPSPRNYVEKSVDRTTRWLERCAKEMEKLNSQSDTINKRQMLFGINQGGVFDDIRIKHAKEISKFDLDGYAIGGLAVGETHEEMYRIIEAVEPYLPSNKPRYLMGVGIPSNILEAVSRGVDFFDCVLPARNGRHGHVFTKYGKINLFNAKYELDTKPIDEDCTCPACQHYTRAYIRHLFKAKEMLAMRLCVLHNLHFYNKLMEEIREAIEGDYFEDYKMGQLENWGGRA

SEQ ID NO: 53994 - protein, 377 aa, [Clostridium] hylemonae
  misc_feature (1)..(377): tr|C0C3B2|C0C3B2_9FIRM Queuine tRNA-ribosyltransferase OS=[Clostridium] hylemonae DSM 15053 OX=553973 GN=tgt P E=3 SV=1
MYEVLKRDGLAKRGRLQTVHGVIETPVFMNVGTAAAIKGAVSTEDLQEIKTQVELSNTYHLHVRPGDVVVKELGGLHKFMVWDKPILTDSGGFQVFSLAGLRRIKEEGVYFQSHIDGRKIFMGPEESMQIQSNLASTIAMAFDECPSSVADRNYIEKSVERTTRWLARCKKEMERLNSLPGTINPRQLLFGINQGGICEDIRIRHAKEIAAMDLDGYAVGGLAVGESHEDMYRILDAVVPHLPVDKPSYLMGVGTPANILEAVDRGIDFFDCVYPSRNGRHGHVYTNGGKLNLFNARYELDAGPIEEGCGCPACRTYSRAYIRHLLKAKEMLGMRLCVLHNLYFYNTMMEEIREAIEKGSYKEYKTKKLAKMAGQEV

SEQ ID NO: 53995 - protein, 379 aa, [Clostridium] indolis
  misc_feature (1)..(379): tr|A0A3P6KD29|A0A3P6KD29_9FIRM Queuine tRNA-ribosyltran sferase OS=[Clostridium] indolis OX=69825 GN=tgt PE=3 S V=1
MPAVTYEHIKTCKQSGARLGIVHTPHGSFETPMFMPVGTKATVKTMSPEELHQMEAKIILGNTYHLWLQPGNDIIKKSGGLHQFMNWNGPILTDSGGFQVFSLSNLRKITEEGVEFRHHTNGSKLFLSPEKSMQIQNDLGSDIMMAFDECPPMPAEYKYVKDSIERTSRWAARCLQAHQRPEDQALFGIIQGGEYKDLRQQSAEELVALDFPGYAIGGLSVGEPKPVMYDMVSHTQQFMPKDKPRYLMGVGSPDALIECSIRGMDMFDCVLPTRIARNGTCMTSHGRVTIKNAKYAEDLGPLDENCDCYTCKNYSRAYIRHLIKAEETFGIRLTTYHNLHFLLKLMENIRQAIRDDRLLDFKEEFFEQYGLNVENPKNF

SEQ ID NO: 53996 - protein, 406 aa, [Clostridium] innocuum
  misc_feature (1)..(406): tr|N9VB55|N9VB55_CLOIN Queuine tRNA-ribosyltransferase OS=[Clostridium] innocuum 2959 OX=999413 GN=HMPREF1094_ 00070 PE=3 SV=1
MTNYKNNNTFSFEIIKRIPGKLGRAGIIHTPHGDIKTPAFMSVGTKGEVKFVSMEDLYLIQAQAMLSNGYHLRNASFEIAENGGLASWSGWNGPTLTDSGGFQVMSLGSGMGKVVSMKRENDVINTDPKDRLAHVTEDGVRFHDPFTDQEDFIGPEESMQIQCRIGADIHMAYDELTSLADSYEYNVEALARTERWAIRSINEHKKHCDDLGYHQSLYGVLQGGRWEDLRRSTAKRFAEMDFDGYGLGGAFLKESLGDILRWCCEELPETKPRHLLGLSHPDDILIGTEMGADTFDCVAPTREARHGKLYTKHGPIKLSKFTDSPLLLDENCDCPTCQAGWTRGELRALWKSGSTEGKHKYFNLATLHNLRFIIRLTENTRQAILEDRFAEFKEAFLKCYYPQSEK

SEQ ID NO: 53997 - protein, 406 aa, Clostridium innocuum
  misc_feature (1)..(406): tr|A0A099HZF4|A0A099HZF4_CLOIN Queuine tRNA-ribosyltran sferase OS=Clostridium innocuum OX=1522 GN=CIAN88_22315 PE=3 SV=1
MTNYKNNNTFSFEIIKRIPGKLGRAGIIHTPHGDIKTPAFMSVGTKGEVKFVSMEDLYLIQAQAMLSNGYHLRNASFEIAENGGLASWSGWNGPTLTDSGGFQVMSLGSGMGKVVSMKRENDVINTDPKDRLAHVTEDGVRFHDPFTDQEDFIGPEESMQIQCRIGADIHMAYDELTSLADSYEYNVEALARTERWAIRSINEHKKHCDDLGYHQSLYGVLQGGRWEDLRRSTAKRFAEMDFDGYGLGGAFLKESLGDILRWCCEELPETKPRHLLGLSHPDDILIGTEMGADTFDCVAPTREARHGKLYTKHGPIKLSKFTDSPLLLDENCDCPTCQAGWTRGELRALWKSGSIEGKHKYFNLATLHNLRFIIRLTENTRQAILEDRFAEFKEAFLKCYYPQSEK

SEQ ID NO: 53998 - protein, 406 aa, Clostridium innocuum; identical to SEQ ID NO: 53996
  misc_feature (1)..(406): tr|A0A174ZBI5|A0A174ZBI5_CLOIN Queuine tRNA-ribosyltran sferase OS=Clostridium innocuum OX=1522 GN=tgt PE=3 SV= 1

SEQ ID NO: 53999 - protein, 379 aa, Clostridium intestinale
  misc_feature (1)..(379): tr|A0A1M5Z2N3|A0A1M5Z2N3_9CLOT Queuine tRNA-ribosyltran sferase OS=Clostridium intestinale DSM 6191 OX=1121320 GN=tgt PE=3 SV=1
MSKKYTLLKKNGKARRGRFETPHGTIETPVFMNVGTLAAIKGGVSSMDLKEIGCQVELSNTYHLHLRPSDKVVSNLGGLHKFMNWDRPILTDSGGFQVFSLSAMRKIKEEGVYFNSHIDGKKIFMGPEESMQIQSNLASTIAMAFDECVSNPSTREYVEKSVARTTRWLERCKVEMDRLNSLPDTINKEQMLFGINQGGVYDDIREEHAKTIAKMDLDGYAIGGLAVGETHEEMYRVIDAVVPHLPEDKPIYLMGVGLPSNILEAVERGVDFFDCVLPARNGRHGHVFTKSGKINLMNAKFELDSAPIDEGCECPTCKNYTRAYIRHLFKAKEMLAMRLCVLHNLYFYNKLMEDIRKAIDGDYFDEFKREKLEAWGGRA

SEQ ID NO: 54000 - protein, 379 aa, Clostridium intestinale
  misc_feature (1)..(379): tr|U2NQX4|U2NQX4_9CLOT Queuine tRNA-ribosyltransferase OS=Clostridium intestinale URNW OX=1294142 GN=tgt PE=3 SV=1
MSKKYTLLKKSGKARRGRFETPHGTIETPVFMNVGTLAAIKGGVSSMDLKEIGCQVELSNTYHLHLRPSDKVVRNLGGLHKFMNWDRPILTDSGGFQVFSLSAMRKIKEEGVYFNSHIDGKKIFMGPEESMQIQSNLASTIAMAFDECVSNPSTREYVEKSVDRTTRWLERCKVEMDRLNSLPDTINKEQMLFGINQGGVYDDIREEHAKTIAKMDLDGYAIGGLAVGETHEEMYRVIDAVVPHLPEDKPIYLMGVGLPSNILEAVERGVDFFDCVLPARNGRHGHVFTKSGKINLMNAKFELDSAPIDEGCECPTCKNYTRAYIRHLFKAKEMLAMRLCVLHNLYFYNKLMEDIRKAIDGDYFDEFKREKLEAWGGRA

SEQ ID NO: 54001 - protein, 382 aa, Clostridium isatidis
  misc_feature (1)..(382): tr|A0A343JAJ2|A0A343JAJ2_9CLOT Queuine tRNA-ribosyltran sferase OS=Clostridium isatidis OX=182773 GN=tgt PE=3 S V=1
MSKKRYTLLKKDGKARRGRFETPHGTIETPVFMNVGTLAVIKGAVSTMDLKEIGCQVELSNTYHLHLRPSDKVVYKLGGLHKFMNWDRPILTDSGGFQVFSLSNIRKIKEEGVYFNSHIDGRKVFMGPEESMQIQSNLASTIAMAFDECIPNPSTREYVEKSVARTTRWLERCKAELDRLNSLDETINKEQMLFGINQGGCYEDIRIEHAKIIAKMDLDGYAIGGLAVGETHEEMYRIIDAVVPHLPEDKPIYLMGVGTPENILEAVDRGVDFFDCVLPARNGRHGHVFTKNGKINLMNAKFELDTRPIDEGCQCPTCRSYTRAYIRHLFKAKEMLAMRLCVLHNLYFYNKLMEDIRTAIENGNFSEFKEQRLREWKSGDCK

SEQ ID NO: 54002 - protein, 376 aa, Clostridium kluyveri
  misc_feature (1)..(376): tr|A0A1L5FBK1|A0A1L5FBK1_CLOKL Queuine tRNA-ribosyltran sferase OS=Clostridium kluyveri OX=1534 GN=tgt PE=3 SV= 1
MYKLLKKDGSSRRGEFSTPHGVVQTPVFMNVGTLAAIKGAVSTEDLKEIGCQIELSNTYHLSLRPGDEVIRKLGGLHKFMNWDRPILTDSGGFQVFSLSGMRKIKEEGVYFNSHIDGRKIFMGPEESMRIQSNLASTVAMAFDECVENPAPKEYVEDSVKRTTRWLKRCKTEIDRLNSIPHTINNKQMLFGINQGGVYDDIRVEHAKIISDMDLDGYAIGGLAVGETHEEMYRVLEKVVPNLPENKPIYLMGVGTPANILESVERGVDFFDCVMPSRNGRHSHVFTSYGVIHLLNAKYELDDNPIDSECSCPTCKSYTRAYIRHLFKAKEMLAMRLCVIHNLHFYNNLMKEIRESIDKGNFLQYKKEKLEKWNETV

SEQ ID NO: 54003 - protein, 376 aa, Clostridium kluyveri
  misc_feature (1)..(376): sp|B9E5Q6|TGT_CLOK1 Queuine tRNA-ribosyltransferase OS= Clostridium kluyveri (strain NBRC 12016) OX=583346 GN=t gt PE=3 SV=1
MYKLLKKDGSSRRGEFSTPHGVVQTPVFMNVGTLAAIKGAVSTEDLKEIGCQIELSNTYHLSLRPGDEVIRKLGGLHKFMNWDRPILTDSGGFQVFSLSGMRKIKEEGVYFNSHIDGRKIFMGPEESMRIQSNLASTVAMAFDECVENPAPKEYVEDSVKRTTRWLKRCKIEIDRLNSMPHTINNKQMLFGINQGGVHDDIRMEHAKIISDMDLDGYAIGGLAVGETHEEMYRVLEKVVPNLPENKPIYLMGVGTPANILEAVERGVDFFDCVMPSRNGRHSHVFTSYGVIHLLNAKYELDDNPIDSECSCPTCKNYTRAYIRHLFKAKEMLAMRLCVIHNLYFYNNLMKEIRESIDKGNFLQYKKEKLEKWNETV

SEQ ID NO: 54004 - protein, 378 aa, [Clostridium] lavalense; identical to SEQ ID NO: 53932
  misc_feature (1)..(378): tr|A0A1I0HXK5|A0A1I0HXK5_9FIRM Queuine tRNA-ribosyltran sferase OS=[Clostridium] lavalense OX=460384 GN=tgt PE= 3 SV=1

SEQ ID NO: 54005 - protein, 376 aa, [Clostridium] leptum
  misc_feature (1)..(376): tr|A0A412B0J3|A0A412B0J3_9FIRM Queuine tRNA-ribosyltran sferase OS=[Clostridium] leptum OX=1535 GN=tgt PE=3 SV= 1
MYELKRKEGCARRGAFSTVHGTVQTPAFMNVATCGAIRGAVSALDLKELKCQVQLCNTYHLRLRPGDKVVKELGGIRKFTRWEGPVLTDSGGFQVFSLASLRNIKEEGVTFASHIDGRKIFMGPEESMHIQSNLASTIAMAFDECIENPAEYNYVKKSVARTTRWLRRCKREMSLLNSKDGTLNPHQLLFGINQGSTYEDLRVEHMKQIEDLDLDGYAIGGLAVGESAQEMYRIIEAVEPYMPEEKPRYLMGVGTPVNILEAVYRGIDLFDCVMPSRNARHGHLFTWTGIRNLNNAKYVLDDQPIDEACGCPVCQNYSRAYLHHLFKANEMLGMRLAVMHNIYFYNTLLEKIRFALDQGQFEAFYRQHRESLALRI

SEQ ID NO: 54006 - protein, 376 aa, [Clostridium] leptum
  misc_feature (1)..(376): tr|A7VX03|A7VX03_9FIRM Queuine tRNA-ribosyltransferase OS=[Clostridium] leptum DSM 753 OX=428125 GN=tgt PE=3 S V=1
MYELKRKEGRARRGAFSTVHGTIQTPAFMNVATCGAIRGAVSALDLKELKCQVQLCNTYHLHLRPGDKVVKELGGIRKFTRWEGPVLTDSGGFQVFSLASLRNIKEEGVTFASHIDGRKIFMGPEESMHIQSNLASTIAMAFDECIENPAEYNYVKKSVARTTRWLRRCKREMSLLNSRDGTLNPHQLLFGINQGSTYEDLRVEHMKQIEELDLDGYAIGGLAVGEPAQEMYRIIEAVEPYMPEEKPRYLMGVGTPVNILEAVYRGIDLFDCVMPSRNARHGHLFTWAGIRNLNNAKYILDDQPIDEACDCPVCQNYSRAYLHHLFKANEMLGMRLAVMHNIYFYNTLLEKIRFALDQGQFEAFYRQHRESLALRI

SEQ ID NO: 54007 - protein, 376 aa, Clostridium leptum
  misc_feature (1)..(376): tr|R6N5N3|R6N5N3_9CLOT Queuine tRNA-ribosyltransferase OS=Clostridium leptum CAG:27 OX=1263068 GN=tgt PE=3 SV= 1
MYELKRKEGRARRGAFSTVHGTVQTPAFMNVATCGAIRGAVSALDLKELKCQVQLCNTYHLHLRPGDKVVKELGGIRKFTRWEGPVLTDSGGFQVFSLASLRNIKEEGVTFASHIDGRKIFMGPEESMHIQSNLASTIAMAFDECIENPAEYNYVKKSVARTTRWLRRCKREMSLLNSRDGTLNPHQLLFGINQGSTYEDLRVEHMKQIEELDLDGYAIGGLAVGESAQEMYRIIEAVEPYMPEEKPRYLMGVGTPVNILEAVYRGIDLFDCVMPSRNARHGHLFTWTGIRNLNNAKYILDDQPIDEACDCPICQNYSRAYLHHLFKANEMLGMRLAVMHNIYFYNTLLEKIRFALDQGQFEAFYRQHRESLALRI

SEQ ID NO: 54008 - protein, 376 aa, Clostridium liquoris
  misc_feature (1)..(376): tr|A0A2T0AZT5|A0A2T0AZT5_9CLOT Queuine tRNA-ribosyltran sferase OS=Clostridium liquoris OX=1289519 GN=tgt PE=3 SV=1
MYKLIKKCGKTRRGEFTTPHGTVQTPVFMNVGTLGAIKGAVSSMDLKEIGCQVELSNTYHLHLRPGDKVIKQMGGLHKFMNWDRPILTDSGGFQVFSLAKIRKIKEEGVYFNSHIDGRKIFMGPEESMQIQSNIASTIAMAFDECISNPSPREYVENSVARTTRWLERCKIEMDRLNSLPDTINKKQMLFGINQGGTYDDIRIEHAKTIAKMNLDGYAIGGLAVGETHEEMYRIIDAVVPYLPEDKPIYLMGVGLPSNILEAVDRGVDFFDCVLPARNGRHGHVFTKEGKINLMNAKFELDGRPIDEGCQCPACKYYSRAYIRHLFKAKEMLAMRLCVLHNLYFYNNLMREIRDAIDGDYFPEFKEKKLTEWAGRA

SEQ ID NO: 54009 - protein, 374 aa, Clostridium ljungdahlii
  misc_feature (1)..(374): tr|A0A166S9N2|A0A166S9N2_9CLOT Queuine tRNA-ribosyltran sferase OS=Clostridium ljungdahlii OX=1538 GN=tgt PE=3 SV=1
MYKLLKKQGSARRGEFTTPHGVVQTPVFMNVGTLAAIKGAVSTCDLKEIGCQVELSNTYHLSLRPGDKIIRKLGGLHKFMNWDRPILTDSGGFQVFSLSKIRKIKEEGVYFNSHIDGSKIFMGPEESMQIQSNLASTVAMAFDECIENPSPKDYVQRSVERTTRWLKRCKVEMDRLNSLPDTINNKQMLFGINQGGVYDDIRVEHAKIISDMNLDGYAIGGLAVGETHEEMYRIIEKVVPHLPQDKPIYLMGVGTPANILEAVERGVDFFDCVLPARNGRHCHVFTSEGEINLLNAKYQLDDSPIDRGCQCPTCKNYTRAYIRHLFKAKEMLAMRLCVLHNLYFYNNLMKEIRDSIDGDYFPKYKREKLEEWNQ

SEQ ID NO: 54010 - protein, 374 aa, Clostridium ljungdahlii; identical to SEQ ID NO: 53934
  misc_feature (1)..(374): tr|D8GRQ7|D8GRQ7_CLOLD Queuine tRNA-ribosyltransferase OS=Clostridium ljungdahlii (strain ATCC 55383 / DSM 135 28 / PETC) OX=748727 GN=tgt PE=3 SV=1

SEQ ID NO: 54011 - protein, 375 aa, Clostridium luticellarii
  misc_feature (1)..(375): tr|A0A2T0BLN9|A0A2T0BLN9_9CLOT Queuine tRNA-ribosyltran sferase OS=Clostridium luticellarii OX=1691940 GN=tgt P E=3 SV=1
MYKLLKKCGRIRRGEFTTPHGVVQTPVFMNVGTLAAIKGAVSTVDLKEIGCQIELSNTYHLSLRPGDEVIRELGGLHKFMNWDRPILTDSGGFQVFSLSDIRRIKEEGVYFNSHIDGSKIFMGPEESMRIQSNLASTVAMAFDECVKNPSPRDYVENSVKRTTRWLKRCKVEMDRLNSLPDTINREQMLFGINQGGVYDDIRIEHAKIISEMDLDGYAIGGLAVGETHEEMYRIIEKVIPYLPQNKPIYLMGVGTPENILEAVERGVDFFDCVLPARNGRHSHVFTSEGEINLLNAKYKLDGSPIDEKCSCPTCKNYSRAYIRHLFKAKEMLAMRLCVLHNLYFYNNLMKEIRNAIDGDYFHSYKREKLNQWENK

SEQ ID NO: 54012 - protein, 376 aa, Clostridium magnum
  misc_feature (1)..(376): tr|A0A162UCT0|A0A162UCT0_9CLOT Queuine tRNA-ribosyltran sferase OS=Clostridium magnum DSM 2767 OX=1121326 GN=tg t PE=3 SV=1
MYKLLKKCGNARRGEFTTPHGVVQTPVFMNVGTLAAIKGAVSSIDLEEIGCQVELSNTYHLHLRPGDEVVRKMGGLHKFMNWSRPILTDSGGFQVFSLSKMRKIKEEGVYFSSHIDGRKIFMGPEESMRIQSNLASTIAMAFDECIPNPSPREYVEDSVARTTRWLYRCKDELNRLNSLPDTINNKQMLFGINQGGIYEDIRIEHAKTIAKLDLDGYAIGGLAVGETHEEMYRIIDAVAPHLPQDKPIYLMGVGIPSNILEAVDRGVDFFDCVLPARNGRHGHVFTKDGKINLMNAKFELDANPIDEGCQCPACKHYSRAYIRHLFKAKELLAMRLCVLHNLYFYNNLMKEIREAIDGDYFQDYKKQKLEQWGGRA

SEQ ID NO: 54013 - protein, 421 aa, [Clostridium] methylpentosum
  misc_feature (1)..(421): tr|C0EF14|C0EF14_9FIRM Queuine tRNA-ribosyltransferase OS=[Clostridium] methylpentosum DSM 5476 OX=537013 GN=t gt PE=3 SV=1
MNYTKLVFANLLYTRFPFGATEKLWLTSEQNQAIIFLFDSMLEVFMYKLIKQEGDARRGEFHTVHGTVQTPAFMNVGTSAAIKGGISSYDLVDLKCQVELCNTYHLHVRPGDKVIRELGGLHKFMGWNRPILTDSGGFQVFSLSSLRTIQEEGVLFASHVDGKRIFMGPEDSMRIQSNLGSTIAMAFDECVENPSTHEYSQHSCERTTRWLYRCKAEMERLNAQPDTINPHQMLFGINQGCTYEDLRVWHMKEIRKLDLDGYAIGGLAVGEPKEEMYRIISAVTPHMPQDKPRYLMGVGKPTNIIEAVYRGVDLFDCVMPSRNARHGHVNTWEGVRNLMNNKYERDDSPIDPDCDCPTCRRHSRAYIRHLFKSKEMLANRLAVMHNLYFYNTLLERIREALDEGRFEEFRARYVPVLDERI

SEQ ID NO: 54014 - protein, 378 aa, Clostridium neonatale
  misc_feature (1)..(378): tr|A0A2A7MG85|A0A2A7MG85_9CLOT Queuine tRNA-ribosyltran sferase OS=Clostridium neonatale OX=137838 GN=tgt PE=3 SV=1
MSKRYTLLKKDGNARRGQFETPHGTIQTPVFMNVGTLAAIKGAVSSMDLKEIGCQVELSNTYHLHLRPTDKVVRELGGLHEFMNWDRPILTDSGGFQVFSLSAMRKIKEEGVYFNSHIDGKKIFMGPEESMQIQSNLASTIAMAFDECIPNPSTREYVENSVARTTRWLERCKKEMDRLNSMPDTINKEQMLFGINQGGTYEDIRIAHAKEITKLDLDGYAIGGLAVGESHEDMYRIIDAVVPHLPEDKPIYLMGVGTPENILEAVSRGVDFFDCVLPARNGRHGNVYTKEGKLNLMNAKYELDKKPIEEGCECPACKHYTRAYIRHLFKAKEMLAMRLCVLHNLYFYNKLMAEIRDAIDDGCFEEFKEEKLKSWGNK

SEQ ID NO: 54015 - protein, 377 aa, Clostridium nexile
  misc_feature (1)..(377): tr|R6PF95|R6PF95_9CLOT Queuine tRNA-ribosyltransferase OS=Clostridium nexile CAG:348 OX=1263069 GN=tgt PE=3 SV =1
MYKLLKRDGLAKRGEFHTVHGVIQTPVFMNVGTAAAIKGAVSTEDLQGIKTQVELSNTYHLHVRPGDQVVKKLGGLHKFMVWDKPILTDSGGFQVFSLAGLRKIKEEGVYFNSHIDGKKIFMGPEESMQIQSNLASTIAMAFDECPSSVATREYIQNSVERTTRWLARCKAEMARLNTLPDTINQHQMLFGINQGGIYEDIRIEHAKEIAKMDLDGYAIGGLAVGESHEEMYRILEAVVPYLPIEKPTYLMGVGTPANILEAVDRGVDFFDCVYPSRNGRHGHVYTNQGKLNLFNAKYELDDAPIEEGCQCPACRTYSRAYIRHLLKAKEMLGMRLCVLHNLYFYNNMMEEIRAAIEAGRYKEYKREKLAGMGIQEV

SEQ ID NO: 54016 - protein, 376 aa, Clostridium novyi
  misc_feature (1)..(376): tr|A0A0A0IS97|A0A0A0IS97_CLONO Queuine tRNA-ribosyltran sferase OS=Clostridium novyi A str. 4570 OX=1444290 GN= tgt PE=3 SV=1
MFKLHKKDGNARRGEFITPHGVIQTPVFMNVGTLAAIKGAVSTMDLKDIRCQVELSNTYHLHLRPGDKVIKQLGGLHKFMNWDRPILTDSGGFQVFSLAKMRKIKEEGVYFRSHIDGRKIFMGPEESMQIQSNLASTIAMAFDECVENPAPREYVEKSVARTTRWLERCKKEMDRLNSLDDTINKKQMLFGINQGGVYDDIRIAHAKEIAKLDLDGYAIGGLAVGETHEEMYRVIESVEPYLPQDKPRYLMGVGIPSNILEAVSRGVDFFDCVLPARNGRHGHVFTKYGKINLLNAKFELDTKPIDEGCDCPACRHYSRAYIRHLFKAKEMLAMRLCVLHNLYFYNKLMEDIRDAIDGGYFNDFKEQKLEEWGGRA

SEQ ID NO: 54017 - protein, 382 aa, Clostridium novyi
  misc_feature (1)..(382): tr|A0PZV6|A0PZV6_CLONN Queuine tRNA-ribosyltransferase OS=Clostridium novyi (strain NT) OX=386415 GN=tgt PE=3 SV=1
MEGENKVFKVHKKDGNARRGEFITPHGVIQTPVFMNVGTLAAIKGAVSTMDLKDIRCQVELSNTYHLHLRPGDKVIKQLGGLHKFMNWDRPILTDSGGFQVFSLAKMRKIKEEGVYFRSHIDGRKIFMGPEESMQIQSNLASTIAMAFDECVENPAPREYVEKSVARTTRWLERCKKEMDRLNSLDDTINKKQMLFGINQGGVYDDIRIAHAKEIAKLDLDGYAIGGLAVGETHEEMYRVIESVEPYLPQDKPRYLMGVGIPSNILEAVSRGVDFFDCVLPARNGRHGHVFTKYGKINLLNAKFELDTKPIDEGCDCPACRHYSRAYIRHLFKAKEMLAMRLCVLHNLYFYNKLMEDIRDAIDGGYFNDFKEQKLEEWGGRA

SEQ ID NO: 54018 - protein, 376 aa, Clostridium oryzae
  misc_feature (1)..(376): tr|A0A1V4IVY7|A0A1V4IVY7_9CLOT Queuine tRNA-ribosyltran sferase OS=Clostridium oryzae OX=1450648 GN=tgt PE=3 SV =1
MFKVLKRNGNAKRGTFTTPHGTVQTPVFMNVGTLAAIKGAVSSMDLKDIGCQVELSNTYHLHLRPGDKTVYKLGGLHKFMNWDRPILTDSGGFQVFSLASMRKIKEEGVYFNSHIDGRKIFMGPEESMQIQSNLASTIAMAFDECVENPSPRDYVKRSVERTTRWLYRCKDEMARLNSMETTINKKQMLFGINQGGVYDDLRIEHAKEISKLNLDGYAIGGLAVGETHEEMYRIIEAVVPHLPEDKPIYLMGVGTPINILEGVERGVDFFDCVLPARNGRHGHVYTHSGKINLLNAKYELDGSPIEEGCECPTCKNYTKAYIRHLFKAKEMLAMRLCVLHNLYFYNKLMEDIRKALDEDKFSEFKQKTVEQFSENI

SEQ ID NO: 54019 - protein, 373 aa, [Clostridium] paradoxum
  misc_feature (1)..(373): tr|A0A150FP78|A0A150FP78_CLOPD Queuine tRNA-ribosyltran sferase OS=[Clostridium] paradoxum JW-YL-7 = DSM 7308 O X=1121328 GN=tgt PE=3 SV=1
MGAIRFELIKTCKQSGARLGKLYTPHGEIQTPIFMPVGTQATVKSMTPQELKEINSQIILSNTYHLYMRPGHKIVEKAGGLHKFMNWDRPILTDSGGFQVFSLGPLRKITEEGVEFRSHLDGSKHFISPEKAIEIQNSLGADIIMAFDECAPYPADRDYVKNSLERTTRWAKRCKDAHKNSDRQALFGIVQGGMYKDLREQSAKEIMDIGFPGYAIGGLSVGEPKELMYEVLDYTTPLLPKDKPRYLMGVGSPDDLLEGVIRGVDMFDCVLPTRIARNGTAMTSQGKVVVRNAQYAEDFTPLDPECDCYTCKNYTRAYIRHLIKANEILGARLITYHNLYFLLKLMENVRNAIKEDRLLDYKNEFFRKYGYTL

SEQ ID NO: 54020 - protein, 431 aa, Clostridium paraputrificum
  misc_feature (1)..(431): tr|A0A2X3B6Y5|A0A2X3B6Y5_9CLOT Queuine tRNA-ribosyltran sferase OS=Clostridium paraputrificum OX=29363 GN=tgt P E=3 SV=1
MTDSTADQGNFSVVKQMDGEPGRAGIIRTPHGDVQTPAFIPVGTKATVKTLTPEQIRDTGAQAVLSNAYHLYLQPGPDIVEAAGGLTRFENWNGPTFTDSGGFQVMSLGVGFRKTLAMDVTGLQNDDILAPGKERNAFVDEEGVTFRSHIDGSSHRFTPEFSMGIQHKLGADIIFAFDELTTLMNTREYQESSVERTHRWAQRCLDEHDRLTRERNQVPGLAGDLAEGERPLQQLFGVVQGAQYEDLRRGAARGLVELSDAAEAAGKRGFAGYGIGGALEKQRLGEICRWVTDELPDDRPRHLLGISEPDDIFAAVAAGADTFDCVAPTRLARRGGVYTLDGKITLTNARFKTDFGPIDPEVESYTTLNYSRAYIHHLLKAKEFLAGTLCTIHNVYFMVKLVENIRASIIDGTFEEYRDEFLGRYYAGKKK

SEQ ID NO: 54021 - protein, 379 aa, Clostridium paraputrificum
  misc_feature (1)..(379): tr|A0A174ATR9|A0A174ATR9_9CLOT Queuine tRNA-ribosyltran sferase OS=Clostridium paraputrificum OX=29363 GN=tgt P E=3 SV=1
MSKRYTLLKKDGKARRGRFVTPHGTVETPVFMNVGTLAAIKGAVSSMDLKEIGCQVELSNTYHLHLRPSDKVVYKMGGLHEFMNWDRPILTDSGGFQVFSLSGMRKIKEEGVYFSSHIDGKKIFMGPEESMQIQSNLASTIAMAFDECIPIPSTREYVEKSVARTTRWLERCKVEMDRLNSLPETINKEQMLFGINQGATFKDIRIEHAKTIAKMDLDGYAIGGLAVGETHEEMYEIIDAVVPYLPEDKPIYLMGVGTPANILEAVDRGVDFFDCVLPARNGRHGHVFTKDGKINLMNAKFELDKRPIDEGCQCPACKSYTRGYIRHLFKAKEMLAMRLCVLHNLYFYNKLMEDIRAAIDGGYYKEFKEQKLKEWNIKA

SEQ ID NO: 54022 - protein, 376 aa, Clostridium pasteurianum
  misc_feature (1)..(376): tr|A0A1D9N412|A0A1D9N412_CLOPA Queuine tRNA-ribosyltran sferase OS=Clostridium pasteurianum OX=1501 GN=tgt PE=3 SV=1
MYKLLKTTGKVRRGEFTTTHGVIQTPVFMNVGTLAAIKGAVSTMDLKEINCQVQLSNTYHLSLRPGNKIVKQLGGLHKFMNWDRPILTDSGGFQVFSLSNIRKIKEEGVYFSSHIDGRKIFMGPEESMQIQSNLASTIAMAFDECIPNPSSRSYVENSVARTTRWLQRCKDEMDRLNSLEDTINKKQMLFAINQGGIYDDIRIEHAKTISKFDLDGYAIGGLAVGETHEEMYRIIDVVVPHLPQNKPIYLMGVGLPSNILEAVSRGVDFFDCVLPARNGRHGHVFTKYGKINLFNAKYELDSSPIDEGCECPACRNYSRAYIRHLFKAKEMLALRLCVLHNLYFYNKLMEDIRNSIDGDYFEEFKKEKLNMWDGKA

SEQ ID NO: 54023 - protein, 376 aa, Clostridium pasteurianum; identical to SEQ ID NO: 54022
  misc_feature (1)..(376): tr|A0A0H3J492|A0A0H3J492_CLOPA Queuine tRNA-ribosyltran sferase OS=Clostridium pasteurianum DSM 525 = ATCC 6013 OX=1262449 GN=tgt PE=3 SV=1

SEQ ID NO: 54024 - protein, 380 aa, Clostridium perfringens
  misc_feature (1)..(380): sp|Q0TP15|TGT_CLOP1 Queuine tRNA-ribosyltransferase OS= Clostridium perfringens (strain ATCC 13124 / DSM 756 / JCM 1290 / NCIMB 6125 / NCTC 8237 / Type A) OX=195103 G N=tgt PE=3 SV=1
MTKKRYTLLKKDGKARRGEFVTPHGTIQTPVFMNVGTLAAIKGAVSSMDLKEIGCQVELSNTYHLHLRPGDKIVKQMGGLHNFMNWDRPILTDSGGFQVFSLAGMRKIKEEGVYFNSHIDGRKIFMGPEESMQIQSNLGSTIAMAFDECIPNPSTREYVEKSVARTTRWLERCKKEMDRLNSLDDTVNKEQMLFGINQGGVYEDIRIEHAKTIREMDLDGYAIGGLAVGETHEEMYRVIDAVVPHLPEDKPIYLMGVGLPSNILEAVERGVDFFDCVLPARNGRHGHVFTKEGKINLMNAKFELDARPIDEGCQCPACKNYTRAYIRHLFKAKEMLAMRLCVLHNLYFYNKLMEDIRDAIDGGYFAEFKAKKLEEWNGRA

SEQ ID NO: 54025 - protein, 380 aa, Clostridium perfringens; identical to SEQ ID NO: 54024
  misc_feature (1)..(380): sp|Q0SRN5|TGT_CLOPS Queuine tRNA-ribosyltransferase OS= Clostridium perfringens (strain SM101 / Type A) OX=2893 80 GN=tgt PE=3 SV=1

SEQ ID NO: 54026 - protein, 376 aa, [Clostridium] polysaccharolyticum
  misc_feature (1)..(376): tr|A0A1I0DLZ1|A0A1I0DLZ1_9FIRM Queuine tRNA-ribosyltran sferase OS=[Clostridium] polysaccharolyticum OX=29364 G N=tgt PE=3 SV=1
MYRLITQDGQAKRGEFHTVHGVIQTPVFMNVGTAAAIKGAVSTMDLQKIGTQVELSNTYHLHVRPGDKVVKQLGGLHKFMVWDKPILTDSGGFQVFSLAGLRKIKEEGVYFQSHIDGRRIFMGPEESMQIQSNLASTIAMAFDECPPHPATREYMQNSVDRTTRWLERCIKEMKRLNELPDTINKKQMLFGINQGGTFADIRIEHAKRISEMDLDGYALGGLAVGESHEEMYDIIEKTVPYLPLEKPTYLMGVGTPANILEAVERGVDFFDCVYPSRNGRHGHAYTNHGKMNLLNARYELDDRPMEEGCQCPVCQTYSRAYIRHLLKAKEMLGLRMLVTHNLYFYNKMMEEIRDAIEHHRFKEYKKAKLEGMAQGE

SEQ ID NO: 54027 - protein, 376 aa, [Clostridium] populeti
  misc_feature (1)..(376): tr|A0A1I6IR00|A0A1I6IR00_9FIRM Queuine tRNA-ribosyltran sferase OS=[Clostridium] populeti OX=37658 GN=tgt PE=3 SV=1
MYRLITRDNNAKRGEFHTVHGTIQTPVFMNVGTAAAIKGAVSTLDLQAIDTQVELSNTYHLHVRPGDLVVKKMGGLHKFMVWDKPILTDSGGFQVFSLAGLRKIKEEGVYFQSHIDGKRIFMGPEESMQIQSNLASTIAMAFDECPPHPATRKYMQDSVDRTTRWLLRCKTEMERLNSLEDTINPKQMLFGINQGGTFADIRIEHARRISELDLDGYALGGLAVGESHEEMYEIIEQTVPYLPLEKPTYLMGVGTPANILEAVERGVDFFDCVYPSRNGRHGHAYTNHGKMNLLNAKYELDERPIEEGCQCPVCKTYSRAYIRHLLKAKEMLGLRFLVTHNLYFYNKMMEEIRMAIEEHRFQEYKRDKLARMAEGE

SEQ ID NO: 54028 - protein, 379 aa, Clostridium puniceum
  misc_feature (1)..(379): tr|A0A1S8TE77|A0A1S8TE77_9CLOT Queuine tRNA-ribosyltran sferase OS=Clostridium puniceum OX=29367 GN=tgt PE=3 SV =1
MSKKYTLLKKDGNARRGQFETPHGTIQTPVFMNVGTIAVIKGAVSTMDLKEIGCQVELSNTYHLHLRPTDKVVSKLGGLHKFMNWDRPILTDSGGFQVFSLAKMRKIKEEGVYFNSHIDGRKIFMGPEESMQIQSNLASTIAMAFDECIENPAPRDYVERSVARTTRWLERCKNEMDRLNSLPGTINKEQMLFGINQGGVYEDIRIKHAKEIAKMDLDGYAIGGLAVGETHEEMYKVINAVVPHLPEDKPIYLMGVGTPSNILEAVERGVDFFDCVLPARNGRHGNVFCKEGKLNLMNAKYELDTRPIDEGCECPACKSYTRAYIRHLFKAKEMLAMRLCVLHNLYFYNKLMEDIRDAIDGGYFKEFKEEKLRSWEGRS

SEQ ID NO: 54029 - protein, 376 aa, Clostridium putrefaciens
  misc_feature (1)..(376): tr|A0A381J8S6|A0A381J8S6_9CLOT Queuine tRNA-ribosyltran sferase OS=Clostridium putrefaciens OX=99675 GN=tgt PE= 3 SV=1
MMYKLLKTSGKVRRGEFKTPHGTIQTPVFMNVGTLAAIKGAVSSMDLKEIECQVELSNTYHLHLRPGDKVINKLGGIHEFMNWDRPILTDSGGFQVFSLASMRKIKEEGVYFNSHIDGRKIFMGPEESMQIQSNLASTIAMAFDECIPNPSSREYVEASVDRTTRWLTRCKNELDRLNSLECTINKKQMLFGINQGGVYEDIRIEHAKTISKLDLDGYAIGGLAVGESHEDMYRIIDSVVPHLPQDKPIYLMGVGLPKNILEAVERGVDFFDCVLPARNGRHGHVFTKSGKINIMNAKFELDKSPIDEGCDCPTCKHYTRAYIRHLFKAKEMLAMRLCVLHNLYFYNKLMEEIRDSIDGDYFSDYKKQKLTEWGEV

SEQ ID NO: 54030 - protein, 374 aa, Clostridium ragsdalei
  misc_feature (1)..(374): tr|A0A1A6AQT7|A0A1A6AQT7_9CLOT Queuine tRNA-ribosyltran sferase OS=Clostridium ragsdalei P11 OX=1353534 GN=tgt PE=3 SV=1
MYKLLKKQGSARRGEFTTPHGVVQTPVFMNVGTLAAIKGAVSTCDLKEIGCQVELSNTYHLSLRPGDKIIRKLGGLHKFMNWDRPILTDSGGFQVFSLSKIRKIKEEGVYFNSHIDGSKIFMGPEESMQIQSNLASTVAMAFDECIENPSPKDYVERSVERTTRWLKRCKVEMDRLNSLPDTINNKQMLFGINQGGVYDDIRIEHAKIISEMNLDGYAIGGLAVGETHEEMYRIIEKVVPHLPQDKPIYLMGVGTPANILEAVERGVDFFDCVLPARNGRHSHVFTSQGELNLLNAKYQLDDFPIDRGCQCPTCKNYTRAYIRHLFKAKEMLAMRLCVLHNLYFYNNLMKEIRDSIDGDYFPKYKREKLEEWNQ

SEQ ID NO: 54031 - protein, 376 aa, Clostridium roseum
  misc_feature (1)..(376): tr|A0A1S8MHX6|A0A1S8MHX6_9CLOT Queuine tRNA-ribosyltran sferase OS=Clostridium roseum OX=84029 GN=tgt PE=3 SV=1
MYTLLKKTGKVRRGRFETVHGTIETPVFMNVGTLGAIKGAVSSMDLKEINCQVELSNTYHLSLRPGDDVIKKLGGLHKFMNWDRPILTDSGGFQVFSLAEIRKIKEEGVYFNSHIDGRKIFMGPEESMRIQSNIASTIAMAFDECIENPSPRDYVERSVERTTRWLVRCKEELDRLNSLPDTINKNQMLFGINQGGVYEDIRIEHAKTIAKMNLDGYAIGGLAVGETHEEMYRIIDAVVPHLPQNKPIYLMGVGTPTNILEAVSRGVDFFDCVLPARNGRHGHVFTKHGKINLRNEKFELDDAPIDEGCQCPTCKNYTRAYIRHLFKAKEMLAMRLCVLHNLYFYNTLMADIRKAIDEDRFEEFKNEKLEAWNGKA

SEQ ID NO: 54032 - protein, 379 aa, Clostridium saccharobutylicum
  misc_feature (1)..(379): tr|A0A1S8MYY6|A0A1S8MYY6_CLOSA Queuine tRNA-ribosyltran sferase OS=Clostridium saccharobutylicum OX=169679 GN=t gt PE=3 SV=1
MSKRYTLLKKDGNARRGQFVTPHGTIQTPVFMNVGTLAAIKGAVSSMDLKDIGCQVELSNTYHLHLRPSDKVVSKLGGLHKFMNWDRPILTDSGGFQVFSLSAMRKIKEEGVYFNSHIDGRKIFMGPEESMQIQSNLASTIAMAFDECIENPAPREYVLKSVARTTRWLERCKKEMDRLNSMPDTINKEQMLFGINQGGVYEDIRIAHAKEITKMDLDGYAIGGLAVGESHEDMYRVIEAVVPHLPEDKPIYLMGVGTPTNILEAVERGVDFFDCVLPARNGRHGNVYTKEGKLNLMNAKFELDERPIDEGCQCPACKNYTRAYIRHLFKAKEMLAMRLCVLHNLYFYNKLMEDIRAAIDGEYFKEFKEQKLKEWEGRA

SEQ ID NO: 54033 - protein, 379 aa, Clostridium saccharobutylicum
  misc_feature (1)..(379): tr|U5MST1|U5MST1_CLOSA Queuine tRNA-ribosyltransferase OS=Clostridium saccharobutylicum DSM 13864 OX=1345695 G N=tgt PE=3 SV=1
MSKRYTLLKKDGNARRGQFVTPHGTIQTPVFMNVGTLAAIKGAVSSMDLKDIGCQVELSNTYHLHLRPSDKVVSKLGGLHKFMNWDRPILTDSGGFQVFSLSAMRKIKEEGVYFNSHIDGRKIFMGPEESMQIQSNLASTIAMAFDECIENPAPREYVLKSVARTTRWLERCKKEMDRLNSMPDTINKEQMLFGINQGGVYEDIRIAHAKEITKMDLDGYAIGGLAVGESHEDMYRVIEAVVPHLPEDKPIYLMGVGTPANILEAVERGVDFFDCVLPARNGRHGNVYTKEGKLNLMNAKFELDERPIEEGCQCPACKNYTRAYIRHLFKAKEMLAMRLCVLHNLYFYNKLMEDIRAAIDGDYFKEFKEQKLKEWEGRA

SEQ ID NO: 54034 - protein, 391 aa, Clostridium saccharolyticum
  misc_feature (1)..(391): tr|D9R4P6|D9R4P6_CLOSW Queuine tRNA-ribosyltransferase OS=Clostridium saccharolyticum (strain ATCC 35040 / DSM 2544 / NRCC 2533 / WM1) OX=610130 GN=tgt PE=3 SV=1
MPGRPGQEKEMQMNYKIIARDGRAKRGSVTTVHGTVQTPVFMNVGTVGAIKGAVSTDDLREIKTQVELSNTYHLHVRTGDKLIKEFGGLHRFMNWDRPILTDSGGFQVFSLTGLRKIKEEGVYFQSHIDGHRIFMGPEESMQIQSNLASTIAMAFDECPPHPATREYMQNSVDRTTRWLERCRNEMARLNSLPDTLNKEQLLFGINQGGTFEDIRIAHAKTISAMDLDGYALGGLAVGESHEEMYRILEETVPYLPENKPTYLMGVGTPANILESVDRGVDFFDCVYPSRNGRHGHVYTNHGKMNLFNIKYELDHKPIEEGCGCPACRSYSRAYIRHLLKAKEMLGMRLCVLHNLYFYNTMMEEIRDAIENHRYGEYKEQKLDRMMAGQTS

SEQ ID NO: 54035 - protein, 379 aa, Clostridium saccharoperbutylacetonicum
  misc_feature (1)..(379): tr|M1MEI3|M1MEI3_9CLOT Queuine tRNA-ribosyltransferase OS=Clostridium saccharoperbutylacetonicum N1-4(HMT) OX= 931276 GN=tgt PE=3 SV=1
MSKRYTLLKKDGKARRGQFETPHGTIQTPVFMNVGTLAAIKGAVSSMDLKEIGCQVELSNTYHLHLRPGDKVVKALGGLHEFMNWDRPILTDSGGFQVFSLAKMRKIKEEGVYFNSHIDGKKIFMGPEESMQIQSNLASTIAMAFDECIENPAPREYVERSVARTTRWLERCKDEMDRLNSQPDTINKEQMLFGINQGGVYEDIRIKHAQEIVKLDLDGYAIGGLAVGETHEEMYRVIDAVVPHLPEDKPIYLMGVGTPNNILEAVERGVDFFDCVLPARNGRHGNVFCGEGKLNLMNAKYELDTRPIDEGCQCPTCKNYTRAYIRHLFKAKEMLAMRLCVLHNLYFYNKLMADIRTAIDGGYFKEFKEKKLIEWQGKA

SEQ ID NO: 54036 - protein, 380 aa, Clostridium sartagoforme
  misc_feature (1)..(380): tr|R9BVF6|R9BVF6_9CLOT Queuine tRNA-ribosyltransferase OS=Clostridium sartagoforme AAU1 OX=1202534 GN=tgt PE=3 SV=1
MSKKRYTLLKKDGEARRGRFETPHGTIETPVFMNVGTLAVIKGAVSTMDLKEIGCQVELSNTYHLHLRPSDKVVASLGGLHNFMNWDRPILTDSGGFQVFSLSGMRKIKEEGVYFSSHIDGKKIFMGPEESMQIQSNLASTIAMAFDECIPNPSTRDYVEKSVARTTRWLERCKKEMDRLNSLPETINKEQMLFGINQGGCYEDIRIEHAKTITKMDLDGYAIGGLAVGETHEEMYRIIDAVVPYLPEDKPIYLMGVGTPSNILEAVDRGVDFFDCVLPARNGRHGHVFTKEGKINLMNAKFELDTRPIDEGCQCPACKSYTRAYIRHLFKAKEMLALRLCVLHNLYFYNKLMEEIRGAIDGGYFKEFKDEKLKEWNGKA

SEQ ID NO: 54037 - protein, 380 aa, Clostridium sartagoforme
  misc_feature (1)..(380): tr|A0A4S2DPZ5|A0A4S2DPZ5_9CLOT Queuine tRNA-ribosyltran sferase OS=Clostridium sartagoforme OX=84031 GN=tgt PE= 3 SV=1
MSKKRYTLLKKDGKARRGRFETPHGTIETPVFMNVGTLAVIKGAVSTMDLKEIGCQVELSNTYHLHLRPSDKVVAELGGLHKFMNWDRPILTDSGGFQVFSLSGMRKIKEEGVYFSSHIDGKKIFMGPEESMQIQSNLASTIAMAFDECIPNPSTRDYVEKSVARTTRWLERCKVEMDRLNSLPETINKEQMLFGINQGGCYEDIRIEHAKTITKMDLDGYAIGGLAVGETHEEMYRVIDAVVPHLPEDKPIYLMGVGLPSNILEAVDRGVDFFDCVLPARNGRHGHVFTRDGKINLMNAKFELDTRPIDEGCQCPACKSYTRAYIRHLFKAKEMLAMRLCVLHNLYFYNKLMEDIRNAIDGGYFKEFKEEKLKEWNGRA

SEQ ID NO: 54038 - protein, 376 aa, Clostridium scatologenes
  misc_feature (1)..(376): tr|A0A0E3K3X0|A0A0E3K3X0_CLOSL Queuine tRNA-ribosyltran sferase OS=Clostridium scatologenes OX=1548 GN=tgt PE=3 SV=1
MYKLLKKSGKARRGEFTTAHGVIQTPVFMNVGTLAAIKGGVSSMDLKEIGCQVELSNTYHLHLRPGDEVVKKMGGLHKFMNWDRPILTDSGGFQVFSLAKMRKIKEEGVYFNSHIDGRKIFMGPEESMRIQSNLASTIAMAFDECIHNPSPRDYVEQSVARTTRWLQRCKDEMDRLNSLPDTINNKQMLFGINQGGIFEDIRIEHAKTISKMNLDGYAIGGLAVGESHEEMYRVIDAVVPYLPEDKPIYLMGVGIPSNILEAVDRGVDFFDCVLPARNGRHGHVFTKEGKINLFNAKYELDSKPIDEGCQCPACKNYSRAYIRHLFKAKEILAMRLCVLHNLYFYNNMMQEIRDAIDGNYFAEYKSEKLKQWNGRA

SEQ ID NO: 54039 - protein, 377 aa, Clostridium scindens
  misc_feature (1)..(377): tr|B0NBB7|B0NBB7_CLOS5 Queuine tRNA-ribosyltransferase OS=Clostridium scindens (strain ATCC 35704 / DSM 5676 / VPI 13733 / 19) OX=411468 GN=tgt PE=3 SV=1
MYELLKKDGLAKRGRLHTVHGVIETPVFMNVGTAAAIKGAVSTTDLQEIKTQVELSNTYHLHVRPGDEVIKKLGGLHKFMVWDKPILTDSGGFQVFSLAGLRRIKEEGVYFNSHIDGRKIFMGPEESMQIQSNLASTIAMAFDECPSSIAEKDYIEKSVDRTTRWLIRCKKEMERLNSLPDTINQEQMLFGINQGGIYEDIRIRHAKEIADLHLDGYAIGGLAVGESHEDMYRILDAVVPHLPQNAPTYLMGVGTPANILEAVDRGVDFFDCVYPSRNGRHGHVYTRHGKLNLYNARYELDERPIEEGCRCPACRTYSRAYIRHLLKAKEMLGMRLCVLHNLYFYNSMMEEIRQAIEEGRYQEYKKEKLDGLMSGRE

SEQ ID NO: 54040 - protein, 380 aa, Clostridium septicum
  misc_feature (1)..(380): tr|A0A386PHA8|A0A386PHA8_CLOSE Queuine tRNA-ribosyltran sferase OS=Clostridium septicum OX=1504 GN=tgt PE=3 SV= 1
MSKKRYTLLKKDGEARRGRFETPHGTIETPVFMNVGTCAVIKGAVSTMDLKEIGCQVELSNTYHLHLRPSDKVVANLGGLHQFMNWDRPILTDSGGFQVFSLSGMRKIKEEGVYFSSHIDGRKIFMGPEESMQIQSNLASTIAMAFDECIPNPSTREYVEKSVARTTRWLERCKNEMDRLNSLDNTINKEQMLFGINQGGCYEDIRIEHAKTITKMDLDGYAIGGLAVGETHEEMYRIIEAVVPHLPEDKPIYLMGVGTPENILEAVDRGVDFFDCVLPARNGRHGHVFTKNGKINLMNAKFELDTRPIDEGCQCPACKSYTRAYIRHLFKAKEMLAMRLCVLHNLYFYNKLMEEIRNAIDGEYFKEFKEQKLKEWNTKA

SEQ ID NO: 54041 - protein, 376 aa, Clostridium sp.
  misc_feature (1)..(376): tr|A0A099S4H3|A0A099S4H3_9CLOT Queuine tRNA-ribosyltran sferase OS=Clostridium sp. HMP27 OX=1487921 GN=tgt PE=3 SV=1
MYKLLKKDGNARRGEFTTPHGVVQTPVFMNVGTLGVIKGAVSSMDLKEIGCQVELSNTYHLHLRPGDNVIKKLGGLHKFMNWDRPILTDSGGFQVFSLAGIRKIQEEGVYFNSHIDGRRIFMGPEESMQIQSNIASTIAMAFDECIPNPSTREYVENSVARTTRWLERCVKEMDRLNTLPDTINKEQMLFGINQGGTYEDIRIAHAKEIVKMDLDGYAIGGLAVGETHEEMYRVIDAVAPHLPEDKPIYLMGVGLPSNILEAVDRGVDFFDCVLPARNGRHGHVFTKEGKINLINAKFELDDRPIDEGCQCPACRDYSRAYIRHLFKAKEMLAMRLCVLHNLHFYNNLMQEIRDAIDAGNFKEYKERKLAEWGGRA

SEQ ID NO: 54042 - protein, 376 aa, Clostridium sp.
  misc_feature (1)..(376): tr|A0A386H2Y7|A0A386H2Y7_9CLOT Queuine tRNA-ribosyltran sferase OS=Clostridium sp. JN500901 OX=2068654 GN=tgt P E=3 SV=1
MYKLLKKCGKIRRGEFTTPHGVIQTPVFMNVGTLAAIKGAVSTVDLRKIGCQVELSNTYHLHLRPGDEVIKKLGGIHKFMNWDRPILTDSGGFQVFSLSKMRNIKEEGVYFNSHIDGRKIFMGPEESMRIQSNLASTIAMAFDECIPNPSPKDYVERSVERTTRWLARCKAELDRLNKLPDTINKQQMLFGINQGGTYDDLRIKHAKEIASMDLDGYAIGGLAVGETHDEMYRIIDAVVPNLPQDKPIYLMGVGLPSNILEAVDRGVDFFDCVLPARNGRHGHVFTKNGKINLMNAKYELDSKPIDDKCNCPTCRNYSRAYIRHLFKAKEMLAMRLCVLHNLYFYNNMMQEIRNAIDGDYFKEYKEQKLNDWNGRA

SEQ ID NO: 54043 - protein, 379 aa, [Clostridium] sphenoides
  misc_feature (1)..(379): tr|A0A381JNJ0|A0A381JNJ0_9FIRM Queuine tRNA-ribosyltran sferase OS=[Clostridium] sphenoides OX=29370 GN=tgt PE= 3 SV=1
MNYKIVAKDGRAKRAEVTTVHGTIQTPVFMNVGTVGAIKGAVSTDDLREIRTQVELSNTYHLHVRTGDKLIREFGGLHKFMSWDRPILTDSGGFQVFSLTGLRKIKEEGVYFQSHIDGRKIFMGPEESMQIQSNLASTIAMAFDECPPHPATREYMQNSVDRTTRWLERCQAEMAKLNSQPDTLNKDQLLFGINQGGTFEDIRIAHAKTISAMDLDGYALGGLAVGESHEEMYRILDETVPYLPENKPTYLMGVGTPANILEAVDRGVDFFDCVYPSRNGRHGHVYTNHGKMNLFNTKYELDHRPIEEGCGCPACRSYSRAYIRHLLKAKEMLGMRLCVLHNLYFYNTMMEEIRDAIENHRYGEYKEQKLSGMMAGQTT

SEQ ID NO: 54044 - protein, 378 aa, [Clostridium] spiroforme
  misc_feature (1)..(378): tr|A0A1Y4ETT9|A0A1Y4ETT9_9FIRM Queuine tRNA-ribosyltran sferase OS=[Clostridium] spiroforme OX=29348 GN=tgt PE= 3 SV=1
MTAISYELKHVCKQSGARYGILHTPHGDVETPMFMPVGTLATVKGISPEMLKEMHSQVILANTYHLWLRPGEDVIEKAGGLHKFMNYDGPMLTDSGGFQVFSLGKTRKIEEEGVKFKSIIDGSALFLSPEKAIEIQNKLGADIIMSFDECAPYPCTYEYMKDSMERTLRWAKRGKEAHKNTDKQALFGIVQGGEYADLRERCAKELVKMDFPGYSIGGTSVGEPKDVMYKMVDDAVKWLPEDKPRYLMGVGNPIDLIECAIRGIDMYDCVLPTRVARHGAVMTSMGRININNEKYKYDYTPLDPNCDCYTCKNYTKSYIRHLHKCDEIFGKTLLSIHNVNFLLKLASDIRQAIKEDRLLDFKEEFLDKYGHDVYKRAF

SEQ ID NO: 54045 - protein, 386 aa, [Clostridium] spiroforme
  misc_feature (1)..(386): tr|B1C319|B1C319_9FIRM Queuine tRNA-ribosyltransferase OS=[Clostridium] spiroforme DSM 1552 OX=428126 GN=tgt P E=3 SV=1
MLALKEVNMAAISYELKHVCKQSGARYGILHTPHGDVETPMFMPVGTLATVKGISPEMLKEMHSQVILANTYHLWLRPGEDVIEKAGGLHKFMNYDGPMLTDSGGFQVFSLGKTRKIEEEGVKFKSIIDGSALFLSPEKAIEIQNKLGADIIMSFDECAPYPCTYEYMKDSMERTLRWAKRGKEAHKNTDKQALFGIVQGGEYADLRERCAKELVKMDFPGYSIGGTSVGEPKDVMYKMVDDAVKWLPEDKPRYLMGVGNPIDLIECAIRGIDMYDCVLPTRVARHGAVMTSIGRININNEKYKYDYTPLDPNCDCYTCKNYTKSYIRHLHKCDEIFGKTLLSIHNVNFLLKLASDIRQAIKEDRLLDFKEEFLDKYGHDVYKRAF

SEQ ID NO: 54046 - protein, 376 aa, Clostridium sporogenes
  misc_feature (1)..(376): tr|A0A1V9IS01|A0A1V9IS01_CLOSG Queuine tRNA-ribosyltran sferase OS=Clostridium sporogenes OX=1509 GN=tgt PE=3 S V=1
MYKLLKKSGKARRGEFTTPHGVIQTPVFMNVGTLAAIKGAVSSMDLKEIGCQVELSNTYHLHLRPGDEVVKKMGGLHKFMNWDRPILTDSGGFQVFSLSKIRKIQEEGVYFNSHIDGRKIFMGPEESMRIQSNLASTIAMAFDECVENPAPREYVEKSVERTTRWLHRCKDEMNRLNSLPDTINNKQMLFGINQGGTYEDIRIEHAKTIAKMDLDGYAIGGLAVGESHEDMYRIIDAVVPHLPEDKPIYLMGVGIPSNILEAVDRGVDFFDCVLPARNGRHAHVFTKEGKINLLNAKFELDDKPIDEGCQCPACKHYTRSYIRHLFKAKEMLAMRLCVLHNLYFYNNLMEEIRDAIDGDYFKEYKERKLKEWGGRA

SEQ ID NO: 54047 - protein, 376 aa, Clostridium sporogenes
  misc_feature (1)..(376): tr|A0A1V9I7L2|A0A1V9I7L2_CLOSG Queuine tRNA-ribosyltran sferase OS=Clostridium sporogenes OX=1509 GN=tgt PE=3 S V=1
MYKLLKKSGNARRGEFTTPHGVIQTPVFMNVGTLAAIKGAVSSMDLKEIGCQVELSNTYHLHLRPGDEVVKKMGGLHKFMNWDRPILTDSGGFQVFSLSKIRNIQEEGVYFNSHIDGRKIFMGPEESMRIQSNLASTIAMAFDECVENPAPREYVEKSVERTTRWLHRCKDEMDRLNSLSDTINNKQMLFGINQGGIYEDIRIEHAKTIAKMDLDGYAIGGLAVGESHEDMYRIIDAVVPHLPEDKPIYLMGVGTPSNILEAVDRGVDFFDCVLPARNGRHAHVFTKEGKINLLNAKFELDDRPIDEGCQCPACKHYTRSYIRHLFKAKEMLAMRLCVLHNLYFYNNLMQEIRNAIDGDYFKEYKERKLQQWGGKA

SEQ ID NO: 54048 - protein, 375 aa, Clostridium sulfidigenes
  misc_feature (1)..(375): tr|A0A084J952|A0A084J952_9CLOT Queuine tRNA-ribosyltran sferase OS=Clostridium sulfidigenes OX=318464 GN=tgt PE =3 SV=1
MYKLLKKSGKVRRGEFVTPHGTIQTPVFMNVGTLAAIKGAVSSMDLKEIGCQVELSNTYHLHLRPGDEVVKKMGGLHEFMNWDRPILTDSGGFQVFSLASMRKIKEEGVYFSSHIDGRKIFMGPEESMQIQSNLASTIAMAFDECIPNPSSREYVEKSVARTTRWLERCKVEMDRLNADPNTINKKQMLFGINQGGVYEDIRIEHAKTIRKLDLDGYAIGGLAVGESHEDMYRIIDAVVPYLPEDKPIYLMGVGTPENILEAVSRGVDFFDCVLPARNGRHGHVFTKYGKINIMNAKFELDKNPIDEGCDCPTCRHYTRGYIRHLFKAKEMLAMRLCVLHNLYFYNILMEDIRNAIDGDYFEEFKNQRLSEWGKK

SEQ ID NO: 54049 - protein, 380 aa, [Clostridium] symbiosum
  misc_feature (1)..(380): tr|U2DH28|U2DH28_CLOSY Queuine tRNA-ribosyltransferase OS=[Clostridium] symbiosum ATCC 14940 OX=411472 GN=tgt PE=3 SV=1
MEYKILYKDGRAKRAEMKTVHGTVQTPVFMNVGTVGAIKGAVSTDDLKEIGTQVELSNTYHLHVRTGDKLIKQFGGLHKFMNWDRPILTDSGGFQVFSLSGLRKIKEEGVYFNSHIDGRKIFMGPEESMQIQSNLGSTIAMAFDECPSSVASREYVQASVDRTTRWLERCREEMKRLNAQPDTVNREQLLFGINQGAIYEDIRIGHAKTISKMELDGYAVGGLAVGETHEEMYRILDAVVPHLPEDKPTYLMGVGTPANILEAVDRGVDFFDCVYPTRNGRHSHVYTNHGKMNLLNAKYELDKKPIEEGCGCPACRSYSRAYIRHLFKAKEMLGMRLCVLHNLYFYNKMMEEIRDAIEHHRYAEYKTAKLAGMMAGEEAK

SEQ ID NO: 54050 - protein, 380 aa, [Clostridium] symbiosum
  misc_feature (1)..(380): tr|E7GP74|E7GP74_CLOSY Queuine tRNA-ribosyltransferase OS=[Clostridium] symbiosum WAL-14163 OX=742740 GN=tgt P E=3 SV=1
MEYKILYKDGRAKRAEMKTVHGTVQTPVFMNVGTVGAIKGAVSTDDLKEIGTQVELSNTYHLHVRTGDKLIKQFGGLHKFMNWDRPILTDSGGFQVFSLSGLRKIKEEGVYFNSHIDGRKIFMGPEESMQIQSNLGSTIAMAFDECPSSVASREYVQASVDRTTRWLERCREEMKRLNAQPDTVNREQLLFGINQGAIYEDIRIGHAKTISKMELDGYAVGGLAVGETHEEMYRILDAVVPHLPEDKPTYLMGVGTPANILEAVDRGVDFFDCVYPTRNGRHSHVYTNHGKMNLLNAKYELDKKPIEEGCGCPACRSYSRAYIRHLFKAKEMLGMRLCVLHNLYFYNKMMEEIRDAIEHHRYAEYKAAKLAGMMAGEEAK

SEQ ID NO: 54051 - protein, 380 aa, Clostridium symbiosum; identical to SEQ ID NO: 54050
  misc_feature (1)..(380): tr|A0A174LJ98|A0A174LJ98_CLOSY Queuine tRNA-ribosyltran sferase OS=Clostridium symbiosum OX=1512 GN=tgt PE=3 SV =1

SEQ ID NO: 54052 - protein, 380 aa, Clostridium symbiosum
  misc_feature (1)..(380): tr|A0A413JGS6|A0A413JGS6_CLOSY Queuine tRNA-ribosyltran sferase OS=Clostridium symbiosum OX=1512 GN=tgt PE=3 SV =1
MEYKILYNDGRAKRAEMKTVHGTVQTPVFMNVGTVGAIKGAVSTDDLKEIGTQVELSNTYHLHVRTGDKLIKQFGGLHKFMNWDRPILTDSGGFQVFSLSGLRKIKEEGVYFNSHIDGRKIFMGPEESMQIQSNLGSTIAMAFDECPSSVASREYVQASVDRTTRWLERCREEMKRLNAQPDTVNREQLLFGINQGAIYEDIRIGHAKTISKMELDGYAVGGLAVGETHEEMYRILDAVVPHLPEDKPTYLMGVGTPANILEAVDRGVDFFDCVYPTRNGRHSHVYTNHGKMNLLNAKYELDKKPIEEGCGCPACRSYSRAYIRHLFKAKEMLGMRLCVLHNLYFYNKMMEEIRDAIEHHRYAEYKAAKLAGMMAGEEAK

SEQ ID NO: 54053 - protein, 379 aa, Clostridium taeniosporum
  misc_feature (1)..(379): tr|A0A1D7XID5|A0A1D7XID5_9CLOT Queuine tRNA-ribosyltran sferase OS=Clostridium taeniosporum OX=394958 GN=tgt PE =3 SV=1
MSKRYTLLKKDGKARRGEFVTPHGTIQTPVFMNVGTLAAIKGAVSSMDLKEIGCQVELSNTYHLHLRPTDKVVSKLGGLHKFMNWDRPILTDSGGFQVFSLSAMRKIKEEGVYFSSHIDGRKIFMGPEESMQIQSNLASTIAMAFDECIPNPSTREYVERSVARTTRWLERCKEEMDRLNSLPDTINKEQMLFGINQGGIYEDIRIAHAKEIVKMDLDGYAIGGLAVGESHEDMYRIIDAVAPHLPEDKPIYLMGVGTPTNILEAIDRGVDFFDCVLPARNGRHGNVYTNEGKLNLMNAKHELDERPIEEGCQCPACKHYTRAYIRHLFKAKEMLAMRLCVLHNLYFYNNLMQEVRDAIDGGYFKEFKNKKIAAWEDRK

SEQ ID NO: 54054 - protein, 376 aa, Clostridium tagluense
  misc_feature (1)..(376): tr|A0A401UJJ5|A0A401UJJ5_9CLOT Queuine tRNA-ribosyltran sferase OS=Clostridium tagluense OX=360422 GN=tgt PE=3 SV=1
MYKLLKKSGKVRRGEFTTPHGIIQTPVFMNVGTQGVIKGAVSSMDLKEINCQVELSNTYHLHLRPTDKVVRQMGGLHKFMNWDRPILTDSGGFQVFSLAAMRKIKEEGVYFNSHIDGKKIFMGPEESMQIQSNLGSTIAMAFDECIPNPSTKEYVVDSVARTTRWLERCKIEMDRLNSLPGTVNNKQMLFGINQGGTDADIRIEHAKTITKMNLDGYAIGGLAVGESHEDMYRIIDAVVPHLPQDKPIYLMGVGYPSNILEAVSRGVDFFDCVLPARNGRHGHVFTSDGKINIMNAKFELDAAPIDEGCQCPACKHYTRAYIRHLFKAKEMLAMRLCVLHNLYFYNKLMEDIRSAIDNDCFEEFKAEKLAKWNENA

SEQ ID NO: 54055 - protein, 378 aa, Clostridium tepidiprofundi
  misc_feature (1)..(378): tr|A0A151B807|A0A151B807_9CLOT Queuine tRNA-ribosyltran sferase OS=Clostridium tepidiprofundi DSM 19306 OX=1121 338 GN=tgt PE=3 SV=1
MGEYKLLKKSGKVRRGEFKTVHGVIQTPVFMNVGTLAAIKGAVSTMDLKEIRCQVELSNTYHLHLRPGDEIVKKMGGLHKFMNWDRPILTDSGGFQVFSLSGIRKIKEEGVYFSSHIDGRKIFMGPEESMQIQSNLGSTIAMAFDECIPNPSPREYVERSVARTTRWLERCKNELDRLNSLPNTVNKEQMLFGINQGGTYEDIRIEHAKTISKMNLDGYAIGGLAVGETHDEMYRIIDAVVPYLPQDKPIYLMGVGLPSNILEAVSRGVDFFDCVLPARNGRHGHVFTKNGKINLFNKKYELDDSPIDEGCQCPACRNYSRAYIRHLFKAKEMLAMRLCVLHNLYFYNKLMEDIRDAIDNDYFDEFKEQKLQEWNGKA

SEQ ID NO: 54056 - protein, 376 aa, Clostridium tepidum
  misc_feature (1)..(376): tr|A0A1S9IAA9|A0A1S9IAA9_9CLOT Queuine tRNA-ribosyltran sferase OS=Clostridium tepidum OX=1962263 GN=tgt PE=3 S V=1
MYKLLKKSGKARRGEFTTPHGVIQTPVFMNVGTLAAIKGAVSSMDLKEIGCQVELSNTYHLHLRPGDEVVKKMGGLHKFMNWDRPILTDSGGFQVFSLSKIRKIQEEGVYFNSHIDGRKIFMGPEESMQIQSNLASTIAMAFDECIENPAPREYVEKSVERTTRWLHRCKDEMDRLNSLPDTINKKQMLFGINQGGTYEDIRIEHAKTIAKMDLDGYAIGGLAVGESHEDMYRIIDAVVPHLPEDKPIYLMGVGIPSNILEAVDRGVDFFDCVLPARNGRHAHVFTKGGKINLLNAKFELDDRPIDEGCQCPACKHYTRSYIRHLFKAKEMLAMRLCVLHNLYFYNNLMQEIRDAIDGDYFKEYKERKLKEWGGRA

SEQ ID NO: 54057 - protein, 376 aa, Clostridium tetani
  misc_feature (1)..(376): tr|A0A4V1LDA9|A0A4V1LDA9_CLOTA Queuine tRNA-ribosyltran sferase OS=Clostridium tetani OX=1513 GN=tgt PE=3 SV=1
MYTLIKKCGNAKRGRFETPHGTIETPVFMNVGTLGVIKGAVSTMDLKEIGCQVELSNTYHLHLRPGDKVIKKMGGLHKFMNWDRPILTDSGGFQVFSLAKIRKIQEEGVYFNSHIDGRRIFMGPEESMRIQSNIASTIAMAFDECIPNPSTREYVENSVARTTRWLERCKKEMDRLNSLPDTINKKQMLFGINQGGTYDDIRKSHAKTIVDMDLDGYAIGGLAVGETHEEMYRVIDEVAPIFPDNKPLYLMGVGLPSNILEAVDRGVDFFDCVLPARNGRHGHVFTKYGKINLMNAKFELDGNPIDEGCECPACKHYSRAYIRHLFKAKEMLAMRLCVLHNLYFYNKLMEDIRKAIESDYFKEFKEEKLHNWNGKA

SEQ ID NO: 54058 - protein, 376 aa, Clostridium tetani
  misc_feature (1)..(376): sp|Q892A0|TGT_CLOTE Queuine tRNA-ribosyltransferase OS= Clostridium tetani (strain Massachusetts / E88) OX=2127 17 GN=tgt PE=3 SV=1
MYTLIKKCGNAKRGRFETPHGTIETPVFMNVGTLGVIKGAVSSMDLKEIGCQVELSNTYHLHLRPGDEVIKKMGGLHKFMNWDRPILTDSGGFQVFSLAKIRKIQEEGVYFNSHIDGRRIFMGPEESMRIQSNIASTIAMAFDECIPNPSTREYVENSVARTTRWLERCKKEMDRLNSLPDTINKKQMLFGINQGGTYEDIRKAHAKTIVDMDLDGYAIGGLAVGETHEEMYRVIDEVAPIFPDNKPLYLMGVGLPSNILEAVDRGVDFFDCVLPARNGRHGHVFTKYGKINLMNAKFELDGNPIDEGCECPACKHYSRAYIRHLFKAKEMLAMRLCVLHNLYFYNKLMEDIRKAIEGDYFKEFKEEKLHNWSGKA

SEQ ID NO: 54059 - protein, 376 aa, Clostridium tetanomorphum
  misc_feature (1)..(376): tr|A0A037ZC03|A0A037ZC03_CLOTT Queuine tRNA-ribosyltran sferase OS=Clostridium tetanomorphum DSM 665 OX=1230342 GN=tgt PE=3 SV=1
MYKLIKRCGRTRRGEFITPHGTIQTPVFMNVGTLGAIKGAVSSMDLKEIGCQVELSNTYHLHLRPGDKIIKQMGGLHKFMNWDRPILTDSGGFQVFSLSSIRRIKEEGVYFNSHIDGKKIFMGPEESMQIQSNIASTIAMAFDECIPNPSTREYVEDSVARTTRWLERCKIEMDRLNSLPDTINKKQMLFGINQGGTYEDIRIEHAKTITKMDLDGYAIGGLAVGETHDEMYRIIDAVVPHLPQDKPIYLMGVGLPSNILEAVDRGVDFFDCVLPARNGRHGHVFTKEGKINLMNAKFELDGRPIDEGCQCPACRHYTRAYIRHLFKAKEMLAMRLCVLHNLYFYNNLMQEIRDAIDGDYFSEFKERKLKEWGGRA

SEQ ID NO: 54060 - protein, 373 aa, [Clostridium] thermoalcaliphilum
  misc_feature (1)..(373): tr|A0A1V4IA15|A0A1V4IA15_9FIRM Queuine tRNA-ribosyltran sferase OS=[Clostridium] thermoalcaliphilum OX=29349 GN =tgt PE=3 SV=1
MAAIKFELIKTCKQSGARLGKLYTPHGVIETPIFMPVGTQATVKAMTPEALKEINSQIILSNTYHLYMRPGHKLVEKAGGLHKFMNWDRPILTDSGGFQVFSLGPLRKITEEGVEFRSHLDGSKHFISPEKATEIQNSLGSDIMMVFDECAPYPADRDYVKNSLERTTRWAKRCKDAHKNPDRQALFGIVQGGMYKDLREQSAREIMEIDFPGYAIGGLSVGEPKHLMYEVLDYTTPLLPKDKPRYLMGVGSPDDLLEGVIRGVDMFDCVLPTRIARNGTAMTSQGKVVVRNAKYAEDFTPLDPECDCYTCKNYTRAYIRHLVKANEILGSTLITHHNLYFLLKLMENVRKAIMEDRLLDYKKEFFQKYGYEI

SEQ ID NO: 54061 - protein, 378 aa, Clostridium thermobutyricum
  misc_feature (1)..(378): tr|A0A1V4SX53|A0A1V4SX53_9CLOT Queuine tRNA-ribosyltran sferase OS=Clostridium thermobutyricum DSM 4928 OX=1121 339 GN=tgt PE=3 SV=1
MSKRYTLLKKDGKARRGRFVTPHGTVETPVFMNVGTLAAIKGAVSSMDLKDIGCQVELSNTYHLHLRPSDKTVAKLGGLHKFMNWDRPILTDSGGFQVFSLASMRKIKEEGVYFNSHIDGRKIFMGPEESMQIQSNLASTIAMAFDECIPIPSTREYVEKSVERTTRWLKRCKKEMDRLNSLPETINKEQMLFGINQGATFKDIRVAHAEEIKKLDLDGYAIGGLAVGETHEEMYEIIDEVVPHLPEDKPIYLMGVGTPENILEAVDRGVDFFDCVLPARNGRHGQVFTANGKINLMNAKFEFDTRPIDEGCGCPACKNYTRAYIRHLFKAKEMLAMRLTVLHNLYFYNKLMEEIREAIDNDCYKEFKEKKLKDWNKK

SEQ ID NO: 54062 - protein, 378 aa, Clostridium thermobutyricum; identical to SEQ ID NO: 54061
  misc_feature (1)..(378): tr|N9XR29|N9XR29_9CLOT Queuine tRNA-ribosyltransferase OS=Clostridium thermobutyricum OX=29372 GN=tgt PE=3 SV= 1

SEQ ID NO: 54063 - protein, 376 aa, Clostridium thermopalmarium; identical to SEQ ID NO: 53971
  misc_feature (1)..(376): tr|A0A2T0AX83|A0A2T0AX83_9CLOT Queuine tRNA-ribosyltran sferase OS=Clostridium thermopalmarium DSM 5974 OX=1121 340 GN=tgt PE=3 SV=1

SEQ ID NO: 54064 - protein, 377 aa, Clostridium tyrobutyricum
  misc_feature (1)..(377): tr|A0A4V1DIQ7|A0A4V1DIQ7_CLOTY Queuine tRNA-ribosyltran sferase OS=Clostridium tyrobutyricum OX=1519 GN=tgt PE= 3 SV=1
MYKLLKKQGNARRGQLTTVHGVVQTPVFMNVGTLAAIKGAVSSVDLRNIGCQVELSNTYHLSLRPGDEVIRKLGGLHKFMNWDRPILTDSGGFQVFSLAKIRKIKEEGVYFSSHIDGRKIFMGPEESMRIQSNLASTIAMAFDECIENPSPREYVQKSVERTTRWLERCKAEMNRLNSMPDTINRKQMLFGINQGGTYDDIRIEHAKAISDLNLDGYAIGGLAVGETSEEMYRIIEKVVPHLPQDKPIYLMGVGTPTNILEAVERGVDFFDCVLPARNGRHSHVFTDHGQLNLLNAKYELDDSPIDYNCSCPVCKNYSRAYIRHLFKAKEMLAMRLCVMHNLYFYNNLMSEIRDAIDGNYFPKYKEQKIQQWNESKK

SEQ ID NO: 54065 - protein, 377 aa, Clostridium tyrobutyricum; identical to SEQ ID NO: 54064
  misc_feature (1)..(377): tr|W6N3N6|W6N3N6_CLOTY Queuine tRNA-ribosyltransferase OS=Clostridium tyrobutyricum DIVETGP OX=1408889 GN=tgt PE=3 SV=1

SEQ ID NO: 54066 - protein, 378 aa, Clostridium uliginosum
  misc_feature (1)..(378): tr|A0A1I1PQ20|A0A1I1PQ20_9CLOT Queuine tRNA-ribosyltran sferase OS=Clostridium uliginosum OX=119641 GN=tgt PE=3 SV=1
MSKKYTLLKKNGKARRGRFVTPHGTIETPVFMNVGTLAAIKGAVSSMDLKEIECQVELSNTYHLHLRPSDKVVRELGGLHKFMNWDRPILTDSGGFQVFSLSGMRKIKEEGVYFNSHIDGKRIFMGPEESMQIQSNLASTIAMAFDECIPNPSTREYVENSVNRTTRWLERCKIEMDKLNSSQDTLNKEQMLFGINQGGVYEDIRIKHAKTITKMDLDGYAIGGLAVGETHEEMYRIIDAVVPHLPEDKPIYLMGVGTPANILEAVDRGVDFFDCVLPARNGRHGHLFTKDGKFNILNAKFELDDRPIDEGCKCPACQHYTRAYIRHLFKAKEMLAMRLCVLHNLYFYNNLMKEIRDAIDGDYFKDFKEQKLREWQII

SEQ ID NO: 54067 - protein, 380 aa, Clostridium ventriculi
  misc_feature (1)..(380): tr|A0A174BB65|A0A174BB65_CLOVE Queuine tRNA-ribosyltran sferase OS=Clostridium ventriculi OX=1267 GN=tgt PE=3 S V=1
MAIKRYTLLKKDGKARRGQFVTPHGTIQTPVFMNVGTLAAIKGAVSSMDLKEIGCQVELSNTYHLHLRPTDKVVKQLGGLHEFMNWDRPILTDSGGFQVFSLASMRKIKEEGVYFNSHIDGRKIFMGPEESMQIQSNLASTIAMAFDECIENPAPRDYVINSVNRTTRWLERCKKEMDRLNSLDTTINKEQLLFGINQGGTYEDIRIEHAKEIAKMDLDGYAIGGLAVGESHEDMYRIIDAVVPHLPEDKPIYLMGVGTPENILEAVSRGVDFFDCVLPARNGRHGHVFTSHGKINLMNAKFELDKSPIDEGCQCPACKNYTRAYIRHLFKAKEMLAMRLCVLHNLYFYNKLMEDIRAAIDGDYFEEFKAKKLEEWSRRA

SEQ ID NO: 54068 - protein, 379 aa, Clostridium vincentii
  misc_feature (1)..(379): tr|A0A2T0BBK7|A0A2T0BBK7_9CLOT Queuine tRNA-ribosyltran sferase OS=Clostridium vincentii OX=52704 GN=tgt PE=3 S V=1
MSKRYTLLKKEGKARRGRFVTPHGTIETPVFMNVGTLAAIKGAVSSMDLKEIGCQVELSNTYHLHLRPSDEVIYKMGGLHSFMNWDKPILTDSGGFQVFSLAKMRKIKEEGVYFNSHIDGSKIFMGPEESMQIQSHLASTIAMAFDECVSNPSTREYVERSVDRTTRWLERCKIEIDRLNLLPSTINKEQMLFGINQGGVYDDIRIEHAKTITKMDLDGYAIGGLAVGESHEDMYRVIDAVVPYLPEDKPIYLMGVGTPENILEAVDRGIDFFDCVLPARNGRHGSVFTKNGKINLLNAKFQLDSKPIDEGCQCPACKSYTRAYIRHLFKAKELLALRLCVLHNLYFYNKLMADIRDALDGGYFKEFKEEKLKQWNLNA

SEQ ID NO: 54069 - protein, 379 aa, Cnuella takakiae
  misc_feature (1)..(379): tr|A0A1M5FNW3|A0A1M5FNW3_9BACT Queuine tRNA-ribosyltran sferase OS=Cnuella takakiae OX=1302690 GN=tgt PE=3 SV=1
MAALQFNLEHTDSASAARAGTITTDHGTIQTPIFMPVGTVGSVKGVTQQQLKTDVQAQIILGNTYHLYLRPGMETMEAAGGLHRLMNWDRPILTDSGGYQVFSLAGTRKINEEGVTFRSHIDGNKHLFTPEKVMDIERSIGADIMMAFDECPPANSTFKYAENSMHLTHRWLDRCWNHFNNTPDRYGHTQNLFPIVQGAVFHDLRKASCEYIASKGATGNAIGGLSVGEPEEVMYEIAALCCEHLPKDKPRYLMGVGTPWNILENIALGVDMFDCVMPTRNGRNAMLFTTKGVINIDNKKWERDFSPIDPGLENEWSQYYSKAYVRHLFKAGELLGYTIASVQNLAFYLWLVREARKHILAGDFMSWKNELVPVLKTRL

SEQ ID NO: 54070 - protein, 378 aa, Cobetia crustatorum
  misc_feature (1)..(378): tr|A0A558HG31|A0A558HG31_9GAMM Queuine tRNA-ribosyltran sferase OS=Cobetia crustatorum OX=553385 GN=tgt PE=3 SV =1
MRKECFMSFEKLATDGRARRGRMTFPRGTVETPAFMPVGTYGTVKGMTPESIKEIGAEMILGNTFHLWLRPGTEVIEAHGDLHDFAQWDKPILTDSGGFQVFSLGKTRKITEQGVHFRSPVDGSKVFMGPEESMAVQRSLGSDIVMIFDECTPYPATHDEARKSMEMSLRWAQRSYDAHGGSPSALFGIIQGGMYPDLREQSLEGLKKIDFDGYAIGGLSVGEPKEEMIKALDYLPEWMPEDKPRYLMGVGKPEDLVEGVRRGVDMFDCVMPTRNARNGHLFTPTGTVKIRNAVHKRDTSPLDPECDCYTCTNFSRGYLHHLDRCGEMLGSMLNTIHNLRYYQTVMAGLRGAIEAGTLQDFVEQFYAARGLPVPPLAD

SEQ ID NO: 54071 - protein, 378 aa, Cobetia marina
  misc_feature (1)..(378): tr|A0A4Y4GM19|A0A4Y4GM19_COBMA Queuine tRNA-ribosyltran sferase OS=Cobetia marina OX=28258 GN=tgt PE=3 SV=1
MRKECFMSFEKLATDGRARRGRMTFPRGTVETPAFMPVGTYGTVKGMTPESIKEIGAEIILGNTFHLWLRPGTEVIEAHGDLHDFAQWDKPILTDSGGFQVFSLGKTRKITEQGVHFRSPVDGSKVFMGPEESMAVQRSLGSDIVMIFDECTPYPATHDEARKSMEMSLRWAQRSRDAHGDSPSALFGIIQGGMYPDLREKSLEGLKKIDFDGYAIGGLSVGEPKDEMIKVLDYLPEWMPEDKPRYLMGVGKPEDLVEGVRRGVDMFDCVMPTRNARNGHLFTPTGTVKIRNAVHKHDTSPLDPDCDCYTCTNFSRGYLHHLDRCGEMLGSMLNTIHNLRYYQTVMAGLRGAIEAGTLQDFVEQFYAARGLPVPPLAD

SEQ ID NO: 54072 - protein, 372 aa, Cobetia marina
  misc_feature (1)..(372): tr|A0A4U1LSI1|A0A4U1LSI1_COBMA Queuine tRNA-ribosyltran sferase OS=Cobetia marina OX=28258 GN=tgt PE=3 SV=1
MSFEKLATDGRARRGRMTFPRGTVETPAFMPVGTYGTVKGMTPESIKEIGAEIILGNTFHLWLRPGTEVIEAHGDLHDFAQWDKPILTDSGGFQVFSLGKTRKITEQGVHFRSPVDGSKVFMGPEESMAVQRSLGSDIVMIFDECTPYPATHDEARKSMEMSLRWAQRSRDAHGDSPSALFGIIQGGMYPDLREKSLEGLKKIDFDGYAIGGLSVGEPKDEMIKVLDYLPEWMPEDKPRYLMGVGKPEDLVEGVRRGVDMFDCVMPTRNARNGHLFTPTGTVKIRNAVHKHDTSPLDPDCDCYTCTNFSRGYLHHLDRCGEMLGSMLNTIHNLRYYQTVMAGLRGAIEAGTLQDFVEQFYAARGLPVPPLAD

SEQ ID NO: 54073 - protein, 372 aa, Cobetia sp.; identical to SEQ ID NO: 54072
  misc_feature (1)..(372): tr|A0A3T0K9V5|A0A3T0K9V5_9GAMM Queuine tRNA-ribosyltran sferase OS=Cobetia sp. ICG0124 OX=2053669 GN=tgt PE=3 S V=1

SEQ ID NO: 54074 - protein, 378 aa, Cobetia sp.
  misc_feature (1)..(378): tr|A0A2E4Q3P7|A0A2E4Q3P7_9GAMM Queuine tRNA-ribosyltran sferase OS=Cobetia sp. OX=1873876 GN=tgt PE=3 SV=1
MRKECFMSFEKLATDGRARRGRMTFPRGTVETPAFMPVGTYGTVKGMTPESIKDIGAEIILGNTFHLWLRPGTEVIEAHGDLHDFAQWDKPILTDSGGFQVFSLGKTRKITEQGVHFRSPVDGSKVFMGPEESMAVQRSLGSDIVMIFDECTPYPATHDEARKSMEMSLRWAQRSYDAHGDSPSALFGIIQGGMYPDLREKSLEGLKKIDFDGYAIGGLSVGEPKDEMIKVLDYLPEWMPEDKPRYLMGVGKPEDLVEGVRRGVDMFDCVMPTRNARNGHLFTPTGTVKIRNAVHKRDTSPLDPDCDCYTCTNFSRGYLHHLDRCGEMLGSMLNTIHNLRYYQTVMAGLRGAIEAGTLQDFVEQFYAARGLPVPPLAD

SEQ ID NO: 54075 - protein, 373 aa, Cocleimonas flava
  misc_feature (1)..(373): tr|A0A4R1FCD1|A0A4R1FCD1_9GAMM Queuine tRNA-ribosyltran sferase OS=Cocleimonas flava OX=634765 GN=tgt PE=3 SV=1
MDFTLKHSDKSNNNLARRGELNFPRGTVQTPAFMPVGTYGTVKSMKPEEIKDLGAEIILGNTFHLMLRPGTDIIEKHGDLHDFMNWDKPILTDSGGFQVFSLAKMRKITEEGVHFRSPVNGDKVLLSPEVSMDIQRKLGSDIVMIFDECTPYPAGLSEARESMELSLRWAKRSKEAHADNPSALFGIVQGGMHAELRTTSAQGLQEIGFDGYAIGGLSVGEPKDERDHVLEVTTPLLPADKPRYLMGVGKPEDIVESVRRGVDMFDCVIPTRNARNGFLFTRFGELKLRNSKHQADTGPIDPECGCYTCQNYSRSYLRHLDKCSEMLGAHLNTVHNLYYYQELMRGIRAAIENDSFDAFADDFYAQRENKENV

SEQ ID NO: 54076 - protein, 376 aa, Cognatishimia maritima
  misc_feature (1)..(376): tr|A0A1M5J1P2|A0A1M5J1P2_9RHOB Queuine tRNA-ribosyltran sferase OS=Cognatishimia maritima OX=870908 GN=tgt PE=3 SV=1
MTSRFSFDLKATDGKARTGVISTPRGEIRTPAFMPVGTAATVKAMMPESVRATGADILLGNTYHLMLRPTAERIDRLGGLHKFMNWERPILTDSGGFQVMSLAGLRKLTEKGVTFQSHIDGSKHELTPERSMEIQKLLGSDIVMCFDECPALPADRDRIAESMRLSMRWAERSKDAFGDRPGHALFGIQQGGLEEDFREESAKALREIEFDGYAVGGLAVGEGQEAMFSVLDFAPDQLPVDKPRYLMGVGKPDDIVGAVKRGIDMMDCVLPSRSGRTGQCFTRHGVVNIKNARHADDPRPLDESCGCPACQNYSRAYLHHVFRSNEMISGMLLTWHNLQYFQDIMQGMRDAIEAGTFEAWERDFHQARAQGDIEPV

SEQ ID NO: 54077 - protein, 378 aa, Cognatiyoonia koreensis
  misc_feature (1)..(378): tr|A0A1I0PQ03|A0A1I0PQ03_9RHOB Queuine tRNA-ribosyltran sferase OS=Cognatiyoonia koreensis OX=364200 GN=tgt PE= 3 SV=1
MSICMTFSFSLHHTDGKARTGVISTPRGDIRTPAFMPVGTAATVKAMMPESVAATGADILLGNTYHLMLRPTAERIDRLGGLHKFMNWDKPILTDSGGFQVMSLSDLRKLTEEGVTFKSHIDGSKHHLTPERSMEIQKLLGSDIVMCFDECPALPADRSRINESMQLSMRWAQRSRDAFGDRPGHALFGIQQGGLEEDLRAESAEALRAIEFEGYAVGGLAVGEGQEAMFSVLDFAPDQLPVEKPRYLMGVGKPDDIVGAVKRGIDMMDCVLPSRSGRTGQAFTHRGVVNIKNARHADDPRPLDADCACPACSNYSRAYLHHVFRAQEMISGMLLTWHNLHYFQDIMQGMRDAIAIGRFAEWEKTFHAGRAAGDIAPL

SEQ ID NO: 54078 - protein, 375 aa, Cognatiyoonia sediminum
  misc_feature (1)..(375): tr|A0A1M5LJ02|A0A1M5LJ02_9RHOB Queuine tRNA-ribosyltran sferase OS=Cognatiyoonia sediminum OX=1508389 GN=tgt PE =3 SV=1
MGGFSFEKLGQDGKARTGVIHTPKGDIRTPAFMPVGTAATVKAMMPESVAATGAEILLGNTYHLMLRPTAERINNLGGLHKFMNWSKPILTDSGGFQVMSLAGLRKLTEEGVTFQSHIDGSKHHLTPERSMEIQRLLGSDIVMCFDECPALPADRDRIAESMRLSMRWAQRSRDAFGDRLGYALFGIQQGGLEQDFREESAEALKSIGFDGYAIGGLAVGEGQDAMFGCLDFAPDQLPEDKPRYLMGVGKPDDIVGAVKRGVDMMDCVLPSRSGRTGQVFTRRGVINIKNARHADDPRPLDEHCTCPACRNYSRAYLHHVFRSNEMIAGMLLTWHNLHYFQEIMQGMRDAIAAGTFDAWEADFHAMRAQGDIDPI

SEQ ID NO: 54079 - protein, 402 aa, Cohaesibacter gelatinilyticus
  misc_feature (1)..(402): tr|A0A285NDQ3|A0A285NDQ3_9RHIZ Queuine tRNA-ribosyltran sferase OS=Cohaesibacter gelatinilyticus OX=372072 GN=t gt PE=3 SV=1
MTEKTTTSISNQDPDRMGLGLPTPDPKPEKFGFKLLAQDGKARRGEVSMPRGTIRTPAFMPVGTAATVKFMYPGQVRDLGADVILGNTYHLMLRPGAERIHSLGGLHKFANWKYPILTDSGGFQVMSLAKLRKMSEQGVEFKSHIDGVKHFMSPERSIEIQCQLGSDIQMQLDECTRLPASEDEIERAMQLSLRWAERCKIEFGDRPGQAMFGIVQGGDIPRLREESAQSLKDMDLKGYSIGGLAVGEPQQVMLDMLEVTCPVLPEDKPRYLMGVGTPDDLIESVSRGVDMFDCVMPTRAGRHGLAFTRYGKVNLKNARHKDDHRPLDPLSHCPAARDYSRAYLYHLVKSNEALGSMLLTWNNLAYYQELMQGMRDAIEAGRFEDHKVEVKEGWARGDIPTL

SEQ ID NO: 54080 - protein, 404 aa, Cohaesibacter marisflavi
  misc_feature (1)..(404): tr|A0A1I5I972|A0A1I5I972_9RHIZ Queuine tRNA-ribosyltran sferase OS=Cohaesibacter marisflavi OX=655353 GN=tgt PE =3 SV=1
MTDQMQMSETTPPLGADRMNKGQPVPNPAPTEFGFKLLATDGKARRGEVFMPRGTIRTPAFMPVGTAATVKFMYPGQVRDLGADVILGNTYHLMLRPGAERVDALGGLHKFANWPYPILTDSGGFQVMSLAQLRKMSEEGVEFKSHIDGAKFMMTPERSIEIQCLLGSDIQMQLDECTRLPAKEIEIEKAMQLSLRWAERCKTQFGDRPGQAMFGIVQGGDIPRLREESARALKAMDLKGYSIGGLAVGEPQAVMLDILDVTCPILPENKPRYLMGVGTPDDLMEAVSRGVDMFDCVMPTRAGRHGLAFTRFGKVNLKNARHKDDPRPLDPESDCPAARDYSRAYLYHLVKSNEALGAMLLSWNNLAYYQSLMQGMRDAIEAGRFEDHKAEVKEGWARGDMPAL

SEQ ID NO: 54081 - protein, 386 aa, Cohaesibacter sp.
  misc_feature (1)..(386): tr|A0A2N5XTL3|A0A2N5XTL3_9RHIZ Queuine tRNA-ribosyltran sferase OS=Cohaesibacter sp. H1304 OX=2067669 GN=tgt PE =3 SV=1
MGLGQPLPDPRPTDFSFKLIATDGKARRGEVSMPRGTIRTPAFMPVGTAATVKFMYPGQVRDLGADVILGNTYHLMLRPGAERIANLGGLHKFANWPYPILTDSGGFQVMSLAKLRKMSEQGVEFKSHIDGAKYMMSPERSIEIQCLLGSDIQMQLDECTRLPASEEDIEKAMQLSLRWAERCKTQFGDRPGQAMFGIVQGGDIPRLREESALALKAMDLKGYSIGGLAVGEPQDVMLDMLGITCPLLPENKPRYLMGVGTPDDLIEAVSQGVDMFDCVMPTRAGRHGLAYTRFGKVNLKNARHKDDHRPLDPESNCPASRDYSRAYLYHLTKSNEALASMLLTWNNLAYYQTLMQNMRDAIEAGHFVDHKAAVKEAWAKGDMPAL

SEQ ID NO: 54082 - protein, 404 aa, Cohaesibacter sp.
  misc_feature (1)..(404): tr|A0A285M809|A0A285M809_9RHIZ Queuine tRNA-ribosyltran sferase OS=Cohaesibacter sp. ES.047 OX=1798205 GN=tgt P E=3 SV=1
MTEQTTSATATPPLGSDRMGKGQPLPEPRPTDFTFKLNATDGAARCGEVTMPRGTIRTPAFMPVGTAATVKFMYPGQVRDLGADVILGNTYHLMLRPGAERIAELGGLHKFANWPYPILTDSGGFQVMSLAKLRKMSEKGVEFKSHIDGVKYMMTPERSIEIQCLLGSDIQMQLDECTRLPASEEEIEKAMQLSLRWAERCKTQFGDRPGQAMFGIVQGGDIPRLREESALALKALDLKGYSIGGLAVGEPQEVMLDMLGITCPLLPDNKPRYLMGVGTPDDLIESVSRGVDMFDCVMPTRAGRHGLAYTRFGKINLKNARHKDDPRPLDPESACPAARDYSRAYLYHLVKSNEALGSMLLTWNNLAYYQDLMQGMRDAISEGRFTDHKASVKEAWTRGDIPAL

SEQ ID NO: 54083 - protein, 377 aa, Cohnella kolymensis
  misc_feature (1)..(377): tr|A0A0C2QFH4|A0A0C2QFH4_9BACL Queuine tRNA-ribosyltran sferase OS=Cohnella kolymensis OX=1590652 GN=tgt PE=3 S V=1
MAVTYELIKTCRQTGARLGRLHTPHGVIDTPTFMPVGTQATVKGMSPEELKDLGAQIILSNTYHLFLRPGHELVKEAGGLHRFMNWDRPILTDSGGFQVFSLSEMRKITEEGVAFRSHINGDKMSLTPESATHVQNALGADIMMAFDECPPFPADYEYVKQSTERTSRWAERCLRAHQRPGDQALFGIVQGGMHKDLRKKSAKDLTSLDFPGYSIGGLSVGEPKALMYEVLEETVPLLPGSKPRYLMGVGSPDALIEGSIRGIDMFDCVLPTRIARNGTLMTSQGRMVVRNAKYTGDFGPLDPECSCYACRSYSRAYIRHLVKADEMFGLRLTTIHNLHFLVNLMHEVRQAIREDRLADFRDQFFEKYGMAENESGF

SEQ ID NO: 54084 - protein, 377 aa, Cohnella luojiensis
  misc_feature (1)..(377): tr|A0A4Y8MAW5|A0A4Y8MAW5_9BACL Queuine tRNA-ribosyltran sferase OS=Cohnella luojiensis OX=652876 GN=tgt PE=3 SV =1
MAVKYELLKTCAQTGARLGRLHTPHGVIDTPTFMPVGTQASVKGMSPEELKSLNAQIILSNTYHLFLRPGHELVKEAGGLHKFMNWDRPILTDSGGFQVFSLSEMRKITEQGVEFRSHINGDKLSLTPESATQVQNALGADIIMAFDECPPYPAEYEYVKQSTERTSRWAERCLQAHGRPHDQALFGIVQGGMHKDLRKQSALDLTSLDFPGYAMGGLSVGEPKHLMYEMLEETIHLLPSDKPRYLMGVGSPDALLDGSIRGVDMFDCVLPTRIARNGTLMTSQGRMVVRNAKYTSDFGPLDPECTCYACRNYSRAYIRHLIKADEMFGLRLTTIHNLHFLVNLMAQVRDAIREDRLGTFRDQFFEKYGMAHNDSGF

SEQ ID NO: 54085 - protein, 377 aa, Cohnella lupini
  misc_feature (1)..(377): tr|A0A3D9IRI9|A0A3D9IRI9_9BACL Queuine tRNA-ribosyltran sferase OS=Cohnella lupini OX=1294267 GN=tgt PE=3 SV=1
MAVKYELIKTCAQTGARLGRLHTPHGIIDTPTFMPVGTQASVKGMSPEELKSLGAQIILSNTYHLFLRPGHELVKEAGGLHKFMNWERPILTDSGGFQVFSLSEMRKITEQGVEFRSHINGDKLSLTPESATQVQNALGADIMMAFDECPPYPAEYEYVKQSTERTSRWAERCLKAHGRPHDQALFAIVQGGMHKDLRKQSALDLTSLDFPGYAMGGLSVGEPKPLMYEMLEETIHLLPSDKPRYLMGVGSPDALLDGSIRGVDMFDCVLPTRIARNGTLMTSQGRMVVRNAKYANDFGPLDPECTCYACQNYSRAYIRHLIKADEMFGLRLTTIHNLHFLVKLMEQVREAIREDRLGSFRDEFFEKYGMAHNDSGF

SEQ ID NO: 54086 - protein, 377 aa, Cohnella phaseoli
  misc_feature (1)..(377): tr|A0A3D9KP53|A0A3D9KP53_9BACL Queuine tRNA-ribosyltran sferase OS=Cohnella phaseoli OX=456490 GN=tgt PE=3 SV=1
MAVKYELIKTCAQTGARLGRLHTPHGVIDTPTFMPVGTQASVKGMSPEELKSLGAQIILSNTYHLFLRPGHELVKEAGGLHRFMNWDRPILTDSGGFQVFSLSEMRKITEEGVEFRSHINGDKLSLTPESATQVQNALGSDILMAFDECPPYPAEYEYVKQSTERTSRWAERCLKAHQRPHDQALFGIVQGGMHKDLRKMSAMDLTSLDFPGYAIGGLSVGESKPLMYEMLEETVPHLPSHKPRYLMGVGSPDALLEGSIRGVDMFDCVLPTRIARNGTLMTSQGRMVVRNAKYTNDFSPLDPECSCYACRNYSRAYIRHLIKADEMFGLRLTTIHNLHFLVQLMAQVREAIREDRLGTFRDEFFEKYGMAHNESGF

SEQ ID NO: 54087 - protein, 378 aa, Cohnella sp.
  misc_feature (1)..(378): tr|A0A1I1ARE2|A0A1I1ARE2_9BACL Queuine tRNA-ribosyltran sferase OS=Cohnella sp. OV330 OX=1855288 GN=tgt PE=3 SV =1
MPAITYELIKTCAQTGARLGRVHTPHGVIDTPTFMPVGTQATVKGISPEELKDLNAQIILSNTYHLFVRPGHELVRAAGGLHKMMNWDRPILTDSGGFQVFSLAQMRKITEEGVTFRSHLNGDKLFLSPEVATAVQNALGPDIMMAFDECPPYPAEYAYVKQSTERTSRWAERCLKAHARPHDQGLFAIVQGGMHKDLRAQSAADLTSLDFPGYAIGGLSVGESKEIMYEVLDHTVPLLPSNKPRYLMGVGSPDALVEGSIRGVDMFDCVLPTRIARNGTLMTSEGRVVVKNAKYAEDFGPLDPKCDCYACRNYSRSYVRHLIRADEMFGLRLTTIHNLHFLVNLMSQVRQAIRDDRLGDFRDEFFEAYGMATNESGF

SEQ ID NO: 54088 - protein, 377 aa, Cohnella sp.
  misc_feature (1)..(377): tr|A0A231RFB6|A0A231RFB6_9BACL Queuine tRNA-ribosyltran sferase OS=Cohnella sp. CIP 111063 OX=1955714 GN=tgt PE =3 SV=1
MAVKYELIKTCAQTGARLGRLHTPHGVIDTPTFMPVGTQASVKGMSPEELKSLGAQIILSNTYHLFLRPGHELVREAGGLHRFMNWDRPILTDSGGFQVFSLSEMRKITEEGVEFRSHINGDKLSLTPESATHVQNALGADIMMAFDECPPYPAEYEYVKQSTERTSRWAERCLKAHERSHDQALFGIVQGGMHKDLRKMSAADLTSLDFPGYAIGGLSVGEPKPLMYEMLEETVPHLPSHKPRYLMGVGSPDALLEGSIRGVDMFDCVLPTRIARNGTLMTSQGRMVVRNAKYTNDFSPLDPECSCYACRNYSRAYIRHLIKADEMFGLRLTTIHNLHFLVQLMVQVREAIREDRLGTFRDEFFEKYGMAHNESGF

SEQ ID NO: 54089 - protein, 374 aa, Coleofasciculus chthonoplastes
  misc_feature (1)..(374): tr|B4VTJ0|B4VTJ0_9CYAN Queuine tRNA-ribosyltransferase OS=Coleofasciculus chthonoplastes PCC 7420 OX=118168 GN =tgt PE=3 SV=1
MAQTYNSFSFQCQAWCSQTKARAGLLHSPHGLIETPRFMPVGTLATVKTLTPAQLEAAQAQIILANTYHLHLQPGEAIVQQAGGLHHFMGWQRPILTDSGGFQVFSLSKLRQISEEGVVFRSPRDGRLINLTPERSIAIQNALGADIIMAFDECPPYPASRAEIEASLERTDRWLKRCINAHTRADQQALFGIVQGGVYLDLRRQAAESLVSLDLPGYAIGGVSVGEPVDLIHDIVAATAPYLPIDKPRYLMGVGTYREMARAIASGVDLFDCVIPTRLGRHGAALVQGERWNLKNARFREDFSALDSTCPCYCCQNFSRAYLSHLVRSREVLGFMLISLHNVTELIRFTQSIREAILRDTFTTDFARWLVQRA

SEQ ID NO: 54090 - protein, 375 aa, Collimonas arenae
  misc_feature (1)..(375): tr|A0A561FY52|A0A561FY52_9BURK Queuine tRNA-ribosyltran sferase OS=Collimonas arenae OX=279058 GN=tgt PE=3 SV=1
MLEFTLLKTEGKARRGRLKLNHGTVETPIFMPVGTYGSVKAMSPLELVEIEAQIILGNTFHLWLRPGTEVLDKFGGLHKFMAWDKPILTDSGGFQVFSLGAMRKITEEGVKFSSPINGDKLFLSPEVSMQIQKSLNSDIVMQFDECTPYEIDGRPATSEEAAQSMRMSLRWAKRSKNEFDQLENPNALFGIVQGGMFENLRDESLAGLEDVGFHGIAIGGLSVGEPKEEMMRVLEHIGPRLPAGKPHYLMGVGTPEDLVAGVENGVDMFDCVMPTRNARNGWLFTRFGDLKIKNARYKDDEKPLDETCGCYACRNFSRAYLHHLHRTGEILGARLNTIHNLHYYLDLMKNIRAALDVGQFSVFVAQFHLDRARGV

SEQ ID NO: 54091 - protein, 375 aa, Collimonas arenae
  misc_feature (1)..(375): tr|A0A0A1FAV9|A0A0A1FAV9_9BURK Queuine tRNA-ribosyltran sferase OS=Collimonas arenae OX=279058 GN=tgt PE=3 SV=1
MLEFTLIKTEGKARRGRLKLNHGTVETPIFMPVGTYGSVKAMSPLELVEIEAQIILGNTFHLWLRPGTDIIDKFSGLHKFMGWDKPILTDSGGFQVFSLGAMRKITEEGVKFSSPINGDKLFLSPEVSMQIQKSLNSDIVMQFDECTPYEIDGRAATSEEAAQSMRMSLRWAKRSKNEFDQLENPNALFGIVQGGMFENLRDESLAGLQDVGFHGIAIGGLSVGEPKEEMMRVLEHIGPRLPADKPHYLMGVGTPEDLVAGVENGVDMFDCVMPTRNARNGWLFTRFGDLKIKNARYKDDEKPLDETCSCYACRNFSRAYLHHLHRTGEILGARLNTIHNLYYYLDLMKNIRAALDVGQFSVFVTQFHLDRARGV

SEQ ID NO: 54092 - protein, 386 aa, Collimonas fungivorans
  misc_feature (1)..(386): tr|G0AI15|G0AI15_COLFT Queuine tRNA-ribosyltransferase OS=Collimonas fungivorans (strain Ter331) OX=1005048 GN =tgt PE=3 SV=1
MQKSDAVNKKIMLEFTLLKTEGKARRGRLKLNHGVVETPIFMPVGTYGSVKAMSPLELVEIEAQIILGNTFHLWLRPGTDVIDKFRGLHKFMAWDKPILTDSGGFQVFSLGAMRKITEEGVKFSSPINGDKLFLSPEVSMQIQKSLNSDIVMQFDECTPYEIDGRPATSEEAAQSMRMSLRWAKRSKNEFDQLENPNALFGIVQGGMFENLRDESLAGLEDIGFHGIAIGGLSVGEPKEEMMRVLEHIGPRLPADKPHYLMGVGTPEDLVAGVENGVDMFDCVMPTRNARNGWLFTRFGDLKIKNARYKDDEKPLDETCGCYACRNFSRAYLHHLHRTGEILGARLNTIHNLHYYLDLMKNIRAALDVGQFSVFVTQFHLDRARGV

SEQ ID NO: 54093 - protein, 375 aa, Collimonas fungivorans
  misc_feature (1)..(375): tr|A0A127P7W3|A0A127P7W3_9BURK Queuine tRNA-ribosyltran sferase OS=Collimonas fungivorans OX=158899 GN=tgt PE=3 SV=1
MLEFTLLKTEGKARRGRLKLNHGVVETPIFMPVGTYGSVKAMSPLELVEIEAQIILGNTFHLWLRPGTDVIDKFSGLHKFMAWDKPILTDSGGFQVFSLGAMRKITEEGVKFSSPINGDKLFLSPEVSMQIQKSLNSDIVMQFDECTPYEIDGRPATSEEAAQSMRMSLRWAKRSKNEFDQLENPNALFGIVQGGMFENLRDESLAGLEDVGFHGIAIGGLSVGEPKEEMMRVLEHIGPRLPADKPHYLMGVGTPEDLVAGVENGVDMFDCVMPTRNARNGWLFTRFGDLKIKNARYKDDEKPLDETCGCYACRNFSRAYLHHLHRTGEILGARLNTIHNLHYYLDLMKNIRAALDVGQFGVFVTQFHLDRARGV

SEQ ID NO: 54094 - protein, 375 aa, Collimonas pratensis
  misc_feature (1)..(375): tr|A0A127PZP0|A0A127PZP0_9BURK Queuine tRNA-ribosyltran sferase OS=Collimonas pratensis OX=279113 GN=tgt PE=3 S V=1
MLEFTLIKTEGKARRGRLKLNHGTVETPIFMPVGTYGSVKAMSPLELVEIEAQIILGNTFHLWLRPGTDVIDKFSGLHKFMAWDKPILTDSGGFQVFSLGAMRKITEEGVKFSSPINGDKLFLSPEVSMQIQKSLNSDIVMQFDECTPYEIDGRPATSEEAAQSMRMSLRWAKRSKNEFDQLENPNALFGIVQGGMFENLRDESLAGLEDVGFHGIAIGGLSVGEPKEEMMRVLEHIGPRLPADKPHYLMGVGTPEDLVAGVENGVDMFDCVMPTRNARNGWLFTRFGDLKIKNARYKDDEKPLDETCGCYACRNFSRAYLHHLHRTGEILGARLNTIHNLHYYLDLMKNIRAALDVGQFSVFVTQFHLDRARGV

SEQ ID NO: 54095 - protein, 375 aa, Collimonas sp.; identical to SEQ ID NO: 54094
  misc_feature (1)..(375): tr|A0A2A9KBB8|A0A2A9KBB8_9BURK Queuine tRNA-ribosyltran sferase OS=Collimonas sp. PA-H2 OX=1881062 GN=tgt PE=3 SV=1

SEQ ID NO: 54096 - protein, 375 aa, Collimonas sp.
  misc_feature (1)..(375): tr|A0A1I1JPG4|A0A1I1JPG4_9BURK Queuine tRNA-ribosyltran sferase OS=Collimonas sp. OK412 OX=1801619 GN=tgt PE=3 SV=1
MLEFTLLKTEGKARRGRLKLNHGTVETPIFMPVGTYGSVKAMSPLELVEIEAQIILGNTFHLWLRPGTEVLDKFGGLHKFMAWDKPILTDSGGFQVFSLGAMRKITEEGVKFSSPINGDKLFLSPEVSMQIQKSLNSDIVMQFDECTPYEIDGRPATSEEAAQSMRMSLRWAKRSKNEFDQLENPNALFGIVQGGMFENLRDESLAGLEDVGFHGIAIGGLSVGEPKEEMMRVLEHIGPRLPAGKPHYLMGVGTPEDLVAGVENGVDMFDCVMPTRNARNGWLFTRFGDLKIKNARYKDDEKPLDETCGCYACRNFSRAYLHHLHRTGEILGARLNTIHNLHYYLDLMKNIRAALDVGQFSVFVTRFHLDRARGV

SEQ ID NO: 54097 - protein, 379 aa, Collinsella aerofaciens
  misc_feature (1)..(379): tr|A4EAN0|A4EAN0_9ACTN Queuine tRNA-ribosyltransferase OS=Collinsella aerofaciens ATCC 25986 OX=411903 GN=tgt PE=3 SV=1
MDQSLFKFDLIAEDPTTHARAGVLHTPHGDIETPIFMPVGTKANVKGIPTETVKQLGAQIVLANTYHLSMRPGEDTIAELGGLHKFMNWHGPILTDSGGFQVFSHNDAVKLTDEGVRFIVNDYDGRHVFWTPEDNMEIAMKLGSDICMQLDQCPGYPATRAYVERAVELSSMWAERCYNAHTRDDQALFGIVQGGMHLDLRLRSLRHLEECGDFPGYGIGGYSVGEDHETMFETLAPLVSEYMPKHKPRYLMGVGNPTTLVRGVGVGIDMFDCVLPTRTGRMGTAFSSEGRLNFRNARFAHDDGPIDPTCTCPVCTGGYSRALIRHMVTQKEMLGGILLSMHNIYYLLNLMQRARQAIIEGRYGAFVSDWMNSPAAVDY

SEQ ID NO: 54098 - protein, 379 aa, Collinsella aerofaciens
  misc_feature (1)..(379): tr|A0A174J634|A0A174J634_9ACTN Queuine tRNA-ribosyltran sferase OS=Collinsella aerofaciens OX=74426 GN=tgt PE=3 SV=1
MDQNLFKFDLIAEDPTTHARAGVLHTPHGDIETPIFMPVGTKANVKGIPTETVKKLGAQIVLANTYHLSMRPGEDTIAELGGLHKFMNWHGPILTDSGGFQVFSHNDAVKLTDEGVRFIVNDYDGRHVFWTPEDNMEIAMKLGSDICMQLDQCPGYPATRAYVERAVELSSMWAERCYKAHTRDDQALFGIVQGGMHLDLRLRSLRHLEECGDFPGYGIGGYSVGEDHETMFETLAPLVSEYMPKHKPRYLMGVGNPTTLVRGVGVGIDMFDCVLPTRTGRMGTAFSSEGRLNFRNARFAHDDGPIDPTCTCPVCTGGYSRALIRHMVTQKEMLGGILLSMHNIYYLLNLMQRARQAIIEGRYGAFVSDWMNSPAAVDY

SEQ ID NO: 54099 - protein, 379 aa, Collinsella intestinalis
  misc_feature (1)..(379): tr|C4F7J2|C4F7J2_9ACTN Queuine tRNA-ribosyltransferase OS=Collinsella intestinalis DSM 13280 OX=521003 GN=tgt PE=3 SV=1
MDQSLFKYEIVAEDPKTHARAGILHTPHGDIETPIFMPVGTKANVKGIPTETVKDLGAQIVLANTYHLAMRPGADTVAELGGLHDFMNWHGPILTDSGGFQIFSHSDAVKLTDEGVRFIATDYDGSHVFWTPEDNMEIAMKLGSDICMQLDQCPGYPATCKFVERAVELSSMWAERCYKAHTRDDQALFGIVQGGMHLDLRLRSLKHLEEIGDFPGYGIGGYSVGEPHEVMFETLEPLVSEHMPRHKPRYLMGVGNPTTLVRGVGCGVDMFDCVLPTRTGRMGTAFSSTGRMNLKNAKFARDPRPIDEKCTCPVCTGGYSRALIRHMVTQKEMLGGILLSQHNIYFLLDLMRRARQAIIDGRYAEFQAEWLAGEGAVDF

SEQ ID NO: 54100 - protein, 264 aa, Collinsella intestinalis
  misc_feature (1)..(264): tr|A0A5K1JPU6|A0A5K1JPU6_9ACTN Queuine tRNA-ribosyltran sferase OS=Collinsella intestinalis OX=147207 GN=tgt PE =4 SV=1
MRFIATDYDGSHVFWTPEDNMEIAMKLGSDICMQLDQCPGYPATRKFVERAVELSSMWAERCYKAHTRDDQALFGIVQGGMHLDLRLRSLKHLEEIGDFPGYGIGGYSVGEPHEVMFETLEPLVSEHMPRHKPRYLMGVGNPTTLVRGVGCGVDMFDCVLPTRTGRMGTAFSSTGRMNLKNAKFARDPRPIDEKCTCPVCTGGYSRALIRHMVTQKEMLGGILLSQHNIYFLLDLMRCARQAIIDGRYAEFQAEWLAGEGAVDF

SEQ ID NO: 54101 - protein, 379 aa, [Collinsella] massiliensis
  misc_feature (1)..(379): tr|A0A1Y3XU32|A0A1Y3XU32_9ACTN Queuine tRNA-ribosyltran sferase OS=[Collinsella] massiliensis OX=1232426 GN=tgt PE=3 SV=1
MDQSLFTYDIIAEDPRTHARAGVLHTPHGDIGTPIFMPVGTRATVKGIPWETVRDLGAQIVLSNTYHLAMRPGADLIAELGGLHEFMNWHGPILTDSGGFQVFSHSDAVKLTNEGVRFIATDYDGSHVFWTPEDNMAIAQKLGSDICMQLDQCIGYPVERRDVERSTDLSSRWAERCYKAHTRPDQALFGIVQGGMHMDLRVKSLQRLEDMGDFPGYGIGGYSVGESHEVMFETLEPLAAEYMPRTKPRYLMGVGNPTTLVRGVACGIDMFDCVLPTRTGRMGTAFSSEGRLNFRNARFARDPRPVDEHCTCPVCTGGYTRAHIRHMVAQKEMLGGILLSMHNIYYLLDLMRRARQAIIEGRYKAFVRDWMDSPAAADY

SEQ ID NO: 54102 - protein, 379 aa, Collinsella sp.
  misc_feature (1)..(379): tr|A0A412T228|A0A412T228_9ACTN Queuine tRNA-ribosyltran sferase OS=Collinsella sp. AF16-8 OX=2292215 GN=tgt PE= 3 SV=1
MDQNLFKFDLIAEDPTTHARAGVLHTPHGDIETPIFMPVGTKANVKGIPTETVKQLGAQIVLANTYHLSMRPGEDTIAELGGLHKFMNWHGPILTDSGGFQVFSHNDAVKLTDEGVRFIVNDYDGRHVFWTPEDNMEIAMKLGSDICMQLDQCPGYPATRAYVERAVELSSMWAERCYKAHTRDDQALFGIVQGGMHLDLRLRSLRHLEECGDFPGYGIGGYSVGEDHETMFETLAPLVSEYMPKHKPRYLMGVGNPTTLVRGVGVGIDMFDCVLPTRTGRMGTAFSSEGRLNFRNARFAHDDGPIDPTCTCPVCTGGYSRALIRHMVTQKEMLGGILLSMHNIYYLLNLMQRARQAIIEGRYGAFVSDWMNSPAAVDY

SEQ ID NO: 54103 - protein, 379 aa, Collinsella sp.
  misc_feature (1)..(379): tr|A0A374VIX8|A0A374VIX8_9ACTN Queuine tRNA-ribosyltran sferase OS=Collinsella sp. OM07-12 OX=2292328 GN=tgt PE =3 SV=1
MDQSLFKFDLIAEDPTTHARAGVLHTPHGDIETPIFMPVGTKANVKGIPTETVKQLGAQIVLANTYHLSMRPGEDTIAELGGLHKFMNWHGPILTDSGGFQVFSHNDAVKLTDEGVRFIVNDYDGRHVFWTPEDNMEIAMKLGSDICMQLDQCPGYPATRAYVERAVELSSMWAERCYKAHTRDDQALFGIVQGGMHLDLRLRSLRHLEECGDFPGYGIGGYSVGEDHETMFETLAPLASEYMPKHKPRYLMGVGNPTTLVRGVGVGIDMFDCVLPTRTGRMGTAFSSEGRLNFRNARFAHDDGPIDPTCTCPVCTGGYSRALIRHMVTQKEMLGGILLSMHNIYYLLNLMQQARQAIIEGRYGAFVSDWMNSPAAVDY

SEQ ID NO: 54104 - protein, 385 aa, Collinsella stercoris
  misc_feature (1)..(385): tr|B6G9I5|B6G9I5_9ACTN Queuine tRNA-ribosyltransferase OS=Collinsella stercoris DSM 13279 OX=445975 GN=tgt PE= 3 SV=1
MAEEPHMDQSLFKYEIVAEDPKTHARAGVLHTPHGDIETPIFMPVGTKANVKGIPTETVKDLGAQIVLANTYHLAMRPGADTIAELGGLHTFMNWHGPILTDSGGFQIFSHSDAVKLTDESVRFIATDYDGSHVFWTPEDNMDIAMKLGSDICMQLDQCPGYPATRKFVERAVELSSIWAERCYKAHTRDDQALFGIVQGGMHLDLRLRSLKHLEEIGDFPGYGIGGYSVGEPHEVMFETLEPLVSEHMPRLKPRYLMGVGNPTTLVRGVGCGIDMFDCVLPTRTGRMGTAFSSQGRMNLKNAKFAKDPRPIDEKCTCPVCTGGYSRALIRHMVTQKEMLGGILLSQHNIYFLLDLMRRARQAIIDGRYAEFQAEWMASEGAADF

SEQ ID NO: 54105 - protein, 379 aa, Collinsella tanakaei
  misc_feature (1)..(379): tr|A0A3E4QPE2|A0A3E4QPE2_9ACTN Queuine tRNA-ribosyltran sferase OS=Collinsella tanakaei OX=626935 GN=tgt PE=3 S V=1
MDQSLFTYDIVAEDPKTHARAGILHTPHGDIETPIFMPVGTKANVKGIPTETVKGLGAQIVLANTYHLAMRPGADLIDELGGLHNFMNWHGPILTDSGGFQVFSHNDAVKLTDEGVRFIATDYDGSHVFWTPEDNMAIAQKLGSDICMQLDQCPGYPATRKYVERAVELSSMWAERCYKAHTRPDQALFGIVQGGMHLDLRLRSLKHLEECGDFPGYGIGGYSVGEDHETMFETLEPLVSEHMPRQKPRYLMGVGNPTTLVRAVGMGVDMFDCVLPTRTGRMGTAFSSQGRLNFRNAKFAHDAGPIDEKCTCPVCTGGYSRALIRHMVTQKEMLGGILLSQHNIYFLLDLMRRARQAIIDGRYAEFRDEWMQNAGAKDY

SEQ ID NO: 54106 - protein, 379 aa, Collinsella tanakaei
  misc_feature (1)..(379): tr|G1WJU8|G1WJU8_9ACTN Queuine tRNA-ribosyltransferase OS=Collinsella tanakaei YIT 12063 OX=742742 GN=tgt PE=3 SV=1
MDQSLFTYDIVAEDPKTHARAGILHTPHGDIETPIFMPVGTKANVKGIPTETVKGLGAQIVLANTYHLAMRPGADLIDELGGLHNFMNWHGPILTDSGGFQVFSHNDAVKLTDEGVRFIATDYDGSHVFWTPEDNMAIAQKLGSDICMQLDQCPGYPATRKYVERAVELSSMWAERCYKAHTRPDQALFGIVQGGMHLDLRLRSLKHLEECGDFPGYGIGGYSVGEDHETMFETLEPLVSEHMPRQKPRYLMGVGNPTTLVRAVGMGVDMFDCVLPTRTGRMGTAFSSQGRLNFRNAKFAHDAGPIDEKCTCPVCTGGYSRALIRHMVTQKEMLGGILLSQHNIYFLLDLMRRARQAIIDGRYAEFRDEWMQSAGARDY

SEQ ID NO: 54107 - protein, 376 aa, Colwellia beringensis
  misc_feature (1)..(376): tr|A0A222GDS4|A0A222GDS4_9GAMM Queuine tRNA-ribosyltran sferase OS=Colwellia beringensis OX=1967665 GN=tgt PE=3 SV=1
MKFELLTKDGKARRGRLTFDRGTVETPAFMPVGTYGTVKGMKTEEVADTGAEILLGNTFHLMLRPGTEIIEQHGGLHGFMNWDKPILTDSGGFQVFSLGKMRKITEEGVKFSSPVNGEKIMLTPERSMEVQNSLGSDIVMIFDECTPYPASHEESKVSMELSLRWAQRSKDAHEGNLNALFGIVQGGMYEDLREVSVNGLTSIGFDGYAIGGLSVGEPKEDMIRILDHTAPLIPENKPRYLMGVGKPEDLVEGVRRGIDMFDCVMPTRNARNGHLFVTNGVIKIRNARHKTDTGPLDPECDCYTCKNYSRAYLHHLDKCNEILGSQLNTMHNLRFYQRVMQGLRGAIEQGKLDEFVADFYALRDLPVPPLAGSEAE

SEQ ID NO: 54108 - protein, 390 aa, Colwellia chukchiensis
  misc_feature (1)..(390): tr|A0A1H7GA59|A0A1H7GA59_9GAMM Queuine tRNA-ribosyltran sferase OS=Colwellia chukchiensis OX=641665 GN=tgt PE=3 SV=1
MTEKKDNATAQAMQFSLLNTDGKARRGRLTFERGTVETPAFMPVGTYGTVKGMKTEEVEATGADILLGNTFHLMLRPGTDIIEQHGGLHGFMNWQKPILTDSGGFQVFSLGKMRKITEEGVKFSSPVNGEKIMLTPERSMAVQNSLGSDIVMIFDECTPYPASHEAAKVSMELSLRWAQRSKDAHQGNKNALFGIVQGGMYEDLREVSVNGLTDIGFDGYAIGGLSVGEPKEDMIRILDHTAPLIPENKPRYLMGVGKPEDLVEGVRRGIDMFDCVMPTRNARNGHLFVTNGVIKIRNARHKTDTGPLDPDCDCYTCKNYSRAYLHHLDKCNEILGSQLNTVHNLRFYQRVMQGLRDAIEQGKLEQFVAEFYALRDLPVPPLAGTDPATQ

SEQ ID NO: 54109 - protein, 385 aa, Colwellia demingiae
  misc_feature (1)..(385): tr|A0A5C6QM47|A0A5C6QM47_9GAMM Queuine tRNA-ribosyltran sferase OS=Colwellia demingiae OX=89401 GN=tgt PE=3 SV= 1
MTETVKNKMKYELITTDGKARRGRLTFDRGVVETPAFMPVGTYGTVKGMKPEEVEATGAHIILGNTFHLMLRPGTDIIEQHGGLHNFMNWNGPILTDSGGFQVFSLGKMSKITEEGVRFSSPVNGEKIMLTPERSMEVQRSLNSDIVMIFDECTPYPASHKESKDSMELSLRWAQRSKDAHGDSPNALFGIVQGGMYEDLREVSVAGLKAIEFDGYAIGGLSVGEPKEDMVRILDHTAPLIPKNKPRYLMGVGKPEDLVEGVRRGIDMFDCVMPTRNARNGHLFVNTGVIKIRNASHKTDTAALDDTCDCYTCKNYSRAYLHHLDKCKEILGSQLNTLHNLHFYQKVMQGLRDAIEQGKLDTFVEEFYALRGLPVPPLAEGSQQV

SEQ ID NO: 54110 - protein, 371 aa, Colwellia hornerae
  misc_feature (1)..(371): tr|A0A5C6QDB3|A0A5C6QDB3_9GAMM Queuine tRNA-ribosyltran sferase OS=Colwellia hornerae OX=89402 GN=tgt PE=3 SV=1
MKYQLINTDGKARRGRLTFDRGTVETPAFMPVGTYGTVKGMKMEDVEATGAEIILGNTFHLMLRPGTEIVEQFGGLHNFINWQKPILTDSGGFQVFSLGKMRKITEEGVKFSSPINGDKIMLTPERSMEVQRSLDADVVMIFDECTPYPASHEESKSSMELSLRWAQRSKVAHGDNQSALFGIVQGGMYEDLREVSVKGLKDIEFDGYAIGGLSVGEPKEDMIRILDHTTPLIPENKPRYLMGVGKPEDLVEGVRRGIDMFDCVMPTRNARNGHLFVTNGVIKIRNASHKTDTGPLDSECDCYTCKNYSRAYLHHLDKCNEILGSQLNTLHNLHFYQRVMKGLRAAIEQGKLDDFVNEFYALRGLPVPELK

SEQ ID NO: 54111 - protein, 385 aa, Colwellia marinimaniae
  misc_feature (1)..(385): tr|A0A1Z5HZA6|A0A1Z5HZA6_9GAMM Queuine tRNA-ribosyltran sferase OS=Colwellia marinimaniae OX=1513592 GN=tgt PE= 3 SV=1
MTKTVKNKMTYELITTDGKARRGRLTFDRGVVETPAFMPVGTYGTVKGMKPEDVAATGADIILGNTFHLMLRPGTDIIEQHGGLHGFMNWHKPILTDSGGFQVFSLGKTRKITEEGVRFSSPVNGEKIMLTPERSIEVQRSLNSDIVMIFDECTPYPASHKESKDSMELSLRWAQRSKDAHGDSPNALFGIVQGGMFEDLREVSVAGLQAIDFDGYAIGGLSVGEPKEDMIRILDHTTPLIPKNKPRYLMGVGKPEDLVEGVRRGIDMFDCVMPTRNARNGHLFVNTGVIKIRNAAHKTDTGPLDDTCDCYTCKNYSRAYLHHLDKCKEILGSQLNTLHNLHFYQKVMQGLRDAIEQGRLDAFVEEFYALRGLPVPPLATGSKQV

SEQ ID NO: 54112 - protein, 385 aa, Colwellia psychrerythraea
  misc_feature (1)..(385): tr|Q487A2|Q487A2_COLP3 Queuine tRNA-ribosyltransferase OS=Colwellia psychrerythraea (strain 34H / ATCC BAA-681 ) OX=167879 GN=tgt PE=3 SV=1
MTETVKNKMKYELITTDGKARRGRLTFDRGVVETPAFMPVGTYGTVKGMKAEEVEATGAHIILGNTFHLMLRPGTDIIEQHGGLHDFMNWNGPILTDSGGFQVFSLGKMSKITEEGVRFSSPVNGEKIMLTPERSMEVQRSLNSDIVMIFDECTPYPASHKESKDSMELSLRWAQRSKDAHGDSPNALFGIVQGGMYEDLREVSVAGLKAIEFDGYAIGGLSVGEPKEDMVRILDHTAPLIPKNKPRYLMGVGKPEDLVEGVRRGIDMFDCVMPTRNARNGHLFVNTGVIKIRNAAHKTDVAPLDDTCDCYTCKNYSRAYLHHLDKCKEILGSQLNTLHNLHFYQKVMQGLRDAIEQGKLDAFVEEFYALRGLPVPPLAEGSKQV

SEQ ID NO: 54113 - protein, 385 aa, Colwellia psychrerythraea
  misc_feature (1)..(385): tr|A0A099KHR2|A0A099KHR2_COLPS Queuine tRNA-ribosyltran sferase OS=Colwellia psychrerythraea OX=28229 GN=tgt PE =3 SV=1
MTEVVKNKMKYELITTDGKARRGRLTFDRGVVETPAFMPVGTYGTVKGMKAEEVEDTGAHIILGNTFHLMLRPGIDIIEQHGGLHDFMNWQGPILTDSGGFQVFSLGKMSKITEEGVRFSSPVNGEKIMLTPERSMEVQRSLNSDIVMIFDECTPYPASHKESKDSMELSLRWAQRSKDAHGDSPNALFGIVQGGMYEDLREVSVAGLKAVEFDGYAIGGLSVGEPKEDMIRILDHTAPLIPKNKPRYLMGVGKPEDLVEGVRRGIDMFDCVMPTRNARNGHLFVNTGVIKIRNAAHKTDVSPLDDTCDCYTCKNYSRAYLHHLDKCKEILGSQLNTLHNLHFYQKVMQGLRAAIEQGRLDAFVEEFYALRDLPVPPLAEGSKQV

SEQ ID NO: 54114 - protein, 385 aa, Colwellia sp.
  misc_feature (1)..(385): tr|A0A2N1CAL3|A0A2N1CAL3_9GAMM Queuine tRNA-ribosyltran sferase OS=Colwellia sp. 75C3 OX=888425 GN=tgt PE=3 SV= 1
MTEVVKNKMKYELITTDGKARRGRLTFDRGVVETPAFMPVGTYGTVKGMKAEEVAATGAHIILGNTFHLMLRPGTDIIEQHGGLHDFMNWSGPILTDSGGFQVFSLGKMSKITEEGVRFSSPVNGEKIMLTPERSMEVQRSLNSDIVMIFDECTPYPASHKESKDSMELSLRWAQRSKDAHGDSPNALFGIVQGGMYEDLREVSVAGLKAIEFDGYAIGGLSVGEPKEDMVRILDHTAPLIPKNKPRYLMGVGKPEDLVEGVRRGIDMFDCVMPTRNARNGHLFVNTGVIKIRNAAHKTDVAPLDDTCDCYTCKNYSRAYLHHLDKCKEILGSQLNTLHNLHFYQKVMQGLRDAIEQGKLDAYVEEFYALRGLPVPALAEGSKQV

SEQ ID NO: 54115 - protein, 375 aa, Colwellia sp.; identical to SEQ ID NO: 51559
  misc_feature (1)..(375): tr|A0A2G2EK22|A0A2G2EK22_COLSX Queuine tRNA-ribosyltran sferase OS=Colwellia sp. OX=56799 GN=tgt PE=3 SV=1

SEQ ID NO: 54116 - protein, 377 aa, Colwelliaceae bacterium
  misc_feature (1)..(377): tr|A0A2D6RHY9|A0A2D6RHY9_9GAMM Queuine tRNA-ribosyltran sferase OS=Colwelliaceae bacterium OX=2026726 GN=tgt PE =3 SV=1
MQYQLLAKDGKARRGRLTFERGTVETPAFMPVGTYGTVKGMKTEEIKDIGAEIILGNTFHLMLRPGTDIIEQHGDLHDFINWDKPILTDSGGFQVFSLGAMRKITEEGVKFSSPVNGEKIMLTPERSMEVQRKLGSDIVMIFDECTPYPATHQEAKDSMEMSLRWAQRSKDAHDGNPNALFGIVQGGMYEDLREVSVEGLKAIDFDGYAIGGLSVGEPKEDMVRILDHTTPLIPEDKPRYLMGVGKPEDLVEGVRRGIDMFDCVMPTRNARNGHLFVSDGVVKIRNAKNKTDTGPLDPECDCYTCKNYSKAYLHHLDKCNEILGSQLNTIHNLRFYQRVMKGLRDAIEAGKLDEFVEDFYAKRGLPVPPLAEGSQQV

SEQ ID NO: 54117 - protein, 422 aa, Comamonadaceae bacterium
  misc_feature (1)..(422): tr|A0A2H0IYC2|A0A2H0IYC2_9BURK Queuine tRNA-ribosyltran sferase OS=Comamonadaceae bacterium CG12_big_fil_rev_8_ 21_14_0_65_59_15 OX=1973952 GN=tgt PE=3 SV=1
MTHDHHHDHPHDHPHDHKPQPVIQFDQLRTDPPLPETGYVGSHARRGTITLAHGMVQTPIFMPVGTYGTVKGVLPSSLEDMGAQIILGNTFHLWMRPGLDVMQNFGGLHDFERWKKPILTDSGGFQVWSLGAMRKITEEGVHFSSPVNGDKLFMSPEVSMQIQTTLNSDIAMQLDECTPYLSVEPKTKGQITTESEARKSMEMSLRWAKRSQAEFERLGNPNALFGIVQGGMFEHLRQESLEALVEMDLPGYAVGGVSVGEPKDEMLRIMAHTPHRLPWHKPRYLMGVGTPEDLVEGVAQGVDMFDCVMPTRNARNGTLFTRFGDLKMRNSRHRSDHAPLDATCTCYTCQGITRPNGMVSGGFSRAYLHHLDRCGEMLAPMLLSIHNLHYYLNLMREMRAALDAGTFGAFRAQFKADRTRGV

SEQ ID NO: 54118 - protein, 390 aa, Comamonadaceae bacterium
  misc_feature (1)..(390): tr|A0A3M6RJR5|A0A3M6RJR5_9BURK Queuine tRNA-ribosyltran sferase OS=Comamonadaceae bacterium NML180582 OX=247874 6 GN=tgt PE=3 SV=1
MLQFQLLATDASSHARRGALTLNHGVVQTPIFMPVGTYGTVKGVMPRSLEEMGAQIILGNTFHLWMRPGLDVMRSFGGLHAFEQWHKPILTDSGGFQVWSLGSMRKITEEGVHFASPVNGDKLFMSPEVSMQIQTALNSDVVMQLDECTPYETNGHITTEAQARQSMEMSLRWARRSQEEFARLNNPNALFGIVQGGMFEHLRQESLEQLVAMDFPGYAVGGVSVGEPKEEMRRIMAHTPHRLPREKPRYLMGVGTPEDLVEGVACGVDMFDCVMPTRNARNGTIFTRYGDLKIRNARHKADHQPLDPSCTCHACAGSSGVSWENGGREGFSRAYLHHLDRCGEMLGPMLTTIHNLHYYLNLMREVRQALEQNRFAAFRQQFAADRARGV

SEQ ID NO: 54119 - protein, 390 aa, Comamonas aquatica
  misc_feature (1)..(390): tr|A0A1B2D736|A0A1B2D736_9BURK Queuine tRNA-ribosyltran sferase OS=Comamonas aquatica OX=225991 GN=tgt PE=3 SV= 1
MLQFELLTTDPTSHARRGTLTLNHGKVQTPIFMPVGTYGTVKGVMPRSLEEMGAQIILGNTFHLWMRPGLDIMKTFGGLHGFEKWNKPILTDSGGFQVWSLGAMRKITEEGVHFQSPVNGDKLFMSPEVSMQIQTILNSDIVMQLDECTPYETNGHKTTEAEARKSMEMSRRWAQRSKDEFERLENPNALFGIVQGGMYTNLREESLQALVEMDFPGYAVGGVSVGEPKDEMLEIMAHTPHLLPTHKPRYLMGVGTPEDLVQGVADGVDMFDCVMPTRNARNGTVFTRYGDLKLRNARHKSDHQPLDTTCTCHACAGASGVSWDNGGRDGFSRAYLHHLDRCGEMLGPMLTTIHNLHYYLNLMQEVRNALDAGTFAQFRAQFKADRARGV

SEQ ID NO: 54120 - protein, 390 aa, Comamonas aquatica
  misc_feature (1)..(390): tr|A0A014NLG9|A0A014NLG9_9BURK Queuine tRNA-ribosyltran sferase OS=Comamonas aquatica DA1877 OX=1457173 GN=tgt PE=3 SV=1
MLQFELLTTDPTSHARRGTLTLNHGKVQTPIFMPVGTYGTVKGVMPRSLEEMGAQIILGNTFHLWMRPGLDIMKTFGGLHGFEKWNKPILTDSGGFQVWSLGAMRKITEEGVHFQSPVNGDKLFMSPEVSMQIQTILNSDIVMQLDECTPYETNGHKTTEAEARKSMEMSRRWAQRSKDEFERLENPNALFGIVQGGMYTNLREESLQALVEMDFPGYAVGGVSVGEPKDEMLEIMAHTPHLLPANKPRYLMGVGTPEDLVQGVADGVDMFDCVMPTRNARNGTVFTRYGDLKLRNARHKSDHQPLDTTCTCHACAGASGVSWDQGGRDGFSRAYLHHLDRCGEMLGPMLTTIHNLHYYLNLMQEVRNALDAGTFAQFRAQFKADRARGV

SEQ ID NO: 54121 - protein, 390 aa, Comamonas kerstersii
  misc_feature (1)..(390): tr|A0A0W7Z4Y2|A0A0W7Z4Y2_9BURK Queuine tRNA-ribosyltran sferase OS=Comamonas kerstersii OX=225992 GN=tgt PE=3 S V=1
MLQFELLKTDPTSHARRGKLTLNHGVVQTPIFMPVGTYGTVKGVMPRSLEEMGAQIILGNTFHLWMRPGLDIMKTFGGLHGFEKWNKPILTDSGGFQVWSLGAMRKITEEGVHFQSPVNGDKLFMSPEVSMQIQTVLNSDIVMQLDECTPYETNGKKTTEAEARKSMEMSRRWAKRSKDEFERLENPNALFGIVQGGMYTNLRQESLEALVEMDFPGYAVGGVSVGEPKDEMLEIMAHTPHLLPANKPRYLMGVGTPEDLVQGVADGVDMFDCVMPTRNARNGTVFTRYGDLKLRNARHKTDHQPLDTTCTCHACAGKSGVSWDDGGRDGFSRAYLHHLDRCGEMLGPMLTTIHNLHYYLNLMQEIRDALEAGAFAEFRAKFKADRVRGV

SEQ ID NO: 54122 - protein, 390 aa, Comamonas kerstersii
  misc_feature (1)..(390): tr|A0A1V0BIJ3|A0A1V0BIJ3_9BURK Queuine tRNA-ribosyltran sferase OS=Comamonas kerstersii OX=225992 GN=tgt PE=3 S V=1
MLQFELLKTDPTSHARRGKLTLNHGVVQTPIFMPVGTYGTVKGVMPRSLEEMGAQIILGNTFHLWMRPGLDIMKTFGGLHGFEKWNKPILTDSGGFQVWSLGAMRKITEEGVHFQSPVNGDKLFMSPEVSMQIQTVLNSDIVMQLDECTPYETNGKKTTEAEARKSMEMSRRWAKRSKDEFERLENPNALFGIVQGGMYTNLRQESLEALVEMDFPGYAVGGVSVGEPKDEMLEIMAHTPHLLPANKPRYLMGVGTPEDLVQGVADGVDMFDCVMPTRNARNGTVFTRYGDLKLRNARHKTDHQPLDTTCTCHACAGKSGVSWDDGGRDGFSRAYLHHLDRCGEMLGPMLTTIHNLHYYLNLMQEIRDALEAGTFAEFRAKFKADRARGV

SEQ ID NO: 54123 - protein, 397 aa, Comamonas serinivorans
  misc_feature (1)..(397): tr|A0A1Y0EU46|A0A1Y0EU46_9BURK Queuine tRNA-ribosyltran sferase OS=Comamonas serinivorans OX=1082851 GN=tgt PE= 3 SV=1
MPALTFDLLATDPASHARRGRLTLNHGVVQTPIFMPVGTYGTVKGVMPRSLHDMGAQIILGNTFHLWMRPGLDVMQSFGGLHGFEQWDKPILTDSGGFQVWSLGAMRKITEEGVHFQSPVNGDKLFMSPEVSMQIQTILNSDIVMQLDECTPYETNGHNTTEAEARQSMEMSRRWALRSQAEFERLGNPNALFGIVQGGMFKHLRQESLEALVEMDFPGYAVGGVSVGEPKDEMLDIMAHTPHRLPAHKPRYLMGVGTPEDLVQGVAEGVDMFDCVMPTRNARNGTIFTRYGDLKIRNARHKTDHQPIDTTCSCYACAGSPGADGAGLSWDQGGRAGFSRAYLHHLDRCGEMLGPMLTTIHNLHYYLNLMQEIRDALDAGTFAQFRLRFQQDRARGV

SEQ ID NO: 54124 - protein, 390 aa, Comamonas sp.
  misc_feature (1)..(390): tr|A0A0M2DUQ9|A0A0M2DUQ9_9BURK Queuine tRNA-ribosyltran sferase OS=Comamonas sp. E6 OX=364029 GN=tgt PE=3 SV=1
MLQFDLLKTDPTSHARRGTLTLNHGKVQTPIFMPVGTYGTVKGVMPRSLEEMGAQIILGNTFHLWMRPGLDIMKSFGGLHDFEKWDKPILTDSGGFQVWSLGAMRKITEEGVHFQSPVNGDKLFMSPEVSMQIQTILNSDIVMQLDECTPYETNGKKTTEAEARKSMEMSRRWAKRSKEEFQRLENPNALFGIVQGGMYTNLREESLQGLLEIDFPGYAVGGVSVGEPKDEMLEIMAHTPHLLPANKPRYLMGVGTPEDLVQGVADGVDMFDCVMPTRNARNGTIFTRYGDLKIRNARHKVDHQPIDTTCTCHACAGKSGVSWDDGGREGFSRAYLHHLDRCGEMLGPMLTTIHNLHYYLNLMQEIRNALDAGSFAQFRTQFKADRARGV

SEQ ID NO: 54125 - protein, 390 aa, Comamonas sp.
  misc_feature (1)..(390): tr|A0A1D2S4U3|A0A1D2S4U3_9BURK Queuine tRNA-ribosyltran sferase OS=Comamonas sp. SCN 65-56 OX=1660095 GN=tgt PE =3 SV=1
MLQFNLLATDPASHARRGRLTLNHGVIQTPIFMPVGTYGTVKGVMPRSLHEMGAQIILGNTFHLWMRPGLDIVKGFGGLHGFEQWHKPILTDSGGFQVWSLGAMRKITEDGVHFASPVNGDKLFLSPEVSMQIQTVLNSDIVMQLDECTPYETDGHATTEPEARKSMEMSLRWAGRSQAEFARLANPNALFGIVQGGMFEHLREESLQALTAMDFPGYAIGGVSVGEPKEDMLRIMGHTPHRLPAHKPRYLMGVGTPEDLVEGVACGVDMFDCVMPTRNARNGTLFTRFGDLKIRNARHKDDHQPLDPSCTCHACAGSEGVSWNDGGRGGFSRAYLHHLDRCGEMLGPMLATIHNLHYYLNLMQEIRDALDAGEYPRFRARFAQERAHGV

SEQ ID NO: 54126 - protein, 390 aa, Comamonas terrigena
  misc_feature (1)..(390): tr|A0A2A7UZU2|A0A2A7UZU2_COMTR Queuine tRNA-ribosyltran sferase OS=Comamonas terrigena OX=32013 GN=tgt PE=3 SV= 1
MLQFDLLKTDPTSHARRGTVTLNHGKVQTPIFMPVGTYGTVKGVMPRSLEEMGAQIILGNTFHLWMRPGLDIMKSFGGLHGFEKWDKPILTDSGGFQVWSLGSMRKITEEGVHFQSPVNGDKLFMSPEVSMQIQTILNSDIVMQLDECTPYETNGKKTTEAEARKSMEMSRRWALRSKQEFERLGNPNALFGIVQGGMYTNLREESLQALVEMDFPGYAVGGVSVGEPKDEMLEIMAHTPHLLPAHKPRYLMGVGTPEDLVQGVADGVDMFDCVMPTRNARNGTIFTRYGDLKLRNARHKVDHQPIDTTCTCHACAGTSGVSWDDGGRDGFSRAYLHHLDRCGEMLGPMLTTIHNLHYYLNLMQEVRDALDAGTFAAFRQKFAQDRSRGV

SEQ ID NO: 54127 - protein, 390 aa, Comamonas testosteroni
  misc_feature (1)..(390): tr|A0A076PMK7|A0A076PMK7_COMTE Queuine tRNA-ribosyltran sferase OS=Comamonas testosteroni TK102 OX=1392005 GN=t gt PE=3 SV=1
MLQFDLLKTDPNSHARRGTLTLNHGKVQTPIFMPVGTYGTVKGVMPRSLEEMGAQIILGNTFHLWMRPGLDIMKSFGGLHDFEKWDKPILTDSGGFQVWSLGAMRKITEEGVHFQSPVNGDKLFMSPEVSMQIQTILNSDIVMQLDECTPYETNGKKTTEAEARKSMEMSRRWAKRSKEEFQRLENPNALFGIVQGGMYTNLREESLQGLLEIDFPGYAVGGVSVGEPKDEMLEIMAHTPHLLPANKPRYLMGVGTPEDLVQGVADGVDMFDCVMPTRNARNGTIFTRYGDLKIRNARHKVDHQPIDTTCTCHACAGKSGVSWDDGGRDGFSRAYLHHLDRCGEMLGPMLTTIHNLHYYLNLMQEIRNALDAGTFTEFRARFKADRARGV

SEQ ID NO: 54128 - protein, 390 aa, Comamonas testosteroni
  misc_feature (1)..(390): tr|A0A1Y1J5Q0|A0A1Y1J5Q0_COMTE Queuine tRNA-ribosyltran sferase OS=Comamonas testosteroni OX=285 GN=tgt PE=3 SV =1
MLQFDLLKTDPTSHARRGTLTLNHGKVQTPIFMPVGTYGTVKGVMPRSLEEMGAQIILGNTFHLWMRPGLDIMKSFGGLHDFEKWDKPILTDSGGFQVWSLGAMRKITEEGVHFQSPVNGDKLFMSPEVSMQIQTILNSDIVMQLDECTPYETNGKKTTEAEARKSMEMSRRWAKRSKEEFQRLENPNALFGIVQGGMYTNLREESLQGLLEIDFPGYAVGGVSVGEPKDEMLEIMAHTPHLLPANKPRYLMGVGTPEDLVQGVADGVDMFDCVMPTRNARNGTIFTRYGDLKIRNARHKVDHQPIDTTCTCHACAGKSGVSWDDGGREGFSRAYLHHLDRCGEMLGPMLTTIHNLHYYLNLMQEIRNALDAGTFAQFRAQFKADRARGV

SEQ ID NO: 54129 - protein, 390 aa, Comamonas thiooxydans; identical to SEQ ID NO: 54128
  misc_feature (1)..(390): tr|A0A176TP11|A0A176TP11_9BURK Queuine tRNA-ribosyltran sferase OS=Comamonas thiooxydans OX=363952 GN=tgt PE=3 SV=1

SEQ ID NO: 54130 - protein, 390 aa, Comamonas thiooxydans; identical to SEQ ID NO: 54124
  misc_feature (1)..(390): tr|A0A096EJK4|A0A096EJK4_9BURK Queuine tRNA-ribosyltran sferase OS=Comamonas thiooxydans OX=363952 GN=tgt PE=3 SV=1

SEQ ID NO: 54131 - protein, 377 aa, Commensalibacter intestini
  misc_feature (1)..(377): tr|G6F166|G6F166_9PROT Queuine tRNA-ribosyltransferase OS=Commensalibacter intestini A911 OX=1088868 GN=tgt PE =3 SV=1
MTEPKFHWTKQAQHHNARAGTLHTAHGDVQTPTFMPVGTAGTVKAMTMDAVRSTGAGIVLGNTYHLMLRPGAELVHELGGLHKFMDWSGPILTDSGGFQVMSLGDLRKLDEDGVTFRSHIDGSAHRLTPESSTDIQYLLDATITMCFDECPALPASYETIKKSMQLSMRWAERSRNQFKNRPGYAQFGIVQGGIEPDLRAESVEALTNIGFEGYAVGGLAVGEPQEQMFSTLDFTTPLMPTDKPRYLMGVGTPDDMLGAIERGIDMFDCVMPTRAGRTARAYTSRGTLNMKNACHIHDPRPIDPECDCPACSKHSRAYLTHLFRSKEILAAMLLTWHNIAYYQRLMRIIRQAIVDDNLTEVAATLRANWQKRRLVCG

SEQ ID NO: 54132 - protein, 380 aa, Commensalibacter intestini
  misc_feature (1)..(380): tr|A0A251ZX41|A0A251ZX41_9PROT Queuine tRNA-ribosyltran sferase OS=Commensalibacter intestini OX=479936 GN=tgt PE=3 SV=1
MTEPKFHWTKQAQHHNARAGTLHTAHGDVQTPTFMPVGTAGTVKAMTMDAVRSTGAGIVLGNTYHLMLRPGAELVHELGGLHKFMDWSGPILTDSGGFQVMSLGDLRKLDEDGVTFRSHIDGSAHRLTPESSTDIQYLLDATITMCFDECPALPASYETIKKSMQLSMRWAERSRNQFKNRPGYAQFGIVQGGIEPDLRAESVEALTNIGFEGYAVGGLAVGEPQEQMFSTLDFTTPLMPTDKPRYLMGVGTPDDMLGAIERGIDMFDCVMPTRAGRTARAYTSRGTLNMKNACHIHDPRPIDPECDCPACSKHSRAYLTHLFRSKEILAAMLLTWHNIAYYQRLMRIIRQAIVDDNLTEVAATLRANWQKGDWSVDEWN

SEQ ID NO: 54133 - protein, 380 aa, Commensalibacter sp.
  misc_feature (1)..(380): tr|W7E253|W7E253_9PROT Queuine tRNA-ribosyltransferase OS=Commensalibacter sp. MX01 OX=1208583 GN=tgt PE=3 SV= 1
MTQPKFHWTKQAQHKNARAGTLHTAHGDVQTPTFMPVGTVGTVKAMTMDAVRSTGAGIVLGNTYHLMLRPGAELVHELGGLHQFMDWPGPILTDSGGFQVMSLGDLRQLDEDGVTFRSHLDGSAHRLTPESSTDIQYLLDATITMCFDECPALPATYDTIAKSMRLSMRWAERSRKQFKNRPGYAQFGIVQGGIEPDLRAESVEALTNIGFEGYAIGGLAVGEPQEQMFSTLDFTTHLMPTDKPRYLMGVGTPDDMLGAIERGIDMFDCVMPTRAGRTGRAYTSRGTLNMKNACHIHDPRPIDPECDCLACSKHSRAYMTHLFRAKEILGAMLLTWHNIAYYQRLMRTIRQAIIEDNLTETAATLRANWAKGDWSVDEWN

SEQ ID NO: 54134 - protein, 380 aa, Commensalibacter sp.
  misc_feature (1)..(380): tr|A0A318N6D5|A0A318N6D5_9PROT Queuine tRNA-ribosyltran sferase OS=Commensalibacter sp. ESL0284 OX=2070537 GN=t gt PE=3 SV=1
MTSLKFHWTQQAQDHKARAGILHTAHGDVITPTFMPVGTVGTVKAMTMDAVRSTGAGIVLGNTYHLMLRPGAELIHELGGLHKFMDWSGPILTDSGGFQVMSLGALRKLNEEGVTFRSHIDGSTYKLTPESSTDIQYLLDATITMCFDECPALPASHDTIASSMRMSMRWAERSRKRFKTRPGYAQFGIVQGGIEPDLRIESAEALNKIGFEGYAIGGLAVGEPQEQMFETLDVTVPYLPSDKPRYLMGVGTPQDMLGSVMRGIDMFDCVMPTRAGRTGRAYTSRGTLNMKNACHIHDRRPIDPECDCLACSKHSRAYIHHLFRSKEILGAMLLTWHNLAYYQRLMRTIHQAILDQNLEEKATELHNDWNKGDWKLDEWN

SEQ ID NO: 54135 - protein, 371 aa, Conchiformibius steedae
  misc_feature (1)..(371): tr|A0A3P2A9K4|A0A3P2A9K4_9NEIS Queuine tRNA-ribosyltran sferase OS=Conchiformibius steedae OX=153493 GN=tgt PE= 3 SV=1
MLKFTLHKTDGHARRGTLELNHGTVETPVFMPVGTYGSVKAMTPQNLHDINAQIILGNTYHLWLRPGLDVIERFGGLHQFIGWDKPILTDSGGFQVFSLSDMRKLTEEGCTFKSPINGDKLFLSPEISMKIQTVLNSDIVMQLDECTPGEATHQQARQSLQMSLRWAERSKTAFEDLRNPNALFGIVQGAMYEDLREESLRGLEELDFPGLAIGGLSVGEPKPEMYRMLRAVGPMLPAHKPHYLMGVGTPEDLVYGVAHGVDMFDCVMPTRNARNGWLFTRFGDIKIKNAKHKHDTRPLDESCSCYACQHFSRAYLYHLHRAGEILGAQLNTIHNLHFYQVIMAEMREAIEQGKFADWQAQFHENRAKGTD

SEQ ID NO: 54136 - protein, 396 aa, Conexibacter sp.
  misc_feature (1)..(396): tr|A0A2T4UDY9|A0A2T4UDY9_9ACTN Queuine tRNA-ribosyltran sferase OS=Conexibacter sp. Seoho-28 OX=2133960 GN=tgt PE=3 SV=1
MSALEIQHRDPGTLARAGVLRTPHGEIRTPAFVPLATKATVKSLLPHEVAELGYDMVLGNTFHLFLDPGHERIRRFRGLHEFMGWRAPIITDSGGFQVFSMGHGTVADEVKGRAPMGQERMGKILAIEEDGVAFRSYLNGETLFMGPETSMEIQGALGSDIALVFDECTPFNVTREYTQRSTERTHRWLDRCLAWHDARGPEGQLVYGISQGGVHEDLRVESTQAVASRPVDGIAIGGSLGADKPQMYEVVSWATAAIADDPRPRHLLGIGEVDDLIRGVELGIDTFDCAMPTRLGRHGVAVVNDPERRWRVDLTAGRFKDSDEPLLEGCPCPACALGYTRGYLRYLVHARELTGQRLLTLHNLAYLSRLMQRLRAAIAEGTLAATAAALRAGELP

SEQ ID NO: 54137 - protein, 408 aa, Conexibacter woesei
  misc_feature (1)..(408): tr|D3F8U2|D3F8U2_CONWI Queuine tRNA-ribosyltransferase OS=Conexibacter woesei (strain DSM 14684 / JCM 11494 / NBRC 100937 / ID131577) OX=469383 GN=tgt PE=3 SV=1
MALLDVQHRDPGSLARTGVLNLAHGQVRTPAFVPLATKGTIKGLEPREVAALGYDMVLGNTFHLFLAPGEELVRELGGLHEFMRWQAPIITDSGGFQVFSMGHGTVADEIKGRRAPGNPTERSGAILGIEEEGVRFRSYIDGGERFMAPETSMEVQAALGSDIALAFDECTPFHVTREYTERSTERTHRWLDRCIAWHEQHPTPGQVLYSISQGGVYEDLRRAATRHVAQTTAPGVAIGGSLGADKPQMYEVVSWATDELEKVAPEKPRHLLGIGEIDDLVRGVELGIDTFDCAMPTRIGRHGMALVPDPARRWRIDLTKGRMKHVNEPIMDDCPCPACSEGFTRAYLHYLFGAHELTALRLVTLHNLSFIARLMADLRAAVATGTLAEVAAAVRAGAAPGALASAAA

SEQ ID NO: 54138 - protein, 376 aa, Confluentibacter sp.
  misc_feature (1)..(376): tr|A0A2N3HJG1|A0A2N3HJG1_9FLAO Queuine tRNA-ribosyltran sferase OS=Confluentibacter sp. 3B OX=1909700 GN=tgt PE =3 SV=1
MIFELKAKDTQSKARAGVITTDHGVIETPIFMPVGTVATVKGVHQRELKNDINPDIILGNTYHLYLRPQTHVIEKAGGLHKFMNWDRNILTDSGGYQVYSLSANRKIKEEGVKFKSHIDGSYHVFTPENVMEIQRSIGADIIMAFDECTPYPCEYNYAKRSMHMTHRWLDRCINHLEKVPFKYDYSQAFFPIVQGSTYKDLRMQSAEYIANAGAVGNAIGGLSVGEPAEEMYAMTEVVCNILPEDKPRYLMGVGTPINILENIALGIDMFDCVMPTRNARNGMLFTAYGTINIKNKKWEEDFSPIDDMGITFVDTEYTKAYLRHLFMVNELLGKQIATIHNLGFYLWLVREARKHILAGDFKIWKDNMIKQMDNRL

SEQ ID NO: 54139 - protein, 376 aa, Confluentimicrobium lipolyticum
  misc_feature (1)..(376): tr|A0A238KJ65|A0A238KJ65_9RHOB Queuine tRNA-ribosyltran sferase OS=Confluentimicrobium lipolyticum OX=1524263 G N=tgt PE=3 SV=1
MAPRFNFDLQATDGKARTGVISTPRGEIRTPAFMPVGTAATVKAMMPESVAATGADILLGNTYHLMLRPTAERIDRLGGLHKFMNWDKPILTDSGGFQVMSLSDLRKMNEKGVTFRSHIDGSRHTLTPERSMEIQKLLGSDIVMCFDECTPFPAEEKVALESMRMSMRWADRSKEAFGDRPGYALFGIQQGSVYRDQREESAEKLRAIGFDGYAVGGLAVGEGQENMFSVLDYAPDMLPTDKPRYLMGVGKPDDIVGAVKRGIDMMDCVLPSRSGRTGQVFTRRGVVNIKNARHQDDPRPLDEHCTCPACSNYSRAYLHHVFRAQEIISSMLLTWHNLHYYQELMAGLRSAIAENRFDAFEKAFHAGRADGDIEQL

SEQ ID NO: 54140 - protein, 376 aa, Confluentimicrobium sp.
  misc_feature (1)..(376): tr|A0A2E3UHA1|A0A2E3UHA1_9RHOB Queuine tRNA-ribosyltran sferase OS=Confluentimicrobium sp. OX=1931204 GN=tgt PE =3 SV=1
MAERFNFHVNSRDGMARQGVISTPRGDIRTPAFMPVGTAATVKAMMPESVAATGADILLGNTYHLMLRPTAERIDRLGGLHRFMNWQKPILTDSGGFQVMSLTGLRKLTEQGVKFKSHIDGSEHMLTPERSMEIQRLLGSDIVMCFDECPALPAPEERVAESMRMSMRWAARSRDAFGDRPGHALFGIQQGGVTRDLRAESAEKLRAIGFDGYAVGGLAVGEGQEAMFGVLDYATDMLPEDKPRYLMGVGKPDDIVGAVARGIDMMDCVLPSRSGRTGQVFTRRGVVNIKNARHQDDPRPLDEACACPACRGYSRAYLHHVFRAQEIISSMLLTWHNLHYYQELMQGIREAIAAGTFGAFQADFHAQRAEGDIAPL

SEQ ID NO: 54141 - protein, 376 aa, Confluentimicrobium sp.
  misc_feature (1)..(376): tr|A0A0N7FWQ6|A0A0N7FWQ6_9RHOB Queuine tRNA-ribosyltran sferase OS=Confluentimicrobium sp. EMB200-NS6 OX=160996 6 GN=tgt PE=3 SV=1
MAERFNFHVNSRDGMARQGVISTPRGDIRTPAFMPVGTAATVKAMMPESVAATGADILLGNTYHLMLRPTAERIDRLGGLHRFMNWQKPILTDSGGFQVMSLTGLRKLTEQGVKFKSHIDGSEHMLTPERSMEIQRLLGSDIVMCFDECPALPAPEERVAESMRMSMRWAARSRDAFGDRPGHALFGIQQGGVTRDLRAESAEKLRAIGFDGYAVGGLAVGEGQEAMFGVLDYATDMLPEDKPRYLMGVGKPDDIVGAVARGIDMMDCVLPSRSGRTGQVFTRRGVVNIKNARHQDDPRPLDETCACPACRGYSRAYLHHVFRAQEIISSMLLTWHNLHYYQELMQGIREAIAAGRFEAFQADFHAQRAEGDIAPL

SEQ ID NO: 54142 - protein, 366 aa, Congregibacter litoralis
  misc_feature (1)..(366): tr|A4ADH0|A4ADH0_9GAMM Queuine tRNA-ribosyltransferase OS=Congregibacter litoralis KT71 OX=314285 GN=tgt PE=3 SV=1
MKFERISSDGVARRSRLHFDRGVVETPAFMPVGTYGTVKGMLPRDVEALGAQIILGNTFHLWLRPGTDVISAHGDLHDFMQWQGPILTDSGGFQVFSLGEMRKISEEGVSFRSPVDGDKVFLDPEKSMEIQRALGSDIVMIFDECTPYPATREEAETSMELSLRWAKRSRAAHGDSKAALFGIVQGGMYGDLRARSLEGLVEIGFDGYAIGGLSVGEPKDEMLSVLETLQPLMPEEYPRYLMGVGTPADLLEGVRRGIDMFDCVMPTRNARNGHLFTSSGTIKIRNARHRHSTAPLDENCGCYTCANFSRAYLHHLDKCNEILGSQLNTLHNLHYYQDHMRGIRDAIEEKRLDAFAEDYYRSQSMG

SEQ ID NO: 54143 - protein, 384 aa, Conservatibacter flavescens
  misc_feature (1)..(384): tr|A0A2M8S2R4|A0A2M8S2R4_9PAST Queuine tRNA-ribosyltran sferase OS=Conservatibacter flavescens OX=28161 GN=tgt PE=3 SV=1
MKYELHKTNGRARRGRLIFERPQGTFTVETPAFMPVGTYGTVKGMTPEEVRATGAEILLGNTFHLWLRPGQEVMRKHGDLHDFMQWHRPILTDSGGFQVFSLGKLRKITEEGVKFQNPINGEKIFLSPEKSMEIQYDLGSDVVMIFDECTPYPATFDYAKNSMEMSLRWAKRSRQRFDELGNKNALFGIIQGGTYEELRKISVEGLVEIGFDGYAVGGLAVGEPKEDMHRILEYVTPKIPMDKPRYLMGVGKPEDLVEGVRRGIDMFDCVMPTRNARNGHLFVSNGIVKIRNAKYRDDTTPLDPECDCYTCKHYTKSYLYHLDKCGEILGARLNTIHNLRYYQRLMEQIRAAIEQERFESFVQEFYAKIGKPVPPIDSYHPFEG

SEQ ID NO: 54144 - protein, 373 aa, Consotaella salsifontis
  misc_feature (1)..(373): tr|A0A1T4LUM9|A0A1T4LUM9_9RHIZ Queuine tRNA-ribosyltran sferase OS=Consotaella salsifontis OX=1365950 GN=tgt PE =3 SV=1
MTETFQFRLLAEDGRARRGEISMPRGTIRTPAFMPVGTAGTVKAMYPDQVRELGADIILGNTYHLMLRPGAERVARLGGLHEFARWPHPILTDSGGFQIMSLAALRKLKESGVTFRSHVDGQVHELSPERSIEIQGLLDSDIQMQLDECIRLPAEREEIERAMELSLRWAERSAAAFGEQPGKAMFGIVQGGDQPDLRIRSAERLSAMNLKGYAVGGLAVGEPQSVMLEMLDVTLPAMPHAKPRYLMGVGTPDDLLESVRRGIDMFDCVMPTRAGRHGLAYTRFGKLNLKNARHAEDSRPLDEQSDCSAARDYSRAYLHHLVKANEILGAMLLTWVNLSYYQFLMQGIRDAIEAGRYDDYVASVKEGWARGEA

SEQ ID NO: 54145 - protein, 405 aa, Convivina intestini
  misc_feature (1)..(405): tr|A0A2U1D5X3|A0A2U1D5X3_9LACT Queuine tRNA-ribosyltran sferase OS=Convivina intestini OX=1505726 GN=tgt PE=3 S V=1
MTNQKPAVWYEHLHTEKHTGARRGRIHTPHGVFETPMFMPVGTQGAVKGVDARTLKEIGSQFILSNTYHLWVRPGDELIAEAGGLHKYMGWDQAILTDSGGFQVFSLSDARKLKEEGVTFQNHVNGDRMFLSPEVAMRIQNNLGSDVMMQLDEAIPYFEPYDYVKESMQRSLRWADRAQQYHKKTDSQALFGIVQGAGFRALRTESAQELVKMDLPGYAVGGLSVGESKTEMNRVLDFTMPLLPEDKPRYLMGVAAPDSLIDSVMRGIDMFDCVLPTRIGRKGTLMTRHGRVVIRNSKYKNDFTPIDADLSYYSDNAIRTNQFGNLAQYDIPGYNPFQTLTRSYLHHLFNAHELLGAQIASAHNLRFLLQFMEDMRRAIENDELLEFREQVMEEYGYNKPNARLF

SEQ ID NO: 54146 - protein, 377 aa, Coprobacillus cateniformis
  misc_feature (1)..(377): tr|E7GAM2|E7GAM2_9FIRM Queuine tRNA-ribosyltransferase OS=Coprobacillus cateniformis OX=100884 GN=tgt PE=3 SV= 1
MEGFWYELKHVCKQSGARYGILHTPHGDVETPMFMPVGTLATVKGISPEQLKEMNSQVILSNTYHLWLRPGEDVVKQAGGLHKFMNYDGPILTDSGGFQVFSLGKTRKIEEEGVTFKSIVDGKKLFLSPEKAIQIQNDLGADIIMSFDECAPYPCTHDYMKNSVERTLRWAKRGKDAHQRDDQALFGIVQGGEFEDLREFSAKELVKMDFPGYSIGGTSVGEPKDVMYKMIDDAIQWLPVDKPRYLMGVGNPIDLIEGAMRGIDMFDCVLPTRVARHGALMTHYGRMNINNEKFKYDFTPIDDKCHCYTCRNYTRAYLRHLHKCDEIFGKSLLSIHNVAFLLQLSEDIRNAIQEDRLLDFKEEFLDHYGRDVYERAF

SEQ ID NO: 54147 - protein, 377 aa, Coprobacillus sp.
  misc_feature (1)..(377): tr|R5Q3S3|R5Q3S3_9FIRM Queuine tRNA-ribosyltransferase OS=Coprobacillus sp. CAG:235 OX=1262854 GN=tgt PE=3 SV= 1
MKDFWYELKHVCKQSGARYGILHTPHGDVETPMFMPVGTLATVKGIAPEMLKEMGSQVILSNTYHLWLRPGEDIVAKAGGLHKFMNYDGPMLTDSGGFQVFSLGKTRKIKEEGVYFKSIIDGKSLFLSPEKAIDIQNKLGADMIMSLDECAPYPATYDYMKHSVERTIRWAKRGKEAHHNEKQALFGIVQGGEYPDLREKCAKALVEMDFPGYSIGGTSVGEPKNVMYKMVEDAIQWLPEDKPRYLMGVGNPIDLIEAAIRGIDMYDCVLPTRVARHGALMTHHGRMNINNEKFKEDFTPIDPECDCYTCRNYTRAYLRHLHKSDELFGKTLLSIHNVRFLLQLSEDIRKAIQEDRLLDFKEEFLDKYGRDVYKRAF

SEQ ID NO: 54148 - protein, 377 aa, Coprobacillus sp.
  misc_feature (1)..(377): tr|A0A1Q6N131|A0A1Q6N131_9FIRM Queuine tRNA-ribosyltran sferase OS=Coprobacillus sp. CAG:235_29_27 OX=1896995 G N=tgt PE=3 SV=1
MKDFWYELKHVCKQSGARYGILHTPHGDVETPMFMPVGTLATVKGIAPEMLKEMGSQVILSNTYHLWLRPGEDIVAKAGGLHKFMNYDGPMLTDSGGFQVFSLGKTRKIKEEGVYFKSIIDGKSLFLSPEKAIDIQNKLGADMIMSLDECAPYPATYDYMKHSVERTIRWAKRGKEAHHNEKQALFGIVQGGEYPDLREKCAKALVEMDFPGYSIGGTSVGEPKDVMYKMVEDAVQWLPEDKPRYLMGVGNPIDLIEAAIRGIDMYDCVLPTRVARHGALMTHHGRMNINNEKFKEDFTPIDPECDCYTCRNYTRAYLRHLHKSDELFGKTLLSIHNVRFLLQLSEDIRKAIQEDRLLDFKEEFLDKYGRDVYKRAF

SEQ ID NO: 54149 - protein, 376 aa, Coprobacter fastidiosus
  misc_feature (1)..(376): tr|A0A495WKG7|A0A495WKG7_9BACT Queuine tRNA-ribosyltran sferase OS=Coprobacter fastidiosus NSB1 OX=1349822 GN=t gt PE=3 SV=1
MDFELQYTDPCSRARAGKITTDHGCINTPIFMPVGTVASVKAVHLHELKEDIKAQIILGNTYHLYLRPGLDTLEKAGGLHKFNGWDRPILTDSGGFQVFSLSENRKLTEEGAHFRSHIDGSKHLFTPEKVVDIQRIIGSDIMMALDECPPGQSDYSYAKKSLQLTQRWLERGWKHFCETEGKYGYKQTFFPIVQGCVYPDLRKDAAKHVAQLEADGNAIGGLAVGEPTEKMYEMIDVVNEILPTDKPRYLMGVGTPANILEGIERGIDMFDCVMPTRNGRNGMLFTANGIMNMRNKKWADDFSPIDPDGTSYVDHQYSKAYLRHLFISNEILAMQIASVHNLAFYVWLTQEARKHILNGTFKTWKDEMIIRVTHRL

SEQ ID NO: 54150 - protein, 376 aa, Coprobacter fastidiosus
  misc_feature (1)..(376): tr|A0A354M525|A0A354M525_9BACT Queuine tRNA-ribosyltran sferase OS=Coprobacter fastidiosus OX=1099853 GN=tgt PE =3 SV=1
MDFELQYTDPCSRARAGKITTDHGCINTPIFMPVGTVASVKAVHLHELKEDIKAQIILGNTYHLYLRPGLDTLEKAGGLHKFNGWDRPILTDSGGFQVFSLSENRKLTEEGAHFRSHIDGSKHLFTPEKVVDIQRIIGSDIMMALDECPPGQSDYSYAKKSLQLTQRWLERGWKHFCETEGKYGYKQTFFPIVQGCVYPDLRKDAAKHVAQLGADGNAIGGLAVGEPTEKMYEMIDVVNEILPTDKPRYLMGVGTPANILEGIERGVDMFDCVMPTRNGRNGMLFTANGIMNMRNKKWADDFSPIDPDGTSYVDHQYSKAYLRHLFISNEILAMQIASVHNLAFYVWLTQEARKHILNGTFKTWKDEMIIRVTHRL

SEQ ID NO: 54151 - protein, 376 aa, Coprobacter secundus
  misc_feature (1)..(376): tr|A0A0B2JG13|A0A0B2JG13_9BACT Queuine tRNA-ribosyltran sferase OS=Coprobacter secundus OX=1501392 GN=tgt PE=3 SV=1
MDFTLEYTDANSDARAGTITTDHGIITTPIFMPVGTVASVKAVHLHELKDDIKAQIILGNTYHLYLRPGLDILEKAGGLHKFNGWDRPILTDSGGFQVFSLSDNRKLTEEGAYFRSHIDGSKHLFTPENVVDTQRIIGSDIMMALDECTPGQADYQYAKKSLALTQRWLERGWRHFCETEGLYGYRQTFFPIVQGCVYPDLRRDAAMHVAQLGADGNAIGGLAVGEPTEKMYEMIEVVNEILPKDKPRYLMGVGTPANILEGIERGVDMFDCVMPTRNGRNGMLFTRNGIMNMRNKKWADDFSPIDEDGTSYVDRQYSKAYLRHLFISDEILAMQIASIHNLAFYVWLTQEARRQIISGTFKSWKKDMVQRVTHRL

SEQ ID NO: 54152 - protein, 376 aa, Coprobacter sp.
  misc_feature (1)..(376): tr|A0A316SLN5|A0A316SLN5_9BACT Queuine tRNA-ribosyltran sferase OS=Coprobacter sp. OX=1941478 GN=tgt PE=3 SV=1
MDFELQHTDTNSCARAGKITTDHGTIDTPIFMPVGTLGSVKAVHIHELKEDIKAQIILGNTYHLYLRPGLEILKQAGGLHKFNGWDRPILTDSGGFQVFSLSGIRKLKEEGVHFRSHIDGSKHLFTPENVVDTERIIGADIMMALDECTPGDADYSYAKKSLALTQRWLERGWKHYLETEGLYGYKQAYFPIVQGCVYPDLRIEAAKHVAALGADGNAIGGLAVGEPTEKMYEMIEIVNDILPKDKPRYLMGVGTPANILEGIERGVDMFDCVMPTRNGRNGMLFTSNGIMNMRNKKWADDFSPIDENGTSYVDKVYSKAYLRHLFISDEILAMQIASIHNLAFYVWLSQEARRHILTGTFKSWKDEMLQRVTTRL

SEQ ID NO: 54153 - protein, 377 aa, Coprococcus catus
  misc_feature (1)..(377): tr|D4J9W6|D4J9W6_9FIRM Queuine tRNA-ribosyltransferase OS=Coprococcus catus GD/7 OX=717962 GN=tgt PE=3 SV=1
MYQIVATDGRAKSAHMETVHGVIETPVFMNVGTIAAIKGAVATTDLKEIGTQVELSNTYHLHVRPGDQIVKQLGGLHKFMNWDRPILTDSGGFQVFSLKGLRKIKEEGVYFQSHIDGHKIFMGPEESMQIQSNLGSTIAMAFDECAPYPATREYMINSVNRTTRWLERCKKKMQELNDAEGTVNPHQLLFGINQGGTYADIRVNHARTIRDMDLDGYAIGGLAVGETHEEMYRILDEVVPELPQNKPTYLMGVGTPANILEGVDRGIDFFDCVYPSRNGRHGHVYTNHGKLNLFNAKFELDDRPIEEGCQCPACRNYTRAYIRHLLKAKEMLGMRLCVLHNLYFYNHLMEEIRLAIREHRYSEFKKSKLEGFLSKED

SEQ ID NO: 54154 - protein, 377 aa, Coprococcus catus; identical to SEQ ID NO: 54153
  misc_feature (1)..(377): tr|A0A3E2TQ84|A0A3E2TQ84_9FIRM Queuine tRNA-ribosyltran sferase OS=Coprococcus catus OX=116085 GN=tgt PE=3 SV=1

SEQ ID NO: 54155 - protein, 377 aa, Coprococcus comes
  misc_feature (1)..(377): tr|A0A3E4GSW2|A0A3E4GSW2_9FIRM Queuine tRNA-ribosyltran sferase OS=Coprococcus comes OX=410072 GN=tgt PE=3 SV=1
MYELIKRDGRAKRGRFHTVHGVIETPVFMNVGTIAAIKGAVSTADLEEIGTQVELSNTYHLHVRPGDQVVKKLGGLHKFMTWDKPILTDSGGFQVFSLAGLRKIKEEGVYFNSHLDGRKIFMGPEESMQIQSNLASTIAMAFDECPSSVAERKYMQASVERTTRWLARCKEEMARLNSLDDTINKHQMLFGINQGGVYEDIRIEHAQQIAEMDLDGYAVGGLAVGETHEEMYRILDAVVPCLPVAKPTYLMGVGTPANILEAVDRGVDFFDCVYPSRNGRHGHVYTKHGKLNLFNAKFELDERPIEEGCQCPACRRYSRAYIRHLLKAKEMLGMRLCVLHNLYYYNHLMEDIRGAIEEGRYAQFKKETLAKMEEKED

SEQ ID NO: 54156 - protein, 377 aa, Coprococcus comes
  misc_feature (1)..(377): tr|A0A173XE40|A0A173XE40_9FIRM Queuine tRNA-ribosyltran sferase OS=Coprococcus comes OX=410072 GN=tgt PE=3 SV=1
MYELIKRDGRAKRGRFHTVHGVIETPVFMNVGTIAAIKGAVSTADLEEIGTQVELSNTYHLHVRPGDQVVKKLGGLHKFMAWDKPILTDSGGFQVFSLAGLRKIKEEGVYFNSHIDGRKIFMGPEESMQIQSNLASTIAMAFDECPSSVAERKYMQASVERTTRWLARCKEEMARLNSLDDTINKHQMLFGINQGGVYEDIRIEHAQQIAEMDLDGYAVGGLAVGETHEEMYRILDAVVPRLPVARPTYLMGVGTPANILEAVDRGVDFFDCVYPSRNGRHGHVYTKHGKLNLFNAKFELDERPIEEGCQCPACRRYSRAYIRHLLKAKEMLGMRLCVLHNLYYYNHLMEDIREAIEEGRYARFKKETLAKMEEKED

SEQ ID NO: 54157 - protein, 377 aa, Coprococcus eutactus
  misc_feature (1)..(377): tr|A0A412IRH6|A0A412IRH6_9FIRM Queuine tRNA-ribosyltran sferase OS=Coprococcus eutactus OX=33043 GN=tgt PE=3 SV =1
MYKILCKDGRAKRAEFQTVHGTVQTPLFMNVGTAAAIKGAVATTDLKDIGCQIELSNTYHLHVRPGDKIVKQMGGLHKFMYWDRPILTDSGGFQVFSLAGLRKIKEEGVTFNSHIDGRKIFMGPEESMQIQSNLASTIAMAFDECAPALADRQYVENSVARTARWLVRCKNEMERLNSLPDTINKNQLLFGINQGAIYDDIRIDHAKRISELDLPGYAIGGLAVGESAEQMYHILDVTVPHLPEDRPTYLMGVGTPANILEAVDRGVDFFDCVYPSRNGRHAHVYTKHGKLNLKNARFETDDRPIEEGCGCPACQHYSRAYIRHLLKANEMLGMRFCVLHNLYFYNNMMKEIREAIEEGRYQSYKKSMLESLAGGEQ

SEQ ID NO: 54158 - protein, 377 aa, Coprococcus eutactus
  misc_feature (1)..(377): tr|A8SXR3|A8SXR3_9FIRM Queuine tRNA-ribosyltransferase OS=Coprococcus eutactus ATCC 27759 OX=411474 GN=tgt PE= 3 SV=1
MYKILCKDGRAKRAEFQTVHGTVQTPLFMNVGTAAAIKGAVATTDLKDIGCQIELSNTYHLHVRPGDKIVKQMGGLHKFMYWDRPILTDSGGFQVFSLAGLRKIKEEGVTFNSHVDGRKIFMGPEESMQIQSNLASTIAMAFDECAPALADRQYVENSVARTARWLVRCKNEMERLNSLPDTINKNQLLFGINQGAIYDDIRIDHAKRISELDLPGYAIGGLAVGESAEQMYHILDVTVPHLPEDRPTYLMGVGTPANILEAVDRGVDFFDCVYPSRNGRHAHVYTKHGKLNLKNARFETDDRPIEEGCGCPACQHYSRAYIRHLLKANEMLGMRFCVLHNLYFYNNMMKEIREAIEEGRYQSYKKSMLESLAGGEQ

SEQ ID NO: 54159 - protein, 377 aa, Coprococcus sp.
  misc_feature (1)..(377): tr|S2ZQ23|S2ZQ23_9FIRM Queuine tRNA-ribosyltransferase OS=Coprococcus sp. HPP0048 OX=1078091 GN=tgt PE=3 SV=1
MYQLIKRDGLAKRGRLKTVHGVIETPVFMNVGTAAAIKGAVSTEDLQGIKTQVELSNTYHLHVRPGDEVVKKLGGLHKFMVWDKPILTDSGGFQVFSLAGLRKIKEEGVYFHSHIDGKKIFMGPEESMQIQSNLASTIAMAFDECPSSVADRNYIQHSVDRTVRWLERCKKEMARLNSLEDTINKQQMLFGINQGGIYEDIRIEHAKRIAELDLDGYALGGLAVGESHEDMYRIIDATVPYLPQDKPTYLMGVGTPANILEAVDRGVDFFDCVYPSRNGRHGHVYTNHGKMNLFNAKYELDDRPIEEGCQCPACRKYSRAYIRHLLKAKEMLGMRLCVLHNLYFYNNMMEEIRTAIEEGRYKEYKKQKLEGFTRGQI

SEQ ID NO: 54160 - protein, 377 aa, Coprococcus sp.
  misc_feature (1)..(377): tr|A0A1Q6MJP9|A0A1Q6MJP9_9FIRM Queuine tRNA-ribosyltran sferase OS=Coprococcus sp. CAG:131_42_139 OX=1896997 GN =tgt PE=3 SV=1
MYKILCKDGRAKRAEFQTVHGTVQTPLFMNVGTAAAIKGAVATTDLKDIGCQIELSNTYHLHVRPGDKIVKQMGGLHKFMYWDRPILTDSGGFQVFSLAGLRKIKEEGVTFNSHVDGRKIFMGPEESMQIQSNLASTIAMAFDECAPALADRQYVENSVARTARWLVRCKNEMERLNSLPDTINKNQLLFGINQGAIYEDIRIDHAKRISELDLPGYAIGGLAVGETAEQMYHILDVTVPYLPEDRPTYLMGVGTPANILEAVDRGVDFFDCVYPSRNGRHAHVYTKHGKMNLKNARFETDDRPIEEGCGCPACQHYSRAYIRHLLKANEMLGMRFCVLHNLYFYNNMMKDIREAIEEGRYQSYKKSMLESLAGGEE

SEQ ID NO: 54161 - protein, 364 aa, Coprothermobacter proteolyticus
  misc_feature (1)..(364): tr|B5Y8Y3|B5Y8Y3_COPPD Queuine tRNA-ribosyltransferase OS=Coprothermobacter proteolyticus (strain ATCC 35245 / DSM 5265 / BT) OX=309798 GN=tgt PE=3 SV=1
MFEIFKETDKGRTGQLSLNHGIVTTPVYMPVATRGAIRVAPLNELKQLGYSLILNNTYHLVLRPGLEVLEKIGGTHRFMGWDKNVLTDSGGFQIYSLKHSMKIRNNGLEFRSPIDGTKFFFTPEFVARAQNIIGSDIAMQLDVCLGYPASESEAKKAMDVTLRWGERFLSVEPLQGQKRFGIVQGGFSKRLRRESAALTASLPFDGFAIGGLSVGEPEELMYELTYEVLDALPKQAPKYMMGVGDPVQIVELASMGIDMFDCVQPTRHARHGWVYSWQDGPQVIVRGKYKFDFRPLEYQPQYTYGYLHHLFKAGEPLGLFVATVENLSYMADLTRKLRAAIEGGSVDSLKEEIRYQWRKRIIGE

SEQ ID NO: 54162 - protein, 364 aa, Coprothermobacter sp.
  misc_feature (1)..(364): tr|A0A348VDJ2|A0A348VDJ2_9BACT Queuine tRNA-ribosyltran sferase OS=Coprothermobacter sp. OX=55509 GN=DCR68_0316 5 PE=3 SV=1
MFEILKETDKGRTGQLSLNHGVVTTPVYMPVATRGAIRVAPLNELEQLGYGLILNNTYHLVLRPGLEVLERIGGTHRFMGWDKNVLTDSGGFQIYSLKHSMKIRNNGLEFRSPIDGTKFFFTPEFVAQAQNIIGSDIAMQLDVCLGYPARESEAKKAMDVTIRWGERFLSVEPLQGQKRFGIVQGGFSKRLRRESAVLTASLPFDGFAIGGLSVGEPEELMYELTYEVLDALPKQAPKYMMGVGDPVQIVELACMGIDMFDCVQPTRHARHGWVYSWQDGPQVIVRGKHKFDFRPLEYQPQYTYGYLHHLFKAGEPLGLFIATVENLSYMADLMQKLRAAIEGGSVDSLKKEIRYQWRKRIIGE

SEQ ID NO: 54163 - protein, 372 aa, Coraliomargarita akajimensis
  misc_feature (1)..(372): tr|D5EJJ4|D5EJJ4_CORAD Queuine tRNA-ribosyltransferase OS=Coraliomargarita akajimensis (strain DSM 45221 / IAM 15411 / JCM 23193 / KCTC 12865 / 04OKA010-24) OX=58335 5 GN=tgt PE=3 SV=1
MYTLLKECDGARRGVFKTRHGEIQTPIFMPVGTQATVKGMTPAQIDEVGAQIILGNTYHLNIRPGSKLVEEMGGLHQFMNWNKPILTDSGGFQVFSLSKLRKITEAGIEFRSHLDGRKLFLDPKGCYQIQAELGTDIAMVLDECPPFPCDRDACESAVSRTVRWAGEFLDHAKSEGFIERGHHVFGIIQGSTYDDLRQHCGEQLAAMDFPGYAVGGVSVGEPEEEMLKQVAACAPVMPKDKPRYVMGVGTPPQLLRMITLGMDMFDCVMPTRLARHANAFTPYGTINLKNERFKYDNQPIMDADNYTCRNFSRAYLRHLIMAKELLASTLLSIHNVHFFLDLMAQARSHIEAGDYLKWSQDWIERYNSADCS

SEQ ID NO: 54164 - protein, 344 aa, Coraliomargarita sp.
  misc_feature (1)..(344): tr|R7L7W3|R7L7W3_9BACT Queuine tRNA-ribosyltransferase OS=Coraliomargarita sp. CAG:312 OX=1262865 GN=tgt PE=3 SV=1
MPVGTQATVKAMTPLQVEETGAQIILANTYHLNIRPTSELIAGFGGLHGFMNWEKPILTDSGGFQAFSLSKLRKITEDGIAFNSHLDGAKKFLSPESCMRIQKNLGSDICMVLDECIPYPCEKKACLKSVERTLRWAKRCLEEYRSIGLPEAQRLAFGIVQGGCYEDIRQYCAEKLSEMDFPGYAIGGVSVGEPEEQMLFQVDVSAQKLPLQKPRYVMGVGTPPQILKMIALGADMFDCVMPTRLARHACAFTLDGEINLKNAKYALDQSPLDESIPSYASKFSRAYIRHLIKCNEMLACTLLSIHNITFFQVLTRQAREHIESGDFEEWSDAWIARYNANNAN

SEQ ID NO: 54165 - protein, 370 aa, Coraliomargarita sp.
  misc_feature (1)..(370): tr|A0A2E0NGA1|A0A2E0NGA1_9BACT Queuine tRNA-ribosyltran sferase OS=Coraliomargarita sp. OX=2024828 GN=tgt PE=3 SV=1
MFKLLKECGSARRGVLTTRHGEIQTPIFMPVGTQATVKAMTPSQVEDVGAQIILGNTYHLNLRPGSKLVEAMGGLHKFMNWEKPILTDSGGFQVFSLAQLRKVKEEGIEFRSHLDGKKLFLGPKECYQIQAELGTDIAMVLDECPPFPCERTACESAVQRTIRWAQEFKNHADNDGFIERGHHVFGIIQGSIYDDLRIQCAEALADLNFPGYAVGGVSVGEPEEEMIRQVAACAPVMPREKPRYVMGVGTPPQLLQMIGLGMDMFDCVMPTRLARHANVFTVDGLINLKNERYKHDDTPIMNADNYTCRNFSRAYLRHLVQAKELLASTLLSIHNLHFFLDLMSQARAHIEAGDYDAWSKAWIERFTFKD

SEQ ID NO: 54166 - protein, 374 aa, Corallincola sp.
  misc_feature (1)..(374): tr|A0A368NG84|A0A368NG84_9GAMM Queuine tRNA-ribosyltran sferase OS=Corallincola sp. C4 OX=2282215 GN=tgt PE=3 S V=1
MQYELLGTDGRARRGRLVFERGTVETPAFMPVGTYGTVKGMTPEEVADSGAQILLGNTFHLWLRPGVEIMEAHGDLHDFMQWQGPILTDSGGFQVFSLGDIRKITEEGVHFRHPINGDKIFLDPETSMDVQYSLGSDIVMIFDECTPYPATHEQAKTSMELSLRWAARSRNRFDEANNPNALFGIIQGGIYEDLRDQSLEGLMAVGFDGYAVGGLAVGEPKEEMHKVLEYIVPKIPEDKPRYLMGVGKPEDLVEGVRRGIDMFDCVMPTRNARNGHLFVDDGVIKIRNAVHKTDTGPLDPTCDCYTCKNYSRAYLHHLDRCNEILGARLNTIHNLRFYQRVMEGLRGAIEQGKLDDFVTEFYAKRSMPVPELKD

SEQ ID NO: 54167 - protein, 398 aa, Corallococcus coralloides
  misc_feature (1)..(398): tr|A0A410RQL8|A0A410RQL8_CORCK Queuine tRNA-ribosyltran sferase OS=Corallococcus coralloides OX=184914 GN=tgt P E=3 SV=1
MVDEQGREKGEKGDTRVPPGLVRFELLHEDQSGTKARRGRLNTPHGPIETPIFMPVGTVGSVKGVGPDDLKTLDAQIILGNTYHLMLRPTDALVGEMGGLHRFISWDRPMLTDSGGFQVFSLSEKRKITEEGAAFQSHLDGSRHFLTPERSIEIQETLGADVIMAFDECPPSTEDRAYLEKSLARTTRWLHRCVKAWGRERSSLFGIVQGGLHDDLRKRHAEEICSVDLPGYALGGYSVGEAPEAMHAGVAYSAPLLPRDKPRYLMGVGTPLDLVTCVEQGVDMFDCVLPTRCARNGLLFTSEGKLVIRNAAYAKDPRPVDPACSCYTCRTFSRSYLRHLFAAGEILAMRLNTLHNLHYFLDLMAQVRRAIAEDRFAAFARDFRARAVAQEAERKGGR

SEQ ID NO: 54168 - protein, 398 aa, Corallococcus coralloides
  misc_feature (1)..(398): tr|H8MU08|H8MU08_CORCM Queuine tRNA-ribosyltransferase OS=Corallococcus coralloides (strain ATCC 25202 / DSM 2 259 / NBRC 100086 / M2) OX=1144275 GN=tgt PE=3 SV=1
MVDEQGREKGEKGDTRVPPGLVRFELLHEDQSGTKARRGRLNTPHGPIETPIFMPVGTVGSVKGVGPDDLKTLDAQIILGNTYHLMLRPTDALVGEMGGLHRFISWDRPMLTDSGGFQVFSLSEKRKITEEGAAFQSHLDGSRHFLSPERSIEIQETLGADVIMAFDECPPSTEDRAYLEKSLARTTRWLHRCVKAWSRERSSLFGIVQGGLHDDLRKRHAEEVCAVDLPGYALGGYSVGEAPEAMHAGVAYSAPLLPRDKPRYLMGVGTPLDLVTCVEHGVDMFDCVLPTRCARNGLLFTSEGKLVIRNAAYAKDPRPVDPACSCYTCRTFSRSYLRHLFAAGEILAMRLNTLHNLHYFLDLMAQVRRAIAEDRFAAFARDFRAKAVAQEAERKGGR

SEQ ID NO: 54169 - protein, 389 aa, Corallococcus exiguus
  misc_feature (1)..(389): tr|A0A5C5DLR9|A0A5C5DLR9_9DELT Queuine tRNA-ribosyltran sferase OS=Corallococcus exiguus OX=83462 GN=tgt PE=3 S V=1
MAVRFELLNTDPTGARTGILHTRKGSFPTPMFMPVATHAGFRHLAMEEVKETGAKVLLANTYHLMLRPGPEVFERFGGIHPFMGWDGAVLTDSGGFQIFSLPEDRLITEKGAHFRSFYDNSRRLLSPESSIAMQQAINSEIMMVLDVCIDSRTDEAGTREAMERTHRWAVRSLAAKESKPTGQALFGIVQGGVHPALRDESAAFLTQLPFDGFAIGGLAVGETKVERDTMTERATASLPQDKPRYLMGVGTPTDLLEAVLRGVDMFDCIIPTKMAQQGYAYTFQGLVRITRTVYQLDDGPLDPECDCYVCKRYTRGYLQHLMRGKHHLGSRFLSVHNVRHYQRLMERVREGILRNGYAQTYRELKAAIATPKDLKDEALASAATLKDVG

SEQ ID NO: 54170 - protein, 395 aa, Corallococcus exiguus
  misc_feature (1)..(395): tr|A0A5C5DRP4|A0A5C5DRP4_9DELT Queuine tRNA-ribosyltran sferase OS=Corallococcus exiguus OX=83462 GN=tgt PE=3 S V=1
MVDEQRKEKGDTRVPPGLVRFELLHEDASGTKARRGRLNTPHGPIETPIFMPVGTVGSVKGVGPDDLKTLDAQIILGNTYHLMLRPGEPLVGEMGGLHRFISWDRPMLTDSGGFQVFSLSEKRKITEEGAAFQSHLDGSRHFLSPERSIEIQETLGADVIMAFDECPPSTEDRAYLEKSLARTTRWLHRCVKAWGRERSSLFGIVQGGLHEDLRKRHAEEICAVDLPGYALGGYSVGEAPEAMHAGVAYSAPLLPRDKPRYLMGVGTPLDLVTCVEHGVDMFDCVLPTRCARNGLLFTSEGKLVIRNAAYAKDPRPVDPACSCYTCRTFSRSYLRHLFAAGEILAMRLNTLHNLHYFLDLMAQVRRAIAEDRFATFARDFRAKAVAQEAERKGGR

SEQ ID NO: 54171 - protein, 398 aa, Corallococcus sp.
  misc_feature (1)..(398): tr|A0A3A8K5S4|A0A3A8K5S4_9DELT Queuine tRNA-ribosyltran sferase OS=Corallococcus sp. CA053C OX=2316732 GN=tgt P E=3 SV=1
MVDEQRDEQRKEKGDTRVPPGLVRFELLHEDTGTKARRGRLHTPHGPIETPIFMPVGTVGSVKGVGPDDLFNLDAQIILGNTYHLMLRPGEPLISEMGGLHRFISWDRPMLTDSGGFQVFSLSEKRKITEEGAAFQSHLDGSRHSLSPERSIAIQETLGADVIMAFDECPPSTEDRPYLEKSLARTTRWLHRCVKAWSRERSSLFGIVQGGLHEDLRKRHAEEICAVDLPGYALGGYSVGEAPEAMHAGVAYSAPLLPRDRPRYLMGVGTPLDLVTCVEQGVDMFDCVLPTRCARNGLLFTSEGKLVIRNAAYARDPRPVDPACSCYTCRTFSRAYLRHLFAAGEILAMRLNTLHNLHYFLTLMADVRRAIAEDRFAAFARDFRARSHAQEAERTRGR

SEQ ID NO: 54172 - protein, 389 aa, Corallococcus sp.
  misc_feature (1)..(389): tr|A0A3A8LEP6|A0A3A8LEP6_9DELT Queuine tRNA-ribosyltran sferase OS=Corallococcus sp. CA053C OX=2316732 GN=tgt P E=3 SV=1
MAVRFELLNTDPTGARTGILHTRKGSFPTPMFMPVATHAGFRHLGMEEVKETGAKVLLANTYHLMLRPGAEVFERFGGIHPFMGWDGAVLTDSGGFQIFSLPEDRLITEKGAHFRSFYDNSRQLLSPESSIAMQQAINSEIMMVLDVCIDSRTDEAGTREAMERTHRWAVRSLAAKEARNTGQALFGIVQGGVHPALRDASAEFLTQLPFDGFAIGGLAVGETKVERDTMTERATAALPQDKPRYLMGVGTPTDLLEAVLRGVDMFDCIIPTKMAQQGYAYTFQGLVRITRTAYRLEDGPLDPECDCYVCKRYTRGYLQHLMRGKHHLGSRFLSVHNVRHYQKLMERIREGILRNGYAQTYRELKAAVATPKDLKDEAAATAVTLKDVG

SEQ ID NO: 54173 - protein, 382 aa, Coriobacteriaceae bacterium
  misc_feature (1)..(382): tr|A0A0A8B3U0|A0A0A8B3U0_9ACTN Queuine tRNA-ribosyltran sferase OS=Coriobacteriaceae bacterium 68-1-3 OX=153142 9 GN=tgt PE=3 SV=1
MTLFEYRIEGRSGHARAGSYETAHGTFQTPMFMPVGTHATVKGVTTDQLHQIKSQVVLANTYHLYMRPGVDLVEEAGGIQKFMNYDGPMLTDSGGFQLFSLDHMMKVDRDGVSFQARDYDGSRHRWTPESNMDIQQRIGADICMQLDQCIGYPAKKEDVRASTKLSWEWAKRCCDAHTRPDQALFAIVQGGMHLDLRLESVEELVRIDSESRAAGGRGFQGYGIGGYSVGEPHDVMFETLGAVCQAMPEGKLRYLMGVGNPTTLVRAVREGVDMFDCVLPTRTGRMGTAFSSEGRMNLRNAKFARDFSPLDRSCTCPVCRNHTRAYIRHLVKQKEMLGGILLSIHNLHFLIDLMARAREAILADAYEDFYREWMASPGADDY

SEQ ID NO: 54174 - protein, 371 aa, Coriobacteriaceae bacterium
  misc_feature (1)..(371): tr|A0A1V1RG09|A0A1V1RG09_9ACTN Queuine tRNA-ribosyltran sferase OS=Coriobacteriaceae bacterium EMTCatB1 OX=1927 122 GN=tgt PE=3 SV=1
MHSFEIEAADGATGARAGVFHTAHGPVRTPVFMPVGTRATVKGITPDALEALGAQVVLANTYHLFLRPGADVVAEAGGLHSFMNWKRAILTDSGGFQIFSLADTLKLDDDGVTFRSIVDGAWHRWTPEDNVRIQEQLGADVIMQLDQCPPYPAEEAFVAEAVRRSAAWAKRCAAAHEREDQALFGIVQGGLYQHLRRESIERLGEIGFPGYGIGGYSVGEPHELMLESLAEVSALLPADRPRYLMGVGNPTTIVQAIALGVDMFDCVLPTRTARLGTAFSSQGRLNLRNAKFSRDFGPLDPECSCPVCASYTRAYIRHLVNMKEMLGAILLTTHNLHFLLDLVRRARGAILAGQYAAFVRAWMDGPGADDY

SEQ ID NO: 54175 - protein, 382 aa, Coriobacteriales bacterium
  misc_feature (1)..(382): tr|A0A133Z8T8|A0A133Z8T8_9ACTN Queuine tRNA-ribosyltran sferase OS=Coriobacteriales bacterium DNF00809 OX=15887 53 GN=tgt PE=3 SV=1
MSLFTFDIHAQSGSARAASYITAHGSFQTPMFMPVGTHATVKGLTVEHLHQLKAQVVLANTYHLYMRPGVEVIEAAGGVHKFMNYDGPMLTDSGGFQLFSLDKMMKISSEGVRFHAYDYDGSKHFWTPETNMDIQQRIGADICMQLDQCIGYPAEKSQVAASTKLSWEWARRCAYAHTRPDQALFGIVQGGMHRDLRLESIKQLVDVHNDARRDGFAGFGGFGIGGYSVGEPHDVMFQTLGDVCAAMPADKPRYLMGVGNPTTLVRAVRVGVDMFDCVLPTRTGRMGTAFSSTGRMNMRNACYTRDFSPLDATCSCWVCQNHTRAYIRHLVKQGEMLGGILLSMHNIHFLINLMARAREAICADAYEDFYEEWMHSPAANDY

SEQ ID NO: 54176 - protein, 378 aa, Coriobacteriales bacterium
  misc_feature (1)..(378): tr|A0A437UWE2|A0A437UWE2_9ACTN Queuine tRNA-ribosyltran sferase OS=Coriobacteriales bacterium OH1046 OX=2491116 GN=tgt PE=3 SV=1
MSAYFKFDIVAEDAETHARAGVLHTAHGDIPTPIFMPVGTKATVKGLLMDTVAALGTKILLANTYHLAMRPGAETVAELGGLHDFMQWHGPILTDSGGFQVFSHGDHVDLSDDGVRFRTVDYDGSYVIWTPEENMRIQQLLGADIAMQLDQCPGYPAERSFVERAVELSSLWAERCWNAHTRDDQALFGIVQGGMHLDLRIRSLEHLEGCGNFCGYGIGGYSVGESHELMFETLAPLASEHMPKRKPRYLMGVGNPTTLVRGVACGIDMFDCVLPTRKARMGTAFSHEGRTNLKNARFARDAGPLDPACPCPVCTGGYTRAYLHHLVRQKEMLGGILLSMHNICFLLDLMARARQAIIEHRYAEFVSAWMDSAAAADF

SEQ ID NO: 54177 - protein, 395 aa, Coriobacteriia bacterium
  misc_feature (1)..(395): tr|A0A316RTY8|A0A316RTY8_9ACTN Queuine tRNA-ribosyltran sferase OS=Coriobacteriia bacterium OX=2052159 GN=tgt P E=3 SV=1
MCGCGEDKLWGAGEAVDESRWFTYDVVAEDPATHARAGVFHTPHGDIPTPIFMPVGTKATVKGILPETLERMGTKILLNNLYHLSQRPGADLVERMGGVHRFMRWGGPILTDSGGFQVFSHEQFFKLSDEGVRFRAVDYDGRWQEWTPEQNMRIAQQLGADIVMQLDQCVGYPATRAKVARSVELSSMWADRCFASHTRKDQALFGIVQGGMHLDLRVRSIEHLENAGDFPGYGIGGYSVGEDHETMFESLAPLCAEHMPRNKPRYLMGVGNPTTLVNGVAAGIDMFDCVLPTRTARTGTAFSNEGRINLKNARFRDDERPLDEGCGCPACAGGFSRAYIHHMVRQKEMLGSILISEHNIYYLLDLMRRARESIISGTYGEFVSGWMASPAANDW

SEQ ID NO: 54178 - protein, 371 aa, Coriobacteriia bacterium
  misc_feature (1)..(371): tr|A0A316P0A0|A0A316P0A0_9ACTN Queuine tRNA-ribosyltran sferase OS=Coriobacteriia bacterium OX=2052159 GN=tgt P E=3 SV=1
MFEYDLIATDPVCAARLGCLHTPHGDVQTPIFMPVGTQATVKGITNPQLEDLHAQIILANTYHLYLRPGIDIIREAGGIHGFMHWDHPVLTDSGGFQIFSLADTLELDADGVNFRSIVDGSKHRWTPEDNMRVQEAIGADIIMQLDQCTHYPATKEEVAAAVERSASWAARCKAAHTREDQALFGIVQGGVFEDLRLESAQRVSELDLPGYGIGGYSVGEDHELMLAQLGTVTAALPANKPRYLMGVGNPTTLVRAVALGVDMFDCVLPTRTGRMGTAFSSTGRMNMRNAKYARDFGPLDEQCTCPTCRNHTRAYIRHLVKMDEMLGGILLSIHNVHFLLDLMRRAREAIAAGEYAAFERAWMESEAANDY

SEQ ID NO: 54179 - protein, 379 aa, Coriobacterium glomerans
  misc_feature (1)..(379): tr|F2N871|F2N871_CORGP Queuine tRNA-ribosyltransferase OS=Coriobacterium glomerans (strain ATCC 49209 / DSM 20 642 / JCM 10262 / PW2) OX=700015 GN=tgt PE=3 SV=1
MDQIRFGFDVVAREPGGSARAAVLATPHGDIETPIFMPVGTKATVKGIPTATVRELGAQIVLANTYHLSMRPGPDVIAALGGIHRFMNWHGPILTDSGGFQVFSHKDAVTLSNEGVRFIAGDYDGSHVFWSPEDNMAIAEKLGADICMQLDQCPGYPAERSFVERAVELSSAWAERCWRAHSRCDQALFGIVQGGMHLDLRLRSLAHLESCGDFIGYGIGGYSVGESHETMFQTLAPLVSEHMPQSKPRYLMGVGNPTTLLKAIAAGVDMFDCVLPTRTGRMGTAFSSEGRLNLRNARFALDDAPIDPGCACPVCSGGYTRALIRHLVVQREMLGGILLSEHNIFYLLDLMKRARRAIIDGRYSAFLSQWLDSPAAQDY

SEQ ID NO: 54180 - protein, 390 aa, Corticibacter populi
  misc_feature (1)..(390): tr|A0A3M6QZT2|A0A3M6QZT2_9BURK Queuine tRNA-ribosyltran sferase OS=Corticibacter populi OX=1550736 GN=tgt PE=3 SV=1
MLQFELLATDSSSHARRGTLTLNHGQVQTPIFMPVGTYGTVKGVMPRSLEEMGAQIILGNTFHLWMRPGLDVMGGFGGLHGFEQWHKPILTDSGGFQVWSLGDMRKITEEGVHFASPVNGDKLFMSPEVSMQIQTVLNSDIVMQLDECTPYETKGHITTEDEARRSMEMSIRWARRSKAEFERLGNPNALFGIVQGGMFEHLREESLQQLLELDFPGYAVGGVSVGEPKDEMRRIMAHTPHRLPRHKPRYLMGVGTPEDLVEGVACGVDMFDCVMPTRNARNGTVFTRYGDLKLRNARHKSDHQPLDATCTCHACAGTSGVAWADGGRGGFSRAYLHHLDRCGEMLGPMLTTIHNLHYYLNLMREIRAALDAGRFGEFRQRFASDRARGV

SEQ ID NO: 54181 - protein, 418 aa, Corynebacterium accolens
  misc_feature (1)..(418): tr|C0WHU5|C0WHU5_9CORY Queuine tRNA-ribosyltransferase OS=Corynebacterium accolens ATCC 49725 OX=525260 GN=tgt PE=3 SV=1
MKDLSFDIDKRLPEGPGKHGRSGVIHTPHGDIATPAFIPVATKATVKTLTPEQIRATGTQAILSNAYHLYLQPGHDIVDEAGGVAKFENWHGPTYTDSGGFQVMSLGVGFKKVIAMDLADLTEKDIRAAKRERMAKVDEEGVDFRSIIDGSKHRFTPEKSMQIQHGLGADIMFAFDELTTLIDSRTYQEESVARTHRWAQRCLEEHDRLTRERYHRPKQSLWGVVQGAQYEDLRRQATRGLLELDRAAREKGQRGFGGFGIGGALEKQNLGTIVGWVCDELPDDKPRHLLGISEPDDIFTAVEAGADTFDCVAPTRLARRGGVYTLDGRLNLTNARFKRDFKGVDEEFGGYVTENYSRAYLHHLLKAKEFLAGTLCTIHNVEFMVRLVDNIRAAINGGYYEDYRDEFLGRYYAASKAR

SEQ ID NO: 54182 - protein, 418 aa, Corynebacterium accolens
  misc_feature (1)..(418): tr|E0MUV9|E0MUV9_9CORY Queuine tRNA-ribosyltransferase OS=Corynebacterium accolens ATCC 49726 OX=862512 GN=tgt PE=3 SV=1
MKDLSFDIDKRLPEGPGKHGRSGIIHTPHGDIATPAFIPVATKATVKTLTPEQIRATGTQAILSNAYHLYLQPGHDIVDEAGGVAKFENWHGPTYTDSGGFQVMSLGVGFKKVIAMDLADLTEKDIRAAKKERMAKVDEEGVDFRSIIDGSKHRFTPEKSMQIQHGLGADIMFAFDELTTLIDSRTYQEESVARTHRWAQRCLEEHDRLTRERYHRPKQSLWGVVQGAQYEDLRRQATRGLLELDRAAREKGQRGFGGFGIGGALEKQNLGTIVGWVCDELPDDKPRHLLGISEPDDIFTAVEAGADTFDCVAPTRLARRGGVYTLDGRLNLTNARFKRDFKGVDEEFGGYVTENYSRAYLHHLLKAKEFLAGTLCTIHNVEFMVRLVDNIRAAINGGYYEDYRDEFLGRYYAASKAR

SEQ ID NO: 54183 - protein, 415 aa, Corynebacterium afermentans
  misc_feature (1)..(415): tr|A0A1N6V2W2|A0A1N6V2W2_9CORY Queuine tRNA-ribosyltran sferase OS=Corynebacterium afermentans OX=38286 GN=tgt PE=3 SV=1
MTDVTFEAHTQLEPAPGRHGRTGVIHTPHGDIQTPAFIPVATKATVKTLTPEQIRQTGAQAILSNAYHLYLQPGPDIVDEAGGVAAFENWHGPTYTDSGGFQVMSLGVGFKKVLAMDVAGLTDSDIRAANKDRMARVDDDGVDFKSVIDGSSHRFTPEVSMQIQHQLGADIMFAFDELTTLVDTRAYQVHSVERTRRWARRCLLEHDRLTTARSGKPLQSLWGVVQGAQYEDLRRSAVRGLLDLDKEARAEGRRGFGGFGIGGALEKENLGTIVGWVTDELPVDMPRHLLGISEPDDIFTAVEAGADTFDCVAPTRLGRRGGVYTLDGRMNLAGARFKRDFAGVDEEFGGYVSENYSRAYIHHLLKAKEFLAGTLCTMHNLEFMIRLVDNIRAAIDAGDYEAYRDEFLGRYYAAN

SEQ ID NO: 54184 - protein, 422 aa, Corynebacterium ammoniagenes
  misc_feature (1)..(422): tr|D5NVB6|D5NVB6_CORAM Queuine tRNA-ribosyltransferase OS=Corynebacterium ammoniagenes DSM 20306 OX=649754 GN= tgt PE=3 SV=1
MSHEHSDDLSFDVTTRLGDGSPGKHGRTGVIHTPHGDIQTPAFIPVATKATVKTLTPEQIKSTGAQAILSNAYHLYLQPGHDIVDEAGGVAAFENWDGPTYTDSGGFQVMSLGVGFKKVLAMDVAKLTEGDIRAAKKERLAHVDEDGVDFRSFIDGSKHRFTPEFSMQIQHGLGADIMFAFDELTTLVDTRLYQEASVDRTHRWAKRCLEEHERLTNERTHRPKQSLWGVVQGAQYEDLRRQATRGLVQLSDEAEAEGKRGFGGFGIGGALEKENLGTIVGWCSDELPENKPRHLLGISEPDDMFTAIEAGADTFDCVAPTRLGRRGGVYTLDGRMNLMGAKFKRDFSGVDEEFGGYVSENYSRAYIHHLLKAKEFLAGTLCTIHNLQFMISLVDNIRKSIDGGYYEAYRDEFMGRYYANKK

SEQ ID NO: 54185 - protein, 433 aa, Corynebacterium amycolatum
  misc_feature (1)..(433): tr|A0A1V2C0C5|A0A1V2C0C5_CORAY Queuine tRNA-ribosyltran sferase OS=Corynebacterium amycolatum OX=43765 GN=tgt P E=3 SV=1
MSQSRTTGFDVVKQIEGARGRAGTIHTPHGDIATPAFIPVGTKATVKTLTPEQVRSTGAQAMLSNAYHLYLQPGEEIVDQAGGLAKFSNWNGPTFTDSGGFQVLSLGAGFKKTLAMDVTGMQKDDIVAEGKERNAFVDEDGVTFRSHIDGSEHRFTPEVSMRIQHALGADIMMAFDELTTLMNTRGYQEASVERTHRWARRCLEAHNELTVSRGQVDGHVTSLDDGQFPIQQLFGVVQGAQYEDLRRKAARGLVELSREFEDAGQLGFHGYGIGGAIEKQNLGLICGWVNDELPDDRARHLLGISEPDDIFAAVEAGADTFDCVAPTRLARRGGVYTLDGRMTLTNARFKNDFRPVDAEVPSYTSLNYSRAYLHHLLKAKEYLAGTLCTIHNLFFMVQLVENIRAAILEDRFFEYRDEFMGRYYANGGRAVGN

SEQ ID NO: 54186 - protein, 433 aa, Corynebacterium amycolatum
  misc_feature (1)..(433): tr|A0A376C947|A0A376C947_CORAY Queuine tRNA-ribosyltran sferase OS=Corynebacterium amycolatum OX=43765 GN=tgt P E=3 SV=1
MSQSRTTGFDVVKQIEGARGRAGTIHTPHGDIATPAFIPVGTKATVKTLTPEQVRSTGAQAMLSNAYHLYLQPGEEIVDQAGGLAKFSNWNGPTYTDSGGFQVLSLGAGFKKTLAMDVTGMQKDDIVAEGKERNAFVDEDGVTFRSHIDGSEHRFTPEVSMRIQHALGADIMMAFDELTTLMNTRGYQEASVERTHRWARRCLEAHNELTVSRGQVDAHVHSLDDGQLPIQQLFGVVQGAQYEDLRRKAARGLVELSREFEDAGQLGFHGYGIGGAIEKQNLGLICGWVNDELPDDRARHLLGISEPDDIFAAVEAGADTFDCVAPTRLARRGGVYTLDGRMTLTNARFKNDFRPVDAEVPSYTSLNYSRAYLHHLLKAKEYLAGTLCTIHNLFFMVKLVENIREAILEDRFFEYRDEFMGRYYANGGRAVGN

SEQ ID NO: 54187 - protein, 424 aa, Corynebacterium appendicis
  misc_feature (1)..(424): tr|A0A1N7IPB4|A0A1N7IPB4_9CORY Queuine tRNA-ribosyltran sferase OS=Corynebacterium appendicis CIP 107643 OX=116 1099 GN=tgt PE=3 SV=1
MTDTSGTGSRVDLSFEVGTRLEEAPGRHGRTGVIHTPHGDIQTPAFIPVATKATVKTLTPEQIRQTGAQAILSNAYHLYLQPGPDIVDEAGGVAAFENWHGPTYTDSGGFQVMSLGVGFKKVLAMDVAGLTDEDIRAANKDRMARVDDDGVDFKSFIDGSSHRFTPEVSMQIQHQLGADIMFAFDELTTLVDTRAYQEHSVERTRQWARRCLIEHDRLSTARPHKPLQSLWGVVQGAQYEDLRRQATRGLIALDEEARAEGRRGFGGFGIGGALEKENLGTIVGWVTDELPEDKPRHLLGISEPDDLFTAIEAGADTFDCVAPTRLGRRGGVYTLDGRMNLMAARFRRDFSGVDEEFGGYVSENYSRAYIHHLLRAKEFLAGTLCTLHNLEFMVRLVDNIRAAIDAGDYEAYRDEFLGRYYAGH

SEQ ID NO: 54188 - protein, 421 aa, Corynebacterium aquilae
  misc_feature (1)..(421): tr|A0A1L7CDB4|A0A1L7CDB4_9CORY Queuine tRNA-ribosyltran sferase OS=Corynebacterium aquilae DSM 44791 OX=1431546 GN=tgt PE=3 SV=1
MTQQHAGHTDTSFTLETHLDAPGHGRAGTIHTPHGDIQTPAFIPVGTKATVKTLTPEQIKDTGAQAVLSNAYHLYLQPGPDIVDEAGGVGAFENWDGPTYTDSGGFQVMSLGVGFKKVLAMDTAGLKETDIRAKSGERLAKVDEDGVDFRSVIDGSRHRFTPEVSMQIQHQLGADIIFAFDELTTLVDTRTYQEQSVARTHRWARRCLEEHNRQTQARADKPLQSLWGVVQGAQYEDLRRQATRGLIDLSKEFEDSGQRGFGGFGIGGALEKENLGTIVGWVCEELPEEKPRHLLGISEPDDLFTAVEAGADTFDCVAPTRLGRRGGVYTLDGRMNLMAARFKRDFNPIDPEVGGYASDNYSRAYIHHLLKAKEYLAGTLCTMHNLHFMIQLVDNIRASIIDGTYQEYKAEFMGRYYANKK

SEQ ID NO: 54189 - protein, 412 aa, Corynebacterium argentoratense
  misc_feature (1)..(412): tr|U3GXY4|U3GXY4_9CORY Queuine tRNA-ribosyltransferase OS=Corynebacterium argentoratense DSM 44202 OX=1348662 GN=tgt PE=3 SV=1
MSTFELRNTLDGSAHGRTGTIHTPHGDIQTPAFIPVATKATVKTLTPEQIRQCGAQAILSNAYHLYLQPGPDIVDEAGGVATFENWHGPTYTDSGGFQVMSLGVGFKKVLAMDTSGLKETDIKARGKDRMAHVDEDGVDFRSVIDGSKHRFTPEVSIQIQHQLGADIMFAFDELTTLVDTREYQESSVERTHRWARRCLEEHNRQTQLRADKPLQALWGVVQGAQYEDLRRQATRGLVSLSDEFEAEGMRGFGGYGIGGALEKENLGTIVQWVCDELPVDKPRHLLGISEPDDLFTAVEAGADTFDCVAPTRLGRRGGVYTLDGRMNLKGARFKRDFTPIDEELGGYVSENYTRAYIHHLLKAKEFLAGTLCTMHNLFFMLKLVDDIRASIDGGYYYEFRDEFMGRYYAGKK

SEQ ID NO: 54190 - protein, 413 aa, Corynebacterium atypicum
  misc_feature (1)..(413): tr|A0A075TTZ0|A0A075TTZ0_9CORY Queuine tRNA-ribosyltran sferase OS=Corynebacterium atypicum OX=191610 GN=tgt PE =3 SV=1
MTALSFDLEARLDGELGRTGVIHTPHGDIRTPAFIPVATKATVKTLTPEQVRSTGAQAILSNAYHLYLQPGEDIVDEAGGVAAFENWHGPTYTDSGGFQVMSLGVGFRKVLAMDVAQLTETDIRAAKKERMALVDEDGVDFRSVIDGSKHWFTPEKSMQIQHGLGADIMFAFDELTTLIDTREYQEQSVARTHRWARRCLVEHQRLSEARAGKPEQSLWGVVQGAQYEDLRRRAARGLVELSQEAEAEGRRGFGGFGIGGALEKQNLGTIVRWVNEELPEGKPRHLLGISEPDDLFTAVANGADTFDCVAPTRLGRRGGVYTLDGRLNLKGARFKRDFSGVDEEFGGYVSENYSRAYIHHLLKAKEYLAGTLCTLHNVEFMVRLVDRMWQAIVDGDFFEFRDEFLGRYYAAKR

SEQ ID NO: 54191 - protein, 427 aa, Corynebacterium aurimucosum
  misc_feature (1)..(427): tr|A0A558GGQ1|A0A558GGQ1_9CORY Queuine tRNA-ribosyltran sferase OS=Corynebacterium aurimucosum OX=169292 GN=tgt PE=3 SV=1
MTHPKPQLETDLSFDVKKELDLSGPAQPGKHGRTGVIHTPHGDIQTPAFIPVATKATVKTLTPEQIRLTGAQAILSNAYHLYLQPGHDIVDEAGGVAAFENWHGPTYTDSGGFQVMSLGVGFKKVLAMDVADLTDSDIRAAKKERMAQVDEDGVDFKSIIDGSTHRFTPEVSMQIQHGLGADIMFAFDELTTLVDTRTYQEESVERTRRWAQRCLDEHDRLTLARGPQKPRQSLWGVVQGAQYEDLRRQAARGLVELSDRAEANGRRGFGGFGIGGALEKENLGTIVGWVCDELPVDKPRHLLGISEPDDIFTAVEAGADTFDCVAPTRLARRGGVYTLDGRLNLTNARFKRDFAGVDEEFGGYVSENYSRAYLHHLLKAKEFLAGTLCTIHNLEFMIRLVDNIRESIDGGYYEAYRDEFLGRYYAK

SEQ ID NO: 54192 - protein, 427 aa, Corynebacterium aurimucosum
  misc_feature (1)..(427): tr|A0A2I1MW95|A0A2I1MW95_9CORY Queuine tRNA-ribosyltran sferase OS=Corynebacterium aurimucosum OX=169292 GN=tgt PE=3 SV=1
MTHPKPQLETDLSFDVKKELDLSGPAQPGKHGRTGVIHTPHGDIQTPAFIPVATKATVKTLTPEQIRATGAQAILSNAYHLYLQPGHDIVDEAGGVATFENWHGPTYTDSGGFQVMSLGVGFKKVLAMDVAELTDSDIRAAKKERMAQVDEDGVDFKSVIDGSSHRFTPEVSMQIQHGLGADIMFAFDELTTLVDTRTYQEESVERTRRWAQRCLDEHDRLTLARGPQKPRQSLWGVVQGAQYEDLRRQAARGLVELSDRAEANGRRGFGGFGIGGALEKENLGTIVGWVCDELPVDKPRHLLGISEPDDLFTAVEAGADTFDCVAPTRLARRGGVYTLDGRLNLTNARFKRDFAGVDEEFGGYVSENYSRAYIHHLLKAKEFLAGTLCTIHNLEFMIRLVDNIRASIDGGYYEAYRDEFLGRYYAK

SEQ ID NO: 54193 - protein, 425 aa, Corynebacterium bovis
  misc_feature (1)..(425): tr|A0A3R8QKX1|A0A3R8QKX1_9CORY Queuine tRNA-ribosyltran sferase OS=Corynebacterium bovis OX=36808 GN=tgt PE=3 S V=1
MSAEPTPSHHDTSFVAGTRLDSVDTSPSQGRTGVIHTPHGDIRTPAFIPVATKATVKTLTPEQIRSTGAEAILSNAYHLYLQPGPDIVDEAGGVAAFENWHGPTYTDSGGFQVMSLGVGYKKVLAMNTAGLAEADIIAQQKKRMAVVDEDGVDFKSIIDGSLHRFTPEVSMQIQHQLGADIMFAFDELTTLANTRLYQEQSVDRTHRWARRCLAEHDRLTRARPHRPLQSLWGVVQGAQYEDLRRAAARGLVALSREAEQEGRRGFGGFGIGGALEKENLGTIVSWVSEELPDDRPRHLLGISEPDDLFTAVAAGADTFDCVAPTRLGRRGGVYTLDGRLNLSAARFRRDFTPVDAEVGGYTSDNYTRAYIHHLLRAKEYLAGTLCTMHNIHFMVRLVAGIRQSIEDGRFEEYRDEFLGRYYAGR

SEQ ID NO: 54194 - protein, 417 aa, Corynebacterium callunae
  misc_feature (1)..(417): tr|M1TMU0|M1TMU0_9CORY Queuine tRNA-ribosyltransferase OS=Corynebacterium callunae DSM 20147 OX=1121353 GN=tgt PE=3 SV=1
MSDLSFTLKTKLADDTPGKHGRTGTIHTPHGDIQTPAFIPVATKATVKTLTPSQIRETGAQAILSNAYHLYLQPGPDIVDEAGGVSEFESWHGPTYTDSGGFQVLSLGSGFKKVLAMDTNNLTRNDIKAAKRERMALVDDDGVDFRSVIDGSKHRFTPEVSMQIQHQLGADIIFAFDELTTLIDTYDYQVESVERTRRWAERCLLEHERLTQERVEKPLQSLWGVVQGAQYEDLRRQAVRGLLDLDRQAVDAGRRGFGGFGIGGALEKENLGTIVGWVCDELPDEKPRHLLGISEPDDLFVAIEAGADTFDCVAPTRLGRRGGVYTLDGRVNLKGAKFKRDFRGIDEEIGGYASENFSRAYIHHLLKAKEFLAGTLCTMHNLYFMITLVDKIRESIDNGTYYDFKAEFLGRYYAAKI

SEQ ID NO: 54195 - protein, 423 aa, Corynebacterium camporealensis
  misc_feature (1)..(423): tr|A0A0F6QUB0|A0A0F6QUB0_9CORY Queuine tRNA-ribosyltran sferase OS=Corynebacterium camporealensis OX=161896 GN= tgt PE=3 SV=1
MEKSTDLTQDLSFQVGTRLEQSGPGKHGRTGVIHTPHGDIQTPAFIPVATKATVKTLTPEQIRSTGAQAILSNAYHLYLQPGHDIVDEAGGVAAFENWQGPTYTDSGGFQVMSLGVGFKKVLAMDVANLTEQDIRAAKKERMAQVDEDGVDFRSFIDGSKHRFTPEFSMQIQHGLGADIMFAFDELTTLVDTRQYQEESVARTHRWAQRCLDEHDRLTRERAHRPKQSLWGVVQGAQYEDLRRQAARGLMQLSDAASDQGKRPFGGFGIGGALEKENLGTIVGWVCDELPEDKPRHLLGISEPDDLFTAVEAGADTFDCVAPTRLARRGGVYTLDGRLNLVNARFKRDFSGVDEEFGGYVSENYSRAYIHHLLKAKEFLAGTLCTMHNVEFMIRLVDNIRASIEGGYYEAYRDEFLGRYYAGK

SEQ ID NO: 54196 - protein, 417 aa, Corynebacterium canis
  misc_feature (1)..(417): tr|A0A5C5UET2|A0A5C5UET2_9CORY Queuine tRNA-ribosyltran sferase OS=Corynebacterium canis OX=679663 GN=tgt PE=3 SV=1
MTQDTSFELHTRLESSPHGRTGTIHTPHGDIATPAFIPVGTKATVKTLTPEQVRSTGAQAVLGNAYHLYLQPGPEIVDAAGGLAAFQNWDGPTYTDSGGFQVMSLGVGFKKVLAMDTKGLTEADIRAKRKDRMAKVDEEGVDFRSVIDGSKHRFTPEVSMQIQHQLGADIMFAFDELTTLVDTRRYQEDSVARTHRWAQRCLDEHERLTQARAGKPLQSLWGVVQGAQYEDLRRRAARGLVELSTAAEAAGKRGFGGYGIGGALEKENLGTIVGWVCDELPEDRPRHLLGISEPDDLFTAIEYGADTFDCVAPTRLGRHGGVYTLDGRVNLTKAQFKRDFEPIDAELGGYVSENYSRAYIHHLLRAKEYLGGTLCTLHNLHFLVGLVDNIRAAITGGYYEEYRDEFLGRYYAAGSAK

SEQ ID NO: 54197 - protein, 422 aa, Corynebacterium casei
  misc_feature (1)..(422): tr|W5XQN6|W5XQN6_9CORY Queuine tRNA-ribosyltransferase OS=Corynebacterium casei LMG S-19264 OX=1285583 GN=tgt PE=3 SV=1
MSHEHSDDLSFDVTTRLGDGSPGKHGRTGVIHTPHGDIQTPAFIPVATKATVKTLTPEQIKSTGAQAILSNAYHLYLQPGHDIVDEAGGVGAFENWEGPTYTDSGGFQVMSLGVGFKKVLAMDVAKLTEVDIRAAKKERLAHVDEDGVDFRSFIDGSKHRFTPEVSMQIQHGLGADIMFAFDELTTLVDTRVYQEQSVERTHRWAKRCLDEHERLTNERTHRPKQSLWGVVQGAQYEDLRRQATRGLVQLSEQAEAEGKRGFGGFGLGGALEKENLGTIVGWCCDELPENKPRHLLGISEPDDMFTAIEAGADTFDCVAPTRLGRRGGVYTLDGRMNLMGARFKRDFRGIDEEFGGYVSENYSRAYIHHLLKAKEFLAGTLCTIHNLQFMISLVDNIRKSIDGGYYEAYRDEFMGRYYANKK

SEQ ID NO: 54198 - protein, 422 aa, Corynebacterium casei; identical to SEQ ID NO: 54197
  misc_feature (1)..(422): tr|G7HVR8|G7HVR8_9CORY Queuine tRNA-ribosyltransferase OS=Corynebacterium casei UCMA 3821 OX=1110505 GN=tgt PE =3 SV=1

SEQ ID NO: 54199 - protein, 500 aa, Corynebacterium choanis
  misc_feature (1)..(500): tr|A0A3G6JBY3|A0A3G6JBY3_9CORY Queuine tRNA-ribosyltran sferase OS=Corynebacterium choanis OX=1862358 GN=tgt PE =3 SV=1
MSGWLIVGRSSGLPAYGWVIRRAASVPVLLMITLDRMEQPQRTPDHQSSSAAPASAEASGIPAAGDGHTEVGGNAAAAAQPASAAGFREGFTLGTALAGSAHGRTGIIHTPHGDIHTPAFIPVGTKATVKTLTPDQIKLTGAQAILGNAYHLYLQPGADLVDEAGGLAKFARWDGPTYTDSGGFQVMSLGAGYKKVISMTAGEVSADEVRQKKDRLAHVDEEGVNFRSVIDGSKHRFTPEVSMAIQHQLGADIMFAFDELTTLVDSRRYQEQSVERTHRWAKRCLTAHNELTESRHGKPPQSLWGVVQGAHYEDLRRIATRGLVGLSQEFEAEGRRGFGGYGIGGALEKENLGTIVGWVCDELPADRPRHLLGISEPDDVFVAVENGADTFDCVAPTRLGRRGGVYTLDGRTNLKKACYTRDFRPVDAELGGYVSENFDRAYIHHLIKAKEFLAGTLCTIHNLFFMVTLVDNIRASIDGGYFAEYKQEFLGRYYAGQQRQ

SEQ ID NO: 54200 - protein, 418 aa, Corynebacterium coyleae
  misc_feature (1)..(418): tr|A0A1H4KG71|A0A1H4KG71_9CORY Queuine tRNA-ribosyltran sferase OS=Corynebacterium coyleae OX=53374 GN=tgt PE=3 SV=1
MTQQTDTTFEVGTQLEPAPGRHGRTGVIHTPHGSIQTPAFIPVATKATVKTLTPEQIRSTGAQAILSNAYHLYLQPGPDIVDEAGGVAAFENWHGPTYTDSGGFQVMSLGVGFKKVLAMDTAGLTEGDIRAANKDRMARVDDDGVDFKSVIDGSSHRFTPEVSMQIQHQLGADIMFAFDELTTLVDTRAYQEHSVERTRRWARRCLIEHDRLTEVRADKPLQSLWGVVQGAQYEDLRRQAVHGLLDLHREALDEGRRGFGGFGIGGALEKENLGTIVGWVTDELPIDMPRHLLGISEPDDIFTAVEAGADTFDCVAPTRLGRRGGVYTLDGRMNLAGARFKRDFSGVDEEFGGYVSENFSRAYIHHLLKAKEFLAGTLCTIHNLEFMIRLVDNIRLAIDAGDYEAYRDEFLGRYYAGK

SEQ ID NO: 54201 - protein, 418 aa, Corynebacterium coyleae
  misc_feature (1)..(418): tr|A0A2I1X6H5|A0A2I1X6H5_9CORY Queuine tRNA-ribosyltran sferase OS=Corynebacterium coyleae OX=53374 GN=tgt PE=3 SV=1
MTQQTDTTFEVGTQLEPAPGRHGRTGVIHTPHGSIQTPAFIPVATKATVKTLTPEQIRSTGAQAILSNAYHLYLQPGPDIVDEAGGVAAFENWHGPTYTDSGGFQVMSLGVGFKKVLAMDTAGLTEGDIRAANKDRMARVDDDGVDFKSVIDGSSHRFTPEVSMQIQHQLGADIMFAFDELTTLLDTRAYQEHSVERTRRWARRCLIEHDRLTEVRADKPLQSLWGVVQGAQYEDLRRQATHGLLDLHREALDEGRRGFGGFGIGGALEKENLGTIVGWVTDELPIDMPRHLLGISEPDDIFTAVEAGADTFDCVAPTRLGRRGGVYTLDGRMNLAGARFKRDFSGVDEEFGGYVSENYSRAYIHHLLKAKEFLAGTLCTIHNLEFMIRLVDNIRLAIDAGDYEAYRDEFLGRYYAGK

SEQ ID NO: 54202 - protein, 417 aa, Corynebacterium crudilactis
  misc_feature (1)..(417): tr|A0A172QX48|A0A172QX48_9CORY Queuine tRNA-ribosyltran sferase OS=Corynebacterium crudilactis OX=1652495 GN=tg t PE=3 SV=1
MSDLSFTLNNRLPDQGPGKHGRTGVIHTPHGDIATPAFIPVATKATVKTLTPEQIRETGAQAILSNAYHLYLQPGPDIVDEAGGVSKFENWNGPTYTDSGGFQVMSLGSGFKKVLAMDTTNLTRNDIKAAKKERMALVDDDGVDFKSVIDGSKHRFTPEVSMQIQHQLGADIIFAFDELTTLIDTYDYQVESVERTRRWAQRCLLEHERLTQERVGKPLQSLWGVVQGAQFEDLRRQAVQGLLDLDRKAADEGRRGFGGFGIGGALEKENLGTIVGWVCDELPDEKPRHLLGISEPDDLFVAIEAGADTFDCVAPTRLGRRGGVYTLDGRMNLTGARFKRDFAGIDEEVGGYASENYSRAYIHHLLKAKEFLAGTLCTMHNLHFMITLVDKIRASIDDGTYYEFKEEFLGRYYAPKI

SEQ ID NO: 54203 - protein, 430 aa, Corynebacterium cystitidis
  misc_feature (1)..(430): tr|A0A1H9U781|A0A1H9U781_9CORY Queuine tRNA-ribosyltran sferase OS=Corynebacterium cystitidis DSM 20524 OX=1121 357 GN=tgt PE=3 SV=1
MTNQPTVPTEPTASLDDDLSFTIGDRLEQGPGRHGRTGVIHTPHGEIHTPAFIPVATKATVKTLTPEQIRNTGAQAILSNAYHLYLQPGHDIVDEAGGLARFSNWHGPTYTDSGGFQVMSLGVGFKKVLAMDTAKLSHEDIRAKDKERMAHVDDNGVDFKSFIDGSSHRFTPEVSMQIQHGLGADILFAFDELTTLVDTREYQEESVERTRRWAKRCIDEHTRLTRLRSARPKQSLWGVVQGAQYEDLRRQATRGLLELDRQARMEGKRGFGGFGIGGAIEKENLGTIVGWVTDELPEDKPRHLLGISEPDDIFAAVEAGADTFDCVAPTRLGRHGGVYTLDGRLNLTGARFKRDFRGVDEEFGGYVSQNYSRAYIHHLLKAKEFLAGTLCTMHNLEFMIRLVDNIRQSIQQGRFEEYRDSFLARYYRAI

SEQ ID NO: 54204 - protein, 431 aa, Corynebacterium deserti
  misc_feature (1)..(431): tr|A0A0M4CVM3|A0A0M4CVM3_9CORY Queuine tRNA-ribosyltran sferase OS=Corynebacterium deserti GIMN1.010 OX=931089 GN=tgt PE=3 SV=1
MGGEARCTLDLAPMSDLSFTLNNKLADDAPGKHGRTGVIHTPHGDIATPAFIPVATKATVKTLTPEQIRETGAQAILSNAYHLYLQPGPDIVDEAGGVAAFENWHGPTYTDSGGFQVMSLGSGFKKVLAMDTTNLTRNDIKAAKKERMALVDEDGVDFKSVIDGSKHRFTPEVSMQIQHQLGADIIFAFDELTTLVDTYDYQVESVERTRRWAQRCLLEHERLTQERVDKPLQSLWGVVQGAQFEDLRRQAVKGLLDLDRQATDEGRRGFGGFGIGGALEKENLGTIVGWVCDELPDEKPRHLLGISEPDDLFVAVEAGADTFDCVAPTRLGRRGGVYTLDGRMNLTGARFKRDFKGIDEEVGGYASENYSRAYIHHLLKAKEFLAGTLCTMHNLHFMITLVDKIRASIDDGTYHEFKEEFLGRYYASKMS

SEQ ID NO: 54205 - protein, 430 aa, Corynebacterium diphtheriae
  misc_feature (1)..(430): tr|A0A5E5PKF2|A0A5E5PKF2_CORDP Queuine tRNA-ribosyltran sferase OS=Corynebacterium diphtheriae OX=1717 GN=tgt P E=3 SV=1
MTDTTFELRTELDDAPGRHGRTGVIHTPHGDINTPAFIPVATKATVKTLTPQQIRDTGAQAILSNAYHLYLQPGPDIVDEAGGVSSFENWHGPTYTDSGGFQVMSLGVGFRKVLAMDTAGLVEGDIRAPKKDRYAQVDEDGVDFRSVIDGSRHRFTPEVSMQIQHRLGADIIFAFDELTTLVDTRQYQESSVERTHRWARRCLIEHDRLTREREGKPLQSLWGVVQGAQYEDLRRQAIRGLLDLDKEAEDNGRRGFGGFGIGGALEKENLGTIVGWVCDEIPQHKPRHLLGISEPDDLFTAIEAGADTFDCVAPTRLGRRGGVYTLDGRVNLTAARFKRDFRQVDEEFGGPIAEYSRAYIHHLFKAKEFLGGTLCTMHNVAFMIQLVDNIRSAINNGDFEAYRDEFLGRYYASKGGPAAAGRSGGMIYGV

SEQ ID NO: 54206 - protein, 430 aa, Corynebacterium diphtheriae
  misc_feature (1)..(430): tr|Q6NJZ0|Q6NJZ0_CORDI Queuine tRNA-ribosyltransferase OS=Corynebacterium diphtheriae (strain ATCC 700971 / NC TC 13129 / Biotype gravis) OX=257309 GN=tgt PE=3 SV=1
MTDTTFELRTELDDAPGRHGRTGVIHTPHGDINTPAFIPVATKATVKTLTPQQIRDTGAQAILSNAYHLYLQPGPDIVDEAGGVSKFENWHGPTYTDSGGFQVMSLGVGFKKVLAMDTAGLVEGDIRAPKKDRYAQVDEDGVDFRSVIDGSRHRFTPEVSMQIQHRLGADIIFAFDELTTLVDTRQYQESSVERTHRWARRCLIEHDRLTREREGKPLQSLWGVVQGAQYEDLRRQAVRGLLDLDKEAEDNGRRGFGGFGIGGALEKENLGTIVGWVCDEIPQHKPRHLLGISEPDDLFTAIEAGADTFDCVAPTRLGRRGGVYTLDGRVNLTAARFKRDFRQVDEEFGGPIAEYSRAYIHHLFKAKEFLGGTLCTMHNVAFMIQLVDNIRSAINNGDFEAYRDEFLGRYYASKGGPAAAGRSGGMIYGV

SEQ ID NO: 54207 - protein, 421 aa, Corynebacterium doosanense
  misc_feature (1)..(421): tr|A0A097ID78|A0A097ID78_9CORY Queuine tRNA-ribosyltran sferase OS=Corynebacterium doosanense CAU 212 = DSM 454 36 OX=558173 GN=tgt PE=3 SV=1
MTDLSFDLGTQLEIGPGKHGRTGVIHTPHGDIRTPAFIPVATKATVKTLTPEQVSSTGAQAILSNAYHLYLQPGHDIVDEAGGVGRFENWQGPTYTDSGGFQVMSLGAGYKKVLAMDTKGLTRNDIKAGEKERLAHVDEDGVDFKSVIDGSYHRFTPEVSMQIQHSLGADIMFAFDELTTLVDSREYQANSVARTHRWAQRCLVEHDRLSTLRSTRPLQSLWGVVQGAQYEDLRRQATRGLIELSRQAEEEGRRGFGGFGIGGALEKENLGTIVGWVADELPLEKPRHLLGISEPDDLFVAVEAGADTFDCVSPTRLARRGGVYTLDGRMNLTAARFKRDFRGIDEEFGGHVSENYSRAYIHHLLKAKEFLAGTLCTMHNLQFMIALVDQMRDAIDDGHFEAFKVEFLGRYYANGGRAATF

SEQ ID NO: 54208 - protein, 432 aa, Corynebacterium durum
  misc_feature (1)..(432): tr|L1MDA2|L1MDA2_9CORY Queuine tRNA-ribosyltransferase OS=Corynebacterium durum F0235 OX=1035195 GN=tgt PE=3 S V=1
MTEGTFHDTTFELGTRLEATPRNGDGGHGARHGRTGVIHTPHGDIATPAFIPVGTKASVKTLTPEQVRDAGAQAVLSNAYHLYLQPGPDIVDEAGGVAAFENWHGPTYTDSGGFQVMSLGVGFKKVLAMSTDGLKEHDIRARGKDRWAHVDEEGVNFRSVIDGSKHRFTPEISMQIQHQLGADIMFAFDELTTLLDTRLYQEQSVERTHRWAQRCLDEHDRLTRARVDKPLQSLWGVVQGAQYEDLRRQAARGLVELSDAAEAEGRRGFGGYGIGGALEKENLGTIVSWVCDELPELKPRHLLGISEPDDLFVAVEAGADTFDCVAPTRLGRRGGVYTLDGRINLTNARFTRDFTPIDAELGGYVSENYTRAYIHHLLKAKEFLAGTLCTLHNLHFMIGLVDKIRWSIDNGDYEAFRDDFLGRYYATGGRAQ

SEQ ID NO: 54209 - protein, 457 aa, Corynebacterium efficiens
  misc_feature (1)..(457): tr|Q8FU20|Q8FU20_COREF Queuine tRNA-ribosyltransferase OS=Corynebacterium efficiens (strain DSM 44549 / YS-314 / AJ 12310 / JCM 11189 / NBRC 100395) OX=196164 GN=tgt PE=3 SV=1
MDAPLAGPHPSEPGCGGLRTGKGMGAQPGQAVEWTTMSAEKTDLSFTLHNQLDDPAPGKHGRTGTIHTPHGDIHTPAFIPVATKATVKTLTPEQIRETGAQAILSNAYHLYLQPGPDIVDEAGGVSAFENWHGPTYTDSGGFQVMSLGSGFKKVLAMDTTNLTREDIKAANKERMAHVDDDGVDFKSFIDGSKHRFTPEVSMQIQHQLGADIIFAFDELTTLIDTYDYQVESVERTRRWAQRCLLEHERLTQERADKPLQSLWGVVQGAQYEDLRRQAVHGLLELDREAADEGRRGFGGFGIGGALEKENLGTIVGWVCDELPDDKPRHLLGISEPDDLFVAIEAGADTFDCVAPTRLGRRGGVYTLDGRLNLGSSRFKRDFRPIDEEVGGYVSQNYTRAYIQHLLKAKEFLAGTLCTMHNLHFMIKLVDDIRTSIDNGTYHEFKAEFLGRYYAGKR

SEQ ID NO: 54210 - protein, 435 aa, Corynebacterium endometrii
  misc_feature (1)..(435): tr|A0A4P7QFB2|A0A4P7QFB2_9CORY Queuine tRNA-ribosyltran sferase OS=Corynebacterium endometrii OX=2488819 GN=tgt PE=3 SV=1
MTEPRELYPSTASDIPEAPLGQDLSFEVGTQLEPAPGRHGRTGVIHTPHGDIHTPAFIPVATKATVKTLTPEQIRSTGAQAILSNAYHLYLQPGHDLVDEAGGVAKFENWHGPTYTDSGGFQVMSLGVGFKKVLAMDTTNLKREDIRAADKERMARVDEDGVNFKSFIDGSKHRFTPEVSMQIQHGLGADILFAFDELTTLVDTRQYQEESVARTHRWAQRCLDEHHRLTQERSHRPRQSLWGVVQGAQYEDLRRQAARGLVDLSAQAEDAGKRGFGGYGIGGAIEKENLGTIVGWVCDELPVDKPRHLLGISEPDDLFAGIEAGADTFDCVAPTRLGRRGGVYTLDGRMNLKGSKFKRDFRGIDEEFGGYVSTHYSRAYIRHLLKANEFLAGTLCTMHNLEFMIALVDNARKAIDGGYYEEYRDAFMARYYAGA

SEQ ID NO: 54211 - protein, 410 aa, Corynebacterium epidermidicanis
  misc_feature (1)..(410): tr|A0A0G3GLX8|A0A0G3GLX8_9CORY Queuine tRNA-ribosyltran sferase OS=Corynebacterium epidermidicanis OX=1050174 G N=tgt PE=3 SV=1
MTDTSFSLVSRLEQTKHGRTGTIHTPHGDIQTPAFIPVATKATVKTLTPEQIRETGAQAILSNAYHLYLQPGPDVVDEAGGVATFENWHGPTYTDSGGFQVMSLGVGFKKVLSMDANIAEGEVKARSKDRMAHVDEDGVDFRSVIDGSKHRFTPEVSMQIQHQLGADIMFAFDELTTLVDTKAYQEASVERTHRWAQRCLLEHDRLTHARPGKPLQSLWGVVQGAQYEDLRRKAARGLVQLSDAATAEGRRGFGGYGIGGALEKENLGTIVGWVNDELPVDKPKHLLGISEPDDIFTAVEAGADTFDCVAPTRLGRRGGVYTLDGRMTLTNARFKRDFTPIDAEVGGYVSENYTRAYIHHLLKAKEFLAGTLCTMHNLYFMIQLVDKIRATMESGDYWAFKEEFMGRYYR

SEQ ID NO: 54212 - protein, 460 aa, Corynebacterium falsenii
  misc_feature (1)..(460): tr|A0A418Q9C6|A0A418Q9C6_9CORY Queuine tRNA-ribosyltran sferase OS=Corynebacterium falsenii OX=108486 GN=tgt PE =3 SV=1
MTDNARPQASADLSFEVHTRLRDCPDIDTVREQQIQAQQGAAQQQRTTEQHPASTRQFLGRTGTIHTPHGDIHTPAFIPVATKATVKTLTPEQVRSTGAQAILSNAYHLYLQPGPDIVDEAGGVAAFENWRGPTYTDSGGFQVMSLGVGYKKVLAMDTKGLSEKDIIAQQKKRMAVVDEDGVDFRSVIDGSKHRFTPEVSMQIQHELGADIMFAFDELTTLVNTRHYQEQSVARTHRWAARCLEEHQRQTDLRSHRPLQSLWGVVQGAQYEDLRRQAARGLVELSEQAESEGRRGFGGFGIGGALEKENLGTIVDWVCQELPEDKPRHLLGISEPDDLFTAIAAGADTFDCVAPTRLGRRGGVYTLDGRMNLAAARFKRDFSPIDAETGGYVSENYSRAYIHHLLKAKEFLAGTLCTLHNLHFMVGLVDQIRASIDEGRFAEFREQFLSRYYGDTWLDHI

SEQ ID NO: 54213 - protein, 428 aa, Corynebacterium flavescens
  misc_feature (1)..(428): tr|A0A3D1W7T5|A0A3D1W7T5_CORFL Queuine tRNA-ribosyltran sferase OS=Corynebacterium flavescens OX=28028 GN=tgt P E=3 SV=1
MHKPPEIDLKRNLSFEIKTRLDDTSPGKHGRTGVIHTPHGDIKTPAFIPVATKATVKTLTPEQIRQTGAQAILSNAYHLYLQPGYDIVDEAGGLAEFENWHGPTYTDSGGFQVMSLGVGFKKVLAMEVANLTEGDVRAAKKERMAQVDEEGVDFKSIIDGSKHRFTPEKSMQIQHGLGADIMFAFDELTTLVDTRIYQEQSVARTHRWAKRCLDEHERLTNERTHRPKQSLWGVVQGAQYEDLRRKAARGLVQLSRAAEEAGRRPFGGFGIGGALEKENLGTIVGWVCDELPEDKPRHLLGISEPDDLFTAIEAGADTFDCVAPTRLGRRGGVYTLDGRLNLKNAQFKRDFSGIDEEFGGYVSENYSRAYIRHLLKANEFLAGTLCTMHNLEFMIRLVDNIRASIEGGYYAAYRDEFMGRYYADSSGM

SEQ ID NO: 54214 - protein, 428 aa, Corynebacterium flavescens
  misc_feature (1)..(428): tr|A0A1L7CJF1|A0A1L7CJF1_CORFL Queuine tRNA-ribosyltran sferase OS=Corynebacterium flavescens OX=28028 GN=tgt P E=3 SV=1
MHKPPEIDLKRNLSFEIKTRLDDTSPGKHGRTGVIHTPHGDIKTPAFIPVATKATVKTLTPEQIRQTGAQAILSNAYHLYLQPGYDIVDEAGGLAEFENWHGPAYTDSGGFQVMSLGVGFKKVLAMEVANLTEGDVRAAKKERMAQVDEEGVDFKSIIDGSKHRFTPEKSMQIQHGLGADIMFAFDELTTLVDTRIYQEQSVARTHRWAKRCLDEHERLTNERTHRPKQSLWGVVQGAQYEDLRRKAARGLVQLSRAAEEAGRRPFGGFGIGGALEKENLGTIVGWVCDELPEDKPRHLLGISEPDDLFTAIEAGADTFDCVAPTRLGRRGGVYTLDGRLNLKNAQFKRDFSGIDEEFGGYVSENYSRAYIRHLLKANEFLAGTLCTMHNLEFMIRLVDNIRASIEGGYYAAYRDEFTGRYYADSSGM

SEQ ID NO: 54215 - protein, 428 aa, Corynebacterium frankenforstense
  misc_feature (1)..(428): tr|A0A1L7CQJ3|A0A1L7CQJ3_9CORY Queuine tRNA-ribosyltran sferase OS=Corynebacterium frankenforstense DSM 45800 O X=1437875 GN=tgt PE=3 SV=1
MQTPAMDTDLSFRVDTRLDPAEAASGGHAVHGRTGVISTPHGEIATPAFIPVATKATVKTLTPEQVRSTGAQAILSNAYHLYLQPGEDIVDEAGGVAAFENWHGPTYTDSGGFQVMSQGVGFRKVLAMDLTDLTEADIRAVDKERKAHVDEDGVDFKSFIDGSLHRFTPERSMQIQHSLGADIMFAFDELTTLVDTRAYQESSVERTRRWAERCLVEHDRLTRERTHRPRQSLWGVVQGAQYEDLRRRAARGLIELSDAAQQRGARGFGGFGIGGALEKENLGTIVGWVCDELPEDKPRHLLGISEPDDLFTAVAAGADTFDCVAPTRLGRRGGVYTLDGRINLPAARFKRDFRGVDEEFGGYVSRNYSRAYLHHLLKAHEYLAGTLCTLHNLEFMVRLVDNMRAAIAEGRFAEYREEFLGRYYAGRK

SEQ ID NO: 54216 - protein, 431 aa, Corynebacterium freneyi
  misc_feature (1)..(431): tr|A0A095ZBY3|A0A095ZBY3_9CORY Queuine tRNA-ribosyltran sferase OS=Corynebacterium freneyi DNF00450 OX=1287475 GN=tgt PE=3 SV=1
MTDSTANEENFTVVKQMDGEPGRAGIIRTPHGDVETPAFIPVGTKATVKTLTPEQIRATRAQAVLSNAYHLYLQPGPDIVEAAGGLTRFENWHGPTFTDSGGFQVMSLGVGFRKTLAMDVTGLQNDDIVAPGKERNAFVDEEGVTFRSHIDGSSHRFTPEVSMGIQHKLGADIIFAFDELTTLMNTRQYQEASVERTHRWAKRCLDEHERLTRERNQVPGRVGELAEGERPLQQLFGVVQGAQYEDLRRRAARGLVSLSDDAEAAGKLGFAGYGIGGALEKQRLGEICRWVTDELPEDRPRHLLGISEPDDIFAAVAAGADTFDCVAPTRLARRGGVYTLDGKITLTNARFKTDFGPIDPEVESYTSLNYSRAYIHHLLKAKEYLAGTLCTIHNVHFMVKLVENIRASILDGTFDEYRDEFLGRYYAGKKK

SEQ ID NO: 54217 - protein, 417 aa, Corynebacterium genitalium
  misc_feature (1)..(417): tr|D7WBH7|D7WBH7_9CORY Queuine tRNA-ribosyltransferase OS=Corynebacterium genitalium ATCC 33030 OX=585529 GN=t gt PE=3 SV=1
MTEQSVDLSFTLGTRLDGANGRTGVIHTPHGDIRTPAFIPVATKATVKTLTPEQVRAAGAQAILSNAYHLYLQPGSDIVDEAGGVAAFENWRGPTFTDSGGFQVMSLGVGFKKILAMDITDLTESDIRAANKDRMARVDDDGVDFKSVIDGSAHRFTPEKSMQIQHQLGADIMFAFDELTTLVDTRAYQEHSVERTRLWAQRCLEEHNRLTLARPGKPLQSLWGVVQGANYEDLRRQAVRGLLALDEEARAEARRGFGGFGIGGALEKEILGTITSWVTDELPEDKPRHMLGISEPDDLFTCIENGADTFDCVAPTRLGRRGGVYTLDGRMNLMAARFKRDFTGIDEEFGGYVSENYSRAYIHHLLKAKEFLAGTLCTLHNLEFMLRLVDNIRAAIDEGRFYEYRDEFLGRYYAGRG

SEQ ID NO: 54218 - protein, 415 aa, Corynebacterium genitalium
  misc_feature (1)..(415): tr|A0A3S0VRI8|A0A3S0VRI8_9CORY Queuine tRNA-ribosyltran sferase OS=Corynebacterium genitalium OX=38288 GN=tgt P E=3 SV=1
MTDVTFEAHTQLEPAPGRHGRTGVIHTPHGDIQTPAFIPVATKATVKTLTPEQIRQTGAQAILSNAYHLYLQPGPDIVDEAGGVASFENWHGPTYTDSGGFQVMSLGVGFKKVLAMDVAGLTDSDIRAANKDRMARVDDDGVDFKSVIDGSSHRFTPEVSMQIQHQLGADIMFAFDELTTLVDTRAYQEHSVERTRRWARRCLLEHDRLTTARSGKPLQSLWGVVQGAQYEDLRRSAVRGLLDLDKEARAEGRRGFGGFGIGGALEKENLGTIVGWVTDELPVDMPRHLLGISEPDDIFTAVEAGADTFDCVAPTRLGRRGGVYTLDGRMNLAGARFKRDFAGVDEEFGGYVSENYSRAYIHHLLKAKEFLAGTLCTMHNLEFMIRLVDNIRAAIDAGDYEAYRDEFLGRYYAAN

SEQ ID NO: 54219 - protein, 479 aa, Corynebacterium geronticis
  misc_feature (1)..(479): tr|A0A3G6J2U5|A0A3G6J2U5_9CORY Queuine tRNA-ribosyltran sferase OS=Corynebacterium geronticis OX=2079234 GN=tgt PE=3 SV=1
MGKRSGWGEWCCFPCQLMASGGGQRQIVMGKCSRRGSRRGSGRGGAKVAGMENRQVGQSPALDQDLSFDLRTELPEAQAEQPGKHGRTGVIHTPHGDIQTPAFIPVATKATVKTLTPEQIRQTGAQAILSNAYHLYLQPGQDVVDEAGGVAKFENWHGPTYTDSGGFQVMSLGVGFKKVLAMDTKGWDEKDIRARHKDRYAHVDEDGVDFRSVIDGSRHRFTPEVSMQIQHGLGADIMFAFDELTTLVDTRAYQESSVARTHRWARRCLIEHDRLTRERSHRPRQSLWGVVQGAQYEDLRRQATRGLLDLHQEALDEGRRGFGGFGVGGALEKENLGTIVGWVCDELPREMPRHLLGISEPDDLFTAIEAGADTFDCVAPTRLARRGGVYTLDGRLNLKNARFKRDFSGVDEEFGGYVSENYSRAYLHHLLKAKEFLAGTLCTMHNVEFMVRLVDNIRASIDNGTYAEFKAEFLGRYYT

SEQ ID NO: 54220 - protein, 425 aa, Corynebacterium glaucum
  misc_feature (1)..(425): tr|A0A1Q2HTE8|A0A1Q2HTE8_9CORY Queuine tRNA-ribosyltran sferase OS=Corynebacterium glaucum OX=187491 GN=tgt PE= 3 SV=1
MTAFTLSKELYDAPGKHGRTGTIHTPHGDIHTPAFIPVATKATVKTLTPEQIRLTEAQAILSNAYHLYLQPGADIVDEAGGVAAFENWHGPTYTDSGGFQVMSQGVGFQKVLAMDVAGLTDADIRAANKDRMARVDDDGVDFKSFIDGSSHRFTPEKSMQIQHQLGADIIFAFDELTTLVDTRQYQEHSVERTRRWAKRCLDEHDRLTRERKVTHPDRPEQSLWGVVQGAQYEDLRRQAARGLLELDEQARAEGKRGFGGFGIGGALEKENLGTIVGWVTDELPVDKPRHLLGISEPDDIFTAVEAGADTFDCVAPTRLARRGGVYTLDGRMNLTGARFKRDFAGIDEEFGGYVSQNYSRAYIHHLLKAKEFLAGTLCTIHNLEFMVRLVDNIRRAIDAGDYEAYRDEFMGRYYAGAKTQRRGLG

SEQ ID NO: 54221 - protein, 408 aa, Corynebacterium glucuronolyticum
  misc_feature (1)..(408): tr|C2GES1|C2GES1_9CORY Queuine tRNA-ribosyltransferase OS=Corynebacterium glucuronolyticum ATCC 51866 OX=54847 8 GN=tgt PE=3 SV=1
MSFHINHSDGAARTGVISTPHGDIQTPAFIPVATKATVKTLTPEQIRSTGAQAILSNAYHLYLQPGPDIVDEAGGVAAFENWHGPTYTDSGGFQVMSLGVGFKKVLAMDTANLTEQDIRAAKKDRMARVDEDGVDFRSVIDGSKHRFTPEKSMEIQHQLGADIIFAFDELTTLVDTRQYQEDSVARTHRWARRCLEAHEKLSNERTHRPEQQLWGVVQGAQYEDLRRQATRGLMELDREARAEGRRGFDGFGIGGALEKNQLGTIVGWVTDELPEDKPRHLLGISEPDDIFAAVAAGADTFDCVAPTRLGRRGGVYTLDGRLNLKAARFKRDFTPIDAELGGYVSENYTRAYIHHLLKAKEFLAGTLCTMHNLLFVVKLVDNIRYHLENGTFEEYRDEFMSRYYATGR

SEQ ID NO: 54222 - protein, 411 aa, Corynebacterium glucuronolyticum
  misc_feature (1)..(411): tr|A0A1W1U9S8|A0A1W1U9S8_9CORY Queuine tRNA-ribosyltran sferase OS=Corynebacterium glucuronolyticum OX=39791 GN =tgt PE=3 SV=1
MSFHINHSDGAARTGVISTPHGDIQTPAFIPVATKATVKTLTPEQIRSTGAQAILSNAYHLYLQPGPDIVDEAGGVAAFENWHGPTYTDSGGFQVMSLGVGFKKVLAMDTANLTEQDIRAAKKDRMARVDEDGVDFRSVIDGSKHRFTPEKSMEIQHQLGADIIFAFDELTTLVDTRQYQEDSVARTHRWARRCLEAHERLSNERSHRPEQQLWGVVQGAQYEDLRRQATRGLMDLDRDARDAGRRGFDGFGIGGALEKNQLGTIVGWVTEELPDDKPRHLLGISEPDDIFAAVAAGADTFDCVAPTRLGRRGGVYTLDGRLNLKAARFKRDFTPIDAELGGYVSENYTRAYIHHLLKAKEFLAGTLCTMHNLLFVVKLVDNIRYHLENGTFEEYRDEFMSRYYATGRYKK

SEQ ID NO: 54223 - protein, 418 aa, Corynebacterium glutamicum; identical to SEQ ID NO: 52849
  misc_feature (1)..(418): tr|A0A072Z4R7|A0A072Z4R7_CORGT Queuine tRNA-ribosyltran sferase OS=Corynebacterium glutamicum ATCC 14067 OX=107 9988 GN=tgt PE=3 SV=1

SEQ ID NO: 54224 - protein, 418 aa, Corynebacterium glutamicum
  misc_feature (1)..(418): tr|A0A1R4FN12|A0A1R4FN12_CORGT Queuine tRNA-ribosyltran sferase OS=Corynebacterium glutamicum OX=1718 GN=tgt PE =3 SV=1
MSDLSFTLNNKLADDAPGKHGRTGVIHTPHGDIATPAFIPVATKATVKTLTPEQIRETGAQAILSNAYHLYLQPGPDIVDEAGGVSAFENWHGPTYTDSGGFQVMSLGSGFKKVLAMDTTNLTRNDIKAAKKERMALVDEDGVDFKSVIDGSKHRFTPEVSMQIQHQLGADIIFAFDELTTLVDTYDYQVESVERTRRWAQRCLLEHERLTQERVGKPLQSLWGVVQGAQFEDLRRQAVKGLLDLDRQAADEGRRGFGGFGIGGALEKENLGTIVGWVCDELPEDKPRHLLGISEPDDLFVAVEAGADTFDCVAPTRLGRRGGVYTLDGRMNLTGARFKRDFKGIDEEVGGYASENYSRAYIHHLLKAKEFLAGTLCTMHNLYFMITLVDKIRASIDDGTYYEFKEEFLGRYYASKVS

SEQ ID NO: 54225 - protein, 437 aa, Corynebacterium glyciniphilum
  misc_feature (1)..(437): tr|X5DQH7|X5DQH7_9CORY Queuine tRNA-ribosyltransferase OS=Corynebacterium glyciniphilum AJ 3170 OX=1404245 GN= tgt PE=3 SV=1
MTESAVSPAPAAHDTTFELGTRVGSVDGAPAHGRTGVIHTPHGDIHTPAFIPVATKATVKTLTPEQVRSTGAEAMLSNAYHLYLQPGEDIVDTAGGVAAFENWHGPTYTDSGGFQVMSLGVGFKKVLAMDVANLTEGDIRAVKKERMALVDEDGVDFRSIIDGSKHRFTPEKSMQIQHGLGADIMFAFDELTTLVDTRLYQEESVERTHRWARRCLVEHDRLTGERSHRPLQSLWGVVQGAQYEDLRRQAARGLVELSKEAEEAGRRGFGGFGIGGALEKENLGVITGWVCDELPDEKPRHMLGISEPDDLFTAIAAGADTFDCVAPTRLARRGGVYTLDGRLNLMAGRHRRDFIPIDASLGGYVCDHYSRAYIHHLLRAKEFLAGTLCTLHNIHFMATLTRNIRTSIDEGRFEEYRDEFLGRYYADTPPELRGRQP

SEQ ID NO: 54226 - protein, 420 aa, Corynebacterium godavarianum
  misc_feature (1)..(420): tr|A0A556QE52|A0A556QE52_9CORY Queuine tRNA-ribosyltran sferase OS=Corynebacterium godavarianum OX=2054421 GN=t gt PE=3 SV=1
MNPAHTDLSYTVGTELEPAPGRHGRTGTIHTPHGDIQTPAFIPVATKATVKTLTPEQIHQTGAQAILSNAYHLYLQPGPDIVDEAGGVAAFEHWDGPTYTDSGGFQVMSLGVGFKKVLAMDIADLDESDIRAANKDRMARVDDDGVDFKSVIDGSSHRFTPEVSMQIQHQLGADIMFAFDELTTLVDTRDYQEHSVERTRRWAKRCLDEHDRLTLARDGKPLQSLWGVVQGAQYEDLRRSAVRGLLDLDREAREEGKRGFGGFGIGGALEKENLGTIVGWVTDELPADKPRHLLGISEPDDIFTAVEAGADTFDCVAPTRLGRRGGVYTLDGRMNLTAARFKRDFAGVDEEFGGYVSQNYSRAYIHHLLKAKEFLAGTLCTMHNLEFMIRLVDNIRAAIDAGEYEAYRDEFMGRYYAKQR

SEQ ID NO: 54227 - protein, 420 aa, Corynebacterium gottingense
  misc_feature (1)..(420): tr|A0A3M0UD70|A0A3M0UD70_9CORY Queuine tRNA-ribosyltran sferase OS=Corynebacterium gottingense OX=2041036 GN=tg t PE=3 SV=1
MNPAHTDLSYTVGTELEPAPGRHGRTGTIHTPHGDIQTPAFIPVATKATVKTLTPEQIHQTGAQAILSNAYHLYLQPGPDIVDEAGGVAAFEHWDGPTYTDSGGFQVMSLGVGFKKVLAMDIADLDESDIRAANKDRMARVDDDGVDFKSVIDGSSHRFTPEVSMQIQHQLGADIMFAFDELTTLVDTRDYQEHSVERTRRWAKRCLDEHDRLTLAREGKPLQSLWGVVQGAQYEDLRRSAVRGLLDLDREAREEGKRGFGGFGIGGALEKENLGTIVGWVTDELPADKPRHLLGISEPDDIFTAVEAGADTFDCVAPTRLGRRGGVYTLDGRMNLTAARFKRDFAGVDEEFGGYVSQNYSRAYIHHLLKAKEFLAGTLCTMHNLEFMIRLVDNIRAAIDAGEYEAYRDEFMGRYYAKQR

SEQ ID NO: 54228 - protein, 421 aa, Corynebacterium hadale
  misc_feature (1)..(421): tr|A0A269PGR5|A0A269PGR5_9CORY Queuine tRNA-ribosyltran sferase OS=Corynebacterium hadale OX=2026255 GN=tgt PE= 3 SV=1
MNPAHTDLSYTVGTELEPAPGRHGRTGTIHTPHGDIQTPAFIPVATKATVKTLTPEQIHQTGAQAILSNAYHLYLQPGPDIVDEAGGVAAFEHWDGPTYTDSGGFQVMSLGVGFKKVLAMDIADLDESDIRAANKDRMARVDDDGVDFKSVIDGSSHRFTPEVSMQIQHQLGADIMFAFDELTTLVDTRDYQEHSVERTRRWAQRCLDEHDRLTHAREGKPLQSLWGVVQGAQYEDLRRSAVRGLLDLDREAREEGKRGFGGFGIGGALEKENLGTIVGWVTDELPADKPRHLLGISEPDDIFTAVEAGADTFDCVAPTRLGRRGGVYTLDGRMNLTAARFKRDFAGVDEEFGGYVSQNYSRAYIHHLLKAKEFLAGTLCTMHNLEFMIRLVDNIRAAIDAGEYEAYRDEFMGRYYASTRD

SEQ ID NO: 54229 - protein, 446 aa, Corynebacterium halotolerans
  misc_feature (1)..(446): tr|M1P3P2|M1P3P2_9CORY Queuine tRNA-ribosyltransferase OS=Corynebacterium halotolerans YIM 70093 = DSM 44683 O X=1121362 GN=tgt PE=3 SV=1
MTSPEPASENSGSPAHPDTSFTLGTRLEQDGPGKHGRTGVIHTPHGDIATPAFIPVATKATVKTLTPEQIRSTGAQAILSNAYHLYLQPGHDIVDEAGGVGRFENWHGPTYTDSGGFQVMSLGSGFKKVLAMDTSGLSEADIKAAKKERKALVDEDGVDFRSVIDGSKHRFTPEKSMQIQHGLGADIMFAFDELTTLVDTRAYQEESVERTRRWAQRCLDEHDRLTHARVGKPKQSLWGVVQGAQYEDLRRQATRGLIALSDAAEAEGRRGFGGFGIGGALEKENLGTIVGWVCDELPEHKPRHLLGISEPDDLFTAVEAGADTFDCVAPTRLGRRGGVYTLDGRMNLTAARFKRDFAGVDEEFGGYVSENYSRAYIHHLLKAKEFLAGTLCTMHNLEFMIRLVDNIRAAIDAGDYEAYRDEFLGRYYAGGTPGRVRPNSGSTQRR

SEQ ID NO: 54230 - protein, 441 aa, Corynebacterium heidelbergense
  misc_feature (1)..(441): tr|A0A364VCQ8|A0A364VCQ8_9CORY Queuine tRNA-ribosyltran sferase OS=Corynebacterium heidelbergense OX=2055947 GN =tgt PE=3 SV=1
MRPNPCAPQDPAPATDTWFQLCSRLEHVTRPGRDTAPALGRTGVLNTPHGIIRTPAFIPVATKATVKTLTPEQVKSTGAQAILSNAYHLYLQPGPDIVDEAGGVAAFENWRGPTYTDSGGFQVMSLGVGFKKVLAMDTSGLDTSDIVAQQAKRMAVVDEDGVDFRSVIDGSKHRFTPEVSMQIQHQLGADIMFAFDELTTLVNTRVYQERSVERTHRWAERCLAEHDRLTQARPHRPLQSLWGVVQGAQYEDLRRQAARGLVALSEQAEQRGCRGFGGYGIGGALEKENLGTIVDWVSQELPEEKPRHLLGISEPDDLFTAIAAGADTFDCVAPTRLGRRGGVYTLDGRINLTGARFRRDFSPIDAEVGGYVCENYSRAYIHHLLKAKEFLAGTLCTLHNLHFMVGLVDRIRQAIDEGRFEEYRDQFLSRYYGAEWKDHIG

SEQ ID NO: 54231 - protein, 441 aa, Corynebacterium heidelbergense
  misc_feature (1)..(441): tr|A0A364V859|A0A364V859_9CORY Queuine tRNA-ribosyltran sferase OS=Corynebacterium heidelbergense OX=2055947 GN =tgt PE=3 SV=1
MRPNPCAPQDPAPATDTSFQLCSRLEHVTRPGRDTAPALGRTGVLNTPHGIIRTPAFIPVATKATVKTLTPEQVKSTGAQAILSNAYHLYLQPGPDIVDEAGGVAAFENWRGPTYTDSGGFQVMSLGVGFKKVLAMDTSGLNTSDIVAQQAKRMAVVDEDGVDFRSVIDGSKHRFTPEVSMQIQHQLGADIMFAFDELTTLVNTRVYQERSVERTHRWAERCLAEHDRLTQARPHRPLQSLWGVVQGAQYEDLRRQAARGLVALSEQAEQRGCRGFGGYGIGGALEKENLGTIVDWVSQELPEEKPRHLLGISEPDDLFTAIAAGADTFDCVAPTRLGRRGGVYTLDGRINLTGARFKRDFSPIDAEVGGYVCENYSRAYIHHLLKAKEFLAGTLCTLHNLHFMVGLVDRIRQAIDEGRFEEYRDQFLSRYYGAEWKDHIG

SEQ ID NO: 54232 - protein, 416 aa, Corynebacterium humireducens
  misc_feature (1)..(416): tr|A0A0B5D895|A0A0B5D895_9CORY Queuine tRNA-ribosyltran sferase OS=Corynebacterium humireducens NBRC 106098 = D SM 45392 OX=1223515 GN=tgt PE=3 SV=1
MSRSDLSFTLGTELESAPGRHGRTGTIHTPHGDIRTPAFIPVATKATVKTLTPEQIEQTGAQAILSNAYHLYLQPGADIVDEAGGVGRFENWSGPTYTDSGGFQVMSQGSGYQKVISMDSSDAANGHLPAKKNMAKVDEDGVNFTSFIDGSRHRFTPEVSMQIQHQLGADIIFAFDELTTLMDTRAYQEASVDRTHRWAQRCLDEHDRLTRERADKPLQSLWGVVQGAQYEDLRRQATRGLVQLSDAAVDAGRRGFGGYGIGGALEKENLGTIVGWVCDELPRDKPRHLLGISEPDDMFTAIEAGADTFDCVAPTRLARRGGVYTLDGRMNLEGARFKRDFRGIDEEFGGYVSENYSRAYIRHLFKANEFLGMTLCTIHNLQFMIRLVDNIRDSIEGGYFEEYRAEFMGRYYANRR

SEQ ID NO: 54233 - protein, 413 aa, Corynebacterium imitans
  misc_feature (1)..(413): tr|A0A076NGZ1|A0A076NGZ1_9CORY Queuine tRNA-ribosyltran sferase OS=Corynebacterium imitans OX=156978 GN=tgt PE= 3 SV=1
MSTDLSFDVGTELGRARTGTIHTPHGDIQTPAFIPVATKATVKTLTPEQIRGTGAQAILSNAYHLYLQPGPEIVDEAGGVAAFENWHGPTYTDSGGFQVMSLGVGFKKVLAMDVADLHESDIRAANKDRMARVDDDGVDFKSFIDGSLHRFTPEVSMQIQHQLGADIMFAFDELTTLVDTREYQEHSVERTRRWAKRCLDEHDRLTRARTGKPLQSLWGVVQGAQYEDLRRQATRGLLELDRAAREEGKRGFGGFGIGGALEKENLGTIVGWVTDELPADKPRHLLGISEPDDIFTAVEAGADTFDCVAPTRLGRRGGVYTLDGRMNLAGARFKRDFSGVDEEFGGYVSENYSRAYIHHLLKAKEFLAGTLCTIHNLEFMIRLVDNIRAAIDAGDYEAYRDEFMGRYYANARK

SEQ ID NO: 54234 - protein, 482 aa, Corynebacterium jeikeium
  misc_feature (1)..(482): tr|Q4JSK5|Q4JSK5_CORJK Queuine tRNA-ribosyltransferase OS=Corynebacterium jeikeium (strain K411) OX=306537 GN= tgt PE=3 SV=1
MADNQENTSADAGAGAADLSFEVRTRLRDSESASAGAGAEGSAGAAASAGAGAEGSAGGSAGAGAGAGGSARLNGSAGALGRTGVIKTPHGNIHTPAFIPVATKATVKTLTPEQVRSTGAQAMLSNAYHLYLQPGPDIVDEGGGLAQFENWHGPTYTDSGGFQVMSLGVGYKKVLAMDTKGRSEADIIQQQKKRMAVVDEDGVDFRSVIDGSKHRFTPEVSMQIQHQLGADIMFAFDELTTLVNTRSYQEQSVARTHRWARRCLAEHQRLTDLRTHRPLQSLWGVVQGAQYEDLRRQAARGLVQLSEEAEAQGNRGFGGFGIGGALEKENLGTIVRWVAEELPEDKPRHLLGISEPDDLFTAIEAGADTFDCVAPTRLGRRGGVYTLDGRLNLMGARFKRDFSPIDAAVGGYVSENYSRAYIHHLLKAKEYLAGTLCTLHNLHFMVGLVDRIRESMEQGRFYEFREEFMGRYYGPTWRERLG

SEQ ID NO: 54235 - protein, 470 aa, Corynebacterium jeikeium
  misc_feature (1)..(470): tr|A0A381KIH6|A0A381KIH6_CORJE Queuine tRNA-ribosyltran sferase OS=Corynebacterium jeikeium OX=38289 GN=tgt PE= 3 SV=1
MADNQENTSADAGAGAADLSFEVRTRLRDSESASAGAGAEGSAGAAGSAGAGAAAAASGQANGGAGALGRTGVIKTPHGNIHTPAFIPVATKATVKTLTPEQVRSTGAQAMLSNAYHLYLQPGPDIVDEGGGLAAFENWHGPTYTDSGGFQVMSLGVGYKKVLAMDTKGRSEADIIQQQKKRMAVVDEDGVDFRSVIDGSKHRFTPEVSMQIQHQLGADIMFAFDELTTLVNTRSYQEQSVARTHRWARRCLAEHQRLTDLRTHRPLQSLWGVVQGAQYEDLRRQAARGLVQLSEEAEAQGNRGFGGFGIGGALEKENLGTIVRWVAEELPEDKPRHLLGISEPDDLFTAIEAGADTFDCVAPTRLGRRGGVYTLDGRLNLMGARFKRDFSPIDAAVGGYVSENYSRAYIHHLLKAKEYLAGTLCTLHNLHFMVGLVDRIRESMEQGRFYEFREEFMGRYYGPAWRERLG

SEQ ID NO: 54236 - protein, 414 aa, Corynebacterium kefirresidentii
  misc_feature (1)..(414): tr|A0A243VGJ1|A0A243VGJ1_9CORY Queuine tRNA-ribosyltran sferase OS=Corynebacterium kefirresidentii OX=1979527 G N=tgt PE=3 SV=1
MDLSFDVGKRLPEGPGKHGRSGVIHTPHGDIQTPAFIPVATKATVKTLTPEQIRATGAQAILSNAYHLYLQPGHDIVDEAGGVAKFENWHGPTYTDSGGFQVMSLGVGFKKVLAMDVADLSDKDIRAAKKERMAQVDEDGVDFKSVIDGSKHRFTPEKSMQIQHGLGADIMFAFDELTTLVDTRTYQEESVARTHRWAKRCLDEHDRLTRERAHRPKQSLWGVVQGAQYEDLRRQATRGLLDLDRAAREEGKRGFGGFGIGGALEKENLGTIVGWVCDELPEDKPRHLLGISEPDDIFTAVEAGADTFDCVAPTRLARRGGVYTLDGRMNLTNARFKRDFAGVDEEFGGYVSENYSRAYLHHLLKAKEFLAGTLCTIHNVEFMIRLVDNIRAAIDGGYYEAYRDEFLGRYYAGK

SEQ ID NO: 54237 - protein, 374 aa, Corynebacterium kroppenstedtii
  misc_feature (1)..(374): tr|A0A133Z378|A0A133Z378_9CORY Queuine tRNA-ribosyltran sferase OS=Corynebacterium kroppenstedtii OX=161879 GN= HMPREF1861_01851 PE=3 SV=1
MLTPEQIRATGAQAILSNAYHLYLQPGPDLIDEAGGVAAFENWHGPTYTDSGGFQVMSLGVGFKKVLAMDTKDIKPEDVKARHKERYAHVDDDGVNFRSVINGSKHRFTPEKSMQIQHGLGADIMFAFDELTTLMDSREYQEESVERTRRWAQRCLEEHNRLTEARVGKPLQSLWGVVQGAQYEDLRRHAAQSLVDMSDQFEAEGRRGFGGFGIGGALEKSALGTIVGWVTDVLPENKPRHLLGISEPDDLFTAIEAGADTFDCVSPTRLGRRGGVYTLDGRLSLKTARFTRDFRPIDNELEGYVSQYSRAYIHHLLKAKEFLAGTLCSIHNIQFIVSLVHNARQALIEDRFHEFRDEFLGRYYANGGRAPEWK

SEQ ID NO: 54238 - protein, 427 aa, Corynebacterium kroppenstedtii
  misc_feature (1)..(427): tr|C4LGK8|C4LGK8_CORK4 Queuine tRNA-ribosyltransferase OS=Corynebacterium kroppenstedtii (strain DSM 44385 / J CM 11950 / CIP 105744 / CCUG 35717) OX=645127 GN=tgt PE =3 SV=1
MTESPTVAGSRATDTSFDVINSAGKARAGVIHTPHGDIPTPAFIPVATKATVKMLTPEQIRATGAQAILSNAYHLYLQPGPELVDEAGGVAKFENWHGPTYTDSGGFQVMSLGVGFKKVLAMDTKDIKPEDVKARHKERYAHVDEDGVNFRSVINGSKHRFTPEKSMQIQHGLGADIMFAFDELTTLMDSREYQEESVERTRRWAQRCLEEHNRLTETRAGKPLQSLWGVVQGAQYEDLRRHAAQSLVDMSDQFEAEGRRGFGGFGIGGALEKSALGTIVGWVTDVLPENKPRHLLGISEPDDLFTAIEAGADTFDCVSPTRLGRRGGVYTLDGRLSLKTARFTRDFRPIDDEIEGYVSQYSRAYIHHLLKAKEFLAGTLCSIHNIQFIVSLVHNARQALIEGRFHEYRDEFLGRYYANGGRAPEWK

SEQ ID NO: 54239 - protein, 415 aa, Corynebacterium kutscheri
  misc_feature (1)..(415): tr|A0A0F6QY57|A0A0F6QY57_9CORY Queuine tRNA-ribosyltran sferase OS=Corynebacterium kutscheri OX=35755 GN=tgt PE =3 SV=1
MTDITFELGTELFDEPGKHGRTGTIHTPHGDIRTPAFIPVGTKATVKTLTPEQIRETGAQAVLSNAYHLYLQPGPDIVDEAGGVAAFENWHGPTYTDSGGFQVMSLGVGFKKVLAMNVKGWEEKDIRARHKDRLAKVDEDGVDFRSVIDGSRHRFTPEVSMQIQHQLGADIMFAFDELTTLIDTRTYQEESVARTHRWAQRCIDEHNRLTEQRVGKPLQSLWGVVQGAQYEDLRRQAARGLVEISNQAEAEGRRGFGGFGIGGALEKENLGTIVGWVCDELPKDKGRHLLGISEPDDLFTAIEAGADTFDCVAPTRLGRRGGVYTLDGRLNLTAARFKRDFTPVDAEFGGYVSENYTRAYIHHLFKAKEFLAGTLCTMHNVTFMIKLVDDIRFHMEAGSYAEFKKEFMGRYYASK

SEQ ID NO: 54240 - protein, 433 aa, Corynebacterium lactis
  misc_feature (1)..(433): tr|A0A0K2GYD6|A0A0K2GYD6_9CORY Queuine tRNA-ribosyltran sferase OS=Corynebacterium lactis RW2-5 OX=1408189 GN=t gt PE=3 SV=1
MSESKTVGFDVVKQIEGARGRAGVIHTPHGDIATPAFTPVATKATVKTLTPEQIRDTGAQAILSNAYHLYLQPGEDIVDEAGGVAAFENWRGPTYTDSGGFQVLSLGAGFKKTLAMDVSGLQKDDIVADGKERNAFVDEDGVTFRSHIDGSEHRFTPEVSMRIQHALGADILMAFDELTTLMNTRAYQESSVERTHRWARRCLQAHNELTDARGQVDGHADSLADGQLPLQQLFGVVQGAQYEDLRRKAARGLVELSREFEDAGKLGFHGFGIGGAIEKHNLGLICGWVNDELPDDRARHLLGISEPDDIFAAVEAGADTFDCVAPTRLARRGGVYTLDGRMTLTNARFKRDFRPVDAEVDSYTSLNYSRAYLHHLLKAKEYLAGTLCTIHNLYFMVHLVDNIRAAILEDRFYEYRDEFLGRYYANGGRAVGN

SEQ ID NO: 54241 - protein, 419 aa, Corynebacterium lipophiloflavum
  misc_feature (1)..(419): tr|C0XU34|C0XU34_CORLD Queuine tRNA-ribosyltransferase OS=Corynebacterium lipophiloflavum (strain DSM 44291 / CCUG 37336) OX=525263 GN=tgt PE=3 SV=1
MDDLSFEVGTEVGTEVGTARTGVIHTPHGDIATPAFIPVATKATVKTLTPEQIRRVGAQAILSNAYHLYLQPGPDIVDEAGGVAAFENWHGPTYTDSGGFQVMSLGVGYKKVLAMDTLHHNRNDIRAGEKERLAKVDEDGVDFKSFIDGSLHRFTPEVSMQIQHQLGADIIFAFDELTTLADTRVYQEQSVERTHRWARRCLDEHDRLTRVRADKPKQSLWGVIQGAQYEDLRRQATRGLLELDRQARGEGKRGFGGFGIGGALEKEHLGTIVGWVTDELPADKPRHLLGISEPDDIFAAVEAGADTFDCVAPTRLGRRGGVYTLDGRLNLTGARFKRDFTGIDEEFGGYVSENYSRAYIHHLLKAKEFLAGTLCTMHNLEFMIRLVDNIRAAIQDGTYPEFKAEFLGRYYAPAASPTQ

SEQ ID NO: 54242 - protein, 419 aa, Corynebacterium lowii
  misc_feature (1)..(419): tr|A0A0N8W0N2|A0A0N8W0N2_9CORY Queuine tRNA-ribosyltran sferase OS=Corynebacterium lowii OX=1544413 GN=tgt PE=3 SV=1
MSDLFFEVGTRLDNDQPGKHGRTGVIHTPHGDIATPAFIPVATKATVKTLTPEQIRETGAQAILSNAYHLYLQPGPEIVDEAGGVAAFENWHGPTYTDSGGFQVMSLGVGFKKVLAMDVANLTKEDVRAAKKERLAKVDEDGVDFKSVIDGSAHRFTPEVSMQIQHHLGADIMFAFDELTTLVDSRAYQEESLVRTTRWAQRCLDEHHRLTLARPDKPKQSLWGVVQGAQYEDLRCKATRDLVSLSDAAEAQGKRGFGGFGIGGALEKENLGTIVGWVCDELPQHKPRHLLGISEPDDLFTAIEAGADTFDCVAPTRLGRRGGVYTLDGRLNLTNARFKRDFKGIDEEFGGYVSQNYSRAYIHHLLKAKEFLAGTLCTMHNLAFMVGLVDNIRAAIQAGDYEAYRDEFLGRYYQGTRAV

SEQ ID NO: 54243 - protein, 418 aa, Corynebacterium macginleyi
  misc_feature (1)..(418): tr|A0A3M0H236|A0A3M0H236_9CORY Queuine tRNA-ribosyltran sferase OS=Corynebacterium macginleyi OX=38290 GN=tgt P E=3 SV=1
MKDLRFDIDKRLPEGPGKHGRSGVIHTPHGDIATPAFIPVATKATVKTLTPEQIRATGAQAILSNAYHLYLQPGHDVVDEAGGVAKFENWHGPTYTDSGGFQVMSLGVGFKKVIAMDLVDLTEKDIRAAKRERMAKVDDEGVDFRSIIDGSKHRFTPEKSMQIQHGLGADIMFAFDELTTLIDSRTYQEESVARTHRWAQRCLEEHDRLTRERHHRPKQSLWGVVQGAQYEDLRRQATRGLLDLDRAAREKGQRGFGGFGIGGALEKQNLGTIVGWVCDELPDDKPRHLLGISEPDDIFTAVEAGADTFDCVAPTRLARRGGVYTLDGRLNLTNARFKRDFAGIDEEWGGYVTENYSRAYLHHLLKAKEFLAGTLCTIHNVEFMVRLVDNIRAAINGDYYEDYRDEFLGRYYAASKAR

SEQ ID NO: 54244 - protein, 415 aa, Corynebacterium marinum
  misc_feature (1)..(415): tr|A0A0B6TIQ7|A0A0B6TIQ7_9CORY Queuine tRNA-ribosyltran sferase OS=Corynebacterium marinum DSM 44953 OX=1224162 GN=tgt PE=3 SV=1
MTDLSFSLGTELESGPGRHGRTGVIHTPHGDIATPAFIPVATKATVKTLTPEQIRQTGAQAILSNAYHLYLQPGADIVDEAGGVGRFENWSGPTYTDSGGFQVMSQGSGFQKTISMDAAEAMANGHLPAKKNMAKVDEEGVDFTSFIDGSRHRFTPEVSMQIQHQLGADIIFAFDELTTLMDARDYQESSVERTRRWAQRCLVEHDRLTHERADKPLQSLWGVVQGAHYEDLRRQATRGLVELSDAAVDQGRRGFGGFGIGGALEKENLGTIVGWVCDELPKDKPRHLLGISEPDDMFTAVEAGADTFDCVAPTRLARRGGVYTLDGRMNLEGARFKRDFRGIDEEFGGYVSENYSRAYLRHLFKANEFLGMTLCTIHNLSFMIRLVDNIRASIDGGYFEEYRAEFLGRYYAGKG

SEQ ID NO: 54245 - protein, 427 aa, Corynebacterium maris
  misc_feature (1)..(427): tr|S5SRK2|S5SRK2_9CORY Queuine tRNA-ribosyltransferase OS=Corynebacterium maris DSM 45190 OX=1224163 GN=tgt PE =3 SV=1
MTDTPRPAVNGSTDTTFTLGTELEKAPGRHGRTGVIHTPHGDIQTPAFIPVGTKATVKTLTPEQIRNTGAQAILSNAYHLYLQPGHDIVDEAGGLSAFTNWRGPTYTDSGGFQVMSLGSGFKKVLAMGTEGLSEADIKARDKERLAKVDEDGVDFKSFIDGSSHRFTPEFSMQIQHGLGADIMFAFDELTTLVDTRKYQEGSVERTHRWAERCLREHDRLTTERSHRPKQSLWGVVQGAQYEDLRRQATRGLIELSDAAEADGRRGFGGFGIGGALEKENLGTIVGWVCDELPVDKPRHLLGISEPDDLFTAVEAGADTFDCVAPTRLGRRGGVYTLDGRMNLTAARFKRDFRGVDEEFGGYVSENYSRAYIRHLLKANEFLAGTLCTMHNVEFMIRLVDNMRAAIEAGDFEAYRDEFLGRYYHGQK

SEQ ID NO: 54246 - protein, 416 aa, Corynebacterium mastitidis
  misc_feature (1)..(416): tr|A0A2N0X9A0|A0A2N0X9A0_9CORY Queuine tRNA-ribosyltran sferase OS=Corynebacterium mastitidis OX=161890 GN=tgt PE=3 SV=1
MTDLSFDIGTRLPDSEPGRHGRTGVIHTPHGDIATPAFIPVATKATVKTLTPEQIRETGAQAILSNAYHLYLQPGPEIVDEAGGVAAFENWRGPTYTDSGGFQVMSLGVGFKKVLAMDVADLTPQDVRAAKKERLAKVDEDGVDFKSVIDGSAHRFTPEVSMRIQHHLGADIMFAFDELTTLVDSREYQEESLVRTTRWAQRCLDEHDRLTRQRSHRPPQSLWGVVQGAQYEDLRRRAARDLVALSDAAESQGRRGFGGFGIGGALEKGNLGTIVGWVCDELPEHKPRHLLGISEPDDLFTAVEAGADTFDCVAPTRLGRRGGVYTLDGRLNLTNARFKRDFRGIDEEFGGYVSQNYSRAYIHHLLKAKEFLAGTLCTMHNLAFMVGLVDNIRAAITAGEYEAFRDEFLGRYYGQH

SEQ ID NO: 54247 - protein, 412 aa, Corynebacterium matruchotii
  misc_feature (1)..(412): tr|C0DZM7|C0DZM7_9CORY Queuine tRNA-ribosyltransferase OS=Corynebacterium matruchotii ATCC 33806 OX=566549 GN= tgt PE=3 SV=1
MAAKADTSFTVGTEFTENGRTGIIHTPHGDIHTPAFIPVGTKATVKTLTPEQVKATGAQAVLANAYHLYLQPGPDIVDEAGGVAAFQNWGGPTYTDSGGFQVMSLGVGHKKVLMMDHVSQEPVARTEKKDRYALVDEEGVNFRSVIDGSKHRFTPEISMQIQHQLGADIMFAFDELTVLADTREYQEASVDRTHRWAKRCLDEHDKLTRERVDKPLQSLWGVVQGAQYEDLRRKATRGLIELSNQAEAEGRRGFGGFGIGGALEKENLGTIVGWVCDELPATKPRHLLGISEPDDLFRAIEAGADTFDCVAPTRLGRRGGAYTLDGRVNLTAARFKRDFEPIDAEFGGYVSENYTRAYIHHLFKAKEFLGGTLCTIHNVSFIVRLVDNIRAAINGGYYEDYKREFLGRYYHS

SEQ ID NO: 54248 - protein, 412 aa, Corynebacterium matruchotii
  misc_feature (1)..(412): tr|A0A3S4XWI2|A0A3S4XWI2_9CORY Queuine tRNA-ribosyltran sferase OS=Corynebacterium matruchotii OX=43768 GN=tgt PE=3 SV=1
MAEKVDTSFTVGTEFTENGRTGTIHTPHGDIHTPAFIPVGTKATVKTLTPEQVKATGAQAVLANAYHLYLQPGPDIVDEAGGVAAFQNWGGPTYTDSGGFQVMSLGVGHKKVLMMDHVSQEPVARTEKKDRYALVDEEGVNFRSVIDGSKHRFTPEISMQIQHQLGADIMFAFDELTVLADTREYQEASVDRTHRWAKRCLDEHDKLTRERVDKPLQSLWGVVQGAQYEDLRRKATRGLIELSNQAEAEGRRGFGGFGIGGALEKENLGTIVGWVCDELPATKPRHLLGISEPDDLFRAIEAGADTFDCVAPTRLGRRGGAYTLDGRVNLTAARFKRDFEPIDAEFGGYVSENYTRAYIHHLFKAKEFLGGTLCTIHNVSFIVRLVDNIRAAINGGYYEDYKREFLGRYYHS

SEQ ID NO: 54249 - protein, 427 aa, Corynebacterium minutissimum
  misc_feature (1)..(427): tr|A0A376CRE5|A0A376CRE5_9CORY Queuine tRNA-ribosyltran sferase OS=Corynebacterium minutissimum OX=38301 GN=tgt PE=3 SV=1
MTHPKPQLETDLSFDVKKELDLSGPAQPGKHGRTGVIHTPHGDIQTPAFIPVATKATVKTLTPEQIRATGAQAILSNAYHLYLQPGHDIVDEAGGVATFENWHGPTYTDSGGFQVMSLGVGFKKVLAMDVADLTESDIRAAKKERMAQVDEDGVDFKSFIDGSTHRFTPEVSMQIQHGLGADIMFAFDELTTLVDTRTYQEESVERTRRWAQRCLDEHDRLTLARGPQKPRQSLWGVVQGAQYEDLRRQAARGLVELSDRAEANGRRGFGGFGIGGALEKENLGTIVGWVCDELPVDKPRHLLGISEPDDIFTAVEAGADTFDCVAPTRLARRGGVYTLDGRLNLTNARFKRDFVGVDEEFGGYVSENYSRAYIHHLLKAKEFLAGTLCTIHNLEFMIRLVDNIRESIDGGYYEAYRDEFMGRYYAK

SEQ ID NO: 54250 - protein, 427 aa, Corynebacterium minutissimum
  misc_feature (1)..(427): tr|A0A0M2X7M1|A0A0M2X7M1_9CORY Queuine tRNA-ribosyltran sferase OS=Corynebacterium minutissimum OX=38301 GN=tgt PE=3 SV=1
MTHPKPLLETDLSFDVKKELDLSGPAQPGKHGRTGVIHTPHGDIQTPAFIPVATKATVKTLTPEQIRLTGAQAILSNAYHLYLQPGHDIVDEAGGVATFENWHGPTYTDSGGFQVMSLGVGFKKVLAMDVAELTDSDIRAAKKERMAQVDEDGVDFKSFIDGSMHRFTPEVSMQIQHGLGADIMFAFDELTTLVDTRTYQEESVERTRRWAQRCLDEHDRLTLARGPQKPRQSLWGVVQGAQYEDLRRQAARGLVELSDRAEANGRRGFGGFGIGGALEKENLGTIVGWVCDELPVDKPRHLLGISEPDDIFTAVEAGADTFDCVAPTRLARRGGVYTLDGRMNLTNARFKRDFAGVDEEFGGYVSENYSRAYIHHLLKAKEFLAGTLCTIHNLEFMIRLVDNIRESIDGGYYEAYRDEFMGRYYAK

SEQ ID NO: 54251 - protein, 419 aa, Corynebacterium mustelae
  misc_feature (1)..(419): tr|A0A0G3H063|A0A0G3H063_9CORY Queuine tRNA-ribosyltran sferase OS=Corynebacterium mustelae OX=571915 GN=tgt PE =3 SV=1
MESHVDTTFSLKTELEPGPGKHGRTGTIHTPHGDIHTPAFIPVGTKATVKTLTPEQVKETGAQAVLSNAYHLYLQPGPDIVDEAGGVAAFENWDGPTYTDSGGFQVMSLGVGFKKVLAMDTAGLTEGDIRARHKDRYAKVDEEGVDFRSVVDGSKHRFTPEISMQIQHKLGADIMFAFDELTTLVDTRLYQEQSVDRTHRWAKRCLDEHDRLTRERADKPLQSLWGVVQGAQYEDLRRQATRGLIQLSDQAEAEGKRGFGGFGIGGALEKENLGTIVGWVCDELPKEKPRHLLGISEPDDLFTAIEAGADTFDCVAPTRLGRRGGVYTLDGRMNLLNARFKRDFTGVDEEFGGYVSENYSRAYIHHLLKAKEFLAGTLCTMHNVTFMVRLVDNIRAAIDGGYYEDYKAEFMGRYYAKKN

SEQ ID NO: 54252 - protein, 420 aa, Corynebacterium mycetoides
  misc_feature (1)..(420): tr|A0A1G9Q243|A0A1G9Q243_9CORY Queuine tRNA-ribosyltran sferase OS=Corynebacterium mycetoides OX=38302 GN=tgt P E=3 SV=1
MHDLSFEVGAQLDDAPGKHGRTGTIHTPHGDIATPAFIPVATKATVKTLTPEQIRRVGAQAILSNAYHLYLQPGPDIVDEAGGVAAFENWHGPTYTDSGGFQVMSLGVGYKKVLAMDTLHHNRNDIRAGEKERLAKVDEDGVDFKSFIDGSAHRFTPEVSMQIQHQLGADIIFAFDELTTLADTRAYQEHSVERTRRWAQRCLDEHDRLTRERAGKPKQSLWGVVQGAQYEDLRRHATRGLLDLDARARAEGRRGFGGFGIGGALEKEHLGTIVGWVTDELPADKPRHLLGISEPDDIFAAVEAGADTFDCVAPTRLGRRGGVYTLDGRLNLTGARFKRDFTGIDEEFGGYVSENYSRAYIHHLLKAKEFLAGTLCTMHNLEFMIRLVDNIRAAIQDGTYPEFKAEFLGRYYAPAASPTQ

SEQ ID NO: 54253 - protein, 421 aa, Corynebacterium oculi
  misc_feature (1)..(421): tr|A0A0Q1DWH1|A0A0Q1DWH1_9CORY Queuine tRNA-ribosyltran sferase OS=Corynebacterium oculi OX=1544416 GN=tgt PE=3 SV=1
MTDLSFEVHTRLGNAAPGENGKHGKHGRTGVIHTPHGDIATPAFIPVATKATVKTLTPEQIKETGAQAILSNAYHLYLQPGPEIVDEAGGVAAFENWRGPTYTDSGGFQVMSLGVGFKKVLAMDVADLTTADVRAAKKERLAKVDEDGVDFKSVIDGSAHRFTPEVSMRIQHHLGADIMFAFDELTTLVDSRQYQEESLVRTTRWAQRCLDEHDRLTRERVHRPKQSLWGVVQGAQYGDLRRKAARDLVALSDAAEAQGRRGFGGFGIGGALEKENLGTIVGWVCDELPEHKPRHLLGISEPDDLFTAIEAGADTFDCVAPTRLGRRGGVYTLDGRLNLTNARFKRDFQGIDEEFGGYVSENYSRAYIHHLLKAKEFLAGTLCTMHNLTFMVRLVDNIRAAMERGDYEAFRDEFLGRYYRH

SEQ ID NO: 54254 - protein, 420 aa, Corynebacterium otitidis
  misc_feature (1)..(420): tr|I7JWS4|I7JWS4_9CORY Queuine tRNA-ribosyltransferase OS=Corynebacterium otitidis ATCC 51513 OX=883169 GN=tgt PE=3 SV=1
MAAPDNARDLTFSVSRRLPGGGRSGLIDTPHGPIATPAFVPVATKAAVKLLTPAQLRDVGAQAILSNAYHLYLQPGPDIVDEAGGVASFEAWGGPTYTDSGGFQVMSLGSGLGKVIAMEKDDVSEREARAAHRERLSKVDDDGVDFRSVVDGSRHRFTPEKSIQIQHQLGADIMFAFDELTTLFESRSYQEESVERTRRWARRCLVEHDRLTRERADEPRQSLWGVVQGAQFEDLRREAARGLVALDEEAQAEGRRGFGGFGIGGALEKHRLGEMVRWVTEELPEDKPRHLLGISEPDDIFAAVAAGADTFDCVAPTRLGRRGGVYTLDGRVNLAAAKYKRDFRGIDEEFGGVVATTYSRAYIRHLLKAKELLAGTLCSLHNLEFVIRLVANIRAAIEAGDFEAYRDEFLGRYYHAERRG

SEQ ID NO: 54255 - protein, 428 aa, Corynebacterium pelargi
  misc_feature (1)..(428): tr|A0A410WBN6|A0A410WBN6_9CORY Queuine tRNA-ribosyltran sferase OS=Corynebacterium pelargi OX=1471400 GN=tgt PE =3 SV=1
MNNAEGEAKAQHEDIAFELGTELPEAQQQPGKHGRTGVIHTPHGDIHTPAFIPVATKATVKTLTPEQIKQTGAQAILSNAYHLYLQPGQDVVDEAGGLAEFEHWHGPTYTDSGGFQVMSLGVGFKKVLAMDTKGWEEKDIRARHKDRYAHVDEEGVNFRSVIDGSKHRFTPEVSMQIQHGLGADIMFAFDELTTLVDTRAYQESSVARTHRWARRCLIEHDRLTLERSHRPKQSLWGVVQGAQYEDLRRQATRGLLDLHREALDEGRRGFGGFGIGGALEKENLGTIVGWVCDELPREMPRHLLGISEPDDLFTAIEAGADTFDCVAPTRLARRGGVYTLDGRLNLKNARFKRDFSGIDEEFGGYVSENYSRAYLHHLLKAKEFLAGTLCTMHNVEFMVRLVDNIRASIDNGTYEEFKAEFLGRYYSK

SEQ ID NO: 54256 - protein, 426 aa, Corynebacterium phocae
  misc_feature (1)..(426): tr|A0A1L7D0U6|A0A1L7D0U6_9CORY Queuine tRNA-ribosyltran sferase OS=Corynebacterium phocae OX=161895 GN=tgt PE=3 SV=1
MNQPLLDTDLSFTQGTALSEELGEGPGKHGRTGTIHTPHGDIQTPAFIPVATKATVKTLTPEQIRMTGAQAILSNAYHLYLQPGHDVVDAAGGVAAFENWHGPTYTDSGGFQVMSLGVGFKKVLAMDASELSEKDIRAAKKERMALVDEDGVDFRSIIDGSKHRFTPEVSMQIQHGLGADILFAFDELTTLVDTRQYQEESVARTHRWAKRCLDEHHRQTLARAGKPRQSLWGVIQGAQYEDLRRQATRGLVELSNQAEAEGRRGFGGFGIGGALEKENLGTIVGWVCDELPKEKPRHLLGISEPDDLFTAVAAGADTFDCVAPTRLARRGGVYTLDGRMTLTNARFKRDFAGVDEEFGGYVSNNYSRAYLHHLLKAKEFLAGTLCTIHNLEFMVRLVDNIRASIEGGYFSEYRDEFMGRYYAGKK

SEQ ID NO: 54257 - protein, 421 aa, Corynebacterium phoceense
  misc_feature (1)..(421): tr|A0A540R599|A0A540R599_9CORY Queuine tRNA-ribosyltran sferase OS=Corynebacterium phoceense OX=1686286 GN=tgt PE=3 SV=1
MTKPLLDTDLSFDVHTRLPEGTGKHGRTGVIHTPHGDIQTPAFIPVATKATVKTLTPEQIRQTGAQAILSNAYHLYLQPGHDIVDEAGGVAEFENWHGPTYTDSGGFQVMSLGVGFKKVLAMDVANLTEGDIRAAKKERMAQVDEDGVDFKSIIDGSKHRFTPEVSMQIQHSLGADIMFAFDELTTLVDTRQYQEESVARTHRWAKRCLDEHDRLTNARAGKPRQSLWGVVQGAQYEDLRRQATRGLVQLSDAAVAAGMRGFGGFGIGGALEKENLGTIVGWVCDELPEDKPRHLLGISEPDDLFTAIEAGADTFDCVAPTRLGRRGGVYTLDGRLNLMGAKFKRDFKGIDEEFGGYVSENYSRAYIHHLLKAHEFLAGTLCTMHNLEFMIRLVDNIRASIDGGYYEAFRDEFMGRYYAKK

SEQ ID NO: 54258 - protein, 432 aa, Corynebacterium pilosum
  misc_feature (1)..(432): tr|A0A376CMF9|A0A376CMF9_9CORY Queuine tRNA-ribosyltran sferase OS=Corynebacterium pilosum OX=35756 GN=tgt PE=3 SV=1
MTEHPTAPTPAQDETQHDDLSFTLGARLEQRPGRNGRAGMIHTPHGDIQTPAFIPVATKATVKTLTPEQIRNTGAQAILSNAYHLYLQPGHDIVDEAGGLAQFTNWHGPTYTDSGGFQVMSLGVGFKKVLAMDTANLTREDIRAKDKERMAHVDDDGVNFKSFIDGSSHRFTPEFSMQIQHGLGADIMFAFDELTTLVDTREYQEESVERTRRWAQRCIDEHTRLTRERPHRPKQSLWGVVQGAQYEDLRRHATRGLLELDRNARAEGKRGFGGFGIGGALEKENLGTIVGWVTDELPDEKPRHMLGISEPDDIFLAVEAGADTFDCVAPTRLGRRGGVYTLDGRLNLTGARFKRDFTGVDEEFGGYVSENYSRAYIHHLLKAKEFLAGTLCTMHNLEFMIRLVDNIRESIHQGRFEEYRDHFLGRYYHSKR

SEQ ID NO: 54259 - protein, 413 aa, Corynebacterium pollutisoli
  misc_feature (1)..(413): tr|A0A1X7IM84|A0A1X7IM84_9CORY Queuine tRNA-ribosyltran sferase OS=Corynebacterium pollutisoli OX=1610489 GN=tg t PE=3 SV=1
MTDLSFTLGTELGSGPGRHGRTGTIHTPHGDIQTPAFIPVATKATVKTLTPEQIEQTGAQAILSNAYHLYLQPGADIVDEAGGVGRFENWSGPTYTDSGGFQVMSQGVGFQKTLTMEQKDGQDWGREKKSMARVDEEGVDFVSFIDGSRHRFTPEISMQIQHQLGADIIFAFDELTTLMDTRSYQEASVERTHRWAARCIDEHNRQTALREGRPLQSLWGVIQGAQYEDLRRQATRDLVELSDASVAAGQRGFGGYGIGGALEKENLGTIVGWVCDELPVDKPRHLLGISEPDDIFTAVEAGADTFDCVAPTRLARRGGVYTLDGRLNLVNAGFKRDFRGIDEEFGGYVSENYSRAYLRHLFKANEFLGMTLCTIHNLSFMIRLVDNVRASIEGGYFEEYRAEFMGRYYAKKK

SEQ ID NO: 54260 - protein, 416 aa, Corynebacterium propinquum
  misc_feature (1)..(416): tr|A0A433FIN0|A0A433FIN0_9CORY Queuine tRNA-ribosyltran sferase OS=Corynebacterium propinquum OX=43769 GN=tgt P E=3 SV=1
MTDLSFTVNTHLDLPGMQGRTGTITTPHGPINTPAFIPVATKATVKTLSPEQIRLTGAQAILSNAYHLYLQPGHDIVDEAGGVAKFESWHGPTYTDSGGFQVMSLGVGHKKTIKMDYEQEMAEYTPRKVNKDSLAIVDEDGVNFRSVLDGSRHRFTPEKSLQIQHGLGADIMFAFDELTTLVDTRAYQEESVARTHRWAERCLLEHDRLTRERAHRPKQSLWGVIQGAQHEDLRRQATRGLVELSREAEAAGRRGFGGYGIGGALDKGMLGTIVGWVCEELPDDKPRHLLGISEPDDVFWAIENGADTFDCVSPTRLGRRGGVYTLDGRMNLKNKRFERDFSGVDEEFGGYVSQNYSRAYIRHLLKAKEFLAGTLCTIHNLEFMIRLVDNIRQSIDGGYYREYRDEFLGRYYANTK

SEQ ID NO: 54261 - protein, 416 aa, Corynebacterium propinquum
  misc_feature (1)..(416): tr|A0A2W5LFK7|A0A2W5LFK7_9CORY Queuine tRNA-ribosyltran sferase OS=Corynebacterium propinquum OX=43769 GN=tgt P E=3 SV=1
MTDLSFTVNTHLDLPGMQGRTGTITTPHGPINTPAFIPVATKATVKTLSPEQIRLTGAQAILSNAYHLYLQPGHDIVDEAGGVAKFESWHGPTYTDSGGFQVMSLGVGHKKTIKMDYEQEMAEYTPRKVNKDSLAIVDEDGVNFRSVLDGSRHRFTPEKSLQIQHGLGADIMFAFDELTTLVDTRAYQEESVARTHRWAERCLVEHDRLTRERAHRPKQSLWGVIQGAQHEDLRRQATRGLVSLSQEAEAAGRRGFGGYGIGGALDKGMLGTIVGWVCDELPDDKPRHLLGISEPDDVFWAIENGADTFDCVSPTRLGRRGGVYTLDGRMNLKNKRFERDFSGVDEEFGGYVSQNYSRAYIRHLLKAKEFLAGTLCTIHNLEFMIRLVDNIRQSIGGGYYREYRDEFLGRYYAHTK

SEQ ID NO: 54262 - protein, 435 aa, Corynebacterium provencense
  misc_feature (1)..(435): tr|A0A2Z3YMF6|A0A2Z3YMF6_9CORY Queuine tRNA-ribosyltran sferase OS=Corynebacterium provencense OX=1737425 GN=tg t PE=3 SV=1
MTDSADPVASLPSDTTFDPGIRIGTTDGKPSHGRTGVIHTPHGDIHTPAFIPVATKATVKTLTPEQVRSTGAEAILSNAYHLYLQPGEDIVEEAGGLAEFENWHGPTYTDSGGFQVMSLGVGFKKVLAMDVANLTEGDIRAAKKERMALVDEDGVDFRSIIDGSSHRFTPEKSMQIQHSLGADIMFAFDELTTLVDTRRYQEESVARTHRWAQRCLAEHDRLTTLRSDRPRQSLWGVVQGAQYEDLRRQAARGLVELSRQAEEEGRRGFGGFGIGGALEKENLGTITGWVCDELPEDRPRHMLGISEPDDLFTAVAAGADTFDCVAPTRLGRRGGVYTLDGRLNLVAARHRRDFIPIDTETGGYVNANYTRAYIHHLLKAHEFLAGTLCTLHNINFMMTLTRNIRRSVEEGRFEEYRDEFLGRYYAGRAPELRGR

SEQ ID NO: 54263 - protein, 416 aa, Corynebacterium pseudodiphtheriticum
  misc_feature (1)..(416): tr|A0A433ITJ9|A0A433ITJ9_9CORY Queuine tRNA-ribosyltran sferase OS=Corynebacterium pseudodiphtheriticum OX=3763 7 GN=tgt PE=3 SV=1
MTDLSFTVNTHLDLPGMQGRTGTITTPHGPINTPAFIPVATKATVKTLSPEQIRLTGAQAILSNAYHLYLQPGHDIVDEAGGVAKFESWHGPTYTDSGGFQVMSLGVGHKKTIKMDYEQEMAEFTPRKVNKDSLAIVDEDGVNFRSVLDGSRHRFTPEKSLQIQHGLGADIMFAFDELTTLVDTRAYQEESVARTHRWAERCLAEHDRLTRERAHRPKQSLWGVIQGAQHEDLRRQATRGLVSLSQEAEAAGRRGFGGYGIGGALDKGMLGTIVGWVCEELPDDKPRHLLGISEPDDVFWAIENGADTFDCVSPTRLGRRGGVYTLDGRMNLKNKRFERDFSGVDEEFGGYVSQNYSRAYIRHLLKAKEFLAGTLCTIHNLEFMIRLVDNIRQSIDGGYYREYRDEFLGRYYAHTK

SEQ ID NO: 54264 - protein, 416 aa, Corynebacterium pseudodiphtheriticum
  misc_feature (1)..(416): tr|U2G3F1|U2G3F1_9CORY Queuine tRNA-ribosyltransferase OS=Corynebacterium pseudodiphtheriticum 090104 OX=13811 11 GN=tgt PE=3 SV=1
MTDLSFTVNTHLDLAGMQGRTGTITTPHGPINTPAFIPVATKATVKTLSPEQIRLTGAQAILSNAYHLYLQPGHDIVDEAGGVAKFESWHGPTYTDSGGFQVMSLGVGHKKTIKMDYEQEMAEFTPRKVNKDSLAIVDEDGVNFRSVLDGSRHRFTPEKSLQIQHGLGADIMFAFDELTTLVDTRAYQEESVARTHRWAERCLVEHDRLTRERAHRPKQSLWGVIQGAQHEDLRRQATRGLVSLSQEAEAAGRRGFGGYGIGGALDKGMLGTIVGWVCEELPDDKPRHLLGISEPDDVFWAIENGADTFDCVSPTRLGRRGGVYTLDGRMNLKNKRFERDFSGVDEEFGGYVSQNYSRAYIRHLLKAKEFLAGTLCTIHNLEFMIRLVDNIRKSIDGGYYREYRDEFLGRYYAHTK

SEQ ID NO: 54265 - protein, 414 aa, Corynebacterium pseudogenitalium
  misc_feature (1)..(414): tr|E2S5X1|E2S5X1_9CORY Queuine tRNA-ribosyltransferase OS=Corynebacterium pseudogenitalium ATCC 33035 OX=52526 4 GN=tgt PE=3 SV=1
MDLSFDVGKRLPEGPGKHGRSGVIHTPHGDIQTPAFIPVATKATVKTLTPEQIRSTGAQAILSNAYHLYLQPGHDIVDEAGGVAEFENWHGPTYTDSGGFQVMSLGVGFKKVLAMDIADLSDKDIRAAKKERMAQVDEDGVDFKSVIDGSKHRFTPEKSMQIQHGLGADIMFAFDELTTLVDTRTYQEESVARTHRWAKRCLDEHDRLTRERAHRPKQSLWGVVQGAQYEDLRRQATRGLLDLDRAAREDGKRGFGGFGIGGALEKENLGTIVGWVCDELPEDKPRHLLGISEPDDIFTAVEAGADTFDCVAPTRLARRGGVYTLDGRMNLTNARFKRDFAGVDEEFGGYVSENYSRAYLHHLLKAKEFLAGTLCTIHNVEFMIRLVDNIRAAIDGGYYEAYRDEFLGRYYAGK

SEQ ID NO: 54266 - protein, 428 aa, Corynebacterium pseudopelargi
  misc_feature (1)..(428): tr|A0A3G6IX46|A0A3G6IX46_9CORY Queuine tRNA-ribosyltran sferase OS=Corynebacterium pseudopelargi OX=2080757 GN= tgt PE=3 SV=1
MNNAEGEAKAQHEDIAFELGTELPDAQQQPGKHGRTGVIHTPHGDIHTPAFIPVATKATVKTLTPEQIKQTGAQAILSNAYHLYLQPGQDVVDEAGGLAEFEHWHGPTYTDSGGFQVMSLGVGFKKVLAMDTKGWEEKDIRARHKDRYAHVDEEGVNFRSVIDGSKHRFTPEVSMQIQHGLGADIMFAFDELTTLVDTRAYQESSVARTHRWARRCLIEHDRLTQERSHRPKQSLWGVVQGAQYEDLRRQATRGLLDLHQEALDAGRRGFGGFGIGGALEKENLGTIVGWVCDELPREMPRHLLGISEPDDLFTAIEAGADTFDCVAPTRLARRGGVYTLDGRLNLKNARFKRDFSGIDEEFGGYVSENYSRAYLHHLLKAKEFLAGTLCTMHNVEFMVRLVDNIRASIDNGTYEEFKAEFLGRYYGH

SEQ ID NO: 54267 - protein, 413 aa, Corynebacterium pseudotuberculosis
  misc_feature (1)..(413): tr|D9QDR2|D9QDR2_CORP2 Queuine tRNA-ribosyltransferase OS=Corynebacterium pseudotuberculosis (strain C231) OX= 681645 GN=tgt PE=3 SV=1
MDTTFELKTELYDEPGRHGRTGVIHTPHGDIATPAFIPVATKATVKTLTPPQIRSTGAQAILSNAYHLYLQPGHDVVDEAGGVAAFENWNGPTYTDSGGFQVMSLGVGFKKVLAMDVKGYEEADIRAKKRERMAKVDEDGVDFRSVLNGSRHRFTPEVSMQIQHGLGADIMFAFDELTTLIDTRDYQVNSVARTHRWAERCLIEHDRLTNERVGKPLQSLWGVVQGAQYEDLRRKAIRGLLELNDQAEAAGRRGFGGFGIGGALEKENLGTIVGWVCDEIPKEKPRHLLGISEPDDLFTAIEAGADTFDCVAPTRLGRRGGVYTLDGRMNLTNAKFKRDFTPIDAEFGGPTVEYTRAYINHLLKAKEFLAGTLCTMHNVAFMVQLVDNIRASIDNGTYEEYKAEFMGRYYARR

SEQ ID NO: 54268 - protein, 413 aa, Corynebacterium pseudotuberculosis; identical to SEQ ID NO: 54267
  misc_feature (1)..(413): tr|A0A1L6CXT9|A0A1L6CXT9_CORPS Queuine tRNA-ribosyltran sferase OS=Corynebacterium pseudotuberculosis OX=1719 G N=tgt PE=3 SV=1

SEQ ID NO: 54269 - protein, 407 aa, Corynebacterium pyruviciproducens
  misc_feature (1)..(407): tr|S2ZDH3|S2ZDH3_9CORY Queuine tRNA-ribosyltransferase OS=Corynebacterium pyruviciproducens ATCC BAA-1742 OX=1 125779 GN=tgt PE=3 SV=1
MSFRINHTHSAARTGVISTPHGDIYTPAFIPVATKATVKTLTPEQIRSTGAQAILSNAYHLYLQPGPDIVDEAGGVAKFENWNGPTYTDSGGFQVMSLGVGFKKVLAMEIADLTEKDIRAAKKDRMARVDEDGVDFRSVIDGSKHRFTPEKSMEIQHQLGADIIFAFDELTTLIDTRQYQENSVARTHRWAKRCLEAHERLSNERSHRPEQQLWGVVQGAQYQDLRRRAARGLMDLDREARAAGHRGFDGFGIGGALEKHSLGTIVGWVTDELPEDKPRHLLGISEPDDIFAAVASGADTFDCVAPTRLGRRGGVYTLDGRLNLKAARFKRDFTPIDAELGGYVSENYTRAYIHHLLKAKEFLAGTLCTMHNLFFVVKLVDSIRHHLEQGTFEEYRDEFMSRYYARS

SEQ ID NO: 54270 - protein, 407 aa, Corynebacterium pyruviciproducens
  misc_feature (1)..(407): tr|A0A2I1VSW4|A0A2I1VSW4_9CORY Queuine tRNA-ribosyltran sferase OS=Corynebacterium pyruviciproducens OX=598660 GN=tgt PE=3 SV=1
MSFRINHTHGAARTGVISTPHGDIHTPAFIPVATKATVKTLTPEQIRSTGAQAILSNAYHLYLQPGPDIVDEAGGVAKFENWNGPTYTDSGGFQVMSLGVGFKKVLAMEIADLTEKDIRAAKKDRMARVDEDGVDFRSVIDGSKHRFTPEKSMEIQHQLGADIIFAFDELTTLIDTRQYQENSVARTHRWAKRCLEAHERLSNERSHRPEQQLWGVVQGAQYEDLRRRAARGLMDLDREARAAGHRGFDGFGIGGALEKHSLGTIVGWVTDELPEDKPRHLLGISEPDDIFAAVAAGADTFDCVAPTRLGRRGGVYTLDGRLNLKAARFKRDFTPIDAELGGYVSENYTRAYIHHLLKAKEFLAGTLCTMHNLFFVVKLVDSIRHHLEQGTFEEYRDEFMSRYYARS

SEQ ID NO: 54271 - protein, 518 aa, Corynebacterium renale
  misc_feature (1)..(518): tr|A0A2A9DL90|A0A2A9DL90_9CORY Queuine tRNA-ribosyltran sferase OS=Corynebacterium renale OX=1724 GN=tgt PE=3 S V=1
MPYSPKPLLNLPPRTQCTHPHLNPGTHSSAWVQNVRNTRNTRNMRNPRPAHAHETPPSAPRVTHTTRPLESTTMTAHENPAPNNTTNPATNSTPNPTPTPHAQDTTFELGTEVFNEPGKHGRTGVIHTPHGAIQTPAFIPVATKATVKTLTPEQIRATGAQAILSNAYHLYLQPGHDIVDEAGGVAAFENWHGPTYTDSGGFQVMSLGVGFKKVLAMDTAGLTDADIRAQKKERMAVVDEDGVDFRSILDGSKHRFTPEVSMQIQHGLGADIMFAFDELTTLVDTREYQEQSVARTHRWAQRCIDEHNRLTQERVGKPLQSLWGVVQGAQYEDLRRQATRGLVALSDAAEAEGRRGFGGFGIGGALEKENLGTIVGWVCDELPVEKPRHLLGISEPDDLFTAIEAGADTFDCVAPTRLGRRGGVYTLDGRMNLTNARFKRDFRGIDEELGGYVSENYSRAYIRHLLKANEFLAGTLCTMHNLYFMVGLVDKIRAAMEAGDYEAFRDEFMGRYYAGKAR

SEQ ID NO: 54272 - protein, 542 aa, Corynebacterium resistens
  misc_feature (1)..(542): tr|F8E3B2|F8E3B2_CORRG Queuine tRNA-ribosyltransferase OS=Corynebacterium resistens (strain DSM 45100 / JCM 12 819 / GTC 2026) OX=662755 GN=tgt PE=3 SV=1
MAERAGEVREWKAGRGRGIRKRGSYGNECADRSLSSRCTNRELPSRHANPDLPHDRLNSGSMTAQSHANGNTPHTDYPQHAKSDSAGGSNTARTSCNTARTSDTTFTLGHALGEITDPSSATPEGTKGAVHGRTGVIHTPHGDIETPAFIPVATKATVKTLTPDQIRETGAQAILSNAYHLYLQPGPDIVDEAGGVSAFENWHGPTYTDSGGFQVMSLGVGFKKVLAMDTAGLAEKDIRARSKDRMAHVDEDGVDFRSVIDGSKHRFTPEVSMQIQHQLGADIIFAFDELTTLVDTRQYQEQSVERTHRWAQRCLDEHDRLTNLRTHRPLQSLWGVVQGAQYEDLRRQAARGLVEISDQAVAAGRRGFGGFGIGGALEKENLGTIVGWVCDELPKEKPRHLLGISEPDDLFTAIAAGADTFDCVAPTRLGRRGGVYTLNGRMNLTGARFKRDFTPVDAEVGGYVSENFTRAYIHHLLKAKEFLAGTLCTMHNLHFMIRLVDNIREAMKEGRFEEYRAEFMSRYYGPDWADRVVPTNFIDGVR

SEQ ID NO: 54273 - protein, 415 aa, Corynebacterium riegelii
  misc_feature (1)..(415): tr|A0A2I1V9I8|A0A2I1V9I8_9CORY Queuine tRNA-ribosyltran sferase OS=Corynebacterium riegelii OX=156976 GN=tgt PE =3 SV=1
MKEFDLTTELYNEPGKHGRTGVIHTPHGDIQTPAFIPVATKATVKTLTPEQIRSTGAQAILSNAYHLYLQPGPDIVDEAGGVAAFENWHGPTYTDSGGFQVMSLGVGFKKVLAMDTAGLVEGDIRAANKDRMARVDDDGVDFKSFIDGSSHRFTPEVSMQIQHQLGADIMFAFDELTTLVDTREYQEHSVERTRRWAKRCLDEHHRLTELRTHRPKQSLWGVVQGAQYEDLRRHATRGLLELDQKAREAGRRGFGGFGIGGALEKENLGMIVGWVTDELPADKPRHLLGISEPDDIFTAVEAGADTFDCVAPTRLGRRGGVYTLDGRLNLMGARFKRDFSGVDEEFGGYVSENYSRAYIHHLLKAKEFLAGTLCTMHNVEFMVRLVDNIRAAIDNGNYEAFRDEFLGRYYAGKKS

SEQ ID NO: 54274 - protein, 415 aa, Corynebacterium riegelii
  misc_feature (1)..(415): tr|A0A0K1RDQ6|A0A0K1RDQ6_9CORY Queuine tRNA-ribosyltran sferase OS=Corynebacterium riegelii OX=156976 GN=tgt PE =3 SV=1
MKEFDLTTELYNEPGKHGRTGVIHTPHGDIQTPAFIPVATKATVKTLTPEQIRSTGAQAILSNAYHLYLQPGPEIVDEAGGVAAFENWHGPTYTDSGGFQVMSLGVGFKKVLAMDTAGLVEGDIRAANKDRMARVDDDGVDFKSFIDGSSHRFTPEVSMQIQHQLGADIMFAFDELTTLVDTREYQEHSVERTRRWAKRCLDEHHRLTELRTHRPKQSLWGVVQGAQYEDLRRHATRGLLELDREAREAGRRGFGGFGIGGALEKENLGTIVGWVTDELPADKPRHLLGISEPDDIFTAVEAGADTFDCVAPTRLGRRGGVYTLDGRLNLMGARFKRDFSGVDEEFGGYVSENYSRAYIHHLLKAKEFLAGTLCTMHNVEFMVRLVDNIRAAIDNGNYEAFRDEFLGRYYAGKQK

SEQ ID NO: 54275 - protein, 418 aa, Corynebacterium segmentosum
  misc_feature (1)..(418): tr|A0A3S5ESY7|A0A3S5ESY7_9CORY Queuine tRNA-ribosyltran sferase OS=Corynebacterium segmentosum OX=43990 GN=tgt PE=3 SV=1
MKDLSFDIAKRLPEGPGKHGRSGIIHTPHGDIATPAFIPVATKATVKTLTPEQIRATGAQAILSNAYHLYLQPGHDIVDEAGGVAKFENWHGPTYTDSGGFQVMSLGVGFKKVIAMDLADLTEKDIRAAKRERMAKVDEEGVDFRSIIDGSKHRFTPEKSMQIQHGLGADIMFAFDELTTLIDSRTYQEESVARTHRWAQRCLEEHDRLTRERYHRPKQSLWGVVQGAQYEDLRRQATRGLLDLDRAAREKGRRGFGGFGIGGALEKQNLGTIVGWVCDELPDDKPRHLLGISEPDDIFTAVEAGADTFDCVAPTRLARRGGVYTLDGRLNLTNARFKRDFKGIDEEFGGYVTENYSRAYLHHLLKAKEFLAGTLCTIHNVEFMVRLVDNIRAAINGGYYEDYRDEFLGRYYAASKAR

SEQ ID NO: 54276 - protein, 430 aa, Corynebacterium simulans
  misc_feature (1)..(430): tr|A0A127NUX9|A0A127NUX9_9CORY Queuine tRNA-ribosyltran sferase OS=Corynebacterium simulans OX=146827 GN=tgt PE =3 SV=1
MIEQQPPFPAPKLETDLSFDVRTRLDQAGPGKHGRSGTIHTPHGDIQTPAFIPVATKATVKTLTPEQIRQTGAQAILSNAYHLYLQPGHDIVDEAGGVATFENWHGPTYTDSGGFQVMSLGVGFKKVLAMDTANLTEKDIRAAKKERMAQVDEDGVDFKSVIDGSKHRFTPEVSMQIQHGLGADIMFAFDELTTLIDSRAYQEESVARTHRWAQRCLDEHHRLTEERGPQKPRQSLWGVVQGAQYEDLRRQATRGLVELSQAAEADGKRGFGGFGIGGALEKENLGTIVGWVCDELPEDKPRHLLGISEPDDLFTAIEAGADTFDCVAPTRLGRRGGVYTLDGRLNLKGARFKRDFTGIDEEFGGYVSENYSRAYIHHLLKANEFLAGTLCTMHNLTFMIRLVDNIRASIDGGYYEAYRDEFMGRYYAGK

SEQ ID NO: 54277 - protein, 427 aa, Corynebacterium singulare
  misc_feature (1)..(427): tr|A0A0B6EXP9|A0A0B6EXP9_9CORY Queuine tRNA-ribosyltran sferase OS=Corynebacterium singulare OX=161899 GN=tgt P E=3 SV=1
MTHPKPQLETDLSFDVKKELDLSGPAQPGKHGRTGVIHTPHGDIQTPAFIPVATKATVKTLTPEQIRLTGAQAILSNAYHLYLQPGHDIVDEAGGVATFENWHGPTYTDSGGFQVMSLGVGFKKVLAMDVADLTESDIRAAKKERMAQVDEDGVDFKSIIDGSSHRFTPEVSMQIQHGLGADIMFAFDELTTLVDTRTYQEESVERTRRWAQRCLDEHDRLTQARGPQKPRQSLWGVVQGAQYEDLRRQAASGLVELSDRAEANGKRGFGGFGIGGALEKENLGTIVGWVCDELPVDKPRHLLGISEPDDIFTAVEAGADTFDCVAPTRLARRGGVYTLDGRLNLTNARFKRDFSGVDEEFGGYVSENYSRAYIHHLLKAKEFLAGTLCTIHNLEFMIRLVDNIRESIDGGYYEAYRDEFMGRYYAK

SEQ ID NO: 54278 - protein, 433 aa, Corynebacterium sp.
  misc_feature (1)..(433): tr|S2XTV4|S2XTV4_9CORY Queuine tRNA-ribosyltransferase OS=Corynebacterium sp. HFH0082 OX=1078764 GN=tgt PE=3 S V=1
MSQSRTTGFDVVKQIEGARGRAGTIHTPHGDIATPAFIPVGTKATVKTLTPEQVRSTGAQAMLSNAYHLYLQPGEEIVDQAGGLAKFSNWNGPTFTDSGGFQVLSLGAGFKKTLAMDVTGMQKDDIVAEGKERNAFVDEDGVTFRSHIDGSEHRFTPEVSMRIQHALGADIMMAFDELTTLMNTRGYQEASVERTHRWARRCLEAHNELTISRGQVDAHVHSLDDDQLPIQQLFGVVQGAQYEDLRRKAARGLVELSREFEDAGQLGFHGYGIGGAIEKQNLGLICGWVNDELPDDRARHLLGISEPDDIFAAVEAGADTFDCVAPTRLARRGGVYTLDGRMTLTNARFKNDFRPVDAEVPSYTSLNYSRAYLHHLLKAKEYLAGTLCTIHNLFFMVQLVENIRAAILEDRFFEYRDEFMGRYYANGGRAVGN

SEQ ID NO: 54279 - protein, 416 aa, Corynebacterium sp.
  misc_feature (1)..(416): tr|A0A1A0JU29|A0A1A0JU29_9CORY Queuine tRNA-ribosyltran sferase OS=Corynebacterium sp. EPI-003-04-2554_SCH24736 22 OX=1834153 GN=tgt PE=3 SV=1
MTDLSFTVNTHLDLPGMQGRTGTITTPHGPINTPAFIPVATKATVKTLSPEQIRLTGAQAILSNAYHLYLQPGHDIVDEAGGVAKFESWHGPTYTDSGGFQVMSLGVGHKKTIKMDYEQEMAEYTPRKVNKDSLAIVDEDGVNFRSVLDGSRHRFTPEKSLQIQHGLGADIMFAFDELTTLVDTRAYQEESVARTHRWAERCLVEHDRLTRERAHRPKQSLWGVIQGAQHEDLRRQATRGLVSLSQEAEAAGRRGFGGYGIGGALDKGMLGTIVGWVCEELPDDKPRHLLGISEPDDVFWAIENGADTFDCVSPTRLGRRGGVYTLDGRMNLKNKRFERDFSGVDEEFGGYVSQNYSRAYIRHLLKAKEFLAGTLCTIHNLEFMIRLVDNIRKSIDGGYYREYRDEFLGRYYAHTK

SEQ ID NO: 54280 - protein, 424 aa, Corynebacterium sphenisci
  misc_feature (1)..(424): tr|A0A1L7CVC2|A0A1L7CVC2_9CORY Queuine tRNA-ribosyltran sferase OS=Corynebacterium sphenisci DSM 44792 OX=14378 74 GN=tgt PE=3 SV=1
MEHAGFRITARVEGTAARAGVIGTPHGEIATPAFIPVATKATVKTLTADQIRATGAQAILANAYHLYLRPGPEVVDAAGGLAEFANWHGPTYTDSGGFQVMSLGVGFRKTLAMDVSGLADDDVVAPGKQRNAFVDDEGVTFRSHVDGSTHRFTPEVSMGIQHALGADIIFAFDELTTLMNTRGYQEASVERTRRWARRCLAEHDRLSRERNQRPGPAGALPPGARPAQQLWGVVQGAQYEDLRRAAARGLVALSDAAEAAGRPGFAGYGIGGAIEKARLGDIVGWVTAELPENRPRHLLGISEPDDVFAAVAAGADTFDCVAPTRLARRGGVYTRDGRLTLTNARFRRDFGPIDAETPSPTAGYSRAYLHHLLKSKEYLAGTICTLHNVFFMVDLVDRIRESIRAGRFPEFREEFLGRYYAGAK

SEQ ID NO: 54281 - protein, 424 aa, Corynebacterium spheniscorum
  misc_feature (1)..(424): tr|A0A1I2VF58|A0A1I2VF58_9CORY Queuine tRNA-ribosyltran sferase OS=Corynebacterium spheniscorum OX=185761 GN=tg t PE=3 SV=1
MTDTTSDLSFTLGTQLEAKSGTHGRSGIIHTPHGDIHTPAFIPVATKATVKTLTPEQVRSTGAQAILSNAYHLYLQPGPDIVDEAGGVAAFENWHGPTYTDSGGFQVMSLGVGFKKVLAMDTTDLSEKDIRAARKDRYAHVDEEGVDFRSVIDGSRHRFTPEISMQIQHQLGADIMFAFDELTTLIDTREYQEASVERTHRWARRCLIEHDRLTRERHDKPKQSLWGVVQGAQYEDLRRQATRGLIELDREAQAEGRRGFGGFGIGGALEKENLGTIVGWVCEELPAEKPRHLLGISEPDDLFAAIEAGADTFDCVAPTRLGRRGGVYTLDGRLNLTAARFKRDFSGVDEEFGGYVSENYSRAYIHHLMKAKEFLGGTLCTLHNLSFMVALVDNIRAAIDNGDFYAYRDEFLGRYYAGKQRPLN

SEQ ID NO: 54282 - protein, 422 aa, Corynebacterium stationis
  misc_feature (1)..(422): tr|A0A3D3II73|A0A3D3II73_9CORY Queuine tRNA-ribosyltran sferase OS=Corynebacterium stationis OX=1705 GN=tgt PE= 3 SV=1
MSHEHADDLSFDVTTRLGDGSPGKHGRTGVIHTPHGDIQTPAFIPVATKATVKTLTPEQIKSTGAQAILSNAYHLYLQPGHDIVDEAGGVAAFENWDGPTYTDSGGFQVMSLGVGFKKVLAMDVAKLTEGDIRAAKKERLAHVDEDGVDFRSFIDGSKHRFTPEFSMQIQHGLGADIMFAFDELTTLVDTRQYQEASVDRTHRWAKRCLEEHDRLTNERTHRPKQSLWGVVQGAQYEDLRRQATRGLVQLSEQAEAEGKRGFGGFGLGGALEKENLGTIVGWCCDELPENKPRHLLGISEPDDMFTAIEAGADTFDCVAPTRLGRRGGVYTLDGRMNLMGAKFKRDFTGIDEEFGGYVSENYSRAYIHHLLKAKEFLAGTLCTIHNLQFMISLVDNIRKSIDGGYYEAYRDEFMGRYYANKK

SEQ ID NO: 54283 - protein, 422 aa, Corynebacterium stationis
  misc_feature (1)..(422): tr|A0A241TT50|A0A241TT50_9CORY Queuine tRNA-ribosyltran sferase OS=Corynebacterium stationis OX=1705 GN=tgt PE= 3 SV=1
MSHEHSDDLSFDVTTRLGDGSPGKHGRTGVIHTPHGDIQTPAFIPVATKATVKTLTPEQIKSTGAQAILSNAYHLYLQPGHDIVDEAGGVAAFENWDGPTYTDSGGFQVMSLGVGFKKVLAMDVAKLTEGDIRAAKKERLAHVDEDGVDFRSFIDGSKHRFTPEFSMQIQHGLGADIMFAFDELTTLVDTRQYQEESVERTHRWAKRCLDEHDRLTNERTHRPKQSLWGVVQGAQYEDLRRQATRGLVQLSEQAEAEGKRGFGGFGLGGALEKENLGTIVGWCCDELPEDKPRHLLGISEPDDMFTAIEAGADTFDCVAPTRLGRRGGVYTLDGRMNLMGAKFKRDFTGIDEEFGGYVSENYSRAYIHHLLKAKEFLAGTLCTIHNLQFMISLVDNIRKSIDGGYYEAYRDEFMGRYYANKK

SEQ ID NO: 54284 - protein, 430 aa, Corynebacterium striatum
  misc_feature (1)..(430): tr|A0A0K2X207|A0A0K2X207_CORST Queuine tRNA-ribosyltran sferase OS=Corynebacterium striatum OX=43770 GN=tgt PE= 3 SV=1
MIEQQPPFPAPKLETDLSFDVRTHLDQAGPGKHGRSGTIHTPHGDIQTPAFIPVATKATVKTLTPEQIRQTGAQAILSNAYHLYLQPGHDIVDEAGGVAAFENWHGPTYTDSGGFQVMSLGVGFKKVLAMDTSNLTEKDIRAAKKERMAQVDEDGVDFKSVIDGSKHRFTPEVSMQIQHGLGADIMFAFDELTTLVDTRTYQEESVARTHRWAQRCLDEHHRLTEERGPQKPRQSLWGVVQGAQYEDLRRQATRGLVELSQAAEANGKRGFGGFGIGGALEKENLGTIVGWVCDELPEDKPRHLLGISEPDDLFTAIEAGADTFDCVAPTRLGRRGGVYTLDGRLNLKGARFKRDFAGIDEEFGGYVSENYSRAYIHHLLKANEFLAGTLCTMHNLTFMIRLVDNIRASIDGGYYEAYRDEFMGRYYAGK

SEQ ID NO: 54285 - protein, 430 aa, Corynebacterium striatum
  misc_feature (1)..(430): tr|C2CSB7|C2CSB7_CORST Queuine tRNA-ribosyltransferase OS=Corynebacterium striatum ATCC 6940 OX=525268 GN=tgt PE=3 SV=1
MIEQQPPFPAPKLETDLSFDVRTRLDQAGPGKHGRSGTIHTPHGDIQTPAFIPVATKATVKTLTPEQIRQTGAQAILSNAYHLYLQPGHDIVDEAGGVAAFENWHGPTYTDSGGFQVMSLGVGFKKVLAMDTSNLTEKDIRAAKKERMAQVDEDGVDFKSVIDGSKHRFTPEVSMQIQHGLGADIMFAFDELTTLVDTRTYQEESVARTHRWAQRCLDEHHRLTEERGPQKPRQSLWGVVQGAQYEDLRRQATRGLVELSQAAEANGKRGFGGFGIGGALEKENLGTIVGWVCDELPEDKPRHLLGISEPDDLFTAIEAGADTFDCVAPTRLGRRGGVYTLDGRLNLKGARFKRDFAGIDEEFGGYVSENYSRAYIHHLLKANEFLAGTLCTMHNLTFMIRLVDNIRASIDGGYYEAYRDEFMGRYYAGK

SEQ ID NO: 54286 - protein, 423 aa, Corynebacterium tapiri
  misc_feature (1)..(423): tr|A0A5C4U4Q5|A0A5C4U4Q5_9CORY Queuine tRNA-ribosyltran sferase OS=Corynebacterium tapiri OX=1448266 GN=tgt PE= 3 SV=1
MDDVSFSLGTEISDAGVGRHGRTGTIHTPHGDIQTPAFIPVATKATVKTLTPEQIRSTGAQAILSNAYHLYLQPGHDIVDEAGGVAAFENWHGPTYTDSGGFQVMSLGAGFRKVLAMDTAKLNPEDIKAKDKERLAKVDEDGVDFRSVIDGSKHRFTPEVSMQIQHGLGADIMFAFDELTTLVDTRAYQEESVERTRRWAQRCLVEHNRLTQERTHRPKQSLWGVVQGANYEDLRRLAARQLVEMSEQAQEKGMRGFGGFGIGGAMEKSNLGTIVGWVCDELPAEKPRHLLGISEPDDLFTAVAAGADTFDCVAPTRLARRGGVYTLDGRMNLVASRFKRDFRGVDEEFGGYVSENYSRAYLHHLLKAKEFLAGTLCTIHNVAFMVTLVDNIRASIAEGRFEEYRAEFLGRYYANGGRAPEGK

SEQ ID NO: 54287 - protein, 440 aa, Corynebacterium terpenotabidum
  misc_feature (1)..(440): tr|S4XJ69|S4XJ69_9CORY Queuine tRNA-ribosyltransferase OS=Corynebacterium terpenotabidum Y-11 OX=1200352 GN=tg t PE=3 SV=1
MTEPAAGTSPASGNAHATDTTFELHTRIGEIDGAAVHGRTGVIHTPHGDIHTPAFIPVATKATVKTLTPEQVRSTGAEAMLSNAYHLYLQPGEDIVDTAGGLAEFENWHGPTYTDSGGFQVMSLGVGFKKVLAMDVANLTEGDIRAAKKERMALVDEDGVDFKSVIDGSAHRFTPEKSMQIQHGLGADIMFAFDELTTLVDTRVYQEESVARTHRWARRCLVEHDRLTRERAHRPLQSLWGVVQGAQYEDLRRQAARGLVELSREAEDAGRRGFGGFGIGGALEKENLGTITSWVCDELPDDRPRHMLGISEPDDLFTCIAAGADTFDCVAPTRLARRGGVYTLDGRLNLMAARHKRDFIPIDTETGGYVNGHYTRAYIHHLLKAHEFLAGTLCTLHNINFMMTLTRNIRRSIEEGRFAEYRDEFLGRYYANIPPEQRGR

SEQ ID NO: 54288 - protein, 418 aa, Corynebacterium testudinoris
  misc_feature (1)..(418): tr|A0A0G3H759|A0A0G3H759_9CORY Queuine tRNA-ribosyltran sferase OS=Corynebacterium testudinoris OX=136857 GN=tg t PE=3 SV=1
MSTSGLTFEVGTQLADAGTGGRHGRTGVIHTPHGDIQTPAFIPVATKATVKTLTPEQIRLTGAQAILSNAYHLYLQPGADIVDEAGGVAAFENWHGPTYTDSGGFQVMSQGVGFQKTLTMEAAEGKHHTRNKPNLARVDEDGVDFTSFRDGSKHRFTPEISMQIQHQLGADIIFAFDELTTLMDTRSYQESSVERTHRWAQRCLDEHDRLTTERANKPLQSLWGVVQGAQYEDLRRQATRGLVELSERAEAEGRRGFGGYGIGGALEKNNLGTIVGWVCDELPVDRPRHLLGISEPDDLFMAVEAGADTFDCVAPTRLGRRGGVYTLDGRLNLMGAKFRRDFSGVDEEFGGYVSENYSRVYIHHLLRAKEFLAGTLCTIHNLEFMVRLVDNIRAAIDNGDFEAYRDEFLGRYYASSQS

SEQ ID NO: 54289 - protein, 415 aa, Corynebacterium timonense
  misc_feature (1)..(415): tr|A0A1H1TRQ6|A0A1H1TRQ6_9CORY Queuine tRNA-ribosyltran sferase OS=Corynebacterium timonense OX=441500 GN=tgt P E=3 SV=1
MQDLSFEVGTTLPEAPGKHGRTGVIHTPHGDIATPAFIPVATKATVKTLTPEQVRSTGAQAILSNAYHLYLQPGPDIVDEAGGVAAFENWHGPTFTDSGGFQVMSLGVGFKKVLAMDTAGLSDADIRAAAKDRMARVDDDGVDFKSVIDGSSHRFTPEVSMQIQHQLGADIMFAFDELTTLVDTRAYQEHSVERTRRWAKRCLDEHDRLTAARADKPTQSLWGVVQGAQYEDLRRAAARGLLDLDARARAEGRRGFGGFGIGGALEKENLGTIVGWVTDELPVDKPRHLLGISEPDDIFTAVEAGADTFDCVAPTRLGRRGGVYTLDGRMNLTAARFRRDFRGVDEEFGGYVSENYSRAYIHHLLKAKEYLAGTLCTLHNLEFMVRLVDTIRAAIDAGRYEDYRDEFLGRYYAPS

SEQ ID NO: 54290 - protein, 414 aa, Corynebacterium tuberculostearicum; identical to SEQ ID NO: 54265
  misc_feature (1)..(414): tr|C6R851|C6R851_9CORY Queuine tRNA-ribosyltransferase OS=Corynebacterium tuberculostearicum SK141 OX=553206 G N=tgt PE=3 SV=1

SEQ ID NO: 54291 - protein, 417 aa, Corynebacterium tuscaniense
  misc_feature (1)..(417): tr|A0A095YF77|A0A095YF77_9CORY Queuine tRNA-ribosyltran sferase OS=Corynebacterium tuscaniense DNF00037 OX=1401 064 GN=tgt PE=3 SV=1
MTDTTFDVRTTLFSAPGRHGRTGTIHTPHGDIHTPAFIPVATKATVKMLTPGQIHSTGAQAILSNAYHLYLQPGPDIVDEAGGLATFENWHGPTYTDSGGFQVMSLGVGFKKVLAMDVAGLTDEDIRAANKERMARVDDDGVDFKSFIDGSTHRFTPEVSMQIQHQLGADIMFAFDELTTLVDTRAYQEESVERTHQWARRCLLEHDRLTHARPDKPLQSLWGVVQGAQYEDLRRQATRGLLALDEEARAAGRRGFGGFGIGGALEKENLGTIVGWVTDELPADKPRHLLGISEPDDLFTAIEAGADTFDCVAPTRLGRRGGVYTLDGRMNLMAARFRRDFTGVDEEFGGYVSENYSRAYIHHLLRAKEFLAGTLCTIHNVEFMVRLVDNIRAAIDAGDYEAYRDEFLGRYYAGQRK

SEQ ID NO: 54292 - protein, 417 aa, Corynebacterium tuscaniense; identical to SEQ ID NO: 54291
  misc_feature (1)..(417): tr|A0A2N6T5L0|A0A2N6T5L0_9CORY Queuine tRNA-ribosyltran sferase OS=Corynebacterium tuscaniense OX=302449 GN=tgt PE=3 SV=1

SEQ ID NO: 54293 - protein, 413 aa, Corynebacterium ulcerans
  misc_feature (1)..(413): tr|V6V8A4|V6V8A4_CORUL Queuine tRNA-ribosyltransferase OS=Corynebacterium ulcerans NCTC 12077 OX=1258583 GN=tg t PE=3 SV=1
MDTTFELKTELYDEPGRHGRTGVIHTPHGDIATPAFIPVATKATVKTLTPPQIRSTGAQAILSNAYHLYLQPGHDVVDEAGGVAAFENWNGPTYTDSGGFQVMSLGVGFKKVLAMDIKGYEEADIRAKKRERMAKVDEDGVDFRSVLNGSRHRFTPEVSMQIQHGLGADIMFAFDELTTLIDTRDYQVSSVARTHRWAERCLVEHDRLTNERVGKPLQSLWGVVQGAQYEDLRRQAIRGLLELSDKAESEGRRGFGGFGIGGALEKENLGTIVGWVCDEIPKEKPRHLLGISEPDDLFTAIEAGADTFDCVAPTRLGRRGGVYTLDGRMNLTNAKFKRDFTPIDAEFGGPTVEYTRAYINHLLKAKEFLAGTLCTMHNVAFMVQLVDNIRASIDNGTYEEYKAEFMGRYYARG

SEQ ID NO: 54294 - protein, 413 aa, Corynebacterium ulcerans; identical to SEQ ID NO: 54293
  misc_feature (1)..(413): tr|A0A0E3KK60|A0A0E3KK60_CORUL Queuine tRNA-ribosyltran sferase OS=Corynebacterium ulcerans OX=65058 GN=tgt PE= 3 SV=1

SEQ ID NO: 54295 - protein, 478 aa, Corynebacterium urealyticum
  misc_feature (1)..(478): tr|B1VIU4|B1VIU4_CORU7 Queuine tRNA-ribosyltransferase OS=Corynebacterium urealyticum (strain ATCC 43042 / DSM 7109) OX=504474 GN=tgt PE=3 SV=1
MPSPAGRSARLPSARRVGSGASTRLSVMTSGSHSQPPHDAAGFATDTSFELLKPLGEVTDPIASHSGEGDRETRLTQGRVGVLKTPHGNINTPAFIPVATKATVKTLTPEQVRSAGAQAILSNAYHLYLQPGPDIVDEAGGVATFENWHGPTYTDSGGFQVMSLGVGYKKVLAMDSKVSEDKVIAQQKKRMAIVDEDGVDFRSVIDGSKHRFTPEVSMQIQHQLGADIMFAFDELTTLANTRAYQEASVARTHRWAKRCLEEHQRQTELRSHRPLQSLWGVVQGAQYEDLRRQAARGLVQLSEEAEAEGKRGFGGFGIGGALEKENLGTIVEWVSQELPDDKPRHLLGISEPDDLFTAIAAGADTFDCVAPTRLGRRGGVYTLDGRMNLSNARFRRDFTPVDAEVGGYVSENYTRAYIHHLLRAKEYLAGTLCTLHNLHFMIKLVDNIREAMLEGRFEEYRAEFMGRYYGPGWEQRLG

SEQ ID NO: 54296 - protein, 427 aa, Corynebacterium urealyticum
  misc_feature (1)..(427): tr|A0A2W5AYN5|A0A2W5AYN5_9CORY Queuine tRNA-ribosyltran sferase OS=Corynebacterium urealyticum OX=43771 GN=tgt PE=3 SV=1
MTHPKPQLETDLSFDVTKELDLSGPAQPGKHGRTGVIHTPHGDIQTPAFIPVATKATVKTLTPEQIRLTGAQAILSNAYHLYLQPGHDIVDEAGGVATFENWHGPTYTDSGGFQVMSLGVGFKKVLAMDVADLTESDIRAAKKERMAQVDEDGVDFKSFIDGSTHRFTPEVSMQIQHGLGADIMFAFDELTTLVDTRTYQEESVERTRRWAQRCLDEHDRLTLARGPQKPRQSLWGVVQGAQYEDLRRQAARGLVELSDQAEENGRRGFGGFGIGGALEKENLGTIVGWVCDELPVGKPRHLLGISEPDDIFTAVEAGADTFDCVAPTRLARRGGVYTLDGRLNLTNARFKRDFAGVDEEFGGYVSENYSRAYIHHLLKAKEFLAGTLCTIHNVEFMIRLVDNIRAAIDGGYYEAYRDEFLGRYYAK

SEQ ID NO: 54297 - protein, 417 aa, Corynebacterium ureicelerivorans
  misc_feature (1)..(417): tr|A0A077HIN6|A0A077HIN6_9CORY Queuine tRNA-ribosyltran sferase OS=Corynebacterium ureicelerivorans OX=401472 G N=tgt PE=3 SV=1
MTDVTFEAHTQLEPAPGRHGRTGVIHTPHGPIQTPAFIPVATKATVKTLTPEQIRQTGAQAILSNAYHLYLQPGPDIVDEAGGVAAFENWHGPTYTDSGGFQVMSLGVGFKKVLAMDTAGLTEADIRAANKDRMARVDDDGVDFKSVIDGSSHRFTPEVSMQIQHQLGADIMFAFDELTTLVDTRAYQEHSVERTRRWARRCLLEHDRLTTLRSDKPLQSLWGVVQGAQYEDLRRQAVRGLLDLDREARAEGRRGFGGVGIGGALEKENLGTIVGWVTDELPVEMPRHLLGISEPDDIFTAVEAGADTFDCVAPTRLGRRGGVYTLDGRLNLAGARFKRDFRGVDEEFGGYVSENYSRAYIHHLLKAKEFLAGTLCTMHNLEFMIRLVDNIRAAIDAGDYEAYRDEFLGRYYAGSDT

SEQ ID NO: 54298 - protein, 428 aa, Corynebacterium uterequi
  misc_feature (1)..(428): tr|A0A0G3H9X9|A0A0G3H9X9_9CORY Queuine tRNA-ribosyltran sferase OS=Corynebacterium uterequi OX=1072256 GN=tgt P E=3 SV=1
MQHHAGAEDLSFEVGTALEAGPGRHGRSGVIHTPHGDIATPAFIPVATKATVKTLTPEQIAATGAQAILSNAYHLYLQPGHDIVDEAGGVAAFENWDGPTYTDSGGFQVMSLGVGFKKVLAMDTTGLNESDIRAKDRQRLATVDEDGVDFKSIIDGSMHRFTPEVSMQIQHGLGADIMFAFDELTTLVDSRAYQEQSVERTLRWAQRCLVEHDRLTRAREGKAKQSLWGVVQGAQYEDLRRHAARELVALSDAAEAEGRRGFGGFGIGGAIEKENLGTIVGWACDELPASKPRHLLGISEPDDLFTAVEAGADTFDCVAPTRLARRGGVYTLDGRMNLTAARFKRDFRGVDEEFGGYVSENFSRAYLHHLLKAKEFLAGTLCTIHNVAFMVRLVDNIRSSIEGGYFDAYREEFLGRYYAHGGRAPEGR

SEQ ID NO: 54299 - protein, 460 aa, Corynebacterium variabile
  misc_feature (1)..(460): tr|G0HG17|G0HG17_CORVD Queuine tRNA-ribosyltransferase OS=Corynebacterium variabile (strain DSM 44702 / JCM 12 073 / NCIMB 30131) OX=858619 GN=tgt PE=3 SV=1
MAQRPGTTLPTHTWCRQVTQHHRIDCSTMTDTASGTASDTTFTLGTRVGEIDGHNAHGRTGVIHTPHGDIHTPAFIPVATKATVKTLTPEQVRSTGAEAILSNAYHLYLQPGEDIVDTAGGLAEFENWHGPTYTDSGGFQVMSLGVGFKKVLAMDVANLTDADIRAAKKERMAQVDEDGVDFKSVIDGSMHRFTPEKSMQIQHGLGADIMFAFDELTTLVDTRRYQEESVERTHRWARRCLVEHDRLTTERTHRPLQSLWGVVQGAQYEDLRRQAARGLVELSAEAEKDGRRGFGGFGIGGALEKENLGTITGWVCDELPDDKPRHMLGISEPDDLFTCIAAGADTFDCVAPTRLARRGGVYTLDGRLNLMASRHKRDFIPIDAETGGYVNEHYTRAYIHHLLKAKEFLAGTLCTLHNINFMMTLTRNIRTSIEEGRFTEYRDEFLGRYYANKAPELRGR

SEQ ID NO: 54300 - protein, 432 aa, Corynebacterium variabile
  misc_feature (1)..(432): tr|A0A3C0MSS5|A0A3C0MSS5_9CORY Queuine tRNA-ribosyltran sferase OS=Corynebacterium variabile OX=1727 GN=tgt PE= 3 SV=1
MTDTASGTASDTTFTLGTRVGEIDGHNAHGRTGVIHTPHGGIHTPAFIPVATKATVKTLTPEQVRSTGAEAILSNAYHLYLQPGEDIVDTAGGLAEFENWHGPTYTDSGGFQVMSLGVGFKKVLAMDVANLTDADIRAAKKERMAQVDEDGVDFKSVIDGSMHRFTPEKSMQIQHGLGADIMFAFDELTTLVDTRRYQEESVERTHRWARRCLVEHDRLTTERTHRPLQSLWGVVQGAQYEDLRRQAARGLVELSAEAEKDGRRGFGGFGIGGALEKENLGTITGWVCDELPDDKPRHMLGISEPDDLFTCIAAGADTFDCVAPTRLARRGGVYTLDGRLNLMASRHKRDFIPIDAETGGYVNEHYTRAYIHHLLKAKEFLAGTLCTLHNINFMMTLTRNIRTSIEEGRFTEYRDEFLGRYYANKAPELRGR

SEQ ID NO: 54301 - protein, 412 aa, Corynebacterium vitaeruminis
  misc_feature (1)..(412): tr|W5XY79|W5XY79_9CORY Queuine tRNA-ribosyltransferase OS=Corynebacterium vitaeruminis DSM 20294 OX=1224164 GN =tgt PE=3 SV=1
MDTTFTLGTQLHDGPGQHGRTGTIHTPHGDIQTPAFIPVGTKATVKTLTPEQVKDTGAQAVLSNAYHLYLQPGPDIVDEAGGVAAFEHWDGPTYTDSGGFQVMSLGVGFKKVLAMDTKGLQDSDIRAQKKDRFAQVDEDGVDFRSVIDGSKHRFTPEVSMQIQHQLGADIIFAFDELTTLVDTRLYQEQSVARTHRWAKRCLDEHERLTNERPGKPLQSLWGVVQGAQYEDLRRQAIRGLLDLSKEAEDAGRRGFGGFGIGGALEKENLGTIVGWVCDEIPADKPRHLLGISEPDDLFTAIEAGADTFDCVAPTRLGRRGGVYTLDGRMNLPAARFKRDFTPIDAEVGGYVNEHYTRAYIHHLFKAKEYLGQSLCTMHNLTFMIQLVDNIRAAINDGTYWEFKQEFLGRYYA

SEQ ID NO: 54302 - protein, 415 aa, Corynebacterium xerosis
  misc_feature (1)..(415): tr|A0A0M2XPK8|A0A0M2XPK8_9CORY Queuine tRNA-ribosyltran sferase OS=Corynebacterium xerosis OX=1725 GN=tgt PE=3 SV=1
MDGEPGRAGIIRTPHGDVQTPAFIPVGTKATVKTLTPEQIRDTGAQAVLSNAYHLYLQPGPDIVEAAGGLTRFENWNGPTFTDSGGFQVMSLGVGFRKTLAMDVTGLQNDDILAPGKERNAFVDEEGVTFRSHIDGSSHRFTPEFSMGIQHKLGADIIFAFDELTTLMNTREYQESSVERTHRWAQRCLDEHDRLTRERNQVPGLAGDLAEGERPLQQLFGVVQGAQYEDLRRGAARGLVELSDAAEAAGKRGFAGYGIGGALEKQRLGEICRWVTDELPDDRPRHLLGISEPDDIFAAVAAGADTFDCVAPTRLARRGGVYTLDGKITLTNARFKTDFGPIDPEVESYTTLNYSRAYIHHLLKAKEFLAGTLCTIHNVYFMVKLVENIRASIIDGTFEEYRDEFLGRYYAGKKK

SEQ ID NO: 54303 - protein, 380 aa, Cosenzaea myxofaciens
  misc_feature (1)..(380): tr|A0A198FL84|A0A198FL84_9GAMM Queuine tRNA-ribosyltran sferase OS=Cosenzaea myxofaciens ATCC 19692 OX=1354337 GN=tgt PE=3 SV=1
MKYELDKTSGNARRGRLIFERGVVETPAFMPVGTYGTVKGMTPEEVKQTGAQILLGNTFHLWLRPGQEIMKLHGDLHDFMQWQGPILTDSGGFQVFSLGAMRKIKEEGVHFRNPINGEKIFLSPEKSMEIQYDLGSDIVMIFDECTPYPSDWDYAKTSMEMSLRWAKRSRQRFDELNNKNSLFGIIQGGVYEDLRDISVKGLVDIGFDGYAVGGLAVGEPKEDMHRILEHVCPQIPADKPRYLMGVGKPEDLVEGVRRGIDMFDCVMPTRNARNGHLFVTDGVIKIRNAKHRSDTSTLDEHCDCYTCKNYSRAYLHHLDRCNEILGARLNTIHNLRYYQRLMAEIRQSIEEDRFDAFVLEFYERIGKPVPPLNGCASKCD

SEQ ID NO: 54304 - protein, 385 aa, Coxiella burnetii
  misc_feature (1)..(385): tr|A9KE20|A9KE20_COXBN Queuine tRNA-ribosyltransferase OS=Coxiella burnetii (strain Dugway 5J108-111) OX=43492 2 GN=tgt PE=3 SV=1
MQNTFKTEIIQRSKTNHARVTKITTPHGEVVTPAFMPVGTRAFANHLTPHDLVAAHSQIILGGNTYHMLVAPGLEVIQAAGGMHAFMGWDKPMLTDSGGFQVFSLSKNREICTLDEEGAHFKHPTTGKLIHLTPKSSIDTQKAIGADIIMAFDECTPENGGREAALGALQRTHYWLAKSKQAHLQSPCSLYGHRQALFGIIQGGSFRDLREKSAQSVVDMDLDGIAIGGEVIGFDMAKTCQIIDWVRPLLPEGKTRYAMGVGLSPQDLIDVVAAGVDIFDCVAPTRNARHGALYHGHCVVENGWVRFISEQENGRIQIKKSIYAKDETPLLAGCRCYTCQHFCRAYLHYLFKQKSTLYAQLACIHNIHVMQETCCFLRQLIVQVQ

SEQ ID NO: 54305 - protein, 385 aa, Coxiella burnetii
  misc_feature (1)..(385): tr|Q83CN8|Q83CN8_COXBU Queuine tRNA-ribosyltransferase OS=Coxiella burnetii (strain RSA 493 / Nine Mile phase I) OX=227377 GN=tgt PE=3 SV=1
MQNTFKTEIIQRSKTNHARVTKITTPHGEVVTPAFMPVGTRAFANHLTPHDLVAAHSQIILGGNTYHMLVAPGLEVIQAAGGMHAFMGWDKPMLTDSGGFQVFSLSKNREICTFDEEGAHFKHPTTGKLIHLTPKSSIDTQKAIGADIIMAFDECTPENGGREAALGALQRTHYWLAKSKQAHLQSPCSLYGHRQALFGIIQGGSFRDLREKSAQSVVDMDLDGIAIGGEVIGFDMAKTCQIIDWVRPLLPEGKTRYAMGVGLSPQDLIDVVAAGVDIFDCVAPTRNARHGALYHGHCVVENGWVRFISEQENGRIQIKKSIYAKDETPLLAGCRCYTCQHFCRAYLHYLFKQKSTLYAQLACIHNIHVMQETCCFLRQLIVQVQ

SEQ ID NO: 54306 - protein, 384 aa, Coxiella sp.
  misc_feature (1)..(384): tr|A0A1F8V149|A0A1F8V149_9COXI Queuine tRNA-ribosyltran sferase OS=Coxiella sp. RIFCSPHIGHO2_12_FULL_44_14 OX=1 797697 GN=A3F41_05635 PE=3 SV=1
MFKTELIAKHKNNHARITKVTTPHGEILTPTFMPVATRAYVNFMRPDDLWKAGSQIILGGNTYHMLINPGMEIIRSAGGMHPFMGWTGPMLTDSGGFQVFSLAKNAEICKIKKDGAHFKVPDTGQKIILNPKTSIETQKIIGADIIMAFDECTPEQGGREAATAALDRTHRWLLEAVDMQQNNPHSVYGHRQALFGIIQGGSFRDLRDQSAAFVVNQPVDGLAIGGEVIGFNMVKTIEVIDWIRPYLPENKIRYTMGVGLSVQDLIDVVAAGIDIFDCVAPTRNARHGALYQGEIVIKGDWLQFQKNAEEKDRLLIKKSLYAKDESPIMDGCECYTCQHHTRAYLHYLFKAKSVAYSNLACIHNIHVMHKVCAVMRDLILQHAS

SEQ ID NO: 54307 - protein, 370 aa, Coxiella sp.
  misc_feature (1)..(370): tr|A0A0S7XXQ8|A0A0S7XXQ8_9COXI Queuine tRNA-ribosyltran sferase OS=Coxiella sp. DG_40 OX=1703354 GN=tgt PE=3 SV =1
MQFELLKKDNNARRGKLVFSCEVVDTPAFMPVGTYGTVKAMTPEEVKASGAQIILGNTFHLMLRPGIEIIRKHAGLHNFMHWDGPILTDSGGFQVFSLANIRKLTEDGIRFQSPIDGREVFLSPENSIEMQLALGSDIVTVLDECTSYPISEQRAEASMQSSLRWAERSKKAHQKGGSSALFGIVQGSIYPNLRDESLRGLVDIGFDGYAIGGLSVGEPKSEMFRTLDHLNSQMPKDKPRYLMGVGTPEDIIEGVCRGVDMFDCVMPTRNARNGHLFTSEGIVRIGNSTHRNSIAPLDSNCDCYTCKNYTRAYLHHLNRCKEILGARLNTIHNLYFYQNLMQNLRQAIEQGKLDRFIKDFYSSYLGEKRQ

SEQ ID NO: 54308 - protein, 367 aa, Coxiellaceae bacterium
  misc_feature (1)..(367): tr|A0A2E9ZA29|A0A2E9ZA29_9COXI Queuine tRNA-ribosyltran sferase OS=Coxiellaceae bacterium OX=2026727 GN=tgt PE= 3 SV=1
MQFTVAKTDGLARRGCVQFPRGDIQTPAFMPVGTYGTVKAMTSHEVRETGADILLGNTFHLMLRPGTEVIKLHGTLHDFMQWSRPILTDSGGFQVFSLTDLCKLTEEGVTFRSPVDGAVVHLTPERSIEVQRDLGSDIVMCFDECTPYPATEAVAKTSMELSLRWAKRSRDAHGDSLSALFGIVQGGMYRDLRLQSLSGLTDIGFDGYAIGGLSVGEPKHLMIKVLDEITPHMPKEKPRYLMGVGKPEDLVEGVLRGIDMFDCVMPTRNARNGHLFTSQGVIKIRNSQYRHDTRPLDPNCDCYTCQNYSRAYLHHLFRTREILSSRLNSWHNLHYYQSLMQGLRNAIEKGTLRAFVEQFYQSQQTRV

SEQ ID NO: 54309 - protein, 369 aa, Coxiellaceae bacterium
  misc_feature (1)..(369): tr|A0A359LDY2|A0A359LDY2_9COXI Queuine tRNA-ribosyltran sferase OS=Coxiellaceae bacterium OX=2026727 GN=tgt PE= 3 SV=1
MQFELITKNLLARRGRITFPSGHIVNTPAFMPVGTYGTVKALTTEEVRATGAEIILGNTFHLMLRPGTEIIKAHGGLHNFMHWSGPILTDSGGFQVFSLSDLRKITEEGVWFKSPLDGNNVFLSPEISMQIQRDLDSNIVMIFDECTPFPVSYDEAAKSVDLSIGWARRSKIAHGDNKNALFGIIQGGIFTDLRDRSLAALLEIGFDGYAIGGLAVGEPKHEMFKILQHLATQIPENKLRYLMGVGTPQDLIEGVLNGVDMFDCVLPTRNARNGYLFTSQGVVRIRNSAHKNDLSPLDQNCDCYTCKYYTRAYLHHLDRCREILGARLNTIHNLYFYQKLMTNLRQALEQGKLSQFVTNFYQLYNNSGE

SEQ ID NO: 54310 - protein, 372 aa, Crassaminicella sp.
  misc_feature (1)..(372): tr|A0A5C0SBS6|A0A5C0SBS6_9CLOT Queuine tRNA-ribosyltran sferase OS=Crassaminicella sp. SY095 OX=2599308 GN=tgt PE=3 SV=1
MAIKYELIKECKQSGARLGRLHTPHGIIETPIFMPVGTQATVKAMTPEELKEINAQIILSNTYHLYLRPGHKLVEKAGGLHKFMNWDRPILTDSGGFQVFSLGDLRKISEEGVEFRSHLDGSKHFISPEKAIEIENALGADIIMAFDECAPYPADKNYVKNSLERTTRWAKRCKQAHKNPDTQALFGIIQGGMYKDLREQSIKEIVELDFPGYAVGGLSVGEPKPLMYEVLEYTTPLMPKDKPRYLMGVGTPDCLIEGVIRGIDMFDCVLPTRIARNGTAMTSVGKVVIKNAKYIEDFEPLDPNCDCYTCKNYSRAYLRHLYKAQEILSARLVTYHNLYFLLELMKNIRNAIKEDRLLDFRKEFFEKYGYEI

SEQ ID NO: 54311 - protein, 371 aa, Crenobacter cavernae
  misc_feature (1)..(371): tr|A0A345Y265|A0A345Y265_9NEIS Queuine tRNA-ribosyltran sferase OS=Crenobacter cavernae OX=2290923 GN=tgt PE=3 SV=1
MLQFTVHKTSGGARRGTLVLNHGLVETPVFQPVGTYGSVKAMSPLELEEIGAQIILGNTFHLWLRPGLEIVEQFGGLHEFIGWDKPILTDSGGFQVFSLTNMRKLTEEGCTFQSPVNGDKLFLSPEISMKIQTVLNSDIVMQLDECTPGQVDHKTAGDSLRMSLRWAERSRRAFDDLKNPNALFGIVQGNLYTDLREESLKGLMEIGFDGIAIGGLSVGEPKPEMYRMLTELKDMLPAEKPHYLMGVGTPEDLVHGVANGVDMFDCVMPTRNARNGWIFTQWGDVKIKNAGYKMDKRPLDEECGCYTCRNFSRAYLHHLHRVGEILGARLNTIHNLYYYQELMRNIRKAIEDDRFEDFRAEFHENRARGVN

SEQ ID NO: 54312 - protein, 375 aa, Crenobacter cavernae
  misc_feature (1)..(375): tr|A0A4Q2JFZ5|A0A4Q2JFZ5_9NEIS Queuine tRNA-ribosyltran sferase OS=Crenobacter cavernae OX=2290923 GN=tgt PE=3 SV=1
MLQFTVHKTSGGARRGTLVLNHGLVETPVFQPVGTYGSVKAMSPLELEEIGAQIILGNTFHLWLRPGLEIVEQFGGLHEFIGWDKPILTDSGGFQVFSLTDMRKLTEEGCTFQSPVNGDKLFLSPEISMKIQTVLNSDIVMQLDECTPGQVDHKTAGDSLRMSLRWAERSRRAFDDLKNPNALFGIVQGNLYTDLREESLKGLMEIGFDGIAIGGLSVGEPKPEMYRMLTELKDMLPAEKPHYLMGVGTPEDLVHGVANGVDMFDCVMPTRNARNGWIFTQWGDVKIKNASYKMDKRPLDEECGCYTCRNFSRAYLHHLHRVGEILGARLNTIHNLYYYQELMRNIRKAIEDDRFEDFRAEFHENRARGVNRGVN

SEQ ID NO: 54313 - protein, 371 aa, Crenobacter luteus
  misc_feature (1)..(371): tr|A0A163C3K0|A0A163C3K0_9NEIS Queuine tRNA-ribosyltran sferase OS=Crenobacter luteus OX=1452487 GN=tgt PE=3 SV =1
MLQFTVHKTSGGARRGTLVLNHGVVETPVFQPVGTYGSVKAMSPLELEEIGAQIILGNTFHLWLRPGLEIVEQFGGLHGFIGWDKPILTDSGGFQVFSLSDMRKLTEEGCTFQSPINGDKLFLSPEISMKIQTVLNSDIVMQLDECTPGQVDHKTARSSLQMSLRWAERSRRAFDDLNNPNALFGIVQGNLYTDLRQESLDGLMQIGFDGIAIGGLSVGEPKPEMYRMLTELKDMLPAEKPHYLMGVGTPEDLVHGVANGVDMFDCVMPTRNARNGWIFTQWGDVKIKNASYKDDKRPLDEECGCYTCKNFSRAYLHHLHRVGEILGARLNTIHNLYYYQELMRQIRRAIEEDRFDDFRAQFHENRARGVR

SEQ ID NO: 54314 - protein, 370 aa, Crenobacter sp.
  misc_feature (1)..(370): tr|A0A4T0URQ3|A0A4T0URQ3_9NEIS Queuine tRNA-ribosyltran sferase OS=Crenobacter sp. GY 70310 OX=2563443 GN=tgt P E=3 SV=1
MLKFTVHKTSGGARRGTLELNHGTVETPVFQPVGTYGSVKAMSPLELNEIGAQIILGNTFHLWLRPGLEVVESFGGLHAFIGWDKPILTDSGGFQVFSLGDLRKLTEEGCTFQSPVNGDKLFLSPEISMKIQTVLNSDIVMQLDECTPGQVDHKTAEASMQMSLRWAARSRQAFDDLRNPNALFGIVQGNLYTDLRQKSLDGLMEIGFDGIAIGGLSVGEPKPEMYRMLEEMRDMLPADKPHYLMGVGTPEDLVQGVANGVDMFDCVMPTRNARNGWIFTRYGDIKIKNAFHKMDHRPLDEECACYACRNFSRAYLHHLHRTGEILGARLNTIHNLHYYQELMAEMREAIEQDRFADWRASFHEKRARGA

SEQ ID NO: 54315 - protein, 377 aa, Crenotalea thermophila
  misc_feature (1)..(377): tr|A0A1I7NEX1|A0A1I7NEX1_9BACT Queuine tRNA-ribosyltran sferase OS=Crenotalea thermophila OX=1393122 GN=tgt PE= 3 SV=1
MAIGFHIVREDVHSRARAGCITTDHGVIETPIFMPVGTAGAVKTLLQQQLDQDLQAPIILGNTYHLYLRPGTDILQQAGGLHRFMHWNRALLTDSGGYQVFSLAKIRKITEEGVWFQSHIDGSRHFFSPQRVMEIQRRIGADIVMAFDECTPYPCTHAYARNSLQLTHRWLDICLACFQEQGLYGYSQTLFPIVQGSVYADLRRASAEYIAAKETAGYAIGGLSVGEPEQMMYEMTALVNEILPPTKPRYLMGVGTPWNILESIALGVDMFDCVMPTRNGRNGMLFTWQGIINIRNKKWATDFSVIDENTTGPVSTYYSKAYLRHLFVSNEITGLQIATLHNLSFYLQLVREARKHILQGDFLSWKNEIIPRLKSRL

SEQ ID NO: 54316 - protein, 371 aa, Crenothrix polyspora
  misc_feature (1)..(371): tr|A0A1R4HJ93|A0A1R4HJ93_9GAMM Queuine tRNA-ribosyltran sferase OS=Crenothrix polyspora OX=360316 GN=tgt PE=3 S V=1
MEFKLKNTDGHARRGQLTFARGIVETPIFMPVGTYGTVKALAPEELHDLGAQIILGNTFHLMLRPGSAVIKAHGDLHDFMRWDKPILTDSGGFQVFSLGKMRKITEEGVIFRSPINGSKIFMGPEESMQVQRDLGSDIVMIFDECTPYPATVHEAADSMRLSLRWAERSKTAHGDNPSALFGIVQGGMYEHLRKESIAGLIDIGFDGYAIGGLSVGEPKEEMMATLDVIHRKMPIDKPRYLMGVGTPEDLVEGVRRGIDMFDCVMPTRNARNGHLFTHFGVVKIRNSQYEADTRPLDESCGCYTCRNYSRAYLRHLDKCKEMLGSRLNTIHNLYYYLELMQGLRDAIETQTLALFVKHFYDQRGKAVPDVA

SEQ ID NO: 54317 - protein, 371 aa, Crenothrix polyspora
  misc_feature (1)..(371): tr|A0A1R4HFP9|A0A1R4HFP9_9GAMM Queuine tRNA-ribosyltran sferase OS=Crenothrix polyspora OX=360316 GN=tgt PE=3 S V=1
MEFKLKNTDGHARRGQLTFARGIVETPIFMPVGTYGTVKSLTPDELHGVGAQIILGNTFHLMLRPGMEVIKAHGDLHDFMRWDKPILTDSGGFQVFSLGKLRKITEEGVTFKSPINGSKIFMGPEESMQVQRDLGSDIVMIFDECTPYPATVYEAADSMRLSLRWAERSKMAHGDNPSALFGIVQGGMYEHLRQESIAGLVDIGFDGYAIGGLSVGEPKEEMMATLDVVHRKMPVDKPRYLMGVGTPEDLVEAVRRGIDMFDCVMPTRNARNGHLFTSFGVVKIRNNQYEQDTRPLDETCGCYTCQNYSRAYLRHLDKCKEMLGSRLNTIHNLYYYLELMQGLREAIENQQLAVFVKRFYDQRGKAVPVVA

SEQ ID NO: 54318 - protein, 369 aa, Crenothrix sp.
  misc_feature (1)..(369): tr|A0A1Y2ZZ41|A0A1Y2ZZ41_9GAMM Queuine tRNA-ribosyltran sferase OS=Crenothrix sp. D3 OX=1880899 GN=tgt PE=3 SV= 1
MKFDLLNTDGHARRGRLTFARGVIETPIFMPVGTYGTVKALTPDELHGIGAQIILGNTFHLMLRPTTAVIKAHGDLHDFMHWEKPILTDSGGFQVFSLGALRKITEKGVTFKSPINGSKIFMGPEESMQVQRDLGSDIVMIFDECTPYPATVQEAADSMRLSLRWAMRSKIAHGDNPSALFGIVQGGMYEHLREESIAGLTDIGFDGYAIGGLSVGEPKEEMMATLDGIHQKMPTDKPRYLMGVGTPEDLVEAVCRGIDMFDCVMPTRNARNGHLFTTFGVVKIRNAQYEFDTRPLDDNCGCYTCQNYSRAYLRHLDKCKEMLGSRLNTIHNLYYYLHLMQGLRDAIASQTLDAFVKAFYEQRNTTRVL

SEQ ID NO: 54319 - protein, 366 aa, Criblamydia sequanensis
  misc_feature (1)..(366): tr|A0A090CXR0|A0A090CXR0_9BACT Queuine tRNA-ribosyltran sferase OS=Criblamydia sequanensis CRIB-18 OX=1437425 G N=tgt PE=3 SV=1
MEFTLLKEDSSSKARLGKLKTAHSEFETPIFMPVGTRAAVKTLTSKQLHALEAQIILGNTYHLMLKPGAEIIEKAGGLHKFMNWDKSILTDSGGFQVFSLSSLNRVTDQGVHFQSHIDGSSHFLGPRESMAIQKSLGSDIVMAFDECPPYPCSRIQLEESLVRTEKWARVCRDYTLHPNQNLFGIVQGGIEADLRRESAKSLVSMDFDGYAIGGVSVGEPEELMYQAVEASIPFLPKEKPRYLMGVGTPKNMIEAVMRGIDLFDCVMPTRNARNGMAFTWDGKVQIKAARYKEDFSPLDPHLDNEVSSYSKAYIRHLLNVDEITGLTLVTMQNLSFYLDLMKKIRQAIENNTIDELYKKIVSLYPN

SEQ ID NO: 54320 - protein, 376 aa, Cribrihabitans marinus
  misc_feature (1)..(376): tr|A0A1H6R317|A0A1H6R317_9RHOB Queuine tRNA-ribosyltran sferase OS=Cribrihabitans marinus OX=1227549 GN=tgt PE= 3 SV=1
MTERFSFRLDATDGRARTGAIDTPRGRIRTPAFMPVGTAATVKAMLPENVRATGADVLLGNTYHLMLRPTAERIDRLGGLHRFMNWDRPILTDSGGFQVMSLAGLRRLTEEGVTFKSHIDGSKHELTPERSMEIQRLLGSDIVMCFDECPALPADRDRIARSMRLSMRWAARSRAAFGDRPGHALFGIQQGGLEHDLRAESAEALREIGFEGYAVGGLAVGEGQEAMFGVLDFATDQLPENKPRYLMGVGKPDDIVGAVARGIDMMDCVLPSRSGRTGQVFTRHGQLNIKNARHMDDPRPLDEACSCPACRNYSRAYLHHVFRSQEIISSMLLTWHNLQFYQDLMAGMRAAIAEGRFAAWQSEFHAAREQGDIDPM

SEQ ID NO: 54321 - protein, 384 aa, Cricetibacter osteomyelitidis
  misc_feature (1)..(384): tr|A0A4R2T7J7|A0A4R2T7J7_9PAST Queuine tRNA-ribosyltran sferase OS=Cricetibacter osteomyelitidis OX=1521931 GN= tgt PE=3 SV=1
MKFELKTTNGRARRGQLIFNRSQGEFTVQTPAFMPVGTYGTVKGMTPEEVKATGAEILLGNTFHLWLRPGQEVMKMHGDLHDFMQWHAPILTDSGGFQVFSLGKLRKITEEGVKFQNPINGERIFLSPEKSMEIQYDLGSDIVMIFDECTPYPATFDYAKNSMELSLRWAKRSRDRFDELKNPNALFGIIQGGTYEELRKISVEGLKEIGFDGYAVGGLAVGEPKEEMHRILEFITPHIPADKPRYLMGVGKPEDLVEGVRRGIDMFDCVMPTRNARNGHLFVTDGIVKIRNAKYRNDTSPLDPECDCYTCKNYSKAYLYHLDKCGEILGARLNTIHNLRYYQRLMAQIREAIEQGGFEDFVQEFYARIGKEVPPLDSYYKFEG

SEQ ID NO: 54322 - protein, 373 aa, Criibacterium bergeronii
  misc_feature (1)..(373): tr|A0A371IJ13|A0A371IJ13_9FIRM Queuine tRNA-ribosyltran sferase OS=Criibacterium bergeronii OX=1871336 GN=tgt P E=3 SV=1
MNKPLEFTVLQEDKKSKARLGLLKTLHSEFETPVFMPVGTNATVKAMENRELYEIGAKIILSNTYHLHLRPGDEIVKKGGGLHKFMNWERSILTDSGGFQVFSLGEFRKIKEEGVYFKSVLDGANLFMGPEESIGVQNSLGSDIMMSFDECAPYPASREYVEDSYKRTIRWAKRGKEANKNPETQALFGIVQGGVYKDLRIESAKATVDLDFDGYSIGGLSVGEPKELMYEVLDYTPDYLPKYKPRYLMGVGTPDDIFEGVIRGVDMFDCVLPTRIARHGTAMTANGKLVVRNATYAEDFLPLDPECDCHVCKNYSRAYIRHLIKAGEILGSRLITYHNIYFLVNMMNNIRAAIRAGNLLEYKKAFLEKYYAE

SEQ ID NO: 54323 - protein, 373 aa, Criibacterium bergeronii
  misc_feature (1)..(373): tr|A0A552UVI0|A0A552UVI0_9FIRM Queuine tRNA-ribosyltran sferase OS=Criibacterium bergeronii OX=1871336 GN=tgt P E=3 SV=1
MNKPLEFTVLQEDKKSKARLGLLKTLHSEFETPVFMPVGTNATVKAMENRELYEIGAKIILSNTYHLHLRPGDEIVKKGGGLHKFMNWERSILTDSGGFQVFSLGEFRKIKEEGVYFKSVLDGANLFMGPEESIGVQNNLGSDIMMSFDECAPYPASREYVEDSYKRTIRWAKRGKEANKNPETQALFGIVQGGVYKDLRIESAKATVDLDFDGYSIGGLSVGEPKELMYEVLDYTPDYLPKYKPRYLMGVGTPDDIFEGVIRGVDMFDCVLPTRIARHGTAMTANGKLVVRNATYAEDFLPLDPECDCHVCKNYSRAYIRHLIKAEEILGSRLITYHNIYFLVNMMNSIRAAIRTGNLLEYKKAFLEKYYAE

SEQ ID NO: 54324 - protein, 378 aa, Crinalium epipsammum
  misc_feature (1)..(378): tr|K9VZI5|K9VZI5_9CYAN Queuine tRNA-ribosyltransferase OS=Crinalium epipsammum PCC 9333 OX=1173022 GN=tgt PE=3 SV=1
MSANFSFQRQASCSHTQARAGVFVTPHGIVETPRFMPVGTLATVKTLTSAHLEEAEAQMVLANTYHLHLQPGEDIVAGAGGLHRFMNWKGPMLTDSGGFQVFSLSKIRTITEAGVTFRSPRDGRIINMTPELSIQIQNTLGADVIMAFDECPPYPAEREEVVRATDRTYRWLERCIKAHQRPQDQALFGIVQGGVFLDLRRAAAEKLATLDLPGYAIGGVSVGEPAEFIHQIVKATAPLLPEDKPRYLMGVGTYREMAIAIASGIDLFDCVIPTRLGRHGAVLVQGERWNLKNARFRRDYTQLDETCPCYTCQNFSRAYLSHLMRSGEVLGYTLLSLHNVTELIRFTKRIREAILSDRFTTEFAQWLDSPPPQAAEPC

SEQ ID NO: 54325 - protein, 376 aa, Croceibacter atlanticus
  misc_feature (1)..(376): tr|A3U4U5|A3U4U5_CROAH Queuine tRNA-ribosyltransferase OS=Croceibacter atlanticus (strain ATCC BAA-628 / HTCC2 559 / KCTC 12090) OX=216432 GN=tgt PE=3 SV=1
MTFDLLSTDKNSQARAGTITTDHGKIETPIFMPVGTVGTVKGVHQRELKQDINPDIILGNTYHLYLRPQTEILEKAGGLHKFMNWDRNILTDSGGYQVYSLSSNRKIKEEGVKFKSHIDGSMHTFTPENVMEIQRTIGADIIMAFDECTPYPCDYQYARRSMHMTHRWLERCVAHLKKLPFKYGYEQTFFPIVQGSTYKDLRQQSADYIASVGADGNAIGGLSVGEPAEEMYAMTDVVTAILPKEKPRYLMGVGTPINILENIALGIDMFDCVMPTRNARNGMLFTAHGTINIKNAKWKDDFSPIDEMDITWVDTEYSKAYLRHLFSVNEFLGKQIATIHNLGFYLWLTREARKQILAGTFRVWKDKMVKQMDKRL

SEQ ID NO: 54326 - protein, 373 aa, Croceicoccus marinus
  misc_feature (1)..(373): tr|A0A1Z1FAM1|A0A1Z1FAM1_9SPHN Queuine tRNA-ribosyltran sferase OS=Croceicoccus marinus OX=450378 GN=tgt PE=3 S V=1
MTRFQFTIHAREGKARTGEIAMQRGTIRTPAFMPVGTAATVKAMKVEDVRKTGADIILGNTYHLMLRPGAERVARLGGLHDFMGWDRPILTDSGGYQVMSLSDLRKITEEGVTFKSHLDGSRHSLTPERSMEIQRLLGSDIVMAFDECPRADRPRDEIAASMEMSMRWAKRSRDGFDSGGEHAARSALFGIQQGALDEDLRRISAEKLTEIGFDGYAVGGLAVGEGQEAMFATLDFAPGQLPDDRPRYLMGVGKPDDLVGAVERGIDMFDCVLPSRSGRNGQAFTWNGAINIRNAKFAEDQEPLDDRCSCPTCGKYSRAYLHHLVRAGEILGAMLMTEHNLSFYQQLMQAMRDAIAGGRFAAFAADFRRDYLR

SEQ ID NO: 54327 - protein, 374 aa, Croceicoccus naphthovorans
  misc_feature (1)..(374): tr|A0A0G3XMD3|A0A0G3XMD3_9SPHN Queuine tRNA-ribosyltran sferase OS=Croceicoccus naphthovorans OX=1348774 GN=tgt PE=3 SV=1
MTRFAFSIHARDGKARTGEIAMKRGTIRTPAFMPVGTAATVKAMKVEDVRRTGADIILGNTYHLMLRPGAERVARLGGLHKFMGWDRPILTDSGGYQVMSLSDLRKITEEGVTFASHIDGSRHMLTPERSMEIQRLLGSDIVMAFDECPRADQSRDVIAQSMEMSMRWAKRSRDGFDSGEEHAARSALFGIQQGALDEDLRGISAQKLTEIGFDGYAIGGLAVGEGQEAMFATLDFAPGQLPDDRPRYLMGVGKPDDLIGAVERGVDMFDCVLPSRSGRNGQAFTWNGPLNIRNAKFAEDNDPIDSRCTCPTCGKYSRAYLHHLNKAGEILGAMLMTEHNLSFYQQLMQAMRAAIADGRFAAFAADFRRDYLRK

SEQ ID NO: 54328 - protein, 374 aa, Croceicoccus ponticola
  misc_feature (1)..(374): tr|A0A437H0X8|A0A437H0X8_9SPHN Queuine tRNA-ribosyltran sferase OS=Croceicoccus ponticola OX=2217664 GN=tgt PE= 3 SV=1
MTRFAFSIHARDGKARTGKIAMLRGDIRTPAFMPVGTAATVKAMKVEDVRATGADIILGNTYHLMLRPGAERVARLGGLHKFMGWDRPILTDSGGYQVMSLSDLRKITEEGVSFRSHLDGSKHMLTPERSMEIQRLLGSDIVMAFDECPRADQPRDIIAQSMEMSMRWAQRSREGFDSGEDHASRAALFGIQQGALDEDLRGISAQKLAEIGFDGYAIGGLAVGEGQEAMFATLDFAPDQLPDDRPRYLMGVGKPDDLVGAVERGVDMFDCVLPSRSGRNGQAFTWNGPLNIRNAKFAEDTDPLDDRCSCSTCGKYSRAYLHHLVRAGEILGAMLMTEHNLSFYQQLMQGMRDAIGAGRFASFATDFRRDYLSK

SEQ ID NO: 54329 - protein, 373 aa, Croceicoccus sp.
  misc_feature (1)..(373): tr|A0A2D8D4I7|A0A2D8D4I7_9SPHN Queuine tRNA-ribosyltran sferase OS=Croceicoccus sp. OX=1927144 GN=tgt PE=3 SV=1
MTRFEFTIHAREGRARTGEIAMQRGTIRTPAFMPVGTAATVKAMKVEDVRRTGAEIILGNTYHLMLRPGAERVARLGGLHAFMGWDRPILTDSGGYQVMSLSDLRKITEEGVTFKSHLDGSRHALTPERSMEIQRLLGSDIVMAFDECPRADRPRDEIAASMEMSMRWAKRSREGFDSGGEHAARSALFGIQQGALDEELRRISADKLTDIGFDGYAVGGLAVGEGQEAMFATLDFAPGQLPDDRPRYLMGVGKPDDLVGAVERGIDMFDCVLPSRSGRNGQAFTWNGPINIRNARFAEDQEPVDSRCSCPTCGKYSRAYLHHLVRSGEILGAMLMTEHNLSFYQQLMQAMRDAIAQGRFAAFAADFRREYLG

SEQ ID NO: 54330 - protein, 376 aa, Croceitalea dokdonensis
  misc_feature (1)..(376): tr|A0A0P7AYQ4|A0A0P7AYQ4_9FLAO Queuine tRNA-ribosyltran sferase OS=Croceitalea dokdonensis DOKDO 023 OX=1300341 GN=tgt PE=3 SV=1
MKYSLLQKDPNSSARAGEITTDHGKIETPIFMPVGTVATVKGVHQRELREDINPDIILGNTYHLYLRPGMDILERAGGLHKFMGWDRNILTDSGGYQVYSLSGTRKIKEEGVNFKSHIDGSSHFFSPESVMEVQRTIGADIIMAFDECTPYPCDYGYAKNSMHMTHRWLDRCISHLEKVPVKYGYGQAFFPIVQGSTYKDLRKQSAEYIAEAGAVGNAIGGLSVGEPAEELYAMSEIVCDILPEDKPRYLMGVGTPINILENIALGVDMFDCVMPTRNARNGMLFTAEGTINIKNKKWEDDFSPLDDMGITWVDKEYSKAYLRHLFAANEYLGKQIATIHNLGFYLWLTRQAREHILAGDFRSWKDNMVKQMDKRL

SEQ ID NO: 54331 - protein, 376 aa, Croceivirga radicis
  misc_feature (1)..(376): tr|A0A1V6LNC9|A0A1V6LNC9_9FLAO Queuine tRNA-ribosyltran sferase OS=Croceivirga radicis OX=1929488 GN=tgt PE=3 S V=1
MKFTLEKKDSQSKARAGTITLGHGPIQTPIFMPVGTVASVKGVHQKELREEINPDIILGNTYHLYLRPGTQILEQAGGLHKFMGWDRNILTDSGGYQVYSLSANRKIKEEGVKFKSHIDGSYHFFSPERAMEIQRSIGADIIMAFDECTPYPCEYNYAKRSMHMTHRWLDRCIKHLKEVPEMYGYEQTLFPIVQGSTYTDLRQQSAEYIANAGALGNAIGGLSVGEPAEEMYAMTDVVCAILPEDKPRYLMGVGTPINILENIALGVDMFDCVMPTRNARNGMLFTSEGTINIKNKKWENDFSPLDDLGVTFVDREYSKAYLRHLFAANEYLGKQIATIHNLGFYLWLVRTAREKIIEGTFTDWKNKMVKQMDKRL

SEQ ID NO: 54332 - protein, 376 aa, Crocinitomicaceae bacterium
  misc_feature (1)..(376): tr|A0A2D5V2M1|A0A2D5V2M1_9FLAO Queuine tRNA-ribosyltran sferase OS=Crocinitomicaceae bacterium OX=2026728 GN=tg t PE=3 SV=1
  misc_feature (185)..(185): Xaa can be any naturally occurring amino acid
MNFTLRSKDPNSKARSGIINTDHGIIQTPIFMPVGTAGTVKSVSQKDLEEQVKAQIILGNTYHLYLRPGLNLLEQVGGIHKFISWNRPVLTDSGGYQVYSLSGRRKITEEGVKFKSHIDGSSHFFTPENVMNIQKSIGADIIMAFDECTPYPCDYSYAKSSTKMTHRWLKRCVDNFNNSPNKYNXSQSLFPIVQGSTYSDLRKQSAEVIASFDLPGNAIGGLSVGEPHDLMYKHTEEVCDILPESKPRYLMGVGTPSNLLECIALGVDMFDCVMPTRNARNGMLFTKEGFINIKNKKWENDFSEIDSNGTSYVDKRYSKSYLRHLFVSKEMLGPQIASIHNLSFYIWLVEESRKKIEDGTFTTWKNKMVKKLVERL

SEQ ID NO: 54333 - protein, 282 aa, Crocinitomicaceae bacterium
  misc_feature (1)..(282): tr|A0A2D8CRM4|A0A2D8CRM4_9FLAO Queuine tRNA-ribosyltran sferase OS=Crocinitomicaceae bacterium OX=2026728 GN=tg t PE=3 SV=1
  misc_feature (109)..(109): Xaa can be any naturally occurring amino acid
  misc_feature (132)..(132): Xaa can be any naturally occurring amino acid
  misc_feature (146)..(146): Xaa can be any naturally occurring amino acid
  misc_feature (173)..(173): Xaa can be any naturally occurring amino acid
MNFKLHSKDEFSKARAGTLQTDHGEILTPIFMPVGTAGTVKAVSQEELSKNVKAEIILGNTYHLYLRPGIDLLEKSGGLHQFISWNKPILTDSGGYQVYSLSERRKITXEGVSFRSHIDGSKHLFTPENAMXIQKSIGADIIMAFXECTPYPCDFNYANTSMHMTHRWLKRCXDHFNSSPSKYGYNQSLFPIVQGSTYSDLRRKSADVIANFDMPGNAIGGLSVGEPAELMYKHTDEVCTILPEDKPRYLMGVGTPVNILECIALGVDMFDSGKLNARLILL

SEQ ID NO: 54334 - protein, 376 aa, Crocinitomix sp.
  misc_feature (1)..(376): tr|A0A1J5M081|A0A1J5M081_9FLAO Queuine tRNA-ribosyltran sferase OS=Crocinitomix sp. MedPE-SWsnd OX=1860084 GN=t gt PE=3 SV=1
MDFILEKTDPNSKARTGTITTDHGEIKTPIFMPVGTAGTVKAVHQHELVEDIKAQIILGNTYHLYLRPGLEVIEKAGGLHKFNGWTKPILTDSGGYQVYSLSGTRKITEEGVNFKSHIDGSSHFFTPERAVDIQRVIGADIIMAFDECTPYPCEYNYAKNSMEMTHRWLKRCMDQMKATEGKYGYSQTLFPIVQGSTYKDLRVKSAETIASFEAEGNAIGGLSVGEPDDELYETTELVCGILPKDKPRYLMGVGTPVNILECIALGVDMMDCVLPTRNARHGTLYTKNGILNMKNAKWKEDFSPLDPDGTSYVDSFYSKSYVRHLFHSKETLAMQIGSIHNLAFFLWLVDEARNQIEEGTFTPWKNEMVVKLAQRL

SEQ ID NO: 54335 - protein, 376 aa, Crocinitomix sp.
  misc_feature (1)..(376): tr|A0A2W1NBL4|A0A2W1NBL4_9FLAO Queuine tRNA-ribosyltran sferase OS=Crocinitomix sp. SM1701 OX=2219161 GN=tgt PE =3 SV=1
MNFKLESTDPKSKARTGTLTTAHGEIKTPIFMPVGTAGTVKGLHQHELKNDVKAQIILGNTYHLYLRPGIETLEKAGGLHKFMNWDMPILTDSGGYQVYSLSGTRKINENGVKFQSHIDGSSHLFTPEYAMDIQRSIGADLIMAFDECTPYPCEYNYARRSMHMTHRWLKRCVDRFDSTTPLYGYDQTLLPIIQGSVYKDLRKESAETIASFDLPANAIGGLSVGEPDEDLYEMTDLVCDYLPKEKPRYLMGVGTPINLLECIALGIDMFDCVLPTRNARHGTIYTQNGIMNVKNLKWKDDFTCLDENGTSYVDSTYSKSYVRHLFTVNEALGKQITSIHNLAFYLWLVGEARTQIEAGTFTDWKNKMVVQLAQKL

SEQ ID NO: 54336 - protein, 370 aa, Crocosphaera chwakensis
  misc_feature (1)..(370): tr|A3IRI4|A3IRI4_9CHRO Queuine tRNA-ribosyltransferase OS=Crocosphaera chwakensis CCY0110 OX=391612 GN=tgt PE= 3 SV=1
MVFSFQLEKKCCHTKARAGTWSTPHGIVETPRFMPVGTLATVKGLTPAQLETTGAQMILANTYHLHLQPGEPIVEAVGGLHQFMGWNGPMLTDSGGFQVFSLSELRKVREIGVTFRSPRDGRIIELTPERSIHIQNALGADVIMAFDECPPGNADYDTVAAATDRTYRWLERCIKAHQRPHDQALFGIVQGGIYPKLRSDAVSALIPLDLPGYAIGGVSVGEEPALVRDIVKLTTPLLPESKPRYLMGVGTYKEMVMAIASGIDLFDCVIPTRFGRHGTALVAGERWNLKNAQFREDFTPLDPECPCYTCQTFSRAYLNHLVRSQEMLGYILLSLHNVTELVRFTQRIRESILRDNFTQEFATWLKEDSP

SEQ ID NO: 54337 - protein, 365 aa, Crocosphaera subtropica
  misc_feature (1)..(365): tr|B1WZE5|B1WZE5_CROS5 Queuine tRNA-ribosyltransferase OS=Crocosphaera subtropica (strain ATCC 51142 / BH68) O X=43989 GN=tgt PE=3 SV=1
MAFSFQLQKKCLHTQARVGTWSTPHGLVETPRFMPVGTLATVKGLTPAQLETTGAQMILANTYHLHLQPGETIIEAAGGLHEFMGWNGPILTDSGGFQVFSLSELRKIREIGVTFRSPRDGRIIELTPERSIHIQNALGADVIMAFDECPPGNADYDTVAAATDRTYRWLERCIKAHQRPHDQALFGIVQGGIYPKLRSDAVSALIPLDLPGYAIGGVSVGEEPALVRDIVKLTTPLLPVSKPRYLMGVGTYKEMVMAIASGIDLFDCVIPTRFGRHGTALVAGERWNLKNAQFREDFTPLDPECPCYTCQTFSRAYLNHLVRSQEMLGYILLSLHNVTELVRFTQRIREAILKDRFTQEFGHWL

SEQ ID NO: 54338 - protein, 370 aa, Crocosphaera watsonii
  misc_feature (1)..(370): tr|T2IJH3|T2IJH3_CROWT Queuine tRNA-ribosyltransferase OS=Crocosphaera watsonii WH 8502 OX=423474 GN=tgt PE=3 SV=1
MVFSFQLQKKCLHTQARVGTWSTPHGIVETPRFMPVGTLATVKGLTPAQLETTGAQMILANTYHLHLQPGEKIVEAAGGLHSFMGWNGPILTDSGGFQVFSLSKLRKIREIGVTFRSPRDGSIIELTPERSIHIQNALGADVIMAFDECPPGDADYDAVAAATDRTYRWLERCIKAHQRPQDQGLFGIVQGGTYPKLRSDAVSALIPLDLPGYAIGGVSVGEQPALVRDIVKFTTPLLPESKPRYLMGVGTYKEMAMAIASGIDLFDCVIPTRFGRHGTALVRGERWNLKNARFREDFSPLDPECPCYVCKNFSRAYLNHLVRSREMLGYILLSLHNVTELVRFTQRIREAILNDSFTEEFADWLKEDFP

SEQ ID NO: 54339 - protein, 370 aa, Crocosphaera watsonii
  misc_feature (1)..(370): tr|T2IY60|T2IY60_CROWT Queuine tRNA-ribosyltransferase OS=Crocosphaera watsonii WH 0005 OX=423472 GN=tgt PE=3 SV=1
MVFSFQLQKKCLHTQARVGTWSTPHGIVETPRFMPVGTLATVKGLTPAQLETTGAQMILANTYHLHLQPGEKIVEAAGGLHSFMGWNGPILTDSGGFQVFSLSKLRKIREIGVTFRSPRDGSIIELTPERSIHIQNALGADVIMAFDECPPGDADYDAVAAATDRTYRWLERCIKAHQRPQDQGLFGIVQGGTYPKLRSDAVSALIPLDLPGYAIGGVSVGEEPALVRDIVKFTTPLLPESKPRYLMGVGTYKEMAMAIASGIDLFDCVIPTRFGRHGTALVRGERWNLKNARFKEDFSPLDPECPCYVCKNFSRAYLNHLVRSREMLGYILLSLHNVTELVRFTQRIREAILNDSFTEEFADWLKEDFP

SEQ ID NO: 54340 - protein, 379 aa, Cronobacter dublinensis
  misc_feature (1)..(379): tr|K8ALU9|K8ALU9_9ENTR Queuine tRNA-ribosyltransferase OS=Cronobacter dublinensis 1210 OX=1208656 GN=tgt PE=3 SV=1
MEKNVKFELDTTDGRARRGRLVFDRGVVETPAFMPVGTYGTVKGMTPEEVEATGAQIILGNTFHLWLRPGQEIMKLHGDLHDFMQWKGPILTDSGGFQVFSLGDIRKITEQGVHFRNPINGDPIFLDPEKSMEIQFDLGSDIVMIFDECTPYPADWDYAKRSMEMSLRWAKRSRDRFDSLGNKNALFGIIQGSVYEDLRDISVKGLVEIGFDGYAVGGLAVGEPKEDMHRILEHVCPQIPADKPRYLMGVGKPEDLVEGVRRGIDMFDCVMPTRNARNGHLFVTEGVVKIRNAKYKSDTGPLDPECDCYTCRNYSRAYLHHLDRCNEILGARLNTIHNLRHYQRLMAGLRKAIEEGKLEHFVADFYQRQGRPVPPLNVD

SEQ ID NO: 54341 - protein, 353 aa, Cronobacter dublinensis
  misc_feature (1)..(353): tr|K8B413|K8B413_9ENTR Queuine tRNA-ribosyltransferase OS=Cronobacter dublinensis 582 OX=1208661 GN=tgt PE=3 S V=1
MVETPAFMPVGTYGTVKGMTPEEVEATGAQIILGNTFHLWLRPGQEIMKLHGDLHDFMQWKGPILTDSGGFQVFSLGDIRKITEQGVHFRNPINGDPIFLDPEKSMEIQFDLGSDIVMIFDECTPYPADWDYAKRSMEMSLRWAKRSRDRFDSLGNKNALFGIIQGSVYEDLRDISVKGLVEIGFDGYAVGGLAVGEPKEDMHRILEHVCPQIPADKPRYLMGVGKPEDLVEGVRRGIDMFDCVMPTRNARNGHLFVTEGVVKIRNAKYKSDTGPLDPECDCYTCRNYSRAYLHHLDRCNEILGARLNTIHNLRHYQRLMAGLRKAIEEGKLEHFVADFYQRQGRPVPPLNVD

SEQ ID NO: 54342 - protein, 375 aa, Cronobacter malonaticus
  misc_feature (1)..(375): tr|A0A423Y571|A0A423Y571_9ENTR Queuine tRNA-ribosyltran sferase OS=Cronobacter malonaticus OX=413503 GN=tgt PE= 3 SV=1
MKFELDTTDGRARRGRLVFDRGVVETPAFMPVGTYGTVKGMTPEEVEATGAQIILGNTFHLWLRPGQEIMKLHGDLHDFMQWKGPILTDSGGFQVFSLGDIRKITEQGVHFRNPINGDPIFLDPEKSMEIQFDLGSDIVMIFDECTPYPADWDYAKRSMEMSLRWAKRSRDRFDSLGNKNALFGIIQGSVYEDLRDISVKGLVEIGFDGYAVGGLAVGEPKEDMHRILEHVCPQIPADKPRYLMGVGKPEDLVEGVRRGIDMFDCVMPTRNARNGHLFVTEGVVKIRNAKYKSDTGPLDPECDCYTCRNYSRAYLHHLDRCNEILGARLNTIHNLRHYQRLMAGLRKAIEEGKLEHFVADFYQRQGRPVPPLNVD

SEQ ID NO: 54343 - protein, 379 aa, Cronobacter malonaticus; identical to SEQ ID NO: 54340
  misc_feature (1)..(379): tr|V5U2Q4|V5U2Q4_9ENTR Queuine tRNA-ribosyltransferase OS=Cronobacter malonaticus OX=413503 GN=tgt PE=3 SV=1

SEQ ID NO: 54344 - protein, 375 aa, Cronobacter muytjensii; identical to SEQ ID NO: 54342
  misc_feature (1)..(375): tr|A0A2T7AQH8|A0A2T7AQH8_9ENTR Queuine tRNA-ribosyltran sferase OS=Cronobacter muytjensii OX=413501 GN=tgt PE=3 SV=1

SEQ ID NO: 54345 - protein, 379 aa, Cronobacter sakazakii; identical to SEQ ID NO: 54340
  misc_feature (1)..(379): tr|A7MLX8|A7MLX8_CROS8 Queuine tRNA-ribosyltransferase OS=Cronobacter sakazakii (strain ATCC BAA-894) OX=29033 9 GN=tgt PE=3 SV=1

SEQ ID NO: 54346 - protein, 352 aa, Cronobacter sakazakii
  misc_feature (1)..(352): tr|K8CZ60|K8CZ60_CROSK Queuine tRNA-ribosyltransferase OS=Cronobacter sakazakii 696 OX=1208664 GN=tgt PE=3 SV= 1
METPAFMPVGTYGTVKGMTPEEVEATGAQIILGNTFHLWLRPGQEIMKLHGDLHDFMQWKGPILTDSGGFQVFSLGDIRKITEQGVHFRNPINGDPIFLDPEKSMEIQFDLGSDIVMIFDECTPYPADWDYAKRSMEMSLRWAKRSRDRFDSLGNKNALFGIIQGSVYEDLRDISVKGLVEIGFDGYAVGGLAVGEPKEDMHRILEHVCPQIPADKPRYLMGVGKPEDLVEGVRRGIDMFDCVMPTRNARNGHLFVTEGVVKIRNAKYKSDTGPLDPECDCYTCRNYSRAYLHHLDRCNEILGARLNTIHNLRHYQRLMAGLRKAIEEGKLEHFVADFYQRQGRPVPPLNVD

SEQ ID NO: 54347 - protein, 375 aa, Cronobacter turicensis; identical to SEQ ID NO: 54342
  misc_feature (1)..(375): tr|A0A2T7B999|A0A2T7B999_9ENTR Queuine tRNA-ribosyltran sferase OS=Cronobacter turicensis OX=413502 GN=tgt PE=3 SV=1

SEQ ID NO: 54348 - protein, 375 aa, Cronobacter turicensis; identical to SEQ ID NO: 54342
  misc_feature (1)..(375): tr|C9XX69|C9XX69_CROTZ Queuine tRNA-ribosyltransferase OS=Cronobacter turicensis (strain DSM 18703 / LMG 23827 / z3032) OX=693216 GN=tgt PE=3 SV=1

SEQ ID NO: 54349 - protein, 375 aa, Cronobacter universalis; identical to SEQ ID NO: 54342
  misc_feature (1)..(375): tr|A0A376E3H4|A0A376E3H4_9ENTR Queuine tRNA-ribosyltran sferase OS=Cronobacter universalis NCTC 9529 OX=1074000 GN=tgt PE=3 SV=1

SEQ ID NO: 54350 - protein, 377 aa, Cruoricaptor ignavus
  misc_feature (1)..(377): tr|A0A1M6AW59|A0A1M6AW59_9FLAO Queuine tRNA-ribosyltran sferase OS=Cruoricaptor ignavus OX=1118202 GN=tgt PE=3 SV=1
MNPFFQIEKTTESKARAGIISTDHGKIETPIFMPVGTVASVKTVHQSELREDIKAQIILGNTYHLYLRPAMEVMQNAGGLHKFMNWDLPILTDSGGFQVFSLSDSRKMTEEGVKFKSHIDGSYHFISPEKSMEIQRQIGADIFMAFDECTAYPSTYTQAKLSMEMTHRWLKRCIKWCEENPEIYAHRQHLFPIVQGSTFSDLRKISAEFISEQNCDGNAIGGLSVGEPEDEMYRITDEVTDILPKEKPRYLMGVGTPWNILESIGLGIDMMDCVLPTRNARNGMLFTWKGVINIKNEKWKNDFSPLDEFGKSYVDRDYSKAYVRHLFVSREYLGKQIASVHNLAFYLDLVKTARQHILAGDFYQWKNSVLPELKNRL

SEQ ID NO: 54351 - protein, 376 aa, Cryomorphaceae bacterium
  misc_feature (1)..(376): tr|A0A2D5N918|A0A2D5N918_9FLAO Queuine tRNA-ribosyltran sferase OS=Cryomorphaceae bacterium OX=1898111 GN=tgt P E=3 SV=1
  misc_feature (142)..(142): Xaa can be any naturally occurring amino acid
MKFTLEHNDPKSAARAGTITTDHGTIQTPIFMPVGTAGTVKGVHTKDLREDTKAQIILGNTYHLFLRPGTEILKAAGGLHKFNGWDRPILTDSGGYQVYSLANQRKITEEGATFASHIDGTKHLFTPERVMDIQREIGADIXMAFDECPPYPSTYEYAKQSMHMTHRWLDRCFNRIHETDPLYGYEQTLFPIIQGSTYEDLRNESAEYIARKNADGNAIGGLSVGEPAEEMYKHAAGACAILPKDKPRYLMGVGTPANILENISLGIDMFDCVMPTRNGRNGQIFTSEGILNLRNKKWENVHEPLDKNGTSFVDSQYTKAYVRHLIHSKESLGAQIASLHNIRFYLWLVEQAREHIIAGDFASWKNHILPKLEQRL

SEQ ID NO: 54352 - protein, 282 aa, Cryomorphaceae bacterium
  misc_feature (1)..(282): tr|A0A0R2QVN7|A0A0R2QVN7_9FLAO Queuine tRNA-ribosyltran sferase (Fragment) OS=Cryomorphaceae bacterium BACL11 M AG-121001-bin54 OX=1655587 GN=tgt PE=3 SV=1
MKFTLLKADKESKARLGEIQTAHGIIKTPIFMPVGTAGTVKGVHQHELLEDTLAQIILGNTYHLYLRPGLDIIQGAGGLHKFIGWDKPLLTDSGGYQVYSLSGTRKIEEKGVKFQSHIDGSYHFFTPEYAIDVQRTIGADIIMAFDECTPYPCEYDYAKRSMHMTHRWLKRCCERFDSTEGKYGFEQSFFPIVQGSVYKDLRLQSAEKIASFEREGNAIGGLSVGEPHDMMYEMTQTVCSVLPWDKPRYLMGVGTPTNLLENIALGIDMFDCVMPTRNARNG

SEQ ID NO: 54353 - protein, 382 aa, Cryptobacterium curtum
  misc_feature (1)..(382): tr|C7MKZ5|C7MKZ5_CRYCD Queuine tRNA-ribosyltransferase OS=Cryptobacterium curtum (strain ATCC 700683 / DSM 156 41 / 12-3) OX=469378 GN=tgt PE=3 SV=1
MSLFDLTIDAQSGHARATTYQTAHGSFTTPLFMPVGTHATVKGIMPDMLKQLQSQVVLANTYHLYMRPGVDVVEEAGGVQKFMHYDGPMLTDSGGFQLFSLDHMMKVDGDGVSFQARDYDGSRHRWTPEANMRIQERLGADIAMQLDQCIGYPAEKSAVAASTKLSWEWARRCCDAHVRPDQALFGIVQGGMHLDLRLESVNRLATIDKESRNQGGRGFQGWGIGGYSVGEPHDVMFATLGQVARSLPDHMPRYLMGVGNPTTLVRAVREGVDMFDCVLPTRTGRMGTAFSSTGRMNLRNARYTHDFTPLDHECTCPVCTQFTRAYIRHLVKQGEMLGGILLSMHNIYFLTDLMRRAREAILADAYEEFYAAWMASPAAKDY

SEQ ID NO: 54354 - protein, 381 aa, Cryptobacterium sp.
  misc_feature (1)..(381): tr|R7CJQ7|R7CJQ7_9ACTN Queuine tRNA-ribosyltransferase OS=Cryptobacterium sp. CAG:338 OX=1262868 GN=tgt PE=3 S V=1
MALFDFTLEAQSGHARAGLFETAHGTVRTPLFMPVGTSATVKGIRPQMLKELGAQIVLSNTYHLSLRPGADLIAEAGGLHKFMAYDGPILTDSGGFQIFSLADTLKLDDDGVTFSSIYDGSKIRWTPETNMDIQQKLGADIIMQLDQCPPYPATREFVQRAVDLSSAWAKRCLAAHTREDQALFAICQGGMNLDMRLESIRRLKEISDESVRGGHKDFKGFGIGGYSVGEDHEVMFETLGEVARACPENKPRYVMGVGNPTTLVRAVHEGVDMFDCVLPTRTARMGTAFSSQGRMNMRNARFVHDFGPLDENCTCPTCQTHSRSYIRHLVKQNEMLGSILLSIHNLHFLIDLMNRAREAVLQDAYEDFYQDWMHSPAAQDY

SEQ ID NO: 54355 - protein, 376 aa, Culturomica sp.
  misc_feature (1)..(376): tr|A0A356DFW3|A0A356DFW3_9BACT Queuine tRNA-ribosyltran sferase OS=Culturomica sp. OX=1926652 GN=tgt PE=3 SV=1
MQYTLLAKDKNSEARCGVLTTAHGEIHTPIFMPVGTVGTVKAVHARELKTDIRAEIILGNTYHLYLRPGTDILQAAGGLHKFNGWDRPILTDSGGFQVFSLTDRRKITEEGVIFHSHIDGSKHIFTPESVMDIQRKIGADIIMAFDECPPGTSEYGYAKKSLELTQRWLERCVKHLDATEPLYGYEQNLFPIVQGCVYKDLRERSAEHAVALDRAGYAIGGLAVGEPAEDMYAMIEVVNRILPQNKPRYLMGVGTPENILEAIALGVDMFDCVMPTRNGRNGMLFTTEGVINIKNRKWDRDFSPLDPAGLCFVDTDYTKAYLRHLIKADEILGLQICSIHNLAFYLWLVREARKHILEGDFAVWKSRMVKKVTTRL

SEQ ID NO: 54356 - protein, 378 aa, Cuneatibacter caecimuris
  misc_feature (1)..(378): tr|A0A4Q7PPR1|A0A4Q7PPR1_9FIRM Queuine tRNA-ribosyltran sferase OS=Cuneatibacter caecimuris OX=1796618 GN=tgt P E=3 SV=1
MYQIITEDGRAKRAVFETVHGTVQTPVFMNVGTAAAIKGAVATTDLQQIGTQIELSNTYHLHVRPGDQVVRQLGGLHRFMVWDKPILTDSGGFQVFSLSGLRRIKEEGVYFQSHVDGRKIFMGPEESMQIQSNLASTIAMAFDECPSSVAERSYIENSVARTTRWLVRCKEEMARLNSLPDTINPRQMLFGINQGGVCEDIRIAHAQEISGLDLDGYAVGGLAVGESHEEMYQVLDAVVPHLPRNKPTYLMGVGTPANILEAVDRGVDFFDCVYPSRNGRHGHVYTAFGKLNLFNARYELDPRPIEEGCGCPACRNYSRAYIRHLLKAKEMLGMRLCVLHNLYFYNHLMEEIREAIEQRRYGEYKKQKLAGLLSGEQN

SEQ ID NO: 54357 - protein, 376 aa, Cupriavidus alkaliphilus
  misc_feature (1)..(376): tr|A0A329AW59|A0A329AW59_9BURK Queuine tRNA-ribosyltran sferase OS=Cupriavidus alkaliphilus OX=942866 GN=tgt PE =3 SV=1
MLNFELITTDGNARRGRVTLNHGVVETPIFMPVGTYGSVKAMSPLELNEIGAQIILGNTFHLWLRPGLEVVNAHDGLHRFIGWDKPILTDSGGFQVFSLGDLRKITEDGVTFASPVNGDKLFLSPEISMQIQRTLNSDIVMQFDECTPYEIDGRPATHEEAAQSMRMSLRWAKRSRDEFERLANPNALFGIVQGGMYEDLRDESLAGLSELDFHGFAIGGLSVGEPKEDMMRVLEHVAPRLPANKPHYLMGVGTPEDLVAGVAAGVDMFDCVMPTRNARNGWLFTRYGDVKIKNAAHRNDPRPLDESCACYTCRNFSRAYLHHLHRVGEILGARLNTIHNLHYYLQLMREVREAIEQHRFTDFRRQFAADRARGTQ

SEQ ID NO: 54358 - protein, 376 aa, Cupriavidus alkaliphilus
  misc_feature (1)..(376): tr|A0A2W7PAD6|A0A2W7PAD6_9BURK Queuine tRNA-ribosyltran sferase OS=Cupriavidus alkaliphilus OX=942866 GN=tgt PE =3 SV=1
MLNFELITTDGNARRGRVTLNHGVVETPIFMPVGTYGSVKAMSPLELNEIGAQIILGNTFHLWLRPGLDVVNAHDGLHRFIGWDKPILTDSGGFQVFSLGDLRKITEDGVTFASPVNGDKLFLSPEISMQIQRTLNSDIVMQFDECTPYEIDGRPATHEEAAKSMRMSLRWAKRSRDEFERLANPNALFGIVQGGMYEDLRDESLAGLSELDFHGFAIGGLSVGEPKEDMMRVLEHVAPRLPANKPHYLMGVGTPEDLVAGVAAGVDMFDCVMPTRNARNGWLFTRYGDVKIKNAAHRNDPRPLDESCACYTCRNFSRAYLHHLHRVGEILGARLNTIHNLHYYLQLMREVREAIEQHRFTDFRRQFAADRARGTQ

SEQ ID NO: 54359 - protein, 383 aa, Cupriavidus basilensis
  misc_feature (1)..(383): tr|A0A0C4YDD5|A0A0C4YDD5_9BURK Queuine tRNA-ribosyltran sferase OS=Cupriavidus basilensis OX=68895 GN=tgt PE=3 SV=1
MLNFELLTTDGNARRGRVTLNHGVVETPIFMPVGTYGSVKAMSPLELGEINAQIILGNTFHLWLRPGLEVVEKHGGLHRFMGWDKPILTDSGGFQVFSLGALRKITEDGVTFASPVNGDKLFLSPEISMQIQRTLNSDIVMQFDECTPYEIDGRPATHAEAAASMRMSLRWAKRSIDEFNSLGNPNALFGIVQGGMFEDLRDESLAGLSELDFHGYAIGGLSVGEPKEDMMRVLEHVGPRLPAHKPHYLMGVGTPEDLVAGVASGVDMFDCVMPTRNARNGWLFTRFGDVKIKNAVHRNDTRPLDESCGCYTCRNFSRAYLHHLHRVGEILGARLNTIHNLHYYLELMSEMREAIEEHRFEAFRLRFAADRARGAQPATPAPA

SEQ ID NO: 54360 - protein, 263 aa, Cupriavidus basilensis
  misc_feature (1)..(263): tr|H1S2E7|H1S2E7_9BURK Queuine tRNA-ribosyltransferase OS=Cupriavidus basilensis OR16 OX=1127483 GN=tgt PE=3 S V=1
MLNFELLTTDGNARRGRVTLNHGVVETPIFMPVGTYGSVKAMSPLELGEINAQIILGNTFHLWLRPGLEVVEKHGGLHRFMGWDKPILTDSGGFQVFSLGALRKITEDGVTFASPVNGDKLFLSPEISMQIQRTLNSDIVMQFDECTPYEIDGRPATHAEAAASMRMSLRWAKRSIDEFNGVGNPNALFGIVQGGMFEDLRDESLAGLSELDFHGYAIGGLSVGEPKEDMMRVLEHVGPRLPAHKPHYLMGVGTPACTTTSNS

SEQ ID NO: 54361 - protein, 376 aa, Cupriavidus campinensis
  misc_feature (1)..(376): tr|A0A556UIA1|A0A556UIA1_9BURK Queuine tRNA-ribosyltran sferase OS=Cupriavidus campinensis OX=151783 GN=tgt PE= 3 SV=1
MLDFELLTTDGNARRGRVTLNHGVVETPIFMPVGTYGSVKAMSPLELNEIGAQIILGNTFHLWLRPGLDVVEAHEGLHRFVGWDKPILTDSGGFQVFSLGELRKITEDGVTFASPVNGDKLFLSPEISMQIQRTLNSDIVMQFDECTPYEIDGRPATHDEAARSMRMSLRWAKRSRDEFERLTNPNALFGIVQGGMFEDLRDESLAGLSELDFHGYAIGGLSVGEPKEDMMRVLEHVGPRLPANKPHYLMGVGTPEDLVAGVASGVDMFDCVMPTRNARNGWLFTRFGDVKIRNAAHRNDPRPLDETCGCYTCRNFSRAYLHHLHRVGEILGARLNTIHNLYYYLELMREMRTAIEEHRFEPFRRQFAEHRARGTK

SEQ ID NO: 54362 - protein, 376 aa, Cupriavidus gilardii
  misc_feature (1)..(376): tr|A0A562BKD9|A0A562BKD9_9BURK Queuine tRNA-ribosyltran sferase OS=Cupriavidus gilardii J11 OX=936133 GN=tgt PE =3 SV=1
MLQFELLTTDGNARRGRLTLNHGVVETPIFMPVGTYGSVKAMSPLELNEIGAQIILGNTFHLWLRPGLEVVDTHQGLHRFIGWDKPILTDSGGFQVFSLGDLRKITEEGVTFASPVNGDKLFLSPEISMQVQRTLNSDIVMQFDECTPYEIDGRPATHDEAARSMRMSLRWARRSRDEFDRLANPNALFGIVQGGMFEDLRDESLAGLGELGFHGLAIGGLSVGEPKEDMMRVLEHVGPRLPADKPHYLMGVGTPEDLVAGVASGVDMFDCVMPTRNARNGWLFTRYGDVKIKNAVHRNDPRPLDESCGCYTCRNFSRAYLHHLHRVGEILGARLNTIHNLYYYLQLMREIREAIEQHRYDAFRRQFGADRARGTQ

SEQ ID NO: 54363 - protein, 376 aa, Cupriavidus gilardii
  misc_feature (1)..(376): tr|A0A5A8EX02|A0A5A8EX02_9BURK Queuine tRNA-ribosyltran sferase OS=Cupriavidus gilardii OX=82541 GN=tgt PE=3 SV =1
MLEFELLTTDGNARRGRVTLNHGVVETPIFMPVGTYGSVKAMSPLELNEIGAQIILGNTFHLWLRPGLEVIDTHQGLHRFIGWDKPILTDSGGFQVFSLGELRKITEEGVTFASPVNGDKLFLSPEISMQIQRTLNSDIVMQFDECTPYEIEGRPATHEEAARSMRMSLRWAKRSRDEFERLANPNALFGIVQGGMFEDLRDESLAGLSELGFHGLAIGGLSVGEPKEDMMRVLEHVGPRLPADKPHYLMGVGTPEDLVAGVACGVDMFDCVMPTRNARNGWLFTRFGDVKIKNAAHRNDPRPLDESCACYTCRNFSRAYLHHLHRVGEILGARLNTIHNLYYYLQLMREIREAIEQHRFDAFRRQFAADRARGTQ

SEQ ID NO: 54364 - protein, 376 aa, Cupriavidus metallidurans
  misc_feature (1)..(376): sp|Q1LJ59|TGT_CUPMC Queuine tRNA-ribosyltransferase OS= Cupriavidus metallidurans (strain ATCC 43123 / DSM 2839 / NBRC 102507 / CH34) OX=266264 GN=tgt PE=3 SV=1
MLNFELLTTDGNARRGRVTLNHGVVETPIFMPVGTYGSVKAMSPLELNEIGAQIILGNTFHLWLRPGLDVVDTHAGLHKFIGWDKPILTDSGGFQVFSLGELRKITEEGVTFASPVNGDKLFLSPEISMQIQRTLNSDIVMQFDECTPYEIDGRPATHDEAARSMRMSLRWAKRSRDEFDHLANPNALFGIVQGGMFEDLRDESLAGLSELDFHGYAIGGLSVGEPKEDMMRVLEHVGPRLPAHKPHYLMGVGTPEDLVAGVAHGVDMFDCVMPTRNARNGWLFTRFGDVKIRNAAHRNDPRPLDEQCGCYTCRNFSRAYLHHLHRVGEILGARLNTIHNLYYYLELMREMRTAIEEHRFEAFRRQFAENRARGTR

SEQ ID NO: 54365 - protein, 376 aa, Cupriavidus metallidurans; identical to SEQ ID NO: 54364
  misc_feature (1)..(376): tr|A0A132HD94|A0A132HD94_9BURK Queuine tRNA-ribosyltran sferase OS=Cupriavidus metallidurans OX=119219 GN=tgt P E=3 SV=1

SEQ ID NO: 54366 - protein, 376 aa, Cupriavidus nantongensis
  misc_feature (1)..(376): tr|A0A142JNT8|A0A142JNT8_9BURK Queuine tRNA-ribosyltran sferase OS=Cupriavidus nantongensis OX=1796606 GN=tgt P E=3 SV=1
MLNFELLTTDGNARRGRVTLNHGVVETPIFMPVGTYGSVKAMSPLELNEIGAQIILGNTFHLWLRPGLDVVNAHDGLHRFIGWDKPILTDSGGFQVFSLGDLRKITEDGVTFASPVNGDKLFLSPEISMQIQRTLNSDIVMQFDECTPYEIDGRPATHEEAAKSMRMSLRWAKRSRDEFERLANPNALFGIVQGGMYEDLRDESLAGLSELDFHGFAIGGLSVGEPKEDMMRVLEHVAPRLPANKPHYLMGVGTPEDLVAGVAAGVDMFDCVMPTRNARNGWLFTRYGDVKIKNAAHRNDPPPLDESCACYTCRNFSRAYLHHLHRVGEILGARLNTIHNLHYYLQLMREVREAIEQHRFTDFRRQFAADRARGTQ

SEQ ID NO: 54367 - protein, 376 aa, Cupriavidus necator
  misc_feature (1)..(376): sp|Q0K733|TGT_CUPNH Queuine tRNA-ribosyltransferase OS= Cupriavidus necator (strain ATCC 17699 / H16 / DSM 428 / Stanier 337) OX=381666 GN=tgt PE=3 SV=1
MLNFELITTDGNARRGRVTLNHGVVETPIFMPVGTYGSVKAMSPLELNEIGAHIILGNTFHLWLRPGLDVVNAHEGLHKFIGWDKPILTDSGGFQVFSLGDLRKITEDGVTFASPVNGDKLFLSPEISMQIQRTLNSDIVMQFDECTPYEIDGRAATHEEAAKSMRMSLRWAKRSRDEFERLANPNALFGIVQGGMYEDLRDESLAGLSELDFHGFAIGGLSVGEPKEDMMRVLEHVAPRLPAHKPHYLMGVGTPEDLVAGVAAGVDMFDCVMPTRNARNGWLFTRFGDVKIKNAAHRNDPRPLDESCACYTCRNFSRAYLHHLHRVGEILGARLNTIHNLHYYLQLMREMREAIEHHRFADFRRQFAADRARGTQ

SEQ ID NO: 54368 - protein, 376 aa, Cupriavidus necator
  misc_feature (1)..(376): tr|A0A1K0J476|A0A1K0J476_CUPNE Queuine tRNA-ribosyltran sferase OS=Cupriavidus necator OX=106590 GN=tgt PE=3 SV =1
MLNFELITPDGNARRGRVTLNHGVVETPIFMPVGTYGSVKAMSPLELNEIDAQIILGNTFHLWLRPGLDVVNAHEGLHRFIGWDKPILTDSGGFQVFSLGDLRKITEDGVTFASPVNGDKLFLSPEISMQIQRTLNSDIVMQFDECTPYEIDGRAATHDEAAKSMRMSLRWAKRSRDEFERLANPNALFGIVQGGMYEDLRDESLAGLSELDFHGFAIGGLSVGEPKEDMMRVLEHVAPRLPADKPHYLMGVGTPEDLVAGVAAGVDMFDCVMPTRNARNGWLFTRFGDVKIKNAAHRNDPRPLDESCACYTCRNFSRAYLHHLHRVGEILGARLNTIHNLHYYLQLMREMREAIEHHRFADFRRQFAADRARGTQ

SEQ ID NO: 54369 - protein, 376 aa, Cupriavidus oxalaticus
  misc_feature (1)..(376): tr|A0A375G9M4|A0A375G9M4_9BURK Queuine tRNA-ribosyltran sferase OS=Cupriavidus oxalaticus OX=96344 GN=tgt PE=3 SV=1
MLNFELITTDGNARRGRVTLNHGVVETPIFMPVGTYGSVKAMSPLELNEIGAHIILGNTFHLWLRPGLEVVNAHGGLHKFIGWDKPILTDSGGFQVFSLGDLRKITEDGVTFASPVNGDKLFLSPEISMQIQRTLNSDIVMQFDECTPYEIDGRPATHDEAAKSMRMSLRWAKRSIDEFERLANPNALFGIVQGGMYEDLRDESLAGLSELDFHGFAIGGLSVGEPKEDMMRVLEHVAPRLPANKPHYLMGVGTPEDLVAGVAAGVDMFDCVMPTRNARNGWLFTRYGDVKIKNAAHRNDPRPLDESCACYTCRNFSRAYLHHLHRVGEILGARLNTIHNLHYYLQLMREVRESIERHRFADFRRQFAADRARGTQ

SEQ ID NO: 54370 - protein, 376 aa, Cupriavidus oxalaticus
  misc_feature (1)..(376): tr|A0A4P7LDQ4|A0A4P7LDQ4_9BURK Queuine tRNA-ribosyltran sferase OS=Cupriavidus oxalaticus OX=96344 GN=tgt PE=3 SV=1
MLNFELITTDGNARRGRVTLNHGVVETPIFMPVGTYGSVKAMSPLELNEIGAHIILGNTFHLWLRPGLDVVNAHGGLHKFIGWDKPILTDSGGFQVFSLGDLRKITEDGVTFASPVNGDKLFLSPEISMQIQRTLNSDIVMQFDECTPYEIDGRPATHEEAAKSMRMSLRWAKRSLDEFERLENPNALFGIVQGGMYEDLRDESLAGLSELDFHGFAIGGLSVGEPKEDMMRVLEHVAPRLPANKPHYLMGVGTPEDLVAGVAAGVDMFDCVMPTRNARNGWLFTRYGDVKIKNAAHRNDPRPLDESCACYTCRNFSRAYLHHLHRVGEILGARLNTIHNLHYYLQLMREVRESIEHHRFADFRRQFASDRARGTQ

SEQ ID NO: 54371 - protein, 376 aa, Cupriavidus pauculus
  misc_feature (1)..(376): tr|A0A2N5CGR0|A0A2N5CGR0_9BURK Queuine tRNA-ribosyltran sferase OS=Cupriavidus pauculus OX=82633 GN=tgt PE=3 SV =1
MLNFELLTTDGNARRGRVTLNHGVVETPIFMPVGTYGSVKAMSPLELNEIGAEIILGNTFHLWLRPGLDVVDTHDGLHKFIGWDKPILTDSGGFQVFSLGELRKITEEGVTFASPVNGDKLFLSPEISMQIQRTLNSDIVMQFDECTPYEIDGRPATHDEAARSMRMSLRWAKRSRDEFDRLANPNALFGIVQGGMFEDLRDESLAGLSELDFHGYAIGGLSVGEPKEDMMRVLEHVGPRLPAHKPHYLMGVGTPEDLVAGVAHGVDMFDCVMPTRNARNGWLFTRFGDVKIRNAAHRNDPRPLDEQCGCYTCRNFSRAYLHHLHRVGEILGARLNTIHNLYYYLELMREMRKAIEEHRFEAFRRQFAENRARGTK

SEQ ID NO: 54372 - protein, 376 aa, Cupriavidus pauculus
  misc_feature (1)..(376): tr|A0A3G8GYY2|A0A3G8GYY2_9BURK Queuine tRNA-ribosyltran sferase OS=Cupriavidus pauculus OX=82633 GN=tgt PE=3 SV =1
MLNFELLTTDGNARRGRVTLNHGVVETPIFMPVGTYGSVKAMSPLELNEIGAQIILGNTFHLWLRPGLDVVETHQGLHKFVGWDKPILTDSGGFQVFSLGELRKITEEGVRFASPVNGDKLFLSPEISMQIQRTLNSDIVMQFDECTPYEIDGRPATHDEAARSMRMSLRWAKRSRDEFDRLANPNALFGIVQGGMFEDLRDESLAGLSELDFHGYAIGGLSVGEPKADMMRVLEHVGPRLPAHKPHYLMGVGTPEDLVAGVAHGVDMFDCVMPTRNARNGWLFTRFGDVKIRNAAHRNDPRPLDEQCGCYTCRNFSRAYLHHLHRVGEILGARLNTIHNLYYYLELMREMRTAIEEHRFEAFRRRFAEDRARGTR

SEQ ID NO: 54373 - protein, 376 aa, Cupriavidus pinatubonensis
  misc_feature (1)..(376): sp|Q46XG4|TGT_CUPPJ Queuine tRNA-ribosyltransferase OS= Cupriavidus pinatubonensis (strain JMP 134 / LMG 1197) OX=264198 GN=tgt PE=3 SV=1
MLNFELITTDGNARRGRVTLNHGVVETPIFMPVGTYGSVKAMSPLELNEIGAEIILGNTFHLWLRPGLDVVNTHEGLHRFIGWDKPILTDSGGFQVFSLGDLRKITEDGVTFASPVNGDKLFLSPEISMQIQRTLNSDIVMQFDECTPYEIEGRPATHEEAAKSMRMSLRWAKRSRDEFERLANPNALFGIVQGGMFEDLRDESLAGLSELDFHGFAIGGLSVGEPKEDMMRVLEHVAPRLPADKPHYLMGVGTPEDLVAGVAAGVDMFDCVMPTRNARNGWLFTRYGDVKIRNAAHRNDPRPLDESCACYTCRNFSRAYLHHLHRVGEILGARLNTIHNLHYYLQLMREVRESIEQHRFSDFRRQFASDRARGTR

SEQ ID NO: 54374 - protein, 379 aa, Cupriavidus plantarum
  misc_feature (1)..(379): tr|A0A316EUI6|A0A316EUI6_9BURK Queuine tRNA-ribosyltran sferase OS=Cupriavidus plantarum OX=942865 GN=tgt PE=3 SV=1
MLNFELITTDGAARRGRVTLNHGVVETPIFMPVGTYGSVKAMSPLELNEIGAQIILGNTFHLWLRPGLDVVGAHDGLHRFIGWDKPILTDSGGFQVFSLGDLRKITEEGVTFASPINGDKLFLSPEISMQIQRTLNSDIVMQFDECTPYEIDGRPATHEEAARSMRMSLRWARRSRDEFDGGKLGPNPNALFGIVQGGMFEDLRDESLAGLSDLDFHGYAIGGLSVGEPKEDMMRVLAHVGPRLPANKPHYLMGVGTPEDLVAGVAAGVDMFDCVMPTRNARNGWLFTRFGDVKIRNAVHRSDQRPLDEQCGCYTCRNFSRAYLHHLYRLGEILGARLNTIHNLYYYLELMAEMREAIEEHRFEAFRRRFAEDRARGTQ

SEQ ID NO: 54375 - protein, 376 aa, Cupriavidus sp.; identical to SEQ ID NO: 54367
  misc_feature (1)..(376): tr|R7X995|R7X995_9BURK Queuine tRNA-ribosyltransferase OS=Cupriavidus sp. GA3-3 OX=1229514 GN=tgt PE=3 SV=1

SEQ ID NO: 54376 - protein, 376 aa, Cupriavidus sp.
  misc_feature (1)..(376): tr|A0A1D9GYX8|A0A1D9GYX8_9BURK Queuine tRNA-ribosyltran sferase OS=Cupriavidus sp. USMAA2-4 OX=876364 GN=tgt PE =3 SV=1
MLEFELLTTDGNARRGRVKLNHGVVETPIFMPVGTYGSVKAMSPLELNEIGAQIILGNTFHLWLRPGLDVIGAHEGLHRFVGWDKPILTDSGGFQVFSLGELRKITEEGVTFASPVNGDKLFLSPEISMQIQRALNSDIVMQFDECTPYEIEGRPATHAEAAASMRMSLRWAKRSRDEFERLANPNALFGIVQGGMFEDLRDESLAGLSELDFHGFAIGGLSVGEPKEDMMRVLQHVAPRLPADKPHYLMGVGTPEDLVAGVAAGVDMFDCVMPTRNARNGWLFTRFGDVKIKNAAHRNDPRPLDESCECYTCRNFSRAYLHHLHRVGEILGARLNTIHNLYYYLQLMREMREAIEQHRFDAFRLQFAADRARGAR

SEQ ID NO: 54377 - protein, 376 aa, Cupriavidus taiwanensis
  misc_feature (1)..(376): sp|B3R6J4|TGT_CUPTR Queuine tRNA-ribosyltransferase OS= Cupriavidus taiwanensis (strain DSM 17343 / BCRC 17206 / CIP 107171 / LMG 19424 / R1) OX=977880 GN=tgt PE=3 SV =1
MLNFELITTDGNARRGRVTLNHGVVETPIFMPVGTYGSVKAMSPLELNEIGAQIILGNTFHLWLRPGLDVVNAHEGLHRFIGWDKPILTDSGGFQVFSLGDLRKITEDGVTFASPVNGDKLFLSPEISMQIQRTLNSDIVMQFDECTPYEIDGRPATHEEAAKSMRMSLRWARRSRDEFERLANPNALFGIVQGGMYEDLRDESLAGLSELDFHGFAIGGLSVGEPKEDMMRVLEHVAPRLPANKPHYLMGVGTPEDLVAGVAAGVDMFDCVMPTRNARNGWLFTRYGDVKIKNAAHRNDPRPLDESCACYTCRNFSRAYLHHLHRVGEILGARLNTIHNLHYYLQLMREVREAIEQHRFADFRRQFAADRARGTQ

SEQ ID NO: 54378 - protein, 376 aa, Cupriavidus taiwanensis
  misc_feature (1)..(376): tr|A0A375GZ33|A0A375GZ33_9BURK Queuine tRNA-ribosyltran sferase OS=Cupriavidus taiwanensis OX=164546 GN=tgt PE= 3 SV=1
MLNFELITTDGNARRGRVTLNHGVVETPIFMPVGTYGSVKAMSPLELNEIGAHIILGNTFHLWLRPGLEVVNAHDGLHRFIGWDKPILTDSGGFQVFSLGDLRKITEDGVTFASPVNGDKLFLSPEISMQIQRTLNSDIVMQFDECTPYEIDGRPATHEEAARSMRMSLRWARRSRDEFERLANPNALFGIVQGGMYEDLRDESLAGLSELDFHGFAIGGLSVGEPKEDMMRVLEHVAPRLPANKPHYLMGVGTPEDLVAGVAAGVDMFDCVMPTRNARNGWLFTRYGDVKIKNAAHRNDPRPLDESCACYTCRNFSRAYLHHLHRVGEILGARLNTIHNLHYYLQLMREVREAIEQHRFAGFRRQFAADRARGTQ

SEQ ID NO: 54379 - protein, 382 aa, [Curtobacterium] plantarum
  misc_feature (1)..(382): tr|A0A3M7UJU2|A0A3M7UJU2_9GAMM Queuine tRNA-ribosyltran sferase OS=[Curtobacterium] plantarum OX=221276 GN=tgt PE=3 SV=1
MKFELDTTDGRARRGRLIFDRGVVETPAFMPVGTYGTVKGMTPEEVQETGAQIILGNTFHLWLRPGQEIMKLHGDLHDFMQWKGPILTDSGGFQVFSLGDIRKITEAGVHFRNPINGDPIFLDPEKSMEIQYDLGSDIVMIFDECTPYPADWDYAKRSMEMSLRWAQRSRDRFDSLGNKNALFGIIQGSVYEDLRDVSVKGLVEIGFDGYAVGGLAVGEPKQDMHRILEHVCPQLPQDKPRYLMGVGKPEDLVEGVRRGVDMFDCVMPTRNARNGHLFVTEGVVKIRNARYKDDTAPLDAECDCYTCRNYSRAYLYHLDRCNEILGARLNTIHNLRYYQRLMAGLRQAIEEGKLERFVNEFYQRTGKEVPPLTSDNSSMREI

SEQ ID NO: 54380 - protein, 411 aa, Curvibacter putative
  misc_feature (1)..(411): tr|C9YEZ2|C9YEZ2_9BURK Queuine tRNA-ribosyltransferase OS=Curvibacter putative symbiont of Hydra magnipapillat a OX=667019 GN=tgt PE=3 SV=1
MITDTGTPMLKFDLLNNDPASADGSYLGSHARRGRLTLNHGVVETPIFMPVGTYGTVKGVMPRSLHDMNAQIILGNTFHLWMRPGLDVVQKFGGLHQFEKWDKPILTDSGGFQVWSLGEMRKISEEGVKFASPVNGDKLFLTPEISMQIQTTLNSDIVMQFDECTPYLSVEPKTKGQITTEREARSSMELSLRWAKRCQDEFARLNNPNALFGIVQGGMFEHLRDESLAGLEALDFPGIAVGGLSVGEPKEDMMRVLKHIGPKLPKHKPHYLMGVGTPEDLIAGVQNGIDMFDCVMPTRNARNGTLFSRYGDLKIRNARHKSDEQPLDVTCTCYACAGSSGVSWANGGRDGFSRAYLHHLDRCGEMLGPMLASVHNLHYYLNLMQEVRDALDAGRFGAFVQQFHADRARGV

SEQ ID NO: 54381 - protein, 393 aa, Curvibacter sp.
  misc_feature (1)..(393): tr|A0A1F8VI04|A0A1F8VI04_9BURK Queuine tRNA-ribosyltran sferase OS=Curvibacter sp. GWA2_64_110 OX=1797747 GN=tg t PE=3 SV=1
MLKFDILKTDGHARRGRLTLNHGVVETPVFMPVGTYGTVKGVMPKSLEDMGAQIILGNTFHLWMRPGLDVMKAFGGLHQFENWHKPILTDSGGFQVWSLGEMRKISEEGVRFSSPVNGDKLFLTPEGSMQIQTVLNSDIVMQFDECTPYVSLDPKTKGQLTTEREARISMELSMRWAKRCQDEFARLENPNALFGIVQGGMYENLRDESLAGLEELNFPGIAVGGVSVGEPKEDMQRLIRHIGPKLPAHKPHYLMGVGTPEDLVYGVQHGIDMFDCVMPTRNARNGHLFTRFGDLKIRNARHKSDERPADETCTCYACAGSSGVPYAQGGRDGFSRAYLHHLDRCGEMLGPMLTTVHNLHYYLNLMREVRAALDAGSFGTFVQQFHADRARGV

SEQ ID NO: 54382 - protein, 393 aa, Curvibacter sp.
  misc_feature (1)..(393): tr|A0A2D0IBQ8|A0A2D0IBQ8_9BURK Queuine tRNA-ribosyltran sferase OS=Curvibacter sp. PD_MW3 OX=2027918 GN=tgt PE= 3 SV=1
MLKFELLKTEGLARRGRLTLNHGVVETPVFMPVGTYGTVKGVMPKSLEDMGAQIILGNTFHLWMRPGLDVMKTFGGLHKFENWHKPILTDSGGFQVWSLGEMRKISEEGVRFSSPVNGDKLFLTPEGSMQIQTVLNSDIVMQFDECTPYVSLDPKTKGQLTTEREARISMELSMRWAKRCQDEFARLENPNALFGIVQGGMYENLRDESLAGLEELNFPGIAVGGVSVGEPKEDMQRLIRHIGPKLPAHKPHYLMGVGTPEDLVYGVQHGIDMFDCVMPTRNARNGHLFTRFGDLKIRNARHKSDERPLDETCTCYACAGSSGVPYAQGGRDGFSRAYLHHLDRCGEMLGPMLATVHNLHYYLNLMREVREALDAGSFGAFVQQFHADRGRGV

SEQ ID NO: 54383 - protein, 381 aa, Cuspidothrix issatschenkoi
  misc_feature (1)..(381): tr|A0A2S6CQ73|A0A2S6CQ73_9CYAN Queuine tRNA-ribosyltran sferase OS=Cuspidothrix issatschenkoi CHARLIE-1 OX=2052 836 GN=tgt PE=3 SV=1
MSANFSFASLATCSQTKARAGIFSTPHGIVETPRFMPVGTLANVKTITPAQLGATGAQMVLANTYHLHLQPGEAIVAGGGGLHKFMGWHGPMLTDSGGFQVFSLSEMRKITEEGVTFRSPHDGQMIKLTPERSIEIQNILGADVIMAFDECPPYPATRQEVEAATDRTYRWLKRSISAHQRQDQALFPIVQGGVYLDLRARAAQDLAELDMPGYAIGGVSVGEPTDLMAQIVQTTAPLLPVNKPRYLMGVGTYREMAIAIASGVDLFDCVIPTRWARHGTAIVSGERWNLKNAKFREDFTPLDTTCPCYTCENFSRAYISHLVRSQEILAYTLLTIHNITELIRFTQKIRESILSDRFVTDFGHWLEPSAIDLEKTDLTST

SEQ ID NO: 54384 - protein, 413 aa, Cutibacterium acnes
  misc_feature (1)..(413): tr|Q6A989|Q6A989_CUTAK Queuine tRNA-ribosyltransferase OS=Cutibacterium acnes (strain DSM 16379 / KPA171202) O X=267747 GN=tgt PE=3 SV=1
MTFGFEVTSRLDNTCGRTGLIHTPHGVIQTPAFVVVGTKATVKALLPESVVQLGAQAVLANAYHLFLQPGPELIDEAGGLGRFMNWTGPTFTDSGGFQVLSLGAGFKKTLAMDVSQLTEADVIAADADRKAMVDDDGVTFRSPLNGDLHRFTPEVSMGIQHHLGADIMFSFDELTTLMNTRAYQEEALERTRRWAERCLAEHRRLTEVRSGKPYQALFGVIQGAQYEDLRRRACRDLAGMEIDGHCFDGFGIGGAIEKANLGRIVTWCAEELPEDRPRHLLGISEPDDLFAACRAGADTFDCVSPSRVARNAAIYTVDGRYNVDTARFRRDFGPLEDDCDCYTCTHYSRAYIHHLFKAKELLANTLATIHNERWTVRLVDQIRGAMCSGDLDAFETEFMGRWNANGGRLAKVN

SEQ ID NO: 54385 - protein, 414 aa, Cutibacterium acnes
  misc_feature (1)..(414): tr|W4TMQ9|W4TMQ9_CUTAC Queuine tRNA-ribosyltransferase OS=Cutibacterium acnes JCM 18909 OX=1302241 GN=tgt PE=3 SV=1
MTFGFEVTSRLDNACGRTGLIHTPHGAIQTPAFVVVGTKATVKALLPESVVQLGAQAVLANAYHLFLQPGPELIDEAGGLGQFMNWTGPTFTDSGGFQVLSLGAGFKKTLAMDVSQLTEADVIAADADRKAMVDDDGVTFRSPLNGDLHRFTPEVSMGIQHHLGADIMFSFDELTTLMNTRAYQEEALERTRRWAERCLAEHRRLTEVRSGKPYQALFFGVIQGAQYEDLRRRACRDLAGMEIDGQCFDGFGIGGAIEKANLGRIVTWCAEELPEDRPRHLLGISEPDDLFAACRAGADTFDCVNPSRVARNAAIYTVDGRYNVDTARFRRDFGPLEDGCDCYTCTHYSRAYIHHLFKAKELLANTLATIHNERWTVSLVDQIRGAMCSGDLDAFETEFMGRWNANGGRLARVN

SEQ ID NO: 54386 - protein, 416 aa, Cutibacterium avidum
  misc_feature (1)..(416): tr|A0A1B3PXT8|A0A1B3PXT8_9ACTN Queuine tRNA-ribosyltran sferase OS=Cutibacterium avidum OX=33010 GN=tgt PE=3 SV =1
MTPMPFGFDVTSHLDDSYGRTGVIHTPHGDIETPAFVVVGTKATVKSLLPESVAQLGAQAVLANAYHLFLQPGPDLVDEAGGLGRFMNWTGPTFTDSGGFQVLSLGAGFKKTLAMDVSELTEEDVIAADADRKAMVDDDGVTFRSPLNGDLHRFTPEVSMGIQHHLGADIMFAFDELTTLMNTRSYQEEALERTRRWAERCLAEHRRLTEARAGKPYQALFGVIQGAQYEDLRRKACRDLSQMEIDGQRFDGFGLGGAIEKVNLGRIVTWCAEELPEDRPRHLLGISEPDDLFAACRAGADTFDCVNPSRVARNAAIYTVDGRYNVNTARFRRDFGPLEEGCDCYTCTYYSRAYLHHLFKAKEMLANTLATIHNERWTVRLVDQIRAAMRNGELDALETEFMGRWNTNGGRLVKAN

SEQ ID NO: 54387 - protein, 416 aa, Cutibacterium avidum
  misc_feature (1)..(416): tr|G4D014|G4D014_9ACTN Queuine tRNA-ribosyltransferase OS=Cutibacterium avidum ATCC 25577 OX=997355 GN=tgt PE= 3 SV=1
MTPMPFGFDVTSHLDDSYGRTGVIHTPHGDIETPAFVVVGTKATVKSLLPESVAQLGAQAVLANAYHLFLQPGPDLVDEAGGLGRFMNWTGPTFTDSGGFQVLSLGAGFKKTLAMDVSELTEEDVIAADADRKAMVDDDGVTFRSPLNGDLHRFTPEVSMGIQHHLGADIMFAFDELTTLMNTRSYQEEALERTRRWAERCLAEHRRLTEARVGKPYQALFGVVQGAQYEDLRRKACRDLSQMEIDGQRFDGFGLGGAIEKVNLGRIVTWCAEELPEDRPRHLLGISEPDDLFAACRAGVDTFDCVNPSRVARNAAIYTVDGRYNVNTARFRRDFGPLEEGCDCYTCTHYSRAYLHHLFKAKEMLANTLATIHNERWTVRLVDQIRAAMRHGELDALETEFMGRWNINGGRLVKAN

SEQ ID NO: 54388 - protein, 414 aa, Cutibacterium granulosum
  misc_feature (1)..(414): tr|A0A2W5D1M6|A0A2W5D1M6_9ACTN Queuine tRNA-ribosyltran sferase OS=Cutibacterium granulosum OX=33011 GN=tgt PE= 3 SV=1
MTFGFQVTSRLDNGLGRTGIIHTPHGDIATPAFIVVGTKASVKALTPDQLTDLGAQAVLANAYHLFLQPGHDLVDEAGGVGQFMAWDGPTFTDSGGFQVLSLGAGFKKTLAMDVSQLTEADVIAADRDRKAMVDDDGVTFRSPLNGDLHRFTPEVSMSIQHRLGADVMMAFDELTTLFNTRAYQEEALERTRRWAERCLTEHRRLSAERAERPYQALYGVIQGAQYEDLRRRACRDLSSMTVDGQRFDGFGIGGAIEKANLGTIVGWCADELPQDRPRHLLGISEPDDLFAACRAGADTFDCVNPSRVARNAAIYTADGRYNVNTAPFRHDFRPLEPGCDCYTCTHVTRAYLHHLFKAKELLANTLATIHNERWTVRLVDGIRAAMANGELDDFEAEFMGRWNAYGGRLVPTAR

SEQ ID NO: 54389 - protein, 414 aa, Cutibacterium granulosum
  misc_feature (1)..(414): tr|U1F3M0|U1F3M0_9ACTN Queuine tRNA-ribosyltransferase OS=Cutibacterium granulosum DSM 20700 OX=1160719 GN=tgt PE=3 SV=1
MTFGFQVTSRLDNGLGRTGIIHTPHGDIATPAFIVVGTKASVKALTPDQLTDLGAQAVLANAYHLFLQPGHDLVDEAGGVGQFMAWDGPTFTDSGGFQVLSLGAGFKKTLAMDVSQLTEADVIAADRDRKAMVDDDGVTFRSPLNGDLHRFTPEVSMSIQHRLGADVMMAFDELTTLFNTRAYQEEALERTRRWAERCLTEHRRLSAERAERPYQALYGVIQGAQYEDLRRRACRDLSSMTVDGQRFDGFGIGGAIEKANLGTIVGWCADELPQDRPRHLLGISEPDDLFAACRAGADTFDCVNPSRVARNAAIYTADGRYNVNTAPFRHDFRPLEPGCDCYTCTHVTRAYLHHLFKAKELLANTLATIHNERWTVRLVDGIRAAMANGELDDFEAEFMGRWNAHGGRLVPTAR

SEQ ID NO: 54390 - protein, 376 aa, Cyanobacteria bacterium
  misc_feature (1)..(376): tr|A0A3M1L962|A0A3M1L962_9CYAN Queuine tRNA-ribosyltran sferase OS=Cyanobacteria bacterium J083 OX=2420336 GN=t gt PE=3 SV=1
MQFSFKLQTNCQATQARAGTFYTPHGIVETPRFMPVGTLATVKGISPAQLQSTQAQMILANTYHLHLQPGENIIKLGGGLHQFMAWNQPILTDSGGFQVFSLSQLRQITETGVTFRSPRDGSLIEITPERSIQIQNALGADVIMAFDECPPAHATRSQVKQATERTCRWLKRCIQAHQNPDKQALFGIVQGGVYPDLRAEAAKALVELDLPGYAIGGVSVGESPQLIHHIVRLTTPLLPYSKPRYLMGVGTYREMVVAIAAGIDLFDCVIPTRLGRHGAVLVQGERWNIKNAKFKEDFTPLDESCDCYTCQHFTRAYLNHLVKAREILGYTLLSLHNIRELVRFTQNIRQAIINGTFMLEFGHWLNPAEHPLKTTS

SEQ ID NO: 54391 - protein, 369 aa, Cyanobacteria bacterium
  misc_feature (1)..(369): tr|A0A353QWG9|A0A353QWG9_9CYAN Queuine tRNA-ribosyltran sferase OS=Cyanobacteria bacterium UBA9971 OX=2055776 G N=tgt PE=3 SV=1
MHHFNFDLLKKSSDSNARAGLFKTPHGVIETPIFMPVGTNSAIKMMTCDHLYDTGAQIILSNSYHLFLRPGHKLIEKAGGLHKWMNWDKPILTDSGGFQVFSLSSLRNLTEDGVTFKDPKDGSSYFMSPEVSMEVQNALGADIIMAFDECAPYPCSYDEAKEAMDRTHRWLLRCVEAHKREDQALFPIVQGSTFDDLREESAKFIANVEAHGYAIGGVSVGEPTELINHIVEITAPFLPENKPRYLMGVGTPEDLLDGVMRGVDMFDCVMPTRIARHGSFFTPNGRGIIKNKEFEEDFTPLVEGCECYACKNHTKAYIRHLFRVKEATAPILMSIHNIYYLVNLMKQARQAILEDRFLDFYEEKMSLIK

SEQ ID NO: 54392 - protein, 366 aa, Cyanobacterium aponinum
  misc_feature (1)..(366): tr|K9Z8D0|K9Z8D0_CYAAP Queuine tRNA-ribosyltransferase OS=Cyanobacterium aponinum (strain PCC 10605) OX=755178 GN=tgt PE=3 SV=1
MVFQYSLIASCTKTRARAGVFSTPHGEVETPRFMPVGTVGTVKGITPAQLQSAHAQMILGNTYHLHIQPGEEIIEKAGGLHNFMGWQQPILTDSGGFQVFSLADLRQITDDGVKFRSPKDGRIINMTPENSIRIQNSLGADVIMAFDECPPATATKEEVVKAVKRTTAWLERCISAHKKPEQQALFGIVQGGIYPELRTQSAKELIEFNLPGYAIGGVSVGEKPELIHQIVQWTTPLLPSNKPRYLMGVGSYKEMVVAIASGIDLFDCVIPTRLGRHGAALVQGERINLKNAQYKEDFTPLDPECDCYTCKNFTRAYLNHLIRAKEMLGYILLSLHNIYELINFTRKIRQAIINDSFVEEFGHYLN

SEQ ID NO: 54393 - protein, 366 aa, Cyanobacterium aponinum
  misc_feature (1)..(366): tr|A0A2G3P9M9|A0A2G3P9M9_9CHRO Queuine tRNA-ribosyltran sferase OS=Cyanobacterium aponinum IPPAS B-1201 OX=2047 986 GN=tgt PE=3 SV=1
MVFQYSLIASCTKTRARAGVFSTPHGEVETPRFMPVGTVGTVKGITPAQLQSAHAQMILGNTYHLHIQPGEEIIEKAGGLHNFMGWQQPILTDSGGFQVFSLADLRQITDDGVKFRSPKDGRIINMTPENSIRIQNSLGADVIMAFDECPPATATKEEVVKAVKRTTAWLERCISAHKKPEQQALFGIVQGGIYPELRTQSAKELIEFNLPGYAIGGVSVGEKPELIHQIVQWTTPLLPTHKPRYLMGVGSYKEMVVAIASGIDLFDCVIPTRLGRHGAALVQGERINLKNAQYKEDFTPLDPECDCYTCKNFTRAYLNHLIRAREMLGYILLSLHNIYELINFTRKIRQAIINDSFVEEFGHYLN

SEQ ID NO: 54394 - protein, 400 aa, Epithemia turgida
  misc_feature (1)..(400): tr|A0A077JEB3|A0A077JEB3_9CYAN Queuine tRNA-ribosyltran sferase OS=cyanobacterium endosymbiont of Epithemia tur gida isolate EtSB Lake Yunoko OX=1228987 GN=tgt PE=3 SV =1
MIKLFARKLFGFLYQCQLLSYNGVILLTLYFIVTLRFSFQTQKKCCQTLARVGVWHTPHGPVETPRFMPVGTLATVKGLTPAQLQTTGAQMVLANTYHLHLQPGETLIEKAGGIHQFMGWKGPILTDSGGFQVFSLSELRHIREIGVTFRSPRDGKIIELTPERSIHIQNTLGADVIMAFDECPPGKADYSTVAAATERTYRWLERCIDAHQRPQDQALFGIVQGGIYPELRISAAKSLIDFDLPGYAIGGVSVGEEPALIREIVQITAPLLPATKPRYLMGVGTYREMAITIASGIDLFDCVIPTRFGRHGTALVRGERWNLKNFQFREDFGPLDADCPCYTCQTFSRAYLNHLVRSQEMLGYTLLSLHNITELVRFTQRIREAILGDRFIEEFGHWLN

SEQ ID NO: 54395 - protein, 366 aa, Rhopalodia gibberula
  misc_feature (1)..(366): tr|A0A2Z5SX08|A0A2Z5SX08_9CYAN Queuine tRNA-ribosyltran sferase OS=cyanobacterium endosymbiont of Rhopalodia gi bberula OX=1763363 GN=tgt PE=3 SV=1
MRFSFQTQKKCCQTHARVGVLHTPHGLVETPRFMPVGTLATVKGLTPAQLQTTGAQMILANTYHLHLQPGETLIGKAGGLHQFMGWQGPILTDSGGFQVFSLSELRQIREIGVTFRSPRDGQIIELTPERSIHIQNTLGADVIMAFDECPPGQADYSTVAAATERTYRWLERCIDAHQRPQDQALFGIVQGGIYPELRRSAAKSLIDFDLPGYAIGGVSVGEEPALVREIVQITAPLLPATKPRYLMGVGTYREMAMTIAYGIDLFDCVIPTRFGRHGTALVGGERWNLKNSRFREDFSPLDADCPCYTCKTFTKAYLNHLVRSQEMLGYILLSLHNVTELVRFTQRIREAILGNRFMEEFGHWLN

SEQ ID NO: 54396 - protein, 365 aa, Cyanobacterium sp.
  misc_feature (1)..(365): tr|A0A1E5QTW5|A0A1E5QTW5_9CHRO Queuine tRNA-ribosyltran sferase OS=Cyanobacterium sp. IPPAS B-1200 OX=1562720 G N=tgt PE=3 SV=1
MNFSYTSVASCSHTKARAGIFHTPHGIVETPKFMPVGTVGTVKGITPAQLKDAHAQMILGNTYHLHIRPGEDIVSKAGGLHGFMNWEQPILTDSGGFQVFSLAKMRKISEEGVKFRSPKDGQIINMTPEHSIHIQNALGADVIMAFDECPPATATREEVITATDRTYRWLKRCMDAHQKPDTQALFGIVQGGIFQDLRNQAAHDLAGLDLPGYAIGGVSVGEKPELIHEIVRQTTPLLPVHKPRYLMGVGTYKEMVIAIASGIDLFDCVIPTRVGRHGAALVQGERWNIKNARFKEDFGPLDPECSCYTCKNFSRAYLNHLLRAHEMLGYILISLHNIHEMINFTNKIRASIINDTFLEEFGHWL

SEQ ID NO: 54397 - protein, 365 aa, Cyanobacterium sp.; identical to SEQ ID NO: 54396
  misc_feature (1)..(365): tr|A0A2K8WNV0|A0A2K8WNV0_9CHRO Queuine tRNA-ribosyltran sferase OS=Cyanobacterium sp. HL-69 OX=2054282 GN=tgt P E=3 SV=1

SEQ ID NO: 54398 - protein, 365 aa, Cyanobacterium stanieri
  misc_feature (1)..(365): tr|K9YJ84|K9YJ84_CYASC Queuine tRNA-ribosyltransferase OS=Cyanobacterium stanieri (strain ATCC 29140 / PCC 720 2) OX=292563 GN=tgt PE=3 SV=1
MNFSYTSIASCSHTKARAGIFHTPHGIVETPKFMPVGTVGTVKGITPAQLKDAHAQMILGNTYHLHIRPGEDIVKKAGGLHGFMNWEQPILTDSGGFQVFSLAQMRKISEEGVKFRSPKDGKIINMTPEHSIHIQNALGADVIMAFDECPPATATREEVITATERTYRWLKRCMDAHQKPDQQALFGIVQGGIFQDLRNQAAHDLTQLDLPGYAIGGVSVGEKPELIHEIVRQTTPLLPVHKPRYLMGVGTYKEMVIAIASGIDLFDCVIPTRVGRHGAALVQGERWNLKNARFKEDFTPLDPECSCYTCQNFSRAYLNHLLRAHEMLGYILISLHNIHEMINFTNKIRASIINDTFLDEFGHWL

SEQ ID NO: 54399 - protein, 340 aa, Ornithocercus magnificus
  misc_feature (1)..(340): tr|A0A4Y3G5K7|A0A4Y3G5K7_9CYAN Queuine tRNA-ribosyltran sferase OS=cyanobiont of Ornithocercus magnificus OX=24 96102 GN=tgt PE=3 SV=1
MPVGTLATVKGISTDQLAATGAQMILSNTFHLHLQPGEDIVAAAGGLHSFMNWSKPILTDSGGFQVCSLADLNRIDDEGVMFRNPRNGSLVWLNPERATEIQMALGADVVMAFDQCSPYPASELDLETACRRTHDWLKRCINAHKRTDQALFGIVQGGCMLHLREWSARTVAELNLPGIAIGGVSVGEPAEELHRIVRHVTPLLPEDRPRYLMGIGTLREMAIAVANGVDLLDCVLPTRLGRHGTALVNEQRWNLRNTRFRHDYAPLDPSCSCPACLYHSRAYLHHLVRSQELLGLTLLSLHNLTHLIRFTTAMGKAIEDNCFSEDFAPWKINSPAHHTW

SEQ ID NO: 54400 - protein, 373 aa, Cyanobium gracile
  misc_feature (1)..(373): tr|K9P909|K9P909_CYAGP Queuine tRNA-ribosyltransferase OS=Cyanobium gracile (strain ATCC 27147 / PCC 6307) OX= 292564 GN=tgt PE=3 SV=1
MAFDFTITARCPRTRARCGCFTTPHGPVHTPRFMPVGTAATVKGVSTPQLRETGAQMVLANTFHLHLQPGEAVVAEAGGLHRFMGWEGPLLTDSGGFQVFSLDAINRIDDDGVVFRSPRDGSRIDLTPERSMAIQRALGADVAMAFDQCPPYPATEAAVAEACRRTHRWLERCVACHGGGDQALFGIVQGGCFPHLREASARVVAAMDLPGIAVGGVSVGEPVEEMHRVVRQVGPLLPQERPHYLMGVGSLREMAIAVANGFDLFDCVLPTRLGRHGTALVGGERWNLRNARFRHDHGPLDPSCGCLACRHHSRSYLHHLFRSEELLGRTLLSLHNLTTLLRFTSAMAQAIGEGCFAEDFAPWEPDSPAARTW

SEQ ID NO: 54401 - protein, 340 aa, Cyanobium sp.
  misc_feature (1)..(340): tr|A0A182AQI0|A0A182AQI0_9CYAN Queuine tRNA-ribosyltran sferase OS=Cyanobium sp. NIES-981 OX=1851505 GN=tgt PE= 3 SV=1
MPVGTLATVKGVTAGQLAATGAQMVLANTYHLHLQPGEDIVAEAGGLHRFMDWPGPLLTDSGGYQVFSLGAINRIDDNGVSFRSPRDGRTILLTPERAMAIQAALGADVAMAFDQCPPYPASEADVEAACRRTHAWLERCMASHQRSGQALFGIVQGGCFPRLRAESAREVAAMDLPGIAVGGVSVGEPVEEMHRIVRQVGPLLPDARPHYLMGVGSLPEMALAVAQGFDLFDCVLPTRLGRHGAALVGGERWNLRNARFRHDHTPLDPGCPCPACTGHTRAYLHHLIRAGEMLGKILLSLHNITQLQRFSGAMARAIREGCFAEDFAPWNPDSPAAHTW

SEQ ID NO: 54402 - protein, 372 aa, Cyanobium sp.
  misc_feature (1)..(372): tr|A0A4P5VCC3|A0A4P5VCC3_9CYAN Queuine tRNA-ribosyltran sferase OS=Cyanobium sp. OX=2164130 GN=tgt PE=3 SV=1
MFAFEITARCPRTRARCGSFHTPHGVVTTPRFMPVGTLATVKGVTADQLRHTGAQMVLANTFHLHLQPGEAIVQEAGGLHRFMAWEGPLLTDSGGFQVFSLGAINRINDRGVVFRSPRDGAQIDLTPERSMAIQMALGADVAMAFDQCPPYPASEADVATACRRTHAWLERCISSHTRSDQALFGIVQGGCYPHLREESARVVSSMGLPGIAVGGVSVGEPTEEMHRIVRQLGPLLPDDKPHYLMGVGTLREMAVAVANGFDVFDCVLPTRLGRHGAALVGGERWNLKNARFRHDHTPLDPSCPCPACSQHSRAYLHHLIKSEEMLGKILLSLHNITQLLRFTSAMAQAIRDGCFAEDFAPWEPDSPAAHTW

SEQ ID NO: 54403 - protein, 377 aa, Cyanobium usitatum
  misc_feature (1)..(377): tr|A0A2P7MUR9|A0A2P7MUR9_9CYAN Queuine tRNA-ribosyltran sferase OS=Cyanobium usitatum str. Tous OX=2116684 GN=t gt PE=3 SV=1
MSFPPAFSFDITAQCSRTRARCGCFHTPHGDVTTPRFMPVGTLATVKGVTASQLRDTGAQMVLSNTYHLHLQPGEQIVADAGGLHRFMGWDGPMLTDSGGFQVFSLGDINTIDDHGVVFRSPRDGARIELTPERSMAIQMALGADVAMAFDQCPPYPASEADVAAACRRTHSWLERCITSHTKVDQALFGIVQGGCFPHLRQESAQVVASMGLPGIAVGGVSVGEPTEEMHRIVRQLGPLLPDAVPHYLMGIGTLREMAIAVANGFDLFDCVIPTRLGRHGAALVGGERWNLKNSRFRHDHTPMDASCPCPACRQHSRAYLHHLIKSEELLGKILLSLHNITQLVRFSTAMGQAIRDGCFAEDFAPWEADSPAAHTW

SEQ ID NO: 54404 - protein, 367 aa, Cyanosarcina cf.
  misc_feature (1)..(367): tr|A0A2T1F9U4|A0A2T1F9U4_9CHRO Queuine tRNA-ribosyltran sferase OS=Cyanosarcina cf. burmensis CCALA 770 OX=2107 697 GN=tgt PE=3 SV=1
MTTQFSFQVSTRCSQTKARAGVFHTPHGAVETPRFMPVGTLANVKTVTPTQLQETGAQMVLANTYHLHLQPGERIVEKAGGLHQFMRWNQPILTDSGGFQVFSLSEMRQITDDGVIFRSPHDGQMINLTPERSIQIQNALGADVIMAFDECPPYPASREEVEAATQRTYRWLERCISAHQRPDQALFGIVQGGVYPDLRAAAAEALAGLDLPGYAIGGVSVGEPPELIAKIVQATTPILPVDKPRYLMGVGTYKEMAQAIASGMDLFDCVIPTRLARHGAALVKGERWNLKNSQYREDFQPLDETCPCYTCQNFTRAYISHLVRSQEILAYTLLTIHNITELVRFTQKIREAIISDRFTTEFAQWLS

SEQ ID NO: 54405 - protein, 381 aa, Cyanothece sp.
  misc_feature (1)..(381): sp|B8HX02|TGT_CYAP4 Queuine tRNA-ribosyltransferase OS= Cyanothece sp. (strain PCC 7425 / ATCC 29141) OX=395961 GN=tgt PE=3 SV=1
MNDSLQAIPNQPFSFFTQASCSHTQARAGQFFTPHGVVETPRFMPVGTLANIKTVTPEQLRGTGAQMILANTYHLHLQPGEGIVAAAGGLHRFMGWTGPILTDSGGFQVFSLSELRSIAEAGVTFRSPRDGEEIYLSPEKAIAIQNQLGADVIMAFDECAPYPADRSTVTEAVERTTRWLERCCKAHDRVEDQALFGIIQGGTYGDLRQQSARSLVEFDLPGYAIGGVSVGEPPELIEKIVKFTTPLLPEHKPRYLMGVGTYREMVQAIAAGIDLFDCVIPTRLARHGNALVRGERWNLKNSRFREDFQPLDQSCACYTCQNFSRAYLSHLLRARELLAYTLLSIHNITELISFTQKIRQAILHDRFSSEFASWLTSPSPS

SEQ ID NO: 54406 - protein, 376 aa, Cyclobacteriaceae bacterium
  misc_feature (1)..(376): tr|A0A3N4HA96|A0A3N4HA96_9BACT Queuine tRNA-ribosyltran sferase OS=Cyclobacteriaceae bacterium YHN15 OX=2487897 GN=tgt PE=3 SV=1
MKFKLESTDVKSKARIGTIKTDHGDIETPIFMPVGTAGSVKAVHQRELTYDIKAQIILGNTYHLYLRPGLDILEKSGGLHKFNGWSKPILTDSGGYQVFSLAENRKLTEEGAIFKSHIDGSKHVFTPERVIDIQRVIGADIIMAFDECPPYPSDFNYAKKSMELTHRWLKRCIDRFDSTESKYGYSQALFPIIQGSVYPELRIQSAEFIASCEREGNAIGGLSVGEPIEEMYAMTNMVTDILPKDRPRYLMGVGTPANILECIALGVDMFDCVMPTRNARNGMLFTSEGIINIRNEKWKDDFSPIDPPIGSYVSSFYSKAYLRHLTISKEILAAQIASIHNLSFYLWLVGQAREHIKNGDFATWKNQMVEKVSRRL

SEQ ID NO: 54407 - protein, 376 aa, Cyclobacteriaceae bacterium
  misc_feature (1)..(376): tr|A0A5C7Z209|A0A5C7Z209_9BACT Queuine tRNA-ribosyltran sferase OS=Cyclobacteriaceae bacterium OX=2099675 GN=tg t PE=3 SV=1
MKFTLSATNRDSKARAGILSTDHGEIPTPIFMPVGTAGSVKAVHQRELETDIDAKIILGNTYHLYLRPGLPLIEQAGGLHKFIGWQRPILTDSGGYQVYSLGDNRKITEEGVIFKSHIDGSRHVFTPEGVMDIERTIGADIIMAFDECTPYPCEYEYAKKSMGLTHRWLQRCVKRVNETEGKYGYSQALFPIVQGSVYKDLRMQSAEFIANQNQPGNAIGGLSVGEPHEMMYEMTDVVCSILPADKPRYLMGVGTPENILECIALGIDMFDCVMPTRNARNGMLFTTQGIINIRNEKWKDDLSPIDAELGDYSSTFYSKAYLRHLIISKEILGAQIASIHNLAFYLWLVKQARQQILAGTFDTWKNRMVKIVSQRL

SEQ ID NO: 54408 - protein, 376 aa, Cyclobacterium amurskyense
  misc_feature (1)..(376): tr|A0A0H4PF64|A0A0H4PF64_9BACT Queuine tRNA-ribosyltran sferase OS=Cyclobacterium amurskyense OX=320787 GN=tgt PE=3 SV=1
MKFKLESKDQNSKARAGEIQTDHGLIQTPIFMPVGTAGSVKAVHQRELTYDVKAQIILGNTYHLYLRPGLDVLEKAGGLHKFIGWSSPILTDSGGYQVFSLEGNRKIKEEGVVFKSHIDGSKHHFTPESVMDIQRTIGADIIMAFDECTPYPCDWSYAKNSMHLTHRWLKRCIDHFDSTTGKYGYAQSLFPIVQGSTYKDLRKDAAHFVSDQDREGNAIGGLSVGEPAEMMYEMTDLVTDILPEDKPRYLMGVGTPANILEGIALGIDMFDCVMPTRNARNGMLFTSEGIINIRNERWKMDFSPLDSGFHSHVSNFYTKAYLRHLTISKEMLAAQIASIHNLSFYLWLVTQAREHILAGDFSSWKNTMVEKVSRRL

SEQ ID NO: 54409 - protein, 397 aa, Cyclobacterium halophilum
  misc_feature (1)..(397): tr|A0A1H6WS34|A0A1H6WS34_9BACT Queuine tRNA-ribosyltran sferase OS=Cyclobacterium halophilum OX=1416801 GN=tgt PE=3 SV=1
MHLFLCLNIRSKWGIFQRMPGMKFKLLEKDQDSKARAGVLYTDHGEIETPIFMPVGTAGTVKAVHQRELTYDVKAQIILGNTYHLYLRPGLEVLEAAGGLHKFMGWSAPILTDSGGYQVFSLAESRKISEEGVVFQSHIDGSRHHFTPESVMDIQRSIGADIVMAFDECTPYPCERSYAKTSMDLTHRWLGRCMQRFDATEGKYGYQQALFPIVQGSTYKDLRQDAARFVADQDREGNAIGGLSVGEPAELMYEMTDLVTDLLPADKPRYLMGVGTPANILEAIALGIDMFDCVMPTRNARNGMLFTSEGILNIRNEKWKMDFSPLDSGFQSYVSNFYTKSYLRHLTLSKEMLAAQIASIHNLSFYLWLTGQARERILAGDFSSWKTEMVEKVSRRL

SEQ ID NO: 54410 - protein, 376 aa, Cyclobacterium lianum
  misc_feature (1)..(376): tr|A0A1M7JQL2|A0A1M7JQL2_9BACT Queuine tRNA-ribosyltran sferase OS=Cyclobacterium lianum OX=388280 GN=tgt PE=3 SV=1
MKFNLQHKDQTTKARAGSILTDHGEIQTPIFMPVGTAGSVKAVHQRELTYDVKAQIILGNTYHLYLRPALEVLEVAGGLHKFMGWSGPILTDSGGYQVFSLADSRKITEEGVMFQSHIDGSRHHFSPESVMDIQRSIGADIIMAFDECTPYPCDWSYAKTSLELTQRWLRRCKTRFESTGGRYGYQQSLFPIVQGSTYKDLRQDAARFVADQDMDGNAIGGLSVGEPAGLMYEMTDLVTDLLPEEKPRYLMGVGTPANILEGIALGIDMFDCVMPTRNARNGMLFTSEGIINIRNEKWKMDFSPIDTGFPSHVSSFYTRAYLRHLTISKEMLAAQIASIHNLSFYLWLVGQARAHILQGDFASWKNTMVEKVSRRL

SEQ ID NO: 54411 - protein, 376 aa, Cyclobacterium marinum
  misc_feature (1)..(376): tr|G0J6R5|G0J6R5_CYCMS Queuine tRNA-ribosyltransferase OS=Cyclobacterium marinum (strain ATCC 25205 / DSM 745) OX=880070 GN=tgt PE=3 SV=1
MKFKLVSKDKKSKARAGEIQTDHGTIQTPIFMPVGTAGSVKAVHQRELTYDVKAQIILGNTYHLYLRPGLEVLEKAGGLHKFIGWSSPILTDSGGYQVFSLEGNRKIKEEGVVFKSHIDGSKHHFTPESVMDIQRTIGADIIMAFDECTPYPCEWSYAKNSMHLTHRWLKRCIERFDSTEGKYGYSQSLFPIVQGSTFKDLRQDAARFVSDQDREGNAIGGLSVGEPAEMMYEMTDLVTDILPEEKPRYLMGVGTPANILESIALGIDMFDCVMPTRNARNGMLFTTEGIINIRNERWKMDFSPIDSGFHSHVSNFYSKAYIRHLTISKEMLAAQIASIHNLSFYLWLVTQARERIQAGDFTSWKNAMVEKVSRRL

SEQ ID NO: 54412 - protein, 376 aa, Cyclobacterium marinum
  misc_feature (1)..(376): tr|A0A5D9B2X2|A0A5D9B2X2_9BACT Queuine tRNA-ribosyltran sferase OS=Cyclobacterium marinum OX=104 GN=tgt PE=3 SV =1
MKFKLVSKDKKSKARAGEIQTDHGTIQTPIFMPVGTAGSVKAVHQRELTYDVKAQIILGNTYHLYLRPGLEVLEKAGGLHKFIGWSSPILTDSGGYQVFSLEGNRKIKEEGVVFKSHIDGSKHHFTPESVMDIQRTIGADIIMAFDECTPYPCEWSYAKNSMHLTHRWLKRCIERFDSTEGKYGYSQSLFPIVQGSTFKDLRQDAARFVSDQDREGNAIGGLSVGEPAEMMYEMTDLVTDILPEEKPRYLMGVGTPANILESIALGIDMFDCVMPTRNARNGMLFTTEGIINIRNERWKMDFSPIDSGFHSHVSNFYSKAYLRHLTISKEMLAAQIASIHNLSFYLWLVTQARERIQAGDFTSWKNAMVEKVSRRL

SEQ ID NO: 54413 - protein, 376 aa, Cyclobacterium qasimii
  misc_feature (1)..(376): tr|A0A512CCU8|A0A512CCU8_9BACT Queuine tRNA-ribosyltran sferase OS=Cyclobacterium qasimii OX=1350429 GN=tgt PE= 3 SV=1
MKFKLENKDQHSKARAGEIQTDHGLIQTPIFMPVGTAGSVKAVHQRELTYDVKAQIILGNTYHLYLRPGLEVLEKAGGLHKFMGWSSPILTDSGGYQVFSLEGNRKIKEEGVVFKSHIDGSKHHFTPESVMDIQRTIGADIIMAFDECTPFPCDWSYAKNSMHLTHRWLKRCIDQFDNTSGKYGYSQSLFPIVQGSTFKDLRMDAARFVSDQDREGNAIGGLSVGEPAEMMYEMTDLVTDILPEDKPRYLMGVGTPANILEGIALGIDMFDCVMPTRNARNGMLFTSEGIINIRNERWKMDFSPLDSGFDSHVSNFYSKAYLRHLTISKEMLAAQIASIHNLSFYLWLVTQAREHIQAGDFTTWKNAMVEKVSRRL

SEQ ID NO: 54414 - protein, 376 aa, Cyclobacterium qasimii; identical to SEQ ID NO: 54413
  misc_feature (1)..(376): tr|S7WED4|S7WED4_9BACT Queuine tRNA-ribosyltransferase OS=Cyclobacterium qasimii M12-11B OX=641524 GN=tgt PE=3 SV=1

SEQ ID NO: 54415 - protein, 371 aa, Cycloclasticus sp.
  misc_feature (1)..(371): tr|K0C1Y3|K0C1Y3_CYCSP Queuine tRNA-ribosyltransferase OS=Cycloclasticus sp. (strain P1) OX=385025 GN=tgt PE=3 SV=1
MKFNLLNTDAKARRARLTFDRGTIETPAFMPVGTYGTVKAMAPEELLDTGAEIVLGNTFHLMLRPGVEVIEAHGDLHDFMNWQKPILTDSGGFQVFSLDEMRKITEKGVHFRSPVDGRKVFMGPEESMQVQRQLGSDIVMIFDECTPYPATEEEARISMELSLRWAKRSKDAHGDNPSALFGIVQGGMYENLRDRSLEALKQIDFDGFAIGGLSVGEPKDDRERVLEHIVPAMPSDKPRYLMGVGKPEDIVEAVLKGIDMFDCVMPTRNARNGYLFTRKGLVKIRNEKYQFDTKPVDEACECYTCKNYSRSYLRHLDKCKEILGSRLNTIHNLHYYQDLMRGLRQAIEQERLLEFVDDFYEQQGKTRDAVA

SEQ ID NO: 54416 - protein, 371 aa, Cycloclasticus sp.
  misc_feature (1)..(371): tr|A0A2E5FES0|A0A2E5FES0_9GAMM Queuine tRNA-ribosyltran sferase OS=Cycloclasticus sp. OX=2024830 GN=tgt PE=3 SV =1
MKFDLLKTDAKARRARLTFDRGAIETPAFMPVGTYGTVKAMAPEELLETGAQIVLGNTFHLMLRPGVEVIEAHGDLHDFMNWQKPILTDSGGFQVFSLDEMRKITEKGVHFRSPVDGRKVFMGPEESMQVQRQLGSDIVMIFDECTPFPATEKEARTSMELSLRWAKRSKAAHGDNPSALFGIIQGGMYEQLRDESLKGLKDIDFDGFAVGGLSVGEPKEDRERVLEHIVPNMPNDKPRYLMGVGKPEDIVEAVLKGIDMFDCVMPTRNARNGYLFTRKGLVKIRNEKYQYDTRPIDEACECYTCKNYTRSYLRHLDKCKEILGSRLNTIHNLHYYQDLMRGLRLAIEEGCLAEFVEDFYAQQGKKPDAVA

SEQ ID NO: 54417 - protein, 371 aa, Cycloclasticus zancles; identical to SEQ ID NO: 54415
  misc_feature (1)..(371): tr|S5TWD5|S5TWD5_9GAMM Queuine tRNA-ribosyltransferase OS=Cycloclasticus zancles 78-ME OX=1198232 GN=tgt PE=3 SV=1

SEQ ID NO: 54418 - protein, 373 aa, Cylindrospermopsis raciborskii
  misc_feature (1)..(373): tr|A0A1S1ZWX6|A0A1S1ZWX6_9CYAN Queuine tRNA-ribosyltran sferase OS=Cylindrospermopsis raciborskii MVCC14 OX=940 191 GN=tgt PE=3 SV=1
MSNFSFRLVANCSQTQARAGVFSTPHGIVETPRFMPVGTLANVKTVTPAQLEDTGAQMILSNTYHLHLQPGEKIVAGGGGLHKFMAWNGPMLTDSGGFQVFSLSEMRKITEEGVVFRSPHDGQMIRLTPEKSIEIQNILGADVIMAFDECPPYPATYQEVTAATDRTYRWLERCIMSHQRLDQALFPIVQGGVYLDLRTRAATDLAKLDMPGYAIGGVSVGEPQELMAQIVRTTAPLLPRNKPRYLMGVGTYREMVIAIAAGVDLFDCVIPTRWARHGTAMVQGERWNLKNAKFREDFAPIDEACHCYTCSNFSRAYVSHLVRSQEILAYTLLSIHNITELIRFTQAIRESILQNRFLTDFGHWMNDPEKDLE

SEQ ID NO: 54419 - protein, 373 aa, Cylindrospermopsis raciborskii
  misc_feature (1)..(373): tr|A0A1X4GAJ2|A0A1X4GAJ2_9CYAN Queuine tRNA-ribosyltran sferase OS=Cylindrospermopsis raciborskii CENA303 OX=11 70769 GN=tgt PE=3 SV=1
MSNFSFRLVANCSQTQARAGVFSTPHGIVETPRFMPVGTLANVKTVTPAQLEDTGAQMILSNTYHLHLQPGEKIVAGGGGLHKFMAWNGPMLTDSGGFQVFSLSEMRKITEEGVVFRSPHDGQMIKLTPEKSIEIQNILGADVIMAFDECPPYPATYQEVTAATDRTYRWLERCIMSHQRLDQALFPIVQGGVYLDMRIRAATDLAKLDMPGYAIGGVSVGEPPELMAQIVRTTAPLLPRNKPRYLMGVGTYREMVIAIAAGVDLFDCVIPTRWARHGTAMVQGERWNLKNSKFREDFIPIDETCHCYTCSNFSRAYVSHLVRSQEILAYTLLSIHNITELIRFTQAIRESILQNRFLTDFGHWMNDPEKDLE

SEQ ID NO: 54420 - protein, 373 aa, Cylindrospermopsis sp.
  misc_feature (1)..(373): tr|A0A0R0MAD5|A0A0R0MAD5_9CYAN Queuine tRNA-ribosyltran sferase OS=Cylindrospermopsis sp. CR12 OX=1747196 GN=tg t PE=3 SV=1
MSNFSFQLVVNCSQTQARAGVFSTPHGIVETPRFMPVGTLANVKTVTPAQLADTGAQMILSNTYHLHLQPGEKIVAGGGGLHKFMAWDGPMLTDSGGFQVFSLSEMRKITEEGVVFRSPHDGQMIKLTPEKSIEIQNILGADVIMAFDECPPYPATYQEVTAATDRTYRWLERCIKSHQRLDQALFPIVQGGVYLDLRTRAATDLAKLDMPGYAIGGVSVGEPPELMAQIVRTTAPLLPRNKPRYLMGVGTYREMVIAIAAGVDLFDCVIPTRWARHGTAMVQGERWNLKNAKFREDFAPIDETCHCYACSNFSRAYVSHLVRSQEILAYTLLSIHNITELIRFTQAIRESILQNRFLTDFGHWMNDPEKDLE

SEQ ID NO: 54421 - protein, 345 aa, Cylindrospermum sp.
  misc_feature (1)..(345): tr|A0A1Z4QEJ9|A0A1Z4QEJ9_9NOST Queuine tRNA-ribosyltran sferase OS=Cylindrospermum sp. NIES-4074 OX=2005457 GN= tgt PE=3 SV=1
MPVGTLANVKTITPAQLLDTGAQMILSNTYHLHLQPGEAIVAGGGGLHKFMGWKGPMLTDSGGFQVFSLSEMRKITEEGVTFRSPHDGQIIKLTPERSIEIQNILGADVIMAFDECPPYPATRQEVEAATDRTYRWLERCMTAHQRSDQALFGIVQGGVFLDLRARAAETLAKLDLPGFAIGGVSVGEPPELMAQIVQTTAPLLPPEKPRYLMGVGTYREMAIAIASGVDLFDCVIPTRWARHGTAIVSGSRWNLKNAKFREDFRPLDETCPCYACQNFSRAYISHLVRSQEILAYTLLSIHNITELIRFTQKIRDAILGDRFATEFAHWLNSPDELPPDEEAGE

SEQ ID NO: 54422 - protein, 382 aa, Cylindrospermum stagnale
  misc_feature (1)..(382): tr|K9X0P7|K9X0P7_9NOST Queuine tRNA-ribosyltransferase OS=Cylindrospermum stagnale PCC 7417 OX=56107 GN=tgt PE =3 SV=1
MSANFSFECLACCSQTKARAGVFFTPHGPVETPRFMPVGTLANVKTITPAQLRDTGAQMVLSNTYHLHLQPGEAIVAGGGGLHKFMGWDGPMLTDSGGFQVFSLSEMRKITEEGVTFRSTHDGKIINLTPERSIEIQSILGADVIMAFDECPPYPATRQEVEAATERTYRWLERCIAAHVRSDQALFAIVQGGVYLDLRSKAATALAKLDLPGFAIGGVSVGEPPELMAKIVQTTAPLLPPDKPRYLMGVGTYREMAIAIASGVDLFDCVIPTRWARHGTAIVSGTRWNLKNAKFREDFTPLDETCPCYACQNFSRAYISHLVRSQEILAYTLLSIHNITELIRFTQKIREAILSDRFIAEFGHWLNSPEPAGDDHELITND

SEQ ID NO: 54423 - protein, 392 aa, Cystobacter ferrugineus
  misc_feature (1)..(392): tr|A0A1L9BDS8|A0A1L9BDS8_9DELT Queuine tRNA-ribosyltran sferase OS=Cystobacter ferrugineus OX=83449 GN=tgt PE=3 SV=1
MAVRFELVTTDPTGARAGVLHTRRGSIPTPVFMPVATHASFRHLGMEEIKATGSKILLSNTYHLMLKPGIDVFRRFKGIHPFMQWDGAVLTDSGGFQIFSLPEDRLITEKGAHFRSFHDNSRQLLSPESSIAMQQAINSEVMMVLDVCIDSRTDEAGTREAMERTHRWALRSLAAKNQVDTGQALFAIVQGGVHPHLRDESAGFLTQHPFDGFAIGGLAVGETNEERKTMTARAASQLPQDKPRYLMGVGTPTDLLEAVLRGVDMFDCIIPTKMAQQGYAYTFQGLVRITRQAFRLSDEPLDPTCDCYVCKRYSRGYLQHLMSGKHHTGSRMLSVHNVHHYQVLTWKMRDAILRGSYAQAYRELKQAVATPKDLKDAQLEAGANAVTLKEVG

SEQ ID NO: 54424 - protein, 394 aa, Cystobacter ferrugineus
  misc_feature (1)..(394): tr|A0A1L9AUV7|A0A1L9AUV7_9DELT Queuine tRNA-ribosyltran sferase OS=Cystobacter ferrugineus OX=83449 GN=tgt PE=3 SV=1
MAEPRKEKGDTRVAPSLVRYELLHEDASGTRARRGRLHTPHGPVETPIFMPVGTVGSVKGVGPDDLLTLDAQIILGNTYHLMLRPGDDLVGHMGGLHRFISWDRPMLTDSGGFQVFSLSEKRKITEEGAAFQSHLDGRHLLLSPERSMEIQETLGADIIMAFDECPPSTESRAYLEKSLARTTRWLHRCVKAWSRERSSLFGIVQGGLDPQLRKLHTEDVCAVDLPGYALGGYAVGETPEAMYEGVAYSAPLLPRDKPRYLMGVGTPVDLVTCVEHGVDMFDCVLPTRCARNGLLFTSEGKLVIRNATWARDERPADPACTCYTCRNFSRAYLRHLFVAGEILAMRLNSLHNLHYFLTLMKQVREAIAEDRYAQFARDFRERARAQEAERTRTK

SEQ ID NO: 54425 - protein, 392 aa, Cystobacter fuscus
  misc_feature (1)..(392): tr|A0A250JAQ8|A0A250JAQ8_9DELT Queuine tRNA-ribosyltran sferase OS=Cystobacter fuscus OX=43 GN=tgt PE=3 SV=1
MAVRFELVTTDPTGARAGVLHTRRGSIPTPVFMPVATHASFRHLGMEEIKATGSKILLSNTYHLMLKPGIDVFRRFNGIHPFMQWDGAVLTDSGGFQIFSLPEDRLITEKGAHFRSFHDNSRQLLSPESSIAMQQAINSEVMMVLDVCIDSRTEEAGTREAMERTHRWALRSLAAKNQVDTGQALFAIVQGGVHPHLRDESAGFLTQHPFDGFAIGGLAVGETNEERKTMTARAAAQLPQDKPRYLMGVGTPTDLLEAVLRGVDMFDCIIPTKMAQQGYAYTFQGLVRITRQAFRLSDEPLDATCDCYVCKRYSRGYLQHLMSGKHHTGSRMLSVHNVHHYQMLTWKMRDAILRGSYAQAYRELKQAVATPKDLKDAQLEAGANAVTLKEVG

SEQ ID NO: 54426 - protein, 394 aa, Cystobacter fuscus
  misc_feature (1)..(394): tr|S9PPS2|S9PPS2_9DELT Queuine tRNA-ribosyltransferase OS=Cystobacter fuscus DSM 2262 OX=1242864 GN=tgt PE=3 S V=1
MAEPRKEKGDTRVAPSLVRYELLHEDASGTRARRGRLHTPHGPVETPIFMPVGTVGSVKGVGPDDLLTLDAQIILGNTYHLMLRPGDDLVGHMGGLHRFISWDRPMLTDSGGFQVFSLSEKRKITEEGAAFQSHLDGRHLMLSPERSIEIQETLGADIIMAFDECPPSTESRAYLEKSLARTTRWLHRCVKAWSRERSSLFGIVQGGLDQELRKRHTEEVCAVDLPGYALGGYAVGETPEAMYEGVAWSAPLLPRDKPRYLMGVGTPVDLVTCVEHGVDMFDCVLPTRCARNGLLFTSEGKLVIRNATWARDERPADPACSCYTCRNFSRAYLRHLFVAGEILAMRLNSLHNLHYFLTLMKQVREAIAEDRYAQFARDFRERARAQETERTRAK

SEQ ID NO: 54427 - protein, 376 aa, Cytophaga hutchinsonii
  misc_feature (1)..(376): tr|Q11VU4|Q11VU4_CYTH3 Queuine tRNA-ribosyltransferase OS=Cytophaga hutchinsonii (strain ATCC 33406 / NCIMB 94 69) OX=269798 GN=tgt PE=3 SV=1
MFYKIEHNDIGTSARAGVITTDHGTFETPIFMPVGTAGTVKAMHQRELEQEADAPIILGNTYHLYLRPGLNIIEQAGGLHKFIGWKRSILTDSGGFQVYSLSGIRKINEEGVKFKSHIDGSAHFFTPESVMDIQRTIGADIVMAFDECTPYPCEYEYARKSMEMTHRWLGRCVTRMAETEPKYGYQQHLFPIVQGSVYKDLRLKSAEVIAEAGCVGNAIGGLSVGEPAEEMYAMSELVCSVLPKDKPRYLMGVGTPENLLENIALGIDMFDCVMPTRNARNGMLFTTQGIINIRNKKWENDFTPLDQGLDIYLNDYYTKAYVRHLVHNNEMLGAQIATIQNISFYLWLMREARKQIVAGTFREWKERMVKQCMQRL

SEQ ID NO: 54428 - protein, 377 aa, Cytophaga sp.
  misc_feature (1)..(377): tr|A0A4R4K7A2|A0A4R4K7A2_9BACT Queuine tRNA-ribosyltran sferase OS=Cytophaga sp. DMA-K-7a OX=2070510 GN=tgt PE= 3 SV=1
MKFFLENQDKNTKARAGRIQTDHGTIETPIFMPVGTAGTVKAVHQRELKDDVQAQIILGNTYHLYLRPGLPIIEAAGGLHKFNGWDFPILTDSGGYQVYSLAGTGRKINEAGVEFKSHIDGSLHTFTPEGVMDIQRKIGADIIMAFDECTPYPCEYDYARTSMELTHRWLQRCCDRFDTTESLYGYQQTLFPIVQGSVYKDLRQRSAEKIASFGREGNAIGGLSVGEPAEIMYELTEVVCDILPADKPRYLMGVGTPANILEGIALGVDMFDCVMPTRNARNGMLFTTEGIINIRNEKWKDDFSPIDKNLGGYVSTFYSKAYLRHLVKSDEMLGAQIASVHNLSFYLWLVKEARRRIMAGDFRMWKEEMIKKVMQRL

SEQ ID NO: 54429 - protein, 376 aa, Cytophaga xylanolytica
  misc_feature (1)..(376): tr|A0A2W7NVY5|A0A2W7NVY5_9BACT Queuine tRNA-ribosyltran sferase OS=Cytophaga xylanolytica OX=990 GN=tgt PE=3 SV =1
MTFQLLHTDSGSKARHGLITTAHGQIPTPIFMPVGTLGSVKGVHFKELREDINAKIILGNTYHLYLRPGTEILHKAGGLHQFNGWDRPILTDSGGYQVFSLSENRKLSEEGAMFRSHIDGSKHFFTPENVVDIQRVIGSDIMMAFDECAPGDADYQYTKKSMERTHRWLKRGLERFDSTEAHYGYEQTFFPIVQGGGYRDLRIQSAETIAAQGRQGNAIGGLAVGEPTEVMYEMVEVVNNILPTDKPRYLMGVGTPANLLENIALGVDMFDCVMPTRNGRNGMMFTSEGIINIRNEKWKDDFSPIDPNGKSYVDTAYSKAYLRHLFIAGEMLASQIASIHNLAFYLWLVEEARNHIAAGTFAAWKAIMVKKVATRL

SEQ ID NO: 54430 - protein, 376 aa, Cytophagaceae bacterium
  misc_feature (1)..(376): tr|A0A2E2SNX3|A0A2E2SNX3_9BACT Queuine tRNA-ribosyltran sferase OS=Cytophagaceae bacterium OX=2026729 GN=tgt PE =3 SV=1
MQFDLLKTDEATSARAGTITTAHGTIETPIFMPVGTVATVKGVHQRELREDINPDIILGNTYHLFLKPGIEILEKAGGLHKFMNWDRNILTDSGGYQVYSLSGTRKIKEEGVKFKSHIDGSAHVFSPERVMEIQRTIGADIIMAFDECTPYPCDYNYAKRSMHMTHRWLDRCINHLEKVPVKYGFDQAFFPIVQGSTYKDLRRQSADYIANAGAVGNAIGGLSVGEPAEEMYAMTEVVTEILPADKPRYLMGVGTPINLLENVALGIDMFDCVMPTRNGRNGMLFTAHGTINIKNKKWEDDFSPLDEMAITWVDTEYSKAYVKHLFSVNEYLGRQIATIHNLGFYLWLMREARKQILAGDFRAWKEKMVKQMDKRL

SEQ ID NO: 54431 - protein, 377 aa, Cytophagaceae bacterium
  misc_feature (1)..(377): tr|A0A1E3ZNE9|A0A1E3ZNE9_9BACT Queuine tRNA-ribosyltran sferase OS=Cytophagaceae bacterium SCN 52-12 OX=1660162 GN=tgt PE=3 SV=1
MKFSISATDPGSKARAGVIETAHGLIETPIFMPVGTAGSVKAVHQRELRDDISAQIILGNTYHLYLRPGLGVLEKAGGLHRFMNWERPILTDSGGYQVYSLASTGRKINDEGVAFKSHIDGSTHFFSPETAIDIQRIIGADIVMAFDECTPYPCEYGYARKSMDLTHQWLARCCTHFDRTAGKYGFDQALFPIVQGSTYKDLRVESANRIAEAGREGNAIGGLSVGEPAEVMYELTGVVCDILPREKPRYLMGVGTPANILECIALGVDMFDCVMPTRNARNGMLFTTEGIINIRNEKWSSDYSPLDPALGGYASTHYSKAYLRHLVKAGEMLGAQIASIQNLTFYLWLVRTAREKITEGTFPQWKSSVLQTIMRRL

SEQ ID NO: 54432 - protein, 376 aa, Cytophagales bacterium
  misc_feature (1)..(376): tr|A0A286IJ11|A0A286IJ11_9BACT Queuine tRNA-ribosyltran sferase OS=Cytophagales bacterium TFI 002 OX=1945892 GN =tgt PE=3 SV=1
MNFELQQQDPNSKARAGQLTTAHGVIETPIFMPVGTAGTVKGVHQQELIDAVKAQIILGNTYHLYLRPGLDIIERAGGLHQFMKWDRPILTDSGGYQVFSLKEIRKITEEGVHFNSHIDGSKHLFTPEYVMDIQRVIGADIIMAFDECPPYPCDHQYAENSMHLTHRWLKRCIKRFNETEGKYGHEQQLFPIVQGSVYKDLRVQSAEFIAAQDQPGNAIGGLSVGEPAEEMYAMLEVVNSILPTDKPRYLMGVGTPENILEGIALGTDMFDCVMPTRNARNGMLFTTEGIINIRNKKWEDDFTAIDPGLSNGISNVHSKAYLKHLIKCKEMLGAQIASIHNLSFYLWLVGEARKHIVAGDFTPWKNVMVKKLMHRL

SEQ ID NO: 54433 - protein, 376 aa, Cytophagales bacterium
  misc_feature (1)..(376): tr|A0A2M6GK66|A0A2M6GK66_9BACT Queuine tRNA-ribosyltran sferase OS=Cytophagales bacterium CG18_big_fil_WC_8_21_ 14_2_50_42_9 OX=1973956 GN=tgt PE=3 SV=1
MTFELQATDSQSKARAGEITTAHGKIQTPIFMPVGTAATVKAVHQRELYDDIQAQIILGNTYHLYLRPGLEVLELAGGLHKFNGWNRPILTDSGGYQVYSLSGTRKIVEEGVKFKSHIDGSSHFFSPEYVMDIQRIIGADIMMAFDECTPYPCDYQYAKKSLDMTHRWLQRCCDRFDSTTSKYGYDQALFPIVQGSTYKDLRIQSAETIASFNREGNAIGGLSVGEPAEMMYEMTELVCDILPKDKPRYLMGVGTPANILENIALGVDMFDCVLPTRNARNGMLFTTQGIINIRNERWKKDFSPLDETLGGYASTFYTKAYLRHLVHSNEMLGSQISSVHNLTFYLWLVKQARAQILQGTFREWKDKMVKQVMTRL

SEQ ID NO: 54434 - protein, 375 aa, Cytophagia bacterium
  misc_feature (1)..(375): tr|A0A2E9WJI2|A0A2E9WJI2_9BACT Queuine tRNA-ribosyltran sferase OS=Cytophagia bacterium OX=2026730 GN=tgt PE=3 SV=1
MFFKLTHSSSKSNARVGKIFTSRGEIDTPIFMPVGTLGSVKGVFHDDLIKKINSQIILSNNYHLYLRPGLDILTASKGLHNFISWEMPILTDSGGYQVFSLSNNVKIKNEGVYFSSHIDGSKHLFTPESVIQSQRIIGSDICMVLDECLPYPCDYKYAKNSLGITHDWLDRSILQFNKTDAKYDSEQFLFPIVQGGTFKDLRIQSSEFVSEKNLPGNAIGGLSVGEPKEIIYENVDLVCSILPKDKPRYLMGVGTPENILECISLGIDMFDCVMPTRNGRNGMLFTSEGSINIKNKKWKKDFSPIDANLQYHSSKFSKAYLRHLIINKEILGSQIASFHNLNFYLWLVKEARKNIKNDTFHTWKENMIPKLNNRL

SEQ ID NO: 54435 - protein, 377 aa, Cytophagia bacterium
  misc_feature (1)..(377): tr|A0A2E5GTN1|A0A2E5GTN1_9BACT Queuine tRNA-ribosyltran sferase OS=Cytophagia bacterium OX=2026730 GN=tgt PE=3 SV=1
MKFFKLLHQSSKCNARVGEIKTTRGLIQTPVFMPVGTLGTVKAVNQKDLEYDIDSEIILSNTYHLYLRPGTDIIKSSKGIHNYINWQRPILTDSGGYQIYSLSSKRDISNKGVKFKSHIDGSIHEFTPENIIDIQNIIGSDINMVLDECVPYTSSYSYAKKSLKLTHSWLDRSIVQHNKIKDAYGHKQFLFPIVQGAFFDDLRKVSAEYVSNCNLPGNAIGGLSVGEPNEKMYHFTDLVCQILPKDKPRYLMGVGTPENILECISLGCDMFDCVIPTRNGRNGMLFTTEGIINIKNSKWKKDFTPIDSNLNGHFSNDYSKAYLRHLIINKEILGSQIASMHNLKFYSWLLKISRTKIIKGNFTSWKNKIIKKITQRL

SEQ ID NO: 54436 - protein, 369 aa, Dactylococcopsis salina
  misc_feature (1)..(369): tr|K9YYM4|K9YYM4_DACSA Queuine tRNA-ribosyltransferase OS=Dactylococcopsis salina PCC 8305 OX=13035 GN=tgt PE= 3 SV=1
MTSISFKFYCERNCRQTQARAGIFETPHGKVETPRFMPVGTIATVKGLTPAQLEAAQAQMILANTYHLHLQPGEEIIKQAGGLHKFMGWKQPILTDSGGFQVFSLSELRKISEEGVTFRSPRDGRIIDFTPEKAIQVQNALGADVIMAFDECPPYPADYDAVLLATERTERWLERCIQAHDRSESQALFGIVQGGVYEDLRRQAAKRLVEFDLPGYAIGGVSVGEPGTLINQIVAVTAPLLPQEKPRYLMGVGTYSEMVNAIAQGVDLFDCVIPTRLGRHGSALVQGERWNLKNARFREDFTPLDDCCPCYCCKTFSRAYLSHLIRSREMLGYLLISLHNVTELIRFTERIRTAILHDRFLAEFGHWLR

SEQ ID NO: 54437 - protein, 389 aa, Dankookia rubra
  misc_feature (1)..(389): tr|A0A4R5QA23|A0A4R5QA23_9PROT Queuine tRNA-ribosyltran sferase OS=Dankookia rubra OX=1442381 GN=tgt PE=3 SV=1
MTLHWTKLAQDGAARRGVLHTAHGEVETPVFMPVGTAGTVKAMTADSVRATGARMVLGNTYHLMLRPGAERVGRLGGLHKLMDWHGPILTDSGGYQVMSLNELRQMDEGGVTFRSHLDGSKHRLTPERSVEIQRLLDADVTMCLDECTPFPATEDQAATSMRLSMRWARRCREAFVPREGYGLFGIVQGSTYPDLRAESVAALTEIGFEGYAVGGLAVGEGQEMMFGVLDCTLPLMPQDAPRYLMGVGTPADILGAVRRGIDMFDCVIPTRSGRTGRAYTSRGMLNLRNARHAEDPRPIDPACGCPACARHSRAYLHHLIKAEEMLGPMLLTWHNVQYYQDLTRGLRDAISAGRLDAHAAALEAGWAAGDAPPDDPAAAELAEDRETLR

SEQ ID NO: 54438 - protein, 369 aa, Dechloromonas aromatica
  misc_feature (1)..(369): sp|Q47AX3|TGT_DECAR Queuine tRNA-ribosyltransferase OS= Dechloromonas aromatica (strain RCB) OX=159087 GN=tgt P E=3 SV=1
MQFDLLKTDGVARRGTLTLAHGVIQTPVFMPVGTYGTVKAMTPQSLNDIGAQICLGNTFHLWLRPGLEVIAAHKGLHDFMNWQKPILTDSGGFQVFSLGAMRKITEEGVKFSSPHDGAKLFLTPEISMQIQKVLNSDIVMIFDECTPYPATHEEAAKSMRMSMRWAQRSRDEHNKLENSNALFGIVQGGMHEDLRDESVAGLCDIGFDGMAIGGLSVGEPKEDMARILAHTAPQLPTHKPRYLMGVGTPEDLVYSVSAGIDMFDCVMPTRNARNGHLFTRFGDVKIKNARYKLDTGPLDSSCSCYTCTNFTRAYLHHLFRNGEILGGMLNTIHNLHFYQTIMAEMRTAIEVEHFTEWAAGFARDRSSGQ

SEQ ID NO: 54439 - protein, 369 aa, Dechloromonas denitrificans
  misc_feature (1)..(369): tr|A0A133XHI4|A0A133XHI4_9RHOO Queuine tRNA-ribosyltran sferase OS=Dechloromonas denitrificans OX=281362 GN=tgt PE=3 SV=1
MQFELLKTDGDARRGTLTLTHGVVQTPVFMPVGTYGTVKAMTPASLNEIGAQICLGNTFHLWLRPGLDVVQAHHGLHDFMQWQKPILTDSGGFQVFSLGAMRKITEEGVKFSSPHDGAKLFLTPEISMQIQKVLNSDIVMIFDECTPYPATRDEAAKSMRMSMRWAQRSRDEHNRLENGNALFGIVQGGMYEELRDESVAGLCDIGFDGMAIGGLSVGEPKEDMARILAHTAPKLPTHKPRYLMGVGTPEDLVYSVKAGIDMFDCVMPTRNARNGHLFTRFGDVKIKNARHKTDTGTLDPSCSCYTCSNFSRAYLHHLFRAGEILGGMLNTIHNLHFYQTIMAEMRAAIEAGTLNEWASAFARDRSSGQ

SEQ ID NO: 54440 - protein, 369 aa, Dechloromonas sp.
  misc_feature (1)..(369): tr|A0A3B7ABD6|A0A3B7ABD6_9RHOO Queuine tRNA-ribosyltran sferase OS=Dechloromonas sp. HYN0024 OX=2231055 GN=tgt PE=3 SV=1
MQFDLLKTDGAARRGTLTLAHGQIQTPVFMPVGTYGTVKAMTPQSLHDIGAQICLGNTFHLWLRPGLDVIAAHNGLHDFMNWQKPILTDSGGFQVFSLGAMRKITEEGVKFSSPHDGAKLFLTPEISMQIQKVLNSDIVMIFDECTPYPASHEEAAKSMRMSMRWARRSRDEHNKLENSNALFGIIQGGMYEDLRDESLAGLDDIGFDGMAIGGLSVGEPKEDMVRVLAHVAPRMPTHKPRYLMGVGTPEDLVRSVAAGIDMFDCVMPTRNARNGHLFTRFGDVKIKNARYKLDTGPLDPSCTCYTCTQFTRSYLHHLFRHGEILGGMLNTIHNLHFYQVIMAEMRAAIESGTFSQWSDEFVRKRSSGE

SEQ ID NO: 54441 - protein, 373 aa, Deferribacter autotrophicus
  misc_feature (1)..(373): tr|A0A5A8F4Y1|A0A5A8F4Y1_9BACT Queuine tRNA-ribosyltran sferase OS=Deferribacter autotrophicus OX=500465 GN=tgt PE=3 SV=1
MFRFTLVKKDKKTKARLGFFETLHGKVETPIFMPVGTAGSVKTVTPDELKDVGAQIILGNTYHLHLRPGEDVVNHFGGLHKFIRWDRPILTDSGGFQVFSLAELKNITEEGVTFRSHLDGHKIFLTPEKSIEIQSKLGSDIMMVLDECVPYPCEKEYVKKSIKLTTRWAKRCKEAKKNQWQALFGIVQGGVYEDLRKQSAEEIVEIGFDGYAIGGLSVGEENRLMYDITDFTTDYLPEDRPRYLMGVGTPEDILECVSRGVDMFDCVMPTRNARNGLLFTSYGKLHIKREQWKLSDKPIDENCNCYTCKNFSRGYLRHLFKAGEILALRLNTIHNLHFYISLVKDIRNAIRKECFEEFKKEKLEMFKIGGDNV

SEQ ID NO: 54442 - protein, 375 aa, Deferribacter desulfuricans
  misc_feature (1)..(375): tr|D3PAI1|D3PAI1_DEFDS Queuine tRNA-ribosyltransferase OS=Deferribacter desulfuricans (strain DSM 14783 / JCM 11476 / NBRC 101012 / SSM1) OX=639282 GN=tgt PE=3 SV=1
MVVFKFVLEKKDSESKARIGYFETIHGRVETPIFMPVGTVGSVKTVTPHELKEIGAQIILGNTYHLHLRPGDDIVNHFGGLHKFINWDKPILTDSGGFQVFSLSELKDLTEDGVTFRSHLDGRKIFLSPEKSIEIQSNLGSDIMMVLDECVPYPCEKSYVERSIELTAMWAKRCKEAKRNFWQALFGIVQGGVYKDLRKISAEQIVEIGFDGYALGGLSVGEENNIMYEITEFTTDYLPEDRPRYLMGVGTPEDILECVERGVDMFDCVMPTRNARNGLLFTSYGKLHIKRQDWKMSDDPIDPHCDCYTCKNFSRGYLRHLYKAGEILALRLNTIHNLHFYISLVKEIRNAIKNGCFKKFKREKLEMFKIGGDNV

SEQ ID NO: 54443 - protein, 373 aa, Deferribacteraceae bacterium
  misc_feature (1)..(373): tr|A0A3C1BUB5|A0A3C1BUB5_9BACT Queuine tRNA-ribosyltran sferase OS=Deferribacteraceae bacterium OX=2053543 GN=t gt PE=3 SV=1
MFKFTLEKTSEKSKARTGRIVTPHGEIETPIFMPVGTVGSVKGIAPRELDEIGAQIILGNTYHLHLRPGEDTVAHFGGLAKFNSWNKPTLTDSGGFQVFSLAKLNKIGEEGVEFRSHLDGSKLFLSPEKSMEIQQKIGADIMMAFDECVPYPSEKIYVEKSLELTTRWAERSLKAKTREDQALFGIIQGGVFPDLRKRSAEQICALPFNGFAIGGLSVGEDIPTMYEITDYITDYMPADKPRYLMGVGTPEDLLNGIERGVDMFDCVMPTRNARNALLFTNNGKLHIKAARHRLSDEPVDAECDCYTCRNFSRGYLRHLYKSGELLALKLNSIHNLHFYLSLVKRSRNAINNGFFEDFKKEILDKISFGGDNV

SEQ ID NO: 54444 - protein, 376 aa, Defluviimonas alba
  misc_feature (1)..(376): tr|A0A161GLZ6|A0A161GLZ6_9RHOB Queuine tRNA-ribosyltran sferase OS=Defluviimonas alba OX=1335048 GN=tgt PE=3 SV =1
MTQKFDFHVTATDGAARTGRIHTPRGEIRTPAFMPVGTAATVKAMLPESVRATGADILLGNTYHLMLRPTAERIDRLGGLHRFMNWDRPILTDSGGFQVMSLAALRKLTEEGVRFKSHIDGSSHFLTPERSMEIQRLLGSDIVMCFDECPALPATDAEVARSMALSMRWAQRSRDAFGDRPGHALFGIMQGGVTRELREESALALRAIGFDGYAIGGLAVGEGQEAMFGVLDYAPGMLPEDKPRYLMGVGKPDDIVGAVERGVDMMDCVLPSRSGRTGQAFTRRGVVNLRNARHMDDPRPLDEQCTCPACRSYSRAYLHHVLRSQEIIASMLLTWHNLHYYQELMAGLRGAISEGRLAAFVAAFHAQRAMGDIEPV

SEQ ID NO: 54445 - protein, 376 aa, Defluviimonas aquaemixtae
  misc_feature (1)..(376): tr|A0A2R8B4A9|A0A2R8B4A9_9RHOB Queuine tRNA-ribosyltran sferase OS=Defluviimonas aquaemixtae OX=1542388 GN=tgt PE=3 SV=1
MTDCFSFTLRATDGKARTGVIATPRGEIRTPAFMPVGTAGTVKAMLPESVAETGAEILLGNTYHLMLRPTAERIDRLGGLHRFMNWHRPILTDSGGFQVMSLASLRKLTEEGVRFSSHIDGSKHMLTPERSMEIQRLLGSDIVMAFDECPALPAPVAKVAESMRLSMRWADRSRDAFGDRPGHALFGIMQGGVTEELRAESAAALKAIGFDGYAVGGLAVGEGQETMFSVLDYAPGLLPEDRPRYLMGVGKPDDIVGAVERGVDMMDCVLPSRSGRTGQAFTRRGVVNIKNARHMDDPRPLDEDCACPACRSYSRAYLHHVFRSGEIISSMLLTWHNLHYYQELMAGLRGAIAEGRLAAFRRDFDAARAEGDIEPL

SEQ ID NO: 54446 - protein, 376 aa, Defluviimonas denitrificans
  misc_feature (1)..(376): tr|A0A2S8SDE6|A0A2S8SDE6_9RHOB Queuine tRNA-ribosyltran sferase OS=Defluviimonas denitrificans OX=404881 GN=tgt PE=3 SV=1
MTDRFSFTLHATDGKARTGTIHTPRGEIRTPAFMPVGTAATVKAMLPESVRATGADILLGNTYHLMLRPTAERIARLGGLHRFMNWDRPILTDSGGFQVMSLAALRKLTEEGVRFSSHIDGSKHMLSPERSMEIQKLLGSDIVMCFDECPALPATEEVVAQSMRLSMRWAQRSRDAFGDRPGHALFGIQQGGVTEDLRGESAEALKAIGFDGYAVGGLAVGEGQETMFSVLDYAPGMLPADKPRYLMGVGKPDDIVGAVQRGIDMMDCVLPSRSGRTGQAWTRRGQVNIKNARHMDDPRPLDEACTCPACRSYSRAYLHHVFRAGEIIASMLLTWHNLHYYHELMEGLRGAIRAGTLDAFVADFHAQRAAGDIAPL

SEQ ID NO: 54447 - protein, 375 aa, Defluviimonas sp.
  misc_feature (1)..(375): tr|A0A059IJG4|A0A059IJG4_9RHOB Queuine tRNA-ribosyltran sferase OS=Defluviimonas sp. 20V17 OX=1417296 GN=tgt PE =3 SV=1
MTAFSFSIAATDGRARTGTIHTPRGQIRTPAFMPVGTAATVKAMLPESVRATGADILLGNTYHLMLRPGAERVAKLGGLHRFMNWNRPILTDSGGFQVMSLSDLRKLTEDGVRFKSHVDGSEHFLSPERSMEIQRLLGSDIVMCFDECPALPATEEQVAQSMRMSMRWAERSREAFGDRPGHALFGIQQGGVTKELRAESAEALRAIGFDGYAIGGLAVGEGQEAMFGVLDYAPGMLPADRPRYLMGVGKPDDIVGAVQRGVDMMDCVLPSRSGRTGQAWTRRGQVNLKNARHADDPRPLDEDCACPACRGYSRAYLHHVYRAGEIIASMLLTWHNLHYFQELMDGLRTAIAAGRLEAFVADFHRLRAEGDIERL

SEQ ID NO: 54448 - protein, 375 aa, Defluviitoga tunisiensis
  misc_feature (1)..(375): tr|A0A0C7NKJ1|A0A0C7NKJ1_DEFTU Queuine tRNA-ribosyltran sferase OS=Defluviitoga tunisiensis OX=1006576 GN=tgt P E=3 SV=1
MSESPIKFELLHIDKYTGARRGRITTRHGVIETPVFMPVGTNATVKGITNDQLNEIGTEIILSNAFHLYLRPGLEVLDYYKGLHNFMNWKKPILTDSGGFQVFSLPNKKFSEDGIIFKSPLDGLEIELTPEKSLNIQNVIGSDIAMVLDVCVNSLSSYETVKESVQKTFNWALRSREYHNNKNQALFGIVQGGLYEDLREISLKQITSLDFDGYAMGGLAVGEKYQDSEKVLKAFGNKFPENKPRYIMGIGSPTMMFLSVENGMDMFDCVLPTRMGRHGTALTMQGKLNLKSSKVRYDDQPIDDECDCYTCKNHSRGYIHHLFKRDEMLGKILLSIHNLRFNISLVEKMRNAIEIDEFKYFKEEFFRNSGYSLTN

SEQ ID NO: 54449 - protein, 373 aa, Dehalobacter sp.
  misc_feature (1)..(373): tr|A0A1C2XYN7|A0A1C2XYN7_9FIRM Queuine tRNA-ribosyltran sferase OS=Dehalobacter sp. TeCB1 OX=1843715 GN=tgt PE= 3 SV=1
MAAVKLEILKKDTRTKARLGRLHTPHGMIETPVFMPVGTQATVKSVSPEELKALGANMILSNTYHLFLRPGHELIKRAGGLHKFMNWDGAILTDSGGFQVFSLGDLRKITEEGVEFRSHLDGSKQFLSPEKATEIQIALGSDIVMAFDECTPYPANREYTKKSAERTFRWLKRCKNTLPTTEKQALFGIVQGGMYEDLRKQSAQEITELDLPGYALGGLSVGEPKEMMYEVLDYTVPLLPEAKPRYLMGVGSPDDLIEGVMRGIDMFDCVLPTRIARNGTAMTRFGKVVVRNATYADDFTPIDPTCSCYTCQNYSRAYIRHLIKADEIFGHRLMTIHNLHFLTHLMKEVRQAIAEDQLPEYRKQFFADYGYKK

SEQ ID NO: 54450 - protein, 373 aa, Dehalobacter sp.
  misc_feature (1)..(373): tr|A0A4R4CUW5|A0A4R4CUW5_9FIRM Queuine tRNA-ribosyltran sferase OS=Dehalobacter sp. 12DCB1 OX=2070364 GN=tgt PE =3 SV=1
MAAVKLEILKKDTRTKARLGRLHTPHGMIETPVFMPVGTQATVKSVSPEELKMLGADIILSNTYHLFLRPGHELIKHAGGLHRFMNWDGAILTDSGGFQVFSLGDLRKITEEGVEFRSHLDGSKQFLSPEKATEIQIALGSDIVMAFDECTPYPATREYTEKSAERTFRWLQRCKNTLTSTDRQALFGIVQGGMYEDLRKQSAQEITGLDLPGYALGGLSVGEPKELMYEVLDYTVPLLPEAKPRYLMGVGSPDDLIEGVMHGIDMFDCVLPTRIARNGTAMTRFGKVVVRNATYADDFTPIDSTCSCYTCRNYSRAYIRHLIKADEIFGHRLMTIHNLHFLTHLMEGIRQAIAEDRLPEYRKQFFADYGYEK

SEQ ID NO: 54451 - protein, 400 aa, Dehalococcoidales bacterium
  misc_feature (1)..(400): tr|A0A2E9M4V9|A0A2E9M4V9_9CHLR Queuine tRNA-ribosyltran sferase OS=Dehalococcoidales bacterium OX=2026733 GN=tg t PE=3 SV=1
  misc_feature (60)..(60): Xaa can be any naturally occurring amino acid
  misc_feature (65)..(65): Xaa can be any naturally occurring amino acid
  misc_feature (179)..(179): Xaa can be any naturally occurring amino acid
  misc_feature (215)..(215): Xaa can be any naturally occurring amino acid
  misc_feature (306)..(306): Xaa can be any naturally occurring amino acid
MNLNTFRLLKTDTDSKARLGELTTPHGRVPTPTFIPVASQGTIKTLTPEEVKDIGFGIAXANTYXLYLRPGISVIEKFGGLHRFMAWERAILTDSGGYQIFSLARLRQVSDEGVTFRSHIDGSEHLITPELAIRLQESLGSDIIMVLDECPAPDDSLRNTRAAVKRTHLWAERSLKTHXRHDQVLYAIVQGGVFPKLRRQSAEYLASLDFSGFAXGGLSLGEPKQLTKEMIEATVTWLPENKPRYLMGAGSPEDIVEGVARGVDLFDSALPTRVARNGALFTERGRVDVCNAMYRQMERPVDPDCXCYTCRTFSAAYLHHLFKSEELLAYRLATMHNLTFIARLTQKIRDAISDATFNSFKEEFLARYQPTNESVRLEQKRKWNRTRDLKGSSNYPNHRQ

SEQ ID NO: 54452 - protein, 390 aa, Dehalococcoidales bacterium
  misc_feature (1)..(390): tr|A0A2D5UU48|A0A2D5UU48_9CHLR Queuine tRNA-ribosyltran sferase OS=Dehalococcoidales bacterium OX=2026733 GN=tg t PE=3 SV=1
MTNNLPGFHLKKTYPAAKARAGELVTSHGTVSTPLFCPVATQGTIKTLTPREVRDLALPMILVNTYHLYLRPGIDVVEKLGGLHKFMAWDGVILTDSGGYQVFSLARLRRVRDEGVVFRSHIDGSEHLITPELAVQFQESLGADIIMVLDVCSAYDSSFEKVEQDTHRTHHWAERSRKAQQSGDQALYGIVQGGVFPGLRRQSAEYLASLNFPGYAIGGLCLGETKEVTLAMVEESVTFLPENKPRYLMGVGSPEDIVESVARGIDLFDSALPTRLARNGSLFTPSGRINIRNAGFGRMERPVDPDCGCYTCRTFSAAYLHHLFSAKELLAYRLASIHNLAFISQLMQRIRSAILDDTFDSFKDEFLSTYRPTDEQVRLEQKQKWLKQRA

SEQ ID NO: 54453 - protein, 392 aa, Dehalococcoides mccartyi
  misc_feature (1)..(392): sp|Q3ZAE2|TGT_DEHM1 Queuine tRNA-ribosyltransferase OS= Dehalococcoides mccartyi (strain ATCC BAA-2266 / KCTC 1 5142 / 195) OX=243164 GN=tgt PE=3 SV=1
MDKSFILNKTSPRSSARRGQLLTAHGQVETPVFCPVGSQATVKTLTPEDLKSVNVNMILSNTYHLYLRPGIPVVKEMGGLHKFMNWDGVILTDSGGYQIFSLANLRKLDEGGVSFRSHIDGSTRYITPEDAVSFQQDLGSDIAMVLDECPHSEASENEVLAAMERTHQWAKRCLAAHTLKSQHLFAIVQGGLSPVLRQQSAEYLASLDFPGYALGGLSLGEPKDITFETVRHTLRFLPENKPRYLMGVGAPEDLLEGVSCGVDIFDCVLPTRVARNGAFFSRLGRLNIRNASFATQKGPVDPECNCYTCRNYSAAYLHHLFRCEEILAYRLATIHNIAFLSNLMQEVRTSIEKDCFEEFKGDFLTRYQPTNESVRIEQKQKWLSARSGETSS

SEQ ID NO: 54454 - protein, 392 aa, Dehalococcoides mccartyi
  misc_feature (1)..(392): sp|A5FSU3|TGT_DEHMB Queuine tRNA-ribosyltransferase OS= Dehalococcoides mccartyi (strain ATCC BAA-2100 / JCM 16 839 / KCTC 5957 / BAV1) OX=216389 GN=tgt PE=3 SV=1
MDKSFILNKTSSRSLARRGQLFTAHGKVETPVFCPVGSQATVKTLTPEDLKSVNINMILSNTYHLYLRPGIPIIKEMGGLHKFMNWDGVILTDSGGYQIFSLANLRKLDEGGVSFRSHIDGSTRYITPEDAVSFQQDLGSDIAMVLDECPHSEASENEVLAAMERTHQWAKRCLAAHTLKSQHLFAIVQGGLSPELRRQSAEYLASLDFPGYALGGLSLGEPKDITFETVRHTLRFLPENKPRYLMGVGAPEDLLEGVSCGVDIFDCVLPTRVARNGAFFSRLGRLNIRNAAFATQKGPIDPDCNCYTCRNYSAAYLHHLFRCEEILAYRLATIHNIAFLSNLMQEIRTSIEKDCFEEFKADFLSRYQPTNEAIRIEQKQKWLFGRNGEPPS

SEQ ID NO: 54455 - protein, 392 aa, Dehalococcoides sp.
  misc_feature (1)..(392): tr|A0A0C6ETE7|A0A0C6ETE7_9CHLR Queuine tRNA-ribosyltran sferase OS=Dehalococcoides sp. UCH007 OX=1522671 GN=tgt PE=3 SV=1
MDKSFILNKTSPRSSARRGQLLTAHGKVETPVFCPVGSQATVKTLTPEDLKSVNVNMILSNTYHLYLRPGIPVVKEMGGLHKFMNWDGVILTDSGGYQIFSLANLRKLDEGGVSFRSHIDGSTRYITPEDAVSFQQDLGSDIAMVLDECPHSEASENEVLAAMERTHQWAKRCLAAHTLKSQHLFAIVQGGLSPVLRQQSAEYLASLDFPGYALGGLSLGEPKDITFETVRHTLRFLPGNKPRYLMGVGAPEDLLEGVSCGIDIFDCVLPTRVARNGAFFSRLGRLNIRNASFATQKGPVDPECNCYTCRNYSAAYLHHLFRCEEILAYRLATIHNIAFLSNLMQEVRTSIEKDCFEEFKGDFLARYQPTNESVRIEQKQKWLSARSGETPS

SEQ ID NO: 54456 - protein, 395 aa, Dehalococcoidia bacterium
  misc_feature (1)..(395): tr|A0A0S8CFW8|A0A0S8CFW8_9CHLR Queuine tRNA-ribosyltran sferase OS=Dehalococcoidia bacterium SG8_51_3 OX=170339 4 GN=tgt PE=3 SV=1
MKSDFRLIKVCTGARAGELITPRGVVPTPVFMPVGSQGTVKALTPEEVKGIGYGMILANTYHLYLRPGIDMVERLDGLHKMMAWDGAILTDSGGYQVFSLAPLCKVSEEGVTFRSHIDGSEHFFTPELTVEYQSRLGADIIMVLDVCSAYDDSFEKVQQSMELTHRWAERCQKARRNQSQALFAIVQGGVFPELRRRSVEFLTNLGFDGYALGGLSVGEPKKLTFETVAQTAAQLPEKKPRYLMGVGSPEDIIEGVARGIDIFDSALPTRVARNGALFTWEGRCNIRNADFSRMGQPIVAGCGCYTCRTFSAAYIHHLFKSGELLAYRLATIHNLYFIHNLMEKIRMAVTGGTFSRLREEFWSRYAPTDEQVRVSQKQKWLKSKRRGLDIGVEGN

SEQ ID NO: 54457 - protein, 385 aa, Dehalococcoidia bacterium
  misc_feature (1)..(385): tr|A0A349K8C3|A0A349K8C3_9CHLR Queuine tRNA-ribosyltran sferase OS=Dehalococcoidia bacterium OX=2026734 GN=tgt PE=3 SV=1
MFNFTLEHSDGLARAGCISTPHGEINTPVFMPVATQGSVKALDRVDLECLGTQIILGNAYHLYLRPGVKTIKELGGLHSFMNWTRPILTDSGGFQGFSLQHLRKITDDGITFKSHIDGSTHELTPESVVDIQTDIGSDVIMPLDVCLPSEASKTDLSEAMDLTSNWLGRSIRSLGSKSDQSLFGIVQGGLHSDLRQKSADFLSSLDLPGYAIGGLSVGETKEKMYPTVEITSELLPSDKPRYLMGVGSPEDLVECVVRGIDMFDCVLPTRVARKGAMYTKFGRRNVTRSEYKRSDSSFDTNCDCYACTNFSAGYIHHLFKAKEYLAYRLASIHNLRFLMQTMADLRKAIQQGLIKEYRETFWENYRPSDQSARANQALRHIKRFK

SEQ ID NO: 54458 - protein, 394 aa, Dehalogenimonas alkenigignens
  misc_feature (1)..(394): tr|A0A0W0GGQ5|A0A0W0GGQ5_9CHLR Queuine tRNA-ribosyltran sferase OS=Dehalogenimonas alkenigignens OX=1217799 GN= tgt PE=3 SV=1
METAGFSFELALSGAARAGVLNTPHAAVETPCFMPVGSQATVKTLTPDELKDLGYNLILANNYHLYLRPGTQVVGSYGGIHKFMGWNGALLTDSGGYQVFSLSPLRKMSDDGVTFRSHIDGSEHFFSPELAIKYQEVFGADIIMALDECPPVEASREVIEAAVERTQAWALRCKSARTRTDQSLFPIVQGGLHADLRRRSAEGLIEADFPGYAIGGLAIGESKEQTAEITAATTEILPIDKPRYLMGVGSPEDIVRGVAAGIDMFDSALPTRVARNGALFTRYGRIDIANARYEGDKGPIDNECGCYACQNFSAGYVHHLFRAKELLAYRLATLHNLYFMRRLMTDIRQSILDERYDDFARSFLSDYKPTDESVRLSQKRQWLKDRNSSSPSMD

SEQ ID NO: 54459 - protein, 387 aa, Dehalogenimonas formicexedens
  misc_feature (1)..(387): tr|A0A1P8F4S3|A0A1P8F4S3_9CHLR Queuine tRNA-ribosyltran sferase OS=Dehalogenimonas formicexedens OX=1839801 GN= tgt PE=3 SV=1
MSELSFKLEKPGNARAGILVTPHATVETPCFMPVGSQATVKTLTPDELKDLGYKLILANNYHLYLRPGTDVIASYGGIHKFMGWSGALLTDSGGYQVFSLSPLRKMSDEGVTFRSHIDGSEHFFSPELAIKYQEIFGADIIMALDECPPVEASRGAIESAVARTQAWALRCKSAKTRADQALFPIVQGGLHPDLRRRSAEGLIETGFPGYAIGGLAIGEAKDQTVEITAATTGVLPSDKPRYLMGVGSPEDIVRGVSAGIDMFDSALPTRVARNGALFTRRGRIDIANARYEGDKTPIETGCACYTCLNFSAGYVHHLFRAKELLAYRLATLHNLYFMRKLMRDIRQSILDERFDGFARNFLSDYTPTDEAVRLAQKRQWLQDRNQP

SEQ ID NO: 54460 - protein, 392 aa, Dehalogenimonas lykanthroporepellens
  misc_feature (1)..(392): tr|D8K230|D8K230_DEHLB Queuine tRNA-ribosyltransferase OS=Dehalogenimonas lykanthroporepellens (strain ATCC BA A-1523 / JCM 15061 / BL-DC-9) OX=552811 GN=tgt PE=3 SV= 1
MSAISFELETAGAARAGMLTTPHAKVETPCFMPVGSQATIKTLTPDEVRDLGYRLILANNYHLYLRPGTAVVSGYGGLHRFMGWDGALLTDSGGYQVFSLSPLRKVTDEGVTFRSHIDGSEHFFSPELAVGYQEAFGADIIMALDECPPVDGSREVISAAVARTHDWAERCLSAKTRDDQALFPIVQGGLFADLRRRSAEGLVELDFPGYAIGGLAIGESKDQTVEITAATTEILPADKPRYLMGVGSPEDIVRAVGVGIDMFDSALPTRVARNGAIFTRQGRIDIANARYQGDTVPIEDDCACPACRRFSAGYIHHLFRAKELLGHRLATLHNLFFMNRLMVDLRRAVKEGRYDDFVRDFLAGYRPTDEQVRLSQKRQWLADRNRPGTEKG

SEQ ID NO: 54461 - protein, 357 aa, Dehalogenimonas sp.
  misc_feature (1)..(357): tr|A0A0F7CTG8|A0A0F7CTG8_9CHLR Queuine tRNA-ribosyltran sferase OS=Dehalogenimonas sp. WBC-2 OX=943347 GN=tgt P E=3 SV=1
MPVGSQATIKTLTPDEVRDIGYKIILANNYHLYLRPGTKVVESYGGLHKFMNWDGAMLTDSGGYQVFSLSPLRKMSDEGVTFRSHIDGSEHFFSPELAIKYQESFGADIIMALDECPPVEGSHDVIAAAVARTHSWAVRCLKAKTRDDQALFPIVQGGLHADLRRRSAQGLVAEEFPGYAIGGLAIGESKDQTIEITAETTAILPIDKPRYLMGVGSPEDVVRGVGAGIDMFDSALPTRVARNGALFTRHGRIDIVNARYEGDKNPIEDGCGCYTCSRFSAGYVHHLFRAKELLAYRLATLHNLSFMFTLMADIRRAIINERYDDFSRNFLSEYRTTDETVRLNQKRQWLQGRHAEN

SEQ ID NO: 54462 - protein, 392 aa, Dehalogenimonas sp.
  misc_feature (1)..(392): tr|A0A2P5P753|A0A2P5P753_9CHLR Queuine tRNA-ribosyltran sferase OS=Dehalogenimonas sp. GP OX=1536648 GN=tgt PE= 3 SV=1
MTEFSFLLEKSGAARAGILTTPHAAVETPCFMPVGSQATVKTLTPDEIKDLGYQLILANNYHLYLRPGTDVIARYGGVHKFMGWDGALLTDSGGYQVFSLSPLRKMSDEGVTFRSHLDGSEHFFSPELAIKYQEIFGADIIMALDECPPVEASREVIESAVKRTQAWAGRCKTAKTRPDQALFPIVQGGLHADLRRRSAEGLIDADFPGYAIGGLAIGESKDQTVEITAATSDVLPVDKPRYLMGVGSPEDIVRGVEVGIDMFDSALPTRVARNGALFTRAGRIDIANARYEGERNPIEIDCSCYTCCNFSAGYIHHLFRTKELLAYRLATIHNLFFMNKLMANIRQAILEERYADFSRTFLSDYKPTDEAVRLSQKRQWLKDRNQPQGHGI

SEQ ID NO: 54463 - protein, 390 aa, Deinococcus actinosclerus
  misc_feature (1)..(390): tr|A0A0U3SV68|A0A0U3SV68_9DEIO Queuine tRNA-ribosyltran sferase OS=Deinococcus actinosclerus OX=1768108 GN=tgt PE=3 SV=1
MFEFEIQHRDGRARVAQFHTPRGTVTTPMFMPVGTQGTVKGISPQELLDIGSQMILGNTYHLMLRPGEAMVATHGGLPGFTAYPGPFLTDSGGFQVMSLGHMRKITEEGVTFKSHLDGSLVNLTPERSIQVQEALGADIIMAFDECPPYPAEREYILRSLERTERWLARCLNVKSREEQALFAIVQGGVHEDLRQRSLDLTLPYNTPGFALGGLAVGEPKEEMYPAVAFTAERLPDHKPRYLMGVGHPEDLVAGVALGVDMFDCVYPTRTGRFGYALTDQGRLNMNSSAPRTSMEPLDPDCDCYACTHYTRAYLAHLIRAEEMLGPRMLSLHNLRYLHRLMERARSAIQAGEFHAWASAWAAGYFKNGIPAWFQSALDQGRTGAHQNPQS

SEQ ID NO: 54464 - protein, 390 aa, Deinococcus actinosclerus
  misc_feature (1)..(390): tr|A0A2Z3YY64|A0A2Z3YY64_9DEIO Queuine tRNA-ribosyltran sferase OS=Deinococcus actinosclerus OX=1768108 GN=tgt PE=3 SV=1
MFEFKIQHRDGRARVAQFHTPRGTVTTPMFMPVGTQGTVKGISPQELLDIGSQMILGNTYHLMLRPGEAMVAAHGGLPGFTAYPGPFLTDSGGFQVMSLGHMRKITEEGVTFKSHLDGSLVNLTPERSIQVQEALGADIIMAFDECPPYPAEREYILRSLERTERWLARCLNVKSREEQALFAIVQGGVHEDLRQRSLDLTLPYNTPGFALGGLAVGEPKEEMYPAVAFTAERLPDHKPRYLMGVGHPEDLVAGVALGVDMFDCVYPTRTGRFGYALTDQGRLNMNSSAPRTSMEPLDRDCDCYACTHYTRAYLAHLIRAEEMLGPRMLSLHNLRYLHRLMERARSAIQAGEFHTWASTWAAGYFKHGVPAWFQSALDQGRAGVSQNPQS

SEQ ID NO: 54465 - protein, 358 aa, Deinococcus aerius
  misc_feature (1)..(358): tr|A0A2I9DKQ4|A0A2I9DKQ4_9DEIO Queuine tRNA-ribosyltran sferase OS=Deinococcus aerius OX=200253 GN=tgt PE=3 SV= 1
MPVGTQGSVKGISPQELLDIGSQMILANTYHLMLRPGEQLVAAHGGLPGFTAYPGPFLTDSGGFQVMSLGHMRKITEEGVTFKSHIDGANVSLTPERSIQVQEALGADVIMAFDECPPYPAERGYIENSLERTARWLERCHAAKTREDQALFAIVQGGVHQDLRRKSLDLTLLFGTPGFAIGGLAVGEPKEEMYPAVAFTASQLPEEKPRYLMGVGHPEDLIAGIALGVDMFDCVYPTRTGRFGYALTDDGRLNMNSSAPRTQLEPIDRECDCYACRHYTRAYLAHLIRAEEMLAPRMLSLHNLRYLHRLVERARTAIEQGAFQTWAQTWAQRYFRGAVPGWFVEALEVGSRVQSSVL

SEQ ID NO: 54466 - protein, 383 aa, Deinococcus cellulosilyticus
  misc_feature (1)..(383): tr|A0A511NAV9|A0A511NAV9_9DEIO Queuine tRNA-ribosyltran sferase OS=Deinococcus cellulosilyticus NBRC 106333 = K ACC 11606 OX=1223518 GN=tgt PE=3 SV=1
MFEFDIQATSGRARKATFHTPRGSVTTPMFMPVGTQGTVKGISPQELLDVGSQMILGNTYHLMLRPGEELVRQHGGLPGFTAYPGPFLTDSGGFQVMSLGHMRTIKEEGVTFRNHLDGSLVYLTPERSIQVQEALGADVIMAFDECPPHPASQEYVKNSLERTIRWLDRCLQVKTREDQALFAIVQGGVYEHLRLQSLEATLPFNTPGFAIGGLAVGESKEEMYPMVDFTARHLPDNKPRYLMGVGHPEDLVAAIGLGVDMFDCVYPTRTGRFGYALTDQGRINLNKASMRTDMRPVDETCDCYCCKNYTRAYLAHLMRAEEMLGPRMLSLHNLRYLHRLVDKARVAIETDTYVEWASEWGKVYFGGTLPAWFEQALRASSDE

SEQ ID NO: 54467 - protein, 385 aa, Deinococcus deserti
  misc_feature (1)..(385): tr|C1CYQ0|C1CYQ0_DEIDV Queuine tRNA-ribosyltransferase OS=Deinococcus deserti (strain VCD115 / DSM 17065 / LMG 22923) OX=546414 GN=tgt PE=3 SV=2
MFEFTVQHQQGRARVAQFHTPRGAVTTPMFMPVGTQGTVKGISPQELLDIGSQMILGNTYHLMLRPGEALVQAHGGLPGFTAYPGPFLTDSGGFQVMSLGHMRKITEEGVTFKSHLDGSLVHLTPERSIQVQEALGADVIMAFDECPPFPAERDYIQRSLERTVRWLDRCVSVKTNDHQALFAIVQGGIHEDLRQQSIDLTLPFETPGFAIGGLAVGESKAEMFPAVAFSAGLLPDDKPRYLMGVGHPEDLVAGIALGIDMFDCVYPTRTGRFGYALTDDGRLNMNSSAPRKELIPIDDTCECYACRHYTRAYLAHLLRAEEMLAPRMLSLHNLRYLHHLVERARTAIASGKFHDWANEWGERYFKGKIPEWYQQALATGAGQRV

SEQ ID NO: 54468 - protein, 384 aa, Deinococcus ficus
  misc_feature (1)..(384): tr|A0A221SYD6|A0A221SYD6_9DEIO Queuine tRNA-ribosyltran sferase OS=Deinococcus ficus OX=317577 GN=tgt PE=3 SV=1
MFEFDIQATAGRARVASFTTPRGQVTTPMFMPVGTQGTVKGISPDELHAVGSQMILGNTYHLMLRPGEAMVAAHGGLPGFTAYPGPFLTDSGGFQVMSLGHMRRITEDGVVFKSHLDGSLINLTPERSIQVQEGLGADIIMAFDECPPYPATTEYVKASLERTVRWLERCLNVKSREDQALFPIIQGGTDETLRALSLELTLPVNPHGFAIGGLAVGEPKTEMFPAVAFSTAGLPENKPRYLMGVGHPEDLVAGIALGVDMFDCVYPTRTGRFGYALTDQGRINMNSSAPRTQLQPIDESCDCYACRHYTRAYLAHLVRAEEMLGPRMLSLHNLRYLHRLTERARDAISNGTFHSWARVWADGYFKNGVPEWFSQALQTGETAV

SEQ ID NO: 54469 - protein, 388 aa, Deinococcus geothermalis
  misc_feature (1)..(388): tr|Q1J1K1|Q1J1K1_DEIGD Queuine tRNA-ribosyltransferase OS=Deinococcus geothermalis (strain DSM 11300) OX=31979 5 GN=tgt PE=3 SV=1
MFEFDIQYRDGQARVATFQTPHGQVRTPMFMPVGTQGTVKGLSPQELIEIGSQMILGNTYHLMLRPGEQLVAAHGGLPGFTAYPGPFLTDSGGFQVMSLGHMRKITEEGVTFKSHLDGSLVSLTPERSIAVQEALGADVIMAFDECPPYPAERDYIRRSLERTARWLERCYAVKTREDQALFAIVQGGIDPDLRQLSLDLTLPFQTPGFAIGGLAVGESKEEMYPAVAFTAKRLPEGKPRYLMGVGHPEDLVAGIALGIDMFDCVYPTRTGRFGYALTDDGRLNMNGSAPRTQLQPLDPECDCYACRHYSRAYLAHLIRAEEMLAPRMLSLHNLRYLHRLVERARTAIMQGAFQAWAQAWAQRYFRGAVPGWFRQVLATGAQVEIQTH

SEQ ID NO: 54470 - protein, 385 aa, Deinococcus gobiensis
  misc_feature (1)..(385): tr|H8GST1|H8GST1_DEIGI Queuine tRNA-ribosyltransferase OS=Deinococcus gobiensis (strain DSM 21396 / JCM 16679 / CGMCC 1.7299 / I-0) OX=745776 GN=tgt PE=3 SV=1
MFEFTVQARSGRARTAQFATPRGTVQTPMFMPVGTQGTVKGISPQELTEIGSQMILGNTYHLMLRPGEALVEAHGGLPGFTAYPGPFLTDSGGFQVMSLGHMRKITEEGVVFKSHLDGSLVNLTPERSVQVQEALGADVIMAFDECPPFPAEREYIRASLERTIRWLERCLTIKRKSEQALFAIVQGGIHEDLRQRSLDLTLPFGTPGFAIGGLAVGESKEEMFPAVAFTAERLPENKPRYLMGVGHPEDLVAGIALGVDMFDCVYPTRTGRFGYALTDVGRLNMNSSAPRRQLEPIDPECDCYACRHYTRAYLAHLLRAEEMLAPRMLSLHNLRYLHRLVERAREAISRGQFTEWATEWGDTYFKGQTPEWFRKALHPETARPD

SEQ ID NO: 54471 - protein, 390 aa, Deinococcus grandis
  misc_feature (1)..(390): tr|A0A100HIX7|A0A100HIX7_9DEIO Queuine tRNA-ribosyltran sferase OS=Deinococcus grandis OX=57498 GN=tgt PE=3 SV= 1
MFEFDIQHRDGRARVAQFHTPRGTVTTPMFMPVGTQGTVKGISPQELTDIGSQMILGNTYHLMLRPGETLVAAHGGLPGFTAYPGPFLTDSGGFQVMSLGHMRKITEEGVVFKSHLDGSLVNLTPERSIQVQEALGADIIMAFDECPPYPAEREYILRSLERTERWLARCLTVKSRPEQALFAIVQGGVHEDLRERSLALTLPYDTPGFALGGLAVGEPKEEMYPAVAFTAGRLPEHKPRYLMGVGHPEDLVAGVALGVDMFDCVYPTRTGRFGYALTDEGRLNMNSSAPRTSMEPLDSGCDCYACRNYTRAYLAHLIRAEEMLGPRMLSLHNLRYLHRLMERARAAIEAGEFHAWASAWAARYFRQGVPQWFQIALETGRNPESQKSQS

SEQ ID NO: 54472 - protein, 383 aa, Deinococcus hopiensis
  misc_feature (1)..(383): tr|A0A1W1V9V4|A0A1W1V9V4_9DEIO Queuine tRNA-ribosyltran sferase OS=Deinococcus hopiensis KR-140 OX=695939 GN=tg t PE=3 SV=1
MFEFDILQQEGRARRATFRTPHGTVTTPMFMPVGTQGTVKGISPQELLDIGSQIVLANTYHLMLRPGEQLVAAHGGLPGFTAYPGPFLTDSGGFQVMSLGHMRKITEQGVTFKSHLDGSRVELTPERSVEVQEALGADVIMAFDECPPYPAEPLYLQRSLERTVRWLERCLEAKTREDQALFAIVQGGTSGELREQSLALTLPFATPGFAIGGLAVGEPKEEMFPAVALTTGRLPAHKPRYLMGVGHPEDLIAGVALGVDMFDCVYPTRTGRFGYALTDDGRLNLNSSAPRRQLEPIDSGCDCYACRSYTRAYLAHLIRAEEMLAPRMLSLHNLRYLHRLMARAGDALQQGTFFNWATAWGERYFRQEVPAWFQKALETGAGI

SEQ ID NO: 54473 - protein, 401 aa, Deinococcus indicus
  misc_feature (1)..(401): tr|A0A246BFW6|A0A246BFW6_9DEIO Queuine tRNA-ribosyltran sferase OS=Deinococcus indicus OX=223556 GN=tgt PE=3 SV =1
MGAMFEFDIQHRDGRARVARFHTPRGAVTTPMFMPVGTQGTVKGISPQELLDIGSQMILGNTYHLMLRPGEALVEAHGGLPGFTAYPRPFLTDSGGFQVMSLGHMRKITEQGVTFKSHLDGSLVDLTPERSIQVQQALGADVIMAFDECPPYPAERDYIQRSLERTERWLARSLNAKTNDHQALFAIVQGGIHPDLRQQSLDLTLPYQTPGFAIGGLAVGEPKDAMYPAVAFTAERLPEHKPRYLMGVGHPEDLVAGIALGVDMFDCVYPTRTGRFGYALTDDGRLNMNSSAPRRQLEPMDPDCDCYACRHYTRAYLAHLVKAEEMLAPRMLSLHNLRYLHRLVERARAAISRGEFHMWADGWAQRYFKGQIPDWFRQALETGRGTTSLRPDPAPAPTDSL

SEQ ID NO: 54474 - protein, 386 aa, Deinococcus irradiatisoli
  misc_feature (1)..(386): tr|A0A2Z3JMK9|A0A2Z3JMK9_9DEIO Queuine tRNA-ribosyltran sferase OS=Deinococcus irradiatisoli OX=2202254 GN=tgt PE=3 SV=1
MFEFEIKSRDGRARTAQFTTPHGTVQTPMFMPVGTQGSVKGISAQELKDIGSQMVLGNTYHLMLRPGHEMVAVHGGLPGFTAYPGPFLTDSGGFQVMSLGHMRKISEEGVVFKSHLDGSPVHLTPERSVEVQQGLGADVMMAFDECPPFPAEVPYIKSSLERTVRWLERCLKAKTREDQALFAIVQGGIHRELRQQSLDATVPFATPGFAIGGLAVGESKDEMFPAVGFTARGLPENKPRYLMGVGHPEDLVAGIALGVDMFDCVYPTRTGRFGYALTDDGRLNMNSAAPRSELKPIDPDCDCYACTHHTRAYLAHLIKAEEMLAPRLLSLHNLRYLHRLVERARAAIEAGEFQTWATEWGERYFRNRPAGAPLPEWFARAVRGED

SEQ ID NO: 54475 - protein, 390 aa, Deinococcus koreensis
  misc_feature (1)..(390): tr|A0A2K3UZ47|A0A2K3UZ47_9DEIO Queuine tRNA-ribosyltran sferase OS=Deinococcus koreensis OX=2054903 GN=tgt PE=3 SV=1
MRQNAPVFDFKIQSRDGRARVGHFETPRGVVTTPMFMPVGTQGTVKGVSAQELLDIRSQMILANTYHLMLRPGESLVAAHGGLPGFTAYPGPFLTDSGGFQVMSLGHMRKITEEGVTFKSHLDGGLVELSPERSVAVQEALGADVIMAFDECPPFPAERDYILRSLERTVRWLDRCLTVKSRPEQALFAIVQGGIHLDLRERSLELTLPFDTPGFAIGGLAVGESKAEMYPAVAFTAARLPEARPRYLMGVGHPEDLIAGIAVGVDMFDCVYPTRTGRFGYALTDDGRLNLNSSAPRSELRPIDENCDCYACRHYTRAYLAHLVKAEEMLGPRMLSLHNLRYLHRLVERAREAIASQSLAGWAQTWGERYFKGAIPEWFQKALEAGSASS

SEQ ID NO: 54476 - protein, 379 aa, Deinococcus maricopensis
  misc_feature (1)..(379): tr|E8U574|E8U574_DEIML Queuine tRNA-ribosyltransferase OS=Deinococcus maricopensis (strain DSM 21211 / LMG 221 37 / NRRL B-23946 / LB-34) OX=709986 GN=tgt PE=3 SV=1
MFDFEIQARSGRARTATFSTPHGTVQTPMFMPVGTQGTVKGITPAELLDVGSQMILGNTYHLMLRPGPDMVAAHGGLPGFTAYPGPFLTDSGGFQVMSLGHMRKITEQGVTFKSHVDGSAVQLTPERSIAVQEALGADIIMAFDECPPFPATREYVKASQERTIRWLERCLNAKTRDDQALFAIVQGSVYEDLREQSVQETLPFNTPGFAIGGLAVGESKEEMYPMVAFTAARLPEGKPRYLMGVGHPEDLVAAIALGVDMFDCVYPTRTGRFGYALTDDGRLNLNSSGPRQQLIPIDPECDCYACRNYTRAYLAHLTRAEEMLSPRMLSLHNIRYLHRLVERARAAIASDTYQSWATTWAERYFKGRIPTWFQQAIAG

SEQ ID NO: 54477 - protein, 397 aa, Deinococcus marmoris
  misc_feature (1)..(397): tr|A0A1U7P1G0|A0A1U7P1G0_9DEIO Queuine tRNA-ribosyltran sferase OS=Deinococcus marmoris OX=249408 GN=tgt PE=3 S V=1
MAMFEFEVQHQDGRARVARFATPHGTVTTPMFMPVGTQGTVKGISPQELLDIGSQMILGNTYHLMLRPGEELVAAHGGLPGFTAYPGPFLTDSGGFQVMSLGHLRKIAEEGVVFKSHLDGSLVELTPERSIEVQQALGADVIMAFDECPPFPAERDYITRSLERTVRWLERCLTFKSRDDQALFAIVQGGIHSDLRQLSLDLTLPFNTPGFAIGGLAVGESKAEMYPAVDFTTARLPAEKPRYLMGVGHPEDLVAGIALGVDMFDCVYPTRTGRFGYALTDEGRLNMNSSAPRRDLRPIDEDCDCYACRHYTRAYLAHLVRAEELLAPRMLSLHNLRYLHRLVERIRAAIVAGEFDVWARAWGARYFGGELPQWFSAALEASAVQPGPAAAGTSPHL

SEQ ID NO: 54478 - protein, 397 aa, Deinococcus metallilatus
  misc_feature (1)..(397): tr|A0A4Q0W8Z3|A0A4Q0W8Z3_9DEIO Queuine tRNA-ribosyltran sferase OS=Deinococcus metallilatus OX=1211322 GN=tgt P E=3 SV=1
MFEFEIQHRDGRARTATFQTPRGKVQTPVFMPVGTQGTVKGISPQELLDIGSQMVLGNTYHLMLRPGEKLVQAHGGLPGFTAYPGPFLTDSGGFQVMSLGHMRKITEEGVTFKSHIDGSTVILTPERSTEVQEALGADVIMAFDECPPYPAEREYIRGSLERTIRWLERCHAVKTREDQALFAIVQGGVHPDLRQLSLDLTLSYETPGFAIGGLAVGESKEEMYPAVAFTAARLPEGKPRYLMGVGHPEDLVAGIALGVDLFDCVYPTRTGRFGYALTDDGRLNMNSSAPRTQLQPIDGDCDCYACRHYTRAYLAHLIRAEEMLAPRMLSLHNLRYLHRLVERARAAIAAGTFQPWAQAWAERYFRHAVPAWFQAALSAGAKAEAVEQSMVEAPAVS

SEQ ID NO: 54479 - protein, 381 aa, Deinococcus peraridilitoris
  misc_feature (1)..(381): tr|K9ZZR3|K9ZZR3_DEIPD Queuine tRNA-ribosyltransferase OS=Deinococcus peraridilitoris (strain DSM 19664 / LMG 22246 / CIP 109416 / KR-200) OX=937777 GN=tgt PE=3 SV=1
MFEFTVSARSGRARTGTFRTPHGDVRTPMFMPVGTQGSVKGISPHELLDIGSQIILANTYHLMLRPGPDLVAVHGGLPGFTAYPGPFLTDSGGFQVMSLGHMRKITEEGATFKSHLDGSLILLTPERSIGVQESLGADIIMAFDECPPYPASHEYVRNSLERTLRWLERSLTAKTRSDQALFPIVQGGIYHDLRAVSLQATVAFDTPGFAIGGLAVGESKEEMYPAISQTAQGLPESKPRYLMGVGHPEDLVAAMALGVDLFDCVYPTRTGRFGYALTDDGRLNMNSSAPRQQLMPIDPECDCYACRHYTRAYLAHLLRAEEMLAPRMLSLHNLCYLHRLVERASLAIASGTYREWAEEWAARYFKGNVPAWFTGAIQNVD

SEQ ID NO: 54480 - protein, 393 aa, Deinococcus phoenicis
  misc_feature (1)..(393): tr|A0A016QLS8|A0A016QLS8_9DEIO Queuine tRNA-ribosyltran sferase OS=Deinococcus phoenicis OX=1476583 GN=tgt PE=3 SV=1
MFEFDIQYRDGRARVATFQTPRGQVQTPMFMPVGTQGTVKGISPQELLEIGSQMILGNTYHLMLRPGEKLVEAHGGLPGFTAYPGPFLTDSGGFQVMSLGHMRKITEEGVTFKSHLDGSAVNLTPERSIGVQEALGADVIMAFDECPPYPADREYIRRSLERTIRWLERCQAVKTRDDQALFAIVQGGVHQDLRQQSLDLTLPFGTPGFAIGGLAVGESKEEMYPAVAFTAARLPENKPRYLMGVGHPEDLVAGIALGVDMFDCVYPTRTGRFGYALTDDGRLNMNSSAPRTQLQPLDDECDCYACRHYTRAYLAHLIRAEEMLAPRMLSLHNLRYLHRLVERARGAIAQGTFQTWAEDWARRYFRQAIPEWFRMALTAGARAETVLTNSVSG

SEQ ID NO: 54481 - protein, 391 aa, Deinococcus proteolyticus
  misc_feature (1)..(391): tr|F0RNN0|F0RNN0_DEIPM Queuine tRNA-ribosyltransferase OS=Deinococcus proteolyticus (strain ATCC 35074 / DSM 2 0540 / JCM 6276 / NBRC 101906 / NCIMB 13154 / VKM Ac-19 39 / CCM 2703 / MRP) OX=693977 GN=tgt PE=3 SV=1
MTAATPFEFEVTHRNGRARLGTLQTPHGKVQTPLFMPVGTQGTVKGLSPQEVKDAGSQIILANTYHLMLRPGEQLVADHGGLQGFSGYQGPFLTDSGGFQVMSLGHLRKIREEGVTFKSHLDGRQIELTPERSVQVQEALGADIIMAFDECPPYPAEREYIQRSLQRTARWLERCLSAKTRPDQALFAIVQGGIHADLRDESLALTLPFDTPGFAIGGLAVGEPKEEMYPAVAYTAARLPEGKPRYLMGVGHPEDLVAGIALGVDMFDCVYPTRTGRFGYALTDNGRINLNASAARTQMAPIDAECDCYACCNFTQAYIAHLLRAEEMLGPRLLSLHNIRYLHRLVERMREAIAAGQLDTWATTWGATYFRGTLPAWFARALDEAKQPLPG

SEQ ID NO: 54482 - protein, 390 aa, Deinococcus puniceus
  misc_feature (1)..(390): tr|A0A172TCC4|A0A172TCC4_9DEIO Queuine tRNA-ribosyltran sferase OS=Deinococcus puniceus OX=1182568 GN=tgt PE=3 SV=1
MFEFDIQHRDGRARVAQFHTPRGTLTTPMFMPVGTQGTVKGISPQELIEIKSQMILGNTYHLMLRPGEELVRAHGGLPGFTAYPGPFLTDSGGFQVMSLGHMRKITEEGVTFKSHLDGSMVKLTPERSIEVQQALGADVIMAFDECPPFPAEREYITRSLERTIRWLDRCLSVQNNDHQALFAIVQGGIHEDLRQHSLDLTLPFNTLGFAIGGLAVGESKAEMYPAVAFTAARLPENKPRYLMGVGHPEDLVAGIALGVDMFDCVYPTRTGRFGYALTDDGRLNMNSSAPRRQLEPIDADCDCYACRHYTRAYLAHLVRAEELLAPRMLSLHNLRYLHRLVERARDAIAVGEFGQWATTWAERYFKGQIPDWFADTLQQEPSAGQPPAMR

SEQ ID NO: 54483 - protein, 394 aa, Deinococcus radiodurans
  misc_feature (1)..(394): sp|Q9RRB5|TGT_DEIRA Queuine tRNA-ribosyltransferase OS= Deinococcus radiodurans (strain ATCC 13939 / DSM 20539 / JCM 16871 / LMG 4051 / NBRC 15346 / NCIMB 9279 / R1 / VKM B-1422) OX=243230 GN=tgt PE=3 SV=1
MNQCGTITAVFEFEIKQRDGRARTATFQTPRGAVTTPMFMPVGTQGTVKGISPQELLEIGSQMILANTYHLMLRPGEQLVKAHGGLPGFTAYPGPFLTDSGGFQVMSLGHMRKISEEGVVFKNHLDGSRVELTPERSIQVQEALGADVIMAFDECPPYPAERPYIEASLDRTVRWLERCHAVKTKDDQALFAIVQGGVHEDLRLKSLEATLPFATPGFAVGGLAVGESKEEMYPAVAFTAGRLPENKPRYLMGVGHPEDLVAGVALGIDMFDCVYPTRTGRFGYALTDDGRLNLNSSAPRTQLQPIDAECDCYACRHYTRAYLAHLLRAEEMLAPRMLSLHNLRYLHRLVERMRVAINGQQFHPWAADWSERYFHGNVPGWFTSAFERSTQSEI

SEQ ID NO: 54484 - protein, 394 aa, Deinococcus radiodurans; identical to SEQ ID NO: 54483
  misc_feature (1)..(394): tr|A0A5C1MMW5|A0A5C1MMW5_DEIRD Queuine tRNA-ribosyltran sferase OS=Deinococcus radiodurans OX=1299 GN=tgt PE=3 SV=1

SEQ ID NO: 54485 - protein, 399 aa, Deinococcus radiophilus
  misc_feature (1)..(399): tr|A0A3S0RD35|A0A3S0RD35_9DEIO Queuine tRNA-ribosyltran sferase OS=Deinococcus radiophilus OX=32062 GN=tgt PE=3 SV=1
MSSELSFDFEVQQRDGRARLGTLQTPHGEVQTPLFMPVGTQGTVKGLSPAEIEEVGSQIILANTYHLMLRPGEQLVAQHGGLQGFSGYPGPFLTDSGGFQVMSLGHLRKISEEGVIFKSHLDGSMIELTPERSIQVQQALGADIIMAFDECPPYPAERDYIRSSLQRTARWLERCLAVKDKDDQALFAIVQGGVHPDLRDESLALTLPFDTPGYAIGGLAVGEPKEEMFPAVAYTAERLPEHKPRYLMGVGHPEDLVAGIALGVDMFDCVYPTRTGRFGYALTDRGRLNLNSSGARTRLEPIDPDCDCVACRTFTQAYIAHLLRAEEMLGPRLLSIHNLRYLHRLVERMREAIAVGTLYDWAMAWGQTYFGSKADGVVPEWFTEALETGRQTPTGTPHH

SEQ ID NO: 54486 - protein, 417 aa, Deinococcus radiopugnans
  misc_feature (1)..(417): tr|A0A5C4Y3S4|A0A5C4Y3S4_9DEIO Queuine tRNA-ribosyltran sferase OS=Deinococcus radiopugnans ATCC 19172 OX=58539 8 GN=tgt PE=3 SV=1
MRSKTSWFQSQAGIAGRRMRHNTCMFEFQVQYQDGRARVASFTTPHGSVTTPMFMPVGTQGTVKGISPQELLDIGSQMILGNTYHLMLRPGEALVAAHGGLPGFTAYPGPFLTDSGGFQVMSLGHLRKISEQGVIFKSHLDGSLVELTPERSIEVQQELGADVIMAFDECPPFPAEREYITQSLERTVRWLERCLAFKSREDQALFAIVQGGIHPDLRQQSLDLTLPFQTPGFAIGGLAVGESKAEMYPAVEFTTARLPADKPRYLMGVGHPEDLVAGIALGVDMFDCVYPTRTGRFGYALTDDGRLNLNSSAPRRDLRPIDDDCDCYACRHYTRAYLAHLVRAEELLAPRMLSLHNLRYLHRLVERARAAIATQTFDTWARAWGRQYFGGELPAWFAASLDASGREATGVPQPSPK

SEQ ID NO: 54487 - protein, 354 aa, Deinococcus reticulitermitis
  misc_feature (1)..(354): tr|A0A1H7BYV6|A0A1H7BYV6_9DEIO Queuine tRNA-ribosyltran sferase OS=Deinococcus reticulitermitis OX=856736 GN=tg t PE=3 SV=1
MFMPVGTQGTVKGLSPEELMGIGSQIVLANTYHLMLRPGEALVAAHGGLPGFTAYPGPFLTDSGGFQVMSLGHMRKISEEGVIFKSHIDGSRVELTPERSIQVQEALGADVIMAFDECPPYPAEPQYIRASLERTVRWLERCLSVKTRPDQALFAIVQGGVHEDLRRQSLQATLPFATPGFALGGLAVGESKDEMFPAVGFTAQHLPEDKPRYLMGVGHPEDLVAGIALGIDMFDCVYPTRTGRFGYALTDDGRLNMNSSAPRQQLLPIDPDCDCYACRHYTRAYLAHLLRAEEMLAPRMLSLHNLRYLHRLVERARTAIAEGHFFPWAREWGGRYFKGQRPTWFEQALTQGEG

SEQ ID NO: 54488 - protein, 390 aa, Deinococcus soli
  misc_feature (1)..(390): tr|A0A0F7JMQ8|A0A0F7JMQ8_9DEIO Queuine tRNA-ribosyltran sferase OS=Deinococcus soli Cha et al. 2016 OX=1309411 GN=tgt PE=3 SV=1
MFEFDIQHRDGRARVAQFRTPRGTVTTPMFMPVGTQGTVKGISPQELTDIGSQMILGNTYHLMLRPGETLVAAHGGLPGFTAYPGPFLTDSGGFQVMSLGHMRKITEEGVVFKSHLDGSLVNLTPERSIQVQEALGADIIMAFDECPPYPAEREYILRSLERTERWLARCLNVKSRSEQALFAIVQGGVHEDLRERSLELTLPYDTPGFALGGLAVGEPKEEMYPAVAFTAGRLPEHKPRYLMGVGHPEDLVAGVALGVDMFDCVYPTRTGRFGYALTDEGRLNMNSSAPRTSMEPLDSGCDCYACRNYTRAYLAHLIRAEEMLGPRMLSLHNLRYLHRLMERARAAIQAGEFHAWASAWAARYFRQGVPQWFQIALETGQNQESQKSQS

SEQ ID NO: 54489 - protein, 393 aa, Deinococcus sp.
  misc_feature (1)..(393): tr|A0A2T3W5J7|A0A2T3W5J7_9DEIO Queuine tRNA-ribosyltran sferase OS=Deinococcus sp. OD32 OX=2136176 GN=tgt PE=3 SV=1
MFEFTIQARDGRARVAQFHTPRGTVTTPMFMPVGTQGTVKGISPQELLEIGSQMILGNTYHLMLRPGEALVAAHGGLPGFTAYPGPFLTDSGGFQVMSLGHLRKITEEGVTFKSHLDGSAVALTPERSIAVQEALGADIIMAFDECPPYPAEREYIQRSLERTERWLARCVQAKTRPEQALFAIVQGGVHHDLRQQSLELTLPHDTPGFALGGLAVGEPKEEMYPAVAYTAERLPDHKPRYLMGVGHPEDLVAGIALGVDMFDCVYPTRTGRFGYALTDDGRLNLNASAPRRQLTPLDDECDCYACRHYTRAYLAHLVKAEEMLGPRMLSLHNLRYLHRLVERARGAIQTGTFIAWAQTWSERYFKGAVPVWFQEALRQSGTGFHQTTRDEKK

SEQ ID NO: 54490 - protein, 395 aa, Deinococcus sp.
  misc_feature (1)..(395): tr|A0A553UUK8|A0A553UUK8_9DEIO Queuine tRNA-ribosyltran sferase OS=Deinococcus sp. H1 OX=2592048 GN=tgt PE=3 SV =1
MSDLSPFEFRIHSRDGRARTAHFATPHGTVQTPMFMPVGTQGSVKGISADELLEIKSQMILGNTYHLMLRPGAEMVAAHGGLPGFTAYPGPFLTDSGGFQVMSLGHMRKITEEGVVFKSHLDGSPIHLTPERSIEVQQLLGADVMMAFDECPPFPAEERYIKASLERTVRWLERCLTFKTRDDQALFAIVQGGIHPHLRQQSLDATLPFSTPGFAIGGLAVGESKEEMFLAVAFTAQRLPENKPRYLMGVGHPEDLVAGIALGVDMFDCVYPTRTGRFGYALTDDGRINMNSAAPRQQLIPIDADCDCYACTHHTRAYLAHLVKAEEMLAPRLLSLHNLRYLHRLVERARAAIEAGEFQAWATEWGERYFKRPSNADGSAQALPEWFARAVRGEG

SEQ ID NO: 54491 - protein, 393 aa, Deinococcus swuensis
  misc_feature (1)..(393): tr|A0A0A7KCM1|A0A0A7KCM1_9DEIO Queuine tRNA-ribosyltran sferase OS=Deinococcus swuensis OX=1182571 GN=tgt PE=3 SV=1
MFEFQVQYQDGRARVARFTTPHGTVTTPMFMPVGTQGTVKGISPQELLDIGSQMILGNTYHLMLRPGEALVAAHGGLPGFTAYPGPFLTDSGGFQVMSLGHLRKISEQGVIFKSHLDGSLVELTPERSIEVQQALGADVIMAFDECPPFPAEREYITQSLERTVRWLERCLAFKSREDQALFAIVQGGIHPDLRQQSLDLTLPFQTPGFAIGGLAVGESKAEMYPAVEFTTARLPADKPRYLMGVGHPEDLVAGIALGVDMFDCVYPTRTGRFGYALTDDGRLNLNSSAPRRELRPIDDDCDCYACRHYTRAYLAHLVRAEELLAPRMLSLHNLRYLHRLVERARAAIATQTFDTWARAWGRQYFGGELPAWFAASLDASGREATGVPQPSPK

SEQ ID NO: 54492 - protein, 389 aa, Deinococcus wulumuqiensis
  misc_feature (1)..(389): tr|A0A345IIJ1|A0A345IIJ1_9DEIO Queuine tRNA-ribosyltran sferase OS=Deinococcus wulumuqiensis OX=980427 GN=tgt P E=3 SV=1
MKVVFEFEVKQRDGRARTATFATPRGQVTTPMFMPVGTQGTVKGISPQELSDIGSQMVLANTYHLMLRPGEQLVEAHGGLPGFTAYPGPFLTDSGGFQVMSLGHLRKITEEGVVFKNHLDGSRVELTPERSIQVQEALGADVIMAFDECPPYPAERSYIQASLERTVRWLERCHTVKTREDQALFAIVQGGVHEDLRLQSLEATLPFATPGFAVGGLAVGESKEEMYPAVAFTASRLPENKPRYLMGVGHPEDLVAGIALGIDMFDCVYPTRTGRFGYALTDDGRLNLNSSAARTQLVPLDPECDCYACRHYTRAYLAHLLRAEEMLAPRMLSLHNLRYLHRLVERMREAITQQHFQAWAAEWSQRYFRGSVPEWFRQALQQSAHPETP

SEQ ID NO: 54493 - protein, 351 aa, Deinococcus yavapaiensis
  misc_feature (1)..(351): tr|A0A318RYX6|A0A318RYX6_9DEIO Queuine tRNA-ribosyltran sferase OS=Deinococcus yavapaiensis KR-236 OX=694435 GN =tgt PE=3 SV=1
MPVGTQGTVKGISPEELRDIGSQFILANTYHLLLRPGPEMVARHGGLPGFTGYPGPFLTDSGGFQVMSLGHMRQITEQGAVFKSHIDGNVVELPPERSIEVQEALGADVIMAFDECPPYPATEEYVSASLERTARWLERSLRAKTKSEQALFAIVQGGVFPHLRERSLALTLPFDTPGFAIGGLAVGEAKEDMYPVVSQVTNALPSGKPRYLMGVGHPEDLVASIALGVDMFDCVYPTRTGRFGYALTDDGRLNLNSSKPRGELIPLDADCDCYACRHFTRAYIGHLLKAEEMLGPRMLSLHNLRYLHRLVERARSAIERGGYTEWAFAWGERYFKGRIPSWFAAALDSSC

SEQ ID NO: 54494 - protein, 384 aa, Unknown
  misc_feature (1)..(384): tr|A0A3M2F426|A0A3M2F426_9DEIN Queuine tRNA-ribosyltran sferase OS=Deinococcus-Thermus bacterium OX=1913990 GN= tgt PE=3 SV=1
MFEFSITARSGRARAGLLTTPHGVVKTPLFMPVGTQGSVKGISPRELKEIGSQIVLANTYHLLLRPGPERVRALGGLHWFAAYDGPWLTDSGGFQVMSLGDLRKIDEQGVTFRSHLNGDLVVLTPERSIEAQEALGADIIMAFDECPPYPSSPDYLKASVGRTLRWLERSLKAKTRPDQALFAIAQGGVDLELRRTSVLATVAFDTPGFAIGGLAVGEPKEDMYPAVELSTRLLPDHKPRYLMGVGHPEDLVAAVALGVDMFDCVYPTRTGRFGYALVPEGRLNLKLSRYLDDPRPIDPACDCYACTHYSRAYLSHLVRAEEILALRMLSLHNLRYLHRLMEAAWEAIQSRDYGAFAREFAGRRFREGIPPWFTLALREGGHWG

SEQ ID NO: 54495 - protein, 390 aa, Delftia acidovorans
  misc_feature (1)..(390): sp|A9BRD7|TGT_DELAS Queuine tRNA-ribosyltransferase OS= Delftia acidovorans (strain DSM 14801 / SPH-1) OX=39857 8 GN=tgt PE=3 SV=1
MLQFDLLKTDPSSHARRGQLTLNHGVVQTPIFMPVGTYGTVKGVMPRSLQEMGAQIILGNTFHLWMRPGLDIMQSFGGLHGFEKWDKPILTDSGGFQVWSLGAMRKITEEGVHFASPVNGDKLFMSPEVSMQIQTVLNSDIVMQLDECTPYETNGHKTTEAEARKSMEMSRRWAKRSSDEFQRLGNPNALFGIVQGGMYENLREESLQALVEMDFPGYAVGGVSVGEPKDEMLAIMAHTPHRLPAHKPRYLMGVGTPEDLVQGVADGVDMFDCVMPTRNARNGTIFTRYGDLKIRNARHKTDHQPLDPSCTCHACAGTSGVSWEQGGRDGFSRAYLHHLDRCGEMLGPMLTTIHNLHYYLNLMQEVRNALEAGNFTEMRARFKAERARGV

SEQ ID NO: 54496 - protein, 390 aa, Delftia acidovorans
  misc_feature (1)..(390): tr|A0A2W5IE07|A0A2W5IE07_DELAC Queuine tRNA-ribosyltran sferase OS=Delftia acidovorans OX=80866 GN=tgt PE=3 SV= 1
MLQFDLLKTDPSSHARRGQLTLNHGVVQTPIFMPVGTYGTVKGVMPRSLQEMGAQIILGNTFHLWMRPGLDIMQSFGGLHGFEKWDKPILTDSGGFQVWSLGAMRKITEEGVHFASPVNGDKLFMSPEVSMQIQTILNSDIVMQLDECTPYETNGHKTTEAEARKSMEMSRRWAKRSSDEFQRLGNPNALFGIVQGGMYENLREESLQALVEMDFPGYAVGGVSVGEPKDEMLAIMAHTPHRLPAHKPRYLMGVGTPEDLVQGVADGVDMFDCVMPTRNARNGTIFTRYGDLKIRNARHKTDHQPLDPSCTCHACAGASGVSWEQGGRDGFSRAYLHHLDRCGEMLGPMLTTIHNLHYYLNLMQEVRNALEAGNFTEMRARFKAERARGV

SEQ ID NO: 54497 - protein, 390 aa, Delftia lacustris; identical to SEQ ID NO: 54496
  misc_feature (1)..(390): tr|A0A1H3Q1S9|A0A1H3Q1S9_9BURK Queuine tRNA-ribosyltran sferase OS=Delftia lacustris OX=558537 GN=tgt PE=3 SV=1

SEQ ID NO: 54498 - protein, 390 aa, Delftia sp.; identical to SEQ ID NO: 54495
  misc_feature (1)..(390): tr|A0A1C7L770|A0A1C7L770_9BURK Queuine tRNA-ribosyltran sferase OS=Delftia sp. JD2 OX=469553 GN=tgt PE=3 SV=1

SEQ ID NO: 54499 - protein, 390 aa, Delftia sp.; identical to SEQ ID NO: 54495
  misc_feature (1)..(390): tr|A0A081J2Y0|A0A081J2Y0_9BURK Queuine tRNA-ribosyltran sferase OS=Delftia sp. 670 OX=1537702 GN=tgt PE=3 SV=1

SEQ ID NO: 54500 - protein, 390 aa, Delftia tsuruhatensis; identical to SEQ ID NO: 54496
  misc_feature (1)..(390): tr|A0A072T2G5|A0A072T2G5_9BURK Queuine tRNA-ribosyltran sferase OS=Delftia tsuruhatensis OX=180282 GN=tgt PE=3 SV=1

SEQ ID NO: 54501 - protein, 384 aa, Unknown
  misc_feature (1)..(384): tr|A0A1V4MP45|A0A1V4MP45_9DELT Queuine tRNA-ribosyltran sferase OS=delta proteobacterium MLS_D OX=1775673 GN=tg t PE=3 SV=1
MQSTVDGAAPFHFHVVAADHGTKARVGLIQTPHGAVETPVFMPVGTRGTVKGVTPEMVRDAGARIILGNTYHLYLRPGHELIGRLGGLHRFMNWPGPILTDSGGFQIYSLGKLRKLTEEGYAFQSHIDGSSHVMTPEHCINVQETLGSDIMMCLDECTSYPADRSTVKSSLDLTLRWAKLCASVHRSPGRALFGISQGGVYSDLRKQGIEALGEIGFDGYALGGLSVGEPKKLLYDTVSYAAPLLPPDKPRYLMGVGTPEDILECVAQGIDMFDCVIPTRNARNGMLFTKRGKLVIKNARYRDDGNPLDDQCGCYTCRNYSRAYLRHLFIAREILAIVLNTVHNITFYMNLMHGIREAVRGGYFDSFRKTFLETYRANDEEDAE

SEQ ID NO: 54502 - protein, 373 aa, Unknown
  misc_feature (1)..(373): tr|Q1NY98|Q1NY98_9DELT Queuine tRNA-ribosyltransferase OS=delta proteobacterium MLMS-1 OX=262489 GN=tgt PE=3 S V=1
MPDPSSSSPFTLLATSSQCAARRGELRTLHGTIQTPVFMPVGTQATVKGVTPEDLRGLGAQIILGNTYHLFLRPGHELIRKLGGLHNFMHWDGPILTDSGGFQIFSLKELAKISEEGAAFKSHIDGSSLFLSPESAVAVQEALGADIIMNLDTCIPYPADYAEAEAATALTSRWAARCRAAKEDDGRLLFGIIQGGMYHDLRHRSLAELQEIGFDGYAIGGLSVGEPQELMYEICQATAAGMPVDQARYLMGVGTPRNLVEAVYRGIDMFDCVMPTRNARNGMLFTSTGRLVIKNARYREDSRPPDEACDCYTCRHYSRAYLRHLYQARELLASHLLTVHNLRYYTALMERMRRALEADRFLEFYREFINLHP

SEQ ID NO: 54503 - protein, 389 aa, Deltaproteobacteria bacterium
  misc_feature (1)..(389): tr|A0A3B8YWI7|A0A3B8YWI7_9DELT Queuine tRNA-ribosyltran sferase OS=Deltaproteobacteria bacterium OX=2026735 GN= tgt PE=3 SV=1
MNETIATAGEGSHSPSFQLRARDPYSRARRGTLMTAHGPVQTPAFMPVGTYGAVKGVAPWELRDLGAELILSNAYHLAMRPGADAIGAMGGLHQFMGWKRAILTDSGGFQVFSLKGMRKVTDEGVLFQSHIDGSRRFFSPEDVVSNQEKLGVDIAMILDECPPAGAPPEDVARALRRTTDWARRSREAHSRADQMQFGIVQGGLDPAMRAQSADELQGIGFDGYAVGGLSVGEGRAETLAVGSYTVNLLPEEKPRYLMGVGTPEELVRFVAAGFDMFDCVMPSRNARNGMAFTSEGRVVIKNAIHRDSLVPLDPMCGCTTCANFSRAYLRHLFLNGEMLSARLLTNHNLYFYVNSMKRLRSAIENGTFRAEAASMGVDLDQIEDEEKRQ

SEQ ID NO: 54504 - protein, 321 aa, Deltaproteobacteria bacterium
  misc_feature (1)..(321): tr|A0A2N2HUB8|A0A2N2HUB8_9DELT Queuine tRNA-ribosyltran sferase (Fragment) OS=Deltaproteobacteria bacterium HGW -Deltaproteobacteria-20 OX=2013748 GN=CVU63_17010 PE=3 SV=1
MTALPTKGYSFHLEACDGAARAGVLETPHGRVLTPTFMPVGTQGSVKSLAPGEVAATGARIVLGNTYHLWIRPGPEVVAELGGLHRFSRWPHAMLTDSGGFQAFSLTNLVKLSEDGFSFRSHLDGARMHLSPEEAMRVQGLLGADIAMQLDVCPPGNADPALVRAAMDRTSRWAERCLRARREDQAVFGIVQGGTDVALRREHMKAIASLPFDGLALGGFSVGEPIEKMHAALAEVGPELDPSRPHYLMGVGTPLDLVHGVAAGVDMFDCVMPTRNARNGQALLRHGRIVIKNAKYRRDPRPLDEACGCPCCAGGYSRAYL

SEQ ID NO: 54505 - protein, 370 aa, Dendrosporobacter quercicolus
  misc_feature (1)..(370): tr|A0A1G9KP52|A0A1G9KP52_9FIRM Queuine tRNA-ribosyltran sferase OS=Dendrosporobacter quercicolus OX=146817 GN=t gt PE=3 SV=1
MAVTYELIKRCPQTGARAGRLHTPHGVFDTPMFMPVGTQATVKAMSPDELKAMGAGIILSNTYHLYLRPGADLVAEAGGLHRFMNWDRGILTDSGGFQVFSLGPLRKITEDGVNFRSHIDGSKHFLSPEKATEIQMALGADIIMAFDECVPYPAEHDYARLSTERTTRWAERCKQAHTRKDQALFGIVQGGMYKDLRSQSVRDLIALDFPGYAVGGLSVGEPKPLMYELLEHTAPQLPENKPRYLMGVGTPDCLVEGVMHGIDMFDCVFPTRVARNGTAMTSRGRLVVKNAEFARDFTPVDTECGCYTCRNFSRAYVRHLLKTEEIFGLRLTTIHNLHFLLDFMKKMRQAIIENRFVAFREEFLANYRLS

SEQ ID NO: 54506 - protein, 370 aa, Denitratisoma sp.
  misc_feature (1)..(370): tr|A0A518UD77|A0A518UD77_9PROT Queuine tRNA-ribosyltran sferase OS=Denitratisoma sp. DHT3 OX=1981880 GN=tgt PE= 3 SV=1
MRFDLLAHAGAARRGRLTLAHGVVETPVFMPVGTYGTVKAMAPNELEEIGARIVLGNTFHLWLRPGLDIIRAHGGLHRFMGWERPILTDSGGFQVFSLGDLRKITEEGVKFQSPINGDRLFMRPEDSMQIQHVLNSDVVMIFDECTPYPATERQAGDSMRLSLRWARRSRDEHDRLGNANALFGIVQGGMYEPLRDESLAGLTEIGFDGYAIGGLSVGEPKEDFARILAHTAPRLPRHKPRYLMGVGTPEDIVYAVSQGIDMFDCVMPTRNARNGWLFTRWGDVKIKNASHKSDARPLDETCGCYTCRHFTRAYLHHLHRIGEILGARLNTIHNLFYYQTLMAELRLAIESGDLAGTIAEFHRNRARGPL

SEQ ID NO: 54507 - protein, 382 aa, Denitrobacterium detoxificans
  misc_feature (1)..(382): tr|A0A172RW89|A0A172RW89_9ACTN Queuine tRNA-ribosyltran sferase OS=Denitrobacterium detoxificans OX=79604 GN=tg t PE=3 SV=1
MALFDVTIEARSGNARALTFETAHGTVRTPMFMPVGTHATVKGITVDVLHELKSQVVLANTYHLYMRPGVEIIEEAGGVQKFMNYDGPMLTDSGGFQLFSLNHMMKTDNDGVNFKALDYDGSKHRWTPDINMDIQQRIGADIAMQLDQCIGYPAEKHDVAASTKLSWEWAERCLMAHTRPDQGLFGIEQGGMHMDLRLESAKRLMEAEERAKAAGMRGFAGFGIGGYSVGEDHEVMFETLGEATRALPEDRPRYLMGVGNPTTLVRAVREGVDMFDCVLPTRTGRMGTAFSSQGRMNLRNAKYAHDFTALDHECDCPVCRNYSRAYLRHLVKQNEMLGGMLLSEHNLYFLIHLMEKAREAVLADAYEEFYEAWMASAGANDY

SEQ ID NO: 54508 - protein, 371 aa, Denitromonas halophilus
  misc_feature (1)..(371): tr|A0A557S4P1|A0A557S4P1_9RHOO Queuine tRNA-ribosyltran sferase OS=Denitromonas halophilus OX=1629404 GN=tgt PE =3 SV=1
MNFELLATDGAARRGRLTLNHGVVETPVFMPVGTYGTVKAMTPQALNDIGAQICLGNTFHLWLRPGTEVLDTFGGLHGFMGWNKPILTDSGGFQVFSLGALRKITEEGVKFASPIDGSKLFLTPEESMRIQRSLNSDIVMIFDECTPYPATLDEAAKSMQLSMRWAKRSRDAFDAQENPNALFGIVQGGMHETLRDDSLAGLMDIGFHGFAIGGLSVGEPKEDMQRILAHTAPRLPQDKPRYLMGVGTPEDLVESVAAGIDMFDCVMPTRNARNGWLFTRFGDLKIKNAKHRNDTRPLDPSCSCYTCQNFSRAYLHHLHRTGEILGAMLNTTHNLHYYQALMAQMRKALEAGSFAEFVRRFQDERGRGAEV

SEQ ID NO: 54509 - protein, 371 aa, Denitromonas halophilus
  misc_feature (1)..(371): tr|A0A557QYA1|A0A557QYA1_9RHOO Queuine tRNA-ribosyltran sferase OS=Denitromonas halophilus OX=1629404 GN=tgt PE =3 SV=1
MNFELLATDGAARRGRMTLNHGVVETPVFMPVGTYGTVKAMTPQALNDIGAQICLGNTFHLWLRPGTEVLDTFGGLHGFMGWDKPILTDSGGFQVFSLGALRKITEEGVKFASPIDGSKLFLTPEESMRIQRSLNSDIVMIFDECTPYPATLDEAAKSMQLSLRWAKRSRDAFDTQENPNALFGIVQGGMHETLRDDSLAGLMDIGFHGFAIGGLSVGEPKEDMQRILAHTAPRLPQDKPRYLMGVGTPEDLVESVAAGIDMFDCVMPTRNARNGWLFTRFGDLKIKNAKHRNDTRPLDPTCSCYTCQNFSRAYLHHLHRTGEILGAMLNTTHNLHYYQALMAQMRKALEAGSFAEFVRRFQDERGRGAEV

SEQ ID NO: 54510 - protein, 372 aa, Denitrovibrio acetiphilus
  misc_feature (1)..(372): tr|D4H485|D4H485_DENA2 Queuine tRNA-ribosyltransferase OS=Denitrovibrio acetiphilus (strain DSM 12809 / N2460) OX=522772 GN=tgt PE=3 SV=1
MDKFNFTLEETDGRARTGLIETPHGNIETPIFMPVGTVGSVKTISPAELTDDIGAQIILGNTYHLHLRPGDEVVAKHGGLAKFNSWNKPTLTDSGGFQVFSLAEMNKITDEGVHFRSHLDGSRLFISPEESIRIQQNIGADIMMAFDECVSLPSERQYVVEAMERTYRWAQRSFDARTRDDQALFGIIQGGVEKDLRKISAEQITSIPFDGFAIGGLSVGEEIPVMYDICSHTTEFMPKDKPRYLMGVGTPQDLLHGISYGVDMFDCVMPTRNARNGLLFTSRGKLHIKRKEWELSDAPVDANCNCYTCRNFSRGYLRHLWKAGEYLGMRLNSLHNLHFYLSLVKRARNAIKLGVYNNFMKETLEEMSVGGE

SEQ ID NO: 54511 - protein, 370 aa, Denitrovibrio sp.
  misc_feature (1)..(370): tr|A0A2N6DI56|A0A2N6DI56_9BACT Queuine tRNA-ribosyltran sferase OS=Denitrovibrio sp. OX=2053308 GN=tgt PE=3 SV= 1
MDFKFTLEKTDGQARAGLMETPHGKIETPIFMPVGTVGSVKTISPAELNDLGAQIILGNTYHLHLRPGDDVVAKHGGLAKFNSWNRPTLTDSGGFQVFSLAKMNKITDEGVHFRSHLDGSKLFLNPESSIQIQQNIGADIMMAFDECVSLPAEHKYVADSVERTFRWAKRSYDARTNEKQALFGIIQGGADHELRKLSAQQITSIPFDGYAIGGLSVGEEIPVMYDICSHTTQFMPNDKPRYLMGVGTPQDLLHCISYGVDMFDCVMPTRNARNGLLFTSKGKLHIKRKEWQLSDEPIDAKCDCYTCKNFSRGYLRHLFKAGELLGMRLQSLHNLYFYLSLVKSARNAINLGVYNKYMNETLEEMSTGGE

SEQ ID NO: 54512 - protein, 373 aa, Denitrovibrio sp.
  misc_feature (1)..(373): tr|A0A2N6D780|A0A2N6D780_9BACT Queuine tRNA-ribosyltran sferase OS=Denitrovibrio sp. OX=2053308 GN=tgt PE=3 SV= 1
MSSKFKYTLEKTDGRARAGVIETPHGKIETPIFMPVGTAGSVKTISPKELDEDIGAQIILGNTYHLHIRPGDDVVAKHGGLAKFNAWNRPTLTDSGGYQVFSLAEMNKITEDGVHFRSHLDGRKLFLSPETSMEIQQNIGADIMMAFDECVSLPAERKYVEESVERTFRWAQRSYDAKTNDEQALFGIIQGGADKELRERSAGQITSIPFDGYAIGGLSVGEEIPVMYDITSHTTQFMPEDKPRYLMGVGTPQDLLNCISYGVDMFDCVMPTRNARNGLLFTSKGKLHIKRKEWQLSDDPVDSKCDCYTCKNFSRGYLRHLFKAGEYLGMRLNSLHNLHFYLSLVKNARNAINLGVYNTYMKETLEEMSSGGE

SEQ ID NO: 54513 - protein, 419 aa, Dermabacter hominis
  misc_feature (1)..(419): tr|A0A2I1LK70|A0A2I1LK70_9MICO Queuine tRNA-ribosyltran sferase OS=Dermabacter hominis OX=36740 GN=tgt PE=3 SV= 1
MSTSEKEGAGFDIAARHGEKARAGVIHTPHGDIHTPAFIPVGTKATVKSVLPESMAQLGAQAILANAYHLYLQPGHDLIDEAGGFGVFMNWDGPTYTDSGGFQVMSLGAGFQKVLSESFAGSDRASTPDGTDLATKKGKERLAHVDDDGVNFRSFIDGSEHRFTPEFSMQIQHSLGADIMFAFDELTTLMNSRGYQEKALERTRLWAERCIAEHKRLTEEREGKPYQMLWGVIQGAQYEDLRRKAARDLGAMTVDEWQFDGFGIGGALEKENLSTIVGWVTDELPEDKPRHLLGLSEMDDLFAGIAAGADTFDCVSPSRVARNSAVYTARGRVNLTGAKYRTQFAPIDDDCDCYTCTHYTAAYIHHLFKAKEMLSSTLCTIHNERFVVRLVQEIRAAILSGDFEALREERTGAYYGEYR

SEQ ID NO: 54514 - protein, 419 aa, Dermabacter hominis; identical to SEQ ID NO: 54513
  misc_feature (1)..(419): tr|A0A069T352|A0A069T352_9MICO Queuine tRNA-ribosyltran sferase OS=Dermabacter hominis 1368 OX=1450519 GN=tgt P E=3 SV=1

SEQ ID NO: 54515 - protein, 450 aa, Dermabacter sp.
  misc_feature (1)..(450): tr|S3Y7H6|S3Y7H6_9MICO Queuine tRNA-ribosyltransferase OS=Dermabacter sp. HFH0086 OX=1203568 GN=tgt PE=3 SV=1
MWNGTALYRVRAAVPPLAVSTAGAGSWENSGMSTSEKEGAGFDIAARHGEKARAGVIHTPHGDIHTPAFIPVGTKATVKSVLPESMAQLGAQAILANAYHLYLQPGHDLIDEAGGFGAFMNWDGPTYTDSGGFQVMSLGAGFQKVLSESFAGSDRASTPDGTDHATKIGKERLAHVDDDGVNFRSFIDGSEHRFTPEFSMQIQHSLGADIMFAFDELTTLMNSRGYQEKALERTRLWAERCIAEHKRLTEEREGKPYQMLWGVIQGAQYEDLRRKAARDLGAMTVDEWQFDGFGIGGALEKENLSTIVGWVTDELPEEKPRHLLGLSEMDDLFAGIAAGADTFDCVSPSRVARNSAVYTARGRVNLTGAKYRTQFAPIDDNCDCYTCTHYTAAYIHHLFKAKEMLSSTLCTIHNERFVVRLVEEIRAAILSGDFEALREERTGAYYGEYR

SEQ ID NO: 54516 - protein, 419 aa, Dermabacter sp.
  misc_feature (1)..(419): tr|A0A3S0U7Y1|A0A3S0U7Y1_9MICO Queuine tRNA-ribosyltran sferase OS=Dermabacter sp. HSID17554 OX=2419511 GN=tgt PE=3 SV=1
MSTSEKEGAGFDIAAHHGDKARAGVIHTPHGDIQTPAFIPVGTKATVKSVLPESMKELGAQAILANAYHLYLQPGHELVDEAGGFGAFMNWSGPTYTDSGGFQVMSLGAGFQKVLSESFAGSDRASTPDGTDLATKKGKERLAHVDDDGVNFRSFIDGSEHRFTPEFSMQIQHSLGADVMFAFDELTTLMNSRGYQEKALERTRLWAERCIAEHQRLTKAREGKPYQMLWGVIQGAQYEDLRRKASRDLGAMTVEGWQFDGFGIGGALEKENLSTIVGWVTDELPDEKPRHLLGLSEMDDLFAGIAAGADTFDCVSPSRVARNSAVYTARGRVNLTGAKYRTQFAPIDESCDCYTCTHYTAAYIHHLFKAKEMLSSTLCTIHNERFVVRLVEEIRAAILSGDFEALREERTGAYYGEYR

SEQ ID NO: 54517 - protein, 419 aa, Dermabacter vaginalis
  misc_feature (1)..(419): tr|A0A1B0ZKB6|A0A1B0ZKB6_9MICO Queuine tRNA-ribosyltran sferase OS=Dermabacter vaginalis OX=1630135 GN=tgt PE=3 SV=1
MSTSEKEGAGFDIAARHGEKARAGVIHTPHGDIQTPAFIPVGTKATVKSVLPESMKELGAQAILANAYHLYLQPGHELVDEAGGFGAFMNWSGPTYTDSGGFQVMSLGAGFQKVLSESFAGSDRASTPDGTDLATKKGKERLAHVDDDGVNFRSFIDGSEHRFTPEFSMQIQHSLGADVMFAFDELTTLMNSRGYQEKALERTRLWAERCIAEHQRLTKAREGKPYQMLWGVIQGAQYEDLRRKASRDLGAMTVEGWQFDGFGIGGALEKENLSTIVGWVTDELPDEKPRHLLGLSEMDDLFAGIAAGADTFDCVSPSRVARNSAVYTARGRVNLTGAKYRTQFAPIDESCDCYTCTHYTAAYIHHLFKAKEMLSSTLCTIHNERFVVRLVEEIRAAILSGDFEALREERTGAYYGEYR

SEQ ID NO: 54518 - protein, 381 aa, Desemzia incerta
  misc_feature (1)..(381): tr|A0A1I5W0Z4|A0A1I5W0Z4_9LACT Queuine tRNA-ribosyltran sferase OS=Desemzia incerta OX=82801 GN=tgt PE=3 SV=1
MSEPAIKYRLIKKDKRTGARLGEIITPHGTFPTPMFMPVGTLATVKSIAPEELEEMGASIILSNTYHLWLRPGEDIVEEAGGLHKFMNWDKGILTDSGGFQVFSLSDMRRIEEEGVHFRNHLNGSKMFLSPEKAINIQNKLGPDIMMSFDECPPFDESYDYVKKSVARTSRWAERGLKAHANPDRQGLFGIIQGAGFKDLREQSARDLVAMDFPGYSIGGLSVGEPKAEMNRVLEFTTPLIPENKPRYLMGVGTPDSFFDGVINGVDMFDCVLPTRIARNGTCMTHKGRLVVKNAKYERDFGPIDDQCNCYTCRNYSRAYIRHLFKSDETFGLRLTSYHNLYFLLEVMRNIRQAILDDNLLEYREAFMEEYGYNKPDAKNF

SEQ ID NO: 54519 - protein, 366 aa, Desertifilum sp.
  misc_feature (1)..(366): tr|A0A1E5QQQ7|A0A1E5QQQ7_9CYAN Queuine tRNA-ribosyltran sferase OS=Desertifilum sp. IPPAS B-1220 OX=1781255 GN= tgt PE=3 SV=1
MATFTFQTQACCSQTRARAGVFSTPHGLVETPRFMPVGTLATVKGVTPDQLKATGAQMVLANTYHLHLQPGESLVAKAGGLHQFMRWDGPMLTDSGGFQVFSLSQLRTITDKGVTFRSPRDGRMIEITPERSIQIQNQLGADVIMAFDECPPYPATREEVEAATQRTYRWLERCIQAHQRSDQALFGIVQGGVFIDLRQKAAKDLVELDLPGYAIGGVSVGEPGELIDEIVRETAPFLPADKPRYLMGVGTYQEMVRAIASGIDLFDCVIPTRLARHGAVFVRGDRWNIKNNCFREDLAPLDAECPCYTCQNFSRAYLGHLWRCRELLVYTLLSIHNITELIRFTQKIRESILADRFTEEFGHWLN

SEQ ID NO: 54520 - protein, 380 aa, Desmospora activa
  misc_feature (1)..(380): tr|A0A2T4Z8Y0|A0A2T4Z8Y0_9BACL Queuine tRNA-ribosyltran sferase OS=Desmospora activa DSM 45169 OX=1121389 GN=tg t PE=3 SV=1
MALRYELIKTCSQSQARLGRIHTPHGIIDTPVFMPVGTLATVKTVSPEELKELGSDIILANTYHLFLRPGHEIVQEAGGLHSFMNWDRAILTDSGGFQVFSLSKLRKITEEGVSFRSHLSGESLFISPEKAMEIQNALGADIIMAFDECPPYPAEREYVKESLERTTRWLHRCKQAHRRKEEQALFGIVQGGMYPDLRQESAKQITDVDLPGYAIGGLSVGEPKPLMYEALEETVPLLPPGKPRYLMGVGSPDALVEGVIRGVDMFDCVLPTRIARNGTTMTSQGRVVIRNAAYARDFGPLDPECDCYTCRHYSRAYLRHLIKSDETFGFRLTTIHNLHFLLTLMKRVRQAIQQDRLLDFRREFFESYYGTSEPDGTRNF

SEQ ID NO: 54521 - protein, 76 aa, Desmospora sp.
  misc_feature (1)..(76): tr|F5SAU8|F5SAU8_9BACL Queuine tRNA-ribosyltransferase OS=Desmospora sp. 8437 OX=997346 GN=tgt2 PE=4 SV=1
MNLFPERLKAGGETIIRGAEGANRGCTPVNLSGKRRPAGRSLESALRGHPRGKTRHVGLNSQVTGQGKTDRGIHSA

SEQ ID NO: 54522 - protein, 378 aa, Desmospora sp.
  misc_feature (1)..(378): tr|F5SAR8|F5SAR8_9BACL Queuine tRNA-ribosyltransferase OS=Desmospora sp. 8437 OX=997346 GN=tgt PE=3 SV=1
MALRYELIKTCKQSGARLGRLHTPHGTVDTPVFMPVGTLATVKTMSPEELTEMGSGIILSNTYHLFLRPGHDVVREAGGLHRFMNWDRAILTDSGGFQVFSLSDLREITEEGVSFRSHLNGEPLFLSPEKSMEIQNALGADIIMAFDECPPYLADREYVKNSMDRTHRWLQRCATAHRRKEEQALFGIIQGGMYRDLREESARQITSVDLPGYAIGGLSVGEPKEMMYDALEWTTPLMPKEKPRYLMGVGSPDALVEGVVRGVDMFDCVLPTRIARNGTTMTSRGRVVVRNAKYARDFSPLDPECDCYTCRNYSRAYLRHLIKAEETFGLRLTTYHNLHFLLKLMEKVRQAIREDRLLDFRAHFFEEYYGSTRPTRNF

SEQ ID NO: 54523 - protein, 374 aa, Desulfacinum hydrothermale
  misc_feature (1)..(374): tr|A0A1W1XA70|A0A1W1XA70_9DELT Queuine tRNA-ribosyltran sferase OS=Desulfacinum hydrothermale DSM 13146 OX=1121 390 GN=tgt PE=3 SV=1
MLVHFELICRDRESHARRGRFRTTHGVVETPVFMPVGTQATVKSLTPQEVEDLGARILLGNTYHLYLRPGAERIARLGGLHQFMGWKGAILTDSGGFQVFSLAKIRTIEEEGVSFQSHIDGSRHVITPEKSVEIQEALGSDIAMCFDECTPYPVTYAYAKASMERTVRWARRCLEAHGREDQALFGIVQGSTFLDLRRACLEQLAALDLPGYAIGSLSVGEPKEEMLAVLENVAPLLPADKPRYLMGVGTPEDLVEGVRCGVDMFDCVMPTRNARNGMLFTSWGSIQIKNARYADDPRPIEDGCGCYTCRHFSRAYLRHLFMARELLAYRLNTLHNLHYYLGLMEQIRHSLEAGAFAEWRRRFYANRDGGGTSD

SEQ ID NO: 54524 - protein, 372 aa, Desulfacinum infernum
  misc_feature (1)..(372): tr|A0A1M4VEX0|A0A1M4VEX0_9DELT Queuine tRNA-ribosyltran sferase OS=Desulfacinum infernum DSM 9756 OX=1121391 GN =tgt PE=3 SV=1
MHFEIICRDKEVAARRGRFRTSHGVVETPVFMPVGTQGTVKSLTPQELEELGARIILGNTYHLYLRPGAERIARLGGLHRFMGWRGSILTDSGGFQVFSLAKIRTIDEEGVAFQSHIDGSRHVITPEKSVQIQEALGSDIAMCFDECTPYPVTYEYAKASMERTVRWARRCLEAHRREDQALFGIVQGGTFLDLRRACLEELAALDLPGYAIGSLSVGEPKEEMLAVLEEVTPALPAGKPRYLMGVGTPEDLVEGVRCGVDMFDCVMPTRNARNGMLFTSWGSIQIKNARYADDPRPVEEGCGCTTCRNFSRAYLRHLFMARELLAYRLNTIHNLHYYLGLMAEMRESLEKGAFSQWRRRFYARRQETRQED

SEQ ID NO: 54525 - protein, 370 aa, Desulfallas geothermicus
  misc_feature (1)..(370): tr|A0A1I6EBV2|A0A1I6EBV2_9FIRM Queuine tRNA-ribosyltran sferase OS=Desulfallas geothermicus DSM 3669 OX=1121426 GN=tgt PE=3 SV=1
MAISFKVIKEDTESRARLGQLETPHGTVQTPVFMPVGTQASVKTMTPHEVSQVGGEMVLSNTYHLYLRPGHELVAEAGGLHRFMRWDGPILTDSGGFQVFSLGPLRRITDEGVTFRSHIDGSELFFSPEISMDIQMALGADVAMAFDECPPYPCSYEETRKATERTTSWARRCLKHHNRKDQALFGIIQGGVHRDLRLKSAAELSAMGFPGYGIGGLSVGEPKPLMYEVLDYLIPAMPGEKPRYLMGVGSPDCLLEGVARGVDMFDCVLPTRIARNGTVFTRDGKLVVRNAEYARDFSPLDPECDCYACRNFTRAYIRHLIKANEVLGIRLTTIHNLRFVLRLMEDIRTAIAGNHFSEMKTKFLRRFKTD

SEQ ID NO: 54526 - protein, 370 aa, Desulfallas gibsoniae
  misc_feature (1)..(370): tr|R4KF74|R4KF74_9FIRM Queuine tRNA-ribosyltransferase OS=Desulfallas gibsoniae DSM 7213 OX=767817 GN=tgt PE=3 SV=1
MAIGFTITKEDGRSRARRGTLITPHGTVQTPIFMPVGTQATVKTMTPEEVQDCGGALVLSNTYHLYLRPGHALVAEAGGLHKFMRWDGPILTDSGGFQVFSLGPLRKISDQGVTFRSHIDGSEHFFSPEKSMEIQMALGADVAMAFDECAPYSSSYEQTRAAMERTTRWAERCRMRHDRKDQALFGIIQGGMYRDLRLQSAAELAALDFPGHGIGGLSVGEPKPLMYEVLDYLVPAMPREKPRYLMGVGSPDCLLEGVFRGVDMFDCVLPTRIARNGTVFTRDGKLVVRNAEYARDFRPLDPECDCYTCRNFSRAYIRHLIKANEVLGIRLTTLHNLRFVLRLMENIRAAIDGDYFVAYKEDFLRRFKLD

SEQ ID NO: 54527 - protein, 371 aa, Desulfamplus magnetovallimortis
  misc_feature (1)..(371): tr|A0A1W1HAB1|A0A1W1HAB1_9DELT Queuine tRNA-ribosyltran sferase OS=Desulfamplus magnetovallimortis OX=1246637 G N=tgt PE=3 SV=1
MFEILTRCPETRARTGIINTAHGKIQTPIFMPVGTLASVKSVSVEELKNCGAQIILGNTYHLYLRPGCDVIDHMKGLHHFMNWDSPILTDSGGFQFFSLAKLAKFSDEGVDFQSHIDGSRHIFTPEKAVEIQSLLGSDIMMSLDWCIGHPADKGATMEALKKTTMWAERGLEFWRDNGKPNALFGIVQGGMYKELRSLSAKQLEDLDFPGYAIGGLSVGEPTEMMYEMADHTAPLLPYEKPKYVMGVGTPENLVELVGMGVDMFDCVMPSRNARNGQLFTSGGTLNISNAAFKMDEAPVDESCNCYTCRNYSRAYLRHLYKSRELLAYRLNTIHNLHYYLTLMANIRQAVAQGSFNLFKKSFYSRLECGLK

SEQ ID NO: 54528 - protein, 371 aa, Desulfarculus baarsii
  misc_feature (1)..(371): tr|E1QIL6|E1QIL6_DESB2 Queuine tRNA-ribosyltransferase OS=Desulfarculus baarsii (strain ATCC 33931 / DSM 2075 / VKM B-1802 / 2st14) OX=644282 GN=tgt PE=3 SV=1
MARLRYQQTARSGRARAGLLHTRRGAVRTPAFMPVGTQATVKTLMPEEVAQAGADMILANTYHLSLRPGAEEVAALGGLHRFMAWDGPILTDSGGFQVFSLAANRKLDESGVSFRSHLDGSAMSLGPERAVQAQELLGSDVMMVLDECPPPGADRAYIATALARDARWAARALAARSEGGGALMGIVQGGVYHDLRRRSAELLLELELDGYALGGLSVGEPKEIMMEVIERTVPLVSGAGPVYLMGVGDPADLVRAVGLGVDMFDCVLPTRTARTGALLTARGRMNIKNARYKDDPRPVEPDCQCPTCRRFSRAYLRHLYMAGELLAYRLNTLHNLHFVLGLMERLRQAIAQDRYEEFARGFLAELELGQQ

SEQ ID NO: 54529 - protein, 377 aa, Desulfarculus sp.
  misc_feature (1)..(377): tr|A0A3A6P470|A0A3A6P470_9DELT Queuine tRNA-ribosyltran sferase OS=Desulfarculus sp. OX=2093367 GN=tgt PE=3 SV= 1
MGRLSFVTTARSAGARCGLMQTRRGPVQTPVFMPVGTQASVKGLTPEEVAGLGAELVLANTYHLMLRPGCQVVAGLGGLHCFMGWQGPILTDSGGYQVFSLSGLRRLDEEGVSFRSHLDGELMRLTPEAVVAAQEELDSDLMMVLDECPPAGAARGYLEQALARDARWAARALAARSEKGGALLGIVQGGVYYDLRARSVESVCALDMDGFALGGLSVGEAKEEMMEVIARTAPLLPADKPVYLMGVGEPADLVRCVGLGVDMFDCVLPTRMARNGTLLTARGRLNLRNARYKDDPQPVEEACGCYTCRGYSRAYLRHLFMARELLSYRLNTIHNLYYVLQLMAGLRRAIVQDAYESFARGFFSCLEEGRGEEALPN

SEQ ID NO: 54530 - protein, 391 aa, Desulfatibacillum aliphaticivorans
  misc_feature (1)..(391): tr|B8FHI8|B8FHI8_DESAL Queuine tRNA-ribosyltransferase OS=Desulfatibacillum aliphaticivorans OX=218208 GN=tgt PE=3 SV=1
MLCPLQIKFEEVEERYVEPFHFTLDAVCEKTGARAGTLTTPHGVIKTPVFMPVGTLGTVKSLAPEDLTGLNAQIILGNTYHLYLRPGCDVIDEFGGLHQFMNWDRPLLTDSGGFQIFSLAKLQKMTEEGAHFQSHIDGSRHLLTPEKAMEIQVCLGSDIAMALDECIPYPASHEQALESLGLTTRWGKRSKEAWEMTKRPGHALFGIVQGGMYGDLRKQSAEELRKIGFDGYALGGLSVGEPRDLMLEMAGTSLPYLPQDRPRYIMGVGKPQDLVDMVNLGADMFDCVLPTRNARNGQLFTSKGPLNICNAQHRTSTLPVDEECQCYTCRNYSRAYLRHLYMSRELLSYRLNTIHNIAFFISLMEKAREAVLANDYAAFYKDFFQKIETGA

SEQ ID NO: 54531 - protein, 391 aa, Desulfatibacillum alkenivorans
  misc_feature (1)..(391): tr|A0A1M6PEI2|A0A1M6PEI2_9DELT Queuine tRNA-ribosyltran sferase OS=Desulfatibacillum alkenivorans DSM 16219 OX= 1121393 GN=tgt PE=3 SV=1
MLCPFQIKFEEVEERYVEPFHFTLDAVCEKTGARAGTLTTPHGIIKTPVFMPVGTLGTVKSLAPEDLAGLNAQIILGNTYHLYLRPGCDVIDEFGGLHQFMNWDRPLLTDSGGFQIFSLAKLQKMTEEGAHFQSHIDGSRHLLTPEKAMEIQVCLGSDIAMALDECIPYPASHEQALESLGLTTRWGKRSKEAWEQTKRPGHALFGIVQGGMYGDLRKQSAEELREIGFDGYALGGLSVGEPRDLMLEMAGISLPYLPQDRPRYIMGVGKPQDLVDMVNLGADMFDCVLPTRNARNGQLFTSRGPLNICNAQHRTSSLPVDEECQCYTCRNYSRAYLRHLYMSRELLSYRLNTIHNIAFFISLMEKAREAVLANSYEAFYKDFFQKIETGA

SEQ ID NO: 54532 - protein, 377 aa, Desulfatitalea sp.
  misc_feature (1)..(377): tr|A0A0F2R3W6|A0A0F2R3W6_9DELT Queuine tRNA-ribosyltran sferase OS=Desulfatitalea sp. BRH_c12 OX=1629708 GN=tgt PE=3 SV=1
MTFLLENQSTSAPRAGLLQTPHGTIHTPIFMPVGTQATVKALSPEELVGLGAQIILGNTYHLYLRPGTEVIGRFGGLHGFMHWHGPVLTDSGGFQIFSLAGLSKLSEEGYAFQSHLDGGARHMLTPERAIEVQLALNSDIMMCLDQCIAYPAGHDEALRALALTTRWARRCKARWQAEPECPNSLFGIVQGGMFKDLRSRSAEEIVAIGFPGYAVGGLSVGEPKALMLEMAAHTLKLLPTDAPRYVMGVGTPSDLVEMIGLGADMFDCVMPTRNARNGQLFTSQGILNIANARHRDDTAPIDAACGCYACRHYSRAYVRHLYQAKEILAHRLTTIHNLHFYLNLVKEARMAILEGDFERFRRDFRSQQQNGAENDCQ

SEQ ID NO: 54533 - protein, 375 aa, Desulfitibacter sp.
  misc_feature (1)..(375): tr|A0A101V9T0|A0A101V9T0_9FIRM Queuine tRNA-ribosyltran sferase OS=Desulfitibacter sp. BRH_c19 OX=1734395 GN=tg t PE=3 SV=1
MTVSFELLYDSQKTKARLGRVTTAHGVVETPVFMPVGTQATVKTLTPHELNELDAEIILSNTYHLYLRPGHKLIEEAGGLHSFMSWDKPILTDSGGFQVFSLADLKDIKEEGVTFRSHIDGSKHFFTPEKAMEVQMSLGSDIAMAFDICAPYPCSYEHALEASDRTTRWAQRCIDYHNHPYQSIFGIVQGSMFPDLRKKSVSEITSFDFPGFGIGGLSVGEPKEIMYDMLDHTIDEMPKDKPRYLMGVGSPDCLLEGVKRGVDMFDCVLPTRIARNGTVMTSVGKVVVRNALYAKDWEKLDPNCNCYTCSNYSRAYIRHLLKANETLGIRLTSIHNLHFLINLMKDIRKAIKEERLENMIKNFYESYENGNKTGI

SEQ ID NO: 54534 - protein, 372 aa, Desulfitobacterium chlororespirans
  misc_feature (1)..(372): tr|A0A1M7U7K9|A0A1M7U7K9_9FIRM Queuine tRNA-ribosyltran sferase OS=Desulfitobacterium chlororespirans DSM 11544 OX=1121395 GN=tgt PE=3 SV=1
MAVRIEILKEDNRTRARLGKLHTPHGVIETPVFMPVGTQATVKTMTPEELKDLGAGIILSNTYHLFLRPGHELIREAGGLHAFMHWDGAILTDSGGFQVFSLGDLRKITEEGVEFRSHLDGSKKFLSPEIATQVQMALGSDIVMAFDECTPYPATREYAKASLERTTRWLKRCQETLTTTDRQALFGIVQGSMYEDLRKQSAAEITELDLPGYAVGGLSVGEPKELMYEVLDYTVPMLPKDKPRYLMGVGSPDALIEGVMRGIDMFDCVLPTRIARNGTALTRYGKLVVRNAESAHDFSPIDPTCDCYTCKNYSRAYLRHLIKADEILGLRLMTIHNLRFLTNLMSEIRAAIKENRLPEYREKFFYEYGYLK

SEQ ID NO: 54535 - protein, 372 aa, Desulfitobacterium dehalogenans
  misc_feature (1)..(372): tr|I4ABK1|I4ABK1_DESDJ Queuine tRNA-ribosyltransferase OS=Desulfitobacterium dehalogenans (strain ATCC 51507 / DSM 9161 / JW/IU-DC1) OX=756499 GN=tgt PE=3 SV=1
MAVRIEILKEDSRTRARLGKLHTPHGVIETPVFMPVGTQATVKTMTPEELKDLGAGIILSNTYHLFLRPGHELIREAGGLHSFMHWDGAILTDSGGFQVFSLGDLRKITEEGVEFRSHLDGSKKFLSPEIATQVQMALGSDIVMAFDECTPYPATREYAKASLERTTRWLKRCQETLTTTDRQALFGIVQGSMYEDLRKQSAAEITELDLPGYAVGGLSVGEPKELMYEVLDYTVPLLPKDKPRYLMGVGSPDALIEGVMRGIDMFDCVLPTRIARNGTALTRYGKLVVRNAESAHDFSPIDPTCDCYTCKNYSRAYLRHLIKADEILGLRLMTIHNLRFLTNLMAEIRTAIREDRLPEYREKFFYEYGYLK

SEQ ID NO: 54536 - protein, 372 aa, Desulfitobacterium dichloroeliminans
  misc_feature (1)..(372): tr|L0FA87|L0FA87_DESDL Queuine tRNA-ribosyltransferase OS=Desulfitobacterium dichloroeliminans (strain LMG P-2 1439 / DCA1) OX=871963 GN=tgt PE=3 SV=1
MAVRIEILKEDSKTRARLGKLHTPHGVIETPVFMPVGTQATVKTMTPEELKELGAGIILSNTYHLFLRPGHELIRDAGGLHAFMHWDGAILTDSGGFQVFSLGDLRKITEEGVEFRSHIDGSKRFLSPEIATQVQMALGSDIVMAFDECTPYPATREYAKASLERTTRWLKRCKETLITTDRQALFGIVQGSMYEDLRKQSAAEITELDLPGYAIGGLSVGEPKELMYEVLDYTVPLLPKDRPRYLMGVGSPDALIEGVMRGIDMFDCVLPTRIARNGTALTRYGKVVVRNAESAHDFSPLDPTCDCYTCKNYSRAYLRHLIKADEILGLRLMTIHNLRFLTNLMAEIREAIKEDRLPEYRHKFFSDYGYFN

SEQ ID NO: 54537 - protein, 372 aa, Desulfitobacterium hafniense
  misc_feature (1)..(372): tr|A0A0W1JDH4|A0A0W1JDH4_DESHA Queuine tRNA-ribosyltran sferase OS=Desulfitobacterium hafniense OX=49338 GN=tgt PE=3 SV=1
MAVRIEVLKEDNRTRARLGKLHTPHGVIETPVFMPVGTQATVKTMTPEELKDLGAGIILSNTYHLFLRPGHELIREAGGLHAFMHWDGAILTDSGGFQVFSLGDLRKITEEGVEFRSHLDGSKKFLSPEIATQVQMALGSDIVMAFDECTPYPATRDYAKASLERTTRWLKRCQETLTTTDRQALFGIVQGSMYEDLRKQSAAEITELDLPGYAVGGLSVGEPKELMYEVLDYTVPLLPKDKPRYLMGVGSPDALIEGVMRGIDMFDCVLPTRIARNGTALTRYGKLVVRNAESAHDFSPIDPTCDCYTCKNYSRAYLRHLIKADEILGLRLMTIHNLRFLTNLMSEIRAAIKENRLPEYREKFFYEYGYLK

SEQ ID NO: 54538 - protein, 372 aa, Desulfitobacterium hafniense; identical to SEQ ID NO: 54537
  misc_feature (1)..(372): sp|B8FQV2|TGT_DESHD Queuine tRNA-ribosyltransferase OS= Desulfitobacterium hafniense (strain DCB-2 / DSM 10664) OX=272564 GN=tgt PE=3 SV=1

SEQ ID NO: 54539 - protein, 373 aa, Desulfitobacterium metallireducens
  misc_feature (1)..(373): tr|W0ED68|W0ED68_9FIRM Queuine tRNA-ribosyltransferase OS=Desulfitobacterium metallireducens DSM 15288 OX=8719 68 GN=tgt PE=3 SV=1
MPAVRLEVLKEDTRTKARLGKLHTPHGVINTPVFMPVGTQATVKTMNPEELKEIGAGIILSNTYHLFLRPGQELIREAGGLHSFMHWDGAILTDSGGFQVFSLGDLRKITEEGVEFRSHLDGSRQFLSPEIATQVQMALGSDIVMAFDECTPYPATREYAKASMERTTRWLKRCKETLTTTDRQSLFGIVQGSMFEDLRKQSAAEITELDLPGYAIGGLSVGEPKELMYEVMDYTVPLLPKDRPRYLMGVGSPDALIEGVMRGIDMFDCVLPTRIARNGTAMTRYGKLVVRNAAVAHDFMPIDPTCDCYACRNYSRAYIRHLLKADEILGLRLMSIHNLRFLQTLMKEIREAIAEDRLPEYRQKFFTDYGYLD

SEQ ID NO: 54540 - protein, 372 aa, Desulfitobacterium sp.; identical to SEQ ID NO: 54537
  misc_feature (1)..(372): tr|A0A562HP71|A0A562HP71_9FIRM Queuine tRNA-ribosyltran sferase OS=Desulfitobacterium sp. LBE OX=884086 GN=tgt PE=3 SV=1

SEQ ID NO: 54541 - protein, 375 aa, Desulfobacca acetoxidans
  misc_feature (1)..(375): tr|F2NDW6|F2NDW6_DESAR Queuine tRNA-ribosyltransferase OS=Desulfobacca acetoxidans (strain ATCC 700848 / DSM 1 1109 / ASRB2) OX=880072 GN=tgt PE=3 SV=1
MNINFEILATDPHCGARRGRLSLPRGEVETPVFMPVGTQATVKTMTPEELQSLGVSIILANAYHLYLRPGAEIVQAMGGLHQFMNWDRPILTDSGGFQIFSLAALRHLSDEGVTFRSHLNGATHFLTPEKVIALQETLDADILICLDECPAYGVSEEYVVRSGELTWRWARRCQQARSRWDKPLFAVVQGGMWSKRRREQAQALVAEGFDGYAIGGLSVGEDKATREAMLEVTVPELPHHQPRYLMGVGTPEDLVEGVARGIDMFDCVLPTRNARNGMALTRFGRVVIKNAEHARSSRPLDEACGCYTCRNYTRAYLRHLYVAREILAYRLLTMHNLYYYLELMAGMRQSLAQGNFQEFRQAFYSQREYGGAYSG

SEQ ID NO: 54542 - protein, 377 aa, Desulfobacca sp.
  misc_feature (1)..(377): tr|A0A1V4QL66|A0A1V4QL66_9DELT Queuine tRNA-ribosyltran sferase OS=Desulfobacca sp. 4484_104 OX=1940691 GN=tgt PE=3 SV=1
MGRGFSFRLLATDAASQARMGEITTPRGSIPTPVFMPVGTLATVKTMTSEELCDLGAQIILANTYHLFLRPGVEVIQSLGGLHRFMHWDRPILTDSGGFQIFSLAPLRQITEEGVTFRSHLNGTSHFLSPEKVVALQEALDSDIIICLDECPAFPATEEYVARSAALTLRWAQRSKIAHTRPEQALFAVTQGGMYPHLRQEHAQALVAQDFQGYAIGGLSVGEDKDTRLAMLEVSIPELPENKPRYLMGVGTPADLVDAVSRGVDMFDCVLPTRNARNGMALTRNGRLVIKNARYVQDSRPLDEACGCYTCQHYSRAYLRHLFVAREILAYRLLTVHNLYYYLELMAGMRQALTQGRFQEFRRNFYGQQQNGGDLGD

SEQ ID NO: 54543 - protein, 376 aa, Desulfobacter hydrogenophilus
  misc_feature (1)..(376): tr|A0A328FBV3|A0A328FBV3_9DELT Queuine tRNA-ribosyltran sferase OS=Desulfobacter hydrogenophilus OX=2291 GN=tgt PE=3 SV=1
MLTFDLIKDNSKSGNGRDRSRLGRITTDHGIIETPIFMPVGTVGSVKAVSKEDLEHCGAQIILGNTYHLYLRPGCEVIEAMKGLHAFTAWDKPMLTDSGGFQFFSLAKLAKFTDEGVHFQSHIDGSRHFFSPERAVEIQMILGSDIMMSLDWCQGHPATDQQVAEALNKTTAWAKRGFDFWQENGAVNNLFGIVQGGMIKELRSLSAEQLTAINFPGFAIGGLSVGEPTEVMYEMADHTLPLLPSQKPRYIMGVGTPENLVTLVGMGCDMFDCVMPSRNARNGQLFTHTGTVNIPNAKYKTDERPIDETCGCYTCRNYSRAYLRHLYKSRELLSYRLNTIHNLYYYLDLMAKMRHAIKEDRFPEFQQQFFKMRQDQ

SEQ ID NO: 54544 - protein, 376 aa, Desulfobacter postgatei
  misc_feature (1)..(376): tr|I5B5B4|I5B5B4_9DELT Queuine tRNA-ribosyltransferase OS=Desulfobacter postgatei 2ac9 OX=879212 GN=tgt PE=3 S V=1
MLTFDLIKDNSKKGDGRDRSRLGRILTDHGVVQTPVFMPVGTLGSVKGVSKEDLAHCGAQIILGNTYHLYLRPGVEVIETMKGLHAFTAWNKPMLTDSGGFQFFSLAKLARFTDEGVHFQSHIDGSRHFFSPERAVEIQMILGSDIMMSLDWCQGHPATDQQVADALNKTTAWAKRGFDFWQENGAIHNLFGIVQGGMVKELRSLSAEQITAIDFPGFAIGGLSVGEPTDVMYEMADHTLPLLPSQKPRYIMGVGTPENLVTLVGMGCDMFDCVMPSRNARNGQLFTHTGTINIPNAVYKTDERPIDEICDCYTCRNYSRAYLRHLYKSRELLSYRLNTIHNLYYYLDLMAKMRHAIKEDKFPEFQQQFFKARQDQ

SEQ ID NO: 54545 - protein, 376 aa, Desulfobacter sp.
  misc_feature (1)..(376): tr|A0A357YUI0|A0A357YUI0_9DELT Queuine tRNA-ribosyltran sferase OS=Desulfobacter sp. OX=2294 GN=tgt PE=3 SV=1
MLTFDLIKDNSKKGDGRDRSRLGRIITDHGVVETPIFMPVGTVGSVKGVSKEDLAHCGAQIILGNTYHLYLRPGVEVIETMKGLHAFTAWNKPMLTDSGGFQFFSLAKLAKFTDEGVHFQSHIDGSRHFFSPERAVEIQMILGSDIMMSLDWCQGHPATDQQVADALNKTTAWAKRGFDFWQENGAINNLFGIVQGGMVKDLRSLSAEQITAIDFPGFAIGGLSVGEPTDVMYEMADHTLPLLPSQKPRYIMGVGTPENLVTLVGMGCDMFDCVMPSRNARNGQLFTHTGTINIPNAVYKTDERPIDETCDCYTCRNYSRAYLRHLYKSRELLSYRLNTIHNLYYYLDLMAKMRHAIKEDKFPEFQQQFFKARQDQ

SEQ ID NO: 54546 - protein, 376 aa, Desulfobacter sp.
  misc_feature (1)..(376): tr|A0A348UVH7|A0A348UVH7_9DELT Queuine tRNA-ribosyltran sferase OS=Desulfobacter sp. OX=2294 GN=tgt PE=3 SV=1
MLTFDLIKDNSKKGDGRDRSRLGRIITDHGVVETPIFMPVGTVGSVKGVSKEDLAHCGAQIILGNTYHLYLRPGVEVIETMKGLHAFTAWNKPMLTDSGGFQFFSLAKLAKFTDEGVHFQSHIDGSRHFFSPERAVEIQMILGSDIMMSLDWCQGHPATDQQVADALNKTTAWAKRGFDFWQENGAINNLFGIVQGGMVKDLRSLSAEQITAIDFPGFAIGGLSVGEPTDVMYEMADHTLPLLPSQKPRYIMGVGTPENLVTLVGMGCDMFDCVMPSRNARNGQLFTHTGTINIPNAVYKTDERPIDETCDCYTCRNYSRAYLRHLYKSRELLSYRLNTIHNLYYYLDLMAKMRHAIKEDNFPEFQQQFFKARQDQ

SEQ ID NO: 54547 - protein, 372 aa, Desulfobacteraceae bacterium
  misc_feature (1)..(372): tr|A0A1W9LLH5|A0A1W9LLH5_9DELT Queuine tRNA-ribosyltran sferase OS=Desulfobacteraceae bacterium A6 OX=1934249 G N=tgt PE=3 SV=1
MFDFTVVSESKKSRARAGIMRTSHGVVETPVFMPVGTLASVKSLSPEEIAGAGASIILGNTYHLYLRPGCDVISLFSGLHGFMNWNRPILTDSGGFQVFSLAKLSKITDEGYTFQSHIDGSSHILTPEKAVEVQISLGSDIMMCLDQCIHYPAEKNEVESAVELTTAWAKRCKKTWEDSGKKKRALFGIIQGGMYKDLRKKSATDLVETEFSGYALGGLSVGEPVEIMLEIAEFTLPKLPNEKPKYVMGVGTPENLVELVSLGADMFDCVLPTRNARNGQMFTAEGTINICNSQYKYDTSSVEKGCLCYTCRNYSRAYLRHLFMAKELLAYRLNTIHNVHYYTKLMRDMRTAILNDTFEVFRKDFYHKRREA

SEQ ID NO: 54548 - protein, 372 aa, Desulfobacteraceae bacterium
  misc_feature (1)..(372): tr|A0A1W9LI15|A0A1W9LI15_9DELT Queuine tRNA-ribosyltran sferase OS=Desulfobacteraceae bacterium A6 OX=1934249 G N=tgt PE=3 SV=1
MGFNLLAVDSCGARRGEFTTTHGKVETPAFMPVGTAGFVRSITPRDVAETDSEVILANTYHLSLGERLATVKRMGGLHRFMGWDKTILTDSGGFQVFSLPGREINDDGVSFSYEEDGERVFFTPEKSMEIQRDLGADIVMAFDECVEHTASREYIEKSVERTTDWAKRCRDVELKEYQFMFGIIQGGVFPDLRQKSAIEITSIPFDGYAIGGVSVGEGFELMKKVVEVTAHFLPEQKPRYLMGVGLPEDILAAVQGGMDMFDCVIPTRYARQGTLFTRIGKIRILDKTYRKDKFPLDTKCRCYTCRTYPRMVLRYLLFSRDPLAETLLTIHNLTFYQDLMKDIRAAVVENRFEEFREEWLGVYKKNRNRNEA

SEQ ID NO: 54549 - protein, 384 aa, Desulfobacterales bacterium
  misc_feature (1)..(384): tr|A0A1F9P229|A0A1F9P229_9DELT Queuine tRNA-ribosyltran sferase OS=Desulfobacterales bacterium RIFOXYA12_FULL_4 6_15 OX=1797914 GN=tgt PE=3 SV=1
MLKFELKKESAEFKGGEQCRARLGAITTDHGKIETPIFMPVGTVGSVKALSVEDLAHCKAQIILGNTYHLYLRPGMDVIEYMKGLHDFIRWNKPILTDSGGYQFFSLAKLAKFSDEGVAFQSHIDGSRHVFSPEKAIDIQMILGSDIMMSLDWCIGYPANEREVMAALNKTTQWAKRGFEFWRQKGSVNNLFGIVQGGMFKSLRSLSAGQLKEIDFPGFAIGGLSVGEPKDLMYEMADHTLPLLPRHKPRYIMGVGTPEDLVELTFMGCDMFDCVMPTRNARNGQLFTSRGTMNISNARYRLDKAPPDAECNCYTCANYSRSYLRHLYKSREILSYRLNTIHNIYYYMNLMEKMREAIKNDRFFEFRQAFYLKRQSDPREFDSE

SEQ ID NO: 54550 - protein, 369 aa, Desulfobacterales bacterium
  misc_feature (1)..(369): tr|A0A1E7GI56|A0A1E7GI56_9DELT Queuine tRNA-ribosyltran sferase OS=Desulfobacterales bacterium S3730MH5 OX=1869 298 GN=tgt PE=3 SV=1
MTFSFEILHKSADTAARLGKIHTPHGCIETPVFIPVGTKATIKSLTPEDLCGMGVQIILANTYHLYLRPGHDVIGTLGGLHRFMHWDRPVLTDSGGYQVFSLSKLRKISDRGVTFQSHIDGSKHLLTPEKAIEIQEILGSDIMMCLDECTPYPATHTESRRSSELSIDWARRCKQSCNADDRALFGIVQGGMFQDLRAQGVEALTGIGFDGYALGGLSVGEPKKALLDVAAFTLPLLPGSLPRYVMGVGAPEDLVELVYLGTDMFDCVMPTRNARNGQFFVRTGTLNIYNARYRSDQAPVETGCPCYTCRHYSRAYLRHLFMAKELLAYRLSTIHNIHYFMTLMREMREAIRQGRLAMFKRDFYSQRAR

SEQ ID NO: 54551 - protein, 370 aa, Desulfobacterium autotrophicum
  misc_feature (1)..(370): sp|C0QKY2|TGT_DESAH Queuine tRNA-ribosyltransferase OS= Desulfobacterium autotrophicum (strain ATCC 43914 / DSM 3382 / HRM2) OX=177437 GN=tgt PE=3 SV=1
MLTFDIINQSLESRARTGRITTAHGVIETPIFMPVGTLGTVKAVSVEELKACQAQIILGNTYHLYLRPGCEVMAHMGGLHPFMNWDRPILTDSGGFQFFSLAKLAKFKDEGVSFQSHIDGSRHLFTPERAVEIQSILGSDIMMSLDWCMGYPATRKEAMGALEKTTQWAERGRNFWIEQGRVNNLFGIVQGGMFADLRSISARQLADLDFPGYAIGGLSVGEPTELMYEMADHTVPQLPLEKPKYVMGVGTPENLVELAGMGVDMFDCVMPSRNARNGQLFTSTGTMNISNAAFRLDESPLDAECSCYTCQNYSRAYLRHLYKSRELLAYRLNTIHNLHYYLDLMHQMRNAINQGRFMAFKQEFYRKRER

SEQ ID NO: 54552 - protein, 342 aa, Desulfobacterium sp.
  misc_feature (1)..(342): tr|A0A1W9U2W7|A0A1W9U2W7_9DELT Queuine tRNA-ribosyltran sferase OS=Desulfobacterium sp. 4572_20 OX=1971621 GN=t gt PE=3 SV=1
MEFRVLKRCTSSKARLGEITTDHGRFETPVFMPVGTSGAIKGISPGEAKDLGVKIVLSNTYHLYLRPGHKLIENMGGLHRFMNWSGPILTDSGGFQVYSLSKLRTISPDGVTFRSHLDGSTHFLGPEKVMEIQRSLGADITMTFDECTPSGAEHEYVRKSVKLTEQWARQCLEQKEKNGQALFGIVQGGVYPELREMSAKGLVSMGFDGYALGGLSVGEDKHTRERVIKATMEFLPEEKPVYLMGIGTPEDILESVKMGVDMFDCVLPTRNARNGMLFTNKGKLVIKNARYAQDSSPIEEGCGCYTCSHYSRAYLRHLFLSREILSFRLNTIHNLYYYLVAK

SEQ ID NO: 54553 - protein, 375 aa, Desulfobacterium vacuolatum
  misc_feature (1)..(375): tr|A0A1W2C469|A0A1W2C469_9DELT Queuine tRNA-ribosyltran sferase OS=Desulfobacterium vacuolatum DSM 3385 OX=1121 400 GN=tgt PE=3 SV=1
MLTFEIEKKSTDSRARTGSIITAHGEIPTPIFMPVGTLGSVKAVSVEELKQCEARIILGNTYHLYLRPGCEVMTHMGGLHKFMNWDRPILTDSGGFQFFSLAKLAKFSREGVNFQSHIDGSRHLFTPEKAVDIQMVLGSDIMMSLDWCIPYPANEKETMAALEKTTLWARRGRDHWLEKGGVNNLFGIVQGGMYAHLRALSAQQLIELDFPGYAVGGLSVGEPTDLMYEMADHTVPLLPHDKPRYVMGVGTPENLVEMVGMGVDMFDCVMPSRNARNGQLFTGRGTINISNARFRMDENPIDDACNCYVCQNYSRAYLRHLYKTRELLSYRLNTIHNLHYYLNLMERIRQSIKADQFSAFKKEFFSQLNHKELNR

SEQ ID NO: 54554 - protein, 389 aa, Desulfobacula phenolica
  misc_feature (1)..(389): tr|A0A1H2HHG7|A0A1H2HHG7_9DELT Queuine tRNA-ribosyltran sferase OS=Desulfobacula phenolica OX=90732 GN=tgt PE=3 SV=1
MVIKKRNMLKFKILKQSSKSKGLGKGNGSEHCRARLGTITTDHGVIDTPIFMPVGTLGSVKAVSVEELDHCKAQIILGNTYHLYLRPGCDVIEHMDGLHEFIRWNKPMLTDSGGFQFFSLAKLAKFSDEGVAFQSHIDGSRHMFSPEKAVDIQMILGSDIMMSLDWCIGYPADEKQTMEALNKTTLWAKRGFDFWQEKGAVNNLFGIVQGGMYKHLRTLSAEQLTQIDFPGFAIGGLSVGEPKEFMYEMADHTLPLLPVHKPRYIMGVGTPEDLVELTGMGCDMFDCVMPSRNARNGQLFTSKGTINIPNAKFRFDKGPIDTDCNCYTCQNYSRSYLRHLYKSRELLAYRLNTIHNIYYYLDLMEKMRDAIRQDSFLEFKREFYSKRQN

SEQ ID NO: 54555 - protein, 384 aa, Desulfobacula sp.; identical to SEQ ID NO: 54549
  misc_feature (1)..(384): tr|A0A1F9N1H1|A0A1F9N1H1_9DELT Queuine tRNA-ribosyltran sferase OS=Desulfobacula sp. GWF2_41_7 OX=1797910 GN=tg t PE=3 SV=1

SEQ ID NO: 54556 - protein, 376 aa, Desulfobacula toluolica
  misc_feature (1)..(376): tr|K0NNH5|K0NNH5_DESTT Queuine tRNA-ribosyltransferase OS=Desulfobacula toluolica (strain DSM 7467 / Tol2) OX= 651182 GN=tgt PE=3 SV=1
MLKFKILKQSNKSNGSDHCRARLGTIATDHGVIDTPIFMPVGTLGSVKAVSVEELDNCKAQIILGNTYHLYLRPGCDVIEHMDGLHEFIRWNKPMLTDSGGFQFFSLAKLAKFSDEGVAFQSHIDGSRHMFSPEKAVEIQMILGSDIMMSLDWCIGYPADEKQTMEALNKTTLWAKRGFDFWQEKGAVNNLFGIVQGGMYKHLRTLSAEQLTQIDFPGFAIGGLSVGEPKEFMYEMACHTLPLLPANKPRYIMGVGTPEDLVELVGMGCDMFDCVMPSRNARNGQLFTSKGTINIPNAKFRFDKGPIDTDCNCYTCQNYSRSYLRHLYKSRELLAYRLNTIHNIYYYLDLMEKMRDAIKQDRFLEFKREFYSKRQK

SEQ ID NO: 54557 - protein, 373 aa, Desulfobotulus alkaliphilus
  misc_feature (1)..(373): tr|A0A562S370|A0A562S370_9DELT Queuine tRNA-ribosyltran sferase OS=Desulfobotulus alkaliphilus OX=622671 GN=tgt PE=3 SV=1
MLTFKLENRSSDSSARAGSIHTAHGEIQTPIFMPVGTLGTVKGLTPEDLLDCGSQIILGNTYHLYLRPGAELLSRFGGLHSFMHWDKPLLTDSGGFQVFSLAALSKITDEGYRFQSHIDGSSHLFTPESVVAMQDVIGSDIMMCLDQCIPYPADRILAEKALERTTLWARRCRKTWQEETGCRNSLFGIVQGGMFTDLRKRSAEELVALDFPGYAIGGLSVGEPAELMYEMGAFTLPLLPENRPRYIMGVGTPENLVELVSHGADMFDCVMPSRNARNGKLFTRYGDINIANSRFRMDEKPLDETCTCYTCRHYSRAYLRHLYKSRELLAYRLNTLHNIHYYLDLMRCMRAAILGDRFAAFRRIFTEERARGL

SEQ ID NO: 54558 - protein, 372 aa, Desulfobotulus alkaliphilus
  misc_feature (1)..(372): tr|A0A562S3L0|A0A562S3L0_9DELT Queuine tRNA-ribosyltran sferase OS=Desulfobotulus alkaliphilus OX=622671 GN=tgt PE=3 SV=1
MAQRDIQFRLLAKDRSGARRGAFTTHHGTVQTPAFMPVGTAGYVHSTPARDVAETGAEVLLANTYHLSLGDRLASVRYMGGLHRFMGWERTILTDSGGFQVFSLPDRVIDDEGVTFSYEEDGERVMLSPEKSMEIQRDLGADIVMAFDECVSHTADRKYVGKSVGLTTAWASRCRDVKLQDHQFLFGIVQGGVFDDLRRKSAKEITSIPFDGFAIGGVSVGEGFDLMRRVVGVTAPCLPEDLPRYLMGVGLPEDILEAVHLGMDMFDCVIPTRYARQGTLFTRTGKLRIKNKNFRKDRYPLDTKCSCYTCRTFSRMVLRYLFFSGDPLAETLATIHNITFYQDMMSDIRRAIEENRFESFKREWLEIYKKNR

SEQ ID NO: 54559 - protein, 372 aa, Desulfobulbaceae bacterium
  misc_feature (1)..(372): tr|A0A1E7GT51|A0A1E7GT51_9DELT Queuine tRNA-ribosyltran sferase OS=Desulfobulbaceae bacterium S5133MH15 OX=1869 306 GN=tgt PE=3 SV=1
MQTKTAFTLHKQSDDCRARRGEVKTGHAVFQTPVFMPVGTQGTVKAVTPENLEEMSAQIILGNTYHLFIRPGHELIERFGGLHKFMNWKGAILTDSGGFQIFSLRKLAKITEEGAAFRSHLDGSKLFLSPEDAVQVQQSLGSDIMMCLDTCIPYPATREETIKSTNLTTRWAKRCREAHTRREQLLFGIVQGGMYSDLRKAHIEELINIGFDGYAIGGLSVGEDKNLMYDMTEATAPCLPEDFPRYLMGVGTPSDLVEGVWRGVDMFDCVMPTRNARNGTLFTSKGKVVIKNARYREDQNPLDEECGCYTCRNYSRGYLRHLFQSREILSYHLNTIHNLHYYLNLMTTIRSAIEQGTFVQFRKDFYSKLELE

SEQ ID NO: 54560 - protein, 372 aa, Desulfobulbaceae bacterium
  misc_feature (1)..(372): tr|A0A0F2NQ23|A0A0F2NQ23_9DELT Queuine tRNA-ribosyltran sferase OS=Desulfobulbaceae bacterium BRH_c16a OX=16297 13 GN=tgt PE=3 SV=1
MDQQTPFTLLKRSSECAARRGEVRTRQGVIQTPVFMPVGTQGTVKAVTPENLQEMNAQIILGNTYHLFIRPGHELIEKFGGLHSFMNWKGSILTDSGGFQIFSLKELATITEEGAAFRSHLDGSKLFLSPEDAIYVQQALGSDIMMCLDTCIPFPATRDETIAATDLTTRWAARCRQAHSKRDRLLFGIVQGGMYPELRREHAAALIDIGFDGYAIGGLSVGEEKHLMYDMTEATVPALPADYPVYLMGVGTPSDLVEGVWRGIDMFDCVMPTRNARNGSLFTSRGKLTIKNSRYRDDPRPLDEECTCYTCRNYSRAYLSHLFHAREILSYHLNTIHNLHYYLNLMADIRKALESDSFALFRKDFYSKLERE

SEQ ID NO: 54561 - protein, 373 aa, Desulfobulbus oralis
  misc_feature (1)..(373): tr|A0A2L1GMA6|A0A2L1GMA6_9DELT Queuine tRNA-ribosyltran sferase OS=Desulfobulbus oralis OX=1986146 GN=tgt PE=3 SV=1
MPSSFAQLARSSECHARTGRLATLHGHIETPVFMPVGTQATVKAMTPEDLKQIGAQIILGNTYHLYIRPGHELIRELGGLHRFMHWDRPILTDSGGFQIFSLNELASITEDGASFRSHLDGTKLFLSPEDAVAVQEALGSDIMMALDTCIPYPATRAEAARATALTNRWARRCRAAQTDTGQLLFGIVQGGLYPDLRLAALAELAETGFDGYALGGLSVGEPKEEMLAMLAACGHRMPADHARYLMGVGTPEDLVEGVMHGMDMFDCVMPTRNARNGMLFTSQGKLVIKNACFQKDAGPLDPLCTCYTCKNFSRAYLRHLFQSHEILASQLNSIHNLHYYNNLMAQMREAIRQDRFLAFRDEFYRLRGGQKPM

SEQ ID NO: 54562 - protein, 374 aa, Desulfobulbus propionicus
  misc_feature (1)..(374): tr|A0A2G6FD28|A0A2G6FD28_9DELT Queuine tRNA-ribosyltran sferase OS=Desulfobulbus propionicus OX=894 GN=tgt PE=3 SV=1
MTVSPYTLEATSSECNARRGEVTTLHGTIQTPVFMPVGTQASVKAVTPENLKEVGAQIILGNTYHLFIRPGHELIKTFGGLHGFMNWDGPILTDSGGFQIFSLMELSKITEEGAAFRSHLDGSKLFLSPEDAVHVQEALGSDIMMALDTCIPYPATRNEAAKATALTTRWAKRCKEALSGTGQHLFGIVQGGMYPDMRIEAIQQLTDIGFPGYALGGLSVGEPKELMYEMLAATVSHMPAAHPKYLMGVGTPEDLVEGVYHGIDMFDCVMPTRNARNGMLFTSQGRLVIKNARYQDDPRPVDESCTCYTCRNYSRAYLRHLFQCREILAYQLNSIHNLHHYCTLMEEMRTAIEKDQFMAFRKTFYKQRDMPVPC

SEQ ID NO: 54563 - protein, 374 aa, Desulfobulbus propionicus
  misc_feature (1)..(374): tr|A0A2G6MD88|A0A2G6MD88_9DELT Queuine tRNA-ribosyltran sferase OS=Desulfobulbus propionicus OX=894 GN=tgt PE=3 SV=1
MITSPFTQTSGSTQCHARTGNLQTLHGEIQTPVFMPVGTQAAVKALTPNDLDAAGVQILLGNTYHLFIRPGHERIRSFGGLHGFMCWDKPILTDSGGFQIFSLQKLAQITEQGAAFRSHLDGSRLFLSPEDAVHVQEALGSDIMMALDTCIPYPADREAVAQGTALTRRWAARCRAAQTDTGQHLFGIIQGGMFKDMRRQALEQIVEIGFDGYALGGLSVGEPKELMYELLAEVTPAMPQHHARYLMGVGTPEDLVEGVYNGMDMFDCVMPTRNARNGMLFTSKGRLVIKNARYKDDPGPPDASCGCYTCRNFSRAYLRHLFQSREILACQLNSMHNIHYYCSLMAEMRQAIKADRFIAFRQQFYAQRDMPVPY

SEQ ID NO: 54564 - protein, 369 aa, Desulfobulbus sp.
  misc_feature (1)..(369): tr|A0A0A2HSA1|A0A0A2HSA1_9DELT Queuine tRNA-ribosyltran sferase OS=Desulfobulbus sp. Tol-SR OX=1536652 GN=tgt P E=3 SV=1
MNPFTLHSRSSECAARRGEVRTRHGIFQTPVFMPVGTQATVKAVTPENLLEMGAQIILGNTYHLFIRPGHQLIERFGGLHGFMNWPGSILTDSGGFQIFSLKDLATITEEGAAFRSHLDGSKLFLSPEGAVQVQESLGSDIMMCLDTCIPYPADRQQARVSTDLTTRWARRCRQAHSRRDQLLFGIVQGGMYADMRQSAAAALVDIGFDGYAIGGLSVGESKTLMYEMTEATVPALPADHPVYLMGVGTPADLVEGVWRGIDMFDCVMPTRNARNGTLFTSHGKVVIKNSRYRDDPAPLDPSCTCYTCRNYSRAYLRHLFVSREILSYHLNTIHNLHYYIDLMDRIRKAIEADCYGRFRKDFYSRLTDQ

SEQ ID NO: 54565 - protein, 371 aa, Desulfobulbus sp.
  misc_feature (1)..(371): tr|A0A432Q935|A0A432Q935_9DELT Queuine tRNA-ribosyltran sferase OS=Desulfobulbus sp. OX=895 GN=tgt PE=3 SV=1
MTTASPYRLLHQSTECPARCGSLSTLHGDILTPVFMPVGTLATVKSVTPENLLDLGAQIILGNTYHLFIRPGHELIQTFGGLHGFMNWDKPILTDSGGFQIFSLQDLARITEKGAEFRSHLDGSNLFLSPEIAVQVQEALGSDIMMVLDTCIPYPATLDEAARATALTARWAKRCRQAQSNTGQLLFGILQGGMYPKLRREAAAELQEIGFDGYALGGLSVGEPKEMMHEMLDESVHLLPDSHAKYLMGVGTPEDLVEGVYRGVDMFDCVMPTRNARNGMLFTSQGRVVIKNACNRDDHRPLDEQCSCYTCRKYSRAYLRHLFQCREILAYQLNSIHNLHYYCSLMADMRKAITENRFMAFRKDFYAKRDA

SEQ ID NO: 54566 - protein, 371 aa, Desulfocapsa sulfexigens
  misc_feature (1)..(371): tr|M1NBM4|M1NBM4_DESSD Queuine tRNA-ribosyltransferase OS=Desulfocapsa sulfexigens (strain DSM 10523 / SB164P1 ) OX=1167006 GN=tgt PE=3 SV=1
MTASPFTLHSKSTDCAARRGELKTLHGTIQTPIFMPVGTQATVKSVTPENLKEMNAQIILGNTYHLFIRPGQELIRSFGGLHNFMNWDRPILTDSGGFQIFSLKELAKITEEGAAFRSHLDGAKLFLSPEDAIEVQESLGSDIMMCLDTCIPYPATREETIKSTDLTSRWAQRCRKAQNDTGQLLFGIVQGGMHHDLRKAHAEALIDIGFDGYAIGGLSVGEDKAMMQDMTEATIPHLPEDYSRYLMGVGTPEDLVEGVYRGVDMFDCVMPTRNARNGTLFTSTGKVVIKNAKYRDDKRPLDPNCNCYTCRNYSRAYLRHLFQCREILCYHLNTIHNLHYYLHLMAEMREAIEKDSFSTFRNDFYGRLETE

SEQ ID NO: 54567 - protein, 382 aa, Desulfocarbo indianensis
  misc_feature (1)..(382): tr|A0A0K9I655|A0A0K9I655_9DELT Queuine tRNA-ribosyltran sferase OS=Desulfocarbo indianensis OX=1348163 GN=tgt P E=3 SV=1
MARLEYVQKAVSGRARLGQLKTRKGVVDTPAFMPVGTQATVKSLLPEEVAGLGAQIILGNTYHLLLRPGLKVVEAHGGLHRFMGWPGPILTDSGGFQVFSLGALRTVAEEGVSFRNHLDGGLMHLTPEVAVEAQERLGSDIMMMLDECPPAGAGREYVAAALERDARWAGRAKAARTEKGGALMGIVQGGVYPELRHRSVELLLEHELDGYALGGLSVGEPKEVMMRVIEQTVPQLPRDKPVYLMGVGSPEDLVACAGLGVDMFDCVLPTRMARNGTLFTSTGRLNIRNARYAEDQAPVDETCGCLACRRYSRAYLRHLFMARELLAYRLNTIHNLHQVLGLMAALREAIAQDQYDAFARDFWARRVPEPGEENSSDGGNHA

SEQ ID NO: 54568 - protein, 376 aa, Desulfococcus multivorans
  misc_feature (1)..(376): tr|S7U6C4|S7U6C4_DESML Queuine tRNA-ribosyltransferase OS=Desulfococcus multivorans DSM 2059 OX=1121405 GN=tgt PE=3 SV=1
MPHPFQVTARCTTTRARTGRLSLVHGTVETPVFMPVGTLGTVKSLTPEDLTAAGAQIILGNTYHLYLRPGCDVIDRFSGLHRFMNWDGPILTDSGGFQVFSLARLTRITEAGASFQSHIDGSRHLLTPEKSIEIQISLDSDVIMCLDQCIAYPAERAAALAALEITTQWAGRCRKTWREQSGEKNALFGIVQGGMYDDLRRMSAEALTAMDFSGYALGGLSVGEPNQMMYDVAEAALPLLPGDRPKYIMGVGTPEDLVELTARGADMFDCVMPTRNARNGQLFTRRGTLNIANSRHRTDTAPVDSECACYTCRNYSRAYLRHLYQSRELLAYRLNTLHNLHYYLDLTARMRSAIAEGRFEAFRKRFYADREPGGAA

SEQ ID NO: 54569 - protein, 384 aa, Desulfococcus oleovorans
  misc_feature (1)..(384): sp|A8ZRX7|TGT_DESOH Queuine tRNA-ribosyltransferase OS= Desulfococcus oleovorans (strain DSM 6200 / Hxd3) OX=96 561 GN=tgt PE=3 SV=1
MFQFETTTACPDTKARTGKMTTAHGDVATPVFMPVGTLATVKSLSPEDLVACGAQIILGNTYHLYLRPGCDIIDAFSGVHAFMGWNRPLLTDSGGFQVFSLAKLSRITEEGAAFQSHLDGSSHLLTPESVIDIQNRLGSDIQMCLDQCIAFPAEKGAARDAANLTTRWAGRCRNRWQETGGPSRCGLFGIVQGGMFDDLRADSAGRLVDLDFSGYAVGGLSVGEPIETRLAVAEHTLSLLPPDRPRYIMGVGTPAELVELVALGADMFDCVMPTRNARNGKLFTSFGAINIRNACHAKETGPVDPACTCYTCTRFSRAYLRHLFMSRELLAYRLATLHNLFYYINLINDARAAVAAGRFAAFRKAFYAAQQATGPTGKEPCAGS

SEQ ID NO: 54570 - protein, 401 aa, Desulfococcus sp.
  misc_feature (1)..(401): tr|A0A1W9Q3T9|A0A1W9Q3T9_9DELT Queuine tRNA-ribosyltran sferase OS=Desulfococcus sp. 4484_242 OX=1968523 GN=tgt PE=3 SV=1
MQGGGWFWVLLGETCLVAAVRPPWKHVEFRITHRAGDCRARTGKIRTAHGLFETPVFMPVGTQGSVKAVSPEDMIEAGVAIILANTYHLYLRPGHEVIGRLGGLHGFMNWPRPILTDSGGFQVYSLTPLRNLTDEGVVFQSHIDGSRHFIGPEKAMEIQEALGADIIMAFDECAPYPAEYGYVQRSVELTTSWARRCLERKKRNDQALFGIVQGGMYPDLREISARDLVNMGFDGYALGGLSVGEDRAARERIIRQTVDFLPLEKPVYLMGVGTPEDIVEAVRMGVDMFDCVMPTRNARNGTLFTSSGRINIKNARYAEDDRPVDEQCDCYTCTHYSRAYLRHLFMAREILSYRLNTIHNIAYYSRLMANIRTVVRENAFPEFRATFYGNQENRVVRKEVL

SEQ ID NO: 54571 - protein, 370 aa, Desulfocucumis palustris
  misc_feature (1)..(370): tr|A0A2L2XH69|A0A2L2XH69_9FIRM Queuine tRNA-ribosyltran sferase OS=Desulfocucumis palustris OX=1898651 GN=tgt P E=3 SV=1
MAIIFKELLKDSKSRARLGELETPHGKVETPIFMPVGTQATVKTMTPEEVKEMGGRLILSNTYHLYLRPGHQLVRKAGGLHRFMNWDGPILTDSGGFQVFSLGPLRKIEEDGVRFRSHIDGSEHYFSPERAVEIQEALGADIIMAFDECAPYPCTREYAVKALERTTRWAGRCKKAHGREEQALFGIIQGGTFRDLREISASQLLELDFPGYGIGGLSVGEPKELMYEMLDYTVPLILEEKPRYLMGVGSPDCLLEGVARGVDMFDCVLPTRIARNGTVFTHTGKLVVRNAAYAEDFTPLDPECDCYTCRNFSRAYVRHLIKANEVLGIRLTTIHNLRFIIRLMENVRRTIKEGTFLEYKEKFLSRFNSD

SEQ ID NO: 54572 - protein, 382 aa, Desulfocurvibacter africanus
  misc_feature (1)..(382): tr|M5PWP2|M5PWP2_DESAF Queuine tRNA-ribosyltransferase OS=Desulfocurvibacter africanus PCS OX=1262666 GN=tgt P E=3 SV=1
MNQPGTFTLRATDGQARRASLVTAHGVIETPVFMPVGTVGSVKAVSPEDLKAVGAQIILGNTYHLYLRPGDELVARMGGLHRFACWDRPILTDSGGFQVFSLSGLRKITEQGVEFQSHLDGSRHFFSPEKVVSIQKNLGSDIMMVLDECVAWGQDRDYTAKSLELTTRWARRSREAYPRGSGGQIMFGIVQGGFHEDLREESLAQLSEIDFEGFAIGGLSVGESPEEMRRQLYHIGPKLPAHKPRYLMGVGTPMDILDGIMAGIDMFDCVLPTRNARNGTLYTSQGKVNIKRAEYREDERPLDSNCNCYTCRTFSRAYLRHLYVTRELLSYRLNTIHNLAFFLDLAAGARKAIEDGRFMAFRQQYADVYGEPGKQDLEAQQS

SEQ ID NO: 54573 - protein, 382 aa, Desulfocurvibacter africanus
  misc_feature (1)..(382): tr|F3Z026|F3Z026_DESAF Queuine tRNA-ribosyltransferase OS=Desulfocurvibacter africanus subsp. africanus str. W alvis Bay OX=690850 GN=tgt PE=3 SV=1
MNQPGTFTLRATDGQARRASLVTAHGVIETPVFMPVGTVGSVKAVSPEDLKAVGAQIILGNTYHLYLRPGDELVARMGGLHRFARWDRPILTDSGGFQVFSLSGLRKITEQGVEFQSHLDGSRHFFSPEKVVSIQKNLGSDIMMVLDECVAWGQDRDYTAKSLELTTRWARRSREAYPRGSGGQIMFGIVQGGFHEDLREESLAQLSEIDFEGFAVGGLSVGESPEEMRRQLYHIGPKLPAHKPRYLMGVGAPMDILDGIMAGIDMFDCVLPTRNARNGTLYTSQGKVNIKRAEYREDERPLDSNCNCYTCRTFSRAYLRHLYVTRELLSYRLNTIHNLAFFLDLAAGARKAIEDGRFMAFRQQYADVYGEPGKQEMEAQQS

SEQ ID NO: 54574 - protein, 374 aa, Desulfofaba hansenii
  misc_feature (1)..(374): tr|A0A2M9DPR6|A0A2M9DPR6_9DELT Queuine tRNA-ribosyltran sferase OS=Desulfofaba hansenii OX=157842 GN=tgt PE=3 S V=1
MFEFKVVAENEGTRARAGVIQTAHGKIETPIFMPVGTLATVKGLAVEELKACGAQIILGNTYHLYLRPGCEVIDLFSGVHRFMNWDRPMLTDSGGFQFFSLAKLSKTTEEGVSFQSHIDGSKHLFTPEKAVEIQDCLGSDIMMCLDRCQAYPADEKTTKEAMEMTTRWAARCKKAWEEKTFRRNALFGIVQGGMYPELRRRSAAQLAELDLPGYAIGGLSVGEPKALMMEMGDLTLPLLPPEKPKYIMGVGTPEDIVELTAMGADMFDCVMPTRNARNGKLFTAGGAINISNARFKKDMGPIEAGCTCYTCRSYTRAYLRHLFMTRELLAYRLNTIHNVHHYMDLVTRMRTAIVAGEFETFRKAFYEDKRRGSQ

SEQ ID NO: 54575 - protein, 369 aa, Desulfofarcimen acetoxidans
  misc_feature (1)..(369): tr|C8W4D8|C8W4D8_DESAS Queuine tRNA-ribosyltransferase OS=Desulfofarcimen acetoxidans (strain ATCC 49208 / DSM 771 / VKM B-1644 / 5575) OX=485916 GN=tgt PE=3 SV=1
MVVKYKLIKKDNKSHARLGILSTPHGEIETPVFMPVGTQATVKAMTPEEVREAGGRIVLSNTYHLYLRPGHELIRDAGGLHRFMNWDGPILTDSGGFQVFSLGPLRKITEDGVAFRSHIDGSSHFFSPEHAMQVQMALGSDIAMVFDECAPYPCSYEDSLAAKERTTRWALRCKEYHSHPEQSVFGIVQGGMYRDLREQSVDELVKLDFPGYAIGGLSVGEPKPLMYEVLDYTVPLLPEDKPRYLMGVGSPDCLLEGVVRGIDMFDCVLPTRIARNGTVFTRQGKLVVRNAAYARDFVPLEEGCACYTCRHYTRAYIRHLLKSDEILGVRLTTIHNLHFLLNLMEDIREAIREDRLLEYKDHFLKDWQA

SEQ ID NO: 54576 - protein, 370 aa, Desulfofundulus australicus
  misc_feature (1)..(370): tr|A0A1M5AWH2|A0A1M5AWH2_9FIRM Queuine tRNA-ribosyltran sferase OS=Desulfofundulus australicus DSM 11792 OX=112 1425 GN=tgt PE=3 SV=1
MTVSFSIIQEDNRTMARAGVLHTLRGDVETPVFMPVGTQATVKTMTPREVEELGARLILSNTYHLYLRPGADLIREAGGLHRFMGWNGPILTDSGGFQVFSLASLCRIEDNGVWFRSHIDGSEHFFSPEKAVAVQEALGSDIAMAFDQCAPYPCSYEEAREATERTSRWALRCREASRREDQALFGIIQGGVHRDLREKSVKDLLALDFPGYGIGGLSVGEPKEVMYEVLDYTVPLLPPHKPRYLMGVGSPDCLLEGVARGVDMFDCVLPTRIARNGTVFTRDGKLVVRNAAYARDFRPLDPECGCYACRHFTRAYIRHLLKANEVLGIRLTTLHNLHFILELMRNIRRAILEGSFLEFKEAFLARWNKN

SEQ ID NO: 54577 - protein, 372 aa, Desulfofundulus kuznetsovii
  misc_feature (1)..(372): tr|A0A101HZQ3|A0A101HZQ3_9FIRM Queuine tRNA-ribosyltran sferase OS=Desulfofundulus kuznetsovii OX=58135 GN=tgt PE=3 SV=1
MSVNFKVIGQDSKSRARLGILETAHGLLETPAFMPVGTQATVKTLAPDEIIAAGGKLVLCNTYHLYLRPGQEIIKKAGGLHRFMNWDGPILTDSGGFQVFSLAALCRVGDEGVSFRSHIDGSEHFFSPETAMNVQQALGSDIAMAFDECVAYPCSFEQAKAATERTSKWAKRCLESHRKEDQAVFCIVQGSIYPELRERSAEELVRIGFPGYGIGGLSVGEPKEIMYDILDQCVPLIPWDKPHYLMGVGSPDCLLEGVERGIDMFDCVLPTRMARNGTVFTSKGKLVVRNADCADDHNPLEPGCRCYTCQRFSRAYIRHLIKAGEVLGIRLTTIHNLHFILNLMSEIRASITNGCFKEYKINFLHQYYSSLN

SEQ ID NO: 54578 - protein, 370 aa, Desulfofundulus salinum
  misc_feature (1)..(370): tr|A0A494X341|A0A494X341_9FIRM Queuine tRNA-ribosyltran sferase OS=Desulfofundulus salinum OX=2419843 GN=tgt PE =3 SV=1
MTVSFSIIKEDARTGARAGVLHTLRGDVETPVFMPVGTQATVKTMTPQEVWDLGGRLILSNTYHLYLRPGPDLIQEAGGLHRFMGWDGPILTDSGGFQVFSLAPLRRIEEDGVWFRSHIDGSEHFFSPEKAVAVQEALGSDIAMAFDQCAPYPCTYEEAREAMERTSRWALRCKEARRREDQALFGIVQGGVHRDLREKSVNDLVALDFPGYGIGGLSVGEPKDIMYQVLDYTVPLLPREKPRYLMGVGSPDCLLEGVARGVDMFDCVLPTRIARNGTVFTREGKLVVRNAEYARDFRPLDPDCNCYACRHFTRAYIRHLIKANEVLGIRLTTIHNLHFVLELMRSIRRAILEGNFYEYKEAFLARWNKN

SEQ ID NO: 54579 - protein, 370 aa, Desulfofundulus thermosubterraneus
  misc_feature (1)..(370): tr|A0A1M6H7G1|A0A1M6H7G1_9FIRM Queuine tRNA-ribosyltran sferase OS=Desulfofundulus thermosubterraneus DSM 16057 OX=1121432 GN=tgt PE=3 SV=1
MTVSFSIIKEDARTGARAGVLHTLRGDVETPVFMPVGTQATVKTMTPREVWDLGGRLILSNTYHLYLRPGANLIREAGGLHRFMGWTGPILTDSGGFQVFSLASLRRIEEEGVWFRSHIDGSEHFFSPEKAMAVQEALGSDIAMAFDQCAPYPCTYEEAREAMERTSRWALRCKEARRREDQALFGIVQGGVHRDLREKSAKDLVELDFPGYGIGGLSVGEPKDIMYQVLDYTVPLLPREKPRYLMGVGSPDCLLEGVARGVDMFDCVLPTRIARNGTVFTREGKLVVRNAEYARDFRPLDPECNCYTCRHFTRAYIRHLIKANEVLGIRLTTVHNLHFVFELMRNIRRAILEGNFLEYKVAFLAHWNKN

SEQ ID NO: 54580 - protein, 377 aa, Desulfofustis glycolicus
  misc_feature (1)..(377): tr|A0A1M5WEU4|A0A1M5WEU4_9DELT Queuine tRNA-ribosyltran sferase OS=Desulfofustis glycolicus DSM 9705 OX=1121409 GN=tgt PE=3 SV=1
MQKTMERPPSPLTIGHRSSQCRARTAELATRHGVIQTPVFMPVGTQATVKAITPENLQEIGAQIILGNTYHLFVRPGHRLIERCGGLHRFMNWDRAILTDSGGFQIFSLKKLSRITEEGAAFRSHLDGSRLFLSPEDAIEVQEALGSDIMMCLDTCIPYPADRTETSGATALTGRWAWRCREARTKHDHLLFGIVQGGMYPDLRRESARTMIDIGFDGYAVGGLSVGEEKEQMYDMTEVTADCLPDDYPRYLMGVGTPEDLVEGVWRGIDMFDCVMPTRNARNGTLFTSTGRVVLKNSRYRDDQLPIDESCDCYTCRNYSRAYLRHLFVSREILSYQLNTIHNIHYYINLMRQIREAIAGDCLASFRNDFYSGLAAE

SEQ ID NO: 54581 - protein, 247 aa, Desulfofustis sp.
  misc_feature (1)..(247): tr|A0A353XBV2|A0A353XBV2_9DELT Queuine tRNA-ribosyltran sferase (Fragment) OS=Desulfofustis sp. OX=2053546 GN=t gt PE=3 SV=1
LFLGPEEAVTVQEALGSDVIMCLDTCIGFPATRDEVEAATALTTRWAARCKTARTRAENLLFGIVQGGMFGDLRAQSAESLVEIGFDGYAIGGLSVGEPTELMYEMTEASVAHLPTTHPVYLMGVGTPADLIEGIWRGVDMFDCVMPTRNARNGTLFTSFGKVVIKNARYRDDPRPIDEACDCPVCRHYSRAYLRHLFSCRELLGYQLCTIHNLHYYLNLMAGARRAIEEDRYGAFRRDFYSGMAPQ

SEQ ID NO: 54582 - protein, 370 aa, Desulfoglaeba alkanexedens
  misc_feature (1)..(370): tr|A0A4P8KZP8|A0A4P8KZP8_9DELT Queuine tRNA-ribosyltran sferase OS=Desulfoglaeba alkanexedens ALDC OX=980445 GN =tgt PE=3 SV=1
MLEFRVVARDGRARRGRLVTARGVTVETPVFMPVGTQATVKSLSPDELESLGASIILGNTYHLYLRPGAERVARLGGLHRFMAWHRAILTDSGGFQVFSLARTRAVEEEGVRFQSHIDGSSHFIRPETAMEIQRLLGSDIAMCFDECTPYPVTRDYAEESMRRTVRWAERCRRSRTGDHQAVFGIVQGSVFADLRKACLEALQEIGFEGYAVGSLSVGEPKETMLSVLEELAPCLPEERPRYLMGVGTPEDLVEGVRLGIDMFDCVMPTRNARNGALFTSSGNLQIKNSRFADDSEPIERGCTCYTCRRFSRAYLRHLFLARELLAYRLNTLHNLHYYLKLMADIRNAVEAGSFESWRKDFYERRSGGSS

SEQ ID NO: 54583 - protein, 371 aa, Desulfohalobium retbaense
  misc_feature (1)..(371): tr|C8X0J3|C8X0J3_DESRD Queuine tRNA-ribosyltransferase OS=Desulfohalobium retbaense (strain ATCC 49708 / DSM 5 692 / JCM 16813 / HR100) OX=485915 GN=tgt PE=3 SV=1
MTHIGSFQIHHTDGPARSGELVTAHGVVPTPIFMPVGTQGTVKSLSPDDLENLGARIILGNTYHLYLRPGDELVARRGGLHRFANWPHPILTDSGGFQVFSLAGLRELSEEGVTFRSHIDGSKHFFSPEKVIDIQRNLGSDIMMVLDECVPYGADHAYTEKSLQLTTRWAKRCREAYPRGAGDQLVFGIVQGGFFEDLRRQSAEQICALDCEGFAIGGLSVGESKQEMHDILQCTAPLLPSAKPRYLMGVGTPLDILNGIAAGVDMFDCVLPTRNARNGTLFTSQGKVNIKRAEYQEDDSRLDPACGCYTCRTFSKAYLRHLYTSRELLSYRLNTIHNLTFFLDLVCGAREAIAAGTFASYKKGFEAVYET

SEQ ID NO: 54584 - protein, 375 aa, Desulfoluna butyratoxydans
  misc_feature (1)..(375): tr|A0A4U8YQE3|A0A4U8YQE3_9DELT Queuine tRNA-ribosyltran sferase OS=Desulfoluna butyratoxydans OX=231438 GN=tgt PE=3 SV=1
MRLTYTKEAQSTECRARAATIKTRRGEIKTPIFMPVGTVGSVKAVSVEDLEEAGAQIILGNTYHLYLRPGTEVLDVFGGLHDFMKWKHPILTDSGGFQFFSLAKLTKRTEEGVSFQSHIDGSRHLFTPEKSIEVQNHIDSDIMMCLDECTPYPSDHRATKESMELTTRWAQRCYDFWQQETNLRNNAFGIVQGGMYKDLRTASVEQICDIDFPGYSIGGLSVGEPKDLMMEMGEHTLAQMPDLKPRYIMGVGTPSDIVELVSMGADMFDCVMPSRNARNGKLFTSEGALNIANQRYQKDEKPLDPVCTCYTCRNYSRAYLRHLYKSKELLAYRLNTIHNLHYYMNLVGEIRQAILEDRFMAWRKDFYAAMEGGIQ

SEQ ID NO: 54585 - protein, 375 aa, Desulfoluna spongiiphila
  misc_feature (1)..(375): tr|A0A1G5GSI4|A0A1G5GSI4_9DELT Queuine tRNA-ribosyltran sferase OS=Desulfoluna spongiiphila OX=419481 GN=tgt PE =3 SV=1
MRLTYTKEAQSTECRARAATIKTRRGEIKTPIFMPVGTVGSVKAVSVEDLEEAGAQIILGNTYHLYLRPGTEVLDVFGGLHDFMKWKHPILTDSGGFQFFSLAKLTKRTEEGVSFQSHIDGSRHVFTPERSIEVQNHIDSDIMMCLDECTPYPSDHRATKESMELTTRWAQRCFDFWQQETDLRNNAFGIVQGGMYKDLRSASVEQICGIDFPGYSIGGLSVGEPKELMMEMGEHTLALMPEEKPRYIMGVGTPSDIVELVMMGADMFDCVMPSRNARNGKLFTSEGALNIANQRYRKDEKPLDPVCTCYTCRNYSRAYLRHLYKSKELLAYRLNTIHNLHYYMNLVGEIRQAIMEDRFMAWRKGFYAAMEGGIQ

SEQ ID NO: 54586 - protein, 406 aa, Desulfomicrobiaceae bacterium
  misc_feature (1)..(406): tr|A0A3D1NG11|A0A3D1NG11_9DELT Queuine tRNA-ribosyltran sferase OS=Desulfomicrobiaceae bacterium OX=2053547 GN= tgt PE=3 SV=1
MGRSQPLSRAFRPRGLLGALAPLHLLPACRHLPAQRSFPVSCFSLITTDGQARRGELTTAHGQIQTPIFMPVGTRGTVKAVCSQDLRDVGAQIILGNTYHLYLRPGDALIARRGGLHRFMSWERPILTDSGGFQVFSLAGLRRISEEGVLFASHIDGSRHLFTPEKVIEIQTNLGSDIMMVLDECVPYGADREYTQRSLALTTRWAKRCREAHPAESPQLLFGIVQGGFFLDLRRESLMQITDIPFDGYALGGLSVGESKEEMLEILEAIGPELPADKPRYLMGVGTPLDLVRGVASGIDMFDCVLPTRNARNGTLFTSLGRITIKRAEYAEDDSPLDPACSCFTCRTFSRAYLRHLYVTQELLAYRLNTIHNLAYFLGLMERVRTAIETGTFAQLQAEIEALYDR

SEQ ID NO: 54587 - protein, 370 aa, Desulfomicrobium apsheronum
  misc_feature (1)..(370): tr|A0A1I3QEC6|A0A1I3QEC6_9DELT Queuine tRNA-ribosyltran sferase OS=Desulfomicrobium apsheronum OX=52560 GN=tgt PE=3 SV=1
MHIGKFSIHNTDGKARAGELHTAHGVIPTPIFMPVGTQGTVKAVCPQDLKDLGARIILGNTYHLYLRPNDEMIARRGGLHKFMNWDRPILTDSGGFQVFSLSGLRKLSEDGVTFSSHIDGSKHVFTPEKVVSIQKNLGSDIMMVLDECVPYGADHEYTKKSLALTTRWAARCRAAYPQGSGDQLLFGIGQGGFFKDLREESIRQLLDIPFDGYALGGLSVGESKAEMMDILYHSAPLLPADKPRYLMGVGTPLDIVRGIDAGIDMFDCVMPTRNARNGTLFTSQGKVNIKRAQYTEDDSPLDPECSCYTCRNFSKAYLRHLYQAQEILSYRLNTIHNLAFFLTVVTGARKAIEEGTFQAYKARFENIYDT

SEQ ID NO: 54588 - protein, 370 aa, Desulfomicrobium baculatum
  misc_feature (1)..(370): tr|C7LX30|C7LX30_DESBD Queuine tRNA-ribosyltransferase OS=Desulfomicrobium baculatum (strain DSM 4028 / VKM B- 1378) OX=525897 GN=tgt PE=3 SV=1
MHIGKFTLHSTDGKARTGELHTAHGVIPTPIFMPVGTQGTVKAVCPQDLKDLGARIILGNTYHLCMRPGDEMIARRGGLHKFMNWDRPILTDSGGFQVFSLSGLRKLSEDGVAFSSHIDGSKHFFSPEKAISIQKNLGSDIMMVLDECVPYGADYEYTKKSLGLTTRWARRCREAYPQGSGDQLLFGIGQGGFFKDLREESIRQLIDIPFDGYALGGLSVGESKPEMLDILYHSAPFLPADKPRYLMGVGTPLDIVRGIDAGIDMFDCVMPTRNARNGTLFTSQGKVNIKRAQYTEDDSALDPECSCYTCRNFSKAYLRHLYQAQEILSYRLNTIHNLAFFLTVVTDARKAIEEGTFQAYKARFEGIYDT

SEQ ID NO: 54589 - protein, 370 aa, Desulfomicrobium norvegicum
  misc_feature (1)..(370): tr|A0A1I4G6U3|A0A1I4G6U3_DESNO Queuine tRNA-ribosyltran sferase OS=Desulfomicrobium norvegicum (strain DSM 1741 / NCIMB 8310) OX=52561 GN=tgt PE=3 SV=1
MHIGKFSIHNTDGKARAGELHTAHGVIPTPIFMPVGTQGTVKAVCPQDLKDLGARIILGNTYHLYLRPNDEMIARRGGLHKFMNWDRPILTDSGGFQVFSLSGLRKLSEDGVTFSSHIDGSKHVFTPEKVVSIQKNLGSDIMMVLDECVPYGADHEYTKKSLGLTTRWAARCRAAYPQGSGDQLLFGIGQGGFFKDLREESIRQLLDIPFDGYALGGLSVGESKAEMMDILYHSAPLLPADKPRYLMGVGTPLDIVRGIDAGIDMFDCVMPTRNARNGTLFTSQGKVNIKRAQYTEDDSPLDPECSCYTCRNFSKAYLRHLYQAQEILSYRLNTIHNLAFFLTVVTDARKAIEEGTFQAYKARFENIYDT

SEQ ID NO: 54590 - protein, 370 aa, Desulfomicrobium orale
  misc_feature (1)..(370): tr|A0A0X8JQI1|A0A0X8JQI1_9DELT Queuine tRNA-ribosyltran sferase OS=Desulfomicrobium orale DSM 12838 OX=888061 G N=tgt PE=3 SV=1
MNIGTFTIQHTDGAARAGELLTAHGVIPTPIFMPVGTQGSVKAVCPQDLKDLGARIILGNTYHLYLRPGDEMIARRGGLHRFMHWDRPILTDSGGFQVFSLSALRKLSEDGVAFSSHIDGSKHFFTPEKAISIQRNLGSDIMMVLDECVPYGADYQYTRKSLERTTRWAARCRAAYPQGGGEQLLFGIGQGGFFKDLREESIRQLRDIPFDGYALGGLSVGESKAEMMDILYHSAPLLPVEKARYLMGVGTPLDIVRGIDAGIDMFDCVLPTRNARNGTLFTSEGKLNIKRAEFAEDDSPLDPQCSCYTCRNFSRAYLRHLYQAREILSYRLNTIHNLSYFLSVVTAARQAIQDGAFQSFKSQMESIYDT

SEQ ID NO: 54591 - protein, 370 aa, Desulfomicrobium sp.
  misc_feature (1)..(370): tr|A0A3D5BQN8|A0A3D5BQN8_9DELT Queuine tRNA-ribosyltran sferase OS=Desulfomicrobium sp. OX=52017 GN=tgt PE=3 SV =1
MKPGTFTIHHTDGASRAGELHTAHGVIPTPIFMPVGTQGTVKAVCPEDLKNLGARIILGNTYHLCMRPGDEMIARRGGLHKFMNWDRPILTDSGGFQVFSLSGLRKLTEDGVAFSSHLDGSKHFFSPEKAISIQRNLGSDIMMVLDECVPYGADYDYTKKSLGLTTRWAERCRKAYPQGSGDQLLFGIGQGGFFRDLREESIRQLIDIPFDGYALGGLSVGESKPEMMDILYHSTPLLPADKPRYLMGVGTPLDIIRGIDAGIDMFDCVLPTRNARNGTLFTSLGKVNIKRAEYTEDDGPLDPECSCYTCRNFSRAYLRHLYQAQEILSYRLNTIHNLANFLQVVTGARKAIAEGTFQAYKARFENIYDT

SEQ ID NO: 54592 - protein, 372 aa, Desulfomonile tiedjei
  misc_feature (1)..(372): tr|I4CD45|I4CD45_DESTA Queuine tRNA-ribosyltransferase OS=Desulfomonile tiedjei (strain ATCC 49306 / DSM 6799 / DCB-1) OX=706587 GN=tgt PE=3 SV=1
MSFAFEVLHRDAGSAARLGRMTIRGIEVPTPAFMPVGTRGVVKTLSSQEIKDFGYKIILSNAYHLYLRPGHKLVEQLGGLHRFMNWDGLILTDSGGFQVFSLARLRKLTDEGVLFQSHIDGSSHLFTPELCIEVQEALGSDIIMCLDDVRGYPATREEALEALLRTTRWAALCLGAKKRVDPALFGIVQGAMYPDLRRLSAESLADLNLDGYAVGGLSVGEPRELMVEMFEVTLPLIFEAVPRYVMGVGKPQDIIDGVLRGADLFDCVLPTRNARNGTLYTSHGSVNIRNSRYRDDPRPIDPQCQCLLCSSYSRAYLRHLFQEREIFGLRLATLHNLSFYYHMMENIRIAITQNRLHSLARDFSVQMEETDD

SEQ ID NO: 54593 - protein, 374 aa, Desulfonatronospira thiodismutans
  misc_feature (1)..(374): tr|D6SM24|D6SM24_9DELT Queuine tRNA-ribosyltransferase OS=Desulfonatronospira thiodismutans ASO3-1 OX=555779 G N=tgt PE=3 SV=1
MNSIGRFRLEHTDGQARCGCLQTLHGEVPTPVFMPVGTQGSVKSLCPMDLDNMGAGMILGNTYHLYLRPGDELLAQMGGLHRFMNWKGPILTDSGGFQVFSLSDLRKITPEGVEFKSHLDGSRHFFTPEKVIRIQKNIGSDIMMVLDECVPYGADLEYTRNSMHRTVQWAWKSRDFYSGETGKQLMFAIVQGGFFMDLRRESAARTCEIPMDGYAIGGVSVGETKQEMLDTVYFTAPLLPRDRPRYLMGVGKPLDILEGINAGLDMFDCVLPTRNARNGTLFTSSGKVNIKQARYRNDETALDPGCDCYTCMNFSRAYLRHLYMAGELLSFRLNTIHNLRFFINLARKARSAIQEKRFAQLISRYRNVEKEQEG

SEQ ID NO: 54594 - protein, 369 aa, Desulfonatronovibrio sp.
  misc_feature (1)..(369): tr|A0A424XWW1|A0A424XWW1_9DELT Queuine tRNA-ribosyltran sferase OS=Desulfonatronovibrio sp. MSAO_Bac4 OX=229385 8 GN=tgt PE=3 SV=1
MNNSSGQFNLEYEDGQARAGQLTTLHGVVKTPVFMPVGTQGTVKSLCPQDLNAIGAQIILSNTYHLYLRPGDELLAQFGGLHKFMNWDKPILTDSGGFQVFSLSDLRKITSDGVEFASHIDGSRHFFTPEKAIAIQNNIGSSIMMVLDECVPYGADFGYTSRSLRLTTDWARRCRDFYPPGKGPQLLFGIVQGGFHHELRSESARQITDIPFDGYALGGLSVGESKQEMLDIMYYSAPLLPVRKPRYLMGVGKPLDILEGINAGIDMFDCVLPTRNARNGTLYTSAGQVNIKRAEYKTDSTALDPECDCYTCTNFSRSYLRHLYMAKELLAYRLNSIHNLRFFVRLTSMARQAIKEGNFSSLLAKFRDL

SEQ ID NO: 54595 - protein, 372 aa, Desulfonatronum sp.
  misc_feature (1)..(372): tr|A0A2T5CAN2|A0A2T5CAN2_9DELT Queuine tRNA-ribosyltran sferase OS=Desulfonatronum sp. SC1 OX=2109626 GN=tgt PE =3 SV=1
MTKTGDFHILATDGQARTATLATAHGTIRTPVFMPVGTVGCVKALSPDDLLDLKAQIILGNTYHLYLLPGDDLVARRGGLHAFSGWKGPILTDSGGFQVFSLQSLRKISENGVEFRSHRDGSKHFFSPEKVVSIQRNLGSDIMMVLDECVPYGADKAYTAKSLGLTTRWAARCRQAYPQDSGSQLQFGIVQGGFFPDLRTESARQICDLPFDGFAIGGLSVGESKPLMLEIMRHTAPLLPSDKPRYLMGVGTPMDILDGIEAGIDMFDCVLPSRNARNGTLYTSLGKVNIKRAEYKEDDGPLDPNCGCYACTRFSRAYLRHLYMARELLAYRLNTIHNLHYFLTLTHGAAQAILEGNFATFKAAVEAVHAHV

SEQ ID NO: 54596 - protein, 373 aa, Desulfonatronum thiosulfatophilum
  misc_feature (1)..(373): tr|A0A1G6BP64|A0A1G6BP64_9DELT Queuine tRNA-ribosyltran sferase OS=Desulfonatronum thiosulfatophilum OX=617002 GN=tgt PE=3 SV=1
MTNTGDFHILGTDGQARCAELTTAHGTIRTPVFMPVGTVGCVKALSPDDLTALKAQIILGNTYHLYILPGDELVARRGGLHTFSGWDGPILTDSGGFQVFSLQGLRKISEDGVEFRSHRDGSKHFFSPEKVVSIQRNLGSDIMMVLDECVPYGADKEYTAQSLGLTTRWAARCRAAYPQGSGNQLLFGIVQGGFFQDLRSESARQICDLPFDGYAIGGLSVGESKPLMLDIMRHTAPLLPADKPRYLMGVGTPMDILDGIEAGIDMFDCVLPTRNARNGTLYTSLGKVNIKRAEYKEDDRPLDPNCDCYACTRFSRAYLRHLYTARELLAYRLNTIHNLHYFLTLTHGAAQAILQGRFATYKAEVQAVHAHAE

SEQ ID NO: 54597 - protein, 374 aa, Desulfonauticus sp.
  misc_feature (1)..(374): tr|A0A101DJ30|A0A101DJ30_9DELT Queuine tRNA-ribosyltran sferase OS=Desulfonauticus sp. 38_4375 OX=1635258 GN=tg t PE=3 SV=1
MHKEKLAIGEFKLEKQEGQARAGLLQTAHGLIKTPVFMPVGTQASVKSLSPEDLKEAGAQIILGNTYHLYLRPGDELIRDLGGLHEFMNWPYPILTDSGGFQVFSLAKLRKITQEGVEFSSHLDGSKHFFSPEKAIEIQKNLGSDIMMVLDECVPYGADYDYTRASVGLTTYWARRCREYYPEGKQLLFGIVQGGFFKDLRVESARQITAIPFSGYAIGGLSVGESKEEMLKFMYFTAPLLPEHKPRYLMGVGKPLDIVEGIRAGIDMFDCVLPTRNARNGTLYTSQGKINIKREEYKRDLRPLDSNCSCYTCKNFSRAYLRHLYVSRELLSYRLNTIHNVHYFVNLAKKARESILRGEFASFYGQIKELYLDD

SEQ ID NO: 54598 - protein, 365 aa, Desulfonauticus submarinus
  misc_feature (1)..(365): tr|A0A1H0AFP2|A0A1H0AFP2_9DELT Queuine tRNA-ribosyltran sferase OS=Desulfonauticus submarinus OX=206665 GN=tgt PE=3 SV=1
MSFKLVAKDKQARAGVLRTAHGEINTPIFMPVGTQASVKSLSPNDLIEAKAQIILGNTYHLYLRPGDELIRDLGGLHNFMSWPKPILTDSGGFQVFSLAKLRKLTRDGVEFSSHIDGSKHFFTPEKVMQIQKNLGSDIMMVLDECVPYGADYDYTRSSVGITTYWAKRCREFYPSGKQLLFGIVQGGFFKDLREESARQITNIPFDGYAIGGLSVGEPKAQMIEFLYFTAPLLPEDKPRYLMGVGKPLDILEGIRAGVDMFDCVLPTRNARNGTLYTSKGKINIKREEYKRDLSPLDPECNCYTCRNFSKAYLRHLYTSRELLAYRLNTLHNITYFLNLVNQARASIFNGTFENFYNHIKSIYTC

SEQ ID NO: 54599 - protein, 373 aa, Desulfonema ishimotonii
  misc_feature (1)..(373): tr|A0A401G3Q1|A0A401G3Q1_9DELT Queuine tRNA-ribosyltran sferase OS=Desulfonema ishimotonii OX=45657 GN=tgt PE=3 SV=1
MSHPFNVTAQSQTTRARAGELKLVHGTIKTPVFMPVGTLASVKSLSPEELKEAGAQIILGNTYHLYLRPGCEVIDLFSGLHRFMNWDRPILTDSGGFQVFSLAKLTKITEEGAAFQSHIDGSKHLLTPEKSVEVQISLNSDIMMCLDQCIEYPAEKEAVRAALEITTRWAKRCKSTWTEKTGGKNALFGIVQGGMFEDLRRQSAEELGEMDFPGYALGGLSVGEPNQMMYDVAEYALPLLPDNKPKYIMGVGTPEDLVELVARGADMFDCVMPSRNARNGQLFTRNGAINISNARFRTDTGPADPECDCYTCRNYSRAYLRHLYMNRELLAYRLNTLHNIHFYIRLMERMRAAITDGEFDAFRRNFHAHWQAR

SEQ ID NO: 54600 - protein, 368 aa, Desulfonispora thiosulfatigenes
  misc_feature (1)..(368): tr|A0A1W1VRJ6|A0A1W1VRJ6_DESTI Queuine tRNA-ribosyltran sferase OS=Desulfonispora thiosulfatigenes DSM 11270 OX =656914 GN=tgt PE=3 SV=1
MFEFELIKECKDTKARVGLLKTPHGDIETPIFMPVGTQATVKTLSPCELKSINSQIILSNTYHLYLRPGHKLVKEAGGLHKFMNWDRPILTDSGGFQVFSLGDLRTITEEGVEFRSHLDGSKHFLSPEKVMEIENDLGADIIMAFDECAPYPCTHEYAKNSLERTTRWAKRCKDSHQRNDQALFGIIQGGTFKDLRIQSANELIPMDFPGYAIGGLSVGEPNELMYEVLDYLTPIMPKHKPRYLMGVGAPDNIVEGIMRGVDMFDCVLPTRIARNGTAMTRTGKLVVRNAKYKADFTPIDEECTCYACKNFTRAYIRHLIKTDEILGLRLISIHNLHFLLELARESRNAILEDRFIEFRKEFYKKYKI

SEQ ID NO: 54601 - protein, 373 aa, Desulfopila aestuarii
  misc_feature (1)..(373): tr|A0A1M7Y7C8|A0A1M7Y7C8_9DELT Queuine tRNA-ribosyltran sferase OS=Desulfopila aestuarii DSM 18488 OX=1121416 G N=tgt PE=3 SV=1
MRETTTPYTLHNRSSECRARRGHVTTRQGTIQTPVFMPVGTQATVKAVTPENLYEMNAEIILGNTYHLFIRPGHELIERFGGLHKFMNWKGSILTDSGGFQIFSLKDLAKITEEGASFRSHVDGAKLFLSPEIAVQVQQSLGSDIMMCLDTCIPYPATKDEVIKSTALTTRWAQRCREAHTSREQLLFGIVQGGMHEELRKMHIEQLMEIGFDGYAIGGLSVGEEPQMMYDIAEATTPHMPENYARYLMGVGTPQDLVEGVWRGIDMFDCVMPTRNARNGMLFTSNGRLVIKNSRYRDDMRPLDENCSCYTCRNYSRAYLRHLYASREILSYHLNTIHNLHYYLTLMADIRKAIEEDNFAAFRNDFYGRLQGE

SEQ ID NO: 54602 - protein, 372 aa, Desulfopila sp.
  misc_feature (1)..(372): tr|A0A4U1A4I8|A0A4U1A4I8_9DELT Queuine tRNA-ribosyltran sferase OS=Desulfopila sp. IMCC35005 OX=2569541 GN=tgt PE=3 SV=1
MQNNTPYTLHCSSSECAARRGQVTTRQGTIQTPVFMPVGTQATVKAVTPENLYEMNAEIILGNTYHLFIRPGHKLIERFGGLHNFMNWKGSILTDSGGFQIFSLKDLATITEEGAAFRSHLDGSKLFLSPEDAVQVQQSLGSDIMMCLDTCIPYPATKDEVINSTNLTTRWAKRCRDAHTKREQLLFGIIQGGMHEELRKMHAEQLIDIGFDGYAIGGLSVGEEPQVMYDMTEATTPHMPKEYARYLMGVGTPQDLIEGVWRGIDMFDCVMPTRNARNGYLFTSTGRVVIKNSRYRDDMLPLDENCTCYTCRNYSRAYLRHLFVSREILSYHLNTIHNLHYYLNLMAGVRKSIEEDNFAQFRKDFYGRLECK

SEQ ID NO: 54603 - protein, 372 aa, Desulfopila sp.
  misc_feature (1)..(372): tr|A0A4U1AFG0|A0A4U1AFG0_9DELT Queuine tRNA-ribosyltran sferase OS=Desulfopila sp. IMCC35006 OX=2569542 GN=tgt PE=3 SV=1
MHTTSPFTLHCNSSECAARRGEVRTRQGVFQTPVFMPVGTQGTVKAVTPENLLEMKAQIILGNTYHLFIRPGHELIASFGGLHNFMNWKGSILTDSGGFQIFSLKELATITEEGAAFRSHLDGSKLFLSPEDAIHVQQSLGSDIMMCLDTCIPFPASRDEAIKATDLTSRWARRCREAHSKREQLLFGIVQGGMYPDLRKDHAAALIDIGFDGYAIGGLSVGEEKNLMHEMTEATVPCLPKDYPVYLMGVGTPADLVEGVWRGIDMFDCVMPTRNARNGSLFTSTGKLSIKNSRFRDDHKPLDEECSCYTCRNYSRAYLRHLFQAREILSYHLNTIHNLHYYLHLMADIRQAIETDSFGRFRKDFYSKLEPE

SEQ ID NO: 54604 - protein, 373 aa, Desulfoplanes formicivorans
  misc_feature (1)..(373): tr|A0A194AEQ4|A0A194AEQ4_9DELT Queuine tRNA-ribosyltran sferase OS=Desulfoplanes formicivorans OX=1592317 GN=tg t PE=3 SV=1
MNAHASLFTCQATDGSARAGTLITPHGVIQTPIFMPVGTLGTVKSLDPHDLYAMGAQIILGNTYHLYLRPGDEMIARRGGLHKFMRWDKPILTDSGGFQVFSLAGLRTITDDGVEFSSHIDGSKHFFSPEKVIAIQTNLGSDIMMVLDECVPYGADHDYTAKSLKKTTAWAKRCRAAYTRGETGNQLMFGIVQGGFFKDLRTQSAREITAIPFEGYAIGGLSVGESKREMLDMLEHTTPLLPSEKPRYLMGVGAPMDLVNGIRNGVDMFDCVLPTRNARNGTLFTSLGKVNIKRAQYREDDSPLDPHCSCYTCRNFSKAYLRHLYVSRELLSYRLNSIHNLHFLLDLVKKARKAIFEGRYEMFYKHWQTIYPE

SEQ ID NO: 54605 - protein, 372 aa, Desulforhopalus singaporensis
  misc_feature (1)..(372): tr|A0A1H0QC28|A0A1H0QC28_9DELT Queuine tRNA-ribosyltran sferase OS=Desulforhopalus singaporensis OX=91360 GN=tg t PE=3 SV=1
MSQKSPFTLHCLSTECDARRGEVRTRQGVFQTPVFMPVGTQGTVKAVTPENLMEMNAQIILGNTYHLFIRPGHRLIESFGGLHRFMNWKGSILTDSGGFQIFSLKELATITEEGAAFRSHLDGSKLFLSPEDAVEVQQSLGSDIMMCLDTCIPFPSTRDETIRATELTTRWARRCRSAHSRREQLLFGIVQGGMYPELRKEHAEALIDIGFDGYAIGGLSVGEKPQIMYDMTRETVASLPADYPRYLMGVGTPEDLVEGVWRGVDMFDCVMPTRNARNGSLFTSKGKISIKNARFRDDHSPVDEECGCYTCRNYSRAYLRHLFQAREILSYHLNTIHNLHFYLTLMANIRKAIEKDNFARFRQDFYSKLEYE

SEQ ID NO: 54606 - protein, 372 aa, Desulforhopalus sp.
  misc_feature (1)..(372): tr|A0A4U0ZRS6|A0A4U0ZRS6_9DELT Queuine tRNA-ribosyltran sferase OS=Desulforhopalus sp. IMCC35007 OX=2569543 GN= tgt PE=3 SV=1
MTNTSPFTLHKQSSECAARRGEVKTRQGIIQTPVFMPVGTQGTVKAVTPENLQEMNAQIILGNTYHLFIRPGHELIESFGGLHKFMNWKGSILTDSGGFQIFSLKELATITEEGAAFKSHLDGSKLFLSPEDAVHVQQSLGSDIMMCLDTCIPFPATKDETIKATDLTTRWANRCRMAHTKRDQLLFGIVQGGMYPELRREHAAALIDIGFDGYAIGGLSVGEDKHLMYDMTEETVPALPKDYPVYLMGVGTPADLVEGVYRGVDMFDCVMPTRNARNGSLFTEKGKISIKNAQYRDDHGPIDENCTCYTCRNYSRAYLRHLFHAREILSSHLNTIHNLHFYLNLMAGIRKAIEEDNFARFRKDFYSKLENE

SEQ ID NO: 54607 - protein, 372 aa, Desulforudis audaxviator; identical to SEQ ID NO: 53240
  misc_feature (1)..(372): sp|B1I4K8|TGT_DESAP Queuine tRNA-ribosyltransferase OS= Desulforudis audaxviator (strain MP104C) OX=477974 GN=t gt PE=3 SV=1

SEQ ID NO: 54608 - protein, 374 aa, Desulfosoma caldarium
  misc_feature (1)..(374): tr|A0A3N1UY70|A0A3N1UY70_9DELT Queuine tRNA-ribosyltran sferase OS=Desulfosoma caldarium OX=610254 GN=tgt PE=3 SV=1
MNPFEILAVDSKSRARRGRLLTSHGPVETPVFMPVGTQATIKALSPDEVHALGARIILGNTYHLSLRPGAQRIARLGGLHAFMAWPGAILTDSGGFQVFSLATIRTIDEDGVTFQSHIDGSRHRITPESCIEIQELLGSDIAMCFDECTPYPVTRDYAKASMERTVRWARRCRNAHTREDQLLFAIVQGGVFPDLRRACVEALTAMDFPGYAVGSLAVGEPKEVMLDVLETVVPDLPHDKPRYLMGVGMPEDLVEGVWRGIDMFDCVVPTRNARNGMVFTSRGALQIKHSRYADDPEPIEAACTCYTCRTFSRAYLRHLFMAKELLVYRLLSLHNLHYFLTLMESIRDAVMRGSFEEFRRQFYARRCVEEPIAD

SEQ ID NO: 54609 - protein, 374 aa, Desulfosporosinus acididurans
  misc_feature (1)..(374): tr|A0A0J1FSM0|A0A0J1FSM0_9FIRM Queuine tRNA-ribosyltran sferase OS=Desulfosporosinus acididurans OX=476652 GN=t gt PE=3 SV=1
MAAVHLEILKEDSRTKARLGTLHTPHGVIDTPVFMPVGTQGTVKAMTPEELREIGAGIILSNTYHLFLRPGQELIREAGGLHRFMNWDGAILTDSGGFQVFSLGDLRTIQESGVEFRSHIDGSRQFLSPEIATQVQMAIGSDIVMAFDECAPYPSSHDYVKNSLERTTRWLKRCKETLTTTDRQSLFGIVQGGMYEDLRRQSAAEVTELDLPGYAIGGLSVGEPKEIMYEVLDYTVPLLPREKPRYLMGVGSPDAIIEGVMRGVDMFDCVLPTRIARNGTAMTRYGKVIVRNAGSAHDFGPIDPTCDCYTCRNYSRAYVRHLLKAEEILGLRLMTIHNLRYLQNLMREIREAIREDRLPEYRQKCFADYGYEFD

SEQ ID NO: 54610 - protein, 374 aa, Desulfosporosinus acidiphilus
  misc_feature (1)..(374): tr|I4D998|I4D998_DESAJ Queuine tRNA-ribosyltransferase OS=Desulfosporosinus acidiphilus (strain DSM 22704 / JC M 16185 / SJ4) OX=646529 GN=tgt PE=3 SV=1
MAAVHLEILKEDSRTKARLGKLHTPHGVIDTPVFMPVGTQGTVKAMTPEEIREVGAGIILSNTYHLFLRPGQELIREAGGLHRFMNWDGAILTDSGGFQVFSLGDLRTIQESGVEFRSHIDGSRQFLSPEIATQMQMTIGSDIVMAFDECAPYPSTREYVKNSLERTTRWLKRCKETLTTTETQALFGIVQGGMYEDLRRQSAAEITELDLPGYAIGGLSVGEPKELMYEVLDYTVPLLPREKPRYLMGVGSPDAIIEGVMRGVDMFDCVLPTRIARNGTAMTRFGKVIVRNAGSAHDFGPIDPTCDCYACRNYSRAYIRHLLKAEEILGLRLMTIHNLRYLQNLMREIRDAIREDRLPEYRQKCFADYGYEYE

SEQ ID NO: 54611 - protein, 372 aa, Desulfosporosinus fructosivorans
  misc_feature (1)..(372): tr|A0A4Z0R4X7|A0A4Z0R4X7_9FIRM Queuine tRNA-ribosyltran sferase OS=Desulfosporosinus fructosivorans OX=2018669 GN=tgt PE=3 SV=1
MTAVHLEILKEDTRTRARLGKLHTPHGVIDTPVFMPVGTQGTVKTITPEEIKEIEAGIILSNTYHLFLRPGHELIKEAGGLHRFMNWDGAILTDSGGFQVFSLGDLRTIKESGVEFRSHLDGSSQFLSPEIATQVQMALGSDIVMAFDECAPYPCTHKYAKDSLERTTRWLKRCKETLTTTDTQALFGIVQGGMYEDLRRQSAAEIIELDLPGYAIGGLSVGEPKDLMYEVLDYTVPLLPREKPRYLMGVGSPDALIEGVMRGVDMFDCVLPTRIARNGTAMTRYGKVIIRNAGSAHDFGPIDPTCDCYTCRNYSRAYIRHLIKAEEVLGLRLMTIHNLRYLQNLMKEIREAIKEDRLPEYRQKCFSDYGYI

SEQ ID NO: 54612 - protein, 372 aa, Desulfosporosinus hippei
  misc_feature (1)..(372): tr|A0A1G8GI27|A0A1G8GI27_9FIRM Queuine tRNA-ribosyltran sferase OS=Desulfosporosinus hippei DSM 8344 OX=1121419 GN=tgt PE=3 SV=1
MAAVYLEILKEDSRTKARLGKLHTPHGTIDTPVFMPVGTQGTVKTMTPEEIKEIGAGMILSNTYHLFLRPGHELVREAGGLHRFMNWDGAILTDSGGFQVFSLGDMRTIREEGVEFRSHIDGSRQFLSPEISMQVQMSLGSDVVMAFDECAPYPCTHTYAKDSLERTTRWLKRCKETLTTTDTQSLFGIVQGGMFEDLRRQSAAEITELDLPGYAIGGLSVGEPKDIMYEVLDYTVPLLPREKPRYLMGVGSPDALIEGVMRGIDMFDCVLPTRIARNGTALTRFGKVIVRNAGSARDFGPIDPSCDCYTCRNYSRAYIRHLLKAEEILGLRLMSIHNLRYLQILMHEVREAIKEDRLPEYREKCFSDYGYE

SEQ ID NO: 54613 - protein, 372 aa, Desulfosporosinus lacus
  misc_feature (1)..(372): tr|A0A1M5Z2E2|A0A1M5Z2E2_9FIRM Queuine tRNA-ribosyltran sferase OS=Desulfosporosinus lacus DSM 15449 OX=1121420 GN=tgt PE=3 SV=1
MTAVYLEILKEDSRTRARLGKLHTPHGIMDTPVFMPVGTQGTVKTITPEEIKEIGAGMILSNTYHLFLRPGHELIREAGGLHRFMNWDGAILTDSGGFQVFSLGDLRTIREEGVEFRSHIDGSRQFLSPEISMQVQMALGSDVVMAFDECAPYPCTHEYAKDSLERTTRWLKRCKETLTTTETQSLFGIVQGGMFEDLRRQSAAEITELDLPGYAVGGLSVGEPKEMMYEVLDYTVPLLPREKPRYLMGVGSPDALIEGVMRGIDMFDCVLPTRIARNGTALTRYGKVIVRNAGSARDLGPIDPSCDCYTCRNYSRAYIRHLLKAEEILGLRLMTIHNLRYLQILMREIREAIKEDRLPEYREKCFSDYGYE

SEQ ID NO: 54614 - protein, 372 aa, Desulfosporosinus meridiei
  misc_feature (1)..(372): tr|J7IV17|J7IV17_DESMD Queuine tRNA-ribosyltransferase OS=Desulfosporosinus meridiei (strain ATCC BAA-275 / DS M 13257 / NCIMB 13706 / S10) OX=768704 GN=tgt PE=3 SV=1
MAAVYLEILKEDSRTKARLGKLHTPHGTIETPVFMPVGTQGTVKTMTPEEIKEIGAGMILSNTYHLFLRPGHELVREAGGLHRFMNWDGAILTDSGGFQVFSLGDMRTIREEGVEFRSHIDGSRQFLSPEISMQVQMSLGSDVVMAFDECAPYPCTHTYAKDSLERTTRWLKRCKETLTTTDKQSLFGIVQGGMFEDLRRQSAAEITELDLPGYAIGGLSVGEPKDIMYEVLDYTVPLLPREKPRYLMGVGSPDALIEGVMRGIDMFDCVLPTRIARNGTALTRFGKVIVRNAGSARDFGPIDPSCDCYTCRNYSRAYIRHLLKAEEILGLRLMSIHNLRYLQILMHEVREAIKEDRLPEYREKCFSDYGYE

SEQ ID NO: 54615 - protein, 374 aa, Desulfosporosinus orientis
  misc_feature (1)..(374): tr|G7W5F5|G7W5F5_DESOD Queuine tRNA-ribosyltransferase OS=Desulfosporosinus orientis (strain ATCC 19365 / DSM 765 / NCIMB 8382 / VKM B-1628) OX=768706 GN=tgt PE=3 SV =1
MAAVYLEILKEDSRTKARLGKLHTPHGIIDTPVFMPVGTQGTVKTMTPEEIKEIGAGMILSNTYHLFLRPGHDLVREAGGLHRFMNWDGAILTDSGGFQVFSLGDLRKIMEEGVEFRSHIDGSRQFLSPEISMQVQMALGSDVVMAFDECAPYPCSHQYAKDSLERTTRWLKRCKETLTTTETQSLFGIVQGGMFEDLRRQSAAEITELDLPGYAVGGLSVGEPKEMMYEVLDYTVPLLPREKPRYLMGVGSPDALIEGVIRGIDMFDCVLPTRIARNGTALTRYGKVIVRNAGSARDFGPIDPSCDCYACRNYSRAYIRHLLKADEILGLRLMTIHNLRYLQILMGEIREAIKEDRLPEYREKCFADYGYELD

SEQ ID NO: 54616 - protein, 374 aa, Desulfosporosinus sp.
  misc_feature (1)..(374): tr|A0A0F2JJ77|A0A0F2JJ77_9FIRM Queuine tRNA-ribosyltran sferase OS=Desulfosporosinus sp. I2 OX=1617025 GN=tgt P E=3 SV=1
MTAVHLEILKEDSRTKARLGKLHTPHGVMETPVFMPVGTQGTVKTITPEEIREIGAGMILSNTYHLFLRPGHELIREAGGLHRFMNWDGAILTDSGGFQVFSLGDMRTIKEEGVEFRSHIDGSRQFLSPEISMQVQMALGSDVVMAFDECAPYPCTHEYAKDSLERTTRWLKRCKETLTTTETQSLFGIVQGGMYEDLRRQSAAEIIELDLPGYAIGGLSVGEPKEMMYEVLDYTVPLLPREKPRYLMGVGSPDALIEGVMRGIDMFDCVLPTRIARNGTAMTRYGKVIVRNAGSARDFGPIDPSCDCYTCRNYSRAYIRHLLKAEEILGLRLMTIHNLRYLQILMREIREAIKEDRLPEYRQTCFADYGYEQD

SEQ ID NO: 54617 - protein, 372 aa, Desulfosporosinus sp.
  misc_feature (1)..(372): tr|A0A101WJ58|A0A101WJ58_9FIRM Queuine tRNA-ribosyltran sferase OS=Desulfosporosinus sp. BRH_c37 OX=1734396 GN= tgt PE=3 SV=1
MTAVHLEILKEDSRTKARLGKLHTPHGVIDTPVFMPVGTQGTVKTITPEEIKEIGAGIILSNTYHLFLRPGHELIREAGGLHRFMNWDGAILTDSGGFQVFSLGDLRTIKESGVEFRSHIDGSRQFLSPEIATQVQMALGSDIVMAFDECAPYPCTHEYAKDSLERTTRWLKRCKDTLTTTDNQGLFGIVQGGMYEDLRRQSAAEITELDLPGYAIGGLSVGEPKEMMYEVLDYTVPLLPREKPRYLMGVGSPDALIEGVMRGVDMFDCVLPTRIARNGTAMTRYGKVIVRNAGSAHDFGPIDPTCDCYTCRNYSRAYIRHLIKAEEILGLRLMSIHNLRYLQNLMREIREAIKEDRLPEYRQKCFSDYGYE

SEQ ID NO: 54618 - protein, 373 aa, Desulfosporosinus youngiae
  misc_feature (1)..(373): tr|H5Y1W3|H5Y1W3_9FIRM Queuine tRNA-ribosyltransferase OS=Desulfosporosinus youngiae DSM 17734 OX=768710 GN=tg t PE=3 SV=1
MASVYLEILKEDSRTKARLGKLHTPHGIMDTPVFMPVGTQATVKTITPEEIKEIGAGMILSNTYHLFLRPGHELIREAGGLHRFMNWDGAILTDSGGFQVFSLGDLRTIREEGVEFRSHIDGSHQFLSPEISMQVQMALGSDVVMAFDECAPYPCTHEYAKDSLERTTRWLKRCKETLTTTETQSLFGIVQGGMFEDLRRQSAAEVTALDLPGYAVGGLSVGEPKEMMYEVLDYTVPLLPREKPRYLMGVGSPDALIEGVMRGIDMFDCVLPTRIARNGTALTRYGKVIVRNAGSARDFGPIDPSCDCYTCRNYSRAYIRHLLKAEEILGLRLMTIHNLRYLQILMEEIREAIKEDRLPEYREKCFSDYGYDD

SEQ ID NO: 54619 - protein, 267 aa, Desulfotalea psychrophila
  misc_feature (1)..(267): tr|Q6APT8|Q6APT8_DESPS Queuine tRNA-ribosyltransferase OS=Desulfotalea psychrophila (strain LSv54 / DSM 12343) OX=177439 GN=DP0907 PE=3 SV=1
MEKKKSPFTLHNKSTQCQARRGEVATKHGVFQTPVFMPVGTQGTVKAVTPENLKDLGAQIILGNTYHLFIRPGHKLIEKFGGLHKFMNWDGSILTDSGGFQIFSLKELTKITEEGAAFRSHIDGAKLFLSPEGAIDVQQSLGSDIMMALDTCIPYPSTREETIKSTNLTTRWAKRCREAHTKRDQHLFGIVQGGMHYDLRAEHAASLIDIGFDGYAIGGLSVGEDNQVMYDTTEATIPHLPEDYARYLMGVGTPEDLIEGVWVVLIV

SEQ ID NO: 54620 - protein, 372 aa, Desulfotalea sp.
  misc_feature (1)..(372): tr|A0A2G2DK61|A0A2G2DK61_9DELT Queuine tRNA-ribosyltran sferase OS=Desulfotalea sp. OX=2030813 GN=tgt PE=3 SV=1
MINNSPFTLHKQSTECAARRGEVKTRQGVIQTPVFMPVGTQGTVKAVTPENLQEMNAQIILGNTYHLFIRPGHKLIESFGGLHKFMNWKGSILTDSGGFQIFSLKELATITEEGAAFKSHLDGSKLFLSPEDAINVQQSLGSDIMMCLDTCIPYPATKDETIKATDLTTRWANRCRIAHTKRDRLLFGIVQGGMFPELRRDHAAALIDIGFDGYAIGGLSVGEDKHLMFDMTEETVPALPKEYPVYLMGVGTPADLVEGVFRGVDMFDCVMPTRNARNGSLFTSKGKISIKNARFRDDHGPVDDQCNCYTCRNYSRAYLRHLFHAREILSSHLNTIHNLHFYLNLMADIRKAIEDDNFVQFRKDFYSKLDDE

SEQ ID NO: 54621 - protein, 371 aa, Desulfotignum phosphitoxidans
  misc_feature (1)..(371): tr|S0FZQ8|S0FZQ8_9DELT Queuine tRNA-ribosyltransferase OS=Desulfotignum phosphitoxidans DSM 13687 OX=1286635 G N=tgt PE=3 SV=1
MKFTLIKKSTRNRARLGMIDTPRGRIQTPIFMPVGTVGSVKALTSDDLKHCGAQIILGNTYHLYLRPGCDVMSHMGGLHEFIRWDRPMLTDSGGFQFFSLAKLAKFTEDGVTFQSHIDGSRHFFSPEKSVEIQTILGSDIMMSLDWCMGYPATFDQAQTALEKTTAWAQKGYDFWQAQGAPNNLFGIVQGGMFKDLRTRSAEELMQIDFSGFAIGGLSVGEPTDLMYEMANHTLPLLPENKPRYIMGVGTPENLVELTQMGCDMFDCVMPSRNARNGKLFTSKGDMNIHNARFKFDTRPIDETCSCYTCQNYTRAYLRHLYKSRELLAYRLNTIHNLYYYLDLMAKMREAIQADEFDAFKRQFYENRAQGV

SEQ ID NO: 54622 - protein, 370 aa, Desulfotomaculum aeronauticum
  misc_feature (1)..(370): tr|A0A1M6NM87|A0A1M6NM87_9FIRM Queuine tRNA-ribosyltran sferase OS=Desulfotomaculum aeronauticum DSM 10349 OX=1 121421 GN=tgt PE=3 SV=1
MPVKITIEKEEKYTRARLGKLATPHGEVETPIFMPVGTQATVKTMTPEEVYQTGGRLILSNTYHLYLRPGHDLVKEAGGLHKFMNWHGPILTDSGGFQVFSLGPLRTITEDGVEFRSHIDGSKHFFTPEKVMEIEQALGADIAMAFDECAPYPCEKEYAVAALERTTRWAERCKKAHQRKDQALFGIIQGGVFTDLRERSAKELIAMDFPGYGIGGLSVGEPKELMYEVLDHLIPIMPKDKPRYLMGVGSPDCLIEGVIRGVDMFDCVLPTRIARNGTVFTHKGKLTVRNAEYARDFRPMDEQCDCYACQNYSRAYIRHLIKTDEILGIRLTTIHNLHFLQHLMGTIKEAIRQDRLLEYREEFFSHFNAG

SEQ ID NO: 54623 - protein, 247 aa, Desulfotomaculum aquiferis
  misc_feature (1)..(247): tr|A0A4Q2WNW5|A0A4Q2WNW5_9FIRM Queuine tRNA-ribosyltran sferase OS=Desulfotomaculum aquiferis OX=1397668 GN=N75 2_04430 PE=3 SV=1
MVREAGGLHKFMNWHGPILTDSGGFQVFSLGPLRTITEEGVTFRSHIDGSKHLFTPEKVMEIEQALGADIAMAFDECAPYPCDKEYAIAALERTTRWAERCKKVHSRKDQALFGIIQGGVFNDLRERSAKELLAMDFPGYGIGGLSVGEPKDLMYDVLDHLIPLMPKDKPRYLMGVGSPDCLIEGVIRGVDMFDCVLPTRIARNGTVFTHKGKLTVRNAEFARDFRPMDEQCDCYACQIIPGLISGI

SEQ ID NO: 54624 - protein, 370 aa, Desulfotomaculum arcticum
  misc_feature (1)..(370): tr|A0A1I2SED9|A0A1I2SED9_9FIRM Queuine tRNA-ribosyltran sferase OS=Desulfotomaculum arcticum DSM 17038 OX=11214 24 GN=tgt PE=3 SV=1
MTISFEVTGNDTRSGARLGLLTTPHGTIKTPVFMPVGTQASVKTMTPEEVQEVGGTMILGNTYHLYLRPGHEIVAEAGGLHNFMNWPGPILTDSGGFQVFSLGPLRKITDQGVTFRSHIDGSEHFFSPEKAMEIQMALGADVVMAFDECAPYPCSYDEARAATERTTRWAERCLNRHDRKDQALFGIIQGGTYRDLRLKSASEITSLGFPGFGIGGLSVGEPKPVMYEVLDYLVPEMPWNKPRYLMGVGSPDCLLEGVSRGVDMFDCVLPTRIARNGTVFTRDGKLVVRNAEYARDFRPLDPDCDCYTCKNYSRAYIRHLIKANEVLGIRLTTLHNLRFVLRLMEDIRAAIANGDFVEYKDRFLQRFNAE

SEQ ID NO: 54625 - protein, 369 aa, Desulfotomaculum copahuensis
  misc_feature (1)..(369): tr|A0A1B7LHH0|A0A1B7LHH0_9FIRM Queuine tRNA-ribosyltran sferase OS=Desulfotomaculum copahuensis OX=1838280 GN=t gt PE=3 SV=1
MGFKFSVLQTDNQTRARLGLLETTHGPVQTPVFMPVGTQATVKTMTPEEVRSVGGRLILSNTYHLYLRPGHELIRGAGGLHRFMGWDGPILTDSGGFQVFSLGPLRRVEEDGVRFRSHIDGSEHYFSPEKAVAVQEALGSDIAMAFDECAPYPCTYEQARAAVERTTRWAGRCLDAHRSPEQALFGIVQGGVHRDLREKSACELLELNFPGYGIGGLSVGEPKEMMYAVLDFTVPLLPVDKPRYLMGVGSPDCLLEGVARGVDMFDCVLPTRIARNGTVFTRRGKLVVRNAEYARDFRPLDGDCGCYTCRHFTRAYVRHLIKAGEILGIRLTTIHNLYFVLRLMENIRQAIREGNFEQFRKKFLAGWQA

SEQ ID NO: 54626 - protein, 370 aa, Desulfotomaculum ferrireducens
  misc_feature (1)..(370): tr|A0A1S6IW66|A0A1S6IW66_9FIRM Queuine tRNA-ribosyltran sferase OS=Desulfotomaculum ferrireducens OX=1833852 GN =tgt PE=3 SV=1
MPVKITIEKEEKYTRARLGKLSTPHGEVETPIFMPVGTQATVKTMTPEEVYQTGGRLILSNTYHLYLRPGHELVREAGGLHKFMNWHGPILTDSGGFQVFSLGPLRTVTEDGVEFRSHIDGSKHFFTPEKVMEIEQALGADIAMAFDECAPYPCEKEYALAALERTTRWAERCKKAHTRKDQALFGIIQGGVFKDLRERSAKELIAMDFPGYGIGGLSVGEPKELMYEVLDHLIPIMPKDKPRYLMGVGSPDCLIEGVIRGVDMFDCVLPTRIARNGTVFTHKGKLTVRNAEYARDFRPMDEQCDCYACQNYSRAYIRHLIKTDEILGIRLTTIHNLHFLQHLMGKIREAIRQDRLLEYREEFFSHFNAG

SEQ ID NO: 54627 - protein, 379 aa, [Desulfotomaculum] guttoideum
  misc_feature (1)..(379): tr|A0A1I0I6T8|A0A1I0I6T8_9FIRM Queuine tRNA-ribosyltran sferase OS=[Desulfotomaculum] guttoideum OX=58134 GN=tg t PE=3 SV=1
MNYKIVAKDGRAKRAEVTTVHGTIQTPVFMNVGTVAAIKGAVSTDDLREIRTQVELSNTYHLHVRTGDKLIKEFGGLHKFMSWDRPILTDSGGFQVFSLTGLRKIKEEGVYFQSHIDGRKIFMGPEESMQIQSNLASTIAMAFDECPPHPATREYMQNSVDRTTRWLERCQAEMAKLNSQPDTLNKEQLLFGINQGGTFEDIRISHAKTISAMDLDGYALGGLAVGESHEEMYRILDETVPYLPENKPTYLMGVGTPANILEAVDRGVDFFDCVYPSRNGRHGHVYTNHGKMNLFNTKYELDHRPIEEGCGCPACRSYSRAYIRHLFKAKEMLGMRLCVLHNLYFYNTMMEEIRDAIENHRYGEYKEQKLSGMMAGQTT

SEQ ID NO: 54628 - protein, 370 aa, Desulfotomaculum hydrothermale
  misc_feature (1)..(370): tr|K8DXH1|K8DXH1_9FIRM Queuine tRNA-ribosyltransferase OS=Desulfotomaculum hydrothermale Lam5 = DSM 18033 OX=1 121428 GN=tgt PE=3 SV=1
MPVKIIIEKEEKHTRARLGKLYTPHGVVETPIFMPVGTQATVKTMTPEEVWETGGRLILSNTYHLYLRPGHDLIREAGGLHRFMNWHGPILTDSGGFQVFSLGPLRTITEEGVEFRSHIDGSKHFFTPEKVMEIEQALGADIAMVFDECAPYPCDREYALAALERTTRWAARCQKAHHRKDQALFGIIQGGVFNDLRARSARELMELDFPGYGIGGLSVGEPKELMYDVLDHLIPLLPKDKPRYLMGVGSPDCLIEGVIRGVDMFDCVLPTRIARNGAVFTHKGRLTVRNAEYAKDFRPLDEQCDCYTCRNYSRAYIRHLIKADEVLGIRLTTIHNLHFIQRLMDKIKEAIRQDRLLEYRAEFLSHFQAG

SEQ ID NO: 54629 - protein, 370 aa, Desulfotomaculum nigrificans
  misc_feature (1)..(370): tr|F6B450|F6B450_DESCC Queuine tRNA-ribosyltransferase OS=Desulfotomaculum nigrificans (strain DSM 14880 / VKM B-2319 / CO-1-SRB) OX=868595 GN=tgt PE=3 SV=1
MPVKITIDKEEKHTRARLGRLSTPHGVVETPIFMPVGTQATVKTMTPDEVKQTGGRLILSNTYHLYLRPGHELVKEAGGLHKFMNWDGPILTDSGGFQVFSLGPLRTITEEGVTFRSHIDGSKHYFTPERVMEIEEALGADIAMAFDECAPYPCDREYALAALERTTRWAERCKKAHKREDQALFGIVQGSVYHDLRERSARELIDLDFPGYGIGGLSVGEPKEVMYDVLDHLMPIMPKDKPRYLMGVGSPDCLIEGVIRGVDMFDCVLPTRIARNGTVFTHKGRLTVRNAEYARDFRPLDEQCDCYACRNFTRAYIRHLIKANEILGIRLTTIHNLHFLQRLMEKIREAIREDRLLQYRAEFLEQFNNG

SEQ ID NO: 54630 - protein, 370 aa, Desulfotomaculum putei
  misc_feature (1)..(370): tr|A0A1M4SQ88|A0A1M4SQ88_9FIRM Queuine tRNA-ribosyltran sferase OS=Desulfotomaculum putei DSM 12395 OX=1121429 GN=tgt PE=3 SV=1
MPVKIVIEKEEKHTRARLGKLYTPHGVVETPIFMPVGTQATVKTMTPEEVWETGGRLILSNTYHLYLRPGHDLIREAGGLHKFMNWQGPILTDSGGFQVFSLGPLRTITEEGVEFRSHIDGSKHFFTPEKVMEIEEALGADIAMAFDECAPYPCDRDYALAALERTTRWAERCKKAHKRDDQALFGIIQGGVFNDLRERSARELIEMDFPGYGIGGLSVGEPKELMYDVLDHLIPIMPKDKPRYLMGVGSPDCLIEGVIRGVDMFDCVLPTRIARNGAVFTHKGRLTIRNAEYARDFRPLDEQCDCYACRNYTRAYIRHLIKTDEVLGIRLTTIHNLHFIQHLMGKIKEAIREDRLLEYRAEFLSHFNAG

SEQ ID NO: 54631 - protein, 370 aa, Desulfotomaculum reducens
  misc_feature (1)..(370): sp|A4J541|TGT_DESRM Queuine tRNA-ribosyltransferase OS= Desulfotomaculum reducens (strain MI-1) OX=349161 GN=tg t PE=3 SV=1
MPVKIKIEKKEKHTRARLGKLTTPHGEVETPIFMPVGTQATVKTMTPEEVKETGGRLVLSNTYHLYLRPGHDLVKEAGGLHKFMNWDGPILTDSGGFQVFSLGPLRTITEEGVEFRSHIDGSKHFFTPEKVMEIEQALGADIAMAFDECAPYPCEKEYAVAALERTTRWAERCKRVHKREDQALFGIIQGGVFPDLRERSAKELLAMDFPGYGIGGLSVGEPKELMYEVLDQLMPIMPEDKPRYLMGVGSPDCLIEGVVRGVDMFDCVLPTRIARNGTVFTHNGKLTVRNAEYARDFRPMDQQCDCYACRNYSRAYIRHLIKTDEILGIRLTTIHNLHFIQHLMQNIRQAIREDRLLEYREDFLKVFNAG

SEQ ID NO: 54632 - protein, 370 aa, Desulfotomaculum ruminis
  misc_feature (1)..(370): tr|F6DN33|F6DN33_DESRL Queuine tRNA-ribosyltransferase OS=Desulfotomaculum ruminis (strain ATCC 23193 / DSM 21 54 / NCIMB 8452 / DL) OX=696281 GN=tgt PE=3 SV=1
MAVKIIIDKEEKHTRARLGRLSTPHGEVETPIFMPVGTQATVKTMTPEEVKDTGGRLILSNTYHLYLRPGHELVKEAGGLHRFMNWNGPILTDSGGFQVFSLGPLRTITEEGVTFRSHIDGSKHLFTPEKVMEIEQALGADIAMAFDECAPYPCDKEYAVAALERTTRWAERCKASHQRKDQALFGIIQGGVFKDLRERSARELMEMDFPGYGIGGLSVGEPKEIMYEVLDHLVPLMPRDKPRYLMGVGSPDCLIEGVIRGVDMFDCVLPTRIARNGAVFTHRGRLTVRNAEFARDFRPMDEQCDCYACRNYSRAYIRHLIKSEEILGIRLTTIHNLHFIQNLMKKIKEAIREDKLLEYRDEFYKQYNEG

SEQ ID NO: 54633 - protein, 372 aa, Desulfotomaculum sp.; identical to SEQ ID NO: 54577
  misc_feature (1)..(372): tr|A0A359H900|A0A359H900_9FIRM Queuine tRNA-ribosyltran sferase OS=Desulfotomaculum sp. OX=41211 GN=tgt PE=3 SV =1

SEQ ID NO: 54634 - protein, 330 aa, Desulfotomaculum sp.
  misc_feature (1)..(330): tr|A0A356UKR4|A0A356UKR4_9FIRM Queuine tRNA-ribosyltran sferase OS=Desulfotomaculum sp. OX=41211 GN=tgt PE=3 SV =1
  misc_feature (113)..(113): Xaa can be any naturally occurring amino acid
MPFAFKITYKDTQTRARTGILQTERGIIQTPVFMPVGTQATVKTLTPDEVKSLGAQIVLSNTYHLYLRPGHELIQKAGGLHKFMNWEGPILTDSGGYQVFSLAPLRRVEEEGXTQTRLALRRTTSWAYRYQSALKAALAEKEQAIFGIIQGGTYQDLRRQSTRELIELDFPGYGIGGLSVGEPKEIMYEVLDYTVPLLPVHKPRYLMGVGSPDCLLEGVARGIDMFDCVLPTRLARNGTVYTSQGKLVVRNAAWAQDFSPLDPTCNCYTCRNFTRAYVRHLLNAKEVLGIRLTTIHNLFFIFNLMKNIREAIENNCFRAFKHEFLQYFKD

SEQ ID NO: 54635 - protein, 377 aa, Desulfovibrio alaskensis
  misc_feature (1)..(377): sp|Q30XF7|TGT_DESAG Queuine tRNA-ribosyltransferase OS= Desulfovibrio alaskensis (strain G20) OX=207559 GN=tgt PE=3 SV=1
MATIGEFTLHATDGKARTGVLQTAHGPVRTPIFMPVGTVGSVKGVAPDDLDAIGAEIILGNTYHLYLRPGDELVARRGGLHEFNAWRKPILTDSGGFQVFSLSGLRRISEEGVEFRSHLDGSKHLFTPEKVVSIQRNLNSDIMMVLDECVPYGADKDYTARSLKMTTRWAQRCRDAYPAGSGGNLMFGITQGGFFKDLREESIGELTRIDFDGFALGGLSVGESKTEMMDILYHTAPMLPAHKPRYLMGVGTPLDIINGINAGIDMFDCVLPTRNARNGTLYTSAGKINIKRREFAEDDGPLDPNCSCYTCRTFSRAYLRHLFHAQEILSYRLNSIHNLTYFLDLVRGAREAIAQGTFAEYKSRYDAIYPQEAALCP

SEQ ID NO: 54636 - protein, 374 aa, Desulfovibrio alkalitolerans
  misc_feature (1)..(374): tr|S7UTX5|S7UTX5_9DELT Queuine tRNA-ribosyltransferase OS=Desulfovibrio alkalitolerans DSM 16529 OX=1121439 GN =tgt PE=3 SV=1
MERQNIFTILARDGHARRGRLSTAHGTVETPVFMPVGTVGSVKAVCPADLKDVGAQIILGNTYHLYLRPGDELVARRGGLHRFMRWDGPILTDSGGFQVFSLNELRRLGEEGVEFRSHLDGSRHLFTPEKVVSIQRNLGSDVMMVLDECPPGGSDRDYVARSLGLTTRWARRCREAYPAGAGEQHLFGIVQGGIYEDLREESLAQLAGIGFEGYALGGLSVGEKKADMYRILAHMGPRLPENAPRYLMGVGTPLDIVTGIENGIDMFDCVLPTRNARNGTLYTSQGKVNIKRAEFREDDSPLDPACSCYTCRTFSRAYLRHLYVAKEILSFRLNTIHNLRYFLDLTARARTAIEAGTMAALKAEIAAAYPEDGA

SEQ ID NO: 54637 - protein, 381 aa, Desulfovibrio bizertensis
  misc_feature (1)..(381): tr|A0A1T4VKC1|A0A1T4VKC1_9DELT Queuine tRNA-ribosyltran sferase OS=Desulfovibrio bizertensis DSM 18034 OX=11214 42 GN=tgt PE=3 SV=1
MHEDIISQLTKPGDFRVAATEGKARQGYLMTAHGLVKTPVFMPVGTVGSVKSIDPRDLHEMEAQVILGNTYHLYLRPGDELVKRRGGLHAFNGWDGPILTDSGGFQVFSLSGLRKITDDGVEFRSHIDGSKHFFTPEKAISIQQNLGSDIMMCFDECAAYGASYEYTKKALELTTRWAKRCREFHKPGQNGQLLFGITQGGFFQDLRDRSIAELSELPFDGFALGGLSVGEPKPKMLEVLRASAPLLPVDKPRYLMGVGTPLDILDGIEAGIDMFDCVLPSRNARNGTLFTSQGKVNIKRAEFKEDDSPLDPECNCYTCRTFSKAYLRHLYTAKELLSYRLNTIHNLSYFLKLTKDARQAIREGRFAEFKKGVEAVYGPNK

SEQ ID NO: 54638 - protein, 373 aa, Desulfovibrio carbinolicus
  misc_feature (1)..(373): tr|A0A4P6HKG4|A0A4P6HKG4_9DELT Queuine tRNA-ribosyltran sferase OS=Desulfovibrio carbinolicus OX=296842 GN=tgt PE=3 SV=1
MNAPGTFTLGPGDGSARTGRLTTAHGEIETPVFMPVGTQGTVKSLCPTDLQDIKARIILGNTYHLYLRPGDELVAKLGGLHRFMGWDGPILTDSGGFQVFSLSGLRRITEEGVTFASHIDGSKHLFSPEKVVSIQRNLGSDIMMVLDECVPYGADRAYTEKSLGLTTRWARRCREAHPAGDRGQLMFGIVQGGFFKDLRAQSAEQIIEVGFDGYALGGLSVGESRAEMYDILGDAAPLLPAERPRYLMGVGAPRDLLAGMAAGIDMFDCVLPTRNARNGTLFTFQGKVNIKRAEYREDDSPLDPTCPCYACRTFSRAYLRHLYIAKELLSYRLNTLHNLTFFSIMMERARQAIREGRFAAYRAEMEALYPEGE

SEQ ID NO: 54639 - protein, 378 aa, Desulfovibrio carbinoliphilus
  misc_feature (1)..(378): tr|G7Q3U3|G7Q3U3_9DELT Queuine tRNA-ribosyltransferase OS=Desulfovibrio carbinoliphilus subsp. oakridgensis OX =694327 GN=tgt PE=3 SV=1
MNVPGTFTLGPGDGNARTGCLTTAHGDVETPIFMPVGTQGTVKSLCPTDLHDLKAQIILGNTYHLYLRPGDELVAKLGGLHRFMGWDGPILTDSGGFQVFSLSGLRQIAEEGVTFSSHIDGSRHLFSPEKVIAIQQNLGSDIMMVLDECVPYGADRAYTEKSLALTTRWARRCRQAHPGGHRGQLLFGIVQGGFFKDLRAESAAQLLEIGFDGYALGGLSVGESREEMYDILGDATPLLPADRPRYLMGVGAPRDLLAGMAAGIDMFDCVLPTRNARNGTLFTFQGKVNIKRAEYREDDTPLDPTCPCYACQTFSKAYLRHLYVARELLSYRLNTLHNLTFFSIMMERARQAIRDGRFAAFRAEMEAVYPTDEEQTEE

SEQ ID NO: 54640 - protein, 379 aa, Desulfovibrio desulfuricans
  misc_feature (1)..(379): tr|A0A4P7UFE9|A0A4P7UFE9_DESDE Queuine tRNA-ribosyltran sferase OS=Desulfovibrio desulfuricans OX=876 GN=tgt PE =3 SV=1
MSQTVFTIEHTDGAARAGVLRTAHGAIPTPIFMPVGTVGSVKALAPDDLAAIGAPIILGNTYHLYLRPGDELVHRRGGLHKFASWPGSILTDSGGFQVFSLSSLRKIREEGVEFRSHLDGSKHLFTPEKVLEIQRNLDSDIMMVLDECVPFGADYDYTEKSLALTTRWARRAIEAYPPGSAHNLLFGITQGGFYKDLRERSVSELCGMDFDGFAIGGLSVGEPKDKMYDLLYHTAPLLPGAKPRYLMGVGTPLDIVTGIHAGVDMFDCVLPTRNARNGTLYTSLGKINIKRREFAEDDGPLDPNCRCYACRNFSRAYLRHLYASQELLSFRLNSLHNLTYYLDLARNARQAIVEGRFTDFLAKITALYPDEAARAAAGA

SEQ ID NO: 54641 - protein, 372 aa, Desulfovibrio desulfuricans
  misc_feature (1)..(372): tr|F0JG86|F0JG86_DESDE Queuine tRNA-ribosyltransferase OS=Desulfovibrio desulfuricans ND132 OX=641491 GN=tgt P E=3 SV=1
MARPGDFTVHAKDNLARRGTLTTAHGDIQTPIFMPVGTQGTVKSLTPRDLEEMEAQIILGNTYHLYLRPGDELVARRGGLHKFANWKRPILTDSGGFQVFSLEGIRKLSEEGVEFRSYIDGSKHFFSPEKAIDIQRNLGSDIMMVLDECVGYGNDRAYTEKSLEMTTRWAKRCRDHYPKGSGYQLMFGIVQGGFYKDLRDRSLEQLRGIDFEGFAIGGLSVGESTEEMYDLLHHITPKMPADKPRYLMGVGTPLDILEGVSVGVDMFDCVLPSRNARNGTLFTSLGKVNIKRAEYAEDDSPLDPNCGCYTCRNFSKAYLRHLYMAKELLSYRLNTYHNLYFYLNLMKQIRQAIEEGTFRELKAKYEAAYGRE

SEQ ID NO: 54642 - protein, 378 aa, Desulfovibrio fairfieldensis
  misc_feature (1)..(378): tr|A0A0X8JMF7|A0A0X8JMF7_9DELT Queuine tRNA-ribosyltran sferase OS=Desulfovibrio fairfieldensis OX=44742 GN=tgt PE=3 SV=1
MSEPVFTLQHTDGAARAGLLRTAHGVIPTPIFMPVGTVGSVKAIAPDDLAAIGAPIILGNTYHLYLRPGDELVARHGGLHGFASWPGAVLTDSGGFQVFSLSSLRKIREEGVEFRSHLDGSRHLFTPEKVISIQRNLNSDIMMVLDECVPYGADYAYTETSLALTTRWAARARAAYPAGTGSNLLFGITQGGFFKDLRCRSVEEICALDFDGFAIGGLSVGEGKAEMYDLLYHTAPLLPSHKPRYLMGVGTPLDIAHGIHAGVDMFDCVLPTRNARNGTLYTSLGKVNIKRKEYAEDDGPLDPACGCYTCRTFSRAYLRHLYVSKELLSFRLNSLHNLTYFLRLAREARQAVLENRFGAFLAGMEGLYPEEAAQAAGV

SEQ ID NO: 54643 - protein, 377 aa, Desulfovibrio ferrireducens
  misc_feature (1)..(377): tr|A0A1G9HEE9|A0A1G9HEE9_9DELT Queuine tRNA-ribosyltran sferase OS=Desulfovibrio ferrireducens OX=246191 GN=tgt PE=3 SV=1
MTENTTKPGTFKIHATDGNARLGTLTTAHGDIETPVYMPVGTQGTVKAVSPRDLKEIGSQIILGNTYHLYLRPGDELIARRGGLHKFSNWDRPILTDSGGFQVFSLESIRKITEQGVEFRSYLDGSKHFFSPEKVISIQKNLGSDIMMVLDECVGYGNDREYTERSLEMTTRWAQRCRDAYPVGSGDQLMFGIIQGGFHKDLREKSLEQLTEIPFEGYAIGGLSVGEPIPDMYDILRHIGPKLPQDKPRYLMGVGTPLDILEGIANGVDMFDCVLPTRNARNGTLYTSQGKVNIKRAQYREDDSPLDPNCDCYTCRNFSKAYLRHIYTAKELLSSQLNSIHNLRFFLNLTEQAREAIKNGTFADLRKKYEAVYEPVV

SEQ ID NO: 54644 - protein, 390 aa, Desulfovibrio ferrophilus
  misc_feature (1)..(390): tr|A0A2Z6AYP9|A0A2Z6AYP9_9DELT Queuine tRNA-ribosyltran sferase OS=Desulfovibrio ferrophilus OX=241368 GN=tgt P E=3 SV=1
MSKEQLIPAEETAQQELTAPGDFRVCATEGGARLGMLHTAHGTVHTPMFMPVGTVGSVKSVDPRDLTEVGAQVILGNTYHLYLRPGDEVVARRGGLHKFNGWDGPILTDSGGFQVFSLAGLRNITDDGVEFRSHLNGSKHFFSPEKSIEIQQNLGSDIMMVFDECAAAGSDRDYTIQALERTTAWAKRCREFHPAGKNGQLLFGICQGGFYEDLRERSIEEITAIPFEGYALGGLSVGETKPEMLRILRHSAPLLPADKPRYLMGVGTPLDILDGIEAGIDMFDCVLPTRNARNGTLYTSQGKVNIKRAEFMEDDSPLDPNCDCYTCRTFSKAYLRHLYIAKELLSSRLNTIHNLAYFLRLAKDARDALRRGGFAEFKKSVEAIYGVNGE

SEQ ID NO: 54645 - protein, 374 aa, Desulfovibrio fructosivorans
  misc_feature (1)..(374): tr|E1JRG5|E1JRG5_DESFR Queuine tRNA-ribosyltransferase OS=Desulfovibrio fructosivorans JJ OX=596151 GN=tgt PE= 3 SV=1
MNLPGTFTLGPGDGSARTGRLTTAHGEIETPVFMPVGTQGTVKSLCPDDLRTIGARIILGNTYHLYLRPGDELVAKMGGLHRFMAWDGPILTDSGGFQVFSLSGLRRITEEGVTFSSHIDGSKHLFSPEKVISIERNLGSDIMMVLDECVPYGADRAYTEKSLGLTTRWATRCRAAHAPLDRGQLLFGIVQGGFFKDLRAESARQLIDLAFEGYALGGLSVGESRAEMYDILYDATPLLPADKPRYLMGVGAPRDLLAGMAAGIDMFDCVLPTRNARNGTLFTFQGKVNIKRAEYREDDSPLEADCPCYACRTFSKAYLRHLYVARELLSYRLNTLHNLTFFSRFMAQARQAIREGRFEAFRTAMEAAYPETDA

SEQ ID NO: 54646 - protein, 390 aa, Desulfovibrio gigas
  misc_feature (1)..(390): tr|T2GBA9|T2GBA9_DESGG Queuine tRNA-ribosyltransferase OS=Desulfovibrio gigas (strain ATCC 19364 / DSM 1382 / NCIMB 9332 / VKM B-1759) OX=1121448 GN=tgt PE=3 SV=1
MTTHLQPGEFSLLTQCGTARAGLLGTAHGTLETPVFMPVGTQGTVKALGPDDLAALGPRIILGNTYHLYLRPGDERVARLGGLHQFMGWNGAILTDSGGFQVFSLQGLRRIEEEGVTFQSHIDGSRHLFSPEKVVSIQRNLGSDIMMVLDECVPYGADREYTAKSLQLTTRWARRCREAHPALDRGQLLFGIVQGGFFPDLRAESARQLMEIPFDGFAIGGLSVGESRAEMLDILAHTAPLLPQDKPRYLMGVGTPRDLLDGIALGVDMFDCVLPTRNARNGTLFTSFGKTNIKLAKYAEDPAPLDPACTCYTCRTFSRAYLRHLYMARELLAYRLNTIHNIHYYLDLMRQARAAILEHRFEAFRRDILAHYEDEATPSGDAACPSSPTP

SEQ ID NO: 54647 - protein, 377 aa, Desulfovibrio gilichinskyi
  misc_feature (1)..(377): tr|A0A1X7C4I5|A0A1X7C4I5_9DELT Queuine tRNA-ribosyltran sferase OS=Desulfovibrio gilichinskyi OX=1519643 GN=tgt PE=3 SV=1
MTENTKKPGTFKIHATDGNARLGTLTTAHGDIETPVYMPVGTQGTVKGVSPRDLKEIKSQIILGNTYHLYLRPGDELIARRGGLHKFANWDRPILTDSGGFQVFSLESIRKISEQGVEFRSYLDGSKHFFSPEKVISIQNNIGSDIMMVLDECVGYGNDREYTDRSLEMTTRWAKRCRDAYPVGSGDQLMFGIVQGGFHKDLREKSLEQLAEIPFEGYAIGGLSVGEPIPDMYDILRHIAPKLPQDKPRYLMGVGTPLDILEGIANGVDMFDCVLPTRNARNGTLYTSQGKVNIKRAQYREDDTPLDPNCDCYTCRTFSKAYLRHIYTSKELLSAQLNSIHNLRFFLNLTEQAREAIKNGTFANLRKKYEAVYAPVE

SEQ ID NO: 54648 - protein, 390 aa, Desulfovibrio gracilis
  misc_feature (1)..(390): tr|A0A1T4WJQ0|A0A1T4WJQ0_9DELT Queuine tRNA-ribosyltran sferase OS=Desulfovibrio gracilis DSM 16080 OX=1121449 GN=tgt PE=3 SV=1
MPVPGRFTIHARDGKARRATLHTAHGEIQTPVFMPVGTQGSVKAVGPDDLLQAGSQIILGNTYHLYLRPGDELVARRGGLHRFMSWDKPILTDSGGFQVFSLSTIRKISEKGVEFRSYLDGSKHFFSPEKAISIQQNLGSDIMMVLDECVGYGADREYTARSLERTTRWARRCREVHTPGADGQLMFGIIQGGFHEDLREESLGQLLEIPFEGYAIGGLSVGESTEDMYRILNHIGPRMPEEKPRYLMGVGTPMDILEGIESGVDMFDCVLPTRNARNGTLFTSQGKVNIKRAEFREDDGPLDPNCQCYTCRNFSRAYLRHLYTAREILSYRLNSLHNIAFFLELARQAREAIEGGRFAELKAHYQGIYGTDGRNQRKGGAHHKPKRRFG

SEQ ID NO: 54649 - protein, 378 aa, Desulfovibrio hydrothermalis
  misc_feature (1)..(378): tr|L0RDQ3|L0RDQ3_9DELT Queuine tRNA-ribosyltransferase OS=Desulfovibrio hydrothermalis AM13 = DSM 14728 OX=112 1451 GN=tgt PE=3 SV=1
MSKEIKKPGNFTVHATDGNARRGTLVTAHGDIQTPVYMPVGTQGAVKAVSPRDLREIGSQIILGNTYHLYLRPGDELIARRGGLHKFANWDRPILTDSGGFQVFSLESIRKITEQGVEFRSYIDGSKHFFSPEKVISIQNNIGSDIMMVLDECVGYGNDRDYTAKSLELTTRWARRCREAYPAGSGDQLMFGIIQGGFHKDLREVSLEQLSEIPFEGYAIGGLSVGEPIPDMYDILQHIGPKLPFEKPRYLMGVGTPLDILEGIANGVDMFDCVLPTRNARNGTLYTSLGKVNIKRAQYREDDSPLDPNCDCYTCRNFSKSYLRHLYTAKELLSSQLNSIHNLRFFLKLTEQAREAIENGTFADLRKKYEAVYEAVTR

SEQ ID NO: 54650 - protein, 378 aa, Desulfovibrio legallii
  misc_feature (1)..(378): tr|A0A1G7MMK2|A0A1G7MMK2_9DELT Queuine tRNA-ribosyltran sferase OS=Desulfovibrio legallii OX=571438 GN=tgt PE=3 SV=1
MTHLTFTLEHTDGAARAGTLRTAHGPVPTPVFMPVGTVGSVKALAPDDLLAIGAPIILGNTYHLYLRPGHELVARRGGLHNFAAWPGAILTDSGGFQVFSLSSLRKIREEGVEFRSHLDGSRHLFTPESVLEIQRALHSDVMMVLDECVPFGADYAYTERSLALTGRWARRARAAYPAGTARNLLFGIVQGGFFKDLRQRSAEEICALDFDGFAIGGLSVGEPKPQMYDLLYHTAPLLPREKPRYLMGVGTPLDIVTGIHAGVDMFDCVLPTRNARNGTLYTSHGKVNIKRREYAEDDRPLDPCCRCYTCRTFTRAYLRHLFASQELLAFRLNSLHNLTYFMDLVRGAREAILQNRYNDYLARIAALYPDEAARAAAG

SEQ ID NO: 54651 - protein, 385 aa, Desulfovibrio litoralis
  misc_feature (1)..(385): tr|A0A1M7SCA5|A0A1M7SCA5_9DELT Queuine tRNA-ribosyltran sferase OS=Desulfovibrio litoralis DSM 11393 OX=1121455 GN=tgt PE=3 SV=1
MQKENIGTFKLLNKDNKARTGLFYTAHGVIQTPIFMPVGTVGTVKAIAPDDLDNIQAEIILGNTYHLHLRPGDELIKGFGGLHEFISWDKPILTDSGGYQAFSLSSLRKISEAGVEFRSHLNGAKLNFTPEKVIEIQRNLNSDIMMVLDECVAYGTDKEYTAKSIELTTRWAKRSRVYYPQNSGQNLLFAITQGGFFNDLRTESVEQLTCDDLFDGYAIGGVSVGEPKPEMYQLMEHTAPLLPETRPRYLMGVGTPLDIVYGIAQGVDMFDCVLPTRNARNGTLYTSLGKVNIKRKEFAEDKNSLDPNCSCYTCRTFSRAYLRHLFVSQELLAFRLNSLHNLTYFLNIVQKARQAINEKRYNAFLNEMIALYPDEAALGGIGLGV

SEQ ID NO: 54652 - protein, 373 aa, Desulfovibrio magneticus
  misc_feature (1)..(373): tr|K6GUS1|K6GUS1_9DELT Queuine tRNA-ribosyltransferase OS=Desulfovibrio magneticus str. Maddingley MBC34 OX=12 06767 GN=tgt PE=3 SV=1
MNAPGTFTLGPGDGSARTGRLTTAHGEIETPVFMPVGTQGTVKSLCPTDLHDIKARIILGNTYHLYLRPGDELVAKLGGLHRFMGWDGPILTDSGGFQVFSLSGLRRITEEGVTFASHIDGSKHLFSPEKVVSIQRNLGSDIMMVLDECVPYGADRAYTEKSLGLTTRWARRCRQAHPAGDRGQLMFGIVQGGFFKDLRAQSAEQIIEVGFDGYALGGLSVGESRAEMYDILGDAAPLLPANRPRYLMGVGAPRDLLAGMAAGIDMFDCVLPTRNARNGTLFTFQGKVNIKRAEYREDDSPLDPTCPCYACRTFSRAYLRHLYIAKELLSYRLNTLHNLTFFSIMMERARQAIREGRFAAYRAEMEALYPEGE

SEQ ID NO: 54653 - protein, 373 aa, Desulfovibrio magneticus
  misc_feature (1)..(373): sp|C4XSI9|TGT_DESMR Queuine tRNA-ribosyltransferase OS= Desulfovibrio magneticus (strain ATCC 700980 / DSM 1373 1 / RS-1) OX=573370 GN=tgt PE=3 SV=1
MNAPGTFTLGPGDGSARTARLTTAHGEIETPVFMPVGTQGTVKSLCPTDLQDIKARIILGNTYHLYLRPGDELVAKLGGLHRFMGWDGPILTDSGGFQVFSLSGLRRITEEGVTFASHIDGSKHLFSPEKVVSIQRNLGSDIMMVLDECVPYGADRAYTEKSLGLTTRWARRCRKAHPAGDRGQLMFGIVQGGFFKDLRAQSAEQIIEVGFDGYALGGLSVGESRAEMYDILGDAAPLLPADRPRYLMGVGAPRDLLAGMAAGIDMFDCVLPTRNARNGTLFTFQGKVNIKRAEYREDDSPLDPTCPCYACRTFSRAYLRHLYIAKELLSYRLNTLHNLTFFSIMMERARQAIREGRFAAYRAEMEALYPEGE

SEQ ID NO: 54654 - protein, 382 aa, Desulfovibrio mexicanus
  misc_feature (1)..(382): tr|A0A239D5U5|A0A239D5U5_9DELT Queuine tRNA-ribosyltran sferase OS=Desulfovibrio mexicanus OX=147047 GN=tgt PE= 3 SV=1
MTYDPATLGQFTITATDGAARRGSLVTAHGVVQTPIFMPVGTQGSVKALAPDDLDAAGAQIILGNTYHLYLRPGDDLLARKGGLHRFASWNKPILTDSGGFQVFSLKDIRKLSEDGVEFRSHHDGSKHFFSPEKVMSIQNNIGSDIMMVLDECVAYGADYDYTAKSLELTTRWARRCRQAHPRHKNGQLLFGINQGGFFKDLRERSLAQLAEIDFDGFAIGGLSVGESIPEMYDMLHHIAPLMPRDTPRYLMGVGTPLDILEGISAGVDMFDCVLPTRNARNGTLYTSQGKVNIRRAEYREDDSPLDPLCPCYACRTFSKAYLRHLYVAQELLSYRLNSLHNITFFLTLARQAREAIEQGRFAALKAHYQDVFAPAKDGGKP

SEQ ID NO: 54655 - protein, 390 aa, Desulfovibrio piger
  misc_feature (1)..(390): tr|A0A1K1LF68|A0A1K1LF68_9DELT Queuine tRNA-ribosyltran sferase OS=Desulfovibrio piger OX=901 GN=tgt PE=3 SV=1
MSFRVHPASLPAMTQSVYTLEHSDNAARAGLVRTAHGVIPTPIFMPVGTVGSVKAIAPDDLAAIGAPIILGNTYHLYLRPGDGLVARHGGLHGFASWPGAILTDSGGFQVFSLSSLRKIREEGVEFRSHLDGSRHLFTPESVVGIQRNLNSDIMMVLDECVPYGADYAYTEKSLALTTRWALRARAAYPQGSGRNLLFAITQGGFFKDLRQRSIEELCCHDFDGFAIGGLSVGESKHMLYDFMYEVAPRLPKDKPRYLMGVGTPLDIAHGINAGIDMFDCVLPTRNARNGTLYTSLGKINIKRRDYAEDDSPLDPACDCYTCRTFSRAYLRHLYVSKELLAFRLNSLHNLTYFLNVVRQARRAILEDRYASFLAHMESLYPDEAAQGRGL

SEQ ID NO: 54656 - protein, 378 aa, Desulfovibrio piger
  misc_feature (1)..(378): tr|B6WXW6|B6WXW6_9DELT Queuine tRNA-ribosyltransferase OS=Desulfovibrio piger ATCC 29098 OX=411464 GN=tgt PE=3 SV=1
MTQSVYTLEHSDNAARAGQVRTAHGVIPTPIFMPVGTVGSVKAIAPDDLAAIGAPIILGNTYHLYLRPGDELVARHGGLHGFASWPGAILTDSGGFQVFSLSSLRKIREEGVEFRSHLDGSKHLFTPESVVGIQRNLNSDIMMVLDECVPYGADYAYTEKSLALTTRWALRARAAYPQGSGQNLLFAITQGGFFKDLRKRSIEELCCHDFDGFAIGGLSVGESKHMLYDFMYEVAPQLPKDKPRYLMGVGTPLDIAHGINAGIDMFDCVLPTRNARNGTLYTSLGKVNIKRKEYAEDDSPLDPACNCYTCRTFSRAYLRHLYVSKELLAFRLNSLHNLTYFLNVVRQARQAILEDRYASFLAHMESLYPDEAAQGRGL

SEQ ID NO: 54657 - protein, 378 aa, Desulfovibrio salexigens
  misc_feature (1)..(378): tr|C6BY31|C6BY31_DESAD Queuine tRNA-ribosyltransferase OS=Desulfovibrio salexigens (strain ATCC 14822 / DSM 26 38 / NCIB 8403 / VKM B-1763) OX=526222 GN=tgt PE=3 SV=1
MSEEKKKPGTFTVHATDGHARRGTLVTAHGEIQTPVYMPVGTQGAVKGVSPRDLKEINSQIILGNTYHLYLRPGDELVARRGGLHKFANWDKPILTDSGGFQVFSLESIRKITEQGVEFRSYLDGSKHFFSPEKVISIQNNIGSDIMMVLDECVGYGHDRDYTAKSLEMTTRWAKRCRDAYPVGSGDQLMFGIVQGGFHKDLREVSLEQLREIPFEGFAIGGLSVGEPIPDMYDILQHIGPKLPEEKPRYLMGVGTPLDILEGIANGVDMFDCVLPTRNARNGTLYTSLGKVNIKRAQYREDDSPLDPNCDCYTCRTFSKAYLRHLYTAKELLSYQLNSIHNLRFFLKLTEEARDAIEKGTFADLRKKYEAVYESPVK

SEQ ID NO: 54658 - protein, 372 aa, Desulfovibrio sp.
  misc_feature (1)..(372): tr|I2Q122|I2Q122_9DELT Queuine tRNA-ribosyltransferase OS=Desulfovibrio sp. U5L OX=596152 GN=tgt PE=3 SV=1
MNVPGTFIPGPGDGNARTGRLSTAHGDIETPIFMPVGTQGTVKSLCPTDLHDLKAQIILGNTYHLYLRPGDELVAKLGGLHRFMGWDGPILTDSGGFQVFSLSGLRRIAEEGVTFSSHIDGSRHLFSPEKVISIQQNLGSDIMMVLDECVPYGADRAYTEKSLALTSRWAGRCRQAHPAGHRGQLLFGIVQGGFFKDLRAASAAQLLEIGFDGYALGGLSVGESREEMYDILGDATPLLPADRPRYLMGVGAPRDLLAGMAAGIDMFDCVLPTRNARNGTLFTFQGKVNIKRAEYREGDTPLDPTCPCYACRTFSKAYLRHLYVARELLSYRLNTLHNLTFFSIFMERARQAIRDGRFAAFRADMEALYPAE

SEQ ID NO: 54659 - protein, 396 aa, Desulfovibrio sp.
  misc_feature (1)..(396): tr|G2HBU9|G2HBU9_9DELT Queuine tRNA-ribosyltransferase OS=Desulfovibrio sp. A2 OX=298701 GN=tgt PE=3 SV=1
MPNQTEISTAMALAEAPAPIPAEAPGTFRIHATDGAARTGVLHTAHGPVRTPIFMPVGTVGSVKAVAPDDLDAIGAEIILGNTYHLYLRPGDELVARRGGLHGFNAWKKPILTDSGGFQVFSLSALRKITEQGVEFRSHLDGSKHLFTPEKVVSIQRNLNSDIMMVLDECVPYGADKPYTEKSLALTTRWAQRCRDAYPKGTAGNLLFGITQGGFFKDLRERSIGELTQIDFDGFALGGLSVGESKPEMMDILYHSAPLLPADKPRYLMGVGTPLDIINGIAAGVDMFDCVLPTRNARNGTLYTSLGKINIKRKEFAEDDGPLDPACTCYACRTFSRAYLRHLYVAKELLAFRLNSVHNLTYFLDVVRGARTAIAEGRFAAYKAGFEAIYPEEVVA

SEQ ID NO: 54660 - protein, 375 aa, Desulfovibrio vulgaris
  misc_feature (1)..(375): sp|Q72E53|TGT_DESVH Queuine tRNA-ribosyltransferase OS= Desulfovibrio vulgaris (strain Hildenborough / ATCC 295 79 / DSM 644 / NCIMB 8303) OX=882 GN=tgt PE=3 SV=1
MTTPGTFEIHATDGAARTGCLHTAHGIVRTPIFMPVGTVGSVKAIAPDDLEAIGAEIILGNTYHLYLRPGDELVARRGGLHEFNAWRKPILTDSGGFQVFSLSGLRRIAEEGVEFRSHLDGSKHLFTPEKVVSIQRNLNSDIMMVLDECVPYGADRTYTEKSVGLTTRWAKRCRDAYPKGAAGNLLFGITQGGFFKDLRTRSIGALTDIDFDGFALGGLSVGEPKAEMMDLLYHSAPLLPADKPRYLMGVGTPLDIINGIAAGVDMFDCVLPTRNARNGTLYTSLGKLNIKRREFAEDDGPLDPACSCYTCRTFSRAYLRHLYTAKELLAFRLNSIHNLTYFLDLVRGARAAIAAGRFAEYKRSFEAIYPEEVVA

SEQ ID NO: 54661 - protein, 375 aa, Desulfovibrio vulgaris
  misc_feature (1)..(375): sp|A1VFP3|TGT_DESVV Queuine tRNA-ribosyltransferase OS= Desulfovibrio vulgaris subsp. vulgaris (strain DP4) OX= 391774 GN=tgt PE=3 SV=1
MTTPGTFEIHATDGAARTGCLHTAHGIVRTPIFMPVGTVGSVKAIAPDDLEAIGAEIILGNTYHLYLRPGDELVARRGGLHEFNAWRKPILTDSGGFQVFSLSGLRRIAEEGVEFRSHLDGSKHLFTPEKVVSIQRNLNSDIMMVLDECVPYGADRTYTEKSVGLTTRWAKRCRDAYPKGAAGNLLFGITQGGFFKDLRTRSIGELTDIDFDGFALGGLSVGEPKAEMMDLLYHSAPLLPADKPRYLMGVGTPLDIINGIAAGVDMFDCVLPTRNARNGTLYTSLGKLNIKRREFAEDDGPLDPACSCYTCRTFSRAYLRHLYTAKELLAFRLNSIHNLTYFLDLVRGARAAIAAGRFAEYKRSFEAIYPEEVVA

SEQ ID NO: 54662 - protein, 382 aa, Desulfovibrionaceae bacterium
  misc_feature (1)..(382): tr|A0A316MUN5|A0A316MUN5_9DELT Queuine tRNA-ribosyltran sferase OS=Desulfovibrionaceae bacterium OX=2049043 GN= tgt PE=3 SV=1
MSDIPGTFHLLAVDGNARAGLLHTAHGPIETPIFMPVGTAGSVKAIAPDDLEAIGAQIILGNTYHLYLRPGDDLVARRGGLHEFNAWRRPILTDSGGFQVFSLEGLRRITEDGVEFRSHLDGSKHFFSPEKVISIQRNLNSDIMMQLDQCIGFGASHDEARKAAELSARWARRCREAYPAGTAGNLLFGIVQGEAFPDLREMSARALMDIGFEGYAIGGLAVGEPKHIMLRCLRQLHPILPGNKPRYLMGVGTPLDILHGIEEGVDMFDCVLPTRNARNGTLYTSRGKINIKRKEFAEDDGPLDPECACYTCRTFSRAYLRHLYVSGEILSFRLNSLHNLTYFLNMVKGARKAILEGRYAEYKARYEAMYPEEDPLFDEPEA

SEQ ID NO: 54663 - protein, 385 aa, Desulfovibrionaceae bacterium
  misc_feature (1)..(385): tr|A0A1J4T1Z8|A0A1J4T1Z8_9DELT Queuine tRNA-ribosyltran sferase OS=Desulfovibrionaceae bacterium CG1_02_65_16 O X=1805130 GN=tgt PE=3 SV=1
MENLGRFHITHTDGLARRGSLVTSHGVIETPIFMPVGTQGSVKALAPDDLVNAGSQIILGNTYHLYLRPGDELLARMGGLHRFANWTKPILTDSGGFQVFSLKEIRKLSEEGVEFRSHLDGSKHFFSPEKVMSIQNNIGSDIMMVLDECVGYGADYDYTEKSLELTTRWAKRCRAAHPRHKNGQLLFGITQGGFFKDLRERSLEQLAEIDFDGFAIGGLSVGESIPEMYDMLRHIAPMLPADKPRYLMGVGTPMDILTGIENGVDMFDCVLPTRNARNGTLYTSQGKVNIRRAEYREDPSPLDPDCQCYTCRTFSKAYLRHLYVAQELLSYRLNSLHNITFFLTLVRQARQAIEQGRFTQLKARYAEVFAPASAKGDGPALEPGA

SEQ ID NO: 54664 - protein, 382 aa, Desulfovibrionales bacterium
  misc_feature (1)..(382): tr|A0A1F9QBF6|A0A1F9QBF6_9DELT Queuine tRNA-ribosyltran sferase OS=Desulfovibrionales bacterium GWA2_65_9 OX=17 97915 GN=tgt PE=3 SV=1
MTTAQNSAAALGRFTITARDGQARRGSLTTAHGVVQTPIFMPVGTQGSVKSLCPQDLDNAGAQIILGNTYHLYLRPGDELLARRGGLHRFMGWKGPILTDSGGFQVFSLKEIRKISEQGVEFRSHIDGSTHFFSPEKVMSIQENIGSDIMMVLDECVAYGADHDYTAKSLELTTRWARRCREAHPRHKNGQLLFGIIQGGFYKDLREKSLEQLRAIDFDGLAIGGLSVGESIPEMYDMLHHITPQMPENLPRYLMGVGTPLDILEGIEAGVDMFDCVLPTRNARNGTLYTSRGKVNIRRAEYREDDSPLDPDCSCYTCRTFSRAYLRHLYVAQELLSYRLNSLHNVSFFLDLVRRAREAIEQGRFAALKQRYVDIFRPGADS

SEQ ID NO: 54665 - protein, 367 aa, Desulfurella acetivorans
  misc_feature (1)..(367): tr|W0JFP8|W0JFP8_DESAE Queuine tRNA-ribosyltransferase OS=Desulfurella acetivorans A63 OX=694431 GN=tgt PE=3 S V=1
MQFKCLKTSDNARLSLLWLKDEIELPAFMPVGTQGIVKALLPDTLIDIGYKLMLSNTYHLYLRPGVEIIEAFGGLHKFTNFKGSILTDSGGFQVFSLSDLRKVTQEGVVFKSHIDGSYHLFTPEKVLDIQFRFKSDIAMVLDECPAYSLDKSFVEKSLNITLNWAKRSSVIKRPPHTAVFGIVQGGVFEDLRKKSALEIAGMDFDGIAIGGLSVGESTQEMYDTVASVMQYLPEDKPRYAMGVGRPEDIVRLVGFGVDMFDCVMPTRNARNGYLFTDFGNINIKNAAYAKDESPIDENCDCYTCKNYSRAFLRHLYKSKELSFYTLATIHNLSYYYNLMQRIGQAIKNNSFAEFSKSFLDKRKYGYS

SEQ ID NO: 54666 - protein, 339 aa, Desulfurella amilsii
  misc_feature (1)..(339): tr|A0A1X4XXH7|A0A1X4XXH7_9DELT Queuine tRNA-ribosyltran sferase OS=Desulfurella amilsii OX=1562698 GN=tgt PE=3 SV=1
MPVGTQGIVKALLPDMLTSIGYKLMLSNTYHLYLRPGIEIIEAFGGLHKFANFNGSILTDSGGFQVFSLSDLRKVAIEGVRFKSHIDGSYHFFTPEKVLDLQFRFKSDIAMVLDECPAYGLDKSATEKSLNITLNWAKRSSVIERPKDTAVFGIVQGGIFEDLRKKSALEISDMNFDGIAIGGLSVGEPLQQMYDTVAFTIEHLPKDKPRYAMGVGRPEDIITLVGFGIDMFDCVMPTRNARNGYLFTDFGNINIKNAIYAKDKSPIDEHCNCYTCKNFSRGFLRHLYKAKELSFYTLATIHNLTYYYNLIQSIKDAIKKGEFEQFAKSFLEKRRYGNS

SEQ ID NO: 54667 - protein, 367 aa, Desulfurella multipotens
  misc_feature (1)..(367): tr|A0A1G6IS09|A0A1G6IS09_9DELT Queuine tRNA-ribosyltran sferase OS=Desulfurella multipotens OX=79269 GN=tgt PE= 3 SV=1
MEFKCLKTSDNARLSLLWLKDEIELPAFMPVGTQGIVKALLPDTLIDIGYKLMLSNTYHLYLRPGVEIIEAFGGLHKFTNFKGSILTDSGGFQVFSLSDLRKVTQEGVVFKSHIDGSYHLFTPEKVLDIQFRFKSDIAMVLDECPAYSLDKSFVEKSLNITLNWAKRSSVIKRPPHTAVFGIVQGGVFEDLRKKSALEIAGMDFDGIAIGGLSVGESTQEMYDTVASVMQYLPEDKPRYAMGVGRPEDIVRLVGFGVDMFDCVMPTRNARNGYLFTDFGNINIKNAAYAKDESPIDENCDCYTCKNYSRAFLRHLYKSKELSFYTLATIHNLSYYYNLMQRIGQAIKNNSFAEFSKSFLDKRKYGYS

SEQ ID NO: 54668 - protein, 369 aa, Desulfuribacillus alkaliarsenatis
  misc_feature (1)..(369): tr|A0A1E5G0I2|A0A1E5G0I2_9BACL Queuine tRNA-ribosyltran sferase OS=Desulfuribacillus alkaliarsenatis OX=766136 GN=tgt PE=3 SV=1
MAVTYELVKTCKQTGARAGIIHTPNGSFETPMFMPVGTLATVKAMSPEELKEIGAGIILSNTYHLFLRPGHDIVKEAGGLHKFMNWDQAILTDSGGFQVFSLSNLRKIKEEGVEFRSHLNGEKLFLSPEKATEIQNALGADIIMAFDECPPYPADYEYVKDSLERTTRWAKRCLDAHRNTDKQALFGIVQGGMYKDLRIESAKQLVDLDFPGYAIGGLSVGEEADIMYEVLEYTTPELPKDKARYLMGVGAPENLVEGVIRGIDMFDCVLPTRIARNGTVFTSKGKLVIRNAQYARDFQPIDSDCACYVCRNYTRAYIRHLIKCNEIFGMRLTTYHNLYYLINMMKQVRQAILEDRLGDFQKHFYAIRQ

SEQ ID NO: 54669 - protein, 369 aa, Desulfuribacillus stibiiarsenatis
  misc_feature (1)..(369): tr|A0A1E5L339|A0A1E5L339_9BACL Queuine tRNA-ribosyltran sferase OS=Desulfuribacillus stibiiarsenatis OX=1390249 GN=tgt PE=3 SV=1
MAVTYELIKTCKQTGARLGKIHTPHGSFDTPMFMPVGTLATVKAMSPEELKEIGSGIILSNTYHLFLRPGHEIVKEAGGLHKFMNWDQAILTDSGGFQVFSLSNLRKIREEGVEFRSHLNGEKLFLSPEKATEIQNALGADIIMAFDECPPFPAEYQYVKDSLERTTRWAKRCLEAHANPDRQALFGIVQGGMYKDLRIESAQQLLDLNFPGYAIGGLSVGESADLMYEMLEHTVPILPQNKPRYLMGVGAPENLVEGVMRGIDMFDCVLPTRIARNGTMMTSKGKLVIRNAEYARDFRTVDENCQCKVCQNYSRAYIRHLIKCNEIFGFRLTTYHNLYYLINLMKQIRQAIAEDRLADFQKEFYAMRS

SEQ ID NO: 54670 - protein, 368 aa, Desulfurispirillum indicum
  misc_feature (1)..(368): tr|E6W4K6|E6W4K6_DESIS Queuine tRNA-ribosyltransferase OS=Desulfurispirillum indicum (strain ATCC BAA-1389 / S 5) OX=653733 GN=tgt PE=3 SV=1
MQSLSFQLKHTCGQARAGTVTTRHGTIHTPIFMPVGTQATVKALSPRELDEAQAQIILGNTYHLYLRPGHELVKRFGGLHGFMNWPKPILTDSGGYQVFSLGSLRKITEEGVEFRSHIDGSRHFISPEKSLEIQQALGSDIMMVFDECPPSTADRGYIEKSLAMTLRWASRSRTAWTNRQQQALFGIIQGGLYPDLRLQSLSALVEMDFPGYAIGGLSVGEPPEKMYEVVEHIAPAMPADRPRYLMGVGTPVDLIQCIDRGVDMFDCVMPTRNARNGTLFTSTGKVNIKNARYAEDHEPLDSQCSCYTCRNFSRGYLRHLYQCGEILGLRLNTLHNIHYYLQLMAGARAAIADGTWNRWKNQQLDIYK

SEQ ID NO: 54671 - protein, 370 aa, Desulfurivibrio alkaliphilus
  misc_feature (1)..(370): tr|D6Z4W9|D6Z4W9_DESAT Queuine tRNA-ribosyltransferase OS=Desulfurivibrio alkaliphilus (strain DSM 19089 / UNI QEM U267 / AHT2) OX=589865 GN=tgt PE=3 SV=1
MSNPFTLLSSSSQCAARRGELRTLHGTVQTPVFMPVGTQATVKGVTPEQVRELGAEIILGNTYHLYLRPGHELIKKFGGLHRFMNWSGPILTDSGGFQIFSLQQLAKITEEGAAFKSHIDGSSLFLSPESAVAVQEDLGADIMMCLDTCIPYPADYRQAEEATELTSRWAARCRASQRVDGRLLFGIIQGGMYHDLRLRSLAALQEIGFDGYAIGGLSVGEPEELMYEICEATAAAMPAARARYLMGVGTPRNLVEAVYRGIDMFDCVMPTRNARNGMLFTSRGRLVIKNARYQDDPRPPDEECGCYTCRHYSRAYLRHLYQAREIMASVLMTIHNLSYYTGLMAAMRRAIEEDRFLEFYRDFNNATNAA

SEQ ID NO: 54672 - protein, 374 aa, Desulfurivibrio sp.
  misc_feature (1)..(374): tr|A0A3A6NK55|A0A3A6NK55_9DELT Queuine tRNA-ribosyltran sferase OS=Desulfurivibrio sp. OX=2093369 GN=tgt PE=3 S V=1
MNSPFTLHARSSQCAARAGEVRTLHGAIQTPVFMPVGTQATVKGVTPENLLELGARIILANTYHLFLRPGHELIRQFGGLHSFMNWHGPILTDSGGFQIYSLRELARITEEGATFKSHLDGSSHFLSPEDAVAVQEALGSDIMMCLDTCIPFPATRQEAETATALTARWAARCRAAQRETGQLLFGIVQGGMYPELRARSVADMTAIGFDGYALGGLSVGEPTAVMYDMTARTAALLPADFPKYVMGVGTPEDLVECVFRGIDMFDCVMPTRNARNGMLFTSQGRLVIKNACYYNDPRPADENCGCYTCRNYSRAYLRHLYMAREIMASQLNTIHNLHYFVNLMAQMRQAIREDRFEIFRKEFYAMREQQIPPF

SEQ ID NO: 54673 - protein, 375 aa, Desulfurobacterium atlanticum
  misc_feature (1)..(375): tr|A0A238YDL8|A0A238YDL8_9BACT Queuine tRNA-ribosyltran sferase OS=Desulfurobacterium atlanticum OX=240169 GN=t gt PE=3 SV=1
MLKFEIIETDGNARTGILKGTHGLTETPCFMPVATAGAVKGVRWEEIKESGYSLVLSNIYHLYLRPGIELIEKMGGLHRFINWNGLILTDSGGFQVFSLGDLMKLTEEGVYFRSHIDGSKHFFSPELVVEFEEKIGVDIGMVLDECTPYPATKEYALHSLERTYRWAKRSVEARSTDKTAIFGIVQGGVYDDLRLKSAKLTAELPFEGIAIGGLSVGEPKEDMYRITSLIAPKLPFEKPRYLMGVGKPEDIVVAVEHGVDMFDCVMPTRNARNGTLFTWNGKLNIKSAKYKEDEKPIDETCDCYTCKNFSRAYLRHLFAAKEINALILNSIHNLHFYSKLMEKIRKAIKEKRFKEFKQEFFSKYKVDEESPYYLT

SEQ ID NO: 54674 - protein, 375 aa, Desulfurobacterium indicum
  misc_feature (1)..(375): tr|A0A1R1MM95|A0A1R1MM95_9BACT Queuine tRNA-ribosyltran sferase OS=Desulfurobacterium indicum OX=1914305 GN=tgt PE=3 SV=1
MLNFEILASDGKARTGILKGTHGQTETPCFMPVATAGAIKGVRWEEVKSSGYSMVLSNIYHLYLRPGTELIENVGGIHKFVGWDGLILTDSGGFQVFSLGDLMKLTEEGVYFRSHIDGSKHFFSPELVIEYEEKIGVDIGMVLDECTPYPATREYAKHSLERTYRWAKRSIEARTSDKTAIFGIVQGGTFDDLRILSAKLTSDLPFDGVAIGGLSVGEPKEDMYRITSLIAPLLPYEKPRYLMGVGKPEDIIVAVEHGVDMFDCVMPTRNARNGTLFTWNGKLNIKSAKYKSDERPVDENCDCYTCRNFSRAYLRHLFASKEINALILNSIHNLHFYAQLMEKTREAIKNKQFKEFKKEFFSKYKTDEESFYYLT

SEQ ID NO: 54675 - protein, 296 aa, Desulfurobacterium sp.
  misc_feature (1)..(296): tr|A0A432QS67|A0A432QS67_9BACT Queuine tRNA-ribosyltran sferase (Fragment) OS=Desulfurobacterium sp. OX=2004706 GN=DSY34_02910 PE=3 SV=1
MEFQVLATDSRARYGKLKGTHGETETPCFMPVGTPGAVKGVTWDRISEMGYSLVLSNVYHLYLRPGIDIVEKAGGFHRFVNWNGLILTDSGGFQVFSLGKLMKITEDGIYFKSHIDGSEHFFSPELVVQFEERMGVDIGMVLDECTPYPATYEYAKHSMERTVRWALRSVRARTTDKTAIFGIVQGGVYDDLRIKCVELLKDLPFEGFAIGGLSVGEPKEEMYRITELVAPLLPEEKPRYLMGVGKPEDIIKAVEAGVDMFDCVIPTRNARNGTLFTSRGKINIKSAKYKNDFSPL

SEQ ID NO: 54676 - protein, 370 aa, Desulfurobacterium sp.
  misc_feature (1)..(370): tr|A0A432QYN1|A0A432QYN1_9BACT Queuine tRNA-ribosyltran sferase OS=Desulfurobacterium sp. OX=2004706 GN=tgt PE= 3 SV=1
MEFQVIKRDGNARLGILRGTHGETETPCFMPVGTLGAVKGVTWDRIKEMGYSLVLSNVYHLYLRPGLEILKEGGGLHSFTGWQNLILTDSGGFQVFSLSKLVKITEEGIYFKSHVDGSEHFFSPEFVVEFEEKVGVDIGMVLDECTPYPATYEYAKYSMERTVRWALRSIKARTTDKTAIFAIVQGGVYDDLRLKCVEMLSNLSFDGFAIGGLSVGEPKEEMYRITKLIAPQLPEDKPRYLMGVGKPEDILEAVEAGVDMFDCVIPTRNARNGTLFTSRGKINIKAAKFKKDFSPVDPECDCYTCKNFTRAYLRHLYVSGEINAAILNTIHNLHFYAKLMENIRNAIREGRFSEFKKSFLEKYLQWERSG

SEQ ID NO: 54677 - protein, 366 aa, Desulfurobacterium thermolithotrophum
  misc_feature (1)..(366): tr|F0S473|F0S473_DESTD Queuine tRNA-ribosyltransferase OS=Desulfurobacterium thermolithotrophum (strain DSM 11 699 / BSA) OX=868864 GN=tgt PE=3 SV=1
MEFKVLATDGKARYGKLKGTHGETETPCFMPVGTLGAVKGVTWNEISEMGYSLVLSNVYHLYLRPGIEVIEKAGGLHRFVNWNGLILTDSGGFQVFSLGKLMKISEEGIYFKSHIDGSEHFFSPELVVELEEKMGVDIGMVLDECTPYPATYEYAKHSMERTVRWALRSIKARTTDKTAIFGIVQGGTYDDLRLKCVELLKGLPFEGFAIGGLSVGEPKEEMYRITKLVAPTLPEEKPRYLMGVGKPEDIIEAVEAGVDMFDCVIPTRNARNGTLFTSRGKVNIKSAKYKNDFSPLDPECDCYTCRNFTKAYLRHLYVSKEINSAILNTIHNLYFYNRLMKKMREAIKNGEFQEFKKEFFSKYLTF

SEQ ID NO: 54678 - protein, 365 aa, Desulfuromonadaceae bacterium
  misc_feature (1)..(365): tr|A0A1G2WH13|A0A1G2WH13_9DELT Queuine tRNA-ribosyltran sferase OS=Desulfuromonadaceae bacterium GWC2_58_13 OX= 1801896 GN=tgt PE=3 SV=1
MDAGSQARRGRVHTRRGIIETPVFMPVGTQGTVKAMYPETLKEIGAQIILANTYHLFLRPGHDLVRRLGGLHAFMNWDRPILTDSGGFQVFSLGALRKIDEEGVRFQSHLDGSSHVLTPESSIAIQEALGADIIMAFDECIPYPSSREYVAASTDRSSRWARRCRQARQVDDGAALYGIVQGGMHRDLRARSVADLLEIGFEGYAVGGLSVGESADLMYEIMEWTMPLLPENQPRYVMGVGTPENLVEGVRRGVDMFDCVMPTRNARNGVMFTSFGKVSIKQARYLDDARPLDPECSCYVCRNYSRAYLRHLYQSNEILSSMLNTHHNLHYYQQLMSSMRNAIEAGAFERFRKDFYEKRQIDGGN

SEQ ID NO: 54679 - protein, 375 aa, Desulfuromonadaceae bacterium
  misc_feature (1)..(375): tr|A0A1G2W3W2|A0A1G2W3W2_9DELT Queuine tRNA-ribosyltran sferase OS=Desulfuromonadaceae bacterium GWC2_58_13 OX= 1801896 GN=tgt PE=3 SV=1
MFQFTLLNTDSETSARRGRLDTPHGTIETPIFMPVGTHAAMKAMTPAQVEETGAQIILSNTYHLHLRPGEGLVEKAGGLHAFMNWKRPILTDSGGFQVFSLPKKKITEDGVFFKHEVSGNEIFLGPAEAMAIQNALGADIIMAFDECIPYPATHDYAAKSIRKTLRWAEACLKAHQRPDQALFGIVQGSVFDDLRRDCAREMTAMGFPGYAIGGVSVGEGLDLLKKVVDYTAPFLPENKPRYLMGVGLPEDILESVERGMDMFDCVIPTRYARSATLFTSRGKLRLTHRRYRRDFYPVDASCDCYCCRNFTRAYLHHLFNANEILSAILSAIHNVHFYLNMMAGIRSAIEQNQFRAFKEEFLGLYGFSGPEDSEH

SEQ ID NO: 54680 - protein, 375 aa, Desulfuromonadales bacterium
  misc_feature (1)..(375): tr|A0A1F9Q0P9|A0A1F9Q0P9_9DELT Queuine tRNA-ribosyltran sferase OS=Desulfuromonadales bacterium GWD2_61_12 OX=1 797918 GN=tgt PE=3 SV=1
MSVFELLQQDGASPARRGRLRTRRGDIETPAFMPVGTRGTVKAMSVEGLEEVGAQIILANTYHLLLRPGHELVGRRGGLHRFMHWDRPILTDSGGFQVFSLGELRRISEEGVRFQSHIDGASHFLSPEVAMQVQETLGADILMAFDECIPYPATRDYAATATARSGRWARRSKAARTPGDDAALFGIVQGGMYEDLRRRSTEELLDIGFDGYALGGLSVGESAEVMYQVMDWTLPLLPAGQPRYVMGVGTPENLVEAVSRGADMFDCVMPTRNARNGLLFTTFGKVSIKQARYAEDDGPLDPACSCRVCRNYSRAYLRHLYQSGEILSSMLNTHHNLHYYLTLMQGMRTALEEGSFKVFKDDFYRRRQASATAAV

SEQ ID NO: 54681 - protein, 369 aa, Desulfuromonadales bacterium
  misc_feature (1)..(369): tr|A0A1E7GY68|A0A1E7GY68_9DELT Queuine tRNA-ribosyltran sferase OS=Desulfuromonadales bacterium C00003096 OX=18 69311 GN=tgt PE=3 SV=1
MFKFDLLNTDPSCAARRGRLTTPHGVIETPIFMPVGTHGALKAMTPAQVEETGAQIILSNTYHLHLSPGEGLVEKAGGLHRFMNWKGPILTDSGGFQVFSLPKKRITETGVFFRHENTGEEIYLGPQEAMQIQNTLGADIIMAFDECIPFPATHDYASKSIRKTLRWAEECIKHQARKDQALFGIVQGGIYEDLRQECARIMGDMDFPGYAVGGVSVGEGLELLKKVVDYTAPMLPELKPRYLMGVGLPEDILESVERGMDMFDCVIPTRYARSATLFTKRGKIRLTNRRYRRDFFPVDPSCDCYCCRNFSRAYLHHLFRSNEILSATLSAIHNVHFYLNMMSQARQAIEQNDFKAFKTEFLGEYLSGD

SEQ ID NO: 54682 - protein, 373 aa, Desulfuromonas acetexigens
  misc_feature (1)..(373): tr|A0A550JLI0|A0A550JLI0_9DELT Queuine tRNA-ribosyltran sferase OS=Desulfuromonas acetexigens OX=38815 GN=tgt P E=3 SV=1
MFQFTLLNTDSESAARRGRLQTPHGVIETPIFMPVGTHAAMKAMTPAQVEETGAQIILSNTYHLHLRPGEGLVEKAGGLHAFMNWKKPILTDSGGFQVFSLPKKKITEEGVFFKHEVNGNEIFLGPAEAMAIQNALGADIIMAFDECIPYPATHDYAAKSIGKTLRWAENCLKAHKRKDQALFGIVQGSVYDDLRRDCAKALTAMDFPGYAIGGVSVGEGLELLKKVVDYTAPFLPENKPRYLMGVGLPEDILESVERGMDMFDCVIPTRYARSATLFTSRGKLRLTHRRYRRDFYPVDASCSCYCCRNFTRAYLHHLFNANEILSAILSAIHNVHFYLDMMAQTRAAIERNEFKAFKAQFLGRYGFSGAGDE

SEQ ID NO: 54683 - protein, 371 aa, Desulfuromonas acetexigens
  misc_feature (1)..(371): tr|A0A550JKH6|A0A550JKH6_9DELT Queuine tRNA-ribosyltran sferase OS=Desulfuromonas acetexigens OX=38815 GN=tgt P E=3 SV=1
MTSFSFDLLHEDGRARRGRLHTRRGVVETPVFMPVGTQATVKAMYPETLKEIGAQIILANTYHLLLRPGHERVRALGGLHRFMNWDRPILTDSGGFQVFSLGELRKIDEQGVRFQSHLDGAAHVLTPESSIAIQEALGSDIIMAFDECIPYPATREYVAESTARSSRWAARCRQARQPEDGAALFGIVQGGMHRDLRAQSVADLLAIGFEGYAVGGLSVGESAELMYEVMDWTMPLLPRDCPRYVMGVGTPENLVEGVRRGVDMFDCVMPTRNARNGVLFTSFGKISIKQARFLDDESPIDPDCDCYVCRHYSRAYLRHLYQSNEILSSMLNTHHNLHYYQQLMARMRDAIESGTFETFRAEFLAARRIDP

SEQ ID NO: 54684 - protein, 371 aa, Desulfuromonas acetoxidans
  misc_feature (1)..(371): tr|Q1JY76|Q1JY76_DESA6 Queuine tRNA-ribosyltransferase OS=Desulfuromonas acetoxidans (strain DSM 684 / 11070) OX=281689 GN=tgt PE=3 SV=1
MFSFELLHNDRSCRARRGRLHTPHGAIETPIFMPVGTHGALKAMTPAQVEETGAQIILSNTYHLHLKPGESLVKKAGGLHRFMNWDKPILTDSGGFQVFSLPKKKITESGVFFRHEHTGEEIFLGPKEAMQIENDLGADIIMAFDECIPYPSSHDYAKKSIHKTLRWANSCLEAHGRSDQALFGIVQGSVYEDLRRECAEQLTAMDFPGYAIGGVSVGEGLELLKQVVDYTEPFLPSNKPRYLMGVGLPEDILESIERGMDMFDCVIPTRYARSATAFTSRGKLRLTNRNYRRDFFPVDPACDCYCCRNFTRAYLHHLFNANEILSATLMAIHNVHFYLNMVKQAREAIEQNCYIDFKNDFLGEYGFFEKK

SEQ ID NO: 54685 - protein, 376 aa, Desulfuromonas acetoxidans
  misc_feature (1)..(376): tr|Q1K1D5|Q1K1D5_DESA6 Queuine tRNA-ribosyltransferase OS=Desulfuromonas acetoxidans (strain DSM 684 / 11070) OX=281689 GN=tgt PE=3 SV=1
MTIPFDLITTDPNSSARRGRLHTAHGVVETPVFMPVGTQGTVKGMLPESLHDLGAQIILGNTYHLFLRPGHDLVKKMGGLHRFMNWSGPILTDSGGFQVFSLGKLRKIDEEGVRFQSHLDGAHQILTPESSIEIQQALGSDIIMVFDECIPYPATRDYVIDSTERSMRWAKRCKQAHNRQDGSALFGIVQGGMHEDLRRKSAHDLMEIGFDGYAIGGLSVGEEAEVMYEVMDYTLPELPADRPRYVMGVGTPENLIEGVRRGVDMFDCVMPTRNARNGVLFTSFGKISIKQAQYREDERPIDPDCDCYVCRHYSRAYLRHLYQSNEILSSMLNTMHNLHYYVQLMAQVRQALDEGNFATFYKEFYQRRQSGVVLES

SEQ ID NO: 54686 - protein, 376 aa, Desulfuromonas soudanensis
  misc_feature (1)..(376): tr|A0A0M3QFI8|A0A0M3QFI8_9DELT Queuine tRNA-ribosyltran sferase OS=Desulfuromonas soudanensis OX=1603606 GN=tgt -2 PE=3 SV=1
MTEFTFDLLATDSGSAARRGRMTTRRGLIETPIFMPVGTQGTVKAMLPEALKEIGAQIILGNTYHLFLRPGHELIRNLGGLHRFMNWDRPILTDSGGFQVFSLGALRKIDEEGVRFQSHLDGSSHVLSPESSIAVQEALGADIIMAFDECIPYPASREYVAESTARSGRWARRCKLARSQGDGAALFGIVQGGMHPDLRAGSVNELLEIGFEGYAIGGLSVGEEAALMYEVMDNTLPLLPRDRPRYVMGVGTPENLIEGVSRGVDMFDCVMPTRNARNGVLFTSFGKVSIKQARYLADPLPVDPDCSCYVCGNYSRAYLRHLYQSNEILSSVLNTHHNLHYYLGLMQGVRDALDGGRFGEFKKDFYRKRADNPSGT

SEQ ID NO: 54687 - protein, 373 aa, Desulfuromonas soudanensis
  misc_feature (1)..(373): tr|A0A0M3QFL1|A0A0M3QFL1_9DELT Queuine tRNA-ribosyltran sferase OS=Desulfuromonas soudanensis OX=1603606 GN=tgt -1 PE=3 SV=1
MFEFTLQCTDPGSAARRGRLETPHGVIETPIFMPVGTHGAVKAMTPAQVEETGAQIILSNTYHLHLKPGEGLVEKAGGLHKFMNWHRPILTDSGGFQVFSLPKKKITETGVYFRHEVTGEEIFLGPKEATTIQNALGADIIMAFDECIPYPATHAYSAKSIRTTLKWADECLKAHTRSDQALFGIVQGSVYEDLRRDCARELTAMDFPGYAIGGVSVGEGLELLKKVVDYTAPFLPENKPRYLMGVGLPEDILESVERGIDMFDCVIPTRYARSATLFTSRGKIRLTHRRYRRDFYPVDAACSCYCCRNFTRAYLHHLYNSNEILSAILAAIHNVHFYLEMMAGARRAIEEGNFKGYKEEFLGSYGFSDSDDG

SEQ ID NO: 54688 - protein, 378 aa, Desulfuromonas sp.
  misc_feature (1)..(378): tr|A0A2J6JE85|A0A2J6JE85_9DELT Queuine tRNA-ribosyltran sferase OS=Desulfuromonas sp. OX=892 GN=tgt PE=3 SV=1
MSTFSFSLLHKDPKSQARRGRIETRRGVIETPVFMPVGTQATVKGMRPEDLLTAGAQIILGNTYHLYLRPGHTLIEKLGGLHRFMNWEKPILTDSGGFQVFSLGALRKISEEGVRFQSHLDGSKHMLTPELSIAIQQSLDADIVMAFDECIPYPSERRYVENSTALSGRWARRCRDAFDTSRGAALFGIVQGGMHPDLRAASAEELQEIGFDGYAVGGLSVGEEAELMYGMMECTMPLLPEDRPRYVMGVGTPENLIEGVRRGVDMFDCVMPTRNARNGVLFTSFGKISIKQARYREDEGPIDPTCSCNVCRSYSRAYLRHLYQSHEILASMLNTQHNLHYYLSLMANARAAIAQGRFTAFAQEFYRLRQTGGDGDTI

SEQ ID NO: 54689 - protein, 374 aa, Desulfuromonas sp.
  misc_feature (1)..(374): tr|A0A357YG01|A0A357YG01_9DELT Queuine tRNA-ribosyltran sferase OS=Desulfuromonas sp. OX=892 GN=tgt PE=3 SV=1
MFEFSLLATDPSTAARRGRLTTPHGVIETPIFMPVGTHAAMKAMTPAQVTACGAQIILANTYHLHLKPGESLVEKAGGLHSFMGWDKPILTDSGGFQVFSLPKKKIADNGVYFRHEVTGDEIFLGPKEATTIQNQLGADIIMAFDECIPYPATLDYAAKSIKKTIRWAEDCKKAHSRSDQALFGIVQGSVYPNLRKECALALAAMDFPGYAVGGVSVGEGLDLLKQVVDCTAPFLPEHKPRYLMGVGLPEDILESVERGMDMFDCVIPTRYARSATLFTTRGKLRLTHRRYRRDFFPVDASCDCYCCRNFTRAYLHHLFNANEILSAILSAIHNVRFYLKMMEGCRSAIEQGAYRDFKRDFLGSYGSSADGNEA

SEQ ID NO: 54690 - protein, 374 aa, Desulfuromonas thiophila
  misc_feature (1)..(374): tr|A0A1G7CCN6|A0A1G7CCN6_9DELT Queuine tRNA-ribosyltran sferase OS=Desulfuromonas thiophila OX=57664 GN=tgt PE= 3 SV=1
MTSYELLCRDPSSAARRGRLQTRRGPVETPAFMPVGTQGTVKAMLPETLQELGAQILLGNTYHLFLRPGHERIARLGGLHRFMHWDGPILTDSGGFQVFSLGKLRKIDEAGVRFQSHLDGSAQVLTPESSIAIQQALDSDVIMVFDECIPYPAERAYVADSTARSMRWAARCKAAHQPDGSALFGIVQGGMHADLRRRSVEELLAIGFDGYALGGLSVGEEAALMYQVMDWTLPLLPDSQPRYVMGVGTPENLVEGVRRGVDLFDCVMPTRNARNGVLFTHFGRLSIKQARYQDDAGPIDPACDCYVCRHYSRAYLRHLYQCNEILAAMLNTHHNLHYYLGLMARMRQALEQGRFAAFCQDFYQRRSSAETDCG

SEQ ID NO: 54691 - protein, 373 aa, Desulfuromonas thiophila
  misc_feature (1)..(373): tr|A0A1G6Z1A3|A0A1G6Z1A3_9DELT Queuine tRNA-ribosyltran sferase OS=Desulfuromonas thiophila OX=57664 GN=tgt PE= 3 SV=1
MFSFELLHQDRHSRARRGRLQTPHGVIETPIFMPVGTHGALKALTPDQVEACGAQIILSNTYHLHLKPGEGLVEKAGGLHRFMHWNKPILTDSGGFQVFSLPKKRITADGVFFRHEVSGEEIFLGPQQAMEIQNALGADIIMAFDECIPYPSDIGYARQSIQKTLRWAECCLKAHRRSDQALFGIVQGSVYPELRRECAEQLRQLDFPGYAIGGVSVGEGLELLKKVVDDTEPHLPADKPRYLMGVGLPEDILESIERGMDMFDCVIPTRYARSATLFTSRGKLRLTHRRYRRDFFPVDASCGCYCCRNFSRAYLHHLYNANEILSATLAAIHNVHFYLDLVRQAREAIEQNRFSAFKASFLQQYGAAGNSDD

SEQ ID NO: 54692 - protein, 370 aa, Desulfuromusa kysingii
  misc_feature (1)..(370): tr|A0A1H3Y673|A0A1H3Y673_9DELT Queuine tRNA-ribosyltran sferase OS=Desulfuromusa kysingii OX=37625 GN=tgt PE=3 SV=1
MFQFKLLKEDPHSRARRGRLETPHGTIETPIFMPVGTHGAVKAMTPAQVEETEAQIILSNTYHLHLKPGEGLVKKAGGLHKFMNWKRPILTDSGGFQVFSLPKKRIGDDGVHFRHELTGEEIFLGPKEAMQIENDLGADIIMAFDECIPYPTTHDYAAKSVKKTIRWAESCLKHHARDDQALFGIVQGGVYEDLRRECAETLTAMNFPGYAIGGVSVGEGLDLLKQVVEYTEPFMPKNKPRYLMGVGLPEDILESIERGMDMFDCVIPTRYARSATLFTKRGKIRLTNRNFRRDFFPVDPSCDCYCCRNFTRAYLHHLYNANEILSATLAAIHNVRFYLNMVAGARAAIEAGDYLRFKEDFLGEYLPSKK

SEQ ID NO: 54693 - protein, 378 aa, Desulfuromusa kysingii
  misc_feature (1)..(378): tr|A0A1H3YDD0|A0A1H3YDD0_9DELT Queuine tRNA-ribosyltran sferase OS=Desulfuromusa kysingii OX=37625 GN=tgt PE=3 SV=1
MSAFKYALLQQDTGSQARRGRITTSRGEIETPAFMPVGTSATVKGILPEALKEIGAQIVLANTYHLYLRPGHKLIQQLGGLHKFMHWDRPILTDSGGFQVFSLGDIRKITEEGAAFQSHVDGSKHMLTPELSIEIQLALGSDIVMVFDECIPHPAERSYISESTNRSARWAKRCREVLSPGSSSALFGIVQGGMELDLRKQSVEQLREIGFEGYALGGLSVGEETSLMYDMMEYSLPLLPIDHPRYVMGVGTPENLIEGVARGCDMFDCVMPTRNARNGLLFTTFGKVSIKQARYRDDERPLDPDCQCYVCQHFSRAYLRHLYVSKEVLASVLNTHHNLYYYQQLMAGIRQSLEDGTFSKFRKDFYHKREKHSLNLID

SEQ ID NO: 54694 - protein, 373 aa, Dethiobacter alkaliphilus
  misc_feature (1)..(373): tr|C0GKE6|C0GKE6_9FIRM Queuine tRNA-ribosyltransferase OS=Dethiobacter alkaliphilus AHT 1 OX=555088 GN=tgt PE= 3 SV=1
MAVTYTLIKECPTTGARAGILHTPHGDVPTPVFMPVGTQATVKTMSPEELKEIGAGIILSNTYHLYLRPGHELIREAGGLHKFMNWDRAILTDSGGFQVFSLGDLRKIKEEGVTFRSHIDGSEHFLSPEKVMEIQEALGSDIIMAFDECAPYPADREYIKNSLERTTRWAERCKKAHTRQDQALFGIVQGGMYADLRQESARQLVPMDFPGYAVGGLSVGEPAHLMYEMLEATVPLLPQNKPRYLMGVGTADYLIEGVSRGIDMFDCVLPTRIARNGTVMTRDGYLTVRNAPYAKDFRPLEEGCECYACRNYTRAYIRHLIKTNEIFGFRLTTYHNLYVLAHFMAKLRESILNGTFPDVYQEFTARFGRKKED

SEQ ID NO: 54695 - protein, 373 aa, Dethiobacter sp.
  misc_feature (1)..(373): tr|A0A3A6NJL3|A0A3A6NJL3_9FIRM Queuine tRNA-ribosyltran sferase OS=Dethiobacter sp. OX=2093370 GN=tgt PE=3 SV=1
MAINLTITAKYGRARAGEIKTPRGLIRTPAFMPVGTQATVKAMTPEELEEIGVDIILNNTYHLYLRPGTDIIDQAGGLHRFMHWQRPILTDSGGFQVFSLSALREVDEEGVTFRSHIDGSTHSFSPEKAVEVQNILGADIIMPLDHVVPYPAAYGDTRQAMERTIRWAGRSRDCHKNTDAQALFAIVQGGTYDDLREKCCRELVGMDFPGYALGGLSVGEPKEIMYHLLDISVPFLPEEKPRYLMGVGSADALLEGVHRGVDLFDCVLPTRIARNGRVMISRGYLTLRNAEFARDMRPVDPECSCYVCRNYSRAYIRHLLKANEILGLRLTTYHNLFFLKDFMDKIRQAIVEQQFAQFYEEFWAKFQSSPLKK

SEQ ID NO: 54696 - protein, 379 aa, Dethiosulfatarculus sandiegensis
  misc_feature (1)..(379): tr|A0A0D2IZ54|A0A0D2IZ54_9DELT Queuine tRNA-ribosyltran sferase OS=Dethiosulfatarculus sandiegensis OX=1429043 GN=tgt PE=3 SV=1
MAKLDFDILAQSGRARRGRLTTRKGVVETPTFMPVGTVGSVKSLTPGEVSDLGAGIILGNTYHLLLRPGVDLVAEMGGLHRFMGGWTGSILTDSGGFQVFSLASRRVVTEEGVSFRSHLDGALMELTPEKAMDAQTLLGSDILMALDECPPPDADREYAEKALLRDARWAKRAKSALRPESGALFGIVQGGMYKDLRAQSAELICELDLPGHSLGGLSVGEPKETMLEVIDATQPLMPRKKPLYLMGVGAPEDLINCVGLGVDMFDCVLPTRMARTGTMLTKDGRLNLRNARFARDSRPIEEDCGCPACRNYSRAYLRHLFAARELLAYRLGTLHNLYFTLNLMARIRQAIENDNYAAFAREALDRLSRGEHRAAADDQ

SEQ ID NO: 54697 - protein, 372 aa, Dethiosulfatibacter aminovorans
  misc_feature (1)..(372): tr|A0A1M6D3F1|A0A1M6D3F1_9FIRM Queuine tRNA-ribosyltran sferase OS=Dethiosulfatibacter aminovorans DSM 17477 OX =1121476 GN=tgt PE=3 SV=1
MALEYKLLYESKECNARLGEIHTPHGVIETPIFMPVGTKATVKTMTPDELKDLEAQIILSNTYHLYLRPGHSLVKEAGGLHKFMNWDRPILTDSGGFQVFSLGKMRKITEEGVVFKSHIDGSEHFISPEKAVEIQNCLGSDIMMAFDECTPYPATYEYAKQSMERTTRWAKRCKEAHKNTDKQALFGIVQGSMYKDLRLESLRQLVELDLPGYALGGLSVGEPAEIMKEVLDYMVHEMPRNKPRYLMGVGSPDYIFEAVERGIDMADCVMPTRMARNGAFMTSKGRITIKNAVHRNDFSPIDDECECYCCKNYSRAYLRHLFKENEILGARLATIHNLFFLINLMKNIRISIREERFLEFKNDFYQKYGYKK

SEQ ID NO: 54698 - protein, 373 aa, Dethiosulfovibrio peptidovorans
  misc_feature (1)..(373): tr|D2Z903|D2Z903_9BACT Queuine tRNA-ribosyltransferase OS=Dethiosulfovibrio peptidovorans DSM 11002 OX=469381 GN=tgt PE=3 SV=1
MMFEFRVQAVCPETGARAGELVTPHGIIETPVFMPVGTRATVKAMSPREMEEIEAQIVLSNTYHLYLRPGVELIEKAGGLHRFMNWHRPILTDSGGFQVFSLSGINRIKEDGVEFSSHLDGSRHFMTPELATRVQEGLGSDIAMCFDQCVELPCDEETARKSVERTLRWARRCKEVHRRDDQALFGIVQGALFDDLRKDCARELIAMDFPGYSIGGLSVGESHDEMYRILDLLNPILPQEKPRYLMGVGFPTNLVEGVARGVDMFDCVLPTRNGRNGTLLTSRGKFNIKHSRFEEDWGPIDPDCDCYACREFSKAYIRHLYRSGEMLGARLCSWHNLRYLISLMKGAREAILEGRFPQFRDRFHELFSTGKVL

SEQ ID NO: 54699 - protein, 371 aa, Dethiosulfovibrio peptidovorans
  misc_feature (1)..(371): tr|A0A2G6M267|A0A2G6M267_9BACT Queuine tRNA-ribosyltran sferase OS=Dethiosulfovibrio peptidovorans OX=47055 GN= tgt PE=3 SV=1
MFEFRILGICPETGARAGELITPHGVIPTPVFMPVGTRATVKAMSPREMLEIGTSILLSNTYHLYLRPGVDLIRKAGGLHRFMNWDGPILTDSGGFQVFSLSGINRVLDEGVEFASHLDGSRHLMTPELATSVQEGLGSDIAMCFDQCVELPCAKDEARQSVERTLRWARQSQEAHTREDQALFGIVQGALFDDLRSFCAQELIQMKFPGYAIGGLSVGESHDEMYRILDLLNPVLPQDKPRYLMGVGYPTNLVEGVARGVDMFDCVLPTRNGRNGTILTSQGRYNIKHGRFTEDWGPLDPHCDCYACREFSRAYIRHLYRSGEILGARLCSWHNLRYLIRLVKGAREAILNGTFPLYRASFHRLFEGGES

SEQ ID NO: 54700 - protein, 366 aa, Dethiosulfovibrio salsuginis
  misc_feature (1)..(366): tr|A0A1X7J8W8|A0A1X7J8W8_9BACT Queuine tRNA-ribosyltran sferase OS=Dethiosulfovibrio salsuginis OX=561720 GN=tg t PE=3 SV=1
MAECPETGARAGELVTPHGIIETPVFMPVGTAATVKAMSPKEMAEIETQILLSNTYHLYLRPGAELVEEAGGLHRFMNWNGPILTDSGGFQVFSLAGINKILEDGVEFVSHLDGSRHFMTPELATQTQEKLGSDIAMCFDQCVKLPCTREEAGKSVDRTLRWAARCQSIHRREDQALFGIVQGALYDDLRVKCAEKLIDMDFPGYSIGGLSVGESHQEMYRILDLLNPVMPKGKPRYLMGVGYPTNLVEGVARGVDMFDCVLPTRNGRNGTLLTSRGKFNIKHSRFTHDWGPIDPDCDCYACREFSRAYVRHLYRSGEMLSARLCSWHNLRFLISLMKRARQSILDGVFPAFRAEFHRLFGESNPL

SEQ ID NO: 54701 - protein, 375 aa, Devosia chinhatensis
  misc_feature (1)..(375): tr|A0A0F5FND6|A0A0F5FND6_9RHIZ Queuine tRNA-ribosyltran sferase OS=Devosia chinhatensis OX=429727 GN=tgt PE=3 S V=1
MKQVSFTIAATDGMARRGRIDTPRGEINTPAFMPVGTAGTVKAMYPEQVRETGADILLGNTYHLMLRPGAERVASLGGLHDFMDWQRPILTDSGGFQVMSLAKLRKLTEKGVTFKSHIDGSSHELTPERSIEIQTLLDSDIIMQLDECIALPAERKEMERAMELSIRWADRSKTAFNNQLNRALFGIVQGGDDAELRARSAAGLKSIGFDGYAVGGLAVGEPQEVMFRVLSEITPELPQDKPRYLMGVGKPDDILGGIERGIDMFDCVHPTRAGRHGHAYTRFGVINLKNARHKDDHRPLDEASPNPNCRRWSRAYLHHLVRTEEILGAMVLSQINLAYYQELTAGTRAAIEAGRMSDFAAETRAAWAAGDLPVL

SEQ ID NO: 54702 - protein, 379 aa, Devosia crocina
  misc_feature (1)..(379): tr|A0A1I7N935|A0A1I7N935_9RHIZ Queuine tRNA-ribosyltran sferase OS=Devosia crocina OX=429728 GN=tgt PE=3 SV=1
MSTSTKLVTFSVSATDGLARRGRIDTPRGEINTPAFMPVGTAGTVKAMYPEQVRETGADILLGNTYHLMLRPGAERVASLGGLHTFMDWQRPILTDSGGFQVMSLAKLRKLTEKGVTFKSHIDGSSHELTPERSIEIQTLLDSDIIMQLDECIALPAERKEMARAMELSLRWADRSKTAFNNQKNRALFGIVQGGDDPELRARSAAGLQSIGFDGYSIGGLAVGEPQEVMFRVLSNITPELPLDKPRYLMGVGKPDDILGGIERGVDMFDCVHPTRAGRHGHAYTRFGVINLKNARHKDDHRPLDEASPNPNCRRWSRAYLHHLVRTEEILGAMVLSQINLAYYQELTAGARVAIEDGRMADFAAETRAAWAAGDLPVL

SEQ ID NO: 54703 - protein, 375 aa, Devosia elaeis
  misc_feature (1)..(375): tr|A0A178HVD7|A0A178HVD7_9RHIZ Queuine tRNA-ribosyltran sferase OS=Devosia elaeis OX=1770058 GN=tgt PE=3 SV=1
MKQVNFSLIASDGMARRGRIDTPRGEINTPAFMPVGTAGTVKAMYPEQVRETGADILLGNTYHLMLRPGAERVAGLGGLHTFMDWQRPILTDSGGFQVMSLAKLRKLTEKGVTFKSHIDGSSHELTPERSIEIQTLLDSDIIMQLDECIALPAERKEMERAMELSLRWADRSKTAFNNQANRALFGIVQGGDDPELRARSAAGLQSIGFDGYSIGGLAVGEPQEVMFRVLSDITPELPWDRPRYLMGVGKPDDILGGIERGVDMFDCVHPTRAGRHGHAYTRFGVINLKNARHKDDHRPLDEASPNPNCRRWSRAYLHHLVRTEEILGAMVLSQINLAYYQELTAGARAAIEAGRISDFAAETRAAWAAGDLPVL

SEQ ID NO: 54704 - protein, 377 aa, Devosia enhydra
  misc_feature (1)..(377): tr|A0A1K2HVC3|A0A1K2HVC3_9RHIZ Queuine tRNA-ribosyltran sferase OS=Devosia enhydra OX=665118 GN=tgt PE=3 SV=1
MTSPVTFTLEATDGMARRGRIDTHRGAINTPAFMPVGTAGTVKGLYPEQVRETGADILLGNTYHLMLRPGAERVARLGGLHEFMDWARPILTDSGGFQVMSLAKLRKLTEKGVTFRSHIDGSAHELTPERSIEIQKLLDSDIIMQLDECIALPAEHREIERAMELSLRWAQRSKDAFAEAPGRALFGIVQGGDDPELRARSAAGLQDIGFHGYSIGGLAVGEPQEVMFRVLSDLTPLMPQDRPRYLMGVGKPDDILGGIERGVDMFDCVHPTRAGRHGHAYTRFGVINLKNARHKDDHRPLDEASPNPNCRRFSRAYLHHLVKAEEMLGAMLLSQINLHYYQELTAGARTAISAGRMADFAVETRNGWARGDLPPLA

SEQ ID NO: 54705 - protein, 379 aa, Devosia epidermidihirudinis
  misc_feature (1)..(379): tr|A0A0F5QHD8|A0A0F5QHD8_9RHIZ Queuine tRNA-ribosyltran sferase OS=Devosia epidermidihirudinis OX=1293439 GN=tg t PE=3 SV=1
MSQTTKQVTFTISATDGAARRGRIDTPRGDIQTPAFMPVGTAGTVKAMYPEQVRETGADILLGNTYHLMLRPGAERVASLGGLHDFMDWQRPILTDSGGFQVMSLAQLRKLTERGVTFKSHIDGSSHDLTPERSIEIQTLLDSDIIMQLDECLKLPAETKEIERAMELSLRWADRSKTAFNNQANRALFGIVQGGDNADLRLRSAQGLKSIGFDGYAVGGLAVGEPQEVMFRVLDDIVPELPADRPHYLMGVGKPDDILGAIGRGIDMFDCVHPTRAGRHGHVYTRFGVINLKNARHKDDHRPLDEASPNPNCRRWSRAYLHHLVKTEEILGAMILSQINLAYYQELVQGCRVAIEGSRFTDFAAETRAAWAAGDLPTL

SEQ ID NO: 54706 - protein, 381 aa, Devosia geojensis
  misc_feature (1)..(381): tr|A0A0F5FTT1|A0A0F5FTT1_9RHIZ Queuine tRNA-ribosyltran sferase OS=Devosia geojensis OX=443610 GN=tgt PE=3 SV=1
MNKTMKQVSFSLAATDGMARRGRIDTPRGDIQTPAFMPVGTAGTVKALYPEQVRETGADILLGNTYHLMLRPGAERVAKLGGLHVFMDWPRPILTDSGGFQVMSLSKLRKITEQGVTFRSHLDGSAYELTPERSIEIQTLLDSDIIMQLDECIPLPSEKKEMERAMELSLRWGDRSKTAFDSQMNRALFGIVQGGDDAELRGKSAAGLRSIGFDGYAVGGLAVGEPQEVMFRVLGEITPELPVDRPRYLMGVGKPDDILGGIERGIDMFDCVHPTRAGRHGHAYTRFGVINLKNARHKDDPRPLDEASPNPNCRRFSRAYLHHLVKTEEILGAMILSQINLSYYQELVSGARGAIEAGRFSDFAAETRAQWAAGDLPVIDG

SEQ ID NO: 54707 - protein, 376 aa, Devosia insulae
  misc_feature (1)..(376): tr|A0A1E5XL32|A0A1E5XL32_9RHIZ Queuine tRNA-ribosyltran sferase OS=Devosia insulae DS-56 OX=1116389 GN=tgt PE=3 SV=1
MKSDYSFTLLATDGMARRGRIDTWRGDVQTPAFMPVGTVGTVKGMYPEQVRDTGADILLGNTYHLMLRPGAERVAALGGLHDFMDWQRPILTDSGGFQVMSLTKLRKLTEKGVTFRSHIDGSAHELTPERSIEIQTLLDSDIIMQLDECIPLPSEHKEMERAMELSLRWAQRSKDAFGNQPHRSLHGIVQGGDNAELRGRSAAGLKSIGFNGYSIGGLAVGEPQEVMFRVLSEITPELPTDKPRYLMGVGKPDDILGGIERGVDMFDCVHPTRAGRHGHAYTRFGVINLKNARHKDDPRPLDEESPNPNCRRFSRAYLHHLIRTEEMLGAMILSQINLSYYQQLCIGARTAIEAGTLADYAAQTRATWAAGDIAVI

SEQ ID NO: 54708 - protein, 375 aa, Devosia limi
  misc_feature (1)..(375): tr|A0A0F5LL37|A0A0F5LL37_9RHIZ Queuine tRNA-ribosyltran sferase OS=Devosia limi DSM 17137 OX=1121477 GN=tgt PE= 3 SV=1
MKQVTFTLSATDGKARRGRIDTPRGDIQTPAFMPVGTAGTVKAMYPEQVRETGADILLGNTYHLMLRPGAERVASLGGLHTFMDWERPILTDSGGFQVMSLSQLRKMSERGVTFKSHIDGSTHELTPERSIEIQTLLDSDIIMQLDECIALPAEHKEMERAMELSLRWADRSKTAFNNQANRALFGIVQGGDAPDLRARSAQGLTSIGFDGYAVGGLAVGEPQEVMFRVLDEIVPELPTDRPHYLMGVGKPDDILGAIGRGIDMFDCVHPTRAGRHGHVYTRFGVINLKNARHKDDHRPIDEASPNRNCRRFSRAYLHHLVKTEEILGAMILSQINLAYYQELVQGARTAIESSRFTDFAAETRAAWAAGDLPTL

SEQ ID NO: 54709 - protein, 375 aa, Devosia lucknowensis
  misc_feature (1)..(375): tr|A0A1Y6ES23|A0A1Y6ES23_9RHIZ Queuine tRNA-ribosyltran sferase OS=Devosia lucknowensis OX=1096929 GN=tgt PE=3 SV=1
MKQVTFSVLASDGMARQGRIDTPRGEINTPAFMPVGTAGTVKAMYPEQVRETGADILLGNTYHLMLRPGAERVASLGGLHDFMDWQRPILTDSGGFQVMSLAKLRKLTEKGVTFKSHIDGSAYELTPERSIEIQTLLDSDIIMQLDECIALPAERKEMERAMELSIRWAERSKTAFNNQQNRALFGIVQGGDDAELRGRSAAGLKSIGFDGYAVGGLAVGEPQAVMFRVLSDITPELPEDRPRYLMGVGKPDDILGGIERGIDMFDCVHPTRAGRHGHAYTRFGVINLKNARHKDDHRPLDEASPNPNCRRWSRAYLHHLVKTEEILGAMVLSQINLAYYQELTAGTRAAIAAGRMTDFAAETRAAWAAGDLPPL

SEQ ID NO: 54710 - protein, 379 aa, Devosia psychrophila
  misc_feature (1)..(379): tr|A0A0F5PVH9|A0A0F5PVH9_9RHIZ Queuine tRNA-ribosyltran sferase OS=Devosia psychrophila OX=728005 GN=tgt PE=3 S V=1
MSSPTKLVTFTLSATDGMARRGRIDTPRGDIQTPAFMPVGTAGTVKAMYPEQVRETGADILLGNTYHLMLRPGAERVASQGGLHTFMDWQRPILTDSGGFQVMSLAQLRKLTEKGVTFRSHIDGSSHELTPERSIEIQTLLDSDIIMQLDECLKLPAEKKEIERAMQLSLRWADRSKTAFNNQQNRALFGIVQGGDDPELRAKSAQGLKSIGFDGYAVGGLAVGEPQEVMFKVIEEITPELPDDRPRYLMGVGKPDDILGAIGRGIDMFDCVHPTRAGRHGHVYSRFGVINLKNARHRDDHRPIDELSPNPNCRRWSRAYLHHLVKTEEILGAMILSQMNLAYYQELVQGCRGAIEGSRFNDFAAETRAAWAAGDLPVL

SEQ ID NO: 54711 - protein, 379 aa, Devosia riboflavina
  misc_feature (1)..(379): tr|A0A087M1L5|A0A087M1L5_9RHIZ Queuine tRNA-ribosyltran sferase OS=Devosia riboflavina OX=46914 GN=tgt PE=3 SV= 1
MSTTTKQVTFSLLATDGAARRGRIDTPRGEINTPAFMPVGTAGTVKAMYPEQVRETGADILLGNTYHLMLRPGAERVASLGGLHDFMDWQRPILTDSGGFQVMSLAKLRKLTEKGVTFKSHIDGSAYELTPERSIEIQTLLDSDIIMQLDECIALPAERKEIERAMELSLRWADRSKTAFNNQQNRALFGIVQGGDDAELRAKSAAGLKSIGFDGYSIGGLAVGEPQDVMFRVLSEITPELPTDRPRYLMGVGKPDDILGGIERGVDMFDCVHPTRAGRHGHAYTRFGVINLKNARHKDDHRPLDEASPNPNCRRWSRAYLHHLVRTEEILGAMVLSQINLAYYQELTAGTRAAIEAGRMADFAAETRAAWAAGDLPVL

SEQ ID NO: 54712 - protein, 379 aa, Devosia soli
  misc_feature (1)..(379): tr|A0A0F5LDS2|A0A0F5LDS2_9RHIZ Queuine tRNA-ribosyltran sferase OS=Devosia soli OX=361041 GN=tgt PE=3 SV=1
MSTTSKLVTFSLTASDGMARCGRIDTPRGEISTPAFMPVGTAGTVKAMYPEQVRETGADILLGNTYHLMLRPGAERVASLGGLHDFMDWQRPILTDSGGFQVMSLAKLRKLTEKGVTFKSHIDGSAYELTPERSIEIQTLLDSDIIMQLDECIALPAERKEIERAMELSLRWADRSKTAFNNQQNRMLFGIVQGGDDAELRAKSAAGLKSIGFDGYSIGGLAVGEPQDVMFRVLSDITPDLPWDRPRYLMGVGKPDDILGAIERGVDMFDCVHPTRAGRHGHAYTRFGVINLKNARHKDDHRPLDEASPNPNCRRWSRAYLHHLVRTEEILGAMVLSQINLAYYQELTAGARAAIKAQRMTDFAAETRAAWAAGDLPVL

SEQ ID NO: 54713 - protein, 376 aa, Devosia sp.
  misc_feature (1)..(376): tr|A0A1E4A5V9|A0A1E4A5V9_9RHIZ Queuine tRNA-ribosyltran sferase OS=Devosia sp. SCN 66-27 OX=1660097 GN=tgt PE=3 SV=1
MKSDYSFTLLATDGMARRGRIDTWRGDVQTPAFMPVGTVGTVKAMYPEQVRDTGADILLGNTYHLMLRPGAERVAALGGLHDFMDWQCPILTDSGGFQVMSLAKLRKLTEKGVTFRSHIDGSAHELTPERSIEIQTLLDSDIIMQLDECIPLPSDYKEMERAMELSLRWAQRSKDAFGNQPHRSLHGIVQGGDNAELRGRSAAGLKSIGFNGYSIGGLAVGEPQEVMFRVLSEITPELPTDKPRYLMGVGKPDDILGGIERGVDMFDCVHPTRAGRHGHAYTRFGVINLKNARHKDDPRPLDEESPNPNCRRFSRAYLHHLIRTEEMLGAMILSQINLSYYQQLCIGARAAIDAGALADYAAQTRATWAAGDLPVL

SEQ ID NO: 54714 - protein, 375 aa, Devosia sp.
  misc_feature (1)..(375): tr|A0A087LN16|A0A087LN16_9RHIZ Queuine tRNA-ribosyltran sferase OS=Devosia sp. 17-2-E-8 OX=1535287 GN=tgt PE=3 SV=1
MKQVSFSLLATDGNARRGRIDTPRGDIQTPAFMPVGTAGTVKAMYPEQVRETGADILLGNTYHLMLRPGAERVASLGGLHTFMDWERPILTDSGGFQVMSLAKLRKLDEKGVTFRSHIDGSAHSLTPERSIEIQTLLDSDIIMQLDECISLPNETREMERAMELSLRWADRSKTAFNGQNNRALFGIVQGGDDLRLRAKSAAGLQSIGFDGYAVGGLAVGEPQAVMFEVLSGVCPLLPEDRPRYLMGVGKPDDILGGIERGIDMFDCVHPTRAGRHGHIYTRFGVINMKNARHKDDGRPVDEQSPNRNCRRFSRAYLHHLVKTEEILGAMILSQINLAYYQELTAGARAAIEAGSFSDFVETTRAGWAAGDLPPL

SEQ ID NO: 54715 - protein, 369 aa, Dialister invisus
  misc_feature (1)..(369): tr|R5TB25|R5TB25_9FIRM Queuine tRNA-ribosyltransferase OS=Dialister invisus CAG:218 OX=1263072 GN=tgt PE=3 SV= 1
MVVNYELVAEDRKTGARAGLLHTPHGVFKTPMFMPVGTQATVKTVTPEELEEMGAQIILSNTYHLFLRPGTELIHEAGELHRFMNWNKGILTDSGGFQVFSLGAMRKITEEGVYFRSFLDGSKQFLSPEISIRAQEDLGSDIAMAFDECIPYPADYEYARKSTERTTRWAKRCIKAHQRTDRGIFGIIQGGMYKDLRKQSAMEISSLPFDGVAVGGLSVGEPHDLMYDILEETIQWMPKGKARYLMGVGTPDCLVEGVARGVDMFDCVFPTRVARNGMAMIHTRRMNMKNKQYERDFRPIEESCGCYTCRNYTRAYIRHLYKSEELLAFRLVTIHNLYFLLQFMRDMREAIVQGNFFEFREHFMEHYKR

SEQ ID NO: 54716 - protein, 369 aa, Dialister invisus
  misc_feature (1)..(369): tr|C9LLI6|C9LLI6_9FIRM Queuine tRNA-ribosyltransferase OS=Dialister invisus DSM 15470 OX=592028 GN=tgt PE=3 SV =1
MVVNYELVAEDRKTGARAGLLHTPHGVFKTPMFMPVGTQATVKTVTPEELEEMGAQIILSNTYHLFLRPGTELIHEAGELHRFMNWNKGILTDSGGFQVFSLGAMRKITEEGVYFRSFLDGSKQFLSPEISIRAQEDLGSDIAMAFDECIPYPADYEYARKSTERTTRWAKRCIKAHQRTDRGIFGIIQGGMYKDLRKQSAMEISSLPFDGVAVGGLSVGEPHDLMYDILEETTQWMPKGKARYLMGVGTPDCLVEGVARGVDMFDCVFPTRVARNGMAMIHTGRMNMKNKQYERDFRPIEESCGCYTCRNYTRAYIRHLYKSEELLAFRLVTIHNLYFLLQFMRDMREAIVQGNFSEFREHFMEHYKQ

SEQ ID NO: 54717 - protein, 372 aa, Dialister micraerophilus
  misc_feature (1)..(372): tr|F2BYB5|F2BYB5_9FIRM Queuine tRNA-ribosyltransferase OS=Dialister micraerophilus DSM 19965 OX=888062 GN=tgt PE=3 SV=1
MIIMVIKYELIAKDEHTGARAGLLHTPHGTFKTPMFMPVGTQATVKTLTPHELKEMGAQIILSNTYHLFLRPGTELIKEAGELHSFMNWDGGILTDSGGFQVFSLGKMRKITEKGVYFRSHLDGSKRFLSPEVAAHAQENLGSDIAMALDECIPYPADYEYSKKSTERTTRWAERFVKAHTRTDRGMFGIIQGGMYKDLRKQSADEICGLPFDGIAIGGLSVGEPLELMYEILEYTTQFIPENKVRYLMGVGTPDCLVEGVARGVDMFDCVYPTRVARNGMAMVKSGRMNMKNKKYEKDFLPLDITCGCYTCKNFTRSYIRHLYKAEEILAFRLVTIHNLYFLLQFMRDMRDSIINGSFVDFMKNFKENYAR

SEQ ID NO: 54718 - protein, 369 aa, Dialister microaerophilus
  misc_feature (1)..(369): tr|E4L7T7|E4L7T7_9FIRM Queuine tRNA-ribosyltransferase OS=Dialister microaerophilus UPII 345-E OX=910314 GN=tg t PE=3 SV=1
MVIKYELIAKDEHTGARAGLLHTPHGTFKTPMFMPVGTQATVKTLTPHELKEMGAQIILSNTYHLFLRPGTELIKEAGELHSFMNWDGGILTDSGGFQVFSLGKMRKITEKGVYFRSHLDGSKRFLSPEVAAHAQENLGSDIAMALDECIPYPADYEYSKKSTERTTRWAERFVKAHTRTDRGMFGIIQGGMYKDLRKQSADEICGLPFDGIAIGGLSVGEPLDLMYEILEYTTQFIPENKVRYLMGVGTPDCLVEGVARGVDMFDCVYPTRVARNGMAMVKSGRMNMKNKKYEKDFLPLDITCGCYTCKNFTRSYIRHLYKAEEILAFRLVTIHNLYFLLQFMRDMRDSIINGSFVDFMKNFKENYVR

SEQ ID NO: 54719 - protein, 369 aa, Dialister pneumosintes
  misc_feature (1)..(369): tr|A0A1B3WD32|A0A1B3WD32_9FIRM Queuine tRNA-ribosyltran sferase OS=Dialister pneumosintes OX=39950 GN=tgt PE=3 SV=1
MVINYELIAQDSKTGARAGLLHTPHGTFTTPMFMPVGTRATVKTLSPDELTMMGAQIILGNTYHLFLRPGTELIKEAGGLHGFMNWKKGILTDSGGFQVFSLGNTRTIKEEGVYFRSILDGSKQFLSPEVATKAQEDLGSDIAMAFDECIPYPADYNYAKKSTERTTRWAERCIKARTRSDRGMFGIVQGGMYKDLRKQSALEIASLPFDGIAIGGLSVGEPHDIMYEVLEYTTPYLPVNKARYLMGVGTPDCLLEGVTRGIDMFDCVFPTRVARNGMAMVHTGRMNMKNKKYEKDFSPIEEECQCYTCKNFTRAYIRHLYKAEELLAFRLVTIHNLFFLLQFMRDMRASIINGSFTVFRENFWAEYAK

SEQ ID NO: 54720 - protein, 369 aa, Dialister sp.
  misc_feature (1)..(369): tr|A0A3B9DVL1|A0A3B9DVL1_9FIRM Queuine tRNA-ribosyltran sferase OS=Dialister sp. OX=1955814 GN=tgt PE=3 SV=1
MVINYELVAEDKKTGARAGLLHTPHGTFKTPMFMPVGTQATVKTVTPEELEGMGAQIILSNTYHLFLRPGTELIKEAGELHRFMNWPKGILTDSGGFQVFSLGAMRKITEEGVHFRSFLDGSKQFLSPEVSIHAQEDLGSDIAMAFDECIPYPADYEYADHSTARTTRWAERCIKAHTRTDRGMFGIVQGGMYKDLRKRSALEISSMPFDGMAIGGLSVGEPHDLMYDILEYTTQFLPVNKARYLMGVGTPDCLVEGVARGIDMFDCVFPTRVARNGMAMVHSGRMNMKNKKYEKDWAPLEEGCGCYTCQHYSRAYIRHLYKSEELLAFRLVTIHNLFFLLQFMRDMRQAIIDGNFTEFRESFMAGYHR

SEQ ID NO: 54721 - protein, 369 aa, Dialister sp.
  misc_feature (1)..(369): tr|R7PNB2|R7PNB2_9FIRM Queuine tRNA-ribosyltransferase OS=Dialister sp. CAG:588 OX=1262871 GN=tgt PE=3 SV=1
MVINYELIAQDSKTGARAGLLHTPHGTFTTPMFMPVGTRATVKTLSPDELTMMGAQIILGNTYHLFLRPGTELIKEAGGLHGFMNWKKGILTDSGGFQVFSLGNTRTIKEEGVYFRSILDGSKQFLSPEVATKAQEDLGSDIAMAFDECIPYPADYNYAKKSTERTTRWAERCIKARTRSDRGMFGIVQGGMYKDLRKQSALEIASLPFDGIAIGGLSVGEPHDIMYEVLEYTTPYLPVNKARYLMGVGTPDCLLEGVTRGIDMFDCVFPTRVARNGMAMVHTGRMNMKNKKYEKDFSPIEEECQCYTCKNFTRAYIRHLYKAEELLAFRLVTIHNLFFLLQFMRDMRASIINGSFTAFRENFWAEYAK

SEQ ID NO: 54722 - protein, 369 aa, Dialister succinatiphilus
  misc_feature (1)..(369): tr|H1D2U7|H1D2U7_9FIRM Queuine tRNA-ribosyltransferase OS=Dialister succinatiphilus YIT 11850 OX=742743 GN=tgt PE=3 SV=1
MVINYELIAEDKKTGARAGLLHTPHGTFKTPMFMPVGTQATVKTVTPEELEDMGAQIILSNTYHLFLRPGTELIREAGGLHDFMNWHKGILTDSGGFQVFSLGAMRKITEEGVHFRSFLDGSKQFLSPEVSIHAQEDLGSDIAMAFDECIPYPADYDYADHSTARTTRWAERCIKAHTRTDRGMFGIVQGGMYKDLRKRSAEEISAMPFDGMAIGGLSVGEPHDLMYEMLEYTTQFLPVNKARYLMGVGTPDCLVEGVARGVDMFDCVFPTRVARNGMAMVHSGRMNMKNKKYEKDWAPLEEGCQCYTCTHYSRAYIRHLYKSEELLAFRLVTIHNLYFLLQFMRDMRQAIIDGNFTEFRENFMANYKR

SEQ ID NO: 54723 - protein, 390 aa, Diaphorobacter nitroreducens
  misc_feature (1)..(390): tr|A0A3N1YKM7|A0A3N1YKM7_9BURK Queuine tRNA-ribosyltran sferase OS=Diaphorobacter nitroreducens OX=164759 GN=tg t PE=3 SV=1
MLKFEILATDTSSHARRGTLTLNHGVVQTPIFMPVGTYGTVKGVMPRSLREMGAQIILGNTFHLWMRPGLDVMQSFGGLHAFEQWDKPILTDSGGFQVWSLGSMRKITEEGVHFASPVNGDKLFMSPEVSMQIQTTLNSDIVMQLDECTPYETNGHKTTEAEARKSMEMSRRWAVRSKNEFERLGNPNALFGIVQGGMYKNLRQESLEALVEMDFPGYAVGGVSVGEPKDEMLDIMAHTPHRLPAHKPRYLMGVGTPEDLVEGVAQGVDMFDCVMPTRNARNGTLFTRYGDLKIRNARHKTDHQPLDPSCTCHACAGTEGVSWNDGGRGGFSRAYLHHLDRCGEMLGPMLTTIHNLHYYLNLMREVREALDAGQFGAFRARFKAERARGV

SEQ ID NO: 54724 - protein, 390 aa, Diaphorobacter polyhydroxybutyrativorans; identical to SEQ ID NO: 51087
  misc_feature (1)..(390): tr|A0A2Z2LNP4|A0A2Z2LNP4_9BURK Queuine tRNA-ribosyltran sferase OS=Diaphorobacter polyhydroxybutyrativorans OX= 1546149 GN=tgt PE=3 SV=1

SEQ ID NO: 54725 - protein, 379 aa, Diaphorobacter sp.; identical to SEQ ID NO: 52047
  misc_feature (1)..(379): tr|A0A4Y8ZLD6|A0A4Y8ZLD6_9BURK Queuine tRNA-ribosyltran sferase OS=Diaphorobacter sp. DS2 OX=1302548 GN=tgt PE= 3 SV=1

SEQ ID NO: 54726 - protein, 390 aa, Diaphorobacter sp.
  misc_feature (1)..(390): tr|A0A2S4KF12|A0A2S4KF12_9BURK Queuine tRNA-ribosyltran sferase OS=Diaphorobacter sp. LR2014-1 OX=1933219 GN=tg t PE=3 SV=1
MLKFEILATDTSSHARRGTLTLNHGVVQTPIFMPVGTYGTVKGVMPRSLREMGAQIILGNTFHLWMRPGLDVMQSFGGLHGFEQWDKPILTDSGGFQVWSLGSMRKITEEGVHFASPVNGDKLFMSPEVSMQIQTTLNSDIVMQLDECTPYETNGHKTTEAEARKSMEMSRRWAVRSKNEFERLGNPNALFGIVQGGMYKNLRQESLEALVEMDFPGYAVGGVSVGEPKDEMLDIMAHTPHRLPAHKPRYLMGVGTPEDLVEGVAQGVDMFDCVMPTRNARNGTLFTRYGDLKIRNARHKTDHQPLDPSCTCHACAGTEGVSWNDGGRSGFSRAYLHHLDRCGEMLGPMLTTIHNLHYYLNLMREVREALDAGQFGAFRARFKAERARGV

SEQ ID NO: 54727 - protein, 364 aa, Dichelobacter nodosus
  misc_feature (1)..(364): tr|A0A5F1A9K3|A0A5F1A9K3_DICNO Queuine tRNA-ribosyltran sferase OS=Dichelobacter nodosus OX=870 GN=tgt PE=3 SV= 1
MTQDGRARRGRIIFDNGQIVQTPVFMPVGTQATVKGLSPEELDALGAEIILGNTFHLMLRPGAEIIQAHGGLHQFMHWQKPILTDSGGFQVFSLAKIRKLTEEGARFRSPIDGREVFLTPEKSIAVQHALNSNIIMQLDECTPYPATYDEAANSMRMSLRWARRSQQAHGDHANHLFGIVQGGIYPDLRQESAQALVELDLPGYAIGGLAVGEPKDAREATLDAVLPFVPKNKPRYLMGVGKPADLVEGVRRGIDMFDCVMPSRNARNAYLFTRFGILKLRNSRYKEDLRPIDETCNCYTCQRYSRSYLHHLDKCNEILGARLNTIHNLYYYVHLMHEMRRAIEEHRFDDFARAFYAEQECGND

SEQ ID NO: 54728 - protein, 369 aa, Dichelobacter nodosus
  misc_feature (1)..(369): sp|A5EW66|TGT_DICNV Queuine tRNA-ribosyltransferase OS= Dichelobacter nodosus (strain VCS1703A) OX=246195 GN=tg t PE=3 SV=1
MNYECMTQDGRARRGRIIFDNGQIVQTPVFMPVGTQATVKGLSPEELDALGAEIILGNTFHLMLRPGAEIIQAHGGLHQFMHWQKPILTDSGGFQVFSLAKIRKLTEEGARFRSPIDGREVFLTPEKSIAVQHALNSNIIMQLDECTPYPATYDEAANSMRMSLRWARRSQQAHGDHANHLFGIVQGGIYPDLRQESAQALVELDLPGYAIGGLAVGEPKDAREATLDAVLPFVPKNKPRYLMGVGKPADLVEGVRRGIDMFDCVMPSRNARNAYLFTRFGILKLRNSRYKEDLRPIDETCNCYTCQRYSRSYLHHLDKCNEILGARLNTIHNLYYYVHLMHEMRRAIEEHRFDDFARAFYAEQECGND

SEQ ID NO: 54729 - protein, 370 aa, Dichotomicrobium thermohalophilum
  misc_feature (1)..(370): tr|A0A397Q6Y7|A0A397Q6Y7_9RHIZ Queuine tRNA-ribosyltran sferase OS=Dichotomicrobium thermohalophilum OX=933063 GN=tgt PE=3 SV=1
MSALAFDIHGRDGEARTGALTTPRGTIRTPAFMPVGTAASVKAMFPDTVRETGADIILGNTYHLMLRPGAERIARLGGLHDFMNWPGPILTDSGGFQVMSLSKLRKLSEDGVTFQSHIDGSTHLLTPERAVEIQCLLGSDIQMQLDECPPYPCTREEAASAVELSLRWAERSQDAFAKRAAAGHALFGIVQGSIHPDLRERSARALMEMDFPGYAIGGLAVGEGPDLMLETLAQTTPHLPADKPRYLMGVGTPLDIVEAVARGVDMFDCVMPTRSGRHGQAFTWAGKVNLRNAAHADDPGPLDPESPCPAARDYSRAYLHHLVKAGEYLAPMLLTWANVAFYQDLMRAVRAAIQEGRLDELRTRIRVAYG

SEQ ID NO: 54730 - protein, 387 aa, Dickeya aquatica
  misc_feature (1)..(387): tr|A0A375ADA0|A0A375ADA0_9GAMM Queuine tRNA-ribosyltran sferase OS=Dickeya aquatica OX=1401087 GN=tgt PE=3 SV=1
MKYQLLNTQGRARRGRLVFERGVVETPAFMPVGTYGTVKGMTPEEVKETGAQIILGNTFHLWLRPGQEIMKQHGDLHGFMQWHGPILTDSGGFQVFSLGDIRKITEEGVHFRNPINGDAIFLSPEKSMEIQYDLGSDIVMIFDECTPYPADWDYAKRSMEMSLRWAKRSRQRFDELGNPNALFGIIQGSVYEDLRDVSVKGLVDIGFDGYAVGGLAVGEPKADMHRILEHVCPQLPADKPRYLMGVGKPEDLVEGVRRGIDMFDCVMPTRNARNGHLFVTDGVVKIRNAKHKDDTAPLDAECDCYTCRNYSRAYLHHLDRCNEILGARLNTIHNLRYYQRLMAGLRQAIEEGNLERFVTEFYQRIGKPVPPLADKAAGDDHEGHVPQ

SEQ ID NO: 54731 - protein, 387 aa, Dickeya chrysanthemi
  misc_feature (1)..(387): tr|C6CEL3|C6CEL3_DICC1 Queuine tRNA-ribosyltransferase OS=Dickeya chrysanthemi (strain Ech1591) OX=561229 GN=t gt PE=3 SV=1
MKYELLQTDGRARRGRLVFERGVVETPAFMPVGTYGTVKGMTPEEVKDTGAQIILGNTFHLWLRPGQEIMKRHGDLHDFMQWHGPILTDSGGFQVFSLGDIRKITEEGVHFRNPINGDAIFLSPEKSMEIQYDLGSDIVMIFDECTPYPADWDYAKRSMEMSLRWAKRSRQRFDELSNKNALFGIVQGSVYEDLRDVSVKGLVDIGFDGYAVGGLAVGEPKADMHRILEHVCPQLPTDKPRYLMGVGKPEDLVEGVRRGIDMFDCVMPTRNARNGHLFVTDGVVKIRNARHKDDTGPLDEHCDCYTCRNYSRAYLHHLDRCNEILGARLNTIHNLRYYQRLMAGLRQAIEEGRLESFVTEFYQRIGKPVPPLVDKAAGDDHEGHVPQ

SEQ ID NO: 54732 - protein, 386 aa, Dickeya dadantii
  misc_feature (1)..(386): tr|E0SD35|E0SD35_DICD3 Queuine tRNA-ribosyltransferase OS=Dickeya dadantii (strain 3937) OX=198628 GN=tgt PE=3 SV=1
MKYELLQTDGRARRGRLVFDRGMVETPAFMPVGTYGTVKGMTPEEVKDTGAQIILGNTFHLWLRPGQEIMKRHGDLHDFMQWHGPILTDSGGFQVFSLGDIRKITEEGVHFRNPINGDAIFLSPEKSMEIQYDLGSDIVMIFDECTPYPADWDYAKRSMEMSLRWAKRSRQRFDELSNKNALFGIVQGSVYEDLRDVSVKGLVDIGFDGYAVGGLAVGEPKADMHRILEHVCPQLPTDKPRYLMGVGKPEDLVEGVRRGIDMFDCVMPTRNARNGHLFVTDGVVKIRNAKHKDDTGPLDEHCDCYTCRNYSRAYLHHLDRCNEILGARLNTIHNLRYYQRLMAGLRQAIEEGRLESFVTEFYQRIGKPVPPVDNVAGNDHEGHAPQ

SEQ ID NO: 54733 - protein, 384 aa, Dickeya dianthicola
  misc_feature (1)..(384): tr|A0A385XWM1|A0A385XWM1_9GAMM Queuine tRNA-ribosyltran sferase OS=Dickeya dianthicola OX=204039 GN=tgt PE=3 SV =1
MKYELLQTDGRARRGRLVFERGVVETPAFMPVGTYGTVKGMTPEEVKDTGAQIILGNTFHLWLRPGQEIMKRHGDLHDFMQWHGPILTDSGGFQVFSLGDIRKITEEGVHFRNPINGDAIFLSPEKSMEIQYDLGSDIVMIFDECTPYPADWDYAKRSMEMSLRWAKRSRQRFDELSNKNALFGIVQGSVYEDLRDVSVKGLVDIGFDGYAVGGLAVGEPKADMHRILEHVCPQLPTDKPRYLMGVGKPEDLVEGVRRGIDMFDCVMPTRNARNGHLFVTDGVVKIRNAKHKDDTGPLDEHCDCYTCRNYSRAYLHHLDRCNEILGARLNTIHNLRYYQRLMAGLRQAIEEGRLEGFAAEFYQRIGKPVPPLVDNAVGNDCGGK

SEQ ID NO: 54734 - protein, 387 aa, Dickeya fangzhongdai
  misc_feature (1)..(387): tr|A0A2K8QJ58|A0A2K8QJ58_9GAMM Queuine tRNA-ribosyltran sferase OS=Dickeya fangzhongdai OX=1778540 GN=tgt PE=3 SV=1
MKYELLQTDGRARRGRLVFDRGMVETPAFMPVGTYGTVKGMTPEEVKDTGAQIILGNTFHLWLRPGQEIMKRHGDLHDFMQWHGPILTDSGGFQVFSLGDIRKITEEGVHFRNPINGDAIFLSPEKSMEIQYDLGSDIVMIFDECTPYPADWDYAKRSMEMSLRWAKRSRQRFDELSNKNALFGIVQGSVYEDLRDVSVKGLVDIGFDGYAVGGLAVGEPKADMHRILEHVCPQLPTDKPRYLMGVGKPEDLVEGVRRGIDMFDCVMPTRNARNGHLFVTDGVVKIRNAKHKDDTGPLDEHCDCYTCRNYSRAYLHHLDRCNEILGARLNTIHNLRYYQRLMAGLRQAIEDGRLESFVTEFYQRIGKPVPPLVDNAAGNDHEGHAPQ

SEQ ID NO: 54735 - protein, 387 aa, Dickeya paradisiaca
  misc_feature (1)..(387): tr|C6CBF3|C6CBF3_DICP7 Queuine tRNA-ribosyltransferase OS=Dickeya paradisiaca (strain Ech703) OX=579405 GN=tgt PE=3 SV=1
MKYELLKTDGRARRGRLVFERGVVETPAFMPVGTYGTVKGMTPEEVKDTGAQIILGNTFHLWLRPGQEIMKLHGDLHDFMQWKGPILTDSGGFQVFSLGDIRKITEEGVHFRNPINGDAIFLSPEKSMEIQYDLGSDIVMIFDECTPYPADWDYAKRSMEMSLRWAQRSRRRFDELGNRNALFGIIQGSVYEDLRDISVKGLVDIGFDGYAVGGLAVGEPKADMHRILEHVCPQIPADKPRYLMGVGKPEDLVEGVRRGIDMFDCVMPTRNARNGHLFVTDGVVKIRNAKHKDDTGPLDEHCDCYTCRNYSRAYLHHLDRCNEILGARLNTIHNLRYYQRLMAGLRQAIEEGKLEDFAAAFYQRIGKPAPPLADNSAGDDHEGHVSQ

SEQ ID NO: 54736 - protein, 387 aa, Dickeya solani
  misc_feature (1)..(387): tr|A0A2K8W3F1|A0A2K8W3F1_9GAMM Queuine tRNA-ribosyltran sferase OS=Dickeya solani RNS 08.23.3.1.A OX=1240086 GN =tgt PE=3 SV=1
MKYELLQTDGRARRGRLVFDRGMVETPAFMPVGTYGTVKGMTPEEVKDTGAQIILGNTFHLWLRPGQEIMKRHGDLHDFMQWHGPILTDSGGFQVFSLGDIRKITEEGVHFRNPINGDAIFLSPEKSMEIQYDLGSDIVMIFDECTPYPADWDYAKRSMEMSLRWAKRSRQRFDELSNNNALFGIVQGSVYEDLRDVSVKGLVDIGFDGYAVGGLAVGEPKADMHRILEHVCPQLPTDKPRYLMGVGKPEDLVEGVRRGIDMFDCVMPTRNARNGHLFVTDGVVKIRNAKHKDDTGPLDEHCDCYTCRNYSRAYLHHLDRCNEILGARLNTIHNLRYYQRLMAGLRQAIEDGKLESFVTEFYQRIGKPVPPLADNAVGNDHEGHAPQ

SEQ ID NO: 54737 - protein, 387 aa, Dickeya sp.
  misc_feature (1)..(387): tr|A0A5B8HQ94|A0A5B8HQ94_9GAMM Queuine tRNA-ribosyltran sferase OS=Dickeya sp. NCPPB 569 OX=568768 GN=tgt PE=3 SV=1
MKYELLQTDGHARRGRLVFERGVVETPAFMPVGTYGTVKGMTPEEVKDTGAQIILGNTFHLWLRPGQEIMKRHGDLHDFMQWHGPILTDSGGFQVFSLGDIRKITEEGVHFRNPINGDAIFLSPEKSMEIQYDLGSDIVMIFDECTPYPADWDYAKRSMEMSLRWAKRSRQRFDELSNKNALFGIVQGSVYEDLRDVSVKGLVDIGFDGYAVGGLAVGEPKADMHRILEHVCPQLPADKPRYLMGVGKPEDLVEGVRRGIDMFDCVMPTRNARNGHLFVTDGVVKIRNAKHKDDTGPLDEHCDCYTCRNYSRAYLHHLDRCNEILGARLNTIHNLRYYQRLMAGLRQAIEDGKLESFVAEFYQRIGKPLPPLVDNAVDVDREGHALQ

SEQ ID NO: 54738 - protein, 387 aa, Dickeya sp.
  misc_feature (1)..(387): tr|A0A454UTU8|A0A454UTU8_9GAMM Queuine tRNA-ribosyltran sferase OS=Dickeya sp. FVG10-MFV-A16 OX=2487135 GN=tgt PE=3 SV=1
MKYELLQTDGRARRGRLVFERGMVETPAFMPVGTYGTVKGMTPEEVKDTGAQIILGNTFHLWLRPGQEIMKRHGDLHDFMQWHGPILTDSGGFQVFSLGDIRKITEEGVHFRNPINGDAIFLSPEKSMEIQYDLGSDIVMIFDECTPYPADWDYAKRSMEMSLRWAKRSRQRFDELSNKNALFGIVQGSVYEDLRDVSVKGLVDIGFDGYAVGGLAVGEPKADMHRILEHVCPQLPTDKPRYLMGVGKPEDLVEGVRRGIDMFDCVMPTRNARNGHLFVTDGVVKIRNAKHKDDTGPLDEHCDCYTCRNYSRAYLHHLDRCNEILGARLNTIHNLRYYQRLMAGLRQAIEDGRLESFVTEFYQRIGKPVPPVVDNAARNDHEGHAPQ

SEQ ID NO: 54739 - protein, 387 aa, Dickeya zeae
  misc_feature (1)..(387): tr|A0A2K9QCX3|A0A2K9QCX3_9GAMM Queuine tRNA-ribosyltran sferase OS=Dickeya zeae OX=204042 GN=tgt PE=3 SV=1
MKYELLQTDGRARRGRLVFERGVVETPAFMPVGTYGTVKGMTPEEVKETGAQIILGNTFHLWLRPGQEIMKRHGDLHDFMQWHGPILTDSGGFQVFSLGDIRKITEEGVHFRNPINGDAIFLSPEKSMEIQYDLGSDIVMIFDECTPYPADWDYAKRSMEMSLRWAKRSRQRFDELSNKNALFGIVQGSVYEDLRDVSVKGLVDIGFDGYAVGGLAVGEPKADMHRILEHVCPQLPTDKPRYLMGVGKPEDLVEGVRRGIDMFDCVMPTRNARNGHLFVTDGVVKIRNAKHKDDTGPLDEHCDCYTCRNYSRAYLHHLDRCNEILGARLNTIHNLRYYQRLMAGLRQAIGEGRLESFVAEFYQRIGKPVPPLADSAAGNDHEGHVPQ

SEQ ID NO: 54740 - protein, 387 aa, Dickeya zeae
  misc_feature (1)..(387): tr|A0A0A8FFZ6|A0A0A8FFZ6_9GAMM Queuine tRNA-ribosyltran sferase OS=Dickeya zeae EC1 OX=1427366 GN=tgt PE=3 SV=1
MKYELLQTDGRARRGRLVFERGVVETPAFMPVGTYGTVKGMTPEEVKETGAQIILGNTFHLWLRPGQEIMKRHGDLHDFMQWHGPILTDSGGFQVFSLGDIRKITEEGVHFRNPINGDAIFLSPEKSMEIQYDLGSDIVMIFDECTPYPADWDYAKRSMEMSLRWAKRSRQRFDELSNKNALFGIVQGSVYEDLRDVSVKGLVDIGFDGYAVGGLAVGEPKADMHRILEHVCPQLPTDKPRYLMGVGKPEDLVEGVRRGIDMFDCVMPTRNARNGHLFVTDGVVKIRNAKHKDDTGPLDEHCDCYTCRNYSRAYLHHLDRCNEILGARLNTIHNLRYYQRLMAGLRQAIGEGRLESFVSEFYQCIGKPVPPLADSAAGNDHEGHVPQ

SEQ ID NO: 54741 - protein, 393 aa, Dictyobacter alpinus
  misc_feature (1)..(393): tr|A0A402B3X6|A0A402B3X6_9CHLR Queuine tRNA-ribosyltran sferase OS=Dictyobacter alpinus OX=2014873 GN=tgt PE=3 SV=1
MSSFNFTIDAECPDTWARAGTVQTPHGTIQTPIFMPVGTQATVKSVAPEELHAAGAQIILANTYHLMLRPGSELIDSFGGLHSFMQWHGPILTDSGGFQVWSLGHLRKLNENGVVFKSHIDGSLHTLTPERVMQIEAELGADIILPLDICAPYPCSPAEAKKAMEWTHRWEERALVEKEKQRPEQTLFGIVQGAFEPELRAESARVIGNMPFQGLSIGGLSVGEPKDEMWGMLKHVTPNLPRDKPRHLLGVGSPEDLVIGVGLGMDMFDCVLPTRVARHGGLFTRDGRVSIKGARFRTARGPIEDGCDCYTCQHYSAAYVNHLARAEEQLYFRLGSIHNIRFMLRLAGDLRASIINGTYPAFQEEFLARYVPASEKVRVAQREKWKEARDKRA

SEQ ID NO: 54742 - protein, 376 aa, Dictyobacter alpinus
  misc_feature (1)..(376): tr|A0A402B374|A0A402B374_9CHLR Queuine tRNA-ribosyltran sferase OS=Dictyobacter alpinus OX=2014873 GN=KDA_12830 PE=3 SV=1
MEHGRAEQPQYGSMHLPHGTIELPVFMPDATLGVVRSTDATDLRNHHIQALVMNTFHLMQRPGTSTIQALGGLHTMSGWKGPIITDSGGFQAYSLIQQNAKFGSLSHDGIAFKPEGSDRKFQLTPEKAVQLQMSYGADIIMCLDYCTHVDAPADIQEVAVMHTIDWAKRSKKEFERLLKQKKLSDDKRPLLFGVIQGGGSEELRKRCAEALLEIGFDGFGYGGWPLDKQGKLLTDIITYTRELIPAQYQMHALGVGHPTSIVELTRLGYAIFDCAMPTRDARHARMYTFSAATSTFAPGEKWFSYIYVNDDKYIKSDHAVSAYCDCLCCTNYSVGYLHHLFKINDTLFFRLATIHNLRFMTMLTERLRELYYAQDR

SEQ ID NO: 54743 - protein, 376 aa, Dictyobacter aurantiacus
  misc_feature (1)..(376): tr|A0A401ZBA9|A0A401ZBA9_9CHLR Queuine tRNA-ribosyltran sferase OS=Dictyobacter aurantiacus OX=1936993 GN=KDAU_ 14990 PE=3 SV=1
MQYGPTAQPQYGSLHLPHGAIDLPVFMPDATLGVVRSTDATDLQNCQIQALVMNTFHLMQRPGTSTIQSLGGLHAMSGWQGPIVTDSGGFQAYSLIQQNAKFGSLNADGITFKPEGADRKFQLTPEKAVQLQMSYGADIIMCLDYCTHVDADAALQTEAVTRTIDWAKRCKKEYERLLKQKKLAEEKRPLLFGVVQGGGSEELRRRCAEALLEIGFDGFGYGGWPLDKHGNLLTDIITYTRNLIPAQYQMHALGVGHPGSIAELTRLGYGIFDCAMPTRDARHARLYSFTSATTSFASGERWFSYIYVNDDKYIKNDRPVSEFCDCLCCTHYSAGYLHHLFKINDTLFFRLATIHNLRFMTMLTQRIRNEYYGQIR

SEQ ID NO: 54744 - protein, 393 aa, Dictyobacter aurantiacus
  misc_feature (1)..(393): tr|A0A401ZC09|A0A401ZC09_9CHLR Queuine tRNA-ribosyltran sferase OS=Dictyobacter aurantiacus OX=1936993 GN=tgt P E=3 SV=1
MSSFNFTIEAECPETWARAGTIQTPHGTIQTPIFMPVGTQATVKSVAPEELHAAGAQIILSNTYHLMLRPGSALIDSFGGLHSFMQWHGPILTDSGGFQVWSLGHLRKLNEDGVVFKSHIDGSLHTLTPERVMQIEAEIGADIILPLDICAPYPCSPKEARKAMEWTHRWEERALVEKEKQRPEQTLFGIVQGAFEPDLRAESARVIGNMPFKGLSIGGLSVGEPKEEMWGMLKHVTPNLPRDKPRHLLGVGSPEDLVVGVGLGMDMFDCVLPTRVARHGGLFTRDGRVSIKGARFRTARGPIEEGCDCYTCQHYSAAYVNHLARAEEQLYFRLGSIHNIRFMLRLAGQLRQSIIDGTYPAFRDEFLARYVPASEKVREAQREKWKEARDKRA

SEQ ID NO: 54745 - protein, 393 aa, Dictyobacter kobayashii
  misc_feature (1)..(393): tr|A0A402AGN8|A0A402AGN8_9CHLR Queuine tRNA-ribosyltran sferase OS=Dictyobacter kobayashii OX=2014872 GN=tgt PE =3 SV=1
MSSFNFTIDAECPETWARAGTIQTPHGTIQTPIFMPVGTQATVKSVAPEELHAAGAQIILANTYHLMLRPGSALIDSFGGLHSFMQWHGPILTDSGGFQVWSLGHLRKLNEDGVVFKSHIDGSLHTLTPERVMQIEAELGSDIILPLDICAPYPCSPKEAKKAMEWTHRWEERALVEKEKLRPEQTLFGIVQGAFEPELRAQSAQVIGNMPFQGLSIGGLSVGEPKEEMWGMLKHVTPNLPRDKPRHLLGVGSPEDLVIGVGLGMDMFDCVLPTRVARHGGLFTRDGRVSIKGARFRTARGPIEEGCDCYTCQHYSAAYVNHLARAEEQLYFRLGSIHNIRFMLRLAGQLRDSIINGTYPAFRDEFLARYIPASEKVREAQREKWKEARDKRA

SEQ ID NO: 54746 - protein, 379 aa, Dictyobacter kobayashii
  misc_feature (1)..(379): tr|A0A402AFW5|A0A402AFW5_9CHLR Queuine tRNA-ribosyltran sferase OS=Dictyobacter kobayashii OX=2014872 GN=KDK_17 890 PE=3 SV=1
MESGLANQPTQPQYGSLQLPHGSIDLPVFMPDATLGVVRSTDATDLRQCQIQALVMNTFHLMQKPGTSTIQSLGGLHTMSGWTGPIVTDSGGFQAYSLIQQNAKFGSLTSDGITFKPEGADRKFQLTPEKAIQLQMSYDADVIMCLDYCTHVDAPYDFQATAVTHTIDWAKRSKKEYKRLLKQKKLTPDKRPLLFGVIQGGGSEELRRRCAEELLAIGFDGFGYGGWPLDKQGKLLTDIITYTRELIPAHYQMHALGVGHPGSIAELTRLGYGIFDCAMPTRDARHARLYSFTSASSSFASDEKWFTYLYLNDDKYIKNDRPVSEFCDCLCCTNYSAGYLHHLFKINDTLFFRLATIHNLRFMTMLTQRIRELYHAQNR

SEQ ID NO: 54747 - protein, 393 aa, Dictyobacter sp.
  misc_feature (1)..(393): tr|A0A5A5T8W8|A0A5A5T8W8_9CHLR Queuine tRNA-ribosyltran sferase OS=Dictyobacter sp. Uno17 OX=2014874 GN=tgt PE= 3 SV=1
MSSFNFTIDAESSETWARAGTIQTPHGTIETPIFMPVGTQATVKSVSPEELHGVGAQIILANTYHLMLRPGSALIDSFGGLHSFMNWQGPILTDSGGFQVWSLAHNRKLNEDGVVFKSHLDGSSHALTPERVMQIEAELGADIVLPLDICAPYPSNPTEARKAMEWTHRWEERALVEKEKLRPEQTLFGIVQGAFEADLRAQSAQVIGNMPFQGLSIGGLSVGEPKEQMWEMLKHVTPELPRDKPRHLLGVGSPEDLVIGVGLGMDMFDCVLPTRVARHGGLFTRDGRVSIKGARFRTAHGPIEEGCDCYTCQHYSAAYVCHLARAEEQLYYRLGSIHNIRFMLRLAKELRESIINGTYPTFRETFLARYVPASEKVREAQREKWIKARDQRA

SEQ ID NO: 54748 - protein, 375 aa, Dictyobacter sp.
  misc_feature (1)..(375): tr|A0A5A5TKE2|A0A5A5TKE2_9CHLR Queuine tRNA-ribosyltran sferase OS=Dictyobacter sp. Uno17 OX=2014874 GN=KDI_492 80 PE=3 SV=1
MEHALGGPLSQDQLHLPNGTIDLPVFMPDATLGVVRATDASDLQNCQIQALVMNTFHLMQRPGTSTIQALGGLHRLSGWTGPIVTDSGGFQAYSLIQQNAKFGSLNSDGITFKPEGADRKFQLTPEKAVQLQMSYGADIIMCLDYCTHVDAPQELQEEAVLHTIAWAKRSKKEYDNLLKQKKLPSEKRPLLFGVIQGGGSEELRKRCAEALLEIGFDGFGYGGWPLDKHGNLLIDIITYTRSLIPAHYQMHALGVGHPNSIVDCVRMGYQIFDCAMPTRDGRHARLYTFTDPGTSFASGEKWFTYIYVNDDKYIKHDRPVSAYCDGLCCTRYSAGYLHHLFKINDTLFFRLATMHNLRFMTMLTQRLREMYHVQS

SEQ ID NO: 54749 - protein, 359 aa, Dictyoglomus sp.
  misc_feature (1)..(359): tr|A0A2J6XXL4|A0A2J6XXL4_9BACT Queuine tRNA-ribosyltran sferase OS=Dictyoglomus sp. NZ13-RE01 OX=2010949 GN=tgt PE=3 SV=1
MNKLILNLSGKELKLPNFLPDATYGVVKSLDTKDLKQVGVHGLVVNTFHLINKPGISVIDSLNGIKNFMNWDGIILSDSGGFQIFSVLRENPKFGSINEDEIILKNNEKIIITPEKIINAQFKLKSDIMMALDYCTHPDDSYEINKLSVKLTIDWGKRSKKEYEKLIKSKENYKPLIFGIIQGGKDKNLRKECAEALMEIGFDGFGFGGYPIDSKGNLIEDILQYTAELIPDNLPKYAMGIGKPENIVTCAQMGYNLFDCVIPTREGRKGKLYIYNDKMEKVDIFSKDFYSNIFILDGKYVRDKKPISEFCDCLLCQNYSRAYLHHLFKLEDPLAYRLASIHNLRFYMQLIDLIWKKIS

SEQ ID NO: 54750 - protein, 387 aa, Dictyoglomus sp.
  misc_feature (1)..(387): tr|A0A2J6XX13|A0A2J6XX13_9BACT Queuine tRNA-ribosyltran sferase OS=Dictyoglomus sp. NZ13-RE01 OX=2010949 GN=tgt PE=3 SV=1
MKFEVLIRDQKSKARICKIETYHGEITTPVFMPVGTQGAVKTLSPEEVREQGAEIILSNTYHLFLRPGPEIIEKAGGLHKFMSWDGPILTDSGGYQVFSLAKLRKIDNDGIHFSSHIDGTRYFFTPELVIDTQSKLGSDIVMPLDVCLGYGADYWETEEALRLTIEWLKRSINYNNRKHYQNLFGIIQGGFYKDLRLEAINKMLELPLDGFALGGISVGEPKELMYEISQFITDNLPDDKPRYLMGVGAPEDLVVMVGFGIDMFDCVLPTRLARHGIFYTRDGRRNIKNAIYKEDLSPLEEDCDCYTCRKFSRAYIRHLYLQYETFSYRLLTIHNLRFLFRIMSELKRSIIEGRYEEYKKSFLKRFLSNDRENRLEKEELWTKILGV

SEQ ID NO: 54751 - protein, 388 aa, Dictyoglomus thermophilum
  misc_feature (1)..(388): sp|B5YFK5|TGT_DICT6 Queuine tRNA-ribosyltransferase OS= Dictyoglomus thermophilum (strain ATCC 35947 / DSM 3960 / H-6-12) OX=309799 GN=tgt PE=3 SV=1
MSFEVIQRDKNTRARLGRLKTFHGEVNTPVFMPVGTQGAVKTLSPEEVEEVGAEIILSNTYHLFLRPGQEIIKKGGGLHRFIGWDKPILTDSGGYQVFSLARLRKIEEDGIYFNSHIDGSQYFFTPELVMEVQKALGSDIIMPLDICLGYGASYWETKEALEITLRWLKRSIDYKKNNNMETQLLFGIIQGGFYRELRKEAVERMLDMELPGFALGGISVGEPKDKMYEITDYTVSLLPEEKPRYLMGVGAPEDLVMGVSMGIDMFDCVLPTRLARHGVFYTKTGRRNIKNAQYKEDFSPLEEDCDCYTCRRFTKAYIRHLFLQHETFSYRLLTIHNLRFLFRLMEDVRRSIREGRLEEFKKEFLTQYLANDRENRLEKEEVWNRLLI

SEQ ID NO: 54752 - protein, 388 aa, Dictyoglomus thermophilum
  misc_feature (1)..(388): tr|A0A5D4XK33|A0A5D4XK33_DICTH Queuine tRNA-ribosyltran sferase OS=Dictyoglomus thermophilum OX=14 GN=tgt PE=3 SV=1
MSFEVIQRDKNTRARLGRLKTFHGEVSTPVFMPVGTQGAVKTLSPEEVEEVGAEIILSNTYHLFLRPGQEIIKKGGGLHRFIGWNKPILTDSGGYQVFSLARLRKIEEDGIYFNSHIDGSQYFFTPEIVMEVQKALGSDIIMPLDICLGYGASYWETKEALEITLRWLKRSIDYKENSNMETQLLFGIIQGGFYRELRKEAVERMLDMELPGFALGGISVGEPKDKMYEITDYTVSLLPEEKPRYLMGVGAPEDLVIGVSMGIDMFDCVLPTRLARHGVFYTKTGRRNIKNAQYKEDFSPLEEDCDCYTCRRFTKAYIRHLFLQHETFSYRLLTIHNLRFLFRLMENIRRSIREGRLEEFKKEFLTQYLANDRENRLEKEEVWNKLLI

SEQ ID NO: 54753 - protein, 388 aa, Dictyoglomus turgidum
  misc_feature (1)..(388): sp|B8E2N5|TGT_DICTD Queuine tRNA-ribosyltransferase OS= Dictyoglomus turgidum (strain Z-1310 / DSM 6724) OX=515 635 GN=tgt PE=3 SV=1
MIFEIIVRDKKTRARLGKLKTFHGEINTPVFMPVGTQGAVKTLSPEEVEKVGAEIILSNTYHLFLRPGHEIVRKGGGLHKFMGWEKPILTDSGGYQVFSLARLRRIDEDGIYFNSHIDGTRYFYTPELVMEIQKSLGSDIIMPLDICLGYGASYWETKEALEITLRWLKRSIDYKNNSNMDHQLLFGIVQGGFYKELRKEAVERMLNIDLPGLALGGISVGEPKDKMYEIIDYTVSLLPEEKPRYLMGVGAPEDLVVGVSMGIDMFDCVLPTRLARHGVFYTSKGRKNIKNAQYKEDFSPLEEDCDCYTCRKFTKAYIRHLFLQHETFSYRLLTIHNLRFLFRLMENIRKSIREGRLEEFKKEFLTEYLRDDRENRLEKEELWSKLLI

SEQ ID NO: 54754 - protein, 379 aa, Dielma fastidiosa
  misc_feature (1)..(379): tr|A0A2V2EW39|A0A2V2EW39_9FIRM Queuine tRNA-ribosyltran sferase OS=Dielma fastidiosa OX=1034346 GN=tgt PE=3 SV= 1
MSAIKFEITHVCKQSGARCGILHTPHGDVETPMFMPVGTLATVKYVSPEELKAIGAGVILSNTYHLWLRPGEDIVAEAGGVQKFMNYNGPMLTDSGGFQVFSLADSRKIHEEGVTFKSHLDGSTLFLSPEKSIQIQNKIGADFIMSFDECAPYPSTYDYMKNSVERTLRWAKRGKEAHQRPEEQALFGIVQGGEFEDLRKLCAETLAEMDFPGYSIGGTSVGESKETMYKMIDYSVKYLPWEKPRYLMGVGSVDAILEGIARNVDMFDCVLPTRIARHGTLMTSQGRVNIKRKEYERDFTPLDPECDCPTCRNYTKAYLRHLNKCNEGLGARLMSIHNLRFLLKLSEDARKAIKEDRFGDFKDEMFKKYGLNSVDSRGF

SEQ ID NO: 54755 - protein, 425 aa, Dietzia alimentaria
  misc_feature (1)..(425): tr|A0A1E3S084|A0A1E3S084_9ACTN Queuine tRNA-ribosyltran sferase OS=Dietzia alimentaria OX=665550 GN=tgt PE=3 SV =1
MPDNATPTTRATTFDVGERMVLDGTAGGRTGVIHTPHGDIATPAFIPVGTKATVKTLTPEQVRSTGAQAVLANAYHLYLQPGHEVVDAAGGLGEFMRWSGPTYTDSGGFQVMSLGVGFKKVIEMSAGATPDDAATNKGQGRLAKVDEDGVTFTSHLDGSRHRFSPEVSMRIQHSLGADILFAFDELTTLMNTRKYQESSVERTRRWAQRCLDEHERLSLERGHRPGQSLWGVIQGAQFEDLRRQAVRGLVEMSERAEAEGRRGFGGYGIGGALEKENLGTIVGWCTEELPEDRPRHLLGISEPDDIFTAVENGADTFDCVAPTRLARHGGIYTLDGRVNITRAQFRHDHTPLDPEGPSEVSREYSRAYLHHLFKAKEFLGSTLLTLHNLAFVVRLVDEVRAAMAAGPDEYVAYKEQFLGRYYSGR

SEQ ID NO: 54756 - protein, 427 aa, Dietzia cinnamea
  misc_feature (1)..(427): tr|A0A4R3ZR37|A0A4R3ZR37_9ACTN Queuine tRNA-ribosyltran sferase OS=Dietzia cinnamea OX=321318 GN=tgt PE=3 SV=1
MPDSATPDTRPTTFDVGERMVLDGTAGGRTGVIHTPHGDIATPAFIPVGTKATVKTLTPEQVRSTGAQAVLANAYHLYLQPGHEIVDAAGGLAEFMRWDGPTYTDSGGFQVMSLGVGFKKVIEMSAGTKAAPDDSATNKGQGRLAKVDEDGVTFTSHLDGSRHRFSPEVSMRIQHSLGADIIFAFDELTTLMNTRRYQENSVERTRRWAQRCLDEHERLSTERTHRPGQSLWGVVQGAQFEDLRRQAVRGLVEMSERAEDQGRRGFGGYGIGGALEKENLGTIVGWCTEELPEDRPRHLLGISEPDDIFTAVENGADTFDCVAPTRLARHGGIYTLDGRVNITRAQFRHDHTPLDPEGPSEVSREYSRAYLHHLFKAKEFLGSTLLTLHNLAFVVRLVDEVRAAMAAGPDEYVAYKTEFLGRYYAGR

SEQ ID NO: 54757 - protein, 427 aa, Dietzia cinnamea
  misc_feature (1)..(427): tr|E6J6L7|E6J6L7_9ACTN Queuine tRNA-ribosyltransferase OS=Dietzia cinnamea P4 OX=910954 GN=tgt PE=3 SV=1
MPDSAAPDTRPTTFDVGERMVLDGTAGGRTGVIHTPHGDIATPAFIPVGTKATVKTLTPEQVRSTGAQAVLANAYHLYLQPGHEIVDAAGGLAEFMRWDGPTYTDSGGFQVMSLGVGFKKVIEMSAGTKAAPDDSATNKGQGRLAKVDEDGVTFTSHLDGSRHRFSPEVSMRIQHSLGADIIFAFDELTTLMNTRRYQENSVERTRRWAQRCLDEHERLSTERTHRPGQSLWGVVQGAQFEDLRRQAVRGLVEMSERAEEQGRRGFGGYGIGGALEKENLGTIVGWCTEELPEDRPRHLLGISEPDDIFTAVENGADTFDCVAPTRLARHGGIYTLDGRVNITRAQFRHDHTPLDPEGPSEVSREYSRAYLHHLFKAKEFLGSTLLTLHNLAFVVRLVDEVRAAMAAGPDEYLAYKEQFLGRYYTGR

SEQ ID NO: 54758 - protein, 425 aa, Dietzia kunjamensis
  misc_feature (1)..(425): tr|A0A420C959|A0A420C959_9ACTN Queuine tRNA-ribosyltran sferase OS=Dietzia kunjamensis OX=322509 GN=tgt PE=3 SV =1
MPDNDTPTTRATTFDVGERMVLDGTAGGRTGVIHTPHGDIATPAFIPVGTKATVKTLTPEQVRSTGAQAVLANAYHLYLQPGHEVIDAAGGLGEFMRWPGPTYTDSGGFQVMSLGVGFKKVIEMSAGAKPDDKATNKGQGRLAKVDEDGVTFTSHLDGSRHRFSPEVSMRIQHSLGADILFAFDELTTLMNTRKYQESSVERTRRWAQRCLDEHERLSQERGHRPGQSLWGVIQGAQFEDLRRQAVRGLVEMSERAEAEGRRGFGGYGIGGALEKENLGTIVGWCTEELPEDRPRHLLGISEPDDIFTAVENGADTFDCVAPTRLARHGGIYTLDGRVNITRAQFRHDHTPLDPEGASPVSREYSRAYLHHLFKAKEFLGQTLLTLHNLAFVVRLVDEVRAAMAAGPDEYVAYKEQFLGRYYSGR

SEQ ID NO: 54759 - protein, 427 aa, Dietzia lutea
  misc_feature (1)..(427): tr|A0A2S1R4E5|A0A2S1R4E5_9ACTN Queuine tRNA-ribosyltran sferase OS=Dietzia lutea OX=546160 GN=tgt PE=3 SV=1
MPDSATPDTRPTTFDVGERMVLDGTAGGRTGVIHTPHGDIATPAFIPVGTKATVKTLTPDQVRSTGAQAVLANAYHLYLQPGHEIVDAAGGVGEFMRWDGPTYTDSGGFQVMSLGVGFKKVIEMSAGTKAAPDDSATNKGQGRLAKVDEDGVTFTSHLDGSRHRFSPEVSMRIQHSLGADIIFAFDELTTLMNTRRYQENSVERTRRWAQRCLDEHERLSTERTHRPGQSLWGVVQGAQFEDLRRQAVRGLVEMSERAEEQGRRGFGGYGIGGALEKENLGTIVGWCTEELPEDRPRHLLGISEPDDIFTAVENGADTFDCVAPTRLARHGGIYTLDGRVNITRAQFRHDHTPLDPEGPSEVSREYSRAYLHHLFKAKEFLGSTLLTLHNLAFVVRLVDEVRAAMAAGPDEYAAYKEQFLGRYYSGR

SEQ ID NO: 54760 - protein, 427 aa, Dietzia maris
  misc_feature (1)..(427): tr|A0A166NW24|A0A166NW24_9ACTN Queuine tRNA-ribosyltran sferase OS=Dietzia maris OX=37915 GN=tgt PE=3 SV=1
MPDSAAPDTRPTTFDVGERMVLDGTAGGRTGVIHTPHGDIATPAFIPVGTKATVKTLTPEQVRSTGAQAVLANAYHLYLQPGHEIVDAAGGLAEFMRWDGPTYTDSGGFQVMSLGVGFKKVIEMSAGTKAAPDDSATNKGQGRLAKVDEDGVTFTSHLDGSRHRFSPEVSMRIQHSLGADIIFAFDELTTLMNTRGYQENSVERTRRWAQRCLDEHERLSTERTHRPGQSLWGVVQGAQFEDLRRQAVRGLVEMSERAEDQGRRGFGGYGIGGALEKENLGTIVGWCTEELPEDRPRHLLGISEPDDIFTAVENGADTFDCVAPTRLARHGGIYTLDGRVNITRAQFRHDHTPLDPEGPSEVSREYSRAYLHHLFKAKEFLGSTLLTLHNLAFVVRLVDEVRAAMAAGPDEYVAYKEQFLGRYYAGR

SEQ ID NO: 54761 - protein, 406 aa, Dietzia maris
  misc_feature (1)..(406): tr|A0A365PCH0|A0A365PCH0_9ACTN Queuine tRNA-ribosyltran sferase OS=Dietzia maris OX=37915 GN=tgt PE=3 SV=1
MVLDGTAGGRTGVIHTPHGDIATPAFIPVGTKATVKTLTPEQVRSTGAQAVLANAYHLYLQPGHEVVDAGGGLGEFMRWSGPTYTDSGGFQVMSLGVGFKKVIEMSAGATPDDAATNKGQGRLAKVDEDGVTFTSHLDGSRHRFSPEVSMRIQHSLGADILFAFDELTTLMNTRKYQESSVERTRRWAQRCLDEHERLSLERGHRPGQSLWGVIQGAQFEDLRRQAVRGLVEMSERAEAEGRRGFGGYGIGGALEKENLGTIVGWCTEELPEDRPRHLLGISEPDDIFTAVENGADTFDCVAPTRLARHGGIYTLDGRVNITRAQFRHDHTPLDPEGPSEVSREYSRAYLHHLFKAKEFLGSTLLTLHNLAFVVRLVDEVRAAMAAGPDEYVAYKEQFLGRYYSGR

SEQ ID NO: 54762 - protein, 407 aa, Dietzia natronolimnaea
  misc_feature (1)..(407): tr|A0A2A2WU98|A0A2A2WU98_9ACTN Queuine tRNA-ribosyltran sferase OS=Dietzia natronolimnaea OX=161920 GN=tgt PE=3 SV=1
MVLDGTAGGRTGVIHTPHGDIATPAFVPVGTKATVKTLTPEQVRSTGAQAVLANAYHLYLQPGHDVVDAAGGLGEFMRWSGPTYTDSGGFQVMSLGVGFKKVIEMSAGAAGAPDDSATNKGQGRLAKVDEDGVTFTSHLDGSPHRFSPEVSMRIQHGLGADILFAFDELTTLMNTREYQERSVERTRRWAQRCLDEHERLSVERGHRPGQSLWGVVQGAQFEDLRRQAVRGLVEMSDRAEEQGRRGFGGYGIGGALEKENLGTIVGWCTEELPEDRPRHLLGISEPDDIFTAVENGADTFDCVAPTRLARHGGIYTLDGRVNVTRAQFRHDHSALDPEGPSEVSREYSRAYLHHLFKAKEFLGSTLLTLHNLAFVVRLVDEVRAAMDAGPDEYLAYKSQFLGRYYST

SEQ ID NO: 54763 - protein, 431 aa, Dietzia psychralcaliphila
  misc_feature (1)..(431): tr|A0A2T5AMX9|A0A2T5AMX9_9ACTN Queuine tRNA-ribosyltran sferase OS=Dietzia psychralcaliphila OX=139021 GN=tgt P E=3 SV=1
MGPMSDHTPPTPRATTFDVGSRMVLDGTAGGRTGVIHTPHGDIATPAFIPVGTKATVKTLTPEQVRSTGAQAVLANAYHLYLQPGHDVVDAAGGLGEFMRWSGPTYTDSGGFQVMSLGVGFKKVIEMSAGAATAPDDSATNKGQGRLAKVDEDGVTFTSHLDGSPHRFSPEVSMRIQHGLGADIMFAFDELTTLMNTRKYQESSVERTRRWAQRCLDEHQLLSEQRTHRPGQSLWGVVQGAQFEDLRRQAVRGLVEMSDRAEGQGRRGFGGYGIGGALEKENLGTIVGWCTEELPEDRPRHLLGISEPDDIFTAVENGADTFDCVAPTRLARHGGIYTLDGRVNVTRAQFRHDHTPLDPEGPSEVSRDYSRAYLHHLFKAKEFLGSTLLTLHNLAFVVRLVDEVRAAMEAGPDEYAAYKAEFLGRYYSAKV

SEQ ID NO: 54764 - protein, 425 aa, Dietzia schimae
  misc_feature (1)..(425): tr|A0A521CC30|A0A521CC30_9ACTN Queuine tRNA-ribosyltran sferase OS=Dietzia schimae OX=498198 GN=tgt PE=3 SV=1
MPDNDTPTTRATTFDVGERMVLDGTAGGRTGVIHTPHGDIATPAFIPVGTKATVKTLTPEQVRSTGAQAVLANAYHLYLQPGHEVVDAAGGLGEFMRWPGPTYTDSGGFQVMSLGVGFKKVIEMSAGAKPDDKATNKGQGRLAKVDEDGVTFTSHLDGSRHRFSPEVSMRIQHSLGADILFAFDELTTLMNTRKYQESSVERTRRWAQRCLDEHERLSQERGHRPGQSLWGVIQGAQFEDLRRQAVRGLVEMSERAEAEGRRGFGGYGIGGALEKENLGTIVGWCTEELPEDRPRHLLGISEPDDIFTAVENGADTFDCVAPTRLARHGGIYTLDGRVNITRAQFRHDHTPLDPEGPSEVSREYSRAYLHHLFKAKEFLGSTLLTLHNLAFVVRLVDEVRAAMAAGPDEYVAYKEQFLGRYYSGR

SEQ ID NO: 54765 - protein, 425 aa, Dietzia sp.
  misc_feature (1)..(425): tr|A0A199AZ99|A0A199AZ99_9ACTN Queuine tRNA-ribosyltran sferase OS=Dietzia sp. 111N12-1 OX=1785156 GN=tgt PE=3 SV=1
MPDNATPTTRATTFDVGERMVLDGTAGGRTGVIHTPHGDIATPAFIPVGTKATVKTLTPEQVRSTGAQAVLANAYHLYLQPGHEVVDAAGGLGEFMRWSGPTYTDSGGFQVMSLGVGFKKVIEMSAGATPDDAATNKGQGRLAKVDEDGVTFTSHLDGSRHRFSPEVSMSIQHSLGADILFAFDELTTLMNTRKYQESSVERTRRWAQRCLDEHERLSLERGHRPGQSLWGVIQGAQFEDLRRQAVRGLVEMSERAEAEGRRGFGGYGIGGALEKENLGTIVGWCTEELPDDRPRHLLGISEPDDIFTAVENGADTFDCVAPTRLARHGGIYTLDGRVNITRAQFRHDHTPLDPEGPSEVSREYSRAYLHHLFKAKEFLGSTLLTLHNLAFVVRLVDEVRAAMAAGPDEYVAYKEQFLGRYYSGR

SEQ ID NO: 54766 - protein, 426 aa, Dietzia sp.
  misc_feature (1)..(426): tr|A0A022L4M0|A0A022L4M0_9ACTN Queuine tRNA-ribosyltran sferase OS=Dietzia sp. UCD-THP OX=1292020 GN=tgt PE=3 S V=1
MSVHTPPTPRATTFDVRSRMALDGTAGGRTGVIRTPHGDIATPAFIPVGTKATVKTLTPEQVRSTGAQAVLANAYHLYLQPGHDVVDAAGGLAEFMRWPGPTYTDSGGFQVMSLGVGFKKVIEMSAGAAKAPDDSATNKGQGRLAKVDEDGVTFTSHLDGSAHRFSPEVSMRIQHGLGADILFAFDELTTLMNTREYQERSVERTRRWAQRCLDEHERLSVERTHRPGQSLWGVVQGAQFEDLRRQAVRGLVEMSDRAEDRGRRGFGGYGIGGALEKENLGTIVGWCTEELPEDRPRHLLGISEPDDIFTAVENGADTFDCVAPTRLARHGGIYTLNGRVNITRAQFRHDHTPLDPEGPSEVSRDYSRAYLHHLFKAKEFLGSTLLTMHNLAFVVRLVDEVRAAMDAGPDEYLAYKAEFLGRYYSA

SEQ ID NO: 54767 - protein, 445 aa, Dietzia timorensis
  misc_feature (1)..(445): tr|A0A173LIC8|A0A173LIC8_9ACTN Queuine tRNA-ribosyltran sferase OS=Dietzia timorensis OX=499555 GN=tgt PE=3 SV= 1
MLRAAPIPACGTMDFMPNPAPEPHGSAKSEYFETTARLAVPGTAGGRSGVIMTPHGAIETPAFIPVGTKATVKTLLPEQIASTGAQAVLANAYHLYLQPGHDIVDAAGGVGAFMNWPGPTYTDSGGFQVMSLGVGFKKVIEMSATGTPDDSATRANKERLARVDEEGVTFRSHLDGSSHRFTPEVSMQIQHGLGADIMFAFDELTTLMNTRGYQEQSVERTRRWAERCLVEHNRLTAERADKPPQSLWGVIQGAQYEDLRRQAVRGLLEMSDRFTESGQRGFGGFGIGGALEKENLGTIVGWCTSEMPEDMPRHLLGISEPDDVFTAVENGADTFDCVAPTRLARHGGIYTRSGKVNITKAMYRRDFTPLDPEGDHPVDAQYTRAYLHHMFKAKEYLGAQICTLHNVRFIIRMVADIRSAIAGGTDEYLAFKEDFLGRYYAGRAK

SEQ ID NO: 54768 - protein, 378 aa, Dinghuibacter silviterrae
  misc_feature (1)..(378): tr|A0A4R8DRK5|A0A4R8DRK5_9BACT Queuine tRNA-ribosyltran sferase OS=Dinghuibacter silviterrae OX=1539049 GN=tgt PE=3 SV=1
MELTFAIEGTDPGTAARAGRIRTDHGEIETPIFMPVGTVGSVKAVTQQQLQSDVNAQIILGNTYHLYLRPGTGVLSKAGGLHRFNGWPRPILTDSGGYQVFSLAENRKITEEGVVFQSHIDGSRHLFSPEGVMDIQRAIGADIIMAFDECPPYPAEYRYVRQSMDLTHRWLDRCIARLADTPDAYGYTQNLFPIVQGGTFADLRKASSEYIASRGAAGNAIGGLSVGEPEEQMYEMCGLCCSFLPADKPRYLMGVGTPWNILESIALGVDMFDCVMPTRNGRNGMLFTTEGVINIRNKKWADDFSPVDPGLTDSPASAYSKAYLRHLFVAGEILGLTLASLQNLTFYLHLVREARVHILAGDFAAWKAAILPRIKQRL

SEQ ID NO: 54769 - protein, 376 aa, Dinoroseobacter shibae
  misc_feature (1)..(376): sp|A8LRQ1|TGT_DINSH Queuine tRNA-ribosyltransferase OS= Dinoroseobacter shibae (strain DSM 16493 / NCIMB 14021 / DFL 12) OX=398580 GN=tgt PE=3 SV=1
MTQRFSFTRLGQDGAARLGRINTPRGEIRTPAFMPVGTAATVKAMRPESVRETGADILLGNTYHLMLRPTAERIARLGGLHRFMNWDRPILTDSGGFQVMSLTGLRKLTEQGVTFKSHIDGSKHMLSPERSMEIQKLLRSDIVMCFDECPALPAPRERITESMELSMRWAARSREAFGDWPGHALFGIQQGGLEEDLRGKSAEALRAIEFDGYAVGGLAVGEGQEAMFGVLDYAPGMLPEDKPRYLMGVGKPGDLVGAVKRGIDMFDCVLPSRSGRTGQVFTRRGVVNIKNARHADDPRPLDEDCTCPACRSYSRAYLHHVFRAGEILSSMLLTWHNLHYYQELMQGMRDAIGAGDFAGFEARFLAQQAEGDIAPV

SEQ ID NO: 54770 - protein, 371 aa, Dissulfuribacter thermophilus
  misc_feature (1)..(371): tr|A0A1B9F9F7|A0A1B9F9F7_9DELT Queuine tRNA-ribosyltran sferase OS=Dissulfuribacter thermophilus OX=1156395 GN= tgt PE=3 SV=1
MPDSFKILHSSKDGPYRTGILNLFHGQVKTPCFMPVGTLATVKAVSPDELKEAGVGFILSNAYHLYLRPGHELIRDLGGLHSFMNWDRPILTDSGGFQVYSLASMRKITEDGVVFQSHLDGSYHKFTPEKVIAIQEALGSDVMMCLDWCTGYPVERQEVEKAVEITTLWAKRSIEARERRELRLFGIIQGGMHKDLRRRSANELLCLDFDGYAIGGLSVGESQDIMLEMIEEVVPIVPRSYPLYLMGVGTPEDIVEAVHRGVDMFDCVLPTRNARNGMAFTRFGNLNIKNAAFERDSSPLDPECSCYTCSRFSRAYLRHLYKSRELLVYRLLTIHNIFYYMELMNSIRQSIEKDTFMDFKKRFYEQRANKK

SEQ ID NO: 54771 - protein, 370 aa, Dokdonella fugitiva
  misc_feature (1)..(370): tr|A0A4R2I3M4|A0A4R2I3M4_9GAMM Queuine tRNA-ribosyltran sferase OS=Dokdonella fugitiva OX=328517 GN=tgt PE=3 SV =1
MSAMRFELLGSDGAARRGRLAFPRGTIETPAFMPVGTYGSVKAMSPRDLLDIGAEIILGNTFHLFLRPGLDVVGEFGGLHRFIGWNKPILTDSGGFQVFSLAHKRKITEQGVTFASPVDGAKVFLSPEESMRIQHVLDSEIAMIFDECTPYPATEKQARDSMELSLRWAERSRRAFDDRGNPNSLFGIVQGGVYPELRRRSAEALIDIGFDGYAIGGLAVGEPEHERNATLERVEPLLPRDRPRYLMGVGRPEDIVEAVRRGVDMFDCVMPTRNARNAHLFTRHGTLRIRNAKYERDTRPLDEECACYTCRSGFSRAYLRHLDRCGEMLGPMLATIHNLHYYQELMAGLRSAIAERRLGDFVAAFYAARS

SEQ ID NO: 54772 - protein, 371 aa, Dokdonella immobilis
  misc_feature (1)..(371): tr|A0A1I4V6N2|A0A1I4V6N2_9GAMM Queuine tRNA-ribosyltran sferase OS=Dokdonella immobilis OX=578942 GN=tgt PE=3 S V=1
MHFELLATDANARRGRLTFARGTIETPAFMPVGTYGTVKAMTPRDVEEIGAEIILGNTFHLFLRPGLDVIGDFGGLHRFIGWNRPILTDSGGFQVFSLAHKRKITEEGVTFASPVDGSKVFLSPEESMRIQRVLDSDIAMIFDECTPYPATEPVARTSMELSLRWALRSRQHFDALGNPNALFGIVQGSVYPDLRKRSAQGLIEIGFDGYAIGGLAVGEPEDERNATLELVEPFLPKDRPRYLMGVGRPEDIVEAVRRGVDMFDCVMPTRNARNGFLFTRHGTLRIRNAKFARDTRVIEEGCACYACRSGFSRAYLRHLDRCGEILGSQLATIHNLHHYQQLMAGLRAAIAASRLDAFVAEFYALRTGEGE

SEQ ID NO: 54773 - protein, 377 aa, Dokdonella koreensis
  misc_feature (1)..(377): tr|A0A160DWY7|A0A160DWY7_9GAMM Queuine tRNA-ribosyltran sferase OS=Dokdonella koreensis DS-123 OX=1300342 GN=tg t PE=3 SV=1
MSALEFTLSARDGAARRGCLTLARGTIQTPAFMPVGTYGSVKAMTPRDIEETGAEIILGNTFHLFLRPGLDVVGDFGGLHRFIGWQRPILTDSGGFQVFSLAHKRRISEDGVTFASPVDGSKVFLSPEESMRIQRALDSDIVMIFDECTPYPASEPVARDSMELSLRWALRSRRAFDAQENPHALFGIVQGSVYPDLRKRSADALVAIGFDGYAIGGLAVGEPEHERNAMLETVCPFLPDDRPRYLMGVGRPEDIVEAVRRGVDMFDCVMPTRNARNGFLFTREGTLRIRNARYARDARVIEAGCTCYTCRSGFSRAYLRHLDKCGEILACQLATIHNLHHYQQLMAGLRAAIAEARLDAFVADFYAQRQAGSAESP

SEQ ID NO: 54774 - protein, 376 aa, Dokdonia donghaensis
  misc_feature (1)..(376): tr|A0A0A2GSS1|A0A0A2GSS1_9FLAO Queuine tRNA-ribosyltran sferase OS=Dokdonia donghaensis DSW-1 OX=1300343 GN=tgt PE=3 SV=1
MQFDLLTTDPASKARAGKLTTDHGVIETPIFMPVGTVASVKGVHQRELREDINPDIILGNTYHLYLRPKMDILQRAGGLHKFMNWDRPILTDSGGYQVYSLSNRRKIKEEGVRFKSHVDGSMHLFTPENVMEIQRQIGADIMMAFDECTPYPCDYRYAKRSMHMTHRWLDRCINHFNKIPALYGHEQALFPIVQGSTYKDLRARSAEYIANAGAFGNAIGGLSVGEPAEEMYGMTEVVTAILPEEKPRYLMGVGTPINILENIALGVDMFDCVMPTRNARNGMLFTAHGSINIKNLKWEDDFSPIDEMGITWVDTEYSKAYLRHLFKCHELLGMQIATIHNLGFYMWLVREARKHILAGDFSTWKEKMVKQMDNRL

SEQ ID NO: 54775 - protein, 376 aa, Dokdonia pacifica
  misc_feature (1)..(376): tr|A0A239BAV5|A0A239BAV5_9FLAO Queuine tRNA-ribosyltran sferase OS=Dokdonia pacifica OX=1627892 GN=tgt PE=3 SV= 1
MQFDLLTTDPASKARAGKLTTDHGVIETPIFMPVGTVASVKGVHQRELREDINPDIILGNTYHLYLRPGTGTLQKAGGLHKFMNWDRPILTDSGGFQVYSLSNRRKIKEEGVRFKSHVDGSMHLFTPENVMEIQRQIGADIIMAFDECTPYPCDYRYAKRSMHMTHRWLDRCITHFEKTPALYGYEQALFPIIQGSTYKDLRTQSAEYIANSNAFGNAIGGLSVGEPAEEMYAMTEVVTAVLPEEKPRYLMGVGTPINILENIALGIDMFDCVMPTRNARNGMLFTAHGTINIKNLKWAEDFSPIDEMGITWVDTEYSKAYLRHLFKCHELLGMQIATIHNLGFYLWLVREARKQILAGTFTAWKDKMVKQMDKRL

SEQ ID NO: 54776 - protein, 376 aa, Dokdonia sp.
  misc_feature (1)..(376): tr|F4B2V3|F4B2V3_DOKS4 Queuine tRNA-ribosyltransferase OS=Dokdonia sp. (strain 4H-3-7-5) OX=983548 GN=tgt PE=3 SV=1
MQFDLLTTDPASQARAGKLTTDHGVIETPIFMPVGTVASVKGVHQRELREDINPDIILGNTYHLYLRPKMDIMQKAGGLHKFMNWDRPILTDSGGYQVYSLSNRRKIKEEGVRFKSHVDGSMHLFTPENVMEIQRQIGADIMMAFDECTPYPCDYRYAKRSMHMTHRWLDRCINHFNKIPALYGHEQALFPIVQGSTYKDLRAQSAEYIANAGAFGNAIGGLSVGEPAEEMYGMTEVVTAILPKDKPRYLMGVGTPINILENIALGVDMFDCVMPTRNARNGMLFTAYGSINIKNLKWEEDFSPIDEMGLTWVDTEYSKAYLRHLFKCHELLGMQIATIHNLGFYMWLVREARKHIIAGDFVTWKEMMVKQMNNRL

SEQ ID NO: 54777 - protein, 376 aa, Dokdonia sp.
  misc_feature (1)..(376): tr|A0A2S1Q9A5|A0A2S1Q9A5_9FLAO Queuine tRNA-ribosyltran sferase OS=Dokdonia sp. Dokd-P16 OX=2173169 GN=tgt PE=3 SV=1
MQFDLLTTDPASQARAGKLTTDHGVIETPIFMPVGTVASVKGVHQRELREDINPDIILGNTYHLYLRPKMDIMQKAGGLHKFMNWDRPILTDSGGYQVYSLSNRRKIKEEGVRFKSHVDGSMHLFTPENVMEIQRQIGADIMMAFDECTPYPCDYRYAKRSMHMTHRWLDRCINHFNKIPALYGHEQALFPIVQGSTYKDLRAQSAEYIANAGAFGNAIGGLSVGEPAEEMYGMTEVVTAILPKDKPRYLMGVGTPINILENIALGVDMFDCVMPTRNARNGMLFTAYGSINIKNLKWEDDFSPIDEMGLTWVDTEYSKAYLRHLFKCHELLGMQIATIHNLGFYMWLVREARKHIIAGDFVTWKEMMVKQMDNRL

SEQ ID NO: 54778 - protein, 343 aa, Dolichospermum compactum
  misc_feature (1)..(343): tr|A0A1Z4UZ30|A0A1Z4UZ30_9CYAN Queuine tRNA-ribosyltran sferase OS=Dolichospermum compactum NIES-806 OX=1973481 GN=tgt PE=3 SV=1
MPVGTLANVKTITPAQLGATGAQMVLANTYHLHLQPGEAIVAGGGGLHKFMGWSGPMLTDSGGFQVFSLSEMRKITEEGVTFRSPHDGQIIKLTPERSIEIQNVLGADVIMAFDECPPYPATRQEVEAATDRTYRWLKRSISAHQRADQALFPIVQGGVYLDLRARAAQELAQLDMPGYAIGGVSVGEPTDLMAQIVQTTAPLLPVNKPRYLMGVGTYREMAIAIASGVDLFDCVIPTRWARHGTAIVAGERWNIKNAKFREDFTPLDETCPCYTCENFSRAYLSHLVRSQEILAYTLLTIHNITELIRFTQKIRASILSDRFVTDFGHWLEPSEIELEKTDN

SEQ ID NO: 54779 - protein, 343 aa, Dolichospermum planctonicum
  misc_feature (1)..(343): tr|A0A480AD50|A0A480AD50_9CYAN Queuine tRNA-ribosyltran sferase OS=Dolichospermum planctonicum OX=136072 GN=tgt PE=3 SV=1
MPVGTLANVKTITPAQLAATGAQMVLANTYHLHLQPGEAIVAGGGGLHKFMGWPGPMLTDSGGFQVFSLSEMRKITEEGVTFRSPHDGQMIKLTPERSIEIQNILGADVIMAFDECPPYPATRQEVEAATDRTYRWLKRSISAHKRQDQALFPIVQGGVYLDLRARAAAELAQLDMPGYAIGGVSVGEPTDLMAQIVQTTAPLLPVNKPRYLMGVGTYREMAIAIASGVDLFDCVIPTRWARHGTAIVDGERWNLKNAKFREDFTPLDTTCPCYTCENFSRAYISHLVRSQEILAYTLLTIHNITELIRFTQKIRASILSDRFITDFGHWLQHDAIDLEKTED

SEQ ID NO: 54780 - protein, 343 aa, Dolichospermum sp.
  misc_feature (1)..(343): tr|A0A5C0DRF9|A0A5C0DRF9_9CYAN Queuine tRNA-ribosyltran sferase OS=Dolichospermum sp. UHCC 0315A OX=1914871 GN= tgt PE=3 SV=1
MPVGTLANVKTITPAQLGATGAQMVLANTYHLHLQPGEAIVAGGGGLHKFMGWSGPMLTDSGGFQVFSLSEMRKITEEGVTFRSPHDGQIIKLTPERSIEIQNILGADVIMAFDECPPYPATRQEVEAATDRTYRWLKRSISAHQRQDQALFPIVQGGVYLDLRARAAQELAQLDMPGYAIGGVSVGEPTDLMAQIVQTTAPLLPMNKPRYLMGVGTYREMAIAIASGVDLFDCVIPTRWARHGTAIVSGERWNIKNAKFREDFTPLDTTCPCYTCENFSRAYLSHLVRSQEILAYTLLTIHNITELIRFTQKIRASILSDRFVTDFGHWLEPSAIDLEKTED

SEQ ID NO: 54781 - protein, 381 aa, Dolosicoccus paucivorans
  misc_feature (1)..(381): tr|A0A2N6SN25|A0A2N6SN25_9LACT Queuine tRNA-ribosyltran sferase OS=Dolosicoccus paucivorans OX=84521 GN=tgt PE= 3 SV=1
MTQGPIHYELLHEEKHTKARYGILHTPHGSYETPMYMPVGTLATVKGLSPEELKDMGAGVILSNTYHLWLRPGEDIVEQAGGLHQFMNWDQGLLTDSGGFQVFSLSDMRKIEEEGVHFRNHISGEKLFLTPEKAIQIQNSLGADIIMSFDECPDFRHTYDYVKDSIARTTRWAERGLNAHQKSDTQALFGIVQGAGFKDLRIQHAKDLMSLDFPGYSIGGLSVGETKEEMDEVLDYLLPVLPKHKPRYLMGVGTPDSLIDGAMYGVDMFDCVLATRVARNGTCMTSTGRLVVKNAQYARDFKPIDENCDCYACRNYTRAYIRHLIKCNEMLGLRLASIHNTHFLLDLMRQVRYHIQNDTLLEFRQEFYERYGYNKKNAPAF

SEQ ID NO: 54782 - protein, 379 aa, Domibacillus aminovorans
  misc_feature (1)..(379): tr|A0A177LAE7|A0A177LAE7_9BACI Queuine tRNA-ribosyltran sferase OS=Domibacillus aminovorans OX=29332 GN=tgt PE= 3 SV=1
MTAIKYELIKTCKQTGARLGRVHTPHGSFETPVFMPVGTLATVKTMSPEDIKQMGANILLSNTYHLWLRPGHDIVQEAGGLHKFMNWDGAILTDSGGFQVFSLSEFRKIEEEGVHFRNHINGDKLFLSPEKAMDIQNALGSDIMMAFDECPPYPAEYEYMKKSVERTSRWAERCLTAHKRPEDQGLFGIVQGGEYEELRRQSARDLVSLDFPGYAIGGLSVGEPKDVMNRVLDFTTPHLPADKPRYLMGVGSPDSLIDGAMRGIDMFDCVLPTRIARNGTLMTSEGRLVVKNAKYARDFGPLDPNCDCYTCKNYSRAYIRHLLHCNETFGIRLTTYHNLHFLVNLMENVRQAIREDRLGDFREEFFEQYGFNRPDAKNF

SEQ ID NO: 54783 - protein, 379 aa, Domibacillus aminovorans
  misc_feature (1)..(379): tr|A0A177KSR4|A0A177KSR4_9BACI Queuine tRNA-ribosyltran sferase OS=Domibacillus aminovorans OX=29332 GN=tgt PE= 3 SV=1
MTAIKYELIKTCKQTGARLGRVHTPHGSFETPVFMPVGTLATVKTMSPEDIKQMGANILLSNTYHLWLRPGHDIVQEAGGLHKFMNWDGAILTDSGGFQVFSLSEFRKIEEEGVHFRNHINGDKLFLSPEKAMDIQNALGSDIMMAFDECPPYPAEYEYMKKSVERTSRWAERCLTAHKRPEDQGLFGIVQGGEYEELRRQSARDLVSLDFPGYAIGGLSVGEPKDVMNRVLDFTTPHLPTDKPRYLMGVGSPDSLIDGAMRGIDMFDCVLPTRIARNGTLMTSEGRLVVKNAKYARDFGPLDPNCDCYTCKNYSRAYIRHLLHCNETFGIRLTTYHNLHFLVNLMENVRQAIREDRLGDFREEFFEQYGFNRPDAKNF

SEQ ID NO: 54784 - protein, 379 aa, Domibacillus antri
  misc_feature (1)..(379): tr|A0A1Q8Q7Y8|A0A1Q8Q7Y8_9BACI Queuine tRNA-ribosyltran sferase OS=Domibacillus antri OX=1714264 GN=tgt PE=3 SV =1
MSAIKYELIKTCKQTGARLGRVHTPHGSFETPVFMPVGTLATVKTMSPEDIKQMGANILLSNTYHLWLRPGHDIVQEAGGLHKFMNWDGAILTDSGGFQVFSLSEFRKIEEEGVHFRNHLNGDKLFLSPEKAMEIQNALGSDIMMVFDECPPYPAEYDYMKKSVERTSRWAERCLTAHKRPEDQGLFGIVQGGEYEELRRQSAKDLVSLDFPGYAIGGLSVGEPKDVMNRVLDFTTPHLPADKPRYLMGVGSPDSLIDGAMRGVDMFDCVLPTRIARNGTLMTSEGRLVVKNAKYARDFGPLDPNCDCYTCKNYSRAYIRHLLHCNETFGIRLTTYHNLHFLIKLMENVRQAIREDRLGDFREEFFEQYGFNRPDAKNF

SEQ ID NO: 54785 - protein, 379 aa, Domibacillus enclensis
  misc_feature (1)..(379): tr|A0A1N6PWS7|A0A1N6PWS7_9BACI Queuine tRNA-ribosyltran sferase OS=Domibacillus enclensis OX=1017273 GN=tgt PE= 3 SV=1
MTAIKYELIKTCKQTGARLGRVHTPHGSFETPVFMPVGTLATVKTMAPEDIKAMGANILLSNTYHLWLRPGHDIVKEAGGLHKFMNWDGAILTDSGGFQVFSLSEFRKIEEEGVHFRNHINGDKLFLSPEKAMDIQNALGSDIMMAFDECPPYPAEYDYMKKSVERTSRWAERCLTAHKRPEDQGLFGIVQGGEYEELRKQSARDLVSLDFPGYAIGGLSVGEPKDVMNRVLDFTTPHLPSDKPRYLMGVGSPDSLIDGAMRGVDMFDCVLPTRIARNGTLMTSEGRLVVKNAKYARDFGPLDPNCDCYTCKNYSRAYIRHLLHCNETFGIRLTTYHNLHFLINLMENVRQAIREDRLGDFREEFFEQYGFNRPDAKNF

SEQ ID NO: 54786 - protein, 379 aa, Domibacillus epiphyticus
  misc_feature (1)..(379): tr|A0A1V2A9D0|A0A1V2A9D0_9BACI Queuine tRNA-ribosyltran sferase OS=Domibacillus epiphyticus OX=1714355 GN=tgt P E=3 SV=1
MSAIKYELIKTCKQTGARLGRVHTPHGSFETPVFMPVGTLATVKTMSPEDIKQMGANILLSNTYHLWLRPGHDIVQEAGGLHKFMNWDGAILTDSGGFQVFSLSEFRKIEEEGVHFRNHLNGDKLFLSPEKAMEIQNALGSDIMMAFDECPPYPAEYEYMKKSVERTSRWAERCLAAHKRPEDQGLFGIVQGGEYEELRRQSAKDLVSLDFPGYAIGGLSVGEPKDVMNRVLDFTTPHLPADKPRYLMGVGSPDSLIDGAMRGVDMFDCVLPTRIARNGTLMTSEGRLVVKNAKYARDFGPLDENCDCYTCKNYSRAYIRHLLHCNETFGIRLTTYHNLHFLIKLMENVRQAIREDRLGDFREEFFEQYGFNRPDAKNF

SEQ ID NO: 54787 - protein, 379 aa, Domibacillus iocasae
  misc_feature (1)..(379): tr|A0A1E7DMH4|A0A1E7DMH4_9BACI Queuine tRNA-ribosyltran sferase OS=Domibacillus iocasae OX=1714016 GN=tgt PE=3 SV=1
MTAIKYEFIKACKQTGARLGRVHTPHGSFETPVFMPVGTLATVKTMAPEDIKAMGANILLSNTYHLWLRPGHDIVQEAGGLHKFMNWDGAILTDSGGFQVFSLSEFRKIEEEGVHFRNHINGDKLFLSPEKAMDIQNALGSDIMMAFDECPPYPAEYDYMKKSVERTSRWAERCLTAHKRPNDQGLFGIVQGGEYEELRKQSARDLVSLDFPGYAIGGLSVGEPKDVMNRVLDFTTPHLPADKPRYLMGVGSPDSLIDGAIRGIDMFDCVLPTRIARNGTLMTSEGRLVVKNAKYARDFGPLDPNCDCYACKNYSRAYIRHLLHCNETFGIRLTTYHNLHFLINLMENVRQAIREDRLGDFREEFFEQYGFNRPDAKNF

SEQ ID NO: 54788 - protein, 379 aa, Domibacillus mangrovi
  misc_feature (1)..(379): tr|A0A1Q5P7H5|A0A1Q5P7H5_9BACI Queuine tRNA-ribosyltran sferase OS=Domibacillus mangrovi OX=1714354 GN=tgt PE=3 SV=1
MTAIKYELIKTCKQTGARLGRVHTPHGSFETPVFMPVGTLATVKTMSPEDIKQMGANILLSNTYHLWLRPGHDIVQEAGGLHKFMNWDGAILTDSGGFQVFSLSKFRQIEEEGVHFRNHINGDKLFLSPEKAMDIQNALGSDIMMAFDECPPYPAEYEYMKKSVERTSRWAERCLTAHKRPEDQGLFGIVQGGEYEELRRQSARDLVSLDFPGYAIGGLSVGEPKDIMNRVLDFTTPHLPADKPRYLMGVGSPDSLIDGAMRGIDMFDCVLPTRIARNGTLMTSEGRLVVKNAKYARDFGPLDPNCDCYTCKNYSRAYIRHLLHCNETFGIRLTTYHNLHFLVNLMENVRQAIREDRLGDFREEFFEQYGFNRPDAKNF

SEQ ID NO: 54789 - protein, 376 aa, Donghicola sp.
  misc_feature (1)..(376): tr|A0A1M4N0W4|A0A1M4N0W4_9RHOB Queuine tRNA-ribosyltran sferase OS=Donghicola sp. KarMa OX=1779855 GN=tgt PE=3 SV=1
MATGFGFELKATDGKARTGVISTPRGDIRTPAFMPVGTAATVKAMLPESVRETGADILLGNTYHLMLRPTAERIDRLGGLHKFMNWERPILTDSGGFQVMSLAGLRKLTEKGVTFKSHVDGSKHEITPERSMEIQRLLGSDIVMCFDECTPFPATEEQALESMRLSMRWAQRSRDAFGDRPGHALFGIQQGSTFRDQREESAEALQKIGFDGYAVGGLAVGEGQEMMFDVLDYAPDMLPVDKPRYLMGVGKPDDIVGAVKRGIDMMDCVLPSRSGRTGQVFTRRGVLNIKNARHQDDPRPLDEDCTCPACRNYSRAYLHHTFRAKEIIQSMLLTWHNLHYYQDLMQGMCDAIAAGTFAEWEADFHAKRAEGDIEPL

SEQ ID NO: 54790 - protein, 376 aa, Donghicola tyrosinivorans
  misc_feature (1)..(376): tr|A0A2T0X5E5|A0A2T0X5E5_9RHOB Queuine tRNA-ribosyltran sferase OS=Donghicola tyrosinivorans OX=1652492 GN=tgt PE=3 SV=1
MATGFRFDLKATDGKARTGVIETPRGEIRTPAFMPVGTAATVKAMLPESVRATGADILLGNTYHLMLRPTAERIDRLGGLHKFMNWDRPILTDSGGFQVMSLAGLRKLTEKGVTFKSHVDGSKHEITPERSMEIQRLLGSDIVMCFDECTPFPATEAQALESMRLSMRWAQRSRDAFGDRPGHALFGIQQGSVFRDQREESAEALQKIGFDGYAVGGLAVGEGQDMMFDVLEYAPDMLPVDKPRYLMGVGKPDDIVGAVKRGIDMMDCVLPSRSGRTGQVFTRRGVLNIKNARHQDDPRPLDEECGCPACRNYSRAYFHHTFRAKEIIQSMLLTWHNLHYYQDLMQGMRDAISAGTFAAWEADFHAKRAEGDIEPL

SEQ ID NO: 54791 - protein, 373 aa, Dongia mobilis
  misc_feature (1)..(373): tr|A0A4R6WTF5|A0A4R6WTF5_9PROT Queuine tRNA-ribosyltran sferase OS=Dongia mobilis OX=578943 GN=tgt PE=3 SV=1
MSGRFDLLATDGKARRGRIHTAHGIVNTPAFMPVGTAGTVKAMLPESVKATGAEIVLGNTYHLMLRPGAERVASFGGLHKFMNWPGPILTDSGGFQAMSLSDLRKISEQGVEFRSHIDGSKHMLTPERSIEIQDLLDSNITMVLDECTPFPATPEQAAESMRRSMRWAARCREAFRDRDGYLLFGIVQGGIYPNLRRESAEALVRIGFDGYAIGGLAIGEGQQQMFGVLDYTPDLLPREKPRYLMGVGKPGDIVGAVARGIDMFDCVMPTRSGRTGLAHTRYGDINMRNARHASDDRPIDPKCACPACSAYVRGYIHHLMKTKEILGAMLLTWHNLHYYQELMQGMRAAIEQGRLADFIAEFERGQALGDLPG

SEQ ID NO: 54792 - protein, 376 aa, Dorea formicigenerans
  misc_feature (1)..(376): tr|A0A3E4F3H0|A0A3E4F3H0_9FIRM Queuine tRNA-ribosyltran sferase OS=Dorea formicigenerans OX=39486 GN=tgt PE=3 S V=1
MYELLKTDGLAKRGRLHTVHGVIETPVFMNVGTIAAIKGAVSTTDLQEIGTQVELSNTYHLHVRPGDEVVKKLGGLHKFMVWDKPILTDSGGFQVFSLAGLRRIKEEGVYFNSHIDGRKIFMGPEQSMQIQSNLASTIAMAFDECPSSVADRDYMENSVNRTTRWLKRCKAEMDRLNSLPDTINKHQMLFGINQGGVYEDIRVRHAQEISELNLDGYAVGGLAVGESHEEMYRILDAVVPHLPQNKPTYLMGVGTPANILEAVERGVDFFDCVYPSRNGRHGHVYTNHGKMNLFNAKYELDTRPIEEGCNCPVCRTYSRAYVRHLLKAKEMLGMRFCVLHNLYFYNKMMEEIREAIEAGRYKEYKEEKLRRMAEGE

SEQ ID NO: 54793 - protein, 376 aa, Dorea formicigenerans
  misc_feature (1)..(376): tr|G1WMQ3|G1WMQ3_9FIRM Queuine tRNA-ribosyltransferase OS=Dorea formicigenerans 4_6_53AFAA OX=742765 GN=tgt PE =3 SV=1
MYELLKTDGLAKRGRLHTVHGVIETPVFMNVGTIAAIKGAVSTTDLQEIGTQVELSNTYHLHVRPGDEVVKKLGGLHKFMVWDKPILTDSGGFQVFSLAGLRRIKEEGVYFNSHIDGRKIFMGPEQSMQIQSNLASTIAMAFDECPSSVADRDYMENSVNRTTRWLKRCKAEMDRLNSLPDTINKHQMLFGINQGGVYEDIRVRHAQEISELNLDGYAVGGLAVGESHEEMYRILDAVVPHLPQNKPTYLMGVGTPANILEAVERGVDFFDCVYPSRNGRHGHVYTNHGKMNLFNAKYELDTRPIEEGCNCPVCRTYSRAYVRHLLKAKEMLGMRFCVLHNLYFYNKMMEEVREAIEAGRYKEYKEEKLRRMAEGE

SEQ ID NO: 54794 - protein, 377 aa, Dorea longicatena
  misc_feature (1)..(377): tr|R7FTP8|R7FTP8_9FIRM Queuine tRNA-ribosyltransferase OS=Dorea longicatena CAG:42 OX=1263074 GN=tgt PE=3 SV=1
MYELIKKDGLAKRGRLHTVHGVIETPVFMNVGTAAAIKGAVATTDLQEIKTQVELSNTYHLHVRPGDEVVKKLGGLHKFMNWDKPILTDSGGFQVFSLAGLRRIKEEGVYFNSHIDGHKIFMGPEESMRIQSNLASTIAMAFDECPSSVADREYIEKSVARTTRWLVRCKKEMERLNSLPDTINKHQMLFGINQGGVYEDIRIKHADEISKLDLDGYAVGGLAVGESHEEMYRILDAVVPHLPDHKPTYLMGVGTPVNILEAVDRGVDFFDCVYPSRNGRHGHVYTNHGKLNLFNAKFELDDRPIEEGCQCPACRNYSRAYIRHLLKAKEMLGMRLCVLHNLYFYNTMMEEIRDAIDHDCYKEYKERKIAAVTGKNE

SEQ ID NO: 54795 - protein, 377 aa, Dorea longicatena
  misc_feature (1)..(377): tr|A0A174UIK9|A0A174UIK9_9FIRM Queuine tRNA-ribosyltran sferase OS=Dorea longicatena OX=88431 GN=tgt PE=3 SV=1
MYELIKKDGLAKRGRLHTVHGVIETPVFMNVGTAAAIKGAVATSDLQEIKTQVELSNTYHLHVRPGDEVVKKLGGLHKFMNWDKPILTDSGGFQVFSLAGLRRIKEEGVYFNSHIDGRKIFMGPEESMQIQSNLASTIAMAFDECPSSVADRDYMEKSVARTTRWLVRCKKEMERLNALPDTINKHQMLFGINQGGVYEDIRIKHADEISKLDLDGYAVGGLAVGESHEEMYRILDAVVPHLPDNKPTYLMGVGTPANILEAVDRGVDFFDCVYPSRNGRHGHVYTNHGKLNLFNARFELDARPIEEGCQCPACRNYSRAYIRHLLKAKEMLGMRLCVLHNLYFYNTMMEEIRDAIDHDCYKEYKTQKIAAVTGKNE

SEQ ID NO: 54796 - protein, 377 aa, Dorea sp.
  misc_feature (1)..(377): tr|A0A396L0F5|A0A396L0F5_9FIRM Queuine tRNA-ribosyltran sferase OS=Dorea sp. AF36-15AT OX=2292041 GN=tgt PE=3 S V=1
MYELLKKDGRAKRGRLHTVHGDIETPVFMNVGTAAAIKGAVSTADLQQIGTKVELSNTYHLHVRPGDQVVKKMGGLHKFMVWDKPILTDSGGFQVFSLAGLRKIKEEGVYFQSHIDGHKIFMGPEESMQIQSNLASTIAMAFDECPSSVADRDYMQKSVDRTTRWLKRCKAEMDRLNSLPDTINKHQMLFGINQGGIYEDIRVAHADEISKLDLDGYAVGGLAVGESHEDMYRILDEVVPHLPENKPTYLMGVGTPANILEAVDRGVDFFDCVYPSRNGRHGHVYTKHGKLNLFNARFELDDRPIEDGCGCPACQMYSRAYIRHLLKAKEMLGMRLCVLHNLYFYNHLMEEIRDAIDAGRYKEYKEETLRGFETPED

SEQ ID NO: 54797 - protein, 376 aa, Dorea sp.
  misc_feature (1)..(376): tr|R6XJL2|R6XJL2_9FIRM Queuine tRNA-ribosyltransferase OS=Dorea sp. CAG:317 OX=1262873 GN=tgt PE=3 SV=1
MYELLKQDGLAKRGRLHTVHGVIETPVFMNVGTAAAIKGAVSTDDLRQIKTQVELSNTYHLHVRPGDDVIKKLGGLHKFMAWDKPILTDSGGFQVFSLAGLRKIKEEGVYFNSHIDGKKIFMGPEESMQIQSNLASTIAMAFDECPSSVADRDYMERSVDRTTRWLARCKAEMDRLNSLPDTINKKQMLFGINQGGIYEDIRIRHAQEISKLDLDGYAVGGLAVGESHEEMYRILDAVVPHLPKNKPTYLMGVGTPANILEAVDRGVDFFDCVYPSRNGRHGHVYTNAGKLNLFNAKYELDDRPIEEGCQCPACRTYSRAYIRHLLKAKEMLGMRLCVLHNLYFYNTMMEEIRDAIDQGCYKEYKEAKLAGMAVKK

SEQ ID NO: 54798 - protein, 375 aa, Draconibacterium orientale
  misc_feature (1)..(375): tr|X5DI15|X5DI15_9BACT Queuine tRNA-ribosyltransferase OS=Draconibacterium orientale OX=1168034 GN=tgt PE=3 SV =1
MQFELQKTTDNSRARAGVITTDHGTIETPIFMPVGTAGSVKGIHTRDIKEDINAQIILGNTYHLYLRPGIDVIEKAGGLHKFNRWNRPILTDSGGFQVFSLGDIRKLSEEGARFQSHIDGSYHMFTPENVMDIQRTIGADIIMAFDECTPGDADYNYAKRSLQLTQRWLERCFKQFNSTEPKYGYAQTLFPIVQGNTFTDLRKAAVAHVKTFDADGYAIGGLSVGETEQEMYEMTEVCTADLPENKPRYLMGVGTPVNILEGIHRGIDMFDCVMPTRNGRNGMLFTSEGIINIRNKKWENDHSPIDENGTSFVDHYSKAYLRHLIISNEMLGAQIASQHNLAFYLWLVKTARQKIQSGDFVSWKNEMVLKLKERL

SEQ ID NO: 54799 - protein, 375 aa, Draconibacterium sediminis
  misc_feature (1)..(375): tr|A0A0D8J6G3|A0A0D8J6G3_9BACT Queuine tRNA-ribosyltran sferase OS=Draconibacterium sediminis OX=1544798 GN=tgt PE=3 SV=1
MQFELQKTTDNSRARAGVITTDNGTIETPIFMPVGTAGSVKGIHTRDIKEDINAQIILGNTYHLYLRPGIDVIEKAGGLHKFNRWDRPILTDSGGFQVFSLGDIRKLSEEGARFQSHIDGSYHMFTPENVMDIQRTIGADIIMAFDECTPGDADYNYAKKSLELTQRWLERCFKQFNSTEPKYGYSQTLFPIVQGNTFTDLRKAAVANVKTFDADGYAIGGLSVGETEQEMYEMTEVCTADLPENKPRYLMGVGTPVNILEGIHRGIDMFDCVMPTRNGRNGMLFTSEGIINIRNKKWENDHSPIDENGTSFVDQYSKAYLRHLIISNEMLGAQIASQHNLAFYLWLVKTARQKIQSGDFVSWKNEMVLKLKERL

SEQ ID NO: 54800 - protein, 375 aa, Draconibacterium sp.
  misc_feature (1)..(375): tr|A0A2G6R943|A0A2G6R943_9BACT Queuine tRNA-ribosyltran sferase OS=Draconibacterium sp. OX=1965318 GN=tgt PE=3 SV=1
MDFELKTVSEQSRARAGIISTAHGQIETPIFMPVGTGGSVKGIHTRDLKEDIEAQIILGNTYHLYLRPGIKVIEEAGGLHKFNMWNKPILTDSGGYQVFSLGDIRKLSEEGARFQSHIDGSYHLFTPENVIDIQRSIGADIVMAFDECPPGDADYAYAKESLELTKRWLHRCFQRFNTTMPIYGYDQSLFPIIQGGTYADLRKSATENAVGYDADGYAIGGLSVGEPEAVMYEMTEVVTERLPAEKPRYLMGVGTPVNILESIDRGVDMFDCVMPTRNGRNGMLFTSEGTINIRNKKWENDHSPIDAGGTSFADQYSKAYLRHLIISKEMLGAQIASQHNLAFYLWLVKEARKQIIGGTFAAWKKEMVQKLNQRL

SEQ ID NO: 54801 - protein, 378 aa, Drancourtella sp.
  misc_feature (1)..(378): tr|A0A1Y4HBW2|A0A1Y4HBW2_9FIRM Queuine tRNA-ribosyltran sferase OS=Drancourtella sp. An210 OX=1965589 GN=tgt PE =3 SV=1
MYELIKRDGLAKRGRFTTVHGVIETPVFMNVGTAAAIKGAVSTEDLNRIGTQVELSNTYHLHVRPGDEVVKKLGGLHKFMVWDKPILTDSGGFQVFSLAGLRKIKEEGVHFQSHIDGRKIFMGPEESMRIQSNLASTIAMAFDECPASTKDRDYIEKSVARTTRWLRRCKTEMERLNSLPDTINPDQMLFGINQGGILEDVRIAHAQAISELDLPGYAIGGLAVGESHEEMYRILDAVVPHLPLHKPTYLMGVGTPANILEAVERGVDFFDCVYPTRNGRHGHVYTNQGKLNLFNAKYELDDRPIEEGCQCPVCQKYSRAYIRHLLKAKEMLGMRFCVLHNLYFYNTMMEEIRQAIEEGRFKEYKKQKLAGMEQTKNV

SEQ ID NO: 54802 - protein, 378 aa, Drancourtella sp.
  misc_feature (1)..(378): tr|A0A1Y4M844|A0A1Y4M844_9FIRM Queuine tRNA-ribosyltran sferase OS=Drancourtella sp. An177 OX=1965573 GN=tgt PE =3 SV=1
MYELIKRDGLAKRGRFTTVHGVIETPVFMNVGTAAAIKGAVSTEDLNRIGTQVELSNTYHLHVRPGDEVVKKLGGLHKFMVWDKPILTDSGGFQVFSLAGLRKIKEEGVHFQSHIDGRKIFMGPEESMRIQSNLASTIAMAFDECPASTKDRDYIEKSVARTTRWLRRCKTEMERLNSLPDTINPDQMLFGINQGGILEDVRIAHAQAISELDLPGYAIGGLAVGESHEEMYRILDAVVPHLPLHKPTYLMGVGTPANILEAVERGVDFFDCVYPTRNGRHGHVYTNQGKLNLFNAKYELDDRPIEEGCQCPVCQKYSRAYIRHLLKAKEMLGMRFCVLHNLYFYNTMMEEIRQAIEQGRFKEYKKQKLAGMEQTKNV

SEQ ID NO: 54803 - protein, 416 aa, Dubosiella newyorkensis
  misc_feature (1)..(416): tr|A0A1U7NQG1|A0A1U7NQG1_9FIRM Queuine tRNA-ribosyltran sferase OS=Dubosiella newyorkensis OX=1862672 GN=BO225_ 00930 PE=3 SV=1
MDRKEDSQRMSQNKFSFDINARIPNQLGRAGTIHTPHGDIKTPAFMCVGTHGHVKFLSMEDLHAIGAQAMLSNGYHLRNISPTIAQEGGLAKWSGWNGPTLTDSGGFQVMSLGSGIGKVVSMEREKEVVNTPKKERLALVQEGGIQFFDPFTQQEDFIGPKESMEIQCRIGADIHMAFDELTSLADTYDYNKEALERTERWAQISLDVHKQHRDDLGYRQSLYGVLQGGRWEDLRRSTAKKMGQMDFDGYGLGGAFLKSSLGDILTWCNEELPEHKPRHLLGLSRPDDILIGVENGADTFDCVAPSREARHGRIYTKHGYYSLARQACQDCHEPLEVGCDCPTCQQGYTQSQLRQMMKSEDPKVREQYFRLSTIHNLRFTIRMMEEVRQAILDGTFQEYKEQFLKDYYGTKKEAIL

SEQ ID NO: 54804 - protein, 274 aa, Duganella phyllosphaerae
  misc_feature (1)..(274): tr|A0A1E7WJX0|A0A1E7WJX0_9BURK Queuine tRNA-ribosyltran sferase OS=Duganella phyllosphaerae OX=762836 GN=tgt PE =3 SV=1
MRKITEEGVHFNSPINGDKLFLSPEVSMQIQRVLNSDIVMQFDECTPYEIDNRPATIEEAAKSMRMSLRWAQRSNDEFHRGENPNALFGIVQGGMFEHLRDESLAGLEAIDFPGLAIGGLSVGEPKEDMMRILKHVGPKLPANKPHYLMGVGTPEDLVAGVSHGVDMFDCVMPTRNARNGWLFTRFGDIKIKNARYKEDKEPLDSTCSCYACRNFSRAYLHHLNRTQEILGARLNTIHNLHYYLDIMRQMREALDEDRFHAWTLQFHADRARGV

SEQ ID NO: 54805 - protein, 379 aa, Duganella sacchari
  misc_feature (1)..(379): tr|A0A1M7PZW8|A0A1M7PZW8_9BURK Queuine tRNA-ribosyltran sferase OS=Duganella sacchari OX=551987 GN=tgt PE=3 SV= 1
MLEFKLHKTDTTGVTKARRGEVKLNHGVVQTPIFMPVGTYGSVKAMSPLELKEINAQIILGNTFHLWLRPGNDVMAKFGGLHDFMGWDKPILTDSGGFQVFSLGAMRKITEEGVHFNSPINGDKLFLSPEISMQIQRVLNSDIVMQFDECTPYEINNRPATLDEAAKSMRMSLRWAQRSHDEFHRGENPNALFGIVQGGMFEKLRDESLAGLEEIDFPGLAIGGLSVGEPKEDMMRILQHVGPKLPANKPHYLMGVGTPEDLVAGVSHGVDMFDCVMPTRNARNGWIFTRFGDVKIKNARYKDDKEPFDSTCSCYACKNFSRAYLHHLNRTQEILGARLNTIHNLHYYLDIMQQMRDALDADRFPAWVQQFHADRARGV

SEQ ID NO: 54806 - protein, 379 aa, Duganella sp.
  misc_feature (1)..(379): tr|A0A3E1S6N8|A0A3E1S6N8_9BURK Queuine tRNA-ribosyltran sferase OS=Duganella sp. BJB480 OX=1871181 GN=tgt PE=3 SV=1
MLEFKLHKTDSSGLTKARRGEVKLNHGVVQTPIFMPVGTYGSVKAMSPLELKEIGAQIILGNTFHLWLRPGNDVMAKFGGLHDFMGWDKPILTDSGGFQVFSLGAMRKITEEGVHFNSPINGDKLFLSPEVSMQIQRVLNSDIVMQFDECTPYEIDNRPATLDEAAKSMRMSLRWAQRSMDEFNRGENPNALFGIVQGGMFENLRDESLAKLEEIDFPGLAIGGLSVGEPKEDMMRILAHVGPKMPANKPHYLMGVGTPEDLVNGVSNGVDMFDCVMPTRNARNGWIFTRFGDVKIKNARYKEDKEPLDSSCSCYACRNFSRAYLHHLNRTQEILGARLNTIHNLHYYLDIMRQMREALDEDRFHAWTLQFHADRARGV

SEQ ID NO: 54807 - protein, 379 aa, Duganella sp.
  misc_feature (1)..(379): tr|A0A0Q7W903|A0A0Q7W903_9BURK Queuine tRNA-ribosyltran sferase OS=Duganella sp. Root1480D1 OX=1736471 GN=tgt P E=3 SV=1
MLEFKLIKKDTTGKTHARRGTVKLNHGEVQTPIFMPVGTYGSVKAMSPLELKEIGAQIILGNTFHLWLRPGNDVMSKFGGLHGFMGWDKPILTDSGGFQVFSLGEMRKITEEGVTFNSPINGDKLFLSPEISMQIQRVLNSDIVMQFDECTPYEIDGRPATLEEAAKSMRMSLRWAQRSMNEFKAGENPNALFGIVQGGMYENLRDESLAGLQEIDFPGLAIGGLSVGEPKEDMMRILQHVGPRLPENKPHYLMGVGTPEDLVNGVANGVDMFDCVMPTRNARNGWIFTRFGDVKIKNARYKDDKEPLDPTCSCYTCRNFSRAYLHHLHRAQEILGARLNTIHNLHYYLDIMQQMRDALDADRFPDWVQQFHADRARGI

SEQ ID NO: 54808 - protein, 376 aa, Duncaniella muris
  misc_feature (1)..(376): tr|A0A2V1IL03|A0A2V1IL03_9BACT Queuine tRNA-ribosyltran sferase OS=Duncaniella muris OX=2094150 GN=tgt PE=3 SV= 1
MDFKLEATAPGTAARAGLITTDHGEIRTPIFMPVGTVGSVKAVHQRELREDVKAQIILGNTYHLYLRPGIEILEKAGGLHKFNGWDRPILTDSGGFQVFSLSANRKLTEEGAWFRSHIDGSKHLFTPEKVVDIERSIGADIMMALDECPPGTAERSYARKSLDLTHRWLARGWKRYKETEGKYGYSQAYFPIVQGVTYPDLRRESAKFVADLGADGNAIGGLAVGEPAEVMYEMIEVVNDILPADRPRYLMGVGTPANILEAIDRGVDMMDCVMPTRNGRNGMLFTRHGIMNMRNRKWADDFSPLQEDGPSYVDTAYTKAYVRHLFIADEILAMQIASIHNLAFYLWLVEEARRHIMAGDFSSWKREMLECVTRRL

SEQ ID NO: 54809 - protein, 376 aa, Duncaniella sp.; identical to SEQ ID NO: 54808
  misc_feature (1)..(376): tr|A0A4P7VUL1|A0A4P7VUL1_9BACT Queuine tRNA-ribosyltran sferase OS=Duncaniella sp. C9 OX=2530392 GN=tgt PE=3 SV =1

SEQ ID NO: 54810 - protein, 376 aa, Duncaniella sp.
  misc_feature (1)..(376): tr|A0A4Z0V5E8|A0A4Z0V5E8_9BACT Queuine tRNA-ribosyltran sferase OS=Duncaniella sp. TLL-A3 OX=2530391 GN=tgt PE= 3 SV=1
MDFVLQSTASGSNARAGLITTDHGVIETPIFMPVGTLGSVKSVHQHELRDDIKAQIILGNTYHLYLRPGIDILEKAGGLHKFNGWERPILTDSGGFQVFSLAANRKLTEEGAWFRSHIDGSKHLFTPESVVDIERSIGADIMMALDECPPGTADIDYARKSLRLTQRWLERGWKRYKETEGRYGYRQAYFPIVQGVVYPELRRDAAKHVADLGADGNAIGGLAVGEPTEVMYDMIEVVNEILPADKPRYLMGVGTPANILEAIDRGVDMMDCVMPTRNGRNGMLFTAHGIMNMRNRKWADDFSPIQEDGPSYVDRTYTKAYLRHLFISDEILAMQIASIHNLAFYLWLVGEARRHIIAGDFKVWKTEMVERVTRRL

SEQ ID NO: 54811 - protein, 377 aa, Dyadobacter fermentans
  misc_feature (1)..(377): tr|C6VS49|C6VS49_DYAFD Queuine tRNA-ribosyltransferase OS=Dyadobacter fermentans (strain ATCC 700827 / DSM 180 53 / NS114) OX=471854 GN=tgt PE=3 SV=1
MKFTLQVEDPHSKARAGLIETDHGVIQTPIFMPVGTAGTVKAVHQRELKEDVKAQIILGNTYHLYLRPGLDLMEKAGGLHAFNGWDRPILTDSGGYQVYSLAGTGRKINEEGVVFKSHIDGGVHTFTPENVMDIQRTIGADIIMAFDECTPYPCEFTYARKSMEMTHRWLTRCCDRFDSTEPRYGHSQTLFPIVQGSVYKDLRKQSAEFIASAGREGNAIGGLSVGEPAEIMYELTEVVCDILPRNKPRYLMGVGTPANILECIALGVDMFDCVMPTRNARNGMIFTTEGIINIRNEKWKDDLSPIDAGLGGHVSTFYSKAYLRHLVKSGEMLGAQIASIHNLTFYLWLVNSAREKIIDGSFASWKREIEKKLNQRL

SEQ ID NO: 54812 - protein, 377 aa, Dyadobacter jejuensis
  misc_feature (1)..(377): tr|A0A316AJV2|A0A316AJV2_9BACT Queuine tRNA-ribosyltran sferase OS=Dyadobacter jejuensis OX=1082580 GN=tgt PE=3 SV=1
MKFTLEAQDKASKARAGSVETDHGTIETPIFMPVGTAGTVKAVHQRELKEDIKAQIILGNTYHLYLRPELPVIQKAGGLHRFNGWDKPILTDSGGYQVYSLAGTGRKINEEGVVFKSHIDGSIHTFTPEGVMDIQRSIGADIIMAFDECTPYPCEFTYARKSMEMTHRWLKRCCQRFDSTSPHYDYQQTLFPIVQGSVYKDLRVQSAEFIAAQDREGNAIGGLSVGEPAEIMYELTEVVCDILPSDKPRYLMGVGTPANILECIALGVDMFDCVMPTRNARNGMIFTTEGIINIKNEKWKDDLSPLDPSLGGYVSGNYSKAYLRHLIKSGEMLGAQIASIQNLTFYLWLVNTAREKIKSGEFLPWKNQMTNKLMQRL

SEQ ID NO: 54813 - protein, 377 aa, Dyadobacter jiangsuensis
  misc_feature (1)..(377): tr|A0A2P8G5A8|A0A2P8G5A8_9BACT Queuine tRNA-ribosyltran sferase OS=Dyadobacter jiangsuensis OX=1591085 GN=tgt P E=3 SV=1
MKFTLQVEDPHSKARAGLVETDHGVIQTPIFMPVGTAGTVKAVHQRELKEDVKAQIILGNTYHLYLRPGLDILEKAGGLHAFNGWDKPILTDSGGYQVYSLAGTGRKINEEGVVFKSHIDGGVHTFTPENVMDIQRTIGADIIMAFDECTPYPCDFGYARKSMEMTHRWLTRCCNRFDSTEPRYGHSQTLFPIVQGSVYKDLRKQSAEFIASAGREGNAIGGLSVGEPAEIMYELTEVVCDILPKDKPRYLMGVGTPANILECISLGVDMFDCVMPTRNARNGMIFTTEGIINIRNEKWKDDLSPINPGLGGHVSTFYSKAYLRHLVKSGEMLGAQIASIHNLTFYLWLVNSAREKIIDGTFASWKREMEKKLNQRL

SEQ ID NO: 54814 - protein, 377 aa, Dyadobacter koreensis
  misc_feature (1)..(377): tr|A0A1H6WQV7|A0A1H6WQV7_9BACT Queuine tRNA-ribosyltran sferase OS=Dyadobacter koreensis OX=408657 GN=tgt PE=3 SV=1
MKFTLQTQDPQSKARAGVVETDHGTIQTPIFMPVGTAGTVKAVHQRELKEDIKAQIILGNTYHLYLRPGLDILQKAGGLHKFNGWDRPILTDSGGYQVYSLAGTGRKINEQGVVFKSHIDGGIHTFTPEGVMDIQRTIGADIIMAFDECTPYPCDFTYARNSMEMTHRWLGRCCTRFDETQPLYGHSQTLFPIVQGSVYKDLRKQSAEVIASYEREGNAIGGLSVGEPAEIMYELTEVVCDILPKDKPRYLMGVGTPANILECIALGVDMFDCVMPTRNARNGMIFTTEGIINIKNEKWKDDLSAIDKNLGGYVSTFYSKAYLRHLVKSEEMLGAQIASVHNLTFYLWLVNTAREKIIEGTFTIWKKEIEKKLMQRL

SEQ ID NO: 54815 - protein, 377 aa, Dyadobacter psychrophilus
  misc_feature (1)..(377): tr|A0A1T5HBG2|A0A1T5HBG2_9BACT Queuine tRNA-ribosyltran sferase OS=Dyadobacter psychrophilus OX=651661 GN=tgt P E=3 SV=1
MKFTLQVEDPASKARAGFIETSHGTIQTPIFMPVGTAGTVKAVHQRELKEDIRAQIILGNTYHLYLRPGLDILQKAGGLHGFNGWDRPILTDSGGYQVYSLAGTGRKINEEGVVFKSHIDGGVHTFTPEYVMDIQRIIGADIIMAFDECTPYPCDFTYARKSMEMTHRWLGRCCARFDSTTDLYGHSQTLFPIVQGSVYKDLRVQSAETIASYGREGNAIGGLSVGEPAEIMYELTEVVCDILPRDKPRYLMGVGTPANILECIALGVDMFDCVMPTRNARNGMIFTTEGVINIRNEKWKDDLSPIDAGLGGYVSTFYSKAYLRHLVKSDEMLGAQIASVHNLTFYLWLVNSAREKIIAGEFVPWKKEMEKKLNQRL

SEQ ID NO: 54816 - protein, 377 aa, Dyadobacter soli
  misc_feature (1)..(377): tr|A0A1G7ZG02|A0A1G7ZG02_9BACT Queuine tRNA-ribosyltran sferase OS=Dyadobacter soli OX=659014 GN=tgt PE=3 SV=1
MKFTLQVEDPHSKARAGLVETDHGVIQTPIFMPVGTAGTVKAVHQRELKEDVKAQIILGNTYHLYLRPGLDILEKAGGLHKFNGWDKPILTDSGGYQVYSLAGTGRKINEEGVVFKSHIDGGVHTFTPENVMDIQRTIGADIIMAFDECTPYPCDFTYARKSMEMTHRWLTRCCNRFDSTEPRYGHSQTLFPIVQGSVYKDLRKQSAEFIASAGREGNAIGGLSVGEPAEIMYELTEVVCDILPKDKPRYLMGVGTPANILECISLGVDMFDCVMPTRNARNGMIFTTEGIINIRNEKWKDDLSPIDSGLGGHISTFYSKAYLRHLVKSGEMLGAQIASIHNLTFYLWLVNSAREKIIDGTFASWKREVEKKLNQRL

SEQ ID NO: 54817 - protein, 377 aa, Dyadobacter sp.
  misc_feature (1)..(377): tr|A0A1H6Z4E2|A0A1H6Z4E2_9BACT Queuine tRNA-ribosyltran sferase OS=Dyadobacter sp. SG02 OX=1855291 GN=tgt PE=3 SV=1
MKFTLQVEDPHSKARAGLVETDHGVIQTPIFMPVGTAGTVKAVHQRELKEDVKAQIILGNTYHLYLRPGLDILEKAGGLHAFNGWDRPILTDSGGYQVYSLAGTGRKINEEGVVFKSHIDGGVHTFTPENVMDIQRTIGADIIMAFDECTPYPCDFTYARKSMEMTHRWLTRCCRRFDETEPLYGHSQTLFPIVQGSVYKDLRKQSAEFIASAGREGNAIGGLSVGEPAEIMYELTEVVCDILPKDKPRYLMGVGTPANILECISLGVDMFDCVMPTRNARNGMIFTTEGIINIRNEKWKDDLSPIDAGLGGHVSTFYSKAYLRHLVKSGEMLGAQIASIHNLTFYLWLVNSAREKIIDGTFASWKREMEKKLNQRL

SEQ ID NO: 54818 - protein, 377 aa, Dyadobacter sp.
  misc_feature (1)..(377): tr|A0A5B0FFS3|A0A5B0FFS3_9BACT Queuine tRNA-ribosyltran sferase OS=Dyadobacter sp. UC 10 OX=2605428 GN=tgt PE=3 SV=1
MKFTLEAKDPGSKARAGYIETDHGMIETPIFMPVGTAGTVKAVHQRELHDDVKAQIILGNTYHLYLRPGLDIISRAGGLHAFNGWDKPILTDSGGYQVYSLAGTGRKINEAGVVFKSHIDGGVHTFTPENVMDIQRTIGADIVMAFDECTPYPCEFSYARQSMEMTHRWLKRCCERFDSTVPLYGHNQTLFPIVQGSVYKDLRKQSAEFIASCQREGNAIGGLSVGEPAEIMYELTEVVCDILPADKPRYLMGVGTPANILECIALGVDMFDCVMPTRNARNGMIFTTEGVVNIRNEKWKDDFSPIDAGLGGYVSTFHSKAYLRHLVKSDEMLGAQIASVHNLTFYLWLVRSARERIKEGNFVSWKKEIEKKINQRL

SEQ ID NO: 54819 - protein, 375 aa, Dyella japonica
  misc_feature (1)..(375): tr|A0A075K596|A0A075K596_9GAMM Queuine tRNA-ribosyltran sferase OS=Dyella japonica A8 OX=1217721 GN=tgt PE=3 SV =1
MTSLTFELQATDGAARRGRLTFDRGTVETPAFMPVGTYGSVKAMTPRDVRDIGAEIILGNTFHLFLRPGLEVVEQFGGLHKFIGWDKPILTDSGGFQVFSLAHKRKITEEGVAFASPVDGSKVFLSPEESMRIQKVLDSDIAMIFDECTPYPATEKVASTSMELSLRWAERSRRAFDDLKNPNALFGIVQGSVYENLRRRSAEGLVNIGFDGYAVGGLAVGEPEAERNHTLDFTVPLLPADKPRYLMGVGRPEDIVEAVRRGIDMFDCVMPTRNARNGFLFTDQGTLRIRNAKYALDTRVIEEGCDCYACSNGFSRAYLRHLDRCNEILGSQLATMHNLRHYQRLMAGLRGAIAAGQLDDFVAEFYARRAGGVAA

SEQ ID NO: 54820 - protein, 375 aa, Dyella japonica
  misc_feature (1)..(375): tr|A0A0G9H889|A0A0G9H889_9GAMM Queuine tRNA-ribosyltran sferase OS=Dyella japonica DSM 16301 OX=1440762 GN=tgt PE=3 SV=1
MTSLTFELQATDGAARRGRLTFDRGTVETPAFMPVGTYGSVKAMTPRDVREIGAEIILGNTFHLYLRPGLEVVEQFGGLHKFIGWDKPILTDSGGFQVFSLAHKRKITEEGVAFASPVDGSKVFLSPEESMRIQTVLDSDIAMIFDECTPYPATEKVASTSMELSLRWAERSRRAFDDLNNPNALFGIVQGSVYENLRRRSAEGLVNIGFDGYAVGGLAVGEPEAERNHALDFTVPMLPADKPRYLMGVGRPEDIVEAVRRGIDMFDCVMPTRNARNGFLFTAEGTLRIRNAKFALDTRVIEEGCDCYACSNGFSRAYLRHLDRCNEILGSQLATMHNLRHYQRLMAGLRDAIAAGKLEDFVAEFYARRAGGVVA

SEQ ID NO: 54821 - protein, 375 aa, Dyella jiangningensis
  misc_feature (1)..(375): tr|A0A328P3F0|A0A328P3F0_9GAMM Queuine tRNA-ribosyltran sferase OS=Dyella jiangningensis OX=1379159 GN=tgt PE=3 SV=1
MTSLTFELQATDGAARRGRLMFDRGTVETPAFMPVGTYGSVKAMTPRDIREIGAEIILGNTFHLFLRPGLEVVEQFGGLHKFIGWDKPILTDSGGFQVFSLAHKRKITEEGVAFASPVDGSKVFLSPEESMRIQKVLDSDIAMIFDECTPYPATEKVASTSMELSLRWAERSRRAFDDLKNPNALFGIVQGSVYENLRRRSAEGLVNIGFDGYAVGGLAVGEPEAERNHTLDFTVPLLPADKPRYLMGVGRPEDIVEAVRRGIDMFDCVMPTRNARNGFLFTAEGTLRIRNAKFALDTRVIEEGCDCYACSNGFSRAYLRHLDRCNEILGSQLATMHNLRHYQRLMAGLREAIAAGKLDDFVAEFYARRQGGLAA

SEQ ID NO: 54822 - protein, 375 aa, Dyella jiangningensis
  misc_feature (1)..(375): tr|A0A023NN76|A0A023NN76_9GAMM Queuine tRNA-ribosyltran sferase OS=Dyella jiangningensis OX=1379159 GN=tgt PE=3 SV=1
MTSLTFELQATDGAARRGRLTFDRGTVETPAFMPVGTYGSVKAMTPRDIREIGAEIILGNTFHLFLRPGLEVVEQFGGLHKFIGWDKPILTDSGGFQVFSLAHKRKITEEGVAFASPVDGSKVFLSPEESMRIQKVLDSDIAMIFDECTPYPATEKVASTSMELSLRWAERSRRAFDDLKNPNALFGIVQGSVYENLRRRSAEGLVNIGFDGYAVGGLAVGEPEAERNHTLDFTVPLLPADKPRYLMGVGRPEDIVEAVRRGIDMFDCVMPTRNARNGFLFTAEGTLRIRNAKYALDTRVIEEGCDCYACSNGFSRAYLRHLDRCNEILGSQLATMHNLRHYQRLMAGLREAIAAGKLDDFVAEFYARRQGGVAA

SEQ ID NO: 54823 - protein, 413 aa, Dyella marensis
  misc_feature (1)..(413): tr|A0A1I2IAD6|A0A1I2IAD6_9GAMM Queuine tRNA-ribosyltran sferase OS=Dyella marensis OX=500610 GN=tgt PE=3 SV=1
MRVRAEWGAPLRPYPHPPAGTFSRREKDFQLGGKPQTGDNLPMTSLRFDISATDGAARRGRLSFDRGTVETPAFMPVGTYGSVKAMTPRDIVEIGAEIILGNTFHLYLRPGLEIVEQFGGLHRFIGWDKPILTDSGGFQVFSLAHKRKITEEGVTFASPVDGSKVFLSPEESMRIQKTLDSDVVMIFDECTPYPATEKVAATSMELSLRWAERSRRAFDELHNPNSLFGIVQGSVYENLRRRSAEGLVGIGFDGYAVGGLAVGEPEAERNHTLDFTVPLLPADKPRYLMGVGRPEDIVEAVRRGIDMFDCVMPTRNARNGFLFTAEGTLRIRNAKFAMDTRVIEEGCDCYACAGGFSRAYLRHLDRCNEILASQLATMHNLRHYQRLMAGLREAIAAGKLEEFVAEFYARRMD

SEQ ID NO: 54824 - protein, 375 aa, Dyella soli
  misc_feature (1)..(375): tr|A0A4R0YW89|A0A4R0YW89_9GAMM Queuine tRNA-ribosyltran sferase OS=Dyella soli OX=522319 GN=tgt PE=3 SV=1
MTSMTFELQATDGAARRGRLTFGRGTVETPAFMPVGTYGSVKAMTPRDIREVGAEIILGNTFHLFLRPGLEVVEQFGGLHKFIGWDKPILTDSGGFQVFSLAHKRKITEEGVAFASPVDGSKVFLSPEESMRIQKVLDSDIAMIFDECTPYPATEKVASTSMELSLRWAERSRRAFDDLKNPNALFGIVQGSVYENLRRRSAEGLVNIGFDGYAVGGLAVGEPEAERNHTLDFTVPLLPADKPRYLMGVGRPEDIVEAVRRGIDMFDCVMPTRNARNGFLFTDEGTLRIRNAKFALDTRVIEEGCDCYACSNGFSRAYLRHLDRCNEILGSQLATMHNLRHYQRLMAGLRQAIAAGQLDDFVAAFYARRQAGVAA

SEQ ID NO: 54825 - protein, 373 aa, Dyella soli
  misc_feature (1)..(373): tr|A0A4V2NM88|A0A4V2NM88_9GAMM Queuine tRNA-ribosyltran sferase OS=Dyella soli OX=522319 GN=tgt PE=3 SV=1
MTSLQFDISATDGAARRGRLTFARGTVETPAFMPVGTYGSVKAMTPRDITDIGAEIILGNTFHLFLRPGLEIVEQFGGLHKFIGWDKPILTDSGGFQVFSLAHKRKITEEGVTFASPVDGSKVFLSPEESMRIQKTLDSDVVMIFDECTPYPATEKVASTSMELSLRWAERSRRAFDDLKNPNSLFGIVQGSVYENLRRRSAEGLVGIGFDGYAVGGLAVGEPEAERNHTLDFTVPLLPQDKPRYLMGVGRPEDIVEAVRRGIDMFDCVMPTRNARNGFLFTDQGTLRIRNAKFAMDTRVIEEGCDCYACSNGFSRAYLRHLDRCNEILGSQLATMHNLRHYQRLMAGLRGAIADGKLDDFVAEFYARRQAGT

SEQ ID NO: 54826 - protein, 384 aa, Dyella sp.
  misc_feature (1)..(384): tr|A0A370XAP2|A0A370XAP2_9GAMM Queuine tRNA-ribosyltran sferase OS=Dyella sp. 4MSK11 OX=1927960 GN=tgt PE=3 SV= 1
MTAMHFDLLATDGPARRGRLTFERGTVETPAFMPVGTYGSVKAMTPRDLVEVDAEIILGNTFHLFLRPGLDIVGEFGGLHKFIGWKAPILTDSGGFQVFSLAHKRKITEQGVTFASPVDGSKVFLSPEESMRIQTVLDSDIAMIFDECTPYPATEKVASESMELSLRWAERSRRAFDDLKNPNALFGIVQGSVYENLRRRSAEGLVQIGFDGYAVGGLAVGEPEAERNHALDFTVPLLPQDRPRYLMGVGRPEDIVEAVRRGIDMFDCVMPTRNARNGFLFTSEGTLRIRNAKFANDTRVIEEGCDCYACSQGFSRAYLRHLDRCNEILGSQLATIHNLRHYQRLMAGLRDAIAAGSLGDFVTEFYARRQGGEYSLSPSGRGLG

SEQ ID NO: 54827 - protein, 376 aa, Dyella sp.
  misc_feature (1)..(376): tr|A0A1G7PZR6|A0A1G7PZR6_9GAMM Queuine tRNA-ribosyltran sferase OS=Dyella sp. 333MFSha OX=1798240 GN=tgt PE=3 S V=1
MTQLPFELLATDGAARRGRLRFGRGTVETPAFMPVGTYGSVKAMTPRDVLDTGAEIILGNTFHLFLRPGLEIVGEFGGLHKFIGWNKPILTDSGGFQVFSLAHKRKITEEGVTFASPVDGSKVFLSPEESMRIQKVLDSDVAMIFDECTPYPATEKVASDSMELSLRWAERSRQSFDHLKNPNALFGIVQGSTYEKLRHRSAERLVEIGFDGYAVGGLAVGEPEAERNHTLDLTLPMLPKDRPRYLMGVGRPEDIVEAVRRGIDMFDCVMPTRNARNGFLFTYEGTLRIRNAKFATDTRVIEEGCDCYACANGFSRAYLRHLDRCNEILASQLATMHNLRHYQRLMAGLRGAIETGTLDDFVTAFYAARQKAVVDG

SEQ ID NO: 54828 - protein, 377 aa, Dyella thiooxydans
  misc_feature (1)..(377): tr|A0A161JXB8|A0A161JXB8_9GAMM Queuine tRNA-ribosyltran sferase OS=Dyella thiooxydans OX=445710 GN=tgt PE=3 SV= 1
MRRMTSLTFDLKATDGAARRGQLTFARGTVQTPAFMPVGTYGSVKAMTPRDIVDVGAEIILGNTFHLFLRPGLEIVEKFGGLHKFIGWNKPILTDSGGFQVFSLAHKRKLAEEGVTFASPVDGSKVFLSPEVSMKIQTVLDSDIAMIFDECTPYPATEKVASDSMELSLRWAERSRRAFDELKNPNNLFGIVQGSVYEPLRRRSAEGLVNIGFDGYAVGGLAVGEPEAERNHTLDFTVSLLPADKPRYLMGVGRPEDIVEAVRRGIDMFDCVMPTRNARNGFLFVPEGTLRIRNARFADDTRVIEEGCDCYACANGFSRAYLRHLDRCNEILASQLATMHNLRHYQRLMAGLRGAIEAGTLDDFTARFYALRQGAKA

SEQ ID NO: 54829 - protein, 376 aa, Dysgonamonadaceae bacterium
  misc_feature (1)..(376): tr|A0A2N4S8D2|A0A2N4S8D2_9BACT Queuine tRNA-ribosyltran sferase OS=Dysgonamonadaceae bacterium OX=2065189 GN=tg t PE=3 SV=1
MDFQLIHTDAKSSARAGIITTDHGLIETPIFMPVGTVGSVKAVHISELKNDIGAQIILGNTYHLYLRPGVEILRQGGGLHKFNSWDRPILTDSGGYQVFSLSDNRKLNPEGAEFRSHIDGSKHFFTPEKVVDIQRIIGADIMMAFDECTPGNADYNYAKSSLELTEQWLDRCLKRFAETECPYGHRQTLFPIVQGCIYPDLRKRAAENVASKEADGNAIGGLAVGEPTEKMYEMVELVNEILPKDKPRYLMGVGTPANILEAIERGVDMFDCIMPTRNGRNGQIFTKNGIMNMRNEKWKDDFSPIEEDGASFVDSLYSKAYLRHLINVNEILGLQIASIHNLAFYIWLVKEARKHIIADDFPLWKSKMIENVTRRL

SEQ ID NO: 54830 - protein, 376 aa, Dysgonomonas alginatilytica
  misc_feature (1)..(376): tr|A0A2V3PMB6|A0A2V3PMB6_9BACT Queuine tRNA-ribosyltran sferase OS=Dysgonomonas alginatilytica OX=1605892 GN=tg t PE=3 SV=1
MKFELQHTDVQSKARAGLITTDHGQIETPIFMPVGTQGAVKAVHMPELENDIKAQIILGNTYHLYLRPGLEILEQAGGLHKFNSWNKPILTDSGGFQVFSLAHNRKLTEEGAIFRSHIDGSKHMFTPERVMDIERTIGADIMMAFDECTPGDAEYSYAKKSLDLTERWLDRCITRFNETECTYGYKQALFPIVQGCVYPDLRRRAAENVASKGAEGNAIGGLAVGEPTEKMYEMIEIVNEILPQDKPRYLMGVGTPVNLLEAIERGVDMFDCIMPTRNGRNGQIFTRHGIMNMKNKRWANDFSPIDPEGASFVDTLYSKAYLRHLFIVNEILALQIASIHNLAFYLWLVKEARKHIIAGDFTSWKASIIEDVTRRL

SEQ ID NO: 54831 - protein, 376 aa, Dysgonomonas capnocytophagoides
  misc_feature (1)..(376): tr|A0A4Y8LB22|A0A4Y8LB22_9BACT Queuine tRNA-ribosyltran sferase OS=Dysgonomonas capnocytophagoides OX=45254 GN= tgt PE=3 SV=1
MKFELQYNDSQSNARAGLITTDHGQIETPIFMPVGTQGAVKAVHMPELVNDIQAQIILGNTYHLYLRPGLDILKQAGGLHKFNSWDKPILTDSGGFQVFSLAHNRKLTEDGAIFRSHIDGSKHIFSPERVMDIERTIGADIMMAFDECTPGDAEYSYAKKSLDLTERWLDRCIARFNETECEYGYKQALFPIVQGCVYPDLRKRAAENVASKGAQGNAIGGLAVGEPTEKMYEMIEVVNEILPKDKPRYLMGVGTPANILEAIERGVDMFDCIMPTRNGRNGQLFTKYGILNMRNKKWATDFSPIDPEGTSFVDTLYSKAYLRHLFIVNEILALQIASIHNLAFYLWLVKEARKHIIAGDYYLWKRSIIDDVTRRL

SEQ ID NO: 54832 - protein, 391 aa, Dysgonomonas gadei
  misc_feature (1)..(391): tr|F5ISV7|F5ISV7_9BACT Queuine tRNA-ribosyltransferase OS=Dysgonomonas gadei ATCC BAA-286 OX=742766 GN=tgt PE= 3 SV=1
MLNNQRPLKSDQNGIMDFKLQYTDGQTKARAGLITTDHGQIETPIFMPVGTQGAVKAVHMTELKNDIEAQIILGNTYHLYLRPGLEILKQAGGLHKFNSWDKPILTDSGGFQVFSLAENRKLTEEGAIFRSHIDGSKHFFTPESVMDIQRVIGADIIMAFDECTPGDADYAYAKKSLDLTERWLDRCFTRFNGTECEYGYKQALFPIVQGCVYPDLRRRAAENVASKGADGNAIGGLAVGEPTEKMYEMIEVVNEILPAGKPRYLMGVGTPANILEAIERGVDMFDCIMPTRNGRNGQLFTRNGIMNMRNKKWANDFSPIEENGASFVDTLYTKAYLRHLFITNEILGLQIASIHNLAFYLQLVKDAREHIIAGDFSGWKREMVENVSRRI

SEQ ID NO: 54833 - protein, 376 aa, Dysgonomonas macrotermitis
  misc_feature (1)..(376): tr|A0A1M5E4I2|A0A1M5E4I2_9BACT Queuine tRNA-ribosyltran sferase OS=Dysgonomonas macrotermitis OX=1346286 GN=tgt PE=3 SV=1
MKFELQYNDSQSNARAGLITTDHGQIETPIFMPVGTQGAVKAVHMPELEKDIQAQIILGNTYHLYLRPGLDILRQAGGLHKFNSWNKPILTDSGGFQVFSLAHNRKLTEEGAIFRSHVDGSKHIFTPENVMDIERTIGADIMMAFDECTPGDAEYSYAKKSLDLTERWLDRCITRFNETECEYGYKQALFPIVQGCVYPDLRKRAAENIASKEAEGNAIGGLAVGEPTEKMYEMIEVVNEILPKDKPRYLMGVGTPANILEAIERGVDMFDCIMPTRNGRNGQLFTRRGILNMRNKKWANDFNPIDAEGTSFVDTLYSKAYLRHLFIVNEILALQIASIHNLAFYLWLVKEARKHIIAGDYSNWKRSIIDDVTRRL

SEQ ID NO: 54834 - protein, 376 aa, Dysgonomonas mossii
  misc_feature (1)..(376): tr|F8X373|F8X373_9BACT Queuine tRNA-ribosyltransferase OS=Dysgonomonas mossii DSM 22836 OX=742767 GN=tgt PE=3 SV=1
MDFELQYTDDQSSARAGLITTDHGQIETPIFMPVGTQGAVKAVHMTELENDIQAQIILGNTYHLYLRPGLDILKQAGGLHRFNSWNKPILTDSGGFQVFSLAHNRKLTEEGAIFRSHIDGSKHIFTPEYVMDIERTIGADIMMAFDECTPGDADYTYAKKSLDLTERWLDRCIKRFNETECEYGYKQALFPIVQGCVYPDLRRRAAENVASKGADGNAIGGLAVGEPTEKMYEMIEVVNEILPKDKPRYLMGVGTPANILEAIERGVDMFDCIMPTRNGRNGQLFTRNGIMNMRNQKWAKDFSAIEENGASFVDTLYTKAYLRHLFITNEILALQIASIHNLAFYLWLVKEARQHIIAGDFLSWKRMMIENVSRRL

SEQ ID NO: 54835 - protein, 376 aa, Dysgonomonas mossii
  misc_feature (1)..(376): tr|A0A4Y9IKA9|A0A4Y9IKA9_9BACT Queuine tRNA-ribosyltran sferase OS=Dysgonomonas mossii OX=163665 GN=tgt PE=3 SV =1
MDFELQYTDDQSSARAGLITTDHGQIETPIFMPVGTQGAVKAVHMTELENDIQAQIILGNTYHLYLRPGLDILQQAGGLHKFNSWNKPILTDSGGFQVFSLAHNRKLTEEGAIFRSHIDGSKHVFTPEYVMDIERTIGADIMMAFDECTPGDADYTYAKKSLDLTERWLDRCIKRFNETECEYGYKQALFPIVQGCVYPDLRRRAAENVASKGADGNAIGGLAVGEPTEKMYEMIEVVNEILPKDKPRYLMGVGTPANILEAIERGVDMFDCIMPTRNGRNGQLFTRNGIMNMRNQKWAKDFSAIEENGASFVDTLYTKAYLRHLFITNEILALQIASIHNLAFYLWLVKEARQHIIAGDFLSWKRMMIENVSRRL

SEQ ID NO: 54836 - protein, 376 aa, Dysgonomonas sp.
  misc_feature (1)..(376): tr|A0A3D3TEU6|A0A3D3TEU6_9BACT Queuine tRNA-ribosyltran sferase OS=Dysgonomonas sp. OX=1891233 GN=tgt PE=3 SV=1
MKFELQHTDVQSNARAGLITTDHGQIETPIFMPVGTQGSVKAVHMTELENDIQAQIILGNTYHLYLRPGLEILEQAGGLHKFNSWNKPILTDSGGFQVFSLADNRKLTEEGAIFRSHVDGSKHFFTPESVMDIERTIGADIMMAFDECTPGDADYTYAKKSLDLTERWLDRCIARFNETECKYGYKQALFPIVQGCVYTDLRKRAAENVASKEAEGNAIGGLAVGEPTEKMYEMIEVVNEILPQDKPRYLMGVGTPANILEAVERGVDMFDCIMPTRNGRNGQLFTWNGILNMRNKKWANDFSPIDEQGTSYVDTLYSKAYLRHLFIVNEILALQIASIHNLAFYLQLVKEARRHIIQGDFTIWKKSVIEDISRRI

SEQ ID NO: 54837 - protein, 376 aa, Dysgonomonas sp.
  misc_feature (1)..(376): tr|A0A1M3KVQ6|A0A1M3KVQ6_9BACT Queuine tRNA-ribosyltran sferase OS=Dysgonomonas sp. 37-18 OX=1895907 GN=tgt PE= 3 SV=1
MDFELQYTDDQSSARAGLITTDHGQIETPIFMPVGTQGAVKAVHMTELENDIQAQIILGNTYHLYLRPGLDILQQAGGLHKFNSWNKPILTDSGGFQVFSLAHNRKLTEEGAIFRSHIDGSKHVFTPESVMDIERTIGADIMMAFDECTPGDADYTYAKKSLDLTERWLDRCIKRFNETECEYGYKQALFPIVQGCVYPDLRRRAAENVASKGADGNAIGGLAVGEPTEKMYEMIEVVNEILPKDKPRYLMGVGTPANILEAIERGVDMFDCIMPTRNGRNGQLFTRNGIMNMRNQKWAKDFSAIEENGASFVDTLYTKAYLRHLFITNEILALQIASIHNLAFYLWLVKEARQHIIAGDFLSWKRMMIENVSRRL

SEQ ID NO: 54838 - protein, 377 aa, Dysosmobacter welbionis
  misc_feature (1)..(377): tr|A0A4D7ATT7|A0A4D7ATT7_9FIRM Queuine tRNA-ribosyltran sferase OS=Dysosmobacter welbionis OX=2093857 GN=tgt PE =3 SV=1
MFKVLKTEGRARRGEFSCAHGGVVQTPVFMNVGTQGAIKGGVSAHDLKEVGCQIELSNTYHLHLRPGDHIVRQMGGLHKFMDWDGPILTDSGGFQVFSLASLRKIREEGVTFASHIDGHRIFMGPEESMQIQSNLGSDIAMAFDECVENPATYEYAKASCERTARWLERCKAEHDRLNALPDTVNPGQMLFGINQGATFADLRVWHMDQIAKIDCDGYAIGGLAVGEPAEVMYEIIDAVEPHMPKDKPRYLMGVGTPSNIIEGVARGVDFFDCVMPSRNGRHGKLFTWEGTVNILNEKYATDPRPISESCGCPACRHFSRAYIRHLFKADEVLALRLAVLHNLYFYNELAARIRRALDEGTFADFRARYSGNLEKRA

SEQ ID NO: 54839 - protein, 376 aa, Echinicola sp.
  misc_feature (1)..(376): tr|A0A514CHL0|A0A514CHL0_9BACT Queuine tRNA-ribosyltran sferase OS=Echinicola sp. LN3S3 OX=2591634 GN=tgt PE=3 SV=1
MKFILENTDQKSKARTGVVKTDHGDIQTPIFMPVGTAGSVKAVHQRELTYDIKAQIILGNTYHLYLRPGLDVLEKAGGLHKFNGWNKPILTDSGGYQVFSLAGTRKITEEGVLFKSHIDGSKHKFTPENVMDIQRSIGADIIMAFDECTPYPCEFGYARKSMEMTHRWLKRCIDQVDSTSGKYGYSQALFPIVQGSVYKDLRKQSAEFVASCGRDGNAIGGLSVGEPAEMMYEMTELVTDILPGDKPRYLMGVGTPANILECIALGVDMFDCVMPTRNARNGMLFTSEGFMNMRNEKWKDDFSPIDPNINSYVSSFYSRAYLRHLTVSKEILAAQIASVHNLSFYLWLVDEAREKIKAGEFAVWKDEMVKKVSRRL

SEQ ID NO: 54840 - protein, 376 aa, Echinicola strongylocentroti
  misc_feature (1)..(376): tr|A0A2Z4ILP7|A0A2Z4ILP7_9BACT Queuine tRNA-ribosyltran sferase OS=Echinicola strongylocentroti OX=1795355 GN=t gt PE=3 SV=1
MKFILENTDPKSKARTGVVKTDHGDIQTPIFMPVGTAGSVKAVHQRELTYDVKAQIILGNTYHLYLRPGLDVLEKAGGLHKFNGWNKPILTDSGGYQVFSLAGTRKITEEGVLFKSHIDGSKHKFTPEYVMDIQRSIGADIIMAFDECTPYPCEFGYARNSMEMTHRWLKRCIEQVDNTSGKYGYSQALFPIVQGSVYKDLRKQSAEFVASCGREGNAIGGLSVGEPAEMMYEMTELVTDILPGDKPRYLMGVGTPANILECIALGVDMFDCVMPTRNARNGMLFTSEGIMNMRNEKWKDDFSPIDPNINSYVSSFYSRAYLRHLTVSKEILAAQIASVHNLSFYLWLVAEAREKIKSGEFAAWKDEMVKKVSTRL

SEQ ID NO: 54841 - protein, 376 aa, Echinicola vietnamensis
  misc_feature (1)..(376): tr|L0FZW3|L0FZW3_ECHVK Queuine tRNA-ribosyltransferase OS=Echinicola vietnamensis (strain DSM 17526 / LMG 2375 4 / KMM 6221) OX=926556 GN=tgt PE=3 SV=1
MKFILENTDQKSKARTGVVKTDHGDIQTPIFMPVGTAGSVKAVHQRELTYDIKAQIILGNTYHLYLRPGLDVLEKAGGLHKFNGWNKPILTDSGGYQVFSLAGTRKITEEGVLFKSHIDGSKHKFTPENVMDIQRSIGADIIMAFDECTPYPCEFGYARKSMEMTHRWLKRCIDQVDSTEGKYGYSQALFPIVQGSVYKDLRKQSAEFVASCGREGNAIGGLSVGEPAEMMYEMTELVTDILPEDKPRYLMGVGTPANILECIALGVDMFDCVMPTRNARNGMLFTSEGIMNMRNEKWKDDFSPIDPNINSHVSSFYSKAYLRHLTVSKEILAAQIASVHNLSFYLWLVAEAREKIKAGEFAVWKDEMVKKVSRRL

SEQ ID NO: 54842 - protein, 371 aa, Ectothiorhodosinus mongolicus
  misc_feature (1)..(371): tr|A0A1R3W8N9|A0A1R3W8N9_9GAMM Queuine tRNA-ribosyltran sferase OS=Ectothiorhodosinus mongolicus OX=233100 GN=t gt PE=3 SV=1
MKFNLQTQDGAARRGQLQFARGVVDTPAFMPVGTYGTVKGMTPEELQDLGAQIILGNTFHLMLRPGTEVIKAHGDLHDFMHWQGPILTDSGGFQVFSLQDLRKLTEEGAKFRSPVDGSPIMLTPELSMQVQRDLGSDIVMIFDECTPYPATHGEARESMQLSLRWAERSKTAHGDNPSALFGIVQGGMYEDLRRESLQGLTQIGFDGYAIGGLSVGEPEDERHLVLDALMPHMPAQAPRYLMGVGRPEDIVEAVRRGVDMFDCVIPTRNARNGFLYTSTGVMRIRNARFREDTAPIDKDCGCYTCRHYSRAYLKHLDRCNEILASRLATIHNLYYYQQLMREIRAAITEQRFEDWVKSFYAKRAQTPPSMP

SEQ ID NO: 54843 - protein, 371 aa, Ectothiorhodospira haloalkaliphila
  misc_feature (1)..(371): tr|W8KVH4|W8KVH4_9GAMM Queuine tRNA-ribosyltransferase OS=Ectothiorhodospira haloalkaliphila OX=421628 GN=tgt PE=3 SV=1
MQFELLGQDGAARRGQLRFDRGTVETPAFMPVGTYGTVKAMTPEELEGLGAQIILGNTFHLMLRPGTDVIQAHGDLHDFMHWERPILTDSGGFQVFSLAELRKITEKGVRFRSPVDGSPILLTPERSMEVQRALGSDIVMIFDECTPHPATEDQARESMELSLRWAARSRQAHGDNPSALFGIVQGGMYDGLRRRSLDGLMEIGFDGYAIGGLSVGETEEERHRVLDGLMPHMPVQRPRYLMGVGRPEDIVEAVRRGVDMFDCVIPTRNARNGFLYTREGVMRIRNARFRDDTGPIDPHCDCYTCRNYSRAYLKHLDKCNEMLASRLATIHNLYFYQTLMREMREAIAQGQLGAWVAEFHGRRAQTPRSMP

SEQ ID NO: 54844 - protein, 371 aa, Ectothiorhodospira magna
  misc_feature (1)..(371): tr|A0A1H9DGN3|A0A1H9DGN3_9GAMM Queuine tRNA-ribosyltran sferase OS=Ectothiorhodospira magna OX=867345 GN=tgt PE =3 SV=1
MQFELMARDGAARRGRLIFDRGVVDTPAFMPVGTYGTVKAMTPEELEGLGAQIILGNTFHLMLRPGTEVIRAHGDLHDFMHWERPILTDSGGFQVFSLAKLRKITEEGVRFASPVDGSKILLTPERSMEVQRALGSDIVMIFDECTPYPATEDQARHSMELSLRWAARSRVAHGDNPSALFGIVQGGMYADLRRRSLDGLMQIGFDGYAIGGLSVGEPEAERNQVLDGLTPLMPVDRPRYLMGVGKPEDIVEAVRRGVDMFDCVIPTRNARNGFLYTHDGVMRIRNARFRDDTLPIDPECDCYTCRHYSRAYLKHLDKCNEILASRLATLHNLHYYQTLMGEMRQAIAAGTLEMWANAFHERRAQTPRSVT

SEQ ID NO: 54845 - protein, 371 aa, Ectothiorhodospira marina
  misc_feature (1)..(371): tr|A0A1H7FN53|A0A1H7FN53_9GAMM Queuine tRNA-ribosyltran sferase OS=Ectothiorhodospira marina OX=1396821 GN=tgt PE=3 SV=1
MQFELIGQDGAARRGRLRFDRGTVETPAFMPVGTYGTVKAMTPEELEGLGAEIILGNTFHLMLRPGTEVIQAHGDLHDFMHWERPILTDSGGFQVFSLAELRKITEEGVRFRSPVDGSPILLTPERSMEVQRALGSDIVMIFDECTPHPATEDQARESMELSLRWAARSRQAHGDSPAALFGIVQGGMYDGLRRRSLDGLVEIGFDGYAIGGLSVGETEEERHRVLDGLMPHMPVQRPRYLMGVGRPEDIVAAVQRGVDMFDCVIPTRNARNGFLYTREGVMRIRNARFRDDIGPIDPHCDCYTCRNYSRAYLKHLDKCNEMLASRLATLHNLYFYQTLMREMREAIAQGQLDAWVAEFHGRRAQTPRSMP

SEQ ID NO: 54846 - protein, 364 aa, Ectothiorhodospira mobilis
  misc_feature (1)..(364): tr|A0A1I4SS68|A0A1I4SS68_ECTMO Queuine tRNA-ribosyltran sferase OS=Ectothiorhodospira mobilis OX=195064 GN=tgt PE=3 SV=1
MRFELLGRDGAARRGRLIFDRGSVETPAFMPVGTYGSVKAMTPEELEGLGAEIILGNTFHLMLRPGTEVIQRHGDLHGFMHWERPILTDSGGFQVFSLADLRKISEEGVRFRSPVDGAPILLTPERSMEVQRALGSDIVMIFDECTPYPATEEVARRSMELSLRWAARSREGHGANPAALFGIVQGGMYPHLRRRSLEGLQAIGFDGYAIGGLSVGEPEAERHQVLDALMPHMPTDRPRYLMGVGRPEDLVEAVRRGVDMFDCVIPTRNARNGFLYTRDGVMRIRNARFRDDTRPIDPECDCYACRHYSRAYLKHLDKCNEILASRLATIHNLRYYQWLMGEMRTAIAEGRLDAWAQDFHPGQL

SEQ ID NO: 54847 - protein, 371 aa, Ectothiorhodospira sp.
  misc_feature (1)..(371): tr|A0A167BIC1|A0A167BIC1_9GAMM Queuine tRNA-ribosyltran sferase OS=Ectothiorhodospira sp. BSL-9 OX=1442136 GN=t gt PE=3 SV=1
MQFELFGQDGAARRGQLRFDRGTVETPAFMPVGTYGTVKAMTPEELEGLGAEIILGNTFHLMLRPGTDVIQAHGDLHDFMHWERPILTDSGGFQVFSLAELRKITEEGVRFRSPVDGSPILLTPERSMEVQRALGSDIVMIFDECTPHPATEDQARESMELSLRWAARSRQAHGDNPSALFGIVQGGMYDGLRRRSLEGLMEIGFDGYAIGGLSVGETEEERHRVLDGLMPHMPVQRPRYLMGVGRPEDIVEAVRRGVDMFDCVIPTRNARNGFLYTREGVMRIRNARFRDDTGPIDPHCDCYTCRNYSRAYLKHLDKCNEMLASRLATIHNLYFYQTLMREMREAIARGQLQEWVTEFYSRRAQTLRSMP

SEQ ID NO: 54848 - protein, 371 aa, Ectothiorhodospira sp.
  misc_feature (1)..(371): tr|H1G2U1|H1G2U1_9GAMM Queuine tRNA-ribosyltransferase OS=Ectothiorhodospira sp. PHS-1 OX=519989 GN=tgt PE=3 S V=1
MQFELMARDGAARRGRLIFDRGVVDTPAFMPVGTYGTVKAMTPEELEGLGAQIILGNTFHLMLRPGTEVIRAHGDLHDFMHWERPILTDSGGFQVFSLAKLRKITEEGVRFASPVDGSKILLTPERSMEVQRALGSDIVMIFDECTPYPATEDQARHSMELSLRWAARSRVAHGDNPSALFGIVQGGMYADLRRRSLEGLMQIGFDGYAIGGLSVGEPEAERNRVLDGLTPLMPVDRPRYLMGVGKPEDIVEAVRRGVDMFDCVIPTRNARNGFLYTHDGVMRIRNARFRDDTQPIDPECDCYTCRHYSRAYLKHLDKCNEILASRLATLHNLHYYQTLMREMRQAIAAGTLETWARAFHERRAQTPRSVT

SEQ ID NO: 54849 - protein, 371 aa, Ectothiorhodospiraceae bacterium
  misc_feature (1)..(371): tr|A0A2A4XVY6|A0A2A4XVY6_9GAMM Queuine tRNA-ribosyltran sferase OS=Ectothiorhodospiraceae bacterium OX=2026737 GN=tgt PE=3 SV=1
  misc_feature (6)..(6): Xaa can be any naturally occurring amino acid
  misc_feature (157)..(157): Xaa can be any naturally occurring amino acid
MKFDLXNTDGPARRGRLTFDRGTVETPAFMPVGTYGTVKAMTPEELSGMGAEIILGNTFHLMLRPGTEVIKAHGDLHNFMHWQGPILTDSGGFQVFSLGKMRKITEEGVTFRSPVNGDKVFLGPEESMAVQRDLGSDIVMCFDECTPYPADERQSRXSMQMSLRWGLRSKEAFADNPNALFGIVQGGMYEALRDESAAGLVDIGFDGYAIGGLSVGEPKDDMMRVLEHTTPLLPTDKPRYLMGVGKPEDLVQAVLRGVDMFDCVMPTRNARNGHLFTRQGVVKIRNACHELDTRPLDEACGCYTCQNYSRSYLRHLDKTGEILGARLNTIHNLHYYQDVMRGLRDAITANELQAFVDDFYTGLGQETPSAQ

SEQ ID NO: 54850 - protein, 383 aa, Ectothiorhodospiraceae bacterium
  misc_feature (1)..(383): tr|A0A2E0UN58|A0A2E0UN58_9GAMM Queuine tRNA-ribosyltran sferase OS=Ectothiorhodospiraceae bacterium OX=2026737 GN=tgt PE=3 SV=1
MFFNLQHVDPRSGARAGTLATERGEIHTPIFMPVGTQGTVKAVQQRELAEIGAEVILANTYHLALRPGADFLRDAGGLHRFMNWDRPILTDSGGYQVFSLNELRKIRDDSVTFQSHIDGSYHTFSPESVIDIQRAIGSDIMMILDECPPADCGYEYAKRSNDLTIRWAERARQQLDATGPLYGKAQFAFGIVQGNVFKDIREQSARQLIDIGFDGYSIGGLAVGESHEVMYDITEFTTGILPSEKPRYLMGVGTPLNIVESIARGVDMFDCVMPTRNGRNAMLFTRQGPVTIKKEHYLQDFRPVDGACSCYTCRTFTRSYLCHLYRAKEILGLQLASIHNLTFYLELTRDARNAILNDGFSEWKAAFIREYTAGGDDADISTV

SEQ ID NO: 54851 - protein, 380 aa, Edaphobacillus lindanitolerans
  misc_feature (1)..(380): tr|A0A1U7PQ81|A0A1U7PQ81_9BACI Queuine tRNA-ribosyltran sferase OS=Edaphobacillus lindanitolerans OX=550447 GN= tgt PE=3 SV=1
MTPAVTYELIKKDKQTGARLGIVHTPHGSFETPAFMPVGTQATVKTMSPEELKEIGSGIILSNTYHLWLRPGHDIIGEAGGLHKFMNWDRPILTDSGGFQVFSLSDMRKIEEEGVHFRHHLDGSKLFLSPEKSMEIQNALGSDIMMAFDECPPYPASHDYMKASVERTSRWAERCLGAHSRPEDQGLFGIVQGGEYEDLRRQSAADLVSLDFPGYAVGGLSVGEPKDVMNRVLEFTTPLLPEGKPRYLMGVGSPDALIDGSIRGIDMFDCVLPTRIARNGTLMTSQGRLVVRNAKFARDFGPLDPNCDCHVCKNYSRAYIRHLIKAEESFGIRLTSYHNLYFLLNLMEQVRQAIREDRLGDFREEFFEQYGYNKPNAKNF

SEQ ID NO: 54852 - protein, 383 aa, Edaphobacter aggregans
  misc_feature (1)..(383): tr|A0A3R9NYM7|A0A3R9NYM7_9BACT Queuine tRNA-ribosyltran sferase OS=Edaphobacter aggregans OX=570835 GN=tgt PE=3 SV=1
MSISFDVQRTAEGGGRRAALTLPHGVVETPVFMPVGTAASVKAVEQGVLEKIGPENRGAQIILANTYHLYLRPGHELIARAGGVHRFMSWERPMLTDSGGFQVFSLSSLRKVTQDGVEFRSHLDGSKHFFSPEHSMDVQIALGADIAMVFDECVEHPATYERTRDSMGLTHAWAQRSKDHFELHKHRVPWHEALGGATQSLFGIVQGGMYVDLRKESADRLVEMDFPGYAIGGLAVGEPREVTREMIARTLEWLPKDKPRYVMGVGYPDEIEEYAKMGVDMMDCVLPTRAGRHGLVFARDADGVVVRMNIKRKEYAEDPGPIDASCGCMVCARYSRAYLRHLFVSGEPLGLTLNSVHNLHFYLATMERVRADIAGTARSHSTL

SEQ ID NO: 54853 - protein, 384 aa, Edaphobacter dinghuensis
  misc_feature (1)..(384): tr|A0A495BV45|A0A495BV45_9BACT Queuine tRNA-ribosyltran sferase OS=Edaphobacter dinghuensis OX=1560005 GN=tgt P E=3 SV=1
MALSFERDVIDAEGGRRGRLVLPHGIVETPVFMPVGTAASVKAVEQGVLEEIGGDGVGAQIILANTYHLYLRPGHELIARMGGVHRFMSWERPMLTDSGGFQVFSLSSLRKVTPDGVEFRSHLDGSKHFFSPEHSMDVQIALGADVMMVFDECVEHPATYERTRDSMALTHAWAQRSKDHFEANKERVPWFEERGGRTQSLFGIVQGGMYADLRRESAERLMEMELPGYAIGGLAVGEPREVTREMIARTLEWLPKDKPRYVMGVGYPDEIEEYAKMGVDMMDCVLPTRAGRHGLVFMREEHGGPVVRMNIKRKEYAEDARPIDETCGCMVCRRYSRAYLRHLYVSGEALGLTLNSVHNLAFYLDTMSRVRAELGVPPLGVSCA

SEQ ID NO: 54854 - protein, 377 aa, Edaphobacter modestus
  misc_feature (1)..(377): tr|A0A4Q7YWT5|A0A4Q7YWT5_9BACT Queuine tRNA-ribosyltran sferase OS=Edaphobacter modestus OX=388466 GN=tgt PE=3 SV=1
MQKMGLSFEIQKTAESGGRRGTLALPHGMVQTPVFMPVGTAASVKAVEQGVLERIGPGERGAEIILANTYHLYLRPGHELIARMGGVHRFMGWERPMLTDSGGFQVFSLSSLRKVTPDGVEFRSHLDGSKHFFSPEHSIDVQIALGADIAMVFDECVETPASWERTKDSMGLTHAWAGRSKDHFEANKHRVPWFSEMQGKTQSLFGIVQGGMYVDLRKESAEHLVEMDLPGYAIGGLAVGEPREVTREMIARTLEWLPKDKPRYVMGVGYPDEIEEYAKMGVDMMDCVLPTRAGRHGLVFARGEDGGIVRMNIKRKEYAEDQGPIDATCGCMVCARYSRAYLRHLFVVGEPLGLTLNSVHNLHFYLATMERVRAELA

SEQ ID NO: 54855 - protein, 379 aa, Edwardsiella anguillarum
  misc_feature (1)..(379): tr|A0A076LUS2|A0A076LUS2_9GAMM Queuine tRNA-ribosyltran sferase OS=Edwardsiella anguillarum ET080813 OX=667120 GN=tgt PE=3 SV=1
MKYELVSTDGRARRGRLIFERGVVETPAFMPVGTYGTVKGMTPEEVAQTGAQILLGNTFHLWLRPGQEIMKLHGDLHDFMQWPGPILTDSGGFQVFSLGAMRKIKEEGVYFRNPINGSPVFLSPEKSMEIQYDLGSDIVMIFDECTPYPADWDYAKRSMEMSLRWAKRSRQRFDELGNQNALFGIIQGSVYEDLRDVSLKGLVEIGFDGYAVGGLAVGEPKEDMHRILEHVCPMIPQDKPRYLMGVGKPEDLVEGVRRGIDMFDCVMPTRNARNGHLFVTGGVVKIRNAKYKEDTAALDPECDCYTCRNYSRAYLHHLDRCNEILGARLNTIHNLRYYQRLMAALRQAIEEGKLERFAADFYGRRGRTVPPLGAADAAS

SEQ ID NO: 54856 - protein, 378 aa, Edwardsiella hoshinae
  misc_feature (1)..(378): tr|A0A376DKE6|A0A376DKE6_9GAMM Queuine tRNA-ribosyltran sferase OS=Edwardsiella hoshinae OX=93378 GN=tgt PE=3 S V=1
MKYELVTTDGRARRGRLIFERGVVETPAFMPVGTYGTVKGMTPEEVAQTGAQILLGNTFHLWLRPGQEIMKLHGDLHDFMQWPGPILTDSGGFQVFSLGAMRKIKEEGVYFRNPINGSPIFLSPEKSMEIQYDLGSDIVMIFDECTPYPADWDYAKRSMEMSLRWAKRSRQRFDELGNKNALFGIIQGSVYEDLRDVSLKGLVEIGFDGYAVGGLAVGEPKEDMHRILEHVCPMIPQDKPRYLMGVGKPEDLVEGVRRGIDMFDCVMPTRNARNGHLFVTGGVVKIRNAKYKEDTRPLDAECDCYTCRNYSRAYLHHLDRCNEILGARLNTIHNLRYYQRLMAGLRQAIEEGKLETFVAEFYGRRGCTVPPLGDAAAS

SEQ ID NO: 54857 - protein, 379 aa, Edwardsiella ictaluri
  misc_feature (1)..(379): sp|C5BCF7|TGT_EDWI9 Queuine tRNA-ribosyltransferase OS= Edwardsiella ictaluri (strain 93-146) OX=634503 GN=tgt PE=3 SV=1
MKYELVSTDGRARRGRLIFERGVVETPAFMPVGTYGTVKGMTPEEVAQTGAQILLGNTFHLWLRPGQEIMKLHGDLHDFMQWPGPILTDSGGFQVFSLGAMRKIKEEGVYFRNPINGSPVFLSPEKSMEIQYDLGSDIVMIFDECTPYPADWDYAKRSMEMSLRWAKRSRQRFDELGNQNALFGIIQGSVYEDLRDVSLKGLVEIGFDGYAVGGLAVGEPKEDMHRILEHVCPMIPQDKPRYLMGVGKPEDLVEGVRRGIDMFDCVMPTRNARNGHLFVTGGVVKIRNAQYKEDTTALDPECDCYTCRNYSRAYLHHLDRCNEILGARLNTIHNLRYYQRLMAALRQAIEEGKLERFAADFYGRRGRTVPPLGAADAAS

SEQ ID NO: 54858 - protein, 379 aa, Edwardsiella piscicida
  misc_feature (1)..(379): tr|A0A411GZV3|A0A411GZV3_9GAMM Queuine tRNA-ribosyltran sferase OS=Edwardsiella piscicida OX=1263550 GN=tgt PE= 3 SV=1
MKYELVSTDGRARRGRLIFERGVVETPAFMPVGTYGTVKGMTPEEVAQTGAQILLGNTFHLWLRPGQEIMKLHGDLHDFMQWPGPILTDSGGFQVFSLGAMRKIKEEGVYFRNPINGSPVFLSPEKSMEIQYDLGSDIVMIFDECTPYPADWDYAKRSMEMSLRWAKRSRQRFDELGNKNALFGIIQGSVYEDLRDVSLKGLVEIGFDGYAVGGLAVGEPKEDMHRILEHVCPMIPQDKPRYLMGVGKPEDLVEGVRRGIDMFDCVMPTRNARNGHLFVTGGVVKIRNAKYKEDTTALDPECDCYTCRNYSRAYLHHLDRCNEILGARLNTIHNLRYYQRLMAALRQAIEEGKLERFAADFYGRRGRTVPPLGAADAAS

SEQ ID NO: 54859 - protein, 379 aa, Edwardsiella piscicida; identical to SEQ ID NO: 54855
  misc_feature (1)..(379): tr|A0A034T3R7|A0A034T3R7_9GAMM Queuine tRNA-ribosyltran sferase OS=Edwardsiella piscicida OX=1263550 GN=tgt PE= 3 SV=1

SEQ ID NO: 54860 - protein, 383 aa, Edwardsiella tarda
  misc_feature (1)..(383): tr|D4F2X1|D4F2X1_EDWTA Queuine tRNA-ribosyltransferase OS=Edwardsiella tarda ATCC 23685 OX=500638 GN=tgt PE=3 SV=1
MTEVYVKYELVTTDGRARRGRLIFERGVVETPAFMPVGTYGTVKGMTPEEVAQTGAQILLGNTFHLWLRPGQEIMKLHGDLHDFMQWPGPILTDSGGFQVFSLGAMRKIKEEGVYFRNPINGSPIFLSPEKSMEIQYDLGSDIVMIFDECTPYPADWDYAKRSMEMSLRWAKRSRQRFDELGNKNALFGIIQGSVYEDLRDVSLKGLVEIGFDGYAVGGLAVGEPKEDMHRILEHVCPMIPQDKPRYLMGVGKPEDLVEGVRRGIDMFDCVMPTRNARNGHLFVTGGVVKIRNAKYKEDTLPLDPECDCYTCRNYSRAYLHHLDRCNEILGARLNTIHNLRYYQRLMAGLRQAIEEGKLETFVADFYDRRGRTVPPLGEVAAS

SEQ ID NO: 54861 - protein, 379 aa, Edwardsiella tarda; identical to SEQ ID NO: 54858
  misc_feature (1)..(379): tr|D0ZE73|D0ZE73_EDWTE Queuine tRNA-ribosyltransferase OS=Edwardsiella tarda (strain EIB202) OX=498217 GN=tgt PE=3 SV=1

SEQ ID NO: 54862 - protein, 381 aa, Eggerthella lenta
  misc_feature (1)..(381): tr|A0A369N6B1|A0A369N6B1_EGGLN Queuine tRNA-ribosyltran sferase OS=Eggerthella lenta OX=84112 GN=tgt PE=3 SV=1
MALFDCELQATSGHARALSYETAHGSFQTPMFMPVGTSASVKGVTVGQLNDLNAQVVLANTYHLSLRPGADVVAEAGGVHRFMNYDGPMLTDSGGFQVFSLADTLKLDDEGLTFRSIYDGTKVRWTPESNMEIQEQLGADIAMQLDQCTPYPAEKAFVAKAVDLSANWARRCLAAHQRPDQTLFGIVQGGMELDLRLESIRRLREIEDESLARGGRRFGGFGIGGYSVGEDHEVMFETLGPVARACPEDRPRYLMGVGNPTTLVRAVREGVDMFDCVLPTRTARMGTAFSSTGRMNMRNAKFTRDFGPLDPACTCPTCRNHSRAYIRHLVKQNEMLGGILLSVHNLHYLIDLMRRAREAVLAGAYEEFYEAWMASPAAKDY

SEQ ID NO: 54863 - protein, 381 aa, Eggerthella lenta
  misc_feature (1)..(381): tr|A0A369NTE7|A0A369NTE7_EGGLN Queuine tRNA-ribosyltran sferase OS=Eggerthella lenta OX=84112 GN=tgt PE=3 SV=1
MTLFDCELQATSGHARALSYETAHGSFQTPMFMPVGTSASVKGVTVGQLNDLGSQVVLANTYHLSLRPGADVVAEAGGVHRFMNYDGPMLTDSGGFQVFSLADTLKLDDEGLTFRSIYDGTKVRWTPESNMEIQQQLGADIAMQLDQCTPYPAEKAFVAKAVDLSANWARRCLAAHTRPDQTLFGIVQGGMELDLRLESVRRLREIEDESLARGGRRFGGFGIGGYSVGEDHEVMFETLGPVARACPEDRPRYLMGVGNPTTLVRAVREGVDMFDCVLPTRTARMGTAFSSEGRMNMRNAKFTRDFGPLDPACTCPTCQNHSRAYIRHLVKQNEMLGGILLSVHNLHYLIDLMRRAREAVLADAYEEFYEAWMSSPAAKDY

SEQ ID NO: 54864 - protein, 381 aa, Eggerthella sinensis
  misc_feature (1)..(381): tr|A0A3N0IXS1|A0A3N0IXS1_9ACTN Queuine tRNA-ribosyltran sferase OS=Eggerthella sinensis OX=242230 GN=tgt PE=3 S V=1
MALFDCTHEAQSGHARALAYETAHGTFRTPMFMPVGTSATVKGVTVGQLNDLGSQVVLANTYHLSLRPGADVVAEAGGVHRFMNYAGPMLTDSGGFQVFSLADTLKLDADGLTFRSIYDGSKIRWTPESNMAIQEQLGADIAMQLDQCTPYPAERSFVANAVDLSANWARRCLAAHQRPDQTLFGIVQGGMELDLRLESIRRLREIEDESVSNGGRRFGGFGIGGYSVGEDHEVMFETLGPVARAVPEDRPRYLMGVGNPTTLVRAVREGVDMFDCVLPTRTARMGTAFSSTGRMNMRNAKFTRDFGPLDPACTCPTCQNHSRAYIRHLVKQNEMLGGILLSVHNLHYLIDLMRRAREAVLADAYEEFYEAWMNSPAAKDY

SEQ ID NO: 54865 - protein, 381 aa, Eggerthella sp.
  misc_feature (1)..(381): tr|R5FY72|R5FY72_9ACTN Queuine tRNA-ribosyltransferase OS=Eggerthella sp. CAG:1427 OX=1262874 GN=tgt PE=3 SV=1
MALFDFTLEAQSGHARAGLFETAHGTVRTPLFMPVGTSATVKGIRPQMLKELGAQIVLSNTYHLSLRPGADLIAEAGGLHKFMAYDGPILTDSGGFQIFSLADTLKLDDDGVTFSSIYDGSKIRWTPETNMDIQQKLGADIIMQLDQCPPYPATREFVQRAVDLSSAWAKRCLAAHTREDQALFAICQGGMNLDMRLESIRRLKEISDESVRSGHKDFKGFGIGGYSVGEDHEVMFETLGDVARTCPENKPRYVMGVGNPTTLVRAVHEGVDMFDCVLPTRTARMGTAFSSQGRMNMRNARFIHDFGPLDEKCTCPTCQTHSRSYIRHLVKQNEMLGSVLLSIHNLHFLIDLMNRAREAILQDAYEDFYQEWMHSPAAQDY

SEQ ID NO: 54866 - protein, 381 aa, Eggerthella sp.
  misc_feature (1)..(381): tr|F7UVK3|F7UVK3_EEGSY Queuine tRNA-ribosyltransferase OS=Eggerthella sp. (strain YY7918) OX=502558 GN=tgt PE= 3 SV=1
MALFDCTCEAQSGHARALAYETAHGTFHTPMFMPVGTSATVKGVTAGQLRDLGSQVVLSNTYHLSLRPGADVVAEAGGVHRFMNYDGPMLTDSGGFQVFSLADTLKLDDDGLTFRSIYDGTKIRWTPESNMEIQEQLGADIAMQLDQCTPYPAEKTFVARAVDLSANWARRCLAAHKRPDQTLFGIVQGGMELDLRLESIRRLREIEDESLAAGGRRFGGFGIGGYSVGEDHEVMFQTLGDVARACPEDRPRYLMGVGNPTTLVRAVREGVDMFDCVLPTRTARMGTAFSSAGRMNMRNAKFTRDFGPLDPACTCPTCQNHSRAYIRHLVKQNEMLGGILLSIHNLHYLLDLMRRARVAVLADAYEEFYQEWMASPAAQDY

SEQ ID NO: 54867 - protein, 381 aa, Eggerthellales bacterium
  misc_feature (1)..(381): tr|A0A316PS71|A0A316PS71_9ACTN Queuine tRNA-ribosyltran sferase OS=Eggerthellales bacterium OX=2137879 GN=tgt P E=3 SV=1
MALFDYTLEATSGHARAGIFETAHGIVRTPLFMSVGTSATVKGIRPETLHEIGAQIILANTYHLSLRPGADLVEEAGGLHSFMNYSGPILTDSGGFQVFSLADTLKLDEDGLTFKSIYDGSKIRWTPESNMEIQQKLGADIVMQLDQCTPYPAEYDFVDHAVELSANWARRCLAAHTRSDQTLFGIVQGGMELDLRMKSIELLTSINDESIANGHKGFGGFGIGGYSVGEEHEVMFETLGAVAQSLPENKPRYLMGVGNPTTLVKAVGVGVDMFDCVLPTRTARMGTAFSSSGRMNMRNAKYTHDFGPLDPQCSCPTCKNHSRAYIRHLVKQNEMLGAILLSIHNLYFLIQLMNRARDAIIADCYDEFLNDWMNSPAAQDY

SEQ ID NO: 54868 - protein, 377 aa, Eggerthia catenaformis
  misc_feature (1)..(377): tr|M2PPB9|M2PPB9_9FIRM Queuine tRNA-ribosyltransferase OS=Eggerthia catenaformis OT 569 = DSM 20559 OX=999415 GN=tgt PE=3 SV=1
MKDFWFELKHREKETGARYGILHTPHGDVETPMFMPVGTQATVKGIWPEMLHQMKSQVVLANTYHLWLRPGDDVVKMAGGLHQFMNYHGPLLTDSGGFQVFSLGKMRKIEEEGVYFRSYIDGSKLFLSPEKSIEIQENLGADIIMSFDECAPYPCSYDYMKRSVERTLRWAKRGQDAHRKENQALFGIVQGGEYADLRKLSATALSDMDFPGYSIGGTSVGEPKDVMYQMIDDSVKWLPDHKPRYLMGVGNPIDLIEGAIRGIDMFDCVLPTRVARHGALMTHQGRLNINNEKYKYDFTPIDEKCSCYACKNYTKAYIRHLHKEDEIFGKSLMSIHNVQFLLDLSKEIRDAVKEDRLLEFKKKFLDEYGHNVYERAF

SEQ ID NO: 54869 - protein, 377 aa, Eggerthia catenaformis
  misc_feature (1)..(377): tr|A0A251WTH8|A0A251WTH8_9FIRM Queuine tRNA-ribosyltran sferase OS=Eggerthia catenaformis OX=31973 GN=tgt PE=3 SV=1
MKDFWFELKHIEKDTGARYGILHTPHGDVETPMFMPVGTQATVKGIWPEMLHQMKSQVVLANTYHLWLRPGDDVVKMAGGLHQFMNYHGPLLTDSGGFQVFSLGKMRKIEEEGVYFRSYIDGSKLFLSPEKSIEIQENLGADIIMSFDECAPYPCSYDYMKRSVERTLRWAKRGQDAHRKENQALFGIVQGGEYADLRKLSATALSDMDFPGYSIGGTSVGEPKDVMYQMIDDSVKWLPDHKPRYLMGVGNPIDLIEGAIRGIDMFDCVLPTRVARHGALMTHQGRLNINNEKYKYDFTPIDEKCSCYACKNYTKAYIRHLHKEDEIFGKSLMSIHNVQFLLDLSKEIRDAVKEDRLLEFKKKFLDEYGHNVYERAF

SEQ ID NO: 54870 - protein, 396 aa, Ehrlichia canis
  misc_feature (1)..(396): tr|Q3YRP4|Q3YRP4_EHRCJ Queuine tRNA-ribosyltransferase OS=Ehrlichia canis (strain Jake) OX=269484 GN=tgt PE=3 SV=1
MYKNFDFKIIHQYNNARLGTILTPHGTINTPAFIFCATKGAIKSVDISKIKESDTQIILSNTYHLMLQPGADIIEKLGGLHKVTGWNKPMLTDSGGYQIFSLGYGSVSHEIKNAGRSYGSRTLVSISEEGAVFKSYINGNLYHLTPEKSIQIQQKLGADLIVVLDECTPFHISYKYTKDSMNMSHRWAVRCIEQFKKNNDNSQALYGIIQGGIYEDLRIDSCNFTNDMPFFGHAIGGSLGACKQQMYDIVSLTTSKLDKNRTIHLLGIGNIDDIFQGVKSGIDTFDCVYPTRIARHGGALVKPKYRKEETRTKEYINLRNQRFKIDTNPIESDCLCFTCCNHSRGYIHHLLKAQELLAYSLITIHNIYFMNNLMQSIRKAILNNTLEEEQNQWVIQ

SEQ ID NO: 54871 - protein, 396 aa, Ehrlichia cf.
  misc_feature (1)..(396): tr|A0A0F3NBG0|A0A0F3NBG0_9RICK Queuine tRNA-ribosyltran sferase OS=Ehrlichia cf. muris str. EmCRT OX=1359167 GN =tgt PE=3 SV=1
MYKNFNFKITHQHNNARLGTIFTPHGVIDTPAFIFCATKAAIKSVDISKIKESNTQIILSNTYHLMLQPGEDIIEKLGGLHKITGWNKPMLTDSGGYQIFSLGYGSVSDEIKSAGRNRTSRTLVSISEEGAVFKSYINGSLYHLTPEKSIQIQQKLGADLIVVLDECTPFHISYDYTKKSTNMSHRWAVRCIDQFKKNNDNSQALYGIIQGGVYEDLRINSCNFINDMPFFGHAIGGSLGACKQQMYDIVSLTTSKLNKNRPIHLLGIGNIDDIFQGVKVGIDTFDCVYPTRIARHGGALVKPKHRTEHTHNKEYINLKNTRFKVDTNPIEPECICFTCCHHSRGYIHHLLKAQELLAYSLISIHNIYFMNNLMQSIRKAILNNRLEEEQNKWVIQ

SEQ ID NO: 54872 - protein, 396 aa, Ehrlichia chaffeensis
  misc_feature (1)..(396): tr|Q2GH20|Q2GH20_EHRCR Queuine tRNA-ribosyltransferase OS=Ehrlichia chaffeensis (strain ATCC CRL-10679 / Arkan sas) OX=205920 GN=tgt PE=3 SV=1
MYKNFNFKIIHQHNNARLGTILTPHGIINTPAFIFCATKAAIKSVDISKIKESNTQIILSNTYHLMLQPGEDIIEKLGGLHKITGWNKPMLTDSGGYQIFSLGYGSVSHEIKSAGRKYTSKTLVSINEEGAIFKSYINGSTYHLTPEKSIQIQQKLGADLIVVLDECTPFHVSYDYTKNSMNMSHRWAVRCIDQFKKNNNYSQALYGIIQGGIHEDLRINSCSFINDMPFFGHAIGGSLGACKQQMYDIVSLTTSNLDKNRPIHLLGIGNIDDIFQGVKAGIDTFDCVYPTRIARHGGALVKPNHRKEETRTKEHINLRNERFKIDTNPIEPDCLCFTCCNHSRGYIHHLLKAQELLAYSLISIHNIYFMNNLMESIRKAILNNTLAEEQNQWVIK

SEQ ID NO: 54873 - protein, 396 aa, Ehrlichia minasensis
  misc_feature (1)..(396): tr|A0A4Q6I5E3|A0A4Q6I5E3_9RICK Queuine tRNA-ribosyltran sferase OS=Ehrlichia minasensis OX=1242993 GN=tgt PE=3 SV=1
MYKNFDFKITHQYNNARVGTILTPHGTINTPAFIFCATKGAIKSVDISKIKESGTQIILSNTYHLMLQPGADTIEKLGGLHKITGWNKPMLTDSGGYQIFSLGHGSVSHEIKNAGRSYGSRTLVSINEEGAVFKSYINGNLYHLTPEKSIQIQQKLGADLIVVLDECTPFHISYKYTKDSMNMSHRWAVRCIEQFKKNNDNSQALYGIIQGGVYEDLRINSCNFINDIPFFGHAIGGSLGACKQQMYDIVSLTTSKLDRNRPIHLLGIGNIDDIFQGVKSGIDTFDCVYPTRIARHGGALVKPKYRKEEAPTKEYINLRNQRFKIDTNPIESDCSCFTCCNHSRGYIHHLLKAQELLAYSLITIHNIYFMNNLMQSIRKAILNNTLEEEQNQWVIQ

SEQ ID NO: 54874 - protein, 396 aa, Ehrlichia muris
  misc_feature (1)..(396): tr|V9R933|V9R933_9RICK Queuine tRNA-ribosyltransferase OS=Ehrlichia muris AS145 OX=1423892 GN=tgt PE=3 SV=1
MYKNFNFKITHQHNNARLGTIFTPHGVIDTPAFIFCATKAAIKSVDISKIKESNTQIILSNTYHLMLQPGEDIIEKLGGLHKITGWNKPMLTDSGGYQIFSLGYGSVSDEIKSAGRNRTSRTLVSISEEGAVFKSYINGSLYHLTPEKSIQIQQKLGADLIVVLDECTPFHISYDYTKKSMNMSHRWAVRCIDQFKKNNDNSQALYGIIQGGVYEDLRINSCNFINDMPFFGHAIGGSLGACKQQMYDIVSLTTSKLDKNRPIHLLGIGNIDDIFQGVKVGIDTFDCVYPTRIARHGGALVKPKHRTEHTYNKEYINLKNKRFKVDTNPIEPECICFTCCHHSRGYIHHLLKAQELLAYSLISIHNIYFMNNLMQSIRKAILNNRLEEEQNKWVIQ

SEQ ID NO: 54875 - protein, 397 aa, Ehrlichia ruminantium
  misc_feature (1)..(397): tr|A0A170QVE1|A0A170QVE1_EHRRU Queuine tRNA-ribosyltran sferase OS=Ehrlichia ruminantium OX=779 GN=tgt PE=3 SV= 1
MYKNFQFKVKHQHNNARLCMIHTPHGVINTPAFIFCATKAAIKAVDISKVKESNTQIILSNTYHLMLQPGEDIIKKLGGLHKITGWDRPILTDSGGYQIFSLGYGSVSQEIKSAGRPYKSKTLISINEEGAIFKSYINGNTYHLTPEKSIQIQHKLGADLVVVLDECTPFHISYDYTKNSMYMSNRWAIRCINEFKKINDNSQALYGIIQGGIYEDLRRESCNFINNTPFFGHAIGGSLGNCKQQMYDIVSFTSEKLNRDRPIHLLGIGNIDDIFQGVKSGIDTFDCVYPTRLARHGGALIKVQYRSEENATKEHINLRNERFKIDTNPIEPDCKCFTCAHHSRGYIHHLLKAQEILAHSLLTIHNIYFMNNLMSAIRESILNNTLDIEQKKWVVTP

SEQ ID NO: 54876 - protein, 399 aa, Ehrlichia ruminantium
  misc_feature (1)..(399): tr|Q5FFT2|Q5FFT2_EHRRG Queuine tRNA-ribosyltransferase OS=Ehrlichia ruminantium (strain Gardel) OX=302409 GN=t gt PE=3 SV=1
MFMYKNFQFKVKHQHNNARLCMIHTPHGVINTPAFIFCATKAAVKAVDISKVKESNTQIILSNTYHLMLQPGEDIIKKLGGLHKIMGWDRPILTDSGGYPIFSLGYGSVSQEIKSAGRPHKSKTLISINEEGPIFKSYINANTYHLTPEKSIQIQHKLGADLVVVLDECTPFHISYDYTKNSMHMSNRWAIRCINEFKKINDNSQALYGIIQGGIYEDLRRESCNFINNTPFFGHAIGGSLGNCKQQMYDIVSFTSEKLNRDRPIHLLGIGNINDIFQGVKSGIDTFDCVYPTRLARHGGALIKVQYRNEENATKEYINLRNERFKIDTNPIEADCKCFTCSHHSRGYIHHLLKAQEILAHSLLTIHNIYFMNNLMSAIRESILNNTLDIEQKKWVVTS

SEQ ID NO: 54877 - protein, 396 aa, Ehrlichia sp.
  misc_feature (1)..(396): tr|X5GKE1|X5GKE1_9RICK Queuine tRNA-ribosyltransferase OS=Ehrlichia sp. HF OX=391036 GN=tgt PE=3 SV=1
MYKNFNFKITHQHNNARLGTIFTPHGVIDTPAFIFCATKAAIKSVDISKIKESNTQIILSNTYHLMLQPGEDIIEKLGGLHKITGWNKPMLTDSGGYQIFSLGYGSVSDEIKSAGRNHASRTLISISEEGAVFKSYINGSLYHLTPEKSIQIQQKLGADLIVVLDECTPFHVSYDYTKKSMNMSHRWAVRCIDQFKKNNDNSQALYGIIQGGVYEDLRINSCSFINDMPFFGHAIGGSLGACKQQMYDIVSLTTSNLDKNRPIHLLGIGNIDDIFQGVKVGIDTFDCVYPTRIARHGGALVKPKHRTEQARNKEYINLKNKRFKVDTNPIEPECICFTCCHHSRGYIHHLLKAQELLAYSLISIHNIYFMNNLMQSIRKAILNNRLEEEQNKWVIQ

SEQ ID NO: 54878 - protein, 371 aa, Eikenella corrodens
  misc_feature (1)..(371): tr|A0A254MND6|A0A254MND6_EIKCO Queuine tRNA-ribosyltran sferase OS=Eikenella corrodens OX=539 GN=tgt PE=3 SV=1
MLKFTLHKKDGHARRGTIELNHGTIETPVFMPVGTYGSVKAMTPQNLHDIKAQIILGNTYHLWLRPGLEVIEQFGGLHDFISWNKPILTDSGGFQVFSLSDMRKLTEEGCTFKSPINGDKLFLSPEISMKIQTVLNSDIAMQLDECTPGEATREQAEKSLQMSLRWAERSKKAFEDLNNPNALFGIVQGAMYEDLREQSLRGLEQLDFPGLAIGGLSVGEPKPEMYRMLRAVGPILPEHKPHYLMGVGTPEDLVYGVAHGVDMFDCVMPTRNARNGWLFTRFGDIKIKNAKHKHDTRPLDESCTCYACQNFSRAYLHHLHRAGEILGAQLNTIHNLHFYQTIMAEMREAIEQGKFADWQAQFHENRAKGTD

SEQ ID NO: 54879 - protein, 371 aa, Eikenella corrodens
  misc_feature (1)..(371): tr|C0DZ12|C0DZ12_EIKCO Queuine tRNA-ribosyltransferase OS=Eikenella corrodens ATCC 23834 OX=546274 GN=tgt PE=3 SV=1
MLKFTLHKKDGHARRATIELNHGSIETPVFMPVGTYGSVKAMTPQNLHDIKAQIILGNTYHLWLRPGLEVIEQFGGLHQFIGWNKPILTDSGGFQVFSLSDMRKLTEEGCTFKSPINGDKLFLSPEISMKIQTVLNSDIAMQLDECTPGEATREQAEKSLQMSLRWAERSKKAFEDLNNPNALFGIVQGAMYEDLREQSLRGLEQLDFPGLAIGGLSVGEPKPEMYRMLRAVGPILPEHKPHYLMGVGTPEDLVYGVAHGVDMFDCVMPTRNARNGWLFTRFGDIKIKNAKHKHDTRPLDESCTCYACQNFSRAYLHHLHRAGEILGAQLNTIHNLHFYQTIMAEMREAIEQGKFADWQAQFHENRAKGTD

SEQ ID NO: 54880 - protein, 371 aa, Eikenella exigua
  misc_feature (1)..(371): tr|A0A5B9BTD6|A0A5B9BTD6_9NEIS Queuine tRNA-ribosyltran sferase OS=Eikenella exigua OX=2528037 GN=tgt PE=3 SV=1
MLKFTLHKKDGHARRATIELNHGSIETPVFMPVGTYGSVKAMTPQNLHDIGSQIILGNTYHLWLRPGLEVIEQFGGLHDFIGWNKPILTDSGGFQVFSLSDMRKLTEEGCTFKSPINGDKLFLSPEISMKIQTVLNSDIAMQLDECTPGEATREQAEKSLQMSLRWAERSKKAFEDLNNSNALFGIVQGAMYEDLREQSLRGLEQLNFPGLAIGGLSVGEPKPEMYRMLRAVGLMLPEHKPHYLMGVGTPEDLVYGVANGVDMFDCVMPTRNARNGWLFTRFGDIKIKNAKYKHDTHPLNESCTCYACTHFSRAYLHHLHRAGEILGAQLNTIHNLHFYQTIMAEMREAIEQGKFADWQEQFHENRGRGVD

SEQ ID NO: 54881 - protein, 371 aa, Eikenella sp.
  misc_feature (1)..(371): tr|A0A1A9S352|A0A1A9S352_9NEIS Queuine tRNA-ribosyltran sferase OS=Eikenella sp. NML03-A-027 OX=1795828 GN=tgt PE=3 SV=1
MLKFTLHKKDGHARRATIELNHGSIETPVFMPVGTYGSVKAMTPQNLHDINAQIILGNTYHLWLRPGLEVIEQFGGLHDFIGWNKPILTDSGGFQVFSLSDMRKLTEEGCTFKSPINGDKLFLSPEISMKIQTVLNSDIAMQLDECTPGEATREQAEKSLQMSLRWAERSKKAFEDLNNPNALFGIVQGAMYEDLREQSLRGLEQLNFPGLAIGGLSVGEPKPEMYRMLRAVGLMLPEHKPHYLMGVGTPEDLVYGVANGVDMFDCVMPTRNARNGWLFTRFGDIKIKNAKYKHDTHPLDESCTCYACTHFSRAYLHHLHRAGEILGAQLNTIHNLHFYQTIMAEMREAIEQGKFADWQEQFHENRGRGVD

SEQ ID NO: 54882 - protein, 371 aa, Eikenella sp.
  misc_feature (1)..(371): tr|A0A1F0FG70|A0A1F0FG70_9NEIS Queuine tRNA-ribosyltran sferase OS=Eikenella sp. HMSC073A11 OX=1739535 GN=tgt P E=3 SV=1
MLKFTLHKKDGHARRATIELNHGSIETPVFMPVGTYGSVKAMTPQNLHDINAQIILGNTYHLWLRPGLEVIEQFGGLHDFIGWNKPILTDSGGFQVFSLSNMRKLTEDGCTFKSPINGDKLFLSPEISMEIQTVLNSDIAMQLDECTPGEATREQAEKSLQMSLRWAERSKKAFEDLNNPNALFGIVQGAMYEDLREQSLRGLEQFDFPGLAIGGLSVGEPKPEMYRMLRAVGPILPEHKPHYLMGVGTPEDLVYGVAHGVDMFDCVMPTRNARNGWLFTRFGDIKIKNAKHKHDTRPLDESCTCYACTHFSRAYLHHLHRAGEILGAQLNTIHNLHFYQTIMVEMCEAIEQGKFADWQAQFHENRAKGTD

SEQ ID NO: 54883 - protein, 381 aa, Eilatimonas milleporae
  misc_feature (1)..(381): tr|A0A3M0CIV5|A0A3M0CIV5_9PROT Queuine tRNA-ribosyltran sferase OS=Eilatimonas milleporae OX=911205 GN=tgt PE=3 SV=1
MTRPRFAFETHAVDGRARTGVLAMRRGDIRTPAFMPVGTAGTVKAMLPEHVRETGADILLGNTYHLMLRPTAERVHHLGGLHTFMNWPHPILTDSGGFQVMSLAGLRKLTEEGVTFQSHLDGRRILLTPERSMEIQRLLGSDIVMAFDECTPYPATRDEAAASMALSMRWARRSRDGFDAGGDHAAGSALFGIVQGGVYGDLRAQSAADLLDIGFDGYAVGGLAVGEGQELMFKVLDETVPHLPAGAPRYLMGVGKPDDIVGAVERGIDMFDCVLPTRSGRTGQAFTRRGPVNMKNARHKDDPRPIDEACGCPACRSYSRAYVHHLLKAGEILGAMLLTWHNLCFYQDLMQGLRDAIAAGRLAEHAADFRATYAAGDIDPV

SEQ ID NO: 54884 - protein, 377 aa, Eisenbergiella massiliensis
  misc_feature (1)..(377): tr|A0A3E3I223|A0A3E3I223_9FIRM Queuine tRNA-ribosyltran sferase OS=Eisenbergiella massiliensis OX=1720294 GN=tg t PE=3 SV=1
MYRLLKQEGRAKRGEFETVHGTIQTPVFMNVGTVAAIKGAVSTQDLEQIKTQVELSNTYHLHVRPGDKIIKQLGGLHKFMSWNKPILTDSGGFQVFSLATLRKIKEEGVYFNSHIDGRKIFMGPEESMQIQSNLASTIAMAFDECAPAKAERAYVENSVARTTRWLERCKAEMARLNSQEDTINKNQLLFGINQGAIYTDIRIEHAKRISELNLDGYAVGGLAVGESHEEMYHVLDETVPYLPVDKPTYLMGVGTPANILEGVERGIDFFDCVYPSRNGRHGHLYTNHGKINLFNAKYELDDRPIEEGCECPACRRYTRAYIRHLLKAKEMLGMRLCVLHNLYFYNTMMEEIRAALDAGNFAAYKKTKLDNMSHPED

SEQ ID NO: 54885 - protein, 377 aa, Eisenbergiella massiliensis
  misc_feature (1)..(377): tr|A0A3E3HUY2|A0A3E3HUY2_9FIRM Queuine tRNA-ribosyltran sferase OS=Eisenbergiella massiliensis OX=1720294 GN=tg t PE=3 SV=1
MYRLLKQEGRAKRGEFETVHGTIQTPVFMNVGTVAAIKGAVSTQDLEQIKTQVELSNTYHLHVRPGDKIIKQLGGLHKFMSWNKPILTDSGGFQVFSLATLRKIKEEGVYFNSHIDGRKIFMGPEESMQIQSNLASTIAMAFDECAPAKAERAYVENSVARTTRWLERCKAEMARLNSQEDTINKNQLLFGINQGAIYTDIRIEHAKRISELNLDGYAVGGLAVGESHEEMYHVLDETVPYLPVDKPTYLMGVGTPANILEGVERGIDFFDCVYPSRNGRHGHLYTNHGKINLFNAKYELDDRPIEEGCDCPACRRYTRAYIRHLLKAKEMLGMRLCVLHNLYFYNTMMEEIRAALDAGNFAAYKKTKLDNMSHPED

SEQ ID NO: 54886 - protein, 383 aa, Eisenbergiella sp.
  misc_feature (1)..(383): tr|A0A416I3U9|A0A416I3U9_9FIRM Queuine tRNA-ribosyltran sferase OS=Eisenbergiella sp. OF01-20 OX=2292348 GN=tgt PE=3 SV=1
MYRLLKQEGRAKRGELVTVHGTVQTPVFMNVGTVAAIKGAVSTGDLEQIKTQVQLSNTYHLHVRPGDKIVKQLGGLHKFMSWDKPILTDSGGFQVFSLSTLRKIKEEGVYFNSHIDGRKIFMGPEESMQIQSNLASTIAMAFDECAPAKAERGYVENSVACTTRWLERCKTEMSRLNGLADTINKKQLLFGINQGAIYADIRIEHAKRIRELDLDGYAVGGLAVGETHEEMYHILDETVPYLPADKPTYLMGVGTPANILEGVERGIDFFDCVYPSRNGRHGHLYTNQGKINLFNAKFELDDRPIEEGCGCPACSRYSRAYIRHLLKAKEMLGMRLCVLHNLYFYNTMMEEIRDSLDRGEFSSYKKAKLEGMSRRQSDSGLLP

SEQ ID NO: 54887 - protein, 379 aa, Eisenbergiella tayi
  misc_feature (1)..(379): tr|A0A1E3ANQ0|A0A1E3ANQ0_9FIRM Queuine tRNA-ribosyltran sferase OS=Eisenbergiella tayi OX=1432052 GN=tgt PE=3 S V=1
MYRLLKQEGRAKRGELETVHGTVQTPVFMNVGTVAAIKGAVSTEDLEHIKTQVQLSNTYHLHVRPGDKIVKQLGGLHKFMSWNKPILTDSGGFQVFSLATLRKIKEEGVYFNSHIDGRKIFMGPEESMQIQSNLASTIAMAFDECAPAKAERDYVENSVARTTRWLERCKAEMSRLNNLDDTINKKQMLFGINQGAVYADIRIEHAKRIRELDLDGYAVGGLAVGETHEEMYHILDETVPYLPTDKPTYLMGVGTPANILEGVERGIDFFDCVYPSRNGRHGHLYTNHGKINLFNAKFELDERPIEEGCDCPACRRYSRAYIRHLLKAKEMLGMRLCVLHNLYFYNTMMEEIRDSLDRGEFASYKKAKLEGMSQPAGSM

SEQ ID NO: 54888 - protein, 377 aa, Eisenbergiella tayi
  misc_feature (1)..(377): tr|A0A1E3A6I3|A0A1E3A6I3_9FIRM Queuine tRNA-ribosyltran sferase OS=Eisenbergiella tayi OX=1432052 GN=tgt PE=3 S V=1
MYRLLKQEGRAKRGELETVHGTVQTPVFMNVGTVAAIKGAVSTEDLEHIKTQVQLSNTYHLHVRPGDKIVKQLGGLHKFMSWNKPILTDSGGFQVFSLATLRKIKEEGVYFNSHIDGRKIFMGPEESMQIQSNLASTIAMAFDECAPAKAERDYVENSVARTTRWLERCKAEMSRLNNLDDTINKKQMLFGINQGAVYADIRIEHAKRIRELDLDGYAVGGLAVGETHEEMYHILDETVPYLPADKPTYLMGVGTPANILEGVERGIDFFDCVYPSRNGRHGHLYTNHGKINLFNAKFELDERPIEEGCDCPACRRYSRAYIRHLLKAKEMLGMRLCVLHNLYFYNTMMEEIRDALDRGEFTSYKKAKLEGMSQPAE

SEQ ID NO: 54889 - protein, 376 aa, Ekhidna lutea
  misc_feature (1)..(376): tr|A0A239JN86|A0A239JN86_9BACT Queuine tRNA-ribosyltran sferase OS=Ekhidna lutea OX=447679 GN=tgt PE=3 SV=1
MQFDLQHTDAKSRARAGTITTDHGQIQTPIFMPVGTAGTVKAVHQRELKEDIKAQIILGNTYHLYMRPGLDIIEQAGGLHKFNGWDKPILTDSGGYQVYSLADNRKIVEEGVHFQSHKDGSRHFFTPESIMDIQRTIGADIIMAFDECTPYPCEYDYAEKSMHMTNRWLDRCINRFDETEGKYGYSQTLFPIVQGSVYKDLRTQSAEYIASKEREGNAIGGLSVGEPAEDMYEMTDHVCGILPTDKPRYLMGVGTPANILECIALGVDMFDCVMPTRNARNGMLFTTQGIINIRNEKWKDDFTPIDPELGGYASTFYTKGYLRHLITSNEILGAQIASIQNLTFYLWLVGEARKQILNDNFASWKETMVKKVSQRL

SEQ ID NO: 54890 - protein, 372 aa, Elioraea sp.
  misc_feature (1)..(372): tr|A0A541C5J1|A0A541C5J1_9PROT Queuine tRNA-ribosyltran sferase OS=Elioraea sp. Yellowstone OX=2592070 GN=tgt P E=3 SV=1
MTVGFTLAATDGMARAGTLHTAHGDVPTPVFMPVGTAGTVKAMTAEAVRSTGARMVLGNTYHLMLRPGAERIAALGGLHRFMDWQGPILTDSGGFQVMSLSQLRRLDEDGVTFRSHLDGSEQRLTPERAVAIQHALGADVTMVLDECTPFPATEAEAAASMRLSMRWAARSRDAFVPRPGHGLFGIVQGSVYPALRAESVAALAAIGFDGYAVGGLAVGEGQETMFAMLDVTVPLLPTDRPRYLMGVGTPADIVGAVARGIDMFDCVIPTRSGRTGRAYTARGVLNLRNARFAGDPRPLDPDCACPACARHSRAYLHHLIKSGEMLGPMLLTWHNVAYYQDLMRGLRAAILDGRFAAHAAALAARWAQGDEA

SEQ ID NO: 54891 - protein, 378 aa, Elizabethkingia anophelis
  misc_feature (1)..(378): tr|A0A290MYA8|A0A290MYA8_9FLAO Queuine tRNA-ribosyltran sferase OS=Elizabethkingia anophelis R26 OX=1246994 GN= tgt PE=3 SV=1
MEKFFEVEQFSAKGKARAGVITTDHGKIQTPIFMPVGTVATVKTVHQRELKDDIKAQIILGNTYHLYLRPGMDVMQNAGGLHKFMNWNGPILTDSGGFQVFSLASSRKMTEEGVKFKSHIDGSYHFISPEVSMEIQRKIGADIFMAFDECTPYPCEYNQAKVSMELTHRWLKRCIEWTENNPEYYGHKQRLFPIVQGSVYSDLRKASAEVIAEAGAEGNAIGGLSVGEPEEEMYRITDEVTDILPKDKPRYLMGVGTPWNILESIGNGIDMMDCVMPTRNARNGMLFTWGGVINIKNEKWKNDFSPLDEFGTSYVDQEYTKAYVRHLFSAREYLGKQIASIHNLAFYLDLVKVAREHILAGDFYEWKDSIIPQLKSRM

SEQ ID NO: 54892 - protein, 378 aa, Elizabethkingia anophelis; identical to SEQ ID NO: 54891
  misc_feature (1)..(378): tr|X5KXZ0|X5KXZ0_9FLAO Queuine tRNA-ribosyltransferase OS=Elizabethkingia anophelis OX=1117645 GN=tgt PE=3 SV= 1

SEQ ID NO: 54893 - protein, 378 aa, Elizabethkingia bruuniana
  misc_feature (1)..(378): tr|A0A5E8D399|A0A5E8D399_9FLAO Queuine tRNA-ribosyltran sferase OS=Elizabethkingia bruuniana OX=1756149 GN=tgt PE=3 SV=1
MEKFFEVEQFSAKGKARAGVITTDHGKIQTPIFMPVGTVATVKTVHQRELRDDIKAQIILGNTYHLYLRPGMEVMQNAGGLHKFMNWNGPILTDSGGFQVFSLASSRKMTEEGVKFKSHIDGSYHFISPEVSMEIQRKIGADIFMAFDECTPYPCEYNQAKLSMELTHRWLKRCIEWTENNPEYYGHKQRLFPIVQGSVYSDLRKASAEVIAEAGAEGNAIGGLSVGEPEEEMYRITDEVTDILPKDKPRYLMGVGTPWNILESIGNGIDMMDCVMPTRNARNGMLFTWGGVINIKNEKWKNDFSPLDEFGTSYVDQEYTKAYVRHLFSAREYLGKQIASIHNLAFYLDLVKVAREHILAGDFYEWKDSIIPQLKSRM

SEQ ID NO: 54894 - protein, 378 aa, Elizabethkingia meningoseptica
  misc_feature (1)..(378): tr|A0A1T3IPE0|A0A1T3IPE0_ELIME Queuine tRNA-ribosyltran sferase OS=Elizabethkingia meningoseptica OX=238 GN=tgt PE=3 SV=1
MEKFFEVEKFSTTGKARAGVITTDHGKIQTPIFMPVGTVATVKTVHQRELKEDIKAQIILGNTYHLYLRPGMEVMQAAGGLHKFMNWDRPILTDSGGFQVFSLASSRKMTEEGVKFKSHIDGSYHFISPEVSMEIQRNIGADIFMAFDECTPYPCEYNQAKQSMELTHRWLKRCIEWTESNQEYYGHKQRLFPIVQGSVYSDLRKISAEVIAEAGAEGNAIGGLSVGEPEEEMYRITDEVTDILPKDKPRYLMGVGTPWNILESIGNGIDMMDCVMPTRNARNGMLFTWNGVINIKNEKWKNDFSPLDEFGTSYVDQEYSKAYVRHLFSAREYLGKQIASIHNLAFYLDLVRVAREHILAGDFYEWKNSIIPQLKSRL

SEQ ID NO: 54895 - protein, 378 aa, Elizabethkingia meningoseptica; identical to SEQ ID NO: 54891
  misc_feature (1)..(378): tr|A0A376E9V0|A0A376E9V0_ELIME Queuine tRNA-ribosyltran sferase OS=Elizabethkingia meningoseptica OX=238 GN=tgt PE=3 SV=1

SEQ ID NO: 54896 - protein, 378 aa, Elizabethkingia miricola; identical to SEQ ID NO: 54893
  misc_feature (1)..(378): tr|A0A0A2H3H0|A0A0A2H3H0_ELIMR Queuine tRNA-ribosyltran sferase OS=Elizabethkingia miricola OX=172045 GN=tgt PE =3 SV=1

SEQ ID NO: 54897 - protein, 378 aa, Elizabethkingia miricola
  misc_feature (1)..(378): tr|A0A0W8EX77|A0A0W8EX77_ELIMR Queuine tRNA-ribosyltran sferase OS=Elizabethkingia miricola OX=172045 GN=tgt PE =3 SV=1
MEKFFEVEQFSAKGKARAGVITTDHGKIQTPIFMPVGTVATVKTVHQRELRDDIKAQIILGNTYHLYLRPGMDVMQNAGGLHKFMNWELPILTDSGGFQVFSLASSRKMTEEGVKFKSHIDGSYHFISPEVSMEIQRKIGADIFMAFDECTPYPCEYNQAKLSMELTHRWLKRCIEWTENNPEYYGHKQRLFPIVQGSVYSDLRKASAEVIAEAGAEGNAIGGLSVGEPEEEMYRITDEVTDILPKDKPRYLMGVGTPWNILESIGNGIDMMDCVMPTRNARNGMLFTWGGVINIKNEKWKNDFSPLDEFGTSYVDQEYTKAYVRHLFSAREYLGKQIASIHNLAFYLDLVKVAREHILAGDFYEWKDSIIPQLKSRM

SEQ ID NO: 54898 - protein, 378 aa, Elizabethkingia occulta; identical to SEQ ID NO: 54897
  misc_feature (1)..(378): tr|A0A1T3MF13|A0A1T3MF13_9FLAO Queuine tRNA-ribosyltran sferase OS=Elizabethkingia occulta OX=1867263 GN=tgt PE =3 SV=1

SEQ ID NO: 54899 - protein, 378 aa, Elizabethkingia sp.; identical to SEQ ID NO: 54897
  misc_feature (1)..(378): tr|A0A2T5RZ10|A0A2T5RZ10_9FLAO Queuine tRNA-ribosyltran sferase OS=Elizabethkingia sp. YR191 OX=2135666 GN=tgt PE=3 SV=1

SEQ ID NO: 54900 - protein, 378 aa, Elizabethkingia sp.
  misc_feature (1)..(378): tr|A0A5B7UF67|A0A5B7UF67_9FLAO Queuine tRNA-ribosyltran sferase OS=Elizabethkingia sp. JS20170427COW OX=2583851 GN=tgt PE=3 SV=1
MDKFFEIEKFSDSGKARAGVITTDHGKIQTPIFMPVGTVASVKTVHQRELKEDIKAQIILGNTYHLYLRPGMDIMQQAGGLHKFMNWDRPILTDSGGYQVFSLSSSRKMNEEGVKFKSHIDGSYHMISPEKSMEIQRKIGADIFMAFDECTPFPCEYNLAKKSMELTHRWLKRCIDWTQNNPEIYGHKQHLFPIVQGSVYSDLRKISAEVISEAGASGNAIGGLSVGEPEEEMYRITNEVTDILPKDKPRYLMGVGTPWNILESIGLGVDMMDCVMPTRNARNGMLFTWNGVINIKNEKWKKDFSPLDPSGASYVDFEYSKAYVRHLFVAKEYLGKQIASLHNLAFYLDLVRVAREHILAGDFYEWKNSIIPQLKTRL

SEQ ID NO: 54901 - protein, 378 aa, Elizabethkingia ursingii
  misc_feature (1)..(378): tr|A0A1T3FIS0|A0A1T3FIS0_9FLAO Queuine tRNA-ribosyltran sferase OS=Elizabethkingia ursingii OX=1756150 GN=tgt P E=3 SV=1
MEKFFEVEQFSAKGKARAGVITTDHGKIQTPIFMPVGTVATVKTVHQRELRDDIKAQIILGNTYHLYLRPGMDVMQNAGGLHKFMNWELPILTDSGGFQVFSLASSRKMTEEGVKFKSHIDGSYHFISPEISMEIQRKIGADIFMAFDECTPYPCEYNQAKLSMELTHRWLKRCIEWTENNPEYYGHKQRLFPIVQGSVYSDLRKASAEVIAEAGAEGNAIGGLSVGEPEEEMYRITDEVTDILPKDKPRYLMGVGTPWNILESIGNGIDMMDCVMPTRNARNGMLFTWGGVINIKNEKWKNDFSPLDEFGTSYVDQEYTKAYVRHLFSAREYLGKQIASIHNLAFYLDLVKVAREHILAGDFYEWKDSIIPQLKSRM

SEQ ID NO: 54902 - protein, 376 aa, Elstera cyanobacteriorum
  misc_feature (1)..(376): tr|A0A255XR35|A0A255XR35_9PROT Queuine tRNA-ribosyltran sferase OS=Elstera cyanobacteriorum OX=2022747 GN=tgt P E=3 SV=1
MTQLRFELLNTSGRGRRGRIFTAHGTVETPTFMPVGTAATVKAMTVDAVKATGAQIVLGNTYHLMLRPTAERIARLGGLHKFMNWEGPILTDSGGYQVMSLTALRKMSEDGVTFRSHLDGSAHTLTPERSTEIQNLLDATITMAFDECTPYPATHEVAQKSMELSMRWAERSRKAFVARPGYGQFGIVQGSVYPDLRARSMDALIPMDFEGYAVGGLAVGEGQAIMFSVLDATTPRLPTDKPRYLMGVGKPSDLVGAVQRGIDMFDCVLPTRSGRTAQAFTRRGTVNIRNARHQDDPRPLDPDCACPACSNYSRAYLHHLARSGEILGAMLLTWHNIHYYQELMAGMRKAIEEDRLDAFAAEFHREQAAGDLEAWR

SEQ ID NO: 54903 - protein, 376 aa, Elstera litoralis
  misc_feature (1)..(376): tr|A0A0F3IWE5|A0A0F3IWE5_9PROT Queuine tRNA-ribosyltran sferase OS=Elstera litoralis OX=552518 GN=tgt PE=3 SV=1
MTRLRFELLNTSGRGRRGRIFTAHGVVETPTFMPVGTAATVKAMTVDAVKATGAQIVLGNTYHLMLRPTAERIARLGGLHKFMNWEGPILTDSGGYQVMSLTALRKMSENGVTFRSHLDGSAHTLTPERSTEIQNLLDATITMAFDECTPYPATHEVAKQSMELSMRWAERSRKAFVARPGYGQFGIVQGSVYPDLRARSMDALIPMDFEGYAVGGLAVGEGQPIMFAVLDQTTPRLPVEKPRYLMGVGKPADLVGAVQRGIDMFDCVLPTRSGRTGQAFTRRGTVNIRNARHQDDPRPLDPDCTCPACSSYSRAYLHHLTRAGEILGAMLLTWHNIHYYQELMAGMRKAIEEDRLDSFAAEFHREQAAGDLAPWQ

SEQ ID NO: 54904 - protein, 374 aa, Elusimicrobia bacterium
  misc_feature (1)..(374): tr|A0A2M7RZ10|A0A2M7RZ10_9BACT Queuine tRNA-ribosyltran sferase OS=Elusimicrobia bacterium CG_4_10_14_0_8_um_fi lter_37_32 OX=2014301 GN=tgt PE=3 SV=1
MEKFIIEKKCRDTKARVGRIITAYGEVETPVFMPVGTQGTVKAVSNSELRDIGVQLFISNTYHLYIRPGMDVIKNAGGLHKFINWDRAIITDSGGFQLHSLAKYCKVNNEGAEFKSHIDGSTHFFTPEKVIEIQNHLGSDIMMCFDECTSYPCSRDYAEQSMELTFRWAKRCKKFFLDTHPVDTEQQVFGIVQGSTYLDLRRTSVQELTDVGFDGYALGGLSVGEPKEIMDEIITEIVPLLPEEKPRYVMGVGTPEDIWTCIENGVDMFDCVIPTKNGRNGQALTSSGKLNLKNAVHKNDYSPLDSECPCEVCREYTKAYIHHLFRSGELLALRLLSLHNLYFLIQLVGSIKKSIRSGKFVSEKKKFFENYGKL

SEQ ID NO: 54905 - protein, 373 aa, Elusimicrobia bacterium
  misc_feature (1)..(373): tr|A0A5C7MW14|A0A5C7MW14_9BACT Queuine tRNA-ribosyltran sferase OS=Elusimicrobia bacterium OX=2030800 GN=tgt PE =3 SV=1
MDFQLLATDNKARRGRLTFDRGTVETPAFMPVGTYGSVKAMTPRDIQEIGAEIILGNTFHLFLRPGLDIIGDFGGLHRFIGWDKPILTDSGGFQVFSLAHKRRISEQGVTFASPVDGSKVFLSPEESMRIQRVLDSDVVMIFDECTPYPASLEVARTSMELSLRWAKRSRESFDALENPNALFGIVQGSVYADLRKRSAEGLIEIGFDGYAIGGLAVGEPEHERNQTLEMVEPLLPAYEPRYLMGVGRPEDIVEAVRRGVDMFDCVMPTRNARNGFLFTRQGTLRIRNAKYARDTRVIEDGCTCYTCASGFSRAYLRHLDRCGEILASQLATIHNLHHYQTLMRELREATEAGRFDDYVRGFYAIRSADAQET

SEQ ID NO: 54906 - protein, 388 aa, Elusimicrobium minutum
  misc_feature (1)..(388): tr|B2KCE3|B2KCE3_ELUMP Queuine tRNA-ribosyltransferase OS=Elusimicrobium minutum (strain Pei191) OX=445932 GN= tgt PE=3 SV=1
MTKLISPFKILARDENSKARTGILYTKHGMVRTPVFMPVATQACVKALTEEDLNYVGAECLLSNTYHLYLRPGTEALKKLGGLHNFMRWNKSILTDSGGFQVHSLSHLRKITEDGIWFKSHHDGSKHFFSPESVIESEAAIGSDIWTCLDVLMPNSAHKADLRRALATTKLWAERAAAHYKKIVPEQNIQQNEDGSFSVGHSILFGIIQGSIYPDLREEAAKHMARQDVHGFCIGGLSVGETLQEMNTAVEATIPHLPEGKPRYLMGLGTPIEILECIERGVDMFDCVWPTRVARNGQAMTSEGKVNIKNNAHRLSEEPLDKNCDCWVCKRYTRAYLSHLYRAGELTSHRLISIHNIRFLIKTMERVRAAILDGTFRQLKKEIIEKYK

SEQ ID NO: 54907 - protein, 389 aa, Elusimicrobium sp.
  misc_feature (1)..(389): tr|A0A1Y4DG35|A0A1Y4DG35_9BACT Queuine tRNA-ribosyltran sferase OS=Elusimicrobium sp. An273 OX=1965617 GN=tgt P E=3 SV=1
MNSPFHILSKDPHSKARTGILYTKHGAVHTPVFMPVATQACVKALTDEDLKNAGAECLLSNTYHLYLRPTTPILQQMGGIHKFMHWDGSVLTDSGGFQVYSLSKFRKIKEEGVTFQSHHDGSKHLFTPENVIQFESEIGSDIWTMLDVCIHAKDPSKHDARQALNLTKRWAERAAKAYEQTVPQQHITQRADGSFEVGNSLLFGIIQGAIFPDLRKEAAQHMASLPTHGYCIGGLSLGETLEQMNESVLAVTDNLPENKPRYFMGLGTPVEILNSIERGVDMFDCVWPTRVARNGMAMTSTGRVNIKNAEYRTQDIPLDPECDCYTCRRYSRAYLCHLYRSAELTSHRLMSIHNIRFLIHLMERARQAIANGTFLAFKDEVIRKYQNFK

SEQ ID NO: 54908 - protein, 384 aa, Emcibacter congregatus
  misc_feature (1)..(384): tr|A0A2G4YNA1|A0A2G4YNA1_9PROT Queuine tRNA-ribosyltran sferase OS=Emcibacter congregatus OX=2043170 GN=tgt PE= 3 SV=1
MTETNTPFGMTITATDGNARTGVIQTCRGEIRTPAFMPVGTAATVKTLKPETVRETGADILLGNTYHLMLRPTAERINRLGGLHKFMNWQRPILTDSGGFQVMSLAKLRKITEEGVAFQSHIDGKKHMLTPERSMEIQRLLGSNIVMAFDECTPFPATEKETEKSMMMSMRWAKRSYDAFHDGSEHAEKNALFGIVQGGVYEHLRRHSVEALKEIDCEGYAVGGLAVGEGQEVMFEVLDYTMPMMLKNKPRYLMGVGKPDDIVGAVERGIDMFDCVMPSRSGRTGQAFTRRGTLNMKNARHVDDPRPIDEDCGCSACTNYSRAYISHLFRCGEVLGLMLLTEHNLTYYQDLMAGLRGAIAAEKLQIFIKDFHEKRANGDVEPIG

SEQ ID NO: 54909 - protein, 380 aa, Emcibacter nanhaiensis
  misc_feature (1)..(380): tr|A0A501PSI9|A0A501PSI9_9PROT Queuine tRNA-ribosyltran sferase OS=Emcibacter nanhaiensis OX=1505037 GN=tgt PE= 3 SV=1
MKDNFKLKIEATDGNARTGVLKTWRGDIRTPAFMPVGTAATVKAMKPETVRETGADILLGNTYHLMLRPTAERIHNLGGLHKFMNWERPILTDSGGFQVMSLAQLRKITEEGVAFQSHIDGSKHMLSPERSMEIQRLLGSNIVMAFDECTPYPATKQETADSMRLSMRWARRSFDAFHNGSVHAAKNALFGIVQGGVFEDLRLESIDALRDMGFHGLAVGGLAVGEGQEVMFEVLDYTMPKMPTDVPRYLMGVGKPDDIVGAVERGIDMFDCVLPTRSGRTAQGFTRRGTVNLKNARHTDDPRPLDEECGCDACSKYSRAYLSHLIRSGEILGAMLLTEHNLTYFQDLMQGLRDAIAAGKLSDFVADFHARRALGDIEPL

SEQ ID NO: 54910 - protein, 373 aa, Emergencia timonensis
  misc_feature (1)..(373): tr|A0A415E3Z1|A0A415E3Z1_9FIRM Queuine tRNA-ribosyltran sferase OS=Emergencia timonensis OX=1776384 GN=tgt PE=3 SV=1
MKHAVTYELLKTDSRTKARRGIVHTPHGDIQTPVFMPVGTQATVKAMRPEQVAEMGANIILSNTYHLYLRPGHELIREAGGLHKFMNWDKAILTDSGGFQVFSLGKLRKITEEGVKFQSHIDGSRHMLTPEKAIEIQNALGSDIMMAFDECAPYPADRKYVKDSLERTTRWLARCKAAHKDVERQSLFGIMQGGMYKDLRRQSAEEIVELDLPGYAIGGLSVGEPKDLMLEVLDDCVDYLPADKARYLMGVGSPDYLFEGVERGVDMFDCVLPTRIARHGLAMTSHGRVNIKNAKFEKDFAPLDAECDCYTCKNYSKAYLRHLFKADEMLSAMLLSNHNLHFLLKMMENIRTAIEEDRFLEFKKEFYDKYGKF

SEQ ID NO: 54911 - protein, 376 aa, Empedobacter brevis
  misc_feature (1)..(376): tr|A0A511NIZ9|A0A511NIZ9_9FLAO Queuine tRNA-ribosyltran sferase OS=Empedobacter brevis NBRC 14943 = ATCC 43319 OX=1218108 GN=tgt PE=3 SV=1
MKFSIDKKDEFSKARAGVVETDHGKIQTPIFMPVGTVGTVKAVHQRELEEDIKAQIILGNTYHLYLRPGTDILHKAGGLHQFINWQKPILTDSGGFQVYSLATSRKKSEEGVRFKSHIDGSYHMFTPEKSMEIQRYIGADIFMAFDELTGIPAKYHDAKRAMHVTHRWLERCRTWLNNNPEYYGHKQTLFPIVQGNDFKDLRQESAKYIADFGAEGNAIGGLSVGEPEPVMYEMTDIVTEILPQDKPRYLMGVGTPWNIIECIALGVDMFDCVMPTRNARNAMLFTWNGVMNMKNAKWKDCFEPLDENGTSYVDSYYTKAYVRHLFNANEALGKQIASVHNLAFYLDLVRVAREHILAGDFAQWKEQIVPQLKQRL

SEQ ID NO: 54912 - protein, 376 aa, Empedobacter brevis
  misc_feature (1)..(376): tr|A0A3P6MH58|A0A3P6MH58_9FLAO Queuine tRNA-ribosyltran sferase OS=Empedobacter brevis OX=247 GN=tgt PE=3 SV=1
MKFSIDKKDEFSKARAGVVETDHGKIQTPIFMPVGTVGTVKSVHQRELEEDIKAQIILGNTYHLYLRPGTDILHKAGGLHQFMNWQKPILTDSGGFQVYSLSTSRKKSEEGVRFKSHIDGSYHMFTPEKSMEIQRFIGGDIFMAFDELTGIPAKYHDAKRAMHVTHRWLERCRTWLDYNPEYYGHKQTLFPIVQGNDFKDLRQESAKYISDFGAEGNAIGGLSVGEPEPIMYEMTDIVTEILPQDKPRYLMGVGTPWNIIECIALGVDMFDCVMPTRNARNGMLFTWNGVMNMKNAKWKDCFEPLDESGTSYVDSFYSKSYVRHLFNANESLGKQIASIHNLAFYLDLVRVAREHILAGDFAQWKEQIVPQLKKRL

SEQ ID NO: 54913 - protein, 376 aa, Empedobacter falsenii
  misc_feature (1)..(376): tr|A0A376G2G2|A0A376G2G2_9FLAO Queuine tRNA-ribosyltran sferase OS=Empedobacter falsenii OX=343874 GN=tgt PE=3 SV=1
MKFSIDKKDEFSKARAGVVETDHGKIETPIFMPVGTVGTVKSVHQRELEEDIKAQIILGNTYHLYLRPGTDILHRAGGLHKFMNWQKPILTDSGGFQVYSLATSRKKSEEGVRFKSHIDGSYHMFTPEKSMEIQRFIGADIFMAFDELTGIPAKYHDAKRAMHVTHRWLERCRTWLNNNPEYYDHKQTLFPIVQGNDFKDLRQESAKYIADFGAEGNAIGGLSVGEPEPVMYEMTDIVTEILPQDKPRYLMGVGTPWNIIECIALGVDMFDCVMPTRNARNAMLFTWNGVMNMKNAKWKDCFEPLDENGTSYVDSYYTKAYVRHLFNANEALGKQIASVHNLAFYLDLVRVARQHILAGDFAQWKEQIVPQLKQRL

SEQ ID NO: 54914 - protein, 376 aa, Empedobacter falsenii
  misc_feature (1)..(376): tr|A0A3R8SMB3|A0A3R8SMB3_9FLAO Queuine tRNA-ribosyltran sferase OS=Empedobacter falsenii OX=343874 GN=tgt PE=3 SV=1
MKFSIDKKDEFSKARAGVVETDHGKIETPIFMPVGTVGTVKSVHQRELEEDIKAQIILGNTYHLYLRPGTDILHRAGGLHKFMNWQKPILTDSGGFQVYSLATSRKKSEEGVRFKSHIDGSYHMFTPEKSMEIQRYIGADIFMAFDELTGIPAKYHDAKRAMHVTHRWLERCRTWLNNNPEYYDHKQTLFPIVQGNDFKDLRQESAKYIADFGAEGNAIGGLSVGEPEPVMYEMTDIVTEILPQDKPRYLMGVGTPWNIIECIALGVDMFDCVMPTRNARNAMLFTWNGVMNMKNAKWKDCFEPLDENGTSYVDSYYTKAYVRHLFNANEALGKQIASVHNLAFYLDLVRVARQHILAGDFAQWKEQIVPQLKQRL

SEQ ID NO: 54915 - protein, 379 aa, Empedobacter haloabium
  misc_feature (1)..(379): tr|A0A5C7BGT3|A0A5C7BGT3_9FLAO Queuine tRNA-ribosyltran sferase OS=Empedobacter haloabium OX=592317 GN=tgt PE=3 SV=1
MLEFKLHKTDTTGLTKARRGTLKLNHGTVETPIFMPVGTYGSVKAMSPLELKEIGAQIILGNTFHLWLRPGNDVMSKFGGLHGFMGWDKPILTDSGGFQVFSLGEMRKITEEGVHFNSPINGDKLFLSPEISMQIQRVLNSDIVMQFDECTPYEINGRPATLDEAAKSMRMSLRWAQRSMNEFKAGENPNALFGIVQGGMFESLRDESLEGLEKIDFPGLAIGGLSVGEPKEDMLRVLEHVGPRLPANKPHYLMGVGTPEDLVAGVSNGVDMFDCVMPTRNARNGWIFTRFGDIKIKNARYKDDKEPLDPTCSCYACRNFSRAYLHHLHRAQEILGARLNTIHNLHYYLDIMRQMREALDEDRFPDWVRQFHADRARGV

SEQ ID NO: 54916 - protein, 376 aa, Empedobacter sp.; identical to SEQ ID NO: 54914
  misc_feature (1)..(376): tr|A0A4Z1B1W6|A0A4Z1B1W6_9FLAO Queuine tRNA-ribosyltran sferase OS=Empedobacter sp. MRS2 OX=2491114 GN=tgt PE=3 SV=1

SEQ ID NO: 54917 - protein, 376 aa, Emticicia sp.
  misc_feature (1)..(376): tr|A0A4Q5LTP9|A0A4Q5LTP9_9BACT Queuine tRNA-ribosyltran sferase OS=Emticicia sp. 17J42-9 OX=2492393 GN=tgt PE=3 SV=1
MKYELQKTDSASKARAGKITTDHGEILTPIFMPVGTAGTVKAVHQRELENDIHAQIILGNTYHLYLRPGLDILERAGGLHKFNGWTKPILTDSGGYQVFSLKDIRKISEEGVKFQSHIDGSRHLFTPESVMDIQRVIGADIIMAFDECAPYPCDYNYAKKSMEMTHRWLKRCCDRFDATEGLYGYSQTLFPIVQGSVYKDLRIQSAEFIAGQNREGNAIGGLAVGEPAEKMYETIDYVNDILPQDKPRYLMGVGTPENILESIALGIDMFDCVMPTRNARNGMLFTTQGIINIRNEKWKDDYSPIDENLGGYTSTFYSKAYLRHLVKCDEILAAQVASIHNLTFYLWLVGQAREHILAGDFVEWKKVIVKKLMERL

SEQ ID NO: 54918 - protein, 376 aa, Emticicia sp.
  misc_feature (1)..(376): tr|A0A2N4XEZ4|A0A2N4XEZ4_9BACT Queuine tRNA-ribosyltran sferase OS=Emticicia sp. TH156 OX=2067454 GN=tgt PE=3 S V=1
MKYELQKTDSGSKARAGKITTDHGEILTPIFMPVGTAGTVKAVHQRELENDIKAQIILGNTYHLYLRPGLDILQRAGGLHKFNGWNHPILTDSGGYQVFSLKDIRKITEEGVKFQSHIDGSKHLFTPESVMDIQRVIGADIIMAFDECAPYPCDYNYAKKSMEMTHRWLKRCCDRFDATEGLYGYSQTLFPIVQGSVYKDLRIQSAEFIANQNREGNAIGGLAVGEPAEKMYETIDYVTDILPKDKPRYLMGVGTPENILESIALGIDMFDCVMPTRNARNGMLFTTQGIINIKNEKWKDDYSPIDEHLGGHVSTFYSKAYLRHLVKCDEILAAQIASVHNLTFYLWLVGQAREHILAGDFTEWKNAMVKQVMQRL

SEQ ID NO: 54919 - protein, 379 aa, Endomicrobium proavitum
  misc_feature (1)..(379): tr|A0A0G3WJ61|A0A0G3WJ61_9BACT Queuine tRNA-ribosyltran sferase OS=Endomicrobium proavitum OX=1408281 GN=tgt PE =3 SV=1
MAEVGSYKLIKKSSQCKARLGQVYTTRGVIDTPVFMPVGTQGTVKGVPNEDLQNSGAQIILANSYHLYLRPGTEIIKKAGGIQKFNSWNRPMLTDSGGFQIFSLNEIRKLTEDGAKFQSHIDGSSHFFSPEKSMQIQKDIGADIIMCFDECTPYPATYKYAKNSMELSLRWAKRCREEFYKDDACKTQSLFGIIQGSTYEDLRKISAQEMTEMNFTGYAIGGVSVGEPKEEKEKVIETVEPYLPENKARYLMGVGMPEDLWEGVSRGIDMFDCVIPTRNGRNGQVFTSMGKINIRNAEFKEDFTSLDPQCNCPTCKGYSKAYLNHLVRAQESLYLGLLSLHNIYFMINLMSKIRKSLENDTFLEAKKEFFENYYSRGTR

SEQ ID NO: 54920 - protein, 364 aa, Riftia pachyptila
  misc_feature (1)..(364): tr|G2DET6|G2DET6_9GAMM Queuine tRNA-ribosyltransferase OS=endosymbiont of Riftia pachyptila (vent Ph05) OX=104 8808 GN=tgt PE=3 SV=1
MYFEKIKTDGAARRGRLTFERGTIETPAFMPVGTYGTVKAMTPEELQQSGAEIILGNTFHLMLRPGTDVIRKHGDLHGFTHWERPILTDSGGFQVFSLGKMRKITEQGVAFRSPVDGSKVFMGPEESMQVQRELGSDIVMIFDECTPYPATQEEARASMELSLRWAERSKVAHGDNPAALFGIVQGGVYESLRQASLEGLMAIGFDGYAVGGLSVGEPPEDRWRILDFLADKLPADKPHYLMGVGTPEDIVGAVQRGIDMFDCVMPTRNARNGHLFTHQGVVRIRNAVHQYDEGPLDPLCDCYTCRNYSRAYLRHLQRCNEILGHRLNTIHNLHYYQSLMRGLREAIEAGRLETFVAEFYRMRE

SEQ ID NO: 54921 - protein, 372 aa, Acanthamoeba sp.
  misc_feature (1)..(372): tr|A0A075MHZ7|A0A075MHZ7_9PROT Queuine tRNA-ribosyltran sferase OS=endosymbiont of Acanthamoeba sp. UWC8 OX=861 06 GN=tgt PE=3 SV=1
MQKIGNLFMSLKYKVLAKDGNARLGVLETAHGEVRTPAFMPVGTAATVKAMFPEDIKTTGADIILGNTYHLMLRGAAERIHKFGGLRKFMNWHGPILTDSGGFQVLSLTKLRKITEEGVTFRSHLDGTKYELTPERSMEIQYFLGSNITMILDECPPYPISHMKAKKSMELSLRWAERSKAAFIKREGHGIFGIVQGSVFEDLRARSAQTLVDMDFDGYALGGVAIGEMQELMFQTLEFTVPLLPQEKPRYLMGIGKPKDIVGSVMRGVDMFDCVLPSRSGRNGQAFVRGGTINIKNAKYSEDTKPLDDKCECYTCKNYSRAYLYHLVRCKEILGAMLVTMHNLTYYQDLMQALRKAIEEKRLSSFDSQGFI

SEQ ID NO: 54922 - protein, 363 aa, Trimyema compressum
  misc_feature (1)..(363): tr|A0A191HUV4|A0A191HUV4_9FIRM Queuine tRNA-ribosyltran sferase OS=endosymbiont 'TC1' of Trimyema compressum OX =243899 GN=tgt PE=3 SV=1
MSNNSRARRGRVSTTHGTIETPVFMPVGTCATVKAMTVEEMKTIGAEIILSNTYHLYLRPGHELIKKAGGLHKFMNWDRAILTDSGGFQVFSLDNLNKIAEDGVCFSSHIDGSKHFLTPEKSMEIQMDLGSDIAMAFDECTTYPADRQYTIDALERTTRWSKRCKEFHHHEYQGLFGIIQGGMYPELRKRSAEEIIAFDFDGYAIGGLSVGEPRDLMIEMLNETAPYLPYNKPRYIMGVGTPDYLIEGVRAGIDMFDCVLPTRLGRNGGVMSHNGYFTIRNAKYFDDFSPLDPECDCYVCQNYTRSYIRHLIKSNEILGFRLLTWHNLYFLIQLMENIRKSIDEDCFETYAHEFLKKYYKNLY

SEQ ID NO: 54923 - protein, 377 aa, Endozoicomonadaceae bacterium
  misc_feature (1)..(377): tr|A0A3S3SD76|A0A3S3SD76_9GAMM Queuine tRNA-ribosyltran sferase OS=Endozoicomonadaceae bacterium GTF-13 OX=2506 149 GN=tgt PE=3 SV=1
MSRECFMTFEQLGSDGRARRGRLTFPRGVVETPAFMPVGTYGTVKGMLPRDIEEIGAQIILGNTFHLMLRPGTEIIQSHGDLHDFNGWQGPILTDSGGFQVFSLGDLRKITEEGVSFRSPVDGAKVFLSPEVSMQVQRELGSDIVMIFDECTPYPADEKTAETSMELSLRWAKRSKEAHGDNPSALFGIIQGGMHQHLRERSLAGLNEIGFDGYAIGGLSVGEPKEEMMKVLDGVTPLMPEDRPRYLMGVGTPEDIVESVRRGVDMFDCVMPTRNARNGHLFTSTGVVRIRNAPHKRDPSTLDAECDCYTCRNFSRAYLHHLDKCNEILGSQLNTIHNLRFYQRLMAGLRDAIEQGKLSDFVDEFYRKRGLETPPLD

SEQ ID NO: 54924 - protein, 371 aa, Endozoicomonas elysicola
  misc_feature (1)..(371): tr|A0A081KBJ8|A0A081KBJ8_9GAMM Queuine tRNA-ribosyltran sferase OS=Endozoicomonas elysicola OX=305900 GN=tgt PE =3 SV=1
MKFDQLATDGKARRGRLTFPRGTVETPCFMPVGTYGTVKGMLPRDIKEIGAEIILGNTFHLMLRPGTEIIQKHGDLHDFNQWHGPILTDSGGFQVFSLGKLRKITEEGVSFQSPVDGSKVFLNPEISMQVQKELGSDIVMIFDECTPGDATEEQARISMELSLRWAARSKAAHGDSPSALFGIIQGGMFEELRDVSLAGLAEVGFDGYAIGGLSVGESKEDMMRILSHITHKIPEDHPRYLMGVGKPEDIVEAVRRGVDMFDCVMPTRNARNGHLFVDEGVIKIRNSAHKKDERPLEAHCDCYTCQNFSRSYLHHLDKCGEILGSMLNTIHNLRYYQRVMEGLRSAIEQGQLDEFVVEFYRKRGQDVPDWG

SEQ ID NO: 54925 - protein, 378 aa, Endozoicomonas montiporae
  misc_feature (1)..(378): tr|A0A081NBA6|A0A081NBA6_9GAMM Queuine tRNA-ribosyltran sferase OS=Endozoicomonas montiporae OX=1027273 GN=tgt PE=3 SV=1
MKREECFMQFERLATDGKARRGRLTFPRGTVETPCFMPVGTYGTVKGMMPDDIKKIGAEIILGNTFHLMLRPGTEVIKEHGDLHDFNQWEGPILTDSGGFQVFSLGKMRKITEEGVSFRSPVDGSKVFLSPEISMQVQKDLGSDIVMIFDECTDGEATEKEAEESMELSLRWAARSRKAHGDSPSALFGIIQGGMFEHLRDRSMNALVDIGFDGYAIGGLSVGESKEDMMRILSHTAHQIPDDYPRYLMGVGKPEDIVEAVRRGVDMFDCVMPTRNARNGHLFTESGVIKIRNAVHKRDTSPLEENCDCYTCRNFSRAYLHHLDKCGEILGSMLNTIHNLRYYQRVMAGLREAIEQGKLDAFVNEFYQKRGQPVPPLD

SEQ ID NO: 54926 - protein, 378 aa, Endozoicomonas montiporae; identical to SEQ ID NO: 54925
  misc_feature (1)..(378): tr|A0A142BB83|A0A142BB83_9GAMM Queuine tRNA-ribosyltran sferase OS=Endozoicomonas montiporae CL-33 OX=570277 GN =tgt PE=3 SV=1

SEQ ID NO: 54927 - protein, 370 aa, Endozoicomonas numazuensis
  misc_feature (1)..(370): tr|A0A081N0Z1|A0A081N0Z1_9GAMM Queuine tRNA-ribosyltran sferase OS=Endozoicomonas numazuensis OX=1137799 GN=tgt PE=3 SV=1
MQFEELATDGEARRGRLTFPRGTVETPCFMPVGTYGTVKGMMPKDIEDTGAEIILGNTFHLMLRPGTEIIQEHGDLHDFNQWQGPILTDSGGFQVFSLGKLRKITEEGVSFKSPVDGSPVFLSPEVSMQVQRELGSDIVMIFDECTDGEATEKEAEDSMELSLRWAKRSKEAHGDNPSALFGIIQGGMFEHLRDRSLEGLAEIGFDGYAIGGLSVGETKEDMMRILSHITNKVPQGYPRYLMGVGKPEDIVEAVRRGVDMFDCVMPTRNARNGHLFVDEGVIKIRNAVHKRDASPLEESCDCYTCQNFSRSYLHHLDKCGEILGCMLNTIHNLRYYQRVMAGLRDAIEQGKLDDFVEEFYRKRGLPVPAL

SEQ ID NO: 54928 - protein, 380 aa, Endozoicomonas sp.
  misc_feature (1)..(380): tr|A0A1D2XA84|A0A1D2XA84_9GAMM Queuine tRNA-ribosyltran sferase OS=Endozoicomonas sp. (ex Bugula neritina AB1) OX=1868284 GN=tgt PE=3 SV=1
MTRECFMKFEQLGSDGHARRGRLTFPRGTVETPCFMPVGTYGTVKGMLPRDIKEIGAEIILGNTFHLMLRPGTEIIKEHGDLHDFNQWQGPILTDSGGFQVFSLGKLRKITEEGVSFQSPVDGSKVFLSPEISMQVQKDLGSDIVMIFDECTAGDAGEEEARVSMEMSLRWAARSKAAHGDSPSALFGIIQGGMFEGLRDASLKGLSEVGFDGYAIGGLSVGESKEDMMRILSHITPQIPEGHPRYLMGVGKPEDIVEAVRRGVDMFDCVMPTRNARNGHLFVDEGVIKIRNAVHKKDNNPLEAHCDCYTCQNFSRAYLHHLDKCGEILGSMLNTIHNLRYYQRVMAGLRGAIEQGKLDDFVAEFYQKRGQEVPDWGSIA

SEQ ID NO: 54929 - protein, 377 aa, Endozoicomonas sp.; identical to SEQ ID NO: 54923
  misc_feature (1)..(377): tr|A0A3P3VV41|A0A3P3VV41_9GAMM Queuine tRNA-ribosyltran sferase OS=Endozoicomonas sp. GTF13 OX=2528527 GN=tgt P E=3 SV=1

SEQ ID NO: 54930 - protein, 374 aa, Enhydrobacter aerosaccus
  misc_feature (1)..(374): tr|A0A1T4S7A9|A0A1T4S7A9_9PROT Queuine tRNA-ribosyltran sferase OS=Enhydrobacter aerosaccus OX=225324 GN=tgt PE =3 SV=1
MSLSFELLATDGLARRGRIATAHGTVETPAFMPVGTAGTVKAMMPQSVAETGAEIVLGNTYHLMLRPGAERVAALGGLHKFMNWPRAILTDSGGFQVMSLKELRKIDRDGVTFRSPIDGIQHRLTPERSIQIQHLLDADITMSFDECTPWPVEKEDAARSMRLSMDWAGRGKHAFVDRPGYGLFGIVQGSTFPDLREESAKALTAIGFDGYAVGGLAVGEGQELMFQTLETTVPLLPADRPRYLMGVGRPSDIVGAVRRGIDMFDCVMPTRAGRTAQAFTRRGELNLRNARHRDDPRPIDERCGCPACRHHSRAYLHHLIRSEEILGPMLLTWHNLHYYQDIMRGLRAAIETQSFGHWIAAFEQEQGRGDLPPL

SEQ ID NO: 54931 - protein, 382 aa, Enhydrobacter sp.
  misc_feature (1)..(382): tr|A0A5C8PGP9|A0A5C8PGP9_9PROT Queuine tRNA-ribosyltran sferase OS=Enhydrobacter sp. CC-CFT640 OX=2586908 GN=tg t PE=3 SV=1
MTLAFSLLANTHAARRGRLVTAHGTVETPAFMPVGTAATVKAMLPASVAATGAQIVLGNTYHLMLRPGAERIERLGGLHRFMNWPGPILTDSGGFQVMSLSKLRQIDAGGVDFQSHIDGSRQRLTPAISIEIQRQLGADITMSFDECTPFPATHAQAATSMRLSMRWAERGRQAFTARPGHGLFGIVQGSVYEDLRLESARTLTEIGFDGYAIGGLAVGEGQEAMFRTLDVTVPALPADRPRYLMGVGRPADIVGAVQRGIDMFDCVMPTRAGRTAQAFTWRGELNLRNARHRDDPRPLMEGCACPACTSHSRAYLHHLIKSDEILGAMLLTWHNLQFYQDVMRGLRTAIEAGTLADWAAWFHEEHAKGDIAALPDADGPAT

SEQ ID NO: 54932 - protein, 378 aa, Enhydrobacter sp.
  misc_feature (1)..(378): tr|A0A1V2GNR8|A0A1V2GNR8_9PROT Queuine tRNA-ribosyltran sferase OS=Enhydrobacter sp. H5 OX=1907940 GN=tgt PE=3 SV=1
MQFTLHKNATGESRARRGTVHLAHGDVQTPAFMPVGTYGTVKGMLPRDIHEIGAEIILGNTFHLWLRPTTDVIDKFGGLHDFIGWNKPILTDSGGFQVFSLGAMRKIKEEGVHFRSPIDGAKVFLSPEISMQIQYSLNSDIVMQFDECTPYPATPSEADTSLELSLRWGERCKNEHEKLGNKNALFGIIQGSMYRNLREKSLEGLLNIGFDGYAIGGLSVGEPKEEMMAVLDYLPDDMPADKPRYLMGVGKPEDIVEAVRRGVDMFDCVMPTRNARNGHYFTTFGAVKIKNAVHRFDQSPLDSECDCYTCQNFSRAYLHHLFKCNEMLSAQLGTIHNLRYYQRLMADIRQSIEDDKFDAFVDTFYQQQNLPKPDLHLT

SEQ ID NO: 54933 - protein, 421 aa, Enhygromyxa salina
  misc_feature (1)..(421): tr|A0A2S9YQY3|A0A2S9YQY3_9DELT Queuine tRNA-ribosyltran sferase OS=Enhygromyxa salina OX=215803 GN=tgt PE=3 SV= 1
MTLRCDPCEGLASFAELSSDLASGLASDPDPGSATSPRPGTLELVAEDPASPARSCRLWTAHGPVETPCFMPVGTYGAVKGVMPEELRSVGSQVVLANAYHLTHRPGPERVREVGGIHAFMRWPGPILTDSGGYQVFSLRGLQKIDDAGVDYRTHFDGTPARMSPRSVLEAEAAIGPDICMILDHCPPGDGDPALVREAMDRTTKWAREAAQIRREILRPEQLCFAIVQGGTDLALRREHLETLSPLDFDGFALGGLSVGEPIPLMHATLAEIAPQMPRDKPRYVMGIGTAADLLAAIRAGVDMFDCVIPSRHARNGQLISFLGRFNIRNGRFRDDDRPVDPGCGCMVCARFSRAYLRHLHAHTDPLYVRLATMHNLYFFHEWVAVLRRAIRAGTFTAVAAALEQVLESQGQPGAESRADW

SEQ ID NO: 54934 - protein, 421 aa, Enhygromyxa salina
  misc_feature (1)..(421): tr|A0A0C2D4S0|A0A0C2D4S0_9DELT Queuine tRNA-ribosyltran sferase OS=Enhygromyxa salina OX=215803 GN=tgt PE=3 SV= 1
MTTTSDHPPQIRCDPAEGLVPFADLLAEPGPRSPGDPQPGTLQIVAEDPSGPARSCRLWTGHGPVETPCFMPVGTYGAVKGVLPEELRAVGSQVVLANAYHLTHRPGPERVREVGGIHAFMRWPGPILTDSGGYQVFSLRGLQKIDDAGVDYRTHFDGTPARMSPRSVLEGEAAIGPDICMILDHCPPGDGDAAIVREAMDRTTKWAREAAQMRRDILRPDQLCFAIVQGGTDLALRREHLETLSALDFDGFALGGLSVGEPIPLMHATLAEIAPQMPRDKPRYVMGIGTAADLLAAIRAGVDMFDCVIPSRHARNGQLISFLGRFNIRNGRFRDDDRPVDPGCGCMVCARFSRSYLRHLHAHTDPLYVRLATMHNLYFFHEWVAVLRRAIRAGTFTAVAAALEQVLEAQAQPGDAAHADW

SEQ ID NO: 54935 - protein, 379 aa, Enorma massiliensis
  misc_feature (1)..(379): tr|A0A1Y3U3M0|A0A1Y3U3M0_9ACTN Queuine tRNA-ribosyltran sferase OS=Enorma massiliensis OX=1472761 GN=tgt PE=3 S V=1
MDQSLFTYDIIAEDPKTHARAGVLHTPHGDIETPIFMPVGTRATVKGVPWETVKDLGAQIVLSNTYHLAMRPGADLIDEMGGLHSFMNWHGPILTDSGGFQIFSHSDAVKLSDKGVRFIATDYDGSHVFWSPEDNMAIAQKLGSDICMQLDQCIGYPAERRDVQRAMDLSSRWAERCYKAHTRPDQALFGIVQGGMHLDLRIKSLERLEEMGSFPGYGIGGYSVGEDHETMFESLEPLAAEYMPKGKPRYLMGVGNPTTLVRGVACGIDMFDCVLPTRTGRMGTAFSSEGRLNFRNARFAHDGGPVDPQCTCPVCTGGYTRAHIRHMVTVKEMLGGILLSMHNIYYLLDLMRRARQAIIDGTYSEFVNDWMASPAAKDY

SEQ ID NO: 54936 - protein, 376 aa, Ensifer adhaerens
  misc_feature (1)..(376): tr|A0A285XK66|A0A285XK66_ENSAD Queuine tRNA-ribosyltran sferase OS=Ensifer adhaerens OX=106592 GN=tgt PE=3 SV=1
MSQAFQFQLKNTDGKARLGQISMPRGEIRTPAFMPVGTVGTVKAMYLDQVRDLGADIILGNTYHLMLRPGAERVARLGGLHNLIRWEKPILTDSGGFQVMSLSGLRKLDEQGVTFKSHVDGSLHHMSPERSIEIQGLLDSDIQMQLDECVALPAERKEIERAMEMSVRWAERCKVAFGNQPGKAMFGIVQGGDQPDLRVRSAEALKALDLKGYAIGGLAVGEPQAVMLQMLETTLPVLPNEKPRYLMGVGTPEDILKSVAVGVDMFDCVMPTRSGRHGLAFTRRGKVNIRNARHAEDLRPLDEASSCPASRDYSRAYLHHLVRANEALGGMLLSWHNLAYYQELMQGIRAAIAENRFADFYAETMENWARGDIDPV

SEQ ID NO: 54937 - protein, 376 aa, Ensifer adhaerens
  misc_feature (1)..(376): tr|A0A2V4WH62|A0A2V4WH62_ENSAD Queuine tRNA-ribosyltran sferase OS=Ensifer adhaerens OX=106592 GN=tgt PE=3 SV=1
MTETFQFKLHKTDGKARRGEVSMPRGTIRTPAFMPVGTVGTVKAMYLDQVKDLGADIILGNTYHLMLRPGAERVARLGGLHGLIRWQGPILTDSGGFQVMSLAGLRKLDEQGVTFKSHVDGALFHMSPERSIEIQGLLDSDIQMQLDECVALPAEPKEIERAMEMSLRWAERCKVAFGDQPGKAMFGIVQGGDIPKLRERSAEALKGLDLKGYAVGGLAVGEPQEVMLRMLDITCPIMPVDKPRYLMGVGTPDDILRSVAEGIDMFDCVMPTRSGRHGLAFTRHGRINLRNARHAEDMRPLDEQSSCPATRDYSRAYLHHLIRSNESLGGMLLSWNNLAYYQELMAGIRLAIEEGRFADFMAETQETWRRGDLPPV

SEQ ID NO: 54938 - protein, 376 aa, Ensifer alkalisoli
  misc_feature (1)..(376): tr|A0A1E3VFH7|A0A1E3VFH7_9RHIZ Queuine tRNA-ribosyltran sferase OS=Ensifer alkalisoli OX=1752398 GN=tgt PE=3 SV =1
MTDTFQFKLLATDGKARRGEVLMPRGTIRTPAFMPVGTVGTVKAMYLDQVRELGADIILGNTYHLMLRPGAERVARLGGLHKFIRWERPILTDSGGFQVMSLSSLRKLNEQGVTFKSHVDGALYHMSPERSIEIQGLLDSDIQMQLDECVALPAEPDEIERAMEMSLRWAERCKTAFGDQPGKAMFGIVQGGDSPKLRERSALALKDLDLKGYAVGGLAVGEPQEVMLDMLDVTCPALPEEKPRYLMGVGTPDDILKSVAHGIDMFDCVMPTRSGRHGLAFTRHGRINLRNARHAEDTRPLDEQSSCPATRDYSRAYLHHLIRSNESLGGMLLSWNNLAYYQELMVGIRKAIEAGRYADFMAETHEGWQRGDLPPV

SEQ ID NO: 54939 - protein, 376 aa, Ensifer glycinis
  misc_feature (1)..(376): tr|A0A178Y661|A0A178Y661_9RHIZ Queuine tRNA-ribosyltran sferase OS=Ensifer glycinis OX=1472378 GN=tgt PE=3 SV=1
MTETFQFKLLATDGKARRGEVSTPRGTIRTPAFMPVGTVGTVKAMYLDQVRDLGADIILGNTYHLMLRPGPERVARLGGLHNFIRWERPILTDSGGFQVMSLSSLRKLNEQGVTFKSHVDGALYHMSPERSIEIQGLLDSDIQMQLDECVALPAEPGEIERAMEMSIRWAERCKVAFGNQPGKAMFGIVQGGDIPKLRERSALALKELDLKGYAVGGLAVGEPQEVMLDMLDVTCPVLPAEKPRYLMGVGTPDDILKSVAHGIDMFDCVMPTRSGRHGLAFTRYGRINLRNARHAEDMRPLDEQSSCPAARDYSRAYLHHLIRSNESLGGMLLSWNNLAYYQELMAGIRNAIEKGRYADFMAETQDGWQRGDLPPV

SEQ ID NO: 54940 - protein, 376 aa, Ensifer sojae
  misc_feature (1)..(376): tr|A0A249PAL8|A0A249PAL8_9RHIZ Queuine tRNA-ribosyltran sferase OS=Ensifer sojae CCBAU 05684 OX=716928 GN=tgt P E=3 SV=1
MTETFQFKLLATDGKARRGEVLTPRGTIRTPAFMPVGTVGTVKAMYLDQVRDLGADIILGNTYHLMLRPGAERVARLGGLHKFIRWERPILTDSGGFQVMSLSSLRKLNEQGVTFKSHVDGALYHMSPERSIEIQGLLDSDIQMQLDECVALPAEPDEIERAMEMSLRWAERCKVAFGEQPGKAMFGIVQGGDNPKLRERSALALKDLDLKGYAVGGLAVGEPQEVMLDMLDVTCPVLPEAKPRYLMGVGTPDDILKSVAHGIDMFDCVMPTRSGRHGLAFTRYGRINLRNARHAEDTRPLDEQSSCPAARDYSRAYLHHLIRSNESLGGMLLSWNNLAYYQELMTGSRQAIEEGRYADFMAETQEGWRRGDLPPV

SEQ ID NO: 54941 - protein, 376 aa, Ensifer sp.
  misc_feature (1)..(376): tr|A0A395LBT2|A0A395LBT2_9RHIZ Queuine tRNA-ribosyltran sferase OS=Ensifer sp. M14 OX=2203782 GN=tgt PE=3 SV=1
MTETFEFKLHATDGKARRGEVSMPRGTIRTPAFMPVGTVGTVKAMYLDQVKDLGADIILGNTYHLMLRPGAERVARLGGLHDLIRWQGPILTDSGGFQVMSLAGLRKLNEQGVTFKSHVDGALFHMSPERSIEIQGLLDSDIQMQLDECVALPAEPKEIERAMEMSLRWAERCKVAFGDQPGKAMFGIVQGGDIPALRVRSAEALKGLDLKGYAVGGLAVGEPQEVMLRMLDITCPELPVEKPRYLMGVGTPDDILRSVAHGIDMFDCVMPTRSGRHGLAFTRHGRINLRNARHAEDMRPLDEQSSCPATRDYSRAYLHHLIRSNESLGGMLLSWNNLAYYQELMAGIRLAIEEGRFADFMAETQETWRRGDLAPL

SEQ ID NO: 54942 - protein, 376 aa, Ensifer sp.
  misc_feature (1)..(376): tr|A0A1C0SEQ2|A0A1C0SEQ2_9RHIZ Queuine tRNA-ribosyltran sferase OS=Ensifer sp. LC14 OX=1873714 GN=tgt PE=3 SV=1
MTETFQFKLHKTDGKARRGEVSMPRGTIRTPAFMPVGTVGTVKAMYLDQVKDLGADIILGNTYHLMLRPGAERVARLGGLHGLIRWQGPILTDSGGFQVMSLAGLRKLDEQGVTFKSHVDGALFHMSPERSIEIQGLLDSDIQMQLDECVALPAEPKEIERAMEMSLRWAERCKVAFGDQPGKAMFGIVQGGDIPKLRERSAEALKGLDLKGYAVGGLAVGEPQEVMLRMLDITCPIMPVDKPRYLMGVGTPDDILRSVAEGIDMFDCVMPTRSGRHGLAFTRHGRINLRNARHAEDMRPLDEQSSCPAARDYSRAYLHHLIRSNESLGGMLLSWNNLAYYQELMAGIRLAIEEGRFADFMAETQETWRRGDLPPV

SEQ ID NO: 54943 - protein, 422 aa, Enteractinococcus coprophilus
  misc_feature (1)..(422): tr|A0A543AFZ6|A0A543AFZ6_9MICC Queuine tRNA-ribosyltran sferase OS=Enteractinococcus coprophilus OX=1027633 GN= tgt PE=3 SV=1
MAEPSDFSFTLGARMDGAHGRTGTIHTPHGDIQTPAYIPVGTKATVKAVLPEVVKDLGAQAVLSNAYHLYLQPGPELLDLHGGLGKFMNWDGPTFTDSGGFQVMSLGSGFKKVIDMTGPEAQGKVGSDDAVAPGKERLANVDDDGVWFTSHINGDRLRFTPEVSMTIQHQLGADVMMAFDELTTLHNSRGYQEESLERTRRWAQRSLDEHARLTEQRSHRPYQALYGVIQGAQYEDLRRKACRDLREMRAEFNGVEAGFDGYGLGGAFEKENLGTIVGWCAEELPEDKPRHLLGISEPDDLFAAIEAGADTFDAVSPTRVGRTGAFYTEYGRINLPRAEFAADLSPLQDGCDCYTCANYSKAYIRHLIKADEILAGTLMSIHNLRFTVRLVDDIRQSIIDGDFHEFKDQMLGRYYNQQKRPV

SEQ ID NO: 54944 - protein, 422 aa, Enteractinococcus helveticum
  misc_feature (1)..(422): tr|A0A1B7M3I7|A0A1B7M3I7_9MICC Queuine tRNA-ribosyltran sferase OS=Enteractinococcus helveticum OX=1837282 GN=t gt PE=3 SV=1
MAEPSDFSFTLGTRMDGAHGRTGTIHTPHGDIQTPAYIPVGTKATVKAVLPEVVKDLGAQAVLSNAYHLYLQPGPELLDLHGGLGKFMNWEGPTFTDSGGFQVMSLGSGFKKVIDMTGPEAQGKVGSDDAVAPGKERLANVDDDGVWFTSHINGDRHRFTPEVSMNIQHQLGADVMMAFDELTTLHNSRGYQEESLERTRVWAQRSLDEHARLTEQRSHRPYQALYGVIQGAQYEDLRRKACRDLREMRADFNGTEAGFDGYGLGGAFEKENLGTIVGWCAEELPEDKPRHLLGISEPDDLFAAIEAGADTFDAVSPTRVGRTGAFYTEYGRINLPRAEFAADLSPLQEGCDCYTCANYSKAYVRHLIKADEILAGTLMSIHNLRFTIRLVDTIRQSIIDGDFCEFKEQMLGRYYDKQKRPV

SEQ ID NO: 54945 - protein, 375 aa, Enterobacillus tribolii
  misc_feature (1)..(375): tr|A0A370QNB9|A0A370QNB9_9ENTR Queuine tRNA-ribosyltran sferase OS=Enterobacillus tribolii OX=1487935 GN=tgt PE =3 SV=1
MKYELQTTDGRARRGRLIFDRGVVETPAFMPVGTYGTVKGMTPEEVKETGAQILLGNTFHLWLRPGQEIMKLHGDLHDFMQWSGPILTDSGGFQVFSLGAMRKIKEEGVYFRNPINGSPIFLSPEKSMEIQYDLGSDIVMIFDECTPYPADWDYAKRSMELSLRWAARSRQRFDELNNKNALFGIIQGSIYEDLRDVSLKGLVEIGFDGYAVGGLAVGEPKEDMHRILEHVCPQIPQDKPRYLMGVGKPEDLVEGVRRGIDMFDCVMPTRNARNGHLFVTDGVIKIRNARFRDDTSPLDAHCDCYTCRHYSRAYLHHLDRCNEILGARLNTIHNLRYYQRLMAGLRQAIEDGKLNDFVADFYQRQGKPVPPLDAA

SEQ ID NO: 54946 - protein, 391 aa, Enterobacter agglomerans
  misc_feature (1)..(391): tr|A0A1T4JJ16|A0A1T4JJ16_ENTAG Queuine tRNA-ribosyltran sferase OS=Enterobacter agglomerans OX=549 GN=tgt PE=3 SV=1
MDCFSNGGFVKFELDTTDGRARRGRLIFDRGVVETPAFMPVGTYGTVKGMTPEEVQETGAQIILGNTFHLWLRPGQEIMKLHGDLHDFMQWKGPILTDSGGFQVFSLGDIRKITEAGVHFRNPINGDPIFLDPEKSMEIQYDLGSDIVMIFDECTPYPADWDYAKRSMEMSLRWARRSRDRFDSLGNKNALFGIIQGSVYEDLRDVSVKGLVEIGFDGYAVGGLAVGEPKQDMHRILEHVCPQLPQDKPRYLMGVGKPEDLVEGVRRGVDMFDCVMPTRNARNGHLFVTEGVVKIRNARYKDDTAPLDAECDCYTCRNYSRAYLYHLDRCNEILGARLNTIHNLRYYQRLMAGLRQAIEEGKLEHFVTEFYQRTGKEVPPLTSDNSSMREI

SEQ ID NO: 54947 - protein, 382 aa, Enterobacter agglomerans; identical to SEQ ID NO: 54379
  misc_feature (1)..(382): tr|A0A379AJX6|A0A379AJX6_ENTAG Queuine tRNA-ribosyltran sferase OS=Enterobacter agglomerans OX=549 GN=tgt PE=3 SV=1

SEQ ID NO: 54948 - protein, 375 aa, Enterobacter asburiae
  misc_feature (1)..(375): tr|A0A263VTI3|A0A263VTI3_ENTAS Queuine tRNA-ribosyltran sferase OS=Enterobacter asburiae OX=61645 GN=tgt PE=3 S V=1
MKFELDTTDGRARRGRLVFERGVVETPAFMPVGTYGTVKGMTPEEVEATGAQIILGNTFHLWLRPGQEIMKLHGDLHDFMQWKGPILTDSGGFQVFSLGDIRKITEQGVHFRNPINGDPIFLDPEKSMEIQYDLGSDIVMIFDECTPYPADWDYAKRSMEMSLRWAKRSRDRFDSLQNKNALFGIIQGSVYEDLRDISVKGLVEIGFDGYAVGGLAVGEPKEDMHRILEHVCPQIPADKPRYLMGVGKPEDLVEGVRRGIDMFDCVMPTRNARNGHLFVTDGVVKIRNAKHKSDTSPLDSECDCYTCRNYSRAYLHHLDRCNEILGARLNTIHNLRYYQRLMAGLRKAIEEGKLESFVTDFYQRQGRDVPPLNVD

SEQ ID NO: 54949 - protein, 375 aa, Enterobacter asburiae
  misc_feature (1)..(375): tr|A0A0F1DL53|A0A0F1DL53_ENTAS Queuine tRNA-ribosyltran sferase OS=Enterobacter asburiae OX=61645 GN=tgt PE=3 S V=1
MKFELDTTDGRARRGRLVFDRGVVETPAFMPVGTYGTVKGMTPEEVEATGAQIILGNTFHLWLRPGQEIMKLHGDLHDFMQWKGPILTDSGGFQVFSLGDIRKITEQGVHFRNPINGDPIFLDPEKSMEIQYDLGSDIVMIFDECTPYPADWDYAKRSMEMSLRWAKRSRDRFDSLQNKNALFGIIQGSVYEDLRDISVKGLVEIGFDGYAVGGLAVGEPKEDMHRILEHVCPQIPADKPRYLMGVGKPEDLVEGVRRGIDMFDCVMPTRNARNGHLFVTDGVVKIRNAKHKSDTSPLDSECDCYTCRNYSRAYLHHLDRCNEILGARLNTIHNLRYYQRLMAGLRKAIEEGKLESFVTDFYQRQGRDVPPLNVD

SEQ ID NO: 54950 - protein, 375 aa, Enterobacter bugandensis
  misc_feature (1)..(375): tr|A0A2J7S6F5|A0A2J7S6F5_9ENTR Queuine tRNA-ribosyltran sferase OS=Enterobacter bugandensis OX=881260 GN=tgt PE =3 SV=1
MKFELDTTDGRARRGRLVFDRGVVETPAFMPVGTYGTVKGMTPEEVEATGAQIILGNTFHLWLRPGQEIMKLHGDLHDFMQWKGPILTDSGGFQVFSLGDIRKITEQGVHFRNPINGDPIFLDPEKSMEIQYDLGSDIVMIFDECTPYPADWDYAKRSMEMSLRWAKRSRDRFDSLQNKNALFGIIQGSVYEDLRDISVKGLVEIGFDGYAVGGLAVGEPKEDMHRILEHVCPQIPADKPRYLMGVGKPEDLVEGVRRGIDMFDCVMPTRNARNGHLFVTDGVVKIRNAKHKSDTSPLDSECDCYTCRNYSRAYLHHLDRCNEILGARLNTIHNLRYYQRLMSGLRKAIEEGKLESFVTDFYQRQGRDVPPLNVD

SEQ ID NO: 54951 - protein, 375 aa, Enterobacter cancerogenus
  misc_feature (1)..(375): tr|D2ZFY3|D2ZFY3_9ENTR Queuine tRNA-ribosyltransferase OS=Enterobacter cancerogenus ATCC 35316 OX=500639 GN=tg t PE=3 SV=1
MKFELDTTDGRARRGRLVFDRGVVETPAFMPVGTYGTVKGMTPEEVEATGAQIILGNTFHLWLRPGQEIMKLHGDLHDFMQWKGPILTDSGGFQVFSLGDIRKITEKGVHFRNPINGDPIFLDPEKSMEIQYDLGSDIVMIFDECTPYPADWDYAKRSMEMSLRWAQRSRDRFDALQNKNALFGIIQGSVYEDLRDISVKGLVEIGFDGYAVGGLAVGEPKEDMHRILEHVCPQIPADKPRYLMGVGKPEDLVEGVRRGIDMFDCVMPTRNARNGHLFVTDGVVKIRNAKHKSDTSPLDSECDCYTCRNYSRAYLHHLDRCNEILGARLNTIHNLRYYQRLMAGLRKAIEEGKLESFVTDFYQRQGRDVPPLNVD

SEQ ID NO: 54952 - protein, 375 aa, Enterobacter cancerogenus; identical to SEQ ID NO: 54951
  misc_feature (1)..(375): tr|A0A4U3HNW5|A0A4U3HNW5_9ENTR Queuine tRNA-ribosyltran sferase OS=Enterobacter cancerogenus OX=69218 GN=tgt PE =3 SV=1

SEQ ID NO: 54953 - protein, 375 aa, Enterobacter chengduensis; identical to SEQ ID NO: 54949
  misc_feature (1)..(375): tr|A0A0F4BRS2|A0A0F4BRS2_9ENTR Queuine tRNA-ribosyltran sferase OS=Enterobacter chengduensis OX=2494701 GN=tgt PE=3 SV=1

SEQ ID NO: 54954 - protein, 375 aa, Enterobacter chuandaensis
  misc_feature (1)..(375): tr|A0A3A3ZVZ0|A0A3A3ZVZ0_9ENTR Queuine tRNA-ribosyltran sferase OS=Enterobacter chuandaensis OX=2497875 GN=tgt PE=3 SV=1
MKFELDTTDGRARRGRLVFDRGVVETPAFMPVGTYGTVKGMTPEEVEATGAQIILGNTFHLWLRPGQEIMKLHGDLHDFMQWKGPILTDSGGFQVFSLGDIRKITEQGVHFRNPINGDPIFLDPEKSMEIQYDLGSDIVMIFDECTPYPADWDYAKRSMEMSLRWAKRSRDRFDSLQNKNALFGIIQGSVYEDLRDISVKGLVEIGFDGYAVGGLAVGEPKEDMHRILEHVCPQIPADKPRYLMGVGKPEDLVEGVRRGIDMFDCVMPTRNARNGHLFVTDGVVKIRNAKHKSDTSPLDAECDCYTCRNYSRAYLHHLDRCNEILGARLNTIHNLRYYQRLMAGLRKAIEEGKLESFVTDFYQRQGRDVPPLNVD

SEQ ID NO: 54955 - protein, 375 aa, Enterobacter cloacae; identical to SEQ ID NO: 54949
  misc_feature (1)..(375): tr|A0A0A6EQ14|A0A0A6EQ14_ENTCL Queuine tRNA-ribosyltran sferase OS=Enterobacter cloacae OX=550 GN=tgt PE=3 SV=1

SEQ ID NO: 54956 - protein, 375 aa, Enterobacter cloacae
  misc_feature (1)..(375): tr|A0A155YQC8|A0A155YQC8_ENTCL Queuine tRNA-ribosyltran sferase OS=Enterobacter cloacae OX=550 GN=tgt PE=3 SV=1
MKFELDTTDGRARRGRLVFDRGVVETPAFMPVGTYGTVKGMTPEEVEATGAQIILGNTFHLWLRPGQEIMKLHGDLHDFMQWKGPILTDSGGFQVFSLGDIRKITEQGVHFRNPINGDPIFLDPEKSMEIQYDLGSDIVMIFDECTPYPADWDYAKRSMEMSLRWAKRSRDRFDALQNKNALFGIIQGSVYEDLRDISVKGLVEIGFDGYAVGGLAVGEPKEDMHRILEHVCPQIPADKPRYLMGVGKPEDLVEGVRRGIDMFDCVMPTRNARNGHLFVTDGVVKIRNAKHKSDTSPLDSECDCYTCRNYSRAYLHHLDRCNEILGARLNTIHNLRYYQRLMAGLRKAIEEGKLESFVTDFYQRQGRDVPPLNVD

SEQ ID NO: 54957 - protein, 375 aa, Enterobacter genomosp.; identical to SEQ ID NO: 54954
  misc_feature (1)..(375): tr|A0A0X4EVA8|A0A0X4EVA8_9ENTR Queuine tRNA-ribosyltran sferase OS=Enterobacter genomosp. O OX=2364150 GN=tgt P E=3 SV=1

SEQ ID NO: 54958 - protein, 375 aa, Enterobacter hormaechei; identical to SEQ ID NO: 54949
  misc_feature (1)..(375): tr|F5RV42|F5RV42_9ENTR Queuine tRNA-ribosyltransferase OS=Enterobacter hormaechei ATCC 49162 OX=888063 GN=tgt PE=3 SV=1

SEQ ID NO: 54959 - protein, 356 aa, Enterobacter hormaechei
  misc_feature (1)..(356): tr|A0A5A9DPK7|A0A5A9DPK7_9ENTR Queuine tRNA-ribosyltran sferase (Fragment) OS=Enterobacter hormaechei OX=158836 GN=tgt PE=3 SV=1
MKFELDTTDGRARRGRLVFDRGVVETPAFMPVGTYGTVKGMTPEEVEATGAQIILGNTFHLWLRPGQEIMKLHGDLHDFMQWKGPILTDSGGFQVFSLGDIRKITEQGVHFRNPINGDPIFLDPEKSMEIQYDLGSDIVMIFDECTPYPADWDYAKRSMEMSLRWAKRSRDRFDALQNKNALFGIIQGSVYEDLRDISVKGLVEIGFDGYAVGGLAVGEPKEDMHRILEHVCPQIPADKPRYLMGVGKPEDLVEGVRRGIDMFDCVMPTRNARNGHLFVTDGVVKIRNAKHKSDTSPLDSECDCYTCRNYSRAYLHHLDRCNEILGARLNTIHNLRYYQRLMAGLRKAIEEGKLES

SEQ ID NO: 54960 - protein, 375 aa, Enterobacter huaxiensis
  misc_feature (1)..(375): tr|A0A3R9NVH1|A0A3R9NVH1_9ENTR Queuine tRNA-ribosyltran sferase OS=Enterobacter huaxiensis OX=2494702 GN=tgt PE =3 SV=1
MKFELDTTDGRARRGRLVFDRGVVETPAFMPVGTYGTVKGMTPEEVEATGAQIILGNTFHLWLRPGQEIMKLHGDLHDFMQWKGPILTDSGGFQVFSLGDIRKITEKGVHFRNPINGDPIFLDPEKSMEIQYDLGSDIVMIFDECTPYPADWDYAKRSMEMSLRWAQRSRDRFDSLQNKNALFGIIQGSVYEDLRDISVKGLVEIGFDGYAVGGLAVGEPKEDMHRILEHVCPQIPADKPRYLMGVGKPEDLVEGVRRGIDMFDCVMPTRNARNGHLFVTDGVVKIRNAKHKSDTSPLDSECDCYTCRNYSRAYLHHLDRCNEILGARLNTIHNLRYYQRLMAGLRKAIEEGKLESFVTDFYQRQGRDVPPLNVD

SEQ ID NO: 54961 - protein, 375 aa, Enterobacter kobei
  misc_feature (1)..(375): tr|A0A5E1A243|A0A5E1A243_9ENTR Queuine tRNA-ribosyltran sferase OS=Enterobacter kobei OX=208224 GN=tgt PE=3 SV= 1
MKFELDTTDGRARRGRLVFDRGVVETPAFMPVGTYGTVKGMTPEEVEATGAQIILGNTFHLWLRPGQEIMKLHGDLHDFMQWKGPILTDSGGFQVFSLGDIRKITEEGVHFRNPINGDPIFLDPEKSMEIQYDLGSDIVMIFDECTPYPADWDYAKRSMEMSLRWAKRSRDRFDSLQNKNALFGIIQGSVYEDLRDISVKGLVEIGFDGYAVGGLAVGEPKEEMHRILEHVCPQIPADKPRYLMGVGKPEDLVEGVRRGIDMFDCVMPTRNARNGHLFVTDGVVKIRNAKHKSDTSPLDAECDCYTCRNYSRAYLHHLDRCNEILGARLNTIHNLRYYQRLMAGLRKAIEEGKLESFVTDFYQRQGRTVPPLNVD

SEQ ID NO: 54962 - protein, 375 aa, Enterobacter kobei; identical to SEQ ID NO: 54949
  misc_feature (1)..(375): tr|A0A0F0XUR1|A0A0F0XUR1_9ENTR Queuine tRNA-ribosyltran sferase OS=Enterobacter kobei OX=208224 GN=tgt PE=3 SV= 1

SEQ ID NO: 54963 - protein, 375 aa, Enterobacter lignolyticus; identical to SEQ ID NO: 53884
  misc_feature (1)..(375): tr|E3G708|E3G708_ENTLS Queuine tRNA-ribosyltransferase OS=Enterobacter lignolyticus (strain SCF1) OX=701347 GN =tgt PE=3 SV=1

SEQ ID NO: 54964 - protein, 375 aa, Enterobacter ludwigii
  misc_feature (1)..(375): tr|W0BS86|W0BS86_9ENTR Queuine tRNA-ribosyltransferase OS=Enterobacter ludwigii OX=299767 GN=tgt PE=3 SV=1
MKFELDTTDGRARRGRLVFDRGVVETPAFMPVGTYGTVKGMTPEEVEATGAQIILGNTFHLWLRPGQEIMKLHGDLHDFMQWKGPILTDSGGFQVFSLGDIRKITEQGVHFRNPINGDPIFLDPEKSMEIQYDLGSDIVMIFDECTPYPADWDYAKRSMEMSLRWAQRSRDRFDSLQNKNALFGIIQGSVYEDLRDISVKGLVEIGFDGYAVGGLAVGEPKEDMHRILEHVCPQIPADKPRYLMGVGKPEDLVEGVRRGIDMFDCVMPTRNARNGHLFVTDGVVKIRNAKHKSDTSPLDSECDCYTCRNYSRAYLHHLDRCNEILGARLNTIHNLRYYQRLMAGLRKAIEEGKLESFVTDFYQRQGRTVPPLNVD

SEQ ID NO: 54965 - protein, 385 aa, Enterobacter ludwigii
  misc_feature (1)..(385): tr|G8LPA7|G8LPA7_9ENTR Queuine tRNA-ribosyltransferase OS=Enterobacter ludwigii OX=299767 GN=tgt PE=3 SV=1
MDCFSDVGEKMKFELDTTDGRARRGRLVFDRGVVETPAFMPVGTYGTVKGMTPEEVEATGAQIILGNTFHLWLRPGQEIMKLHGDLHDFMQWKGPILTDSGGFQVFSLGDIRKITEQGVHFRNPINGDPIFLDPEKSMEIQYDLGSDIVMIFDECTPYPADWDYAKRSMEMSLRWAKRSRDRFDSLQNKNALFGIIQGSVYEDLRDISVKGLVEIGFDGYAVGGLAVGEPKEDMHRILEHVCPQIPADKPRYLMGVGKPEDLVEGVRRGIDMFDCVMPTRNARNGHLFVTDGVVKIRNAKHKSDTSPLDSECDCYTCRNYSRAYLHHLDRCNEILGARLNTIHNLRYYQRLMAGLRKAIEEGKLESFVTDFYQRQGRTVPPLNVD

SEQ ID NO: 54966 - protein, 375 aa, Enterobacter mori; identical to SEQ ID NO: 54960
  misc_feature (1)..(375): tr|A0A2J0N9X7|A0A2J0N9X7_9ENTR Queuine tRNA-ribosyltran sferase OS=Enterobacter mori OX=539813 GN=tgt PE=3 SV=1

SEQ ID NO: 54967 - protein, 375 aa, Enterobacter roggenkampii
  misc_feature (1)..(375): tr|A0A384GIL5|A0A384GIL5_9ENTR Queuine tRNA-ribosyltran sferase OS=Enterobacter roggenkampii OX=1812935 GN=tgt PE=3 SV=1
MKFKLDTTDGRARRGRLVFDRGVVETPAFMPVGTYGTVKGMTPEEVEATGAQIILGNTFHLWLRPGQEIMKLHGDLHDFMQWKGPILTDSGGFQVFSLGDIRKITEQGVHFRNPINGDPIFLDPEKSMEIQYDLGSDIVMIFDECTPYPADWDYAKRSMEMSLRWAKRSRDRFDSLQNKNALFGIIQGSVYEDLRDISVKGLVEIGFDGYAVGGLAVGEPKEDMHRILEHVCPQIPADKPRYLMGVGKPEDLVEGVRRGIDMFDCVMPTRNARNGHLFVTDGVVKIRNAKHKSDTSPLDSECDCYTCRNYSRAYLHHLDRCNEILGARLNTIHNLRYYQRLMAGLRKAIEEGKLESFVTDFYQRQGRDVPPLNVD

SEQ ID NO: 54968 - protein, 375 aa, Enterobacter roggenkampii; identical to SEQ ID NO: 54949
  misc_feature (1)..(375): tr|A0A167QT33|A0A167QT33_9ENTR Queuine tRNA-ribosyltran sferase OS=Enterobacter roggenkampii OX=1812935 GN=tgt PE=3 SV=1

SEQ ID NO: 54969 - protein, 375 aa, Enterobacter sichuanensis
  misc_feature (1)..(375): tr|A0A0F1B299|A0A0F1B299_9ENTR Queuine tRNA-ribosyltran sferase OS=Enterobacter sichuanensis OX=2071710 GN=tgt PE=3 SV=1
MKFELDTTDGRARRGRLVFDRGVVETPAFMPVGTYGTVKGMTPEEVEATGAQIILGNTFHLWLRPGQEIMKLHGDLHDFMQWKGPILTDSGGFQVFSLGDIRKITEEGVHFRNPINGDPIFLDPEKSMEIQYDLGSDIVMIFDECTPYPADWDYAKRSMEMSLRWAKRSRDRFDSLQNKNALFGIIQGSVYEDLRDISVKGLVEIGFDGYAVGGLAVGEPKEDMHRILEHVCPQIPADKPRYLMGVGKPEDLVEGVRRGIDMFDCVMPTRNARNGHLFVTDGVVKIRNAKHKSDTSPLDAECDCYTCRHYSRAYLHHLDRCNEILGARLNTIHNLRYYQRLMAGLRKAIEEGKLESFVTDFYQRQGRTVPPLNVD

SEQ ID NO: 54970 - protein, 375 aa, Enterobacter soli
  misc_feature (1)..(375): tr|A0A198GR86|A0A198GR86_9ENTR Queuine tRNA-ribosyltran sferase OS=Enterobacter soli ATCC BAA-2102 OX=1354262 G N=tgt PE=3 SV=1
MKFELDTTDGRARRGRLVFDRGVVETPAFMPVGTYGTVKGMTPEEVEATGAQIILGNTFHLWLRPGQEIMKLHGDLHDFMQWKGPILTDSGGFQVFSLGDIRKITEKGVHFRNPINGDPIFLDPEKSMEIQYDLGSDIVMIFDECTPYPADWDYAKRSMEMSLRWAQRSRDRFDSLENKNALFGIIQGSVYEDLRDISVKGLVEIGFDGYAVGGLAVGEPKEDMHRILEHVCPQIPADKPRYLMGVGKPEDLVEGVRRGIDMFDCVMPTRNARNGHLFVTDGVVKIRNAKHKSDTSPLDSECDCYTCRNYSRAYLHHLDRCNEILGARLNTIHNLRYYQRLMAGLRKAIEEGKLESFVTDFYQRQGRDVPPLNVD

SEQ ID NO: 54971 - protein, 375 aa, Enterobacter sp.
  misc_feature (1)..(375): sp|A4W779|TGT_ENT38 Queuine tRNA-ribosyltransferase OS= Enterobacter sp. (strain 638) OX=399742 GN=tgt PE=3 SV= 1
MKFELDTTDGRARRGRLVFDRGVVETPAFMPVGTYGTVKGMTPEEVEATGAQIILGNTFHLWLRPGQEVMKLHGDLHDFMQWKGPILTDSGGFQVFSLGDIRKITEKGVHFRNPINGDPIFLDPEKSMEIQYDLGSDIVMIFDECTPYPADWDYAKRSMEMSLRWAQRSRDRFDSLENKNALFGIIQGSVYEDLRDISVKGLVEIGFDGYAVGGLAVGEPKEDMHRILEHVCPQIPEDKPRYLMGVGKPEDLVEGVRRGIDMFDCVMPTRNARNGHLFVTDGVVKIRNAKHKSDTSTLDAECDCYTCRHYSRAYLYHLDRCNEILGARLNTIHNLRYYQRLMAGLRKAIEEGKLESFVTDFYQRQGRDVPPLNVD

SEQ ID NO: 54972 - protein, 375 aa, Enterobacter sp.
  misc_feature (1)..(375): tr|R9VQL0|R9VQL0_9ENTR Queuine tRNA-ribosyltransferase OS=Enterobacter sp. R4-368 OX=1166130 GN=tgt PE=3 SV=1
MKFELDTTDGRARRGRLVFDRGVVETPAFMPVGTYGTVKGMTPEEVEATGAQIILGNTFHLWLRPGQEIMKLHGDLHDFMQWKGPILTDSGGFQVFSLGDIRKITEAGVHFRNPINGDPIFLDPEKSMEIQYDLGSDIVMIFDECTPYPADWDYAKRSMEMSLRWAKRSRERFDGLGNKNALFGIIQGSVYEDLRDISVKGLVEIGFDGYAVGGLAVGEPKEDMHRILEHVCPQIPADKPRYLMGVGKPEDLVEGVRRGIDMFDCVMPTRNARNGHLFVTNGVVKIRNAKYKSDTGPLDSECDCYTCRNYSLAYLHHLDRCNEILGARLNTIHNLRYYQRLMAGLRKAIEEGKLESFVADFYQRQGRSVPPLNVD

SEQ ID NO: 54973 - protein, 374 aa, Enterobacterales bacterium
  misc_feature (1)..(374): tr|A0A2I0FT58|A0A2I0FT58_9GAMM Queuine tRNA-ribosyltran sferase OS=Enterobacterales bacterium CwR94 OX=2025587 GN=tgt PE=3 SV=1
MKFELDTTDGRARRGRLVFERGVVETPAFMPVGTYGTVKGMTPEEVKDTGAQILLGNTFHLWLRPGQEIMKLHGDLHDFMNWQGPILTDSGGFQVFSLGDLRKITEAGVHFRNPINGDPIFLDPEKSMEIQYDLGSDIVMIFDECTPYPADWDYAKRSMEMSLRWARRSRDRFDSLGNKNALFGIIQGGVYEDLRDVSVKGLVDIGFDGYAVGGLAVGEPKEDMHRILEHVCPQIPEDKPRYLMGVGKPQDLVEGVRRGIDMFDCVMPTRNARNGHLFVSNGVVKIRNAKYKDDTATLDAECDCYTCRNYSRAYLHHLDRCNEILGARLNTIHNLRYYQRLMAGLRQAIEDGKLECFVTEFYTKTGNAVPPLNV

SEQ ID NO: 54974 - protein, 374 aa, Enterobacterales bacterium
  misc_feature (1)..(374): tr|A0A389M8V5|A0A389M8V5_9GAMM Queuine tRNA-ribosyltran sferase OS=Enterobacterales bacterium OX=1993870 GN=tgt PE=3 SV=1
MKYELSTTDGRARRGRLVFERGVVETPAFMPVGTYGTVKGMTPEEVKETGAQILLGNTFHLWLRPGQEVMKLHGDLHDFMNWHGPILTDSGGFQVFSLGAMRKIKEEGVHFRNPINGDPVFLSPEKSMEIQHDLGSDIVMIFDECTPYPADWDYAKRSMEMSLRWAKRSRDRFNELNNKNALFGIIQGSVYEDLRDVSLKGLVDIGFDGYAVGGLAVGEPKEDMHRILEHVCPQIPEDKPRYLMGVGKPEDLVEGVRRGVDMFDCVMPTRNARNGHLFVTDGIVKIRNAKYKSDTTTLDEHCDCYTCRNYSRAYLHHLDRCNEILGARLNTIHNLRYYQRLMAGLRQAIEEGKLELFVKDFYERKGKEVPPLNF

SEQ ID NO: 54975 - protein, 321 aa, Enterobacteriaceae bacterium
  misc_feature (1)..(321): tr|A0A351NRL4|A0A351NRL4_9ENTR Queuine tRNA-ribosyltran sferase (Fragment) OS=Enterobacteriaceae bacterium OX=1 849603 GN=DCX28_16210 PE=3 SV=1
LGNTFHLWLRPGQEIMKLHGDLHDFMQWKGPILTDSGGFQVFSLGDIRKITEAGVHFRNPINGDPIFLDPEKSMEIQYDLGSDIVMIFDECTPYPADWDYAKRSMEMSLRWAQRSRDRFDSLGNKNALFGIIQGSVYEDLRDISVKGLVEIGFDGYAVGGLAVGEPKEDMHRILEHVCPQIPADKPRYLMGVGKPEDLVEGVRRGIDMFDCVMPTRNARNGHLFVTNGVVKIRNAKYKSDTGPLDEECDCYTCRNYSLAYLHHLDRCNEILGARLNTIHNLRHYQRLMAGLRKAIEEGKLESFVTDFYERQGRPVPPLNVD

SEQ ID NO: 54976 - protein, 375 aa, Enterobacteriaceae bacterium
  misc_feature (1)..(375): tr|A0A427BV16|A0A427BV16_9ENTR Queuine tRNA-ribosyltran sferase OS=Enterobacteriaceae bacterium CCUG 66741 OX=1 851514 GN=tgt PE=3 SV=1
MKFELDTTDGRARRGRLVFERGVVETPAFMPVGTYGTVKGMTPEEVEETGAQIILGNTFHLWLRPGQEIMKLHGDLHDFMQWKGPILTDSGGFQVFSLGDIRKITEAGVHFRNPINGDPIFLDPEKSMEIQNDLGSDIVMIFDECTPYPADWDYAKRSMEMSLRWAKRSRDRFDSLNNKNALFGIIQGSVYEDLRDISVKGLVEIGFDGYAVGGLAVGEPKEDMHRILEHVCPQIPADKPRYLMGVGKPEDLVEGVRRGIDMFDCVMPTRNARNGHLFVTDGVVKIRNAKHKSDTSTLDAECDCYTCRHYSRAYLHHLDRCNEILGARLNTIHNLRYYQRLMAGLRKAIEEGKLESFVTEFYQRQGRDVPPLNVD

SEQ ID NO: 54977 - protein, 381 aa, Enterococcus aquimarinus
  misc_feature (1)..(381): tr|A0A1L8QW69|A0A1L8QW69_9ENTE Queuine tRNA-ribosyltran sferase OS=Enterococcus aquimarinus OX=328396 GN=tgt PE =3 SV=1
MTEPAIRYRLIKKEKHTGARLGEIITPHGTFPTPMFMPVGTLATVKTMSPEELKAMGSGIILSNTYHLWLRPGEDLIEEAGGLHKFMNWDQPILTDSGGFQVFSLADMRNIEEEGVHFRNHLNGSKLFLSPEKAIQIQNKLGSDIMMSFDECPPFNESYDYVKKSVERTSRWAARGLEAHANPDRQGLFGIIQGAGFEELRRQSAKDLISMDFPGYSIGGLSVGESKEEMNRVLDFTTPLIPDNKPRYLMGVGAPDSLIDGVIRGVDMFDCVLPTRIARNGTCMTSTGRLVVKNAQYARDFRPLDEKCDCYTCKNYSRAYIRHLIKADETFGLRLTSYHNLHFLLNLMKQVRQAIMDDNLLEFRAHFIEEYGFNKENARNF

SEQ ID NO: 54978 - protein, 381 aa, Enterococcus asini
  misc_feature (1)..(381): tr|R2SBS1|R2SBS1_9ENTE Queuine tRNA-ribosyltransferase OS=Enterococcus asini ATCC 700915 OX=1158606 GN=tgt PE= 3 SV=1
MTQPAIQYRLIKKEKHTGARLGELITPHGTFPTPMFMPVGTLATVKTMSPEELKEMGAGVILSNTYHLWLRPGEDLVAEAGGLHKFMNWDQPILTDSGGFQVFSLADMRNIEEEGVHFKNHLNGAPLFLSPEKAIQIQNKLGSDIMMSFDECPPFDESYDYVKKSVERTSRWAHRGLEAHANPDRQGLFGIIQGAGFEDLRRQSAKDLVAMDFPGYSIGGLSVGEPKSEMNRVLEFTTPWIPENKPRYLMGVGAADSLIDGVIRGVDMFDCVLPTRIARNGTCMTSQGRLVVKNAKYAHDFRPIDEKCDCYTCRNYTRAYIRHLIKCDETFGIRLTSYHNLYFLLNLMKQVRQAIMDDNLLEFREAFFEEYGFNKENAKSF

SEQ ID NO: 54979 - protein, 381 aa, Enterococcus avium
  misc_feature (1)..(381): tr|S0SNA8|S0SNA8_ENTAV Queuine tRNA-ribosyltransferase OS=Enterococcus avium ATCC 14025 OX=1140002 GN=tgt PE=3 SV=1
MTEPAISYRLIKKEKHTGARLGEIITPHGTFPTPMFMPVGTLATVKTMSPEELKEMGAGIILSNTYHLWLRPGEDLVAEAGGLHKFMNWDQPILTDSGGFQVFSLADMRNIVEEGVHFKNHLNGSKMFLSPEKAIDIQNKLGSDIMMSFDECPPFDESYDYVKKSVERTSRWAERGLKAHANPATQGLFGIIQGAGFEDLRRQSAKDLVSMDFPGYSIGGLSVGEPKEEMNRVLEFTTPLIPENKPRYLMGVGAADSLIDGVIRGVDMFDCVLPTRIARNGTCMTSSGRLVVKNAKFAHDFRPLDEKCDCYTCRNYTRAYIRHLIHCDETFGIRLTSYHNLYFLINLMKQVRQAIMDDNLLEFRQAFFEEYGFNKQNAKSF

SEQ ID NO: 54980 - protein, 381 aa, Enterococcus avium; identical to SEQ ID NO: 54979
  misc_feature (1)..(381): tr|A0A437UIV6|A0A437UIV6_ENTAV Queuine tRNA-ribosyltran sferase OS=Enterococcus avium OX=33945 GN=tgt PE=3 SV=1

SEQ ID NO: 54981 - protein, 381 aa, Enterococcus caccae
  misc_feature (1)..(381): tr|R3WJT9|R3WJT9_9ENTE Queuine tRNA-ribosyltransferase OS=Enterococcus caccae ATCC BAA-1240 OX=1158612 GN=tgt PE=3 SV=1
MTEPAIRYRLIKKEKHTGARLGEIITPHGTFPTPMFMPVGTLATVKTMSPEDLKEMGAGVILSNTYHLWLRPGDDLIAEAGGLHKFMNWDQPILTDSGGFQVFSLSDMRKITEEGVHFRHHLNGSKLFLSPEKAINIQNNLGSDIMMSFDECPPFDESYDYVKKSIERTSRWAERGLKAHANPDRQGLFGIIQGAGFEDLRRQSAKDLISMDFPGYSIGGLSVGEPKAEMNRVLDFTTPLIPDNKPRYLMGVGTADSLIDGVIRGIDMFDCVLPTRIARNGTCMTSKGRLVVKNAQYARDFRPLDEKCDCYTCKNYTRAYIRHLIKADETFGIRLTSYHNLYFLLNLMKQVRQAIMDDNLLEFRQAFFEEYGFNKENAKSF

SEQ ID NO: 54982 - protein, 382 aa, Enterococcus canintestini
  misc_feature (1)..(382): tr|A0A267HRS1|A0A267HRS1_9ENTE Queuine tRNA-ribosyltran sferase OS=Enterococcus canintestini OX=317010 GN=tgt P E=3 SV=1
MAQEPAIKYRLIKKEKHTGARLGELITPHGTFPTPMFMPVGTLATVKTMAPEELKEMGAGVILSNTYHLWLRPGEDLVAEAGGLHKFMNWDQPILTDSGGFQVFSLADMRNITEEGVHFKNHLNGAPLFLSPEKAIDIQNKLGSDIMMSFDECPPFDESYDYVKKSVERTSRWAYRGLEAHANPDRQGLFGIIQGAGFEDLRRQSAKDLISMDFPGYSIGGLSVGEPKEEMNRVLDFTTPLIPDHKPRYLMGVGAADSLIDGVIRGIDMFDCVLPTRIARNGTCMTSKGRLVVKNAKFAHDFRPLDEKCDCYTCRNYSRAYIRHLIHCDETFGIRLTTYHNLYFLLNLMKQVRQAIMDDNLLEFRQAFFEEYGYNKENAKSF

SEQ ID NO: 54983 - protein, 382 aa, Enterococcus canintestini
  misc_feature (1)..(382): tr|A0A1L8R4K1|A0A1L8R4K1_9ENTE Queuine tRNA-ribosyltran sferase OS=Enterococcus canintestini OX=317010 GN=tgt P E=3 SV=1
MAQEPAIKYRLIKKEKHTGARLGELITPHGTFPTPMFMPVGTLATVKTMAPEELKEMGAGVILSNTYHLWLRPGEDLVAEAGGLHKFMNWDQPILTDSGGFQVFSLADMRNITEEGVHFKNHLNGAPLFLSPEKAIDIQNKLGSDIMMSFDECPPFDESYDYVKKSVERTSRWAYRGLEAHANPDRQGLFGIIQGAGFEDLRRQSAKDLISMDFPGYSIGGLSVGEPKEEMNRVLDFTTPLIPDHKPRYLMGVGAADSLIDGVIRGIDMFDCVLPTRIARNGTCMTSKGRLVVKNAKFAHDFRPLDEKCDCYTCRNYSRAYIRHLIHCDETFGIRLTTYHNLYFLLNLMKQVRQAIMDDNLLDFRQAFFEEYGYNKENAKSF

SEQ ID NO: 54984 - protein, 381 aa, Enterococcus canis
  misc_feature (1)..(381): tr|A0A1L8RF69|A0A1L8RF69_9ENTE Queuine tRNA-ribosyltran sferase OS=Enterococcus canis OX=214095 GN=tgt PE=3 SV= 1
MTQPAIQYRLIKKEKHTGARLGEIITPHGTFPTPMFMPVGTLATVKTMSPEELKEMGAGIILSNTYHLWLRPGEDLVAEAGGLHKFMNWDQPILTDSGGFQVFSLSDMRNITEEGVHFKNHLNGSKMFLSPEKAIDIQNKLGSDIMMSFDECPPFDESYDYVKKSVERTSRWAERGLKAHANPDRQGLFGIIQGAGFEDLRKQSARDLVSMDFPGYSIGGLSVGEPKDEMNRVLDFTTPLIPENKPRYLMGVGAADSLIDGVIRGIDMFDCVLPTRIARNGTCMTSKGRLVVKNAQYARDFRPLDENCDCHVCQNYTRAYIRHLIKCDETFGIRLTSYHNLYFLVNLMKQVRQAIMDDNLLEFRQSFFEEYGFNQANAKNF

SEQ ID NO: 54985 - protein, 381 aa, Enterococcus casseliflavus
  misc_feature (1)..(381): tr|F0EG19|F0EG19_ENTCA Queuine tRNA-ribosyltransferase OS=Enterococcus casseliflavus ATCC 12755 OX=888066 GN=t gt PE=3 SV=1
MTEPAIRYRLIKKEKHTGARLGELITPHGTFPTPMFMPVGTLATVKTLAPEELKEMGAGVILSNTYHLWLRPGEDIVAEAGGLHKFMNWDQPILTDSGGFQVFSLAEMRNIVEEGVHFKNHLNGSKMFLSPEKAIDIQNKLGSDIMMSFDECPPFDESYDYVKKSVERTSRWAERGLKAHANPDRQGLFGIIQGAGFEDLRKQSAQDLISMDFPGYSIGGLSVGEPKAEMNRVLEFTTPWIPENKPRYLMGVGAADSLIDGVIRGVDMFDCVLPTRIARNGTCMTSKGRLVVKNAQYARDFRPIDEKCDCYTCKNYSRAYIRHLIKCDETFGMRLTSYHNVYFLLNLMKNVRQAIMDDNLLEFREHFIEEYGFNKENARNF

SEQ ID NO: 54986 - protein, 381 aa, Enterococcus casseliflavus; identical to SEQ ID NO: 54985
  misc_feature (1)..(381): tr|A0A1I1YPB3|A0A1I1YPB3_ENTCA Queuine tRNA-ribosyltran sferase OS=Enterococcus casseliflavus OX=37734 GN=tgt P E=3 SV=1

SEQ ID NO: 54987 - protein, 381 aa, Enterococcus cecorum
  misc_feature (1)..(381): tr|S1RLN3|S1RLN3_9ENTE Queuine tRNA-ribosyltransferase OS=Enterococcus cecorum DSM 20682 = ATCC 43198 OX=11218 64 GN=tgt PE=3 SV=1
MSEPAIKYRLIKKEKHTGARLGELITPHGIFPTPMFMPVGTLATVKTMSPEELKEMGAGVILSNTYHLWLRPGEDLVEKAGGLHKFMNWDQPILTDSGGFQVFSLADMRNIEEEGVHFKNHLNGSPLFLSPEKAINIQNKLGSDIMMSFDECPPFNESYDYVKKSIERTSRWAERGLKAHKNPDRQGLFGIIQGAGFEDLRRQSARDLVSLDFPGYSIGGLSVGESKEEMNRVLEFTTPLVPENKPRYLMGVGAPDSLIDGVIRGVDMFDCVLPTRIARNGTCMTSKGRLVVKNAQYAEDFRPIDEKCDCYTCRNYTRAYVRHLIKCDETFGLRLTSYHNLYFLLNLMKQVREAIMNDNLLEFREYFFEEYGFNKANAKNF

SEQ ID NO: 54988 - protein, 381 aa, Enterococcus cecorum
  misc_feature (1)..(381): tr|A0A366SEY6|A0A366SEY6_9ENTE Queuine tRNA-ribosyltran sferase OS=Enterococcus cecorum OX=44008 GN=tgt PE=3 SV =1
MSEPAIKYRLIKKEKHTGARLGELITPHGTFPTPMFMPVGTLATVKTMSPEELKEMGAGVILSNTYHLWLRPGEDLVEKAGGLHKFMNWDQPILTDSGGFQVFSLADMRNIEEEGVHFKNHLNGSPLFLSPEKAINIQNKLGSDIMMSFDECPPFNESYDYVKKSIERTSRWAERGLKAHKNPARQGLFGIIQGAGFEDLRRQSARDLVSLDFPGYSIGGLSVGESKEEMNRVLEFTTPLVPENKPRYLMGVGAPDSLIDGVIRGVDMFDCVLPTRIARNGTCMTSKGRLVVKNAQYAEDFRPIDEKCDCYTCRNYTRAYVRHLIKCDETFGLRLTSYHNLYFLLNLMKQVREAIMNDNLLEFREYFFEEYGFNKANAKNF

SEQ ID NO: 54989 - protein, 381 aa, Enterococcus columbae
  misc_feature (1)..(381): tr|S0KDB3|S0KDB3_9ENTE Queuine tRNA-ribosyltransferase OS=Enterococcus columbae DSM 7374 = ATCC 51263 OX=11218 65 GN=tgt PE=3 SV=1
MAEPAIRYRLIKKEKHTGARLGELITPHGTFPTPMFMPVGTLATVKTMSPEELKEMGAGVILSNTYHLWLRPGEDLVEKAGGLHKFMNWDQPILTDSGGFQVFSLADMRNIEEEGVHFKNHLNGSPLFLSPEKAINIQNKLGSDIMMSFDECPPFNESYDYVKKSIERTSRWAERGLKAHKNPDRQGLFGIVQGAGFEDLRRQSARDLVSMDFPGYSIGGLSVGESKAEMNRVLEFTTPLIPENKPRYLMGVGAADSLIDGVIRGIDMFDCVLPTRIARNGTCMTSKGRLVVKNAQYAEDFRPIDEKCDCYTCRNYTRAYVRHLIKCDETFGLRLTSYHNLYFLLNLMKQVREAIMNDNLLEFREYFFEEYGFNKADAKKF

SEQ ID NO: 54990 - protein, 381 aa, Enterococcus devriesei
  misc_feature (1)..(381): tr|A0A1L8SWH3|A0A1L8SWH3_9ENTE Queuine tRNA-ribosyltran sferase OS=Enterococcus devriesei OX=319970 GN=tgt PE=3 SV=1
MTEPAISYRLIKKEKHTGARLGEIITPHGTFPTPMFMPVGTLATVKTMSPEDLKEMGAGIILSNTYHLWLRPGEDLVAEAGGLHKFMNWDQPILTDSGGFQVFSLADMRNIVEEGVHFKNHLNGSKMFLSPEKAIDIQNKLGSDIMMSFDECPPFDESYDYVKKSVERTSRWAERGLKAHANPTTQGLFGIIQGAGFEDLRRQSAKDLVSMDFPGYSIGGLSVGEPKAEMNRVLEFTTPLIPENKPRYLMGVGAADSLIDGVIRGVDMFDCVLPTRIARNGTCMTSAGRLVVKNAKYAHDFRPLDEKCDCYTCRNYTRAYIRHLIHCDETFGIRLTSYHNLYFLINLMKQVRQAIMDDNLLEFRQAFFEEYGFNKQNAKSF

SEQ ID NO: 54991 - protein, 382 aa, Enterococcus dispar
  misc_feature (1)..(382): tr|S1NA75|S1NA75_9ENTE Queuine tRNA-ribosyltransferase OS=Enterococcus dispar ATCC 51266 OX=1139219 GN=tgt PE= 3 SV=1
MAQEPAIKYRLIKKEKHTGARLGELITPHGTFPTPMFMPVGTLATVKTMAPEELKEMGAGVILSNTYHLWLRPGEDLVAEAGGLHKFMNWDQPILTDSGGFQVFSLADMRNITEEGVHFKNHLNGAPLFLSPEKAIDIQNKLGSDIMMSFDECPPFDESYDYVKKSVERTSRWAERGLKAHANPNQQGLFGIIQGAGFEDLRRQSAKDLIGMDFPGYSIGGLSVGEPKEEMNRVLDFTTPLIPDHKPRYLMGVGAADSLIDGVIRGIDMFDCVLPTRIARNGTCMTSKGRLVVKNAKFAHDFRPLDEKCDCYTCRNYSRAYIRHLIHCDETFGIRLTTYHNLYFLLNLMKQVRQAIMDDNLLEFRQSFFEEYGYNKENAKSF

SEQ ID NO: 54992 - protein, 381 aa, Enterococcus durans
  misc_feature (1)..(381): tr|A0A248V9B1|A0A248V9B1_9ENTE Queuine tRNA-ribosyltran sferase OS=Enterococcus durans OX=53345 GN=tgt PE=3 SV= 1
MSQPAIRYRLIKKEKHTGARLGELITPHGTFPTPMFMPVGTLATVKTMSPEELKAMGAGVILSNTYHLWLRPGEDLVEEAGGLHKFMNWDQPILTDSGGFQVFSLSDMRNIEEEGVHFKNHLNGSKMFLSPEKAINIQNKLGSDIMMSFDECPPFDESYDYVKKSVERTSRWAERGLKAHANPDRQGLFGIIQGAGFEDLRRQSAKDLVGMDFPGYSIGGLSVGEPKAEMNRVLEFTTPLIPENKPRYLMGVGAADSLIDGVIRGVDMFDCVLPTRIARNGTCMTSQGRLVVKNAQYARDFRPIDEKCDCYTCKNYTRAYIRHLIKCDETFGIRLTSYHNLYFLLNLMKQVRQAIMDDNLLEFRAAFFEEYGFNKENAKSF

SEQ ID NO: 54993 - protein, 381 aa, Enterococcus durans
  misc_feature (1)..(381): tr|A0A5B9A1L7|A0A5B9A1L7_9ENTE Queuine tRNA-ribosyltran sferase OS=Enterococcus durans OX=53345 GN=tgt PE=3 SV= 1
MSQPAIRYRLIKKEKHTGARLGELITPHGTFPTPMFMPVGTLATVKTMSPEELKAMGAGVILSNTYHLWLRPGEDLVEEAGGLHKFMNWDQPILTDSGGFQVFSLSDMRNIEEEGVHFKNHLNGSKMFLSPEKAINIQNKLGSDIMMSFDECPPFDESYDYVKKSVERTSRWAERGLKAHANPDRQGLFGIIQGAGFEDLRRQSARDLVGMDFPGYSIGGLSVGEPKAEMNRVLEFTTPLIPENKPRYLMGVGAADSLIDGVIRGVDMFDCVLPTRIARNGTCMTSQGRLVVKNAQYARDFRPIDEKCDCYTCKNYTRAYIRHLIKCDETFGIRLTSYHNLYFLLNLMKQVRQAIMDDNLLEFRAAFFEEYGFNKENAKSF

SEQ ID NO: 54994 - protein, 381 aa, Enterococcus faecalis
  misc_feature (1)..(381): sp|Q837E7|TGT_ENTFA Queuine tRNA-ribosyltransferase OS= Enterococcus faecalis (strain ATCC 700802 / V583) OX=22 6185 GN=tgt PE=3 SV=1
MTEPAIRYRLIKKDKHTGARLGELITPHGTFPTPMFMPVGTLATVKTMSPEELKEMGAGVILSNTYHLWLRPGEDLVEEAGGLHKFMNWDQPILTDSGGFQVFSLSDMRKIEEEGVHFRNHLNGSKMFLSPEKAINIQNKLGSDIMMSFDECPPFDESYEYVKRSIERTSRWAERGLKAHANPDRQGLFGIVQGAGFEDLRRQSAKDLVSMDFPGYSIGGLSVGESKEEMNRVLDFTTPLIPENKPRYLMGVGAPDSLIDGVIRGIDMFDCVLPTRIARNGTCMTSQGRLVVKNAQYARDFRPLDEKCDCYVCRNYTRAYIRHLIKCDETFGIRLTSYHNLYFLLDLMKNVRQAIMDDNLLEFRQAFFEEYGFNKANAKSF

SEQ ID NO: 54995 - protein, 381 aa, Enterococcus faecalis; identical to SEQ ID NO: 54994
  misc_feature (1)..(381): tr|J6QB71|J6QB71_ENTFL Queuine tRNA-ribosyltransferase OS=Enterococcus faecalis ERV63 OX=1134793 GN=tgt PE=3 S V=1

SEQ ID NO: 54996 - protein, 390 aa, Enterococcus faecium
  misc_feature (1)..(390): tr|I3TYI8|I3TYI8_ENTFD Queuine tRNA-ribosyltransferase OS=Enterococcus faecium (strain ATCC BAA-472 / TX0016 / DO) OX=333849 GN=tgt PE=3 SV=1
MTQPAIRYRLIKKEKHTGARLGELITPHGTFPTPMFMPVGTLATVKTMSPEELKEMGAGVILSNTYHLWLRPGEDLVEEAGGLHKFMNWDQPILTDSGGFQVFSLSDMRNIEEEGVHFKNHLNGSRMFLSPEKAINIQNKLGSDIMMSFDECPPFDESYDYVKKSVERTSRWAERGLKAHANPDRQGLFGIIQGAGFEDLRRQSAKDLVGMDFPGYSIGGLSVGEPKSEMNRVLEFTTPLIPENKPRYLMGVGAADSLIDGVIRGVDMFDCVLPTRIARNGTCMTSQGRLVVKNAKYAHDFRPIDEKCDCYTCKNYTRAYIRHLIKCDETFGIRLTSYHNLYFLLNLMKQVRQAIMDDNLLEFREAFFEEYGFNKENAKSFLKENLLKIK

SEQ ID NO: 54997 - protein, 381 aa, Enterococcus faecium
  misc_feature (1)..(381): tr|R2LRU7|R2LRU7_ENTFC Queuine tRNA-ribosyltransferase OS=Enterococcus faecium EnGen0191 OX=1157486 GN=tgt PE= 3 SV=1
MTQPAIRYRLIKKEKHTGARLGELITPHGTFPTPMFMPVGTLATVKTMSPEELKEMGAGVILSNTYHLWLRPGEDLVEEAGGLHKFMNWDQPILTDSGGFQVFSLSDMRNIEEEGVHFKNHLNGSRMFLSPEKAINIQNKLGSDIMMSFDECPPFDESYDYVKKSVERTSRWAERGLKAHANPDRQGLFGIIQGAGFEDLRRQSAKDLVGMDFPGYSIGGLSVGEPKSEMNRVLEFTTPLIPENKPRYLMGVGAADSLIDGVIRGVDMFDCVLPTRIARNGTCMTSQGRLVVKNAKYAHDFRPIDEKCDCYTCKNYTRAYIRHLIKCDETFGIRLTSYHNLYFLLNLMKQVRQAIMDDNLLEFREAFFEEYGFNKENAKSF

SEQ ID NO: 54998 - protein, 381 aa, Enterococcus florum
  misc_feature (1)..(381): tr|A0A4P5P8I6|A0A4P5P8I6_9ENTE Queuine tRNA-ribosyltran sferase OS=Enterococcus florum OX=2480627 GN=tgt PE=3 S V=1
MTQPAISYRLIKKEKHTGARLGEIITPHGTFPTPMFMPVGTLATVKTMAPEELKEMGAGIILSNTYHLWLRPGEDLVAEAGGLHKFMNWDQPILTDSGGFQVFSLADMRNIVEEGVHFKNHLNGSKMFLSPEKAIDIQNKLGSDIMMSFDECPPFDESYDYVKKSVERTSRWAERGLKAHANPDSQGLFGIIQGAGFEDLRRQSAKDLVSMDFPGYSIGGLSVGEPKEEMNRVLEFTTPLIPENKPRYLMGVGAADSLIDGVIRGVDMFDCVLPTRIARNGTTMTSQGRLVVKNAKFAHDFRPLDEKCDCYTCRNYSRAYIRHLIHCDETFGIRLTSYHNLYFLINLMKQVRQAIMDDNLLEFRQAFFEEYGFNKENAKSF

SEQ ID NO: 54999 - protein, 381 aa, Enterococcus gallinarum
  misc_feature (1)..(381): tr|C9A2I1|C9A2I1_ENTGE Queuine tRNA-ribosyltransferase OS=Enterococcus gallinarum (strain EG2) OX=565653 GN=tg t PE=3 SV=1
MSQPAIRYRLIKKEKHTGARLGELITPHGTFPTPMFMPVGTLATVKTLAPEELKAMGAGVILSNTYHLWLRPGEDLVAEAGGLHKFMNWDQPILTDSGGFQVFSLADMRNIVEEGVHFKNHLNGSKMFLSPEKAIDIQNKLGSDTMMSFDECPPFDESYEYVKKSVERTSRWAERGLKAHANPDSQGLFGIIQGAGFEDLRKQSAQDLISMDFPGYSIGGLSVGEPKAEMNRVLEFTTPWIPDHKPRYLMGVGAADSLIDGVIRGVDMFDCVLPTRIARNGTCMTSKGRLVVKNAQFARDFRPIDENCDCYTCKNYSRAYIRHLIKCDETFGIRLTSYHNVYFLLNLMKQVRQAIMDDNLLEFRQHFFEEYGFNKENAKNF

SEQ ID NO: 55000 - protein, 381 aa, Enterococcus gallinarum; identical to SEQ ID NO: 54985
  misc_feature (1)..(381): tr|A0A0X8PP41|A0A0X8PP41_ENTGA Queuine tRNA-ribosyltran sferase OS=Enterococcus gallinarum OX=1353 GN=tgt PE=3 SV=1

SEQ ID NO: 55001 - protein, 381 aa, Enterococcus gilvus
  misc_feature (1)..(381): tr|R2V7L1|R2V7L1_9ENTE Queuine tRNA-ribosyltransferase OS=Enterococcus gilvus ATCC BAA-350 OX=1158614 GN=tgt P E=3 SV=1
MTEPAISYRLIKKEKHTGARLGEIITPHGTFPTPMFMPVGTLATVKTMSPEDLKEMGASIILSNTYHLWLRPGEDLVAEAGGLHKFMNWDQPILTDSGGFQVFSLADMRNIVEEGVHFKNHLNGSKMFLSPEKAIDIQNKLGSDIMMSFDECPPFDESYDYVKKSVERTSRWAERGLKAHANPATQGLFGIIQGAGFEDLRRQSAKDLVSMDFPGYSIGGLSVGEPKEEMNRVLEFTTPLIPENKPRYLMGVGAADSLIDGVIRGVDMFDCVLPTRIARNGTCMTSGGRLVVKNAKYAHDFRPLDEKCDCYTCRNYTRAYIRHLIHCDETFGIRLTSYHNLYFLINLMKQVRQAIMDDNLLEFRQAFFEEYGFNKQNAKSF

SEQ ID NO: 55002 - protein, 381 aa, Enterococcus gilvus
  misc_feature (1)..(381): tr|A0A345FVF2|A0A345FVF2_9ENTE Queuine tRNA-ribosyltran sferase OS=Enterococcus gilvus OX=160453 GN=tgt PE=3 SV =1
MTEPAISYRLIKKEKHTGARLGEIITPHGTFPTPMFMPVGTLATVKTMSPEDLKEMGAGIILSNTYHLWLRPGEDLVAEAGGLHKFMNWDQPILTDSGGFQVFSLADMRNIVEEGVHFKNHLNGSKMFLSPEKAIDIQNKLGSDIMMSFDECPPFDESYDYVKKSVERTSRWAERGLKAHANPATQGLFGIIQGAGFEDLRRQSAKDLVSMDFPGYSIGGLSVGEPKEEMNRVLEFTTPLIPENKPRYLMGVGAADSLIDGVIRGVDMFDCVLPTRIARNGTCMTSGGRLVVKNAKYAHDFRPLDEKCDCYTCRNYTRAYIRHLIHCDETFGIRLTSYHNLYFLINLMKQVRQAIMDDNLLEFRQAFFEEYGFNKQNAKSF

SEQ ID NO: 55003 - protein, 381 aa, Enterococcus haemoperoxidus
  misc_feature (1)..(381): tr|R2SYZ3|R2SYZ3_9ENTE Queuine tRNA-ribosyltransferase OS=Enterococcus haemoperoxidus ATCC BAA-382 OX=1158608 GN=tgt PE=3 SV=1
MTEPAIRYRLIKKEKHTGARLGEIITPHGTFPTPMFMPVGTLATVKTMSPEDLKEMGAGVILSNTYHLWLRPGDDLIAEAGGLHKFMNWDQPILTDSGGFQVFSLSDMRKITEEGVHFRHHLNGSKLFLSPEKAINIQNNLGSDIMMSFDECPPFDESYDYVKKSIERTSRWAERGLKAHANPDRQGLFGIIQGAGFEDLRRQSAKDLISMDFPGYSIGGLSVGEPKAEMNRVLDFTTPLIPDNKPRYLMGVGTADSLIDGVIRGIDMFDCVLPTRIARNGTCMTSKGRLVVKNAQYARDFRPLDEKCDCYTCKNYTRAYIRHLIKADETFGIRLTSYHNLYFLLNLMKQVRQAIMDDNLLEFRQAFFEEYGFNKENPKSF

SEQ ID NO: 55004 - protein, 381 aa, Enterococcus hermanniensis
  misc_feature (1)..(381): tr|A0A1L8TNE2|A0A1L8TNE2_9ENTE Queuine tRNA-ribosyltran sferase OS=Enterococcus hermanniensis OX=249189 GN=tgt PE=3 SV=1
MTEPAISYRLIKKEKHTGARLGEIITPHGTFPTPMFMPVGTLATVKTMSPEELKAMGAGIILSNTYHLWLRPGEDLVAEAGGLHKFMNWDQPILTDSGGFQVFSLADMRNIVEEGVHFKNHLNGSKMFLSPEKAIDIQNKLGSDIMMSFDECPPFDESYDYVKKSVERTSRWAERGLKAHANPSTQGLFGIIQGAGFEDLRRQSAKELVSMDFPGYSIGGLSVGEPKEEMNRVLEFTTPLIPENKPRYLMGVGAADSLIDGVIRGVDMFDCVLPTRIARNGTCMTSAGRLVVKNAKYAHDFRPLDEKCDCYTCKNYTRAYIRHLIHCDETFGIRLTSYHNLHFLINLMKQVRQAIMDDNLLEFRQAFFEEYGFNKQNAKSF

SEQ ID NO: 55005 - protein, 381 aa, Enterococcus hirae
  misc_feature (1)..(381): tr|A0A4V0CD04|A0A4V0CD04_ENTHR Queuine tRNA-ribosyltran sferase OS=Enterococcus hirae OX=1354 GN=tgt PE=3 SV=1
MTQPAIRYRLIKKEKHTGARLGELITPHGTFPTPMFMPVGTLATVKTMSPEELKAMGAGVILSNTYHLWLRPGEDLVEEAGGLHKFMNWDQPILTDSGGFQVFSLSDMRNIEEEGVHFKNHLNGSRMFLSPEKAINIQNKLGSDIMMSFDECPPFDESYDYVKKSVERTSRWAERGLKAHLNPDRQGLFGIIQGAGFEDLRRQSAKDLISMDFPGYSIGGLSVGEPKSEMNRVLEFTTPLIPEDKPRYLMGVGAADSLIDGVIRGVDMFDCVLPTRIARNGTCMTSQGRLVVKNAQYAHDFRPIDEKCDCYTCKNYTRAYIRHLIKCDETFGIRLTSYHNLYFLLNLMKQVRQAIMDDHLLEFRAAFFEEYGFNKENAKSF

SEQ ID NO: 55006 - protein, 381 aa, Enterococcus hirae
  misc_feature (1)..(381): tr|A0A1V8XAN0|A0A1V8XAN0_ENTHR Queuine tRNA-ribosyltran sferase OS=Enterococcus hirae OX=1354 GN=tgt PE=3 SV=1
MTQPAIRYRLIKKEKHTGARLGELITPHGTFPTPMFMPVGTLATVKTMSPEELKAMGAGVILSNTYHLWLRPGEDLVEEAGGLHKFMNWDQPILTDSGGFQVFSLSDMRNIEEEGVHFKNHLNGSRMFLSPEKAINIQNKLGSDIMMSFDECPPFDESYDYVKKSVERTSRWAERGLKAHLNPDRQGLFGIIQGAGFEDLRRQSAKDLISMDFPGYSIGGLSVGEPKSEMNRVLEFTTPLIPEDKPRYLMGVGAADSLIDGVIRGVDMFDCVLPTRIARNGTCMTSQGRLVVKNAQYAHDFRPIDEKCDCYTCKNYTRAYIRHLIKCDETFGIRLTSYHNLYFLLNLMKQVRQAIMDDNLLEFRAAFFEEYGFNKENAKSF

SEQ ID NO: 55007 - protein, 381 aa, Enterococcus italicus
  misc_feature (1)..(381): tr|E6LID1|E6LID1_ENTI1 Queuine tRNA-ribosyltransferase OS=Enterococcus italicus (strain DSM 15952 / LMG 22039 / TP 1.5) OX=888064 GN=tgt PE=3 SV=1
MSQPAIRYRLIKKEKHTGARLGELITPHGTFPTPMFMPVGTLATVKTIAPEELKQMGAGVILSNTYHLWLRPGEDIVEEAGGLHKFMNWDQPILTDSGGFQVFSLADMRNIEEEGVHFRNHLNGSKLFLSPEKAINIQNKLGSDIMMSFDECPPFDESYDYVKKSVERTSRWAARGLEAHLHPDRQGLFGIIQGAGFEELRRQSAKDLISMDFPGYSIGGLSVGEPKSEMNRVLEFTTPLIPEDKPRYLMGVGAADSLIDGVIRGVDMFDCVLPTRIARNGTCMTSKGRLVVKNAQYARDFRPIDENCDCYTCKNYSRAYVRHLIKCDETFGMRLTSYHNLYFLLNLMRQVRQAIMDDNLLEFRQHFFEEYGFNKENAKNF

SEQ ID NO: 55008 - protein, 381 aa, Enterococcus malodoratus
  misc_feature (1)..(381): tr|R2R960|R2R960_9ENTE Queuine tRNA-ribosyltransferase OS=Enterococcus malodoratus ATCC 43197 OX=1158601 GN=tg t PE=3 SV=1
MTEPAISYRLIKKEKHTGARLGEIITPHGTFPTPMFMPVGTLATVKTMSPEDLKEMGAGIILSNTYHLWLRPGEDLVAEAGGLHKFMNWDQPILTDSGGFQVFSLADMRNIVEEGVHFKNHLNGSKMFLSPEKAIDIQNKLGSDIMMSFDECPPFDESYDYVKKSVERTSRWAERGLNAHANPATQGLFGIIQGAGFEDLRRQSAKDLVSMDFPGYSIGGLSVGEPKEEMNRVLEFTTPLIPENKPRYLMGVGAADSLIDGVIRGVDMFDCVLPTRIARNGTCMTSAGRLVVKNAKYAHDFRPLDEKCDCYTCRNYTRAYIRHLIHCDETFGIRLTSYHNLYFLINLMKQVRQAIMDDNLLEFRQAFFEEYGFNKQNAKSF

SEQ ID NO: 55009 - protein, 381 aa, Enterococcus moraviensis
  misc_feature (1)..(381): tr|R2RBP9|R2RBP9_9ENTE Queuine tRNA-ribosyltransferase OS=Enterococcus moraviensis ATCC BAA-383 OX=1158609 GN= tgt PE=3 SV=1
MTEPAIRYRLIKKEKHTGARLGEIITPHGTFPTPMFMPVGTLATVKTMSPEDLKEMGAGVILSNTYHLWLRPGDDLIAEAGGLHKFMNWDQPILTDSGGFQVFSLSDMRKITEEGVHFRHHLNGSKLFLSPEKAINIQNNLGSDIMMSFDECPPFDESYDYVKKSIERTSRWAERGLKAHANPDRQGLFGIIQGAGFEDLRHQSAKDLISMDFPGYSIGGLSVGEPKAEMNRVLDFTTPLIPDNKPRYLMGVGTADSLIDGVIRGIDMFDCVLPTRIARNGTCMTSKGRLVVKNAQYARDFRPLDEKCDCYTCKNYTRAYIRHLIKADETFGIRLTSYHNLYFLLNLMKQVRQAIMDDNLLEFRQAFFEEYGFNKENAKSF

SEQ ID NO: 55010 - protein, 381 aa, Enterococcus mundtii
  misc_feature (1)..(381): tr|A0A022N8Q7|A0A022N8Q7_ENTMU Queuine tRNA-ribosyltran sferase OS=Enterococcus mundtii CRL35 OX=1450511 GN=tgt PE=3 SV=1
MTEPAIRYRLIKKEKHTGARLGELITPHGTFPTPMFMPVGTLATVKTMSPEELKEMGAGVILSNTYHLWLRPGEDLVEEAGGLHKFMNWDQPILTDSGGFQVFSLSDMRNIVEEGVHFKNHLNGSKMFLSPEKAINIQNKLGSDIMMSFDECPPFDESYDYVKKSVERTSRWAERGLKAHANPDRQGLFGIIQGAGFEDLRKQSAKDLISMDFPGYSIGGLSVGEPKAEMNRVLEFTTPLIPDHKPRYLMGVGAADSLIDGVIRGVDMFDCVLPTRIARNGTCMTSQGRLVVKNAQYARDFRPIDEKCDCYTCKNYTRAYIRHLIKCDETFGIRLTSYHNLYFLLNLMKQVRQAIMDDNLLEFRAAFFEEYGFNKENAKSF

SEQ ID NO: 55011 - protein, 381 aa, Enterococcus mundtii; identical to SEQ ID NO: 55010
  misc_feature (1)..(381): tr|V5XM99|V5XM99_ENTMU Queuine tRNA-ribosyltransferase OS=Enterococcus mundtii QU 25 OX=1300150 GN=tgt PE=3 SV =1

SEQ ID NO: 55012 - protein, 381 aa, Enterococcus pallens
  misc_feature (1)..(381): tr|R2SQ49|R2SQ49_9ENTE Queuine tRNA-ribosyltransferase OS=Enterococcus pallens ATCC BAA-351 OX=1158607 GN=tgt PE=3 SV=1
MTQPAISYRLIKKEKHTGARLGEIITPHGTFPTPMFMPVGTLATVKTMSPEELKEMGAGIILSNTYHLWLRPGEDLVAEAGGLHKFMNWDQPILTDSGGFQVFSLADMRNIVEEGVHFKNHLNGSKMFLSPEKAIDIQNKLGSDIMMSFDECPPFDESYDYVKKSVERTSRWAERGLKAHANPDTQGLFGIIQGAGFEDLRRQSAKDLVSMDFPGYSIGGLSVGEPKAEMNRVLEFTTPLIPENKPRYLMGVGAADSLIDGVIRGVDMFDCVLPTRIARNGTTMTSQGRLVVKNAKFAHDFRPLDENCDCYTCRNYSRAYIRHLIHCDETFGIRLTSYHNLYFLINLMKQVRQAIMDDNLLEFREAFFEAYGFNKENAKSF

SEQ ID NO: 55013 - protein, 381 aa, Enterococcus phoeniculicola
  misc_feature (1)..(381): tr|R3TM85|R3TM85_9ENTE Queuine tRNA-ribosyltransferase OS=Enterococcus phoeniculicola ATCC BAA-412 OX=1158610 GN=tgt PE=3 SV=1
MSQPAIRYRLIKKEKHTGARLGEIITPHGTFPTPMFMPVGTLATVKTMSPEELKEMGAGIILSNTYHLWLRPGEDLVEEAGGLHKFMNWDQPILTDSGGFQVFSLSDMRNIVEEGVHFKNHLNGSKMFLSPEKAIMIQNKLGSDIMMSFDECPPFDESYDYVKKSVERTSRWAQRGLDAHANPDRQGLFGIIQGAGFEDLRRQSASDLVSMDFPGYSIGGLSVGESKEEMNRVLDFTTPLIPENKPRYLMGVGAADSLIDGVIRGVDMFDCVLPTRIARNGTCMTSQGRLVVKNAQYAHDFRPIDEKCDCYTCKNYTRAYIRHLIKCDETFGIRLTSYHNLHFLLNLMKQVRQAIMDDNLLEFRQAFFEEYGFNKENAKSF

SEQ ID NO: 55014 - protein, 381 aa, Enterococcus plantarum
  misc_feature (1)..(381): tr|A0A2W4BFU2|A0A2W4BFU2_9ENTE Queuine tRNA-ribosyltran sferase OS=Enterococcus plantarum OX=1077675 GN=tgt PE= 3 SV=1
MTEPAIRYRLIKKEKHTGARLGEIITPHGTFPTPMFMPVGTLATVKTMSPEDLKEMGAGVILSNTYHLWLRPGDDLIAEAGGLHKFMNWDQPILTDSGGFQVFSLSDMRKITEEGVHFRHHLNGSKLFLSPEKAINIQNNLGSDIMMSFDECPPFDESYEYVKKSIERTSRWAERGLKAHANPDRQGLFGIIQGAGFEDLRRQSAKELISMDFPGYSIGGLSVGEPKAEMNRVLDFTTPLIPDNKPRYLMGVGTADSLIDGVIRGIDMFDCVLPTRIARNGTCMTSKGRLVVKNAQYARDFRPLDEKCDCYTCKNYTRAYIRHLIKADETFGIRLTSYHNLYFLLNLMKQVRQAIMDDNLLEFREAFFEEYGFNKENAKSF

SEQ ID NO: 55015 - protein, 381 aa, Enterococcus pseudoavium
  misc_feature (1)..(381): tr|A0A3D9A1E5|A0A3D9A1E5_9ENTE Queuine tRNA-ribosyltran sferase OS=Enterococcus pseudoavium OX=44007 GN=tgt PE= 3 SV=1
MTEPAISYRLIKKEKHTGARLGEIITPHGTFPTPMFMPVGTLATVKTMSPEELKEMGAGIILSNTYHLWLRPGEDLVAEAGGLHKFMNWDQPILTDSGGFQVFSLADMRNIVEEGVHFKNHLNGSKMFLSPEKAIDIQNKLGSDIMMSFDECPPFDESYDYVKKSVERTSRWAERGLKAHANPATQGLFGIIQGAGFEDLRRQSAKDLVSMDFPGYSIGGLSVGEPKEEMNRVLEFTTPLIPENKPRYLMGVGAADSLIDGVIRGVDMFDCVLPTRIARNGTCMTSAGRLVVKNAKYAHDFRPLDEKCDCYTCRNYTRAYIRHLIHCDETFGIRLTSYHNLYFLINLMKQVRQAIMDDNLLEFRQAFFEEYGFNKQNAKSF

SEQ ID NO: 55016 - protein, 381 aa, Enterococcus quebecensis; identical to SEQ ID NO: 54981
  misc_feature (1)..(381): tr|A0A1E5GWC9|A0A1E5GWC9_9ENTE Queuine tRNA-ribosyltran sferase OS=Enterococcus quebecensis OX=903983 GN=tgt PE =3 SV=1

SEQ ID NO: 55017 - protein, 381 aa, Enterococcus raffinosus; identical to SEQ ID NO: 55015
  misc_feature (1)..(381): tr|R2RDU7|R2RDU7_9ENTE Queuine tRNA-ribosyltransferase OS=Enterococcus raffinosus ATCC 49464 OX=1158602 GN=tgt PE=3 SV=1

SEQ ID NO: 55018 - protein, 381 aa, Enterococcus raffinosus; identical to SEQ ID NO: 55015
  misc_feature (1)..(381): tr|A0A1L8X522|A0A1L8X522_9ENTE Queuine tRNA-ribosyltran sferase OS=Enterococcus raffinosus OX=71452 GN=tgt PE=3 SV=1

SEQ ID NO: 55019 - protein, 381 aa, Enterococcus ratti
  misc_feature (1)..(381): tr|A0A1L8WKX3|A0A1L8WKX3_9ENTE Queuine tRNA-ribosyltran sferase OS=Enterococcus ratti OX=150033 GN=tgt PE=3 SV= 1
MSQPAIRYRLIKKEKHTGARLGELITPHGTFPTPMFMPVGTLATVKTLSPEELKAMGAGVILSNTYHLWLRPGEDLVAEAGGLHKFMNWDQPILTDSGGFQVFSLSDMRNIEEEGVHFKNHLNGSKMFLSPEKAIAIQNKLGSDIMMSFDECPPFNESYAYVKKSVERTSRWAERGLNAHANPYHQGLFGIIQGAGFEDLRRQSAQDLVAMDFPGYSIGGLSVGEPKAEMNRVLEFTTPLIPENKPRYLMGVGAADSLIDGVIRGVDMFDCVLPTRIARNGTCMTSQGRLVVKNAQYAHDFRPIDEKCDCYTCKNYTRAYIRHLIKCDETFGIRLTSYHNLYFLLNLMKQVRQAIMDDHLLEFRTAFFEEYGFNKENAKSF

SEQ ID NO: 55020 - protein, 381 aa, Enterococcus rivorum
  misc_feature (1)..(381): tr|A0A1E5L167|A0A1E5L167_9ENTE Queuine tRNA-ribosyltran sferase OS=Enterococcus rivorum OX=762845 GN=tgt PE=3 S V=1
MTQPAIRYRLIKKEKHTGARLGEIITPHGTFPTPMFMPVGTLATVKTMSPEELKEMGSGIILSNTYHLWLRPGEDLIEEAGGLHKFMNWDQPILTDSGGFQVFSLSDMRKIEEEGVHFRNHLNGSKMFLSPEKAINIQNKLGSDIMMSFDECPPFNESYDYVKRSIERTSRWAERGLKAHANPDRQGLFGIVQGAGFEDLRRQSAKDLVSMDFPGYSIGGLSVGESKEEMNRVLDFTTPLIPENKPRYLMGVGAADSLIDGVIRGVDMFDCVLPTRIARNGTCMTSQGRLVVKNAQYARDFRPLDEKCDCYTCKNYSRAYIRHLIKCDETFGIRLTSYHNLYFLLNLMKQVRQAIMDDNLLEFRQAFFEEYGFNKENAKSF

SEQ ID NO: 55021 - protein, 381 aa, Enterococcus rotai; identical to SEQ ID NO: 54981
  misc_feature (1)..(381): tr|A0A0U2XIU3|A0A0U2XIU3_9ENTE Queuine tRNA-ribosyltran sferase OS=Enterococcus rotai OX=118060 GN=tgt PE=3 SV= 1

SEQ ID NO: 55022 - protein, 381 aa, Enterococcus saccharolyticus
  misc_feature (1)..(381): tr|S0NFU0|S0NFU0_9ENTE Queuine tRNA-ribosyltransferase OS=Enterococcus saccharolyticus subsp. saccharolyticus ATCC 43076 OX=1139996 GN=tgt PE=3 SV=1
MSEPAIRYRLIKKEKYTGARLGELITPHGTFPTPMFMPVGTLATVKTIAPEELKAMGAGVILSNTYHLWLRPGEDIVAEAGGLHKFMNWDQPILTDSGGFQVFSLADMRNIVEEGVHFKNHLNGSPLFLSPEKAIDIQNKLGSDIMMSFDECPPFDESYDYVKSSVERTSRWAERGLKAHANPDRQGLFGIIQGAGFEDLRRQSAHDLISMDFPGYSIGGLSVGEPKAEMNRVLEFTTPLIPENKPRYLMGVGTPDSLIDGVIRGIDMFDCVLPTRIARNGTCMTSKGRLVVKNAQFARDYRPIDENCDCYTCRNYSRAYIRHLIKCDETFGIRLTSYHNLYFLLNMMKQVRQAIMDDNLLEFRQHFFEEYGFNKENAKNF

SEQ ID NO: 55023 - protein, 381 aa, Enterococcus saccharolyticus
  misc_feature (1)..(381): tr|A0A449EWN6|A0A449EWN6_9ENTE Queuine tRNA-ribosyltran sferase OS=Enterococcus saccharolyticus OX=41997 GN=tgt PE=3 SV=1
MSQPAIRYRLIKKEKHTGARLGELITPHGTFPTPMFMPVGTLATVKTLAPEELKAMGAGVILSNTYHLWLRPGEDLVAEAGGLHKFMNWDQPILTDSGGFQVFSLADMRNIVEEGVHFKNHLNGSKMFLSPEKAIDIQNKLGSDIMMSFDECPPFDESYEYVKKSVERTSRWAERGLKAHANPDSQGLFGIIQGAGFEDLRKQSAQDLISMDFPGYSIGGLSVGEPKAEMNRVLEFTTPWIPDHKPRYLMGVGAADSLIDGVIRGVDMFDCVLPTRIARNGTCMTSKGRLVVKNAQFARDFRPIDENCDCYTCKNYSRAYIRHLIKCDETFGIRLTSYHNVYFLLNLMKQVRQAIMDDNLLEFRQHFFEEYGFNKENAKNF

SEQ ID NO: 55024 - protein, 381 aa, Enterococcus silesiacus; identical to SEQ ID NO: 54981
  misc_feature (1)..(381): tr|A0A0S3KFB5|A0A0S3KFB5_9ENTE Queuine tRNA-ribosyltran sferase OS=Enterococcus silesiacus OX=332949 GN=tgt PE= 3 SV=1

SEQ ID NO: 55025 - protein, 381 aa, Enterococcus sp.
  misc_feature (1)..(381): tr|A0A242AZT8|A0A242AZT8_9ENTE Queuine tRNA-ribosyltran sferase OS=Enterococcus sp. 7F3_DIV0205 OX=1834189 GN=t gt PE=3 SV=1
MTEAAIRYRLIKKEKHTGARLGEIITPHGTFPTPMFMPVGTLATVKTMSPEDLKEMGAGVILSNTYHLWLRPGDDLIAEAGGLHKFMNWDQPILTDSGGFQVFSLSDMRKITEEGVHFRHHLNGSKLFLSPEKAINIQNNLGSDIMMSFDECPPFDESYDYVKKSIERTSRWAERGLKAHANPDRQGLFGIIQGAGFEDLRRQSAKDLISMDFPGYSIGGLSVGEPKAEMNRVLDFTTPLIPDNKPRYLMGVGTADSLIDGVIRGIDMFDCVLPTRIARNGTCMTSKGRLVVKNAQYARDFRPLDEKCDCYTCKNYTRAYIRHLIKADETFGIRLTSYHNLYFLLNLMKQVRQAIMDDNLLEFRQAFFEEYGFNKENAKSF

SEQ ID NO: 55026 - protein, 381 aa, Enterococcus sp.
  misc_feature (1)..(381): tr|A0A291DMY9|A0A291DMY9_9ENTE Queuine tRNA-ribosyltran sferase OS=Enterococcus sp. FDAARGOS_375 OX=2060307 GN= tgt PE=3 SV=1
MTEPAIRYRLIKKEKHTGARLGELITPHGTFPTPMFMPVGTLATVKTLAPEELKEMGAGVILSNTYHLWLRPGEDIVAEAGGLHKFMNWDQPILTDSGGFQVFSLAEMRNIVEEGVHFKNHLNGSKMFLSPEKAIDIQNKLGSDIMMSFDECPPFDESYDYVKKSVERTSRWAERGLKAHANPDRQGLFGIIQGAGFEDLRKQSAQDLISMDFPGYSIGGLSVGEPKAEMNRVLEFTTPCIPENKPRYLMGVGAADSLIDGVIRGVDMFDCVLPTRIARNGTCMTSKGRLVVKNAQYARDFRPIDEKCDCYTCKNYSRAYIRHLIKCDETFGMRLTSYHNVYFLLNLMKNVRQAIMDDNLLEFREHFIEEYGFNKENARNF

SEQ ID NO: 55027 - protein, 381 aa, Enterococcus sulfureus
  misc_feature (1)..(381): tr|S0PBD8|S0PBD8_9ENTE Queuine tRNA-ribosyltransferase OS=Enterococcus sulfureus ATCC 49903 OX=1140003 GN=tgt PE=3 SV=1
MSQPAIRYRLIKKEKHTGARLGEIITPHGTFPTPMFMPVGTLATVKTIAPEELKQMGAGIILSNTYHLWLRPGEDLVEEAGGLHKFMNWDQPILTDSGGFQVFSLADMRNIEEEGVHFKNHLNGSPLFLSPEKAINIQNKLGSDIMMSFDECPPFDESYDYVKKSVERTSRWAERGLKAHANPDRQGLFGIIQGAGFEDLRRQSAKDLISMDFPGYSIGGLSVGEPKSEMNRVLDFTTPLIPDNKPRYLMGVGTPDSLIDGVMRGIDMFDCVLPTRIARNGTCMTSQGRLVVKNAQYARDFRPLDEKCDCYTCKNYSRAYIRHLIKCDETFGIRLTSYHNLHFLLNVMKQVRQAIMDDNLLEFRQAFFEEYGFNKENAKNF

SEQ ID NO: 55028 - protein, 381 aa, Enterococcus termitis
  misc_feature (1)..(381): tr|A0A242LEX9|A0A242LEX9_9ENTE Queuine tRNA-ribosyltran sferase OS=Enterococcus termitis OX=332950 GN=tgt PE=3 SV=1
MTEPAIRYRLIKKEKHTGARLGEIITPHGTFPTPMFMPVGTLATVKTMSPEDLKEMGAGVILSNTYHLWLRPGDDLIAEAGGLHKFMNWDQPILTDSGGFQVFSLSDMRKITEEGVHFRHHLNGSKLFLSPEKAINIQNNLGSDIMMSFDECPPFDESYDYVKKSIERTSRWAERGLKAHANPDRQGLFGIIQGAGYEDLRRQSAKDLISMDFPGYSIGGLSVGEPKAEMNRVLDFTTPLIPDNKPRYLMGVGTADSLIDGVIRGIDMFDCVLPTRIARNGTCMTSKGRLVVKNAQYARDFRPLDEKCDCYTCKNYTRAYIRHLIKADETFGIRLTSYHNLYFLLNLMKQVRQAIMDDNLLEFRQDFFEEYGFNKENAKSF

SEQ ID NO: 55029 - protein, 381 aa, Enterococcus termitis
  misc_feature (1)..(381): tr|A0A1E5GCI9|A0A1E5GCI9_9ENTE Queuine tRNA-ribosyltran sferase OS=Enterococcus termitis OX=332950 GN=tgt PE=3 SV=1
MTEPAIRYRLIKKEKHTGARLGELITPHGTFPTPMFMPVGTLATVKTMSPEDLKEIGAGVILSNTYHLWLRPGDDLIAEAGGLHKFMNWDQPILTDSGGFQVFSLSDMRKITEEGVHFRHHLNGSKLFLSPEKAINIQNNLGSDIMMSFDECPPFDESYDYVKKSIERTSRWAERGLKAHANPDRQGLFGIIQGAGFEDLRRQSAKDLISMDFPGYSIGGLSVGEPKAEMNRVLDFTTPLIPDNKPRYLMGVGTADSLIDGVIRGIDMFDCVLPTRIARNGTCMTSKGRLVVKNAQYARDFRPLDEKCDCYTCKNYTRAYIRHLIKADETFGIRLTSYHNLYFLLNLMKQVRQAIMDDNLLEFREAFFEEYGFNKENAKSF

SEQ ID NO: 55030 - protein, 381 aa, Enterococcus thailandicus
  misc_feature (1)..(381): tr|A0A249SG16|A0A249SG16_ENTTH Queuine tRNA-ribosyltran sferase OS=Enterococcus thailandicus OX=417368 GN=tgt P E=3 SV=1
MSQPAIRYRLIKKEKHTGARLGEIITPHGTFPTPMFMPVGTLATVKTMSPEELKEMGAGIILSNTYHLWLRPGEDLVAEAGGLHKFMNWDQPILTDSGGFQVFSLSDMRNIEEEGVHFKNHLNGSRMFLSPEKAIDIQNKLGSDIMMSFDECPPFDESYDYVKKSVERTSRWAERGLKAHANPATQGLFGIIQGAGFEDLRRQSVKDLVSMDFPGYSIGGLSVGEPKADMNRVLEFTTPLIPEDKPRYLMGVGAADSLIDGVIRGVDMFDCVLPTRIARNGTCMTSQGRLVVKNAKYAHDFRPIDEKCDCYTCKNYTRAYIRHLIKCDETFGIRLTSYHNLYFLLNLMKQVRQAIMDDNLLEFRAAFFEEYGFNKENAKSF

SEQ ID NO: 55031 - protein, 381 aa, Enterococcus thailandicus
  misc_feature (1)..(381): tr|A0A179ES40|A0A179ES40_ENTTH Queuine tRNA-ribosyltran sferase OS=Enterococcus thailandicus OX=417368 GN=tgt P E=3 SV=1
MSQPAIRYRLIKKEKHTGARLGEIITPHGTFPTPMFMPVGTLATVKTMSPEELKEMGAGIILSNTYHLWLRPGEDLVAEAGGLHKFMNWDQPILTDSGGFQVFSLSDMRNIEEEGVHFKNHLNGSRMFLSPEKAIDIQNKLGSDIMMSFDECPPFDESYDYVKKSVERTSRWAERGLKAHANPATQGLFGIIQGAGFEDLRRQSAKDLVSMDFPGYSIGGLSVGEPKADMNRVLEFTTPLIPEDKPRYLMGVGAADSLIDGVIRGVDMFDCVLPTRIARNGTCMTSQGRLVVKNAKYAHDFRPIDEKCDCYTCKNYTRAYIRHLIKCDETFGIRLTSYHNLYFLLNLMKQVRQAIMDDNLLEFRAAFFEEYGFNKENAKSF

SEQ ID NO: 55032 - protein, 381 aa, Enterococcus ureasiticus
  misc_feature (1)..(381): tr|A0A1E5GFS5|A0A1E5GFS5_9ENTE Queuine tRNA-ribosyltran sferase OS=Enterococcus ureasiticus OX=903984 GN=tgt PE =3 SV=1
MTEPAIRYRLIKKEKHTGARLGEIITPHGTFPTPMFMPVGTLATVKTMSPEDLKEMGAGVILSNTYHLWLRPGDDLIAEAGGLHKFMNWDQPILTDSGGFQVFSLSDMRKITEEGVHFRHHLNGSKLFLSPEKAINIQNNLGSDIMMSFDECPPFDESYDYVKKSIERTSRWAERGLKAHANPDRQGLFGIIQGAGYEDLRRQSAKDLISMDFPGYSIGGLSVGEPKAEMNRVLDFTTPLIPDNKPRYLMGVGTADSLIDGVIRGIDMFDCVLPTRIARNGTCMTSKGRLVVKNAQYARDFRPLDEKCDCYTCKNYTRAYIRHLIKADETFGIRLTSYHNLYFLLNLMKQVRQAIMDDNLLEFRQAFFEEYGFNKENAKSF

SEQ ID NO: 55033 - protein, 381 aa, Enterococcus ureilyticus
  misc_feature (1)..(381): tr|A0A1E5HFN7|A0A1E5HFN7_9ENTE Queuine tRNA-ribosyltran sferase OS=Enterococcus ureilyticus OX=1131292 GN=tgt P E=3 SV=1
MTEPAIRYRLIKKEKHTGARLGEIITPHGTFPTPMFMPVGTLATVKTMSPEDLKEMGAGVILSNTYHLWLRPGDDLIAEAGGLHKFMNWDQPILTDSGGFQVFSLSDMRKITEEGVHFRHHLNGSKLFLSPEKAINIQNNLGSDIMMSFDECPPFDESYDYVKKSIERTSRWAERGLKAHANPDRQGLFGIIQGAGFEDLRRQSAKDLISMDFPGYSIGGLSVGEPKAEMNRVLDFTTPLIPDNKPRYLMGVGTADSLIDGVIRGIDMFDCVLPTRIARNGTCMTSKGRLVVKNAQYARDFRPLDEKCDCYTCKNYTRAYIRHLIKADETFGIRLTSYHNLYFLLNLMKQVRQAIMDDNLLEFREAFFEEYGFNKENAKSF

SEQ ID NO: 55034 - protein, 381 aa, Enterococcus villorum
  misc_feature (1)..(381): tr|A0A511J2K7|A0A511J2K7_9ENTE Queuine tRNA-ribosyltran sferase OS=Enterococcus villorum OX=112904 GN=tgt PE=3 SV=1
MSQPAIRYRLIKKEKHTGARLGELITPHGTFPTPMFMPVGTLATVKTMSPEELKAMGAGVILSNTYHLWLRPGEDLVEEAGGLHKFMNWDQPILTDSGGFQVFSLSDMRNIEEEGVHFKNHLNGSRMFLSPEKAINIQNKLGSDIMMSFDECPPFDESYDYVKKSVERTSRWADRGLKAHANPDRQGLFGIIQGAGFEDLRRQSAHDLVAMDFPGYSIGGLSVGEPKAEMNRVLEFTTPLIPENKPRYLMGVGAADSLIDGVIRGVDMFDCVLPTRIARNGTCMTSKGRLVVKNAQYAHDFRPIDEKCDCYTCRNYTRAYIRHLIKCDETFGIRLTSYHNLHFLLNLMKQVRQAIMDDHLLEFRAAFFEEYGFNKENAKSF

SEQ ID NO: 55035 - protein, 381 aa, Enterococcus villorum
  misc_feature (1)..(381): tr|A0A1V8YX44|A0A1V8YX44_9ENTE Queuine tRNA-ribosyltran sferase OS=Enterococcus villorum OX=112904 GN=tgt PE=3 SV=1
MSQPAIRYRLIKKEKHTGARLGELITPHGTFPTPMFMPVGTLATVKTMSPEELKAMGAGVILSNTYHLWLRPGEDLVEEAGGLHKFMNWDQPILTDSGGFQVFSLSDMRNIEEEGVHFKNHLNGSRMFLSPEKAINIQNKLGSDIMMSFDECPPFDESYDYVKKSVERTSRWADRGLKAHANPDRQGLFGIIQGAGFEDLRRQSAHDLVAMDFPGYSIGGLSVGEPKAEMNRVLEFTTPLIPENKPRYLMGVGAADSLIDGVIRGVDMFDCVLPTRIARNGTCMTSKGRLVVKNAQYAHDFRPIDEKCDCYTCKNYTRAYIRHLIKCDETFGIRLTSYHNLHFLLNLMKQVRQAIMDDHLLEFRAAFFEEYGFNKENAKSF

SEQ ID NO: 55036 - protein, 381 aa, Enterorhabdus caecimuris
  misc_feature (1)..(381): tr|A0A4S4G1X8|A0A4S4G1X8_9ACTN Queuine tRNA-ribosyltran sferase OS=Enterorhabdus caecimuris OX=671266 GN=tgt PE =3 SV=1
MALFDCTCEATSGHARALSYETAHGTFRTPMFMPVGTSATVKGVTTDQLRELGAQVVLANTYHLAMRPGADLVEEAGGIHRFMNYDGPMLTDSGGFQVFSLADTVKLSDDGVTFKSIYDGSNIHWTPEENMVIQQKIGADIAMQLDQCAPYPAERAFVAKAVDYSSAWARRCLAAHTRPDQTLFGIVQGGMHLDLRLESIRRLREIEDESLAAGHRRFGGFGIGGYSVGEDHEVMFETLGAVARACPEDRPRYLMGVGNPTTLVRAVREGVDMFDCVLPTRTARMGTAFSSAGRMNMRNAKFARDFTPLDPACDCPTCRNYTRAYLRHLVKQNEMLGAMLLSVHNLHFLLDLMRRAREAVLADAYEDFYRAWMDSPAAADY

SEQ ID NO: 55037 - protein, 381 aa, Enterorhabdus caecimuris
  misc_feature (1)..(381): tr|R9L1V9|R9L1V9_9ACTN Queuine tRNA-ribosyltransferase OS=Enterorhabdus caecimuris B7 OX=1235794 GN=tgt PE=3 S V=1
MALFDCTCEATSGHARALSYETAHGTFRTPMFMPVGTSATVKGVTTDQLRELGAQVVLANTYHLAMRPGADLVEEAGGIHRFMNYDGPMLTDSGGFQVFSLADTVKLSDDGVTFKSIYDGSNIHWTPEENMVIQQKIGADIAMQLDQCAPYPAERAFVAKAVDYSSAWARRCLAAHTRPDQTLFGIVQGGMHLDLRLESIRRLREIEDESLAAGHQRFGGFGIGGYSVGEDHEVMFETLGAVARACPEDRPRYLMGVGNPTTLVRAVREGVDMFDCVLPTRTARMGTAFSSTGRMNMRNAKFARDFTPLDPACTCPTCQNYTRAYLRHLVKQNEMLGAMLLSVHNLHFLLDLMRRAREAVLADAYEDFYRAWMASPAAADY

SEQ ID NO: 55038 - protein, 381 aa, Enterorhabdus sp.
  misc_feature (1)..(381): tr|A0A4S2FYH5|A0A4S2FYH5_9ACTN Queuine tRNA-ribosyltran sferase OS=Enterorhabdus sp. NM05_H27 OX=2516956 GN=tgt PE=3 SV=1
MALFDCTCEATSGHARALSYETAHGAFRTPMFMPVGTSATVKGVTTDQLRELGAQVVLANTYHLAMRPGADLVEEAGGIHRFMNYDGPMLTDSGGFQVFSLADTVKLSDDGVTFKSIYDGSNIHWTPEENMVIQQKIGADIAMQLDQCAPYPAERAFVAKAVDYSSAWARRCLAAHTRPDQTLFGIVQGGMHLDLRLESIRRLREIEDESLAAGHRRFGGFGIGGYSVGEDHEVMFETLGAVARACPEDRPRYLMGVGNPTTLVRAVREGVDMFDCVLPTRTARMGTAFSSTGRMNMRNAKFARDFTPLDPACTCPTCQNYTRAYLRHLVKQNEMLGAMLLSVHNLHFLLDLMRRAREAVLADAYEDFYRAWMDSPAAADY

SEQ ID NO: 55039 - protein, 381 aa, Enteroscipio rubneri
  misc_feature (1)..(381): tr|A0A2K2UF20|A0A2K2UF20_9ACTN Queuine tRNA-ribosyltran sferase OS=Enteroscipio rubneri OX=2070686 GN=tgt PE=3 SV=1
MALFDCACEATSGHARALSYETAHGTFHTPMFMPVGTSATVKGVTAGQLRDLNSQVVLANTYHLSLRPGADVVAEAGGVHRFMNYDGPMLTDSGGFQVFSLADTLKLDDDGLTFRSIYDGSKIRWTPESNMAIQEQLGADIAMQLDQCTPYPAEHAFVAKAVDLSSNWARRCLAAHVRPDQTLFGIVQGGMELDLRLESIRRLREIEEESLAAGGRRFGGFGIGGYSVGEDHEVMFETLGPVARACPEDRPRYLMGVGNPTTLVRAVREGVDMFDCVLPTRTARMGTAFSSTGRMNMRNAKFTRDFGPLDAACTCPTCRNHSRAYIRHLVKQNEMLGGILLSIHNLHYLIDLMRRVREAVLADAYEEFYAAWMASPAASDY

SEQ ID NO: 55040 - protein, 375 aa, Enterovibrio nigricans
  misc_feature (1)..(375): tr|A0A1T4URH7|A0A1T4URH7_9GAMM Queuine tRNA-ribosyltran sferase OS=Enterovibrio nigricans DSM 22720 OX=1121868 GN=tgt PE=3 SV=1
MKYELIKKEGRARRGRLTFERGTVETPAFMPVGTYGTVKGMTPEEVAETGAQILLGNTFHLWLRPGQDVMRAHGDLHDFMHWQGPILTDSGGFQVFSLGKMRKITEEGVHFRNPVNGDKIFMDAEKSMEIQYDLGSDIVMIFDECTPYPATHDEAKKSMEMSLRWAQRSRNHFDKMGNKNALFGIVQGSVYEDLRDVSVEGLTNIGFDGYAVGGLAVGEPKEDMHRVLEHTCPKLPEDKPRYLMGVGKPEDLVEGVRRGIDMFDCVMPTRNARNGHLFVTGGVIKIRNAKHKTDTTALDPECDCYTCRNYSKAYLHHLDRCNEILGARLNTIHNLRYYQRLMESLRNAIDEGRLETFVQEFYERRGRDVPPLKKD

SEQ ID NO: 55041 - protein, 375 aa, Enterovibrio norvegicus
  misc_feature (1)..(375): tr|A0A1I5V9T4|A0A1I5V9T4_9GAMM Queuine tRNA-ribosyltran sferase OS=Enterovibrio norvegicus DSM 15893 OX=1121869 GN=tgt PE=3 SV=1
MKYELLKKEGRARRGRLTFERGTVETPAFMPVGTYGTVKGMTPEEVAETGAEILLGNTFHLWLRPGQEVMRAHGDLHDFMHWQGPILTDSGGFQVFSLGKMRKITEEGVHFRNPVNGDRIFMDAEKSMEIQYDLGSDIVMIFDECTPYPATHDEAKKSMEMSLRWAQRSRNHFDKMENKNALFGIVQGSVYEDLRDVSVEGLTSIGFDGYAVGGLAVGEPKEDMHRVLEHTCPKLPEDKPRYLMGVGKPEDLVEGVRRGIDMFDCVMPTRNARNGHLFVTGGVIKIRNATHKSDTTALDPQCDCYTCRNYSKAYLHHLDRCNEILGARLNTIHNLRYYQRLMESLRNAIDEGRLETFVTEFYARRGQDVPPLKED

SEQ ID NO: 55042 - protein, 375 aa, Enterovibrio norvegicus
  misc_feature (1)..(375): tr|A0A2N7LHP4|A0A2N7LHP4_9GAMM Queuine tRNA-ribosyltran sferase OS=Enterovibrio norvegicus OX=188144 GN=tgt PE= 3 SV=1
MKYELLKKEGRARRGRLTFERGTVETPAFMPVGTYGTVKGMTPEEVAETGAEILLGNTFHLWLRPGQEVMRAHGDLHDFMHWQGPILTDSGGFQVFSLGKTRKITEEGVHFRNPVNGDRVFMDAEKSMEIQYDLGSDIVMIFDECTPYPATHDEAKKSMEMSLRWAQRSRNHFDKMENKNALFGIIQGSVYEDLRDVSVEGLTNIGFDGYAVGGLAVGEPKEDMHRVLEHTCPKLPEDKPRYLMGVGKPEDLVEGVRRGIDMFDCVMPTRNARNGHLFVTGGVIKIRNATHKSDTTALDPQCDCYTCRNYSKAYLHHLDRCNEILGARLNTIHNLRYYQRLMESLRNAIDEGRLETFVTEFYARRGQDVPPLKED

SEQ ID NO: 55043 - protein, 375 aa, Enterovibrio pacificus
  misc_feature (1)..(375): tr|A0A1C3EGK3|A0A1C3EGK3_9GAMM Queuine tRNA-ribosyltran sferase OS=Enterovibrio pacificus OX=1080227 GN=tgt PE= 3 SV=1
MKYELIKKDGRARRGRLVFERGTVETPAFMPVGTYGTVKGMTPEEVKETGAQILLGNTFHLWLRPGQEVMKMHGDLHDFMNWQGPILTDSGGFQVFSLGDIRKITEEGVHFRNPVNGDKIFMDAEKSMEIQRDLGSDVVMIFDECTPYPATHDEAQKSMEMSLRWAKRSRVHHDKLENKNALFGIVQGSVYEDLRDVSVKGLTEIGFDGYAVGGLAVGEPKEDMHRVLEHTCPQLPEDKPRYLMGVGKPEDLVEGVRRGVDMFDCVMPTRNARNGHLFVSDGVIKIRNAKHKSDTSPLDSECDCYTCRNYSKAYLHHLDRCNEILGARLNTIHNLRHYQLLMEGLRKAIDEGKLDAFVEDFYARRGRDVPPLKED

SEQ ID NO: 55044 - protein, 378 aa, Enterovirga rhinocerotis
  misc_feature (1)..(378): tr|A0A4R7BIH4|A0A4R7BIH4_9RHIZ Queuine tRNA-ribosyltran sferase OS=Enterovirga rhinocerotis OX=1339210 GN=tgt P E=3 SV=1
MSSFGFTVHARDGAARTGAITTPRGEIRTPAFMPVGTAGTVKAMYPEQVKALGADIVLGNTYHLMLRPGAERVARLGGLHRMMRWDGPILTDSGGFQVMSLAGLRKLSETGVVFQSHIDGSRHEMTPERSIEIQTLLGADIQMQLDECVRLPAPREEVEKAMRLSLRWAERCRTAFGSQPGRALFGIVQGGTDEALRVESAKDLVSLDLGGYAVGGLAVGEPQADMLRMIETVEPHLPTAKPRYLMGVGTPDDIAQAVRRGIDMFDCVMPTRAGRHGMAYTRHGRVNLKNARFAEDIRPLDEASSCAASRDYSRAYLHHLVRSGEILGMMLLTWSNLAYYQDLMAGLRAAIRDGRLEDHLAEIREGWARGEAGAPTRP

SEQ ID NO: 55045 - protein, 378 aa, Eoetvoesia caeni
  misc_feature (1)..(378): tr|A0A366HCN9|A0A366HCN9_9BURK Queuine tRNA-ribosyltran sferase OS=Eoetvoesia caeni OX=645616 GN=tgt PE=3 SV=1
MTGLKFELLATDGAARRGRVTLNHGVVETPIFMPVGTYGSVKAMMPHELTEVGAQIILGNTFHLWLRPGTEVLDKHGGLHGFMQWNKPILTDSGGFQVFSLSGMRKITEEGVKFASPIDGSRLFLTPEESMRIQRALNSDIAMVFDECTPYEIDGRPATSEEAARSMRMSLRWAKRSREAFDQLGNPNALFGIVQGGMYEDLRDESLAGLVDIGFHGYAIGGLSVGEPKDEMMRVLAHVAPRLPADKPRYLMGVGTPEDLVEGVSRGVDMFDCVMPTRNARNGWLFTRHGDIKIRNARYRDDTRPLDSTCSCHTCAHFSRSYLHHLQRSNEITGSRLNTLHNLHYYLNLMGEMREAIASGTFEAWRARFHQDRARGIE

SEQ ID NO: 55046 - protein, 376 aa, Epibacterium mobile
  misc_feature (1)..(376): tr|A0A1B1A3B3|A0A1B1A3B3_9RHOB Queuine tRNA-ribosyltran sferase OS=Epibacterium mobile F1926 OX=1265309 GN=tgt PE=3 SV=1
MAELFNFEMTATDGKARTGVIHTPRGDIRTPAFMPVGTAATVKAMMPESVRATGADILLGNTYHLMLRPTAERIDRLGGLHKFMNWDRPILTDSGGFQVMSLAGLRKLTEKGVTFKSHIDGSRHELTPERSMEIQALLGSDIVMCFDECPALPADRDRIAESMRLSMRWAERSREAFGDRPGHALFGIQQGGLEQDFRAESAEALTKIGFDGYAVGGLAVGEGQEAMFGCLDYAPDMLPVDKPRYLMGVGKPDDIVGAVARGIDMMDCVLPSRSGRTGQAFTRHGVVNIKNARHQDDPRPLDENCSCPACSNYSRAYLHHVFRSNEMISGMLLTWHNLHYFQDIMAGMRESIAAGTFDAWQKNFHDMRAQGDIEQL

SEQ ID NO: 55047 - protein, 376 aa, Epibacterium mobile
  misc_feature (1)..(376): tr|A0A1H3FI64|A0A1H3FI64_9RHOB Queuine tRNA-ribosyltran sferase OS=Epibacterium mobile OX=379347 GN=tgt PE=3 SV =1
MAELFNFEMTATDGKARTGVIHTPRGDIRTPAFMPVGTAATVKAMMPESVRATGADILLGNTYHLMLRPTAERIDRLGGLHKFMNWDRPILTDSGGFQVMSLAGLRKLTEKGVTFKSHIDGSRHELTPERSMEIQALLGSDIVMCFDECPALPADRDRIAESMRLSMRWAERSREAFGDRPGHALFGIQQGGLEKDFREESAEALTKIGFDGYAVGGLAVGEGQEAMFGCLDYAPDMLPVDKPRYLMGVGKPDDIVGAVARGIDMMDCVLPSRSGRTGQAFTRHGVVNIKNARHQDDPRPLDENCSCPACSNYSRAYLHHVFRSNEMISGMLLTWHNLHYFQDIMAGMRESIAAGTFDAWQKTFHDMRAQGDIEPL

SEQ ID NO: 55048 - protein, 376 aa, Epibacterium multivorans
  misc_feature (1)..(376): tr|A0A0N7M0I5|A0A0N7M0I5_9RHOB Queuine tRNA-ribosyltran sferase OS=Epibacterium multivorans OX=928856 GN=tgt PE =3 SV=1
MAERFNFELKATDGKARTGVINTPRGEIRTPAFMPVGTAATVKAMMPESVRATGADILLGNTYHLMLRPTAERINNLGGLHKFMNWERPILTDSGGFQVMSLAGLRKLTEKGVTFKSHIDGSKHELTPERSMEIQRLLGSDIVMCFDECPALPADRDRIAESMRLSMRWAERSKDAFGDRPGHALFGIQQGGLEQDFREESAEALQKIGFDGYAVGGLAVGEGQEAMFGCLDYAPDMLPVDKPRYLMGVGKPDDIVGAVKRGIDMMDCVLPSRSGRTGQAFTRYGVVNIKNARHADDPRPLDETCTCPACTNYSRAYLHHVFRSNEMISGMLLTWHNLHYFQTIMQEMRDAIAAGTFDAWEKKFHEDRARGDIEPL

SEQ ID NO: 55049 - protein, 376 aa, Epibacterium scottomollicae
  misc_feature (1)..(376): tr|A0A2T1AIW8|A0A2T1AIW8_9RHOB Queuine tRNA-ribosyltran sferase OS=Epibacterium scottomollicae OX=483013 GN=tgt PE=3 SV=1
MAELFNFEMTATDGKARTGVIHTPRGDIRTPAFMPVGTAATVKAMMPESVRATGADILLGNTYHLMLRPTAERIDRLGGLHKFMNWDRPILTDSGGFQVMSLAGLRKLTEKGVTFKSHIDGSRHELTPERSMEIQRLLGSDIVMCFDECPALPADRDRIAESMRLSMRWAERSREAFGDRPGYALFGIQQGGLERDFREESAEALTKVGFDGYAVGGLAVGEGQEAMFGCLDYAPDMLPQDKPRYLMGVGKPDDIVGAVARGIDMMDCVLPSRSGRTGQAFTRHGVVNIKNARHQDDPRPLDENCSCPACSNYSRAYLHHVFRSNEMISGMLLTWHNLHYFQDIMAGMRESIAAGTFEAWQKNFHDNRAQGDIEPL

SEQ ID NO: 55050 - protein, 376 aa, Epibacterium ulvae
  misc_feature (1)..(376): tr|A0A1G5QMZ2|A0A1G5QMZ2_9RHOB Queuine tRNA-ribosyltran sferase OS=Epibacterium ulvae OX=1156985 GN=tgt PE=3 SV =1
MTQKFEFDLKATDGAARTGVISTPRGEIRTPAFMPVGTAATVKAMMPESVRATGADILLGNTYHLMLRPTAERIDRLGGLHKFMNWERPILTDSGGFQVMSLAGLRKLTEKGVTFKSHIDGSKHELTPERSMEIQRLLGSDIVMCFDECPALPADRDRIAESMRLSMRWADRSREAFGDRPGHALFGIMQGGLEQDLREESAQALTDIGFDGYAVGGLAVGEGQEAMFGCLDYAPGFLPKDKPRYLMGVGKPDDIVGAVARGIDMMDCVLPSRSGRTGQAFTRRGVVNIKNARHAEDPRPLDEGCTCPACSNYSRAYLHHVFRSNEMISGMLLTWHNLHYFQDIMQEMRDAIAAGTFEAWQANFHEMRAQGDIEPL

SEQ ID NO: 55051 - protein, 371 aa, Epsilonproteobacteria bacterium
  misc_feature (1)..(371): tr|A0A496XML8|A0A496XML8_9PROT Queuine tRNA-ribosyltran sferase OS=Epsilonproteobacteria bacterium OX=2026809 G N=tgt PE=3 SV=1
MKFFTPISKSGKARTGLIKTHHGDIETPVFMPVGTRASVKGLWQEDLEELKSQIILGNTYHLYLRPGHELVERVGDGLHGFMSWDGPILTDSGGYQVFSLSKMNKLSEEGVVFKSHLDGSSHMITPEKSMEIQRALGADIVMAFDECPPLPSTKEELKKSMELTLRWAKRCQSVSLKGYQNLFGIIQGGLELDLRLECMQALEEMNFPGLALGGLSVGEKNEEMVEFLNNFVHLMPENKPRYLMGVGNPLDILNGVRAGLDMFDCVLPTRNARNGQFITSLGPLNIKKEKFKEDQRAPDPSCGCKVCARYSRAYIRHLYNVGEYLAGQLITFHNIHFYHQMMENTRQAIREDRFESFFQEFRKNYTSAEWK

SEQ ID NO: 55052 - protein, 374 aa, Epsilonproteobacteria bacterium
  misc_feature (1)..(374): tr|A0A426VV60|A0A426VV60_9PROT Queuine tRNA-ribosyltran sferase OS=Epsilonproteobacteria bacterium (ex Lamellib rachia satsuma) OX=2496635 GN=tgt PE=3 SV=1
MQFQIDKTDGKARACTIKTAHSTIQTPVFMPVGTVGAVKALDATDLTTFIKPEIILGNTYHLYIRPGDEVIKTMGKLQKFTKYPKSFLTDSGGFQAFSLSDNVKIDEGGITFRSHLDGSKHYFTPKKVIDIQNNLGSDIMMILDDLVALPATQERIKASIERTTRWAEESIKYHRENQKKGIGIDQNIFAIIQGGTDKAFREKSAKELCALDYDGFAIGGLSVGEANQDMYDTVEWTTQFMPEDKPRYLMGVGTPEDLVENVSRGIDMFDCVMPTRNARNGTLFTSFGKVNIKKACYTVDESPIDPECGCMVCQTYSRSYLRHLFRAREITYFRLATIHNLYYYLDLMKQMREAIIENRFEEFKREFYRKRETK

SEQ ID NO: 55053 - protein, 376 aa, Epulopiscium sp.
  misc_feature (1)..(376): tr|A0A1V2YBN0|A0A1V2YBN0_9FIRM Queuine tRNA-ribosyltran sferase OS=Epulopiscium sp. Nuni2H_MBin003 OX=1884657 G N=tgt PE=3 SV=1
MYEILSMEGRAKSARLCTVHGIIETPCFMNVATVAAIKGGLSTVDLYDIKTQVALSNTYHLHLRPGDDVIKELGGLHKFMVWDKPILTDSGGFQVFSLAHRRKIKEEGVYFSSHIDGKKIFMGPEESMKIQSNLGSTIAMAFDECPPALSDREYILPSIARTTRWLKRCVDKMNELNQQDDTINKKQLLFGINQGGVLADIRISHAKEIAEFDLAGYAIGGLAVGETHQEMYYILDNVIPHLPQNKPTYLMGVGTPENILEAVERGVDFFDCVLPARNGRHGHVYTNAGKLNLFNKIHEKDLSPISDECSCSTCERYSRAYIRHLLKAKEMLGMRLCVIHNLHYYNNLMIEIRKNIRNNTFAKYKKSRLEGFKSTL

SEQ ID NO: 55054 - protein, 376 aa, Epulopiscium sp.
  misc_feature (1)..(376): tr|A0A1S9CJP6|A0A1S9CJP6_9FIRM Queuine tRNA-ribosyltran sferase OS=Epulopiscium sp. AS2M-Bin002 OX=1764959 GN=t gt PE=3 SV=1
MYDLLKTEERAKRGRFQTVHGTIETPVFMNVATVAAIKGAVSAQDLQQIETQVALANTYHLHLRPNDKLIKELGGLHKFMVWDKPILTDSGGFQVFSLAHRRKIKEEGVYFSSHIDGSKIFMGPEESMQIQSNLGSTIAMAFDECPPAMADKEYIIPSVERTTRWLKRCIEEINKLNSLETTINNKQMLFGINQGGVIPAIRIEHAKVIREFDLPGYSIGGLAVGETHEEMYNILEEVIPHLPKNKPTYLMGVGTPENILEAVDRGIDFFDCVLPARNGRHGHVYTNNGKLNLFNKKHEKDMDPISKECCCPTCQRYSKAYIRHLLKAKEMLGMRLCVIHNLYYFNNLMTEIRVALDNNEFKSYKKKRLKSYKNLN

SEQ ID NO: 55055 - protein, 378 aa, Ereboglobus luteus
  misc_feature (1)..(378): tr|A0A2U8E1N7|A0A2U8E1N7_9BACT Queuine tRNA-ribosyltran sferase OS=Ereboglobus luteus OX=1796921 GN=tgt PE=3 SV =1
MPSVPHFELLKTDTATAARRARLTTRHGVVQTPIFMPVGTQGTVKAVTPVQLREIGAQIILGNTYHLNIRPTSELIRDMGGLHKFMGWDGPILTDSGGFQVFSLAKLRDIRPDGVAFQSHLDGAKLFLGPREVMTIQQNLGSDIAMVLDECPPFPCERDVCAHSVARTFEWAKQCKQIATDNGFLAAGHHVFAIAQGSTYDDIRREAAEALASLDFPGYAIGGVSVGEPEPEMLQQVSASVKYLPAHKPRYTMGLGTPPQMLKMIAMGVDMFDCVMPTRVARNGLVFTPDGPINLRNEKYRADPRPISDEVQNYTTNFSRAYLRHLTTSNEMLAGTLLSMHNLHFFLDLMAQARARIEAGDYATWHRAWITRYEAGSK

SEQ ID NO: 55056 - protein, 381 aa, Eremococcus coleocola
  misc_feature (1)..(381): tr|E4KM08|E4KM08_9LACT Queuine tRNA-ribosyltransferase OS=Eremococcus coleocola ACS-139-V-Col8 OX=908337 GN=tg t PE=3 SV=1
MTQVPVTYELIKEEKHTGARLGILHTPHGSFPTPMYMPVGTLATVKSLSPEELKEMGAGVILSNTYHLWLRPGEDIVQDAGGLHKFMNWDQGILTDSGGFQVFSLSDNRKLTEEGVHFRSHLDGSKLFLSPEKAIQIQTALGSDIMMSLDECPPFYESYDYVKNSINRTTRWAERGLKAQENTKDQVIFGIMQGAGYKDLRIQHAKDMAALDFPGYSVGGLSVGESKEEMNEVLDYLTPYMPANKPRYLMGVGSPDALIDGAIRGIDMFDCVLATRIARNGSCMTSHGRLVVKNAKYARDYTPIDDHCDCYTCRNYSRAYVRHLFHANESFGLRLASIHNTHFLLNLMKQVRQAIMDDNLLDFRQDFFERYGYNKPNARAF

SEQ ID NO: 55057 - protein, 376 aa, Erwinia amylovora
  misc_feature (1)..(376): tr|D4HXZ1|D4HXZ1_ERWAC Queuine tRNA-ribosyltransferase OS=Erwinia amylovora (strain CFBP1430) OX=665029 GN=tgt PE=3 SV=1
MKFELDTTDGRARRGRLVFERGVVETPAFMPVGTYGTVKGMTPEEVQDTGAQIILGNTFHLWLRPGQEIMKLHGDLHDFMQWKGPILTDSGGFQVFSLGDIRKITEKGVHFRNPINGDAIFLDPEKSMEIQYDLGSDIVMIFDECTPYPADWDYARRSMEMSLRWAQRSRDRFDSLGNKNALFGIIQGSVYEDLRDVSVKGLVEIGFDGYAVGGLAVGEPKEDMHRILEHVCPQLPQDKPRYLMGVGKPQDLVEGVRRGIDMFDCVMPTRNARNGHLFVTDGVVKIRNAKYKDDTSPLDAECDCYTCRNYSRAYLYHLDRCNEILGARLNTIHNLRYYQRLMAGLRQAIEEGKLEHFVSEFYQRTGTAVPPLTSDN

SEQ ID NO: 55058 - protein, 376 aa, Erwinia amylovora; identical to SEQ ID NO: 55057
  misc_feature (1)..(376): tr|E5B2U7|E5B2U7_ERWAM Queuine tRNA-ribosyltransferase OS=Erwinia amylovora ATCC BAA-2158 OX=889211 GN=tgt PE= 3 SV=1

SEQ ID NO: 55059 - protein, 376 aa, Erwinia aphidicola; identical to SEQ ID NO: 52189
  misc_feature (1)..(376): tr|A0A4R6PH04|A0A4R6PH04_ERWAP Queuine tRNA-ribosyltran sferase OS=Erwinia aphidicola OX=68334 GN=tgt PE=3 SV=1

SEQ ID NO: 55060 - protein, 374 aa, Erwinia billingiae
  misc_feature (1)..(374): tr|D8MNV1|D8MNV1_ERWBE Queuine tRNA-ribosyltransferase OS=Erwinia billingiae (strain Eb661) OX=634500 GN=tgt P E=3 SV=1
MKFELDKTDGRARRGRLIFDRGVVETPAFMPVGTYGTVKGMTPEEVIDTGAQIILGNTFHLWLRPGQEVMKLHGDLHDFMNWKGPILTDSGGFQVFSLGDIRKITEAGVHFRNPINGDAIFLDPEKSMEIQYDLGSDIVMIFDECTPYPADWDYAKRSMEMSLRWAQRSRDRFDSLENKNALFGIIQGGVYEDLRDVSVKGLVEIGFDGYAVGGLAVGEPKEDMHRILEHVCPQIPEDKPRYLMGVGKPQDLVEGVRRGIDMFDCVMPTRNARNGHLFVTDGIVKIRNAKYKDDTATLDAECDCYTCRNYSRAYLHHLDRCNEILGARLNTIHNLRYYQRLMAGLRQAIEDGKLEHFVTEFYDRTGNTAPPLSV

SEQ ID NO: 55061 - protein, 374 aa, Erwinia billingiae; identical to SEQ ID NO: 55060
  misc_feature (1)..(374): tr|A0A5J6LYT0|A0A5J6LYT0_9GAMM tRNA guanosine(34) trans glycosylase Tgt OS=Erwinia billingiae OX=182337 GN=D0N5 0_17385 PE=4 SV=1

SEQ ID NO: 55062 - protein, 374 aa, Erwinia citreus
  misc_feature (1)..(374): tr|A0A358L234|A0A358L234_ERWCI Queuine tRNA-ribosyltran sferase OS=Erwinia citreus OX=558 GN=tgt PE=3 SV=1
MKFELDTTDGRARRGRLVFDRGVVETPAFMPVGTYGTVKGMTPEEVQDTGAQIILGNTFHLWLRPGQEIMKLHGDLHDFMQWKGPILTDSGGFQVFSLGDIRKITEAGVHFRNPINGDKIFLDPEKSMEIQYDLGSDIVMIFDECTPYPADWDYAKRSMEMSLRWAQRSRDRFDSLGNKNSLFGIIQGGVYEDLRDVSVKGLVEIGFDGYAVGGLAVGEPKEDMHRILEHVCPQIPEDKPRYLMGVGKPEDLVEGVRRGIDMFDCVMPTRNARNGHLFVTDGVVKIRNAKYKDDTAPLDAECDCYTCRNYSRAYLYHLDRCNEILGARLNTIHNLRYYQRLMAGLRKAIEEGKLEHFVSEFYARTGKAVPPLNV

SEQ ID NO: 55063 - protein, 374 aa, Erwinia gerundensis
  misc_feature (1)..(374): tr|A0A0U5E7L5|A0A0U5E7L5_9GAMM Queuine tRNA-ribosyltran sferase OS=Erwinia gerundensis OX=1619313 GN=tgt PE=3 S V=1
MKFELDTTDGRARRGRLIFDRGVVETPAFMPVGTYGTVKGMTPEEVLETGAQIILGNTFHLWLRPGQEVMKLHGDLHDFMQWKGPILTDSGGFQVFSLGDIRKITEAGVHFRNPINGDQIFLDPEKSMEIQHDLGSDIVMIFDECTPYPADWDYAKRSMEMSLRWAQRSRDRFDSLGNKNALFGIIQGSVYEDLRDVSVKGLVEIGFDGYAVGGLAVGEPKEDMHRILEHVCPQIPTDKPRYLMGVGKPEDLVEGVRRGVDMFDCVMPTRNARNGHLFVTDGVVKIRNAKHKADTSPLDAECDCYTCRNYSRAYLHHLDRCNEILGARLNTIHNLRYYQRLMAGLRQAIEEGKLERFVTEFYERTGKAVPPLNV

SEQ ID NO: 55064 - protein, 374 aa, Erwinia iniecta
  misc_feature (1)..(374): tr|A0A0L7TGA7|A0A0L7TGA7_9GAMM Queuine tRNA-ribosyltran sferase OS=Erwinia iniecta OX=1560201 GN=tgt PE=3 SV=1
MKFELDTTDGRARRGRLVFDRGVVETPAFMPVGTYGTVKGMTPEEVQETGAQIILGNTFHLWLRPGQEIMKLHGDLHDFMQWKGPILTDSGGFQVFSLGDIRKITEAGVHFRNPINGDPIFLDPEKSMEIQYDLGSDIVMIFDECTPYPADWDYAKSSMEMSLRWAQRSRDRFDSLGNKNALFGIIQGGVYEDLRDVSVKGLVDIGFDGYAVGGLAVGEPKEDMHRILEHVCPQIPEDKPRYLMGVGKPEDLVEGVRRGVDMFDCVMPTRNARNGHLFVTDGVVKIRNAKYKDDISPLDAECDCYTCRSYSRAYLHHLDRCNEILGARLNTIHNLRYYQRLMAGLRQAIEEGKLECFVTEFYERKGKAVPPLTV

SEQ ID NO: 55065 - protein, 374 aa, Erwinia mallotivora
  misc_feature (1)..(374): tr|A0A014MG14|A0A014MG14_9GAMM Queuine tRNA-ribosyltran sferase OS=Erwinia mallotivora OX=69222 GN=tgt PE=3 SV= 1
MKFELDTTDGRARRGRLVFDRGVVETPAFMPVGTYGTVKGMTPEEVQDTGAQIILGNTFHLWLRPGQEIMKLHGDLHDFMQWKGPILTDSGGFQVFSLGDIRKITEAGVHFRNPINGDAIFLDPEKSMEIQFDLGSDIVMIFDECTPYPADHDYARRSMEMSLRWAQRSRDRFDSLGNKNALFGIIQGGVYEDLRDVSVKGLVEIGFDGYAVGGLAVGEPKEDMHRILEHVCPQIPQDKPRYLMGVGKPEDLVEGVRRGIDMFDCVMPTRNARNGHLFVTDGVVKIRNAKYKDDTSPLDAECDCYTCRNYSRAYLHHLDRCNEILGARLNTIHNLRYYQRLMAGLRQAIEEGKLEHFVSEFYNRTGKAVPPLAV

SEQ ID NO: 55066 - protein, 376 aa, Erwinia persicina
  misc_feature (1)..(376): tr|A0A3Q8H7N7|A0A3Q8H7N7_9GAMM Queuine tRNA-ribosyltran sferase OS=Erwinia persicina OX=55211 GN=tgt PE=3 SV=1
MKFELDTTDGRARRGRLVFERGVVETPAFMPVGTYGTVKGMTPEEVLDTGAQIILGNTFHLWLRPGQEIMKLHGDLHDFMQWKGPILTDSGGFQVFSLGDIRKITEKGVHFRNPINGDAIFLDPEKSMEIQFDLGSDIVMIFDECTPYPADWDYAKRSMEMSLRWAQRSRDRFDSLGNKNALFGIIQGGVYEDLRDVSVKGLVDIGFDGYAVGGLAVGEPKEDMHRILEHVCPQLPEDKPRYLMGVGKPQDLVEGVRRGIDMFDCVMPTRNARNGHLFVTDGVVKIRNAKYKDDTSPLDAECDCYTCRNYSRAYLYHLDRCNEILGARLNTIHNLRYYQRLMAGLRQAIEAGHLEQFVTEFYQRTGLAVPPLPSDN

SEQ ID NO: 55067 - protein, 376 aa, Erwinia piriflorinigrans
  misc_feature (1)..(376): tr|V5Z4X2|V5Z4X2_9GAMM Queuine tRNA-ribosyltransferase OS=Erwinia piriflorinigrans CFBP 5888 OX=1161919 GN=tgt PE=3 SV=1
MKFELDTTDGHARRGRLVFERGVVETPAFMPVGTYGTVKGMTPEEVQDTGAQIILGNTFHLWLRPGQEIMKLHGDLHDFMQWKGPILTDSGGFQVFSLGDIRKITEKGVHFRNPINGDAIFLDPEKSMEIQYDLGSDIVMIFDECTPYPADWDYAKRSMEMSLRWAQRSRDRFDSLGNKNALFGIIQGSVYEDLRDVSVKGLVDIGFDGYAVGGLAVGEPKEDMHRILEHVCPQLPQDKPRYLMGVGKPQDLVEGVRRGIDMFDCVMPTRNARNGHLFVSDGVVKIRNAKYKDDTSPLDAECDCYTCRNYSRAYLYHLDRCNEILGARLNTIHNLRYYQRLMAGLRQAIEEGRLEHFASEFYQRTGAAVPPLTSDN

SEQ ID NO: 55068 - protein, 374 aa, Erwinia psidii
  misc_feature (1)..(374): tr|A0A3N6TW00|A0A3N6TW00_9GAMM Queuine tRNA-ribosyltran sferase OS=Erwinia psidii OX=69224 GN=tgt PE=3 SV=1
MKFELDTTDGRARRGRLVFERGVVETPAFMPVGTYGTVKGMTPEEVQETGAQIILGNTFHLWLRPGQEIMKLHGDLHDFMQWKGPILTDSGGFQVFSLGDIRKITEAGVHFRNPINGDAIFLDPEKSMEIQFDLGSDIVMIFDECTPYPADWDYAKRSMEMSLRWAQRSRDRFDALGNKNALFGIIQGGVYEDLRDVSVKGLVEIGFDGYAVGGLAVGEPKEDMHRILEHVCPQIPQDKPRYLMGVGKPEDLVEGVRRGIDMFDCVMPTRNARNGHLFVTDGVVKIRNARYKDDTSPLDADCDCYTCRHYSRAYLHHLDRCNEILGARLNTIHNLRYYQRLMAALRQAIEAGRLEHFVSEFYDRTGKAVPPLNV

SEQ ID NO: 55069 - protein, 376 aa, Erwinia pyrifoliae
  misc_feature (1)..(376): tr|D2T4N9|D2T4N9_ERWP6 Queuine tRNA-ribosyltransferase OS=Erwinia pyrifoliae (strain DSM 12163 / CIP 106111 / Ep16/96) OX=644651 GN=tgt PE=3 SV=1
MKFELDTTDGRARRGRLVFERGVVETPAFMPVGTYGTVKGMTPEEVQDTGAQIILGNTFHLWLRPGQEVMKLHGDLHDFMQWKGPILTDSGGFQVFSLGDIRKITEKGVHFRNPINGDAIFLDPEKSMEIQYDLGSDIVMIFDECTPYPADWDYAKRSMEMSLRWAQRSRDRFDSLGNKNALFGIIQGSVYEDLRDVSVKGLVEIGFDGYAVGGLAVGEPKEDMHRILEHVCPQLPQDKPRYLMGVGKPQDLVEGVRRGIDMFDCVMPTRNARNGHLFVTDGVVKIRNAKYKDDTSPLDAECDCYTCLNYSRAYLYHLDRCNEILGARLNTIHNLRYYQRLMAGLRQAIEEGKLEHFVSEFYQRTGTAVPPLTSDN

SEQ ID NO: 55070 - protein, 376 aa, Erwinia rhapontici
  misc_feature (1)..(376): tr|A0A4R7GIT9|A0A4R7GIT9_ERWRD Queuine tRNA-ribosyltran sferase OS=Erwinia rhapontici OX=55212 GN=tgt PE=3 SV=1
MKFELDTTDGRARRGRLVFERGVVETPAFMPVGTYGTVKGMTPEEVIDTGAQIILGNTFHLWLRPGQEIMKLHGDLHDFMQWKGPILTDSGGFQVFSLGDIRKITEKGVHFRNPINGDAIFLDPEKSMEIQYDLGSDIVMIFDECTPYPADWDYAKRSMEMSLRWAQRSRDRFDSLGNKNALFGIIQGGVYEDLRDVSVKGLVDIGFDGYAVGGLAVGEPKEDMHRILEHVCPQLPEDKPRYLMGVGKPQDLVEGVRRGIDMFDCVMPTRNARNGHLFVTDGVVKIRNAKYKDDTSPLDAECDCYTCRNYSRAYLYHLDRCNEILGARLNTIHNLRYYQRLMAGLRQAIEEGKLALFVTEFYQRTGLAVPPLPSDN

SEQ ID NO: 55071 - protein, 374 aa, Erwinia sp.
  misc_feature (1)..(374): tr|A0A427K9N1|A0A427K9N1_9GAMM Queuine tRNA-ribosyltran sferase OS=Erwinia sp. 198 OX=2022746 GN=tgt PE=3 SV=1
MKFELDTTDGRARRGRLVFDRGVVETPAFMPVGTYGTVKGMTPEEVQDTGAQIILGNTFHLWLRPGQEIMKLHGDLHDFMQWKGPILTDSGGFQVFSLGDIRKITEAGVHFRNPINGDKIFLDPEKSMEIQYDLGSDIVMIFDECTPYPADWDYAKRSMEMSLRWAQRSRDRFDSLENKNALFGIIQGGVYEDLRDVSVKGLVEIGFDGYAVGGLAVGEPKEDMHRILEHVCPQIPEDKPRYLMGVGKPEDLVEGVRRGIDMFDCVMPTRNARNGHLFVTDGVVKIRNAKYKDDTAPLDAECDCYTCRNYSRAYLYHLDRCNEILGARLNTIHNLRYYQRLMAGLRKAIEEGKLEHFVTEFYARTGKAVPPLNV

SEQ ID NO: 55072 - protein, 376 aa, Erwinia sp.
  misc_feature (1)..(376): tr|A0A3N1VVX5|A0A3N1VVX5_9GAMM Queuine tRNA-ribosyltran sferase OS=Erwinia sp. JUb26 OX=2485126 GN=tgt PE=3 SV= 1
MKFELDTTDGRARRGRLVFDRGVVETPAFMPVGTYGTVKGMTPEEVQDTGAQIILGNTFHLWLRPGQEIMKLHGDLHDFMQWKGPILTDSGGFQVFSLGDIRKITEKGVHFRNPINGDAIFLDPEKSMEIQYDLGSDIVMIFDECTPYPADWDYAKRSMEMSLRWAQRSRDRFDSLGNKNALFGIIQGSVYEDLRDVSVKGLVEIGFDGYAVGGLAVGEPKDDMHRILEHVCPQLPEDKPRYLMGVGKPQDLVEGVRRGIDMFDCVMPTRNARNGHLFVTDGVVKIRNAKYKDDTSPLDAECDCYTCRNYSRAYLYHLDRCNEILGARLNTIHNLRYYQRLMAGLRKAIEEGKLEHFVTEFYQRTGTAVPPLTSDN

SEQ ID NO: 55073 - protein, 376 aa, Erwinia tasmaniensis
  misc_feature (1)..(376): sp|B2VHQ1|TGT_ERWT9 Queuine tRNA-ribosyltransferase OS= Erwinia tasmaniensis (strain DSM 17950 / CIP 109463 / E t1/99) OX=465817 GN=tgt PE=3 SV=1
MKFELDTTDGRARRGRLVFERGVVETPAFMPVGTYGTVKGMTPEEVQDTGAQIILGNTFHLWLRPGQEIMKLHGDLHDFMQWKGPILTDSGGFQVFSLGDIRKITEKGVHFRNPINGDAIFLDPEKSMEIQYDLGSDIVMIFDECTPYPADWDYAKRSMEMSLRWAQRSRDRFDSLGNKNALFGIIQGSVYEDLRDVSVKGLVDIGFDGYAVGGLAVGEPKEDMHRILEHVCPQLPQDKPRYLMGVGKPQDLVEGVRRGVDMFDCVMPTRNARNGHLFVSDGVVKIRNAKYKDDISPLDAECDCYTCRNYSRAYLYHLDRCNEILGARLNTIHNLRYYQRLMAGLRQAIEEGKLEHFVSEFYQRTGAAVPPITSDN

SEQ ID NO: 55074 - protein, 374 aa, Erwinia tracheiphila
  misc_feature (1)..(374): tr|A0A0M2KHD0|A0A0M2KHD0_9GAMM Queuine tRNA-ribosyltran sferase OS=Erwinia tracheiphila OX=65700 GN=tgt PE=3 SV =1
MKFELDTTDGQARRGRLIFERGVVETPAFMPVGTYGTVKCMTPEEVQDTGAQIILGNTFHLWLRPGQQVMRLHGDLHDFMQWKGPILTDSGGFQVFSLGDIRKITEAGVHFRNPINGDAIFLDPEKSMEIQFDLGSDIVMIFDECTPYPADWDYAKRSMEMSLRWAQRSRDHFDALGNKNALFGIIQGGVYEDLRDVSVKGLVEIGFDGYAVGGLAVGEPKEDMHRILEHVCRQIPRDKPRYLMGVGKPEDLVEGVRRGIDMFDCVMPTRNARNGHLFVTDGVVKIRNAKYKDDTSPLDAECDCYTCRHYSRAYLHHLDRCNEILGARLNTIHNLRYYQRLMAALRLAIEEGRLEHFVSEFYERTGKAVPSLNV

SEQ ID NO: 55075 - protein, 374 aa, Erwinia tracheiphila
  misc_feature (1)..(374): tr|A0A345CN77|A0A345CN77_9GAMM Queuine tRNA-ribosyltran sferase OS=Erwinia tracheiphila OX=65700 GN=tgt PE=3 SV =1
MKFELDTTDGQARRGRLIFERGVVETPAFMPVGTYGTVKCMTPEEVQDTGAQIILGNTFHLWLRPGQQVMRLHGDLHDFMQWKGPILTDSGGFQVFSLGDIRKITEAGVHFRNPINGDAIFLDPEKSMEIQFDLGSDIVMIFDECTPYPADWDYAKRSMEMSLRWAQRSRDHFDALGNKNALFGIIQGGVYEDLRDVSVKRLVEIGFDGYAVGGLAVGEPKEDMHRILEHVCRQIPRDKPRYLMGVGKPEDLVEGVRRGIDMFDCVMPTRNARNGHLFVTDGVVKIRNAKYKDDTSPLDAECDCYTCRHYSRAYLHHLDRCNEILGARLNTIHNLRYYQRLMAALRLAIEEGRLEHFVSEFYERTGKAVPSLNV

SEQ ID NO: 55076 - protein, 374 aa, Erwinia typographi
  misc_feature (1)..(374): tr|A0A0A3ZB65|A0A0A3ZB65_9GAMM Queuine tRNA-ribosyltran sferase OS=Erwinia typographi OX=371042 GN=tgt PE=3 SV= 1
MKFELDTTDGRARRGRLVFDRGVVETPAFMPVGTYGTVKGMTPEEVTDTGAQIILGNTFHLWLRPGQEIMKLHGDLHDFMNWKGPILTDSGGFQVFSLGDIRKITEAGVHFRNPINGDAIFLDPEKSMEIQYDLGSDIVMIFDECTPYPADWDYAKRSMEMSLRWARRSRDRFDSLGNKNALFGIIQGGVYEDLRDVSVKGLVEIGFDGYAVGGLAVGEPKEDMHRILEHVCPQIPEDKPRYLMGVGKPQDLVEGVRRGIDMFDCVMPTRNARNGHLFVTDGVVKIRNAKYKDDTATLDAECDCYTCRNYSRAYLHHLDRCNEILGARLNTIHNLRYYQRLMAGLRKAIEEGKLEHFVTEFYNRTGSAVPSLAV

SEQ ID NO: 55077 - protein, 374 aa, Erwiniaceae bacterium
  misc_feature (1)..(374): tr|A0A3D5MB88|A0A3D5MB88_9GAMM Queuine tRNA-ribosyltran sferase OS=Erwiniaceae bacterium OX=2053552 GN=tgt PE=3 SV=1
MKFELDTKDGRARRGRLVFDRGVVETPAFMPVGTYGTVKGMTPEEVKETGAQILLGNTFHLWLRPGQEIMKLHGDLHDFMQWHGPILTDSGGFQVFSLGDIRKITEAGVHFRNPINGDAIFLDPEKSMEIQYDLGSDIVMIFDECTPYPADWDYAKRSMEMSLRWAKRSRDHFDKLGNKNALFGIIQGSVYEDLRDVSVKGLVEIGFDGYAVGGLAVGEPKADMHRILEHVCPQIPEDKPRYLMGVGKPEDLVEGVRRGIDMFDCVMPTRNARNGHLFVTDGVVKIRNAKHKDDTSPLDAECDCYTCRNYSRAYLHHLDRCNEILGARLNTIHNLRYYQRVMAGLRKAIEEGKLERFVSDFYTRKGKAVPPLNV

SEQ ID NO: 55078 - protein, 378 aa, Erysipelatoclostridium ramosum
  misc_feature (1)..(378): tr|A0A3E3EEL9|A0A3E3EEL9_9FIRM Queuine tRNA-ribosyltran sferase OS=Erysipelatoclostridium ramosum OX=1547 GN=tg t PE=3 SV=1
MAAITYELKHVCKQSGARYGILHTPHGDVETPMFMPVGTLATVKGISPEMLKEMHSQVVLANTYHLWLRPGEDVVEKAGGLHKFMNYNGPMLTDSGGFQVFSLGKTRKIEEEGVKFKSIIDGSSLFLSPEKAIEIQNKLGADMIMSFDECAPYPCTYEYMKNSMERTLRWAKRGKEAHKNTEKQALFGIVQGGEFPDLREQCAKELVAMDFPGYSIGGTSVGEPKDVMYKMVDDTIKWLPEDKPRYLMGVGNPIDLIECAIRGIDMYDCVLPTRVARHGAIMTSRGRLNINNEKFKYDFTPLDPECDCYACKNYTRAYIRHLHKCDEIFGKTLLSIHNVNFLLKLASDIREAIKEDRLLDFKEEFLDKYGHDVYKRAF

SEQ ID NO: 55079 - protein, 386 aa, Erysipelatoclostridium ramosum
  misc_feature (1)..(386): tr|B0N4F8|B0N4F8_9FIRM Queuine tRNA-ribosyltransferase OS=Erysipelatoclostridium ramosum DSM 1402 OX=445974 GN =tgt PE=3 SV=1
MLALRRMIMAAITYELKHVCKQSGARYGILHTPHGDVETPMFMPVGTLATVKGISPEMLKEMHSQVVLANTYHLWLRPGEDVVEKAGGLHKFMNYNGPMLTDSGGFQVFSLGKTRKIEEEGVKFKSIIDGSSLFLSPEKAIEIQNKLGADMIMSFDECAPYPCTYEYMKNSMERTLRWAKRGKEAHKNTEKQALFGIVQGGEFPDLREQCAKELVAMDFPGYSIGGTSVGEPKDVMYKMVDDTIKWLPEDKPRYLMGVGNPIDLIECAIRGIDMYDCVLPTRVARHGAIMTSRGRLNINNEKFKYDFTPLDPECDCYACKNYTRAYIRHLHKCDEIFGKTLLSIHNVNFLLKLASDIREAIKEDRLLDFKEEFLDKYGHDVYKRAF

SEQ ID NO: 55080 - protein, 378 aa, Erysipelatoclostridium sp.
  misc_feature (1)..(378): tr|A0A417C8A8|A0A417C8A8_9FIRM Queuine tRNA-ribosyltran sferase OS=Erysipelatoclostridium sp. AM42-17 OX=229310 2 GN=tgt PE=3 SV=1
MAAISFELKHVCKQSGARYGILHTPHGDVETPMFMPVGTLATVKGIAPEMLKEMGSQVVLSNTYHLWLRPGEDIVEKAGGLHRFMNYDGPMLTDSGGFQVFSLGKTRKIEEEGVKFKSIIDGRALFLSPEKAIEIQNKLGADIIMSFDECAPYPCTYDYMKKSMERTLRWAKRGKDAHKNTDKQALFGIVQGGEYPDLRKRCAQELVKMDFPGYSIGGTSVGEPKDVMYKMVEDTIQWLPEDKPRYLMGVGNPIDLIEAAIRGIDMYDCVLPTRVARHGAVMTSEGRLNINNEKFKEDFGPLDPHCDCYTCKNYSRAYLRHLHKSDEIFGKTLLSIHNVRFLLKLSEDIRQAIKEDRLLDFKEEFLDQYGRDVYKRAF

SEQ ID NO: 55081 - protein, 378 aa, Erysipelatoclostridium sp.
  misc_feature (1)..(378): tr|A0A1Y4QND6|A0A1Y4QND6_9FIRM Queuine tRNA-ribosyltran sferase OS=Erysipelatoclostridium sp. An15 OX=1965566 G N=tgt PE=3 SV=1
MAAISYELKHVCKQSNARYGILHTPHGDVETPMFMPVGTLATVKGIAPEMLKDMGSQVILANTYHLWLRPGEDVVEKAGGLHKFMNYDGPILTDSGGFQVFSLGKTRKIEEKGVTFKSIIDGSSLFLSPEKSIEIQNKLGADIIMSFDECAPYPCDYEYMKNSVERTIRWAKRGKAVHHNTEKQALFGIVQGGAFPELREQCAKELVAMDFPGYSIGGTSVGEPKDVMYKMVEDAIQWLPEDKPRYLMGVGNPIDLIECAIRGIDMYDCVLPTRVARHGAVMTSMGRLNINNEKFKYDFTPLDPNCDCYTCRNYTRAYVRHLHKCDEIFGKTLLSIHNVNFLLNLSKDIREAIKNDRLLDFKEEFLKQYGHDVYKRAF

SEQ ID NO: 55082 - protein, 379 aa, Erysipelothrix larvae
  misc_feature (1)..(379): tr|A0A0X8H1X3|A0A0X8H1X3_9FIRM Queuine tRNA-ribosyltran sferase OS=Erysipelothrix larvae OX=1514105 GN=tgt PE=3 SV=1
MKKPLDYTLIKKDIRSKARRGAITTPHGTVQTPMFMPVGTLATVKFLSPEDLYKIGSQVILSNTYHLWLRPGEHIVKQAGGLHKFMNYDGPILTDSGGFQVFSLSQIRKIEEEGVAFRNHLNGDKLFLSPEKAIQIQNDLGADIIMSFDECPPYPATYEYMKDSVERTLRWAKRGQLAHQRPDDQALFGIVQGGSFTELRHHSAKSLVEMDFPGYSIGGTSVGEPKEVMYKMIDDAIEFLPEDKPRYLMGVGSVDAIFEGVLRGVDMFDCVLPTRIARHGAAMTTQGRVNIKNNKFAEDFTPLDPACDCEACQNYTKAYLRHLIRCNEGLGMRLLSIHNLRFLLKLMEDIRLAIEEDRLLELRDQVYEAYELHETKSGF

SEQ ID NO: 55083 - protein, 383 aa, Erysipelothrix rhusiopathiae
  misc_feature (1)..(383): tr|E7FYA5|E7FYA5_ERYRH Queuine tRNA-ribosyltransferase OS=Erysipelothrix rhusiopathiae ATCC 19414 OX=525280 GN =tgt PE=3 SV=1
MSLGNKPLKLTLIKKSNESKARLTTIETHHGTVETPMFMPVGTLASVKFLSPEDLRKIGSQVILSNTYHLWLRPGEDVVRQAGGLHKFMNYNGPILTDSGGFQVFSLGKIRTISEEGVEFRSHLSGEKLFLTPEKAIQVQNALGPDIMMSFDECPPYPATYEYMKNSVERTIRWAARGKAAHQNPETQALFGIVQGGKYADLREHCAKELVAMDFPGYSIGGTSVGEPKDVMWQMIDHTIDFLPEDKPRYLMGVGSVDAIFEGVLRGVDMFDCVLPTRIARHGTAMTSTGRVNIKNRKWEYDFSPLDENCDCECCQNYTKSYLRHLIRCNEGFGMRLLSIHNLRFLLKLMEDIREAIKEDRLLQLRDEVYESYGITGDDHPGW

SEQ ID NO: 55084 - protein, 383 aa, Erysipelothrix sp.
  misc_feature (1)..(383): tr|A0A3S5HK03|A0A3S5HK03_9FIRM Queuine tRNA-ribosyltran sferase OS=Erysipelothrix sp. 15TAL0474 OX=2485784 GN=t gt PE=3 SV=1
MSLGNKPLKLTLIKKSNESKARLTTIETHHGTVETPMFMPVGTLASVKFLSPEDLRSIGSQVILSNTYHLWLRPGEEVVRQAGGLHKFMNYNGPILTDSGGFQVFSLGKIRTISEEGVEFRSHLSGEKLFLTPEKAIQVQNALGPDIMMSFDECPPYPATYEYMKNSVERTIRWAARGKAAHQNPETQALFGIVQGGKYADLREHCAKELVAMDFPGYSIGGTSVGEPKDVMWQMIDHTIDFLPEDKPRYLMGVGSVDAIFEGVLRGVDMFDCVLPKRIARHGTAMTSTGRVNIKNKKWEYDFSPLDENCDCECCQNYTKSYLRHLIRCNEGFGMRLLSIHNLRFLLKLMEDIREAIKEDRLLELRDQVYESYGITGDDHPGW

SEQ ID NO: 55085 - protein, 375 aa, Erysipelotrichaceae bacterium
  misc_feature (1)..(375): tr|A0A3P1S9N3|A0A3P1S9N3_9FIRM Queuine tRNA-ribosyltran sferase OS=Erysipelotrichaceae bacterium OH741_COT-311 OX=2491058 GN=tgt PE=3 SV=1
MKNFKFELLHTCKKSKARYGRLHTPHGIVETPMFMPVGTLATVKFLSPEEIETIGSGVILANTYHLWLRPGQEIIAKAGGVHNFMNYKGPMLTDSGGFQVFSLADTRKINEEGVTFKSHLDGSKLFMSPEISIEVQNKIGADIIMSFDECIPYPADYNYVKQSVERTLRWAKRGKDAHKRTDQALFGIVQGGDYPDLRKHCALKLVDMDFDGYSIGGTSVGEDKETMYRMIDYSIEHLPQDKPRYLMGVGAVNDILEAIERGVDMMDCVLPTRIARHGTCMTSHGRINIKKATYKEDFTPLDSNCDCYCCKNFTKAYLNHLFKCNEGLGNRLMSIHNLRFLIKLAEDAREAIKEDRFPEFKEQYLKNSNFDHRGF

SEQ ID NO: 55086 - protein, 379 aa, Erysipelotrichaceae bacterium
  misc_feature (1)..(379): tr|A0A357R111|A0A357R111_9FIRM Queuine tRNA-ribosyltran sferase OS=Erysipelotrichaceae bacterium OX=2049044 GN= tgt PE=3 SV=1
MEKFKLEITHVCKQSGARLGILHTPHGSVETPMFMPVGTLATVKFVSPEELTDMQAGVILSNTYHLWLRPGEDIVKQAGGLHKFMNVQRPILTDSGGFQVFSLSDSRKISEEGVTFKNHLNGDTLFLTPEKSIQIQNDLGADIIMSFDECPPYPASYDYMKASVERTLRWAKRGKEAHQRSEDQALFGIVQGGEFEDLRKFSAESLVEMDFPGYSIGGTSVGETKETMYKMIDYSIKYLPEDKPRYLMGVGSVDAILEGILRGVDMFDCVLPTRIARHGTAMTSLGRVNIRNAQYERDFSTLDPECDCVTCKNYTRAYLRHLIKCNEGLGQRLLSIHNLRHLIRLTEMARVAIKEDRFLDFKNEYFERLGLNDKNARGF

SEQ ID NO: 55087 - protein, 379 aa, Erysipelotrichales bacterium
  misc_feature (1)..(379): tr|A0A524KAT7|A0A524KAT7_9FIRM Queuine tRNA-ribosyltran sferase OS=Erysipelotrichales bacterium OX=2478483 GN=t gt PE=3 SV=1
MEKFWLEITHECKQSGARTGILHTPHGDVLTPMFMPVGTLATVKFLSPEEITEIKSGVILANTYHLWLRPGDDVVREAGGLHRFMNVKNPILTDSGGFQVFSLSDTRKINEEGVTFKNHMNGDTLMLSPEKSIQIQHNLGADIIMSFDECPPFPATHEYMLASVERTLRWAQRGKDAHQRPDDQALFGIVQGGEFADLRELSAKKLVEMDFPGYSIGGTSVGETKETLYKMVDYAIKWLPKDKPRYLMGVGSTDAILEGVLRGIDMFDCVLPTRIARHGTLMTSEGRLNIRNAKFERDFGPLDPECDCYTCKNFSRAYLRHLIRCTEGLGQRLLSIHNLRFLTKLTEDIREAINDDRFLDFKAEYFKRYDLNSIDSRGF

SEQ ID NO: 55088 - protein, 378 aa, Erythrobacter aquimixticola
  misc_feature (1)..(378): tr|A0A419RRL9|A0A419RRL9_9SPHN Queuine tRNA-ribosyltran sferase OS=Erythrobacter aquimixticola OX=1958945 GN=tg t PE=3 SV=1
MASDRPRFAFSLKARDGRARTGEIAMRRGTIRTPAFMPVGTAATVKAMKPESVRATGADIILGNTYHLMLRPGAERMARLGGLHEFMRWDRPILTDSGGYQVMSLSDLRKLTEKGVEFRSHIDGSKHMLTPERSIEIQRLLGSDIVMAFDECPRADRPMAEIEASMELSMRWAQRSRDAFDAGGEHAANAALFGIQQGALDRGLRARSAEALRAIDFDGYAVGGLAVGEGQEAMFGVLDYAPDMLPEEAPRYLMGVGKPDDLVGAVERGIDMFDCVLPTRSGRNGQGFTWNGPINLRNARHAEDTGPLDPRCTCPTCGNYSRAYLHHLHKSGEILGAMLLTEHNLSFYQQLMQTMRDAIGAGTFAAFAATFRADYLEA

SEQ ID NO: 55089 - protein, 368 aa, Erythrobacter atlanticus
  misc_feature (1)..(368): tr|A0A0H4VCG0|A0A0H4VCG0_9SPHN Queuine tRNA-ribosyltran sferase OS=Erythrobacter atlanticus OX=1648404 GN=tgt P E=3 SV=2
MDATDGRARTGRIEMRRGTIRTPAFMPVGTAGTVKAMKPEDVRAGGADIILGNTYHLMLRPGAERMARLGGLHSFMRWNRPILTDSGGYQVMSLSDLRKLTEEGVEFRSHIDGSKHMLTPERSMEIQRLLGSDIVMAFDECPRADRPMAEIEASMELSMRWAQRSRDAFDSGGDHAASSALFGIQQGALDEGLRARSAEALRAIGFDGFAIGGLAVGEGQEAMFGVLDYAPAMLPEDAPRYLMGVGKPDDLVGAVERGVDMFDCVLPTRSGRNGQAFTWNGTVNLRNAGHAEDTGPLDPRCICPTCASYSRAYLHHLHKSGEILGAMLLTEHNLSFYQQLMQAMRDAIAEGRFAIFAEDFRRDYLSRK

SEQ ID NO: 55090 - protein, 374 aa, Erythrobacter citreus
  misc_feature (1)..(374): tr|A0A0L1KDE6|A0A0L1KDE6_9SPHN Queuine tRNA-ribosyltran sferase OS=Erythrobacter citreus LAMA 915 OX=1306953 GN =tgt PE=3 SV=1
MSERFAFTIDATDGAARTGRIAMQRGTIRTPAFMPVGTAATVKAMKPETVRKTGADIILGNTYHLMLRPGAERMARLGGLHKFMNWQRPILTDSGGYQVMSLSELRKLTEKGVEFRSHIDGSKHMLTPERSMEIQRMLGSDIVMAFDECPRADRPRDEIAASMEMSMRWARRSRDGFDAGGEHAQRSALFGIQQGALDEELRRISADKLTDIGFDGYAIGGLAVGEGQEAMFATLDFAPGQLPADRPRYLMGVGKPDDLVGAVERGVDMFDCVLPSRSGRNGQAFTWNGPVNLRNARFAEDEEPLDSRCTCDTCGTYSRAYLHHLVKSQEILGAMLMTEHNIAFYQQLMQAMRDAIAEARFAQFARDFRRDYLQ

SEQ ID NO: 55091 - protein, 374 aa, Erythrobacter flavus
  misc_feature (1)..(374): tr|A0A3T1CIH9|A0A3T1CIH9_9SPHN Queuine tRNA-ribosyltran sferase OS=Erythrobacter flavus OX=192812 GN=tgt PE=3 S V=1
MSERFAFTIDATDGATRTGSIAMRRGTIRTPAFMPVGTAATVKAMKPETVRKTGADIILGNTYHLMLRPGAERVARLGGLHQFMNWDRPILTDSGGYQVMSLSDLRKLTEKGVEFRSHIDGSKHMLTPERSMEIQRLLGSDIVMAFDECPRADRPRDEIAASMEMSMRWAKRSRDGFDSGGDHAERAALFGIQQGALDEDLRQISAEKLTEIGFDGYAIGGLAVGEGQEAMFATLDFAPRQLPQDRPRYLMGVGKPDDLVGAVERGVDMFDCVLPSRSGRNGQAFTWNGPINLRNARFAEDQEPLDSRCACDTCGTYTRAYLHHLIKSQEILGAMLMTEHNIAFYQQLMQAMRDAIAEGRFAAFAAQFRSDYLG

SEQ ID NO: 55092 - protein, 374 aa, Erythrobacter flavus
  misc_feature (1)..(374): tr|A0A222EVX6|A0A222EVX6_9SPHN Queuine tRNA-ribosyltran sferase OS=Erythrobacter flavus OX=192812 GN=tgt PE=3 S V=1
MSERFAFTIDATDGAARTGSIAMRRGTIRTPAFMPVGTAATVKAMKPETVRKTGADIILGNTYHLMLRPGAERVARLGGLHQFMNWDRPILTDSGGYQVMSLSDLRKLTEKGVEFRSHIDGSKHMLTPERSMEIQRLLGSDIVMAFDECPRADRPRDEIAASMEMSMRWAKRSRDGFDSGGDHAERSALFGIQQGALDEDLRQISAEKLTEIGFDGYAIGGLAVGEGQEAMFATLDFAPRQLPHDRPRYLMGVGKPDDLVGAVERGVDMFDCVLPSRSGRNGQAFTWNGPINLRNARFAEDQEPLDSRCACDTCGTYTRAYLHHLIKSQEILGAMLMTEHNIAFYQQLMQAMRDAIAEGRFAAFAAQFRSDYLG

SEQ ID NO: 55093 - protein, 377 aa, Erythrobacter gangjinensis
  misc_feature (1)..(377): tr|A0A0G9MQ12|A0A0G9MQ12_9SPHN Queuine tRNA-ribosyltran sferase OS=Erythrobacter gangjinensis OX=502682 GN=tgt PE=3 SV=1
MTNPRFQFTVSATDGKARTGQIAMRRGTIRTPAFMPVGTAATVKAMKPEAVRATGADIILGNTYHLMLRPGAERVARLGGLHEFMRWKRPILTDSGGFQVMSLSDLRKLTEKGVEFRSHIDGSKHMLTPERSMEIQRLLGSDIVMAFDECPRADRPMKEIEASMELSMRWAQRSRDAFDAGEDHAAGAALFGIQQGALDEGLRARSAEALRAIGFDGYAIGGLAVGEGQEAMFATLDFAPSQLPEDAPRYLMGVGKPDDLVGAVERGVDMFDCVLPTRSGRNGQAFTWNGPVNLRNARHAEDTGPLDPRCPCPTCTSYSRAYLHHLQKSGEILGAMLVTEHNLSFYQQLMQAMRDAIGERRFAAFAQQFRHDYLPKS

SEQ ID NO: 55094 - protein, 380 aa, Erythrobacter litoralis
  misc_feature (1)..(380): tr|Q2NAS8|Q2NAS8_ERYLH Queuine tRNA-ribosyltransferase OS=Erythrobacter litoralis (strain HTCC2594) OX=314225 GN=tgt PE=3 SV=1
MTKPRFDFTIHATDGKARTGTIAMQRGEIRTPAFMPVGTAGTVKAMKPESVRAAGADIILGNTYHLMLRPGAERVARLGGLHTFMNWQRPILTDSGGYQVMSLSDLRKLTEQGVEFRSHIDGSKHMLTPERSMEIQRLLGSDIVMAFDECPRADQPRDVIAESMEMSMRWAKRSRDGFDGGAEHAARSALFGIQQGALDEQLRKISAERLTDIGFDGYAIGGLAVGEGQEAMFATLDFAPDQLPEDRPRYLMGVGKPDDLVGAVERGVDMFDCVLPSRSGRNGQAFTWNGPINLRNARFAEDQEPLDSRCACPTCGTYSRAYIHHLIKSQEILGAMLMTEHNIGFYQQLMQAMRDAIGEGRFAAFAADFRRDYLGGGDTA

SEQ ID NO: 55095 - protein, 376 aa, Erythrobacter litoralis
  misc_feature (1)..(376): tr|A0A074N1S3|A0A074N1S3_9SPHN Queuine tRNA-ribosyltran sferase OS=Erythrobacter litoralis OX=39960 GN=tgt PE=3 SV=1
MTAPRFKFTLHATDGKARTGTIAMQRGEIRTPAFMPVGTAATVKAMKPETVRSTGADIILGNTYHLMLRPGAERVARLGGLHHFMNWERPILTDSGGYQVMSLSDLRKLSEEGVEFRSHLDGSKHMLTPERSMEIQRLLGSDIVMAFDECPRADRPRDEIAESMELSMRWAKRSREGFDSGEDHAARAALFGIQQGALDEDLRRVSAQKLTDIGFDGYAVGGLAVGEGQEAMFGVLDYAPGQLPHDRPRYLMGVGKPDDLVGAVERGIDMFDCVLPTRSGRNGQAFTWDGPLNLRNARHAEDTGPLDERCTCPTCANYSRAYLHHLHKSGEILGAMLVTEHNLAFYQQLMQAMRAAIEEARFAAFASDFRRDYCKA

SEQ ID NO: 55096 - protein, 374 aa, Erythrobacter longus
  misc_feature (1)..(374): tr|A0A074MHH3|A0A074MHH3_ERYLO Queuine tRNA-ribosyltran sferase OS=Erythrobacter longus OX=1044 GN=tgt PE=3 SV= 1
MTRFSFDLHATDGRARTGKITMQRGEIRTPAFMPVGTAATVKAMKPESVREIGADIILGNTYHLMLRPGAERVARLGGLHNFMKWDRPILTDSGGYQVMSLSDLRKLTEKGVEFRSHIDGSKHMLTPERSMEIQRLLGSDIVMCFDECPRADRPRDEIAASMELSMRWAKRSRDGFDSGEGHASRSALFGIQQGALDEDLRRVSAQKLIDIGFDGYAVGGLAVGEGQEAMFGVLDYAPEMLPKDRPRYLMGVGKPDDLVGAVERGIDMFDCVLPTRSGRNGQAFTWNGPINLRNAKFAEDQEPLDPASDCSASRDYSKAYLHHLHKSHEILGAMLLTEHNLAFYQALMQKMRDAIAQGTFTAFAAEFRHNYLSK

SEQ ID NO: 55097 - protein, 385 aa, Erythrobacter luteus
  misc_feature (1)..(385): tr|A0A0G9MY05|A0A0G9MY05_9SPHN Queuine tRNA-ribosyltran sferase OS=Erythrobacter luteus OX=1581420 GN=tgt PE=3 SV=1
MASELPAGRPRFRFTVSATDGKARTGSIAMRRGTIRTPAFMPVGTAATVKAMKPEAVRATGADIILGNTYHLMLRPGAERMARLGGLHRFMHWDRPILTDSGGYQVMSLSDLRKLTEAGVEFRSHIDGSKHMLSPERSMEIQRLLGSDIVMAFDECPRADRPLAEIEASMELSMRWAQRSRDAFDAGGDHAAGSALFGIQQGALDEGLRARSAEALRAIGFDGYAIGGLAVGEGQEAMFATLDFAPAMLPEDAPRYLMGVGKPDDLVGAVERGVDMFDCVLPTRSGRNGQAFTWGGPVNLRNARHAEDLSPLDPRCTCPTCATYSRAYLHHLTKSGEMLGAMLLTEHNLSFYQQLMQAMRDAIAAGSFTQFAATFRSDYGLAGTA

SEQ ID NO: 55098 - protein, 376 aa, Erythrobacter lutimaris
  misc_feature (1)..(376): tr|A0A395LTV0|A0A395LTV0_9SPHN Queuine tRNA-ribosyltran sferase OS=Erythrobacter lutimaris OX=1538146 GN=tgt PE =3 SV=1
MSTRFDFQISATGGAARTGTIRMMRGEIRTPAFMPVGTAATVKGMKPEAVRAAGADIILGNTYHLMLRPGAERMAKLGGLHTFMNWDRPILTDSGGYQVMSLSDLNKLTEEGVEFRSHLDGSKHMLTPERSMEIQRLLGSDIVMAFDECPRADRPLSEIEASMEMSMRWAKRSRDAFDAGGEHAERAALFGIQQGALDEGLRQRSADALREIGFDGYAIGGLAVGEGQEAMFATLDFAPAQLPEDAPRYLMGVGKPDDLVGAVERGVDMFDCVLPTRSGRNGQAFTWNGPMNLRNARFAEDTGPLDDRCACPTCATYSRAYLHHLIKSGEMLGAMLLTEHNIGFYQQLMAAMRAAIADDRFAAFAREFRSTYLKQA

SEQ ID NO: 55099 - protein, 380 aa, Erythrobacter marinus
  misc_feature (1)..(380): tr|A0A0H0XPH6|A0A0H0XPH6_9SPHN Queuine tRNA-ribosyltran sferase OS=Erythrobacter marinus OX=874156 GN=tgt PE=3 SV=1
MASEKPRFAFTLKATDGRARTGQIAMRRGTIRTPAFMPVGTAATVKAMKPEDVRATGADIILGNTYHLMLRPGAERMARLGGLHKFMRWNRPILTDSGGYQVMSLCDLRKLTEKGVEFRSHIDGSKHMLSPERSMEIQRLLGSDIVMAFDECPRADRPMAEIEASMELSMRWAKRSRDAFDAGGEHAAGAALFGIQQGCLDEGLRKRSADALREIGFDGYAVGGLAVGEGQEAMFGVLDFAPAMLPEDAPRYLMGVGKPDDLVGAVERGIDMFDCVLPTRSGRNGQAFTWNGPVNLRNARHAEDTGPLDPRCPCPTCTQYSRAYLHHLQKSGEILGAMLTTEHNLSFYQNLMQAMRTAIAEQRFAAFAADFRRDYLERRE

SEQ ID NO: 55100 - protein, 378 aa, Erythrobacter nanhaisediminis
  misc_feature (1)..(378): tr|A0A1I5MXY7|A0A1I5MXY7_9SPHN Queuine tRNA-ribosyltran sferase OS=Erythrobacter nanhaisediminis OX=604088 GN=t gt PE=3 SV=1
MANRFDFTIDATDGAARTGRISMLRGDIRTPAFMPVGTAATVKAMKPETVRATGADIILGNTYHLMLRPGAERVARLGGLHKFMNWDRPILTDSGGYQVMSLSDLRKLTEKGVEFRSHIDGSKHMLTPERSMEIQRLLGSDIVMAFDECPRADRPRDEIAASMEMSMRWAQRSRDGFDAGGEHAERSALFGIQQGALDEELRKISAEKLTDIGFDGYAIGGLAVGEGQEAMFATLDFAPGQLPNDRPRYLMGVGKPDDLVGAVERGVDMFDCVLPSRSGRNGQAFTWHGPLNLRNARFAEDTGPLDEKCTCSVCATYSRAYLHHLQKSGEILGAMLMTEHNIAFYQQLMQAMRDAIGGGTFAAFAADFRRDYLGDAKQ

SEQ ID NO: 55101 - protein, 376 aa, Erythrobacter sp.
  misc_feature (1)..(376): tr|A0A1E4B0E7|A0A1E4B0E7_9SPHN Queuine tRNA-ribosyltran sferase OS=Erythrobacter sp. SCN 62-14 OX=1660099 GN=tg t PE=3 SV=1
MSTRFSFTLHATDGKARTGVIQMQRGEIRTPAFMPVGTAATVKAMKPEDVRASGADIILGNTYHLMLRPTAERMARLGGLHKFMNWDRPILTDSGGYQVMSLSELRKLTEQGVEFKSHLDGSRHMITPERSMEIQRLLGSDIVMAFDECPRADRPRDEIAASMELSMRWARRSRDGFDSGEQHAMRAALFGIQQGALHEDLRRVSAEKLIDIGFDGYAVGGLAVGEGQEAMFGVLDYAPAMLPANKPRYLMGVGKPDDLVGAVERGIDMFDCVLPTRSGRNGQAFTWNGPVNLRNAKHAEDTGPLDERCTCPVCANYSRAYLHHLHKSGEILGAMLVTEHNLYFYQALMQAMRDAIARGRFAAFAADFRRDYLGSS

SEQ ID NO: 55102 - protein, 375 aa, Erythrobacter sp.
  misc_feature (1)..(375): tr|A0A2Z4K0I0|A0A2Z4K0I0_9SPHN Queuine tRNA-ribosyltran sferase OS=Erythrobacter sp. KY5 OX=2011159 GN=tgt PE=3 SV=1
MSQRFSFELKATDGRARTGKIQMLRGEIRTPAFMPVGTAATVKAMKPEAVRALGADIILGNTYHLMLRPGAERVARLGGLHNFMRWDRPILTDSGGYQVMSLSDLRKLTEKGVEFRSHIDGSKHMLTPERSMEIQRLLGSDIVMAFDECPRADRPRDEIAASMELSMRWAKRSRDAFDSGEEHAARSALFGIQQGALDEDLRRISADKLTDIGFDGYAVGGLAVGEGQEAMFGVLDYAPGMLPADRPRYLMGVGKPDDLVGAVERGIDMFDCVLPTRSGRNGQAFTWNGPLNLRNARFAEDQEPLDETSTCSASRDYSKAYLHHLIKSGEMLGAMLLTEHNLAFYQSLMQAMRTAISEQRFDSFAAEFRRNYLRN

SEQ ID NO: 55103 - protein, 377 aa, Erythrobacter xanthus
  misc_feature (1)..(377): tr|A0A3A1P4I4|A0A3A1P4I4_9SPHN Queuine tRNA-ribosyltran sferase OS=Erythrobacter xanthus OX=1784712 GN=tgt PE=3 SV=1
MTAPRFQFSIHSTDGKARTGTIAMRRGEIRTPAFMPVGTAATVKAMKPETVRAIGADIILGNTYHLMLRPGAERVARLGGLHRFMRWDRPILTDSGGYQVMSLASLRKLTEEGVTFQSHIDGSRHMLSPERSMEIQRLLGSDIVMCFDECPRADRPLKEIEASMELSMRWARRSRNAFDAGGDHAASAALFGIQQGALDEGLRQRSAEALREIGFDGYAIGGLAVGEGQEAMFATLDFAPGQLPEDAPRYLMGVGKPDDLVGAVERGVDMFDCVLPTRSGRNGQGFTWNGPVNLRNARHAEDTAPLDERCSCDTCANYSRAYLHHLHKSGEILGAMLLTEHNLAFYQQLMQAMRDAITEGRLAAFAADFRRDYLAKI

SEQ ID NO: 55104 - protein, 379 aa, Erythrobacter zhengii
  misc_feature (1)..(379): tr|A0A418NWD5|A0A418NWD5_9SPHN Queuine tRNA-ribosyltran sferase OS=Erythrobacter zhengii OX=2307003 GN=tgt PE=3 SV=1
MASDRPRFAFTVHATDGKARTGEIAMRRGTIRTPAFMPVGTAATVKAMKPEDVRGTGADIILGNTYHLMLRPGAERVARLGGLHKFMRWDRPILTDSGGYQVMSLSDLRKLTEEGVEFRSHIDGSKHMLSPERSMEIQRLLGSDIVMCFDECPRADRPMQEIEASMELSMRWARRSREAFDAGGEHAANSALFGIQQGALDETLRARSAGALREIGFDGYAIGGLAVGEGQEAMFGVLDYAPGQLPEDAPRYLMGVGKPDDLVGAVERGVDMFDCVLPTRSGRNGQAFTWNGPLNLRNARHAEDTGPLDERCSCPTCGSYSRAYLHHLHKSGEILGAMLVTEHNLSFYQQLMQAMRDAIAKGGFAEFARTFRQDYSGPA

SEQ ID NO: 55105 - protein, 375 aa, Erythrobacteraceae bacterium
  misc_feature (1)..(375): tr|A0A4R0NV67|A0A4R0NV67_9SPHN Queuine tRNA-ribosyltran sferase OS=Erythrobacteraceae bacterium CFH 75059 OX=25 28174 GN=tgt PE=3 SV=1
MTRFQFDLLATDGAARAGRIAMRRGVIDTPAFMPVGTAASVKAMKPGTVRALGAQIILGNTYHLMLRPGAERVARLGGLHRFMGWELPILTDSGGYQVMSLAELRSLSEEGVTFRSHLDGSRHILTPERSMEIQRLLGSDIVMAFDECPRPDQDRDALGRSMELSMRWAARSRTAFDAGADHVQRAALFGIQQGGLDEDLRRHSAEALTAIGFDGYAVGGLAVGEGQEAMFATLDFAPGQLPADRPRYLMGVGKPDDLVGAVERGIDMFDCVLPTRSGRNGQAFTWSGPLNLRNSRFAEDESPLDDRCTCDVCRGYSRAYLHHLVRSKEILGAMLMTEHNLAFYQQLMARMRAAIARGEFAAFAASFRASYGAER

SEQ ID NO: 55106 - protein, 376 aa, Erythrobacteraceae bacterium
  misc_feature (1)..(376): tr|A0A0P8AG61|A0A0P8AG61_9SPHN Queuine tRNA-ribosyltran sferase OS=Erythrobacteraceae bacterium HL-111 OX=16669 08 GN=tgt PE=3 SV=1
MTGPRFEFTLHQTDGKARTGVIRMQRGEIRTPAFMPVGTAATVKAMKPEAVRALGADIILGNTYHLMLRPGAERVARLGGLHRFMNWPRPILTDSGGYQVMSLSELRKLTEEGVEFRSHLDGSKHMLTPERSMEIQRLLGSDIVMAFDECPRADRPRDEIAASMELSMRWAKRSREGFDSDAAHAGRAALFGIQQGALDEDLRRVSAQALIDIGFDGYAVGGLAVGEGQEAMFGVLDYAPAMLPEQAPRYLMGVGKPDDLVGAVERGIDMFDCVLPTRSGRNGQAFTWNGPLNLRNARFAEDSEPLDPHSDCAASRDYSKAYLHHLVKSNEILGAMLVTEHNLAFYQQLMAAMRAAIAKGTFAAFARGFRRDYLGQ

SEQ ID NO: 55107 - protein, 375 aa, Escherichia albertii
  misc_feature (1)..(375): tr|A0A1X3JTZ3|A0A1X3JTZ3_9ESCH Queuine tRNA-ribosyltran sferase OS=Escherichia albertii B156 OX=550693 GN=tgt P E=3 SV=1
MKFELDTTDGRARRGRLVFDRGVVETPCFMPVGTYGTVKGMTPEEVEATGAQIILGNTFHLWLRPGQEIMKLHGDLHDFMQWKGPILTDSGGFQVFSLGDIRKITEQGVHFRNPINGDPIFLDPEKSMEIQYDLGSDIVMIFDECTPYPADWDYAKRSMEMSLRWAKRSRDHFDRLGNKNALFGIIQGSVYEDLRDISVKGLVDIGFDGYAVGGLAVGEPKADMHRILEHVCPQIPADKPRYLMGVGKPEDLVEGVRRGIDMFDCVMPTRNARNGHLFVTDGVVKIRNAKYKSDTGPLDPECDCYTCRNYSRAYLHHLDRCNEILGARLNTIHNLRYYQRLMAGLRKAIEEGKLESFVTDFYQRQGREVPPLNVD

SEQ ID NO: 55108 - protein, 375 aa, Escherichia albertii; identical to SEQ ID NO: 55107
  misc_feature (1)..(375): tr|A0A2S6PFW4|A0A2S6PFW4_9ESCH Queuine tRNA-ribosyltran sferase OS=Escherichia albertii OX=208962 GN=tgt PE=3 S V=1

SEQ ID NO: 55109 - protein, 375 aa, Escherichia fergusonii; identical to SEQ ID NO: 50999
  misc_feature (1)..(375): tr|F0JMX0|F0JMX0_ESCFE Queuine tRNA-ribosyltransferase OS=Escherichia fergusonii ECD227 OX=981367 GN=tgt PE=3 SV=1

SEQ ID NO: 55110 - protein, 375 aa, Escherichia marmotae
  misc_feature (1)..(375): tr|A0A2B7MK18|A0A2B7MK18_9ESCH Queuine tRNA-ribosyltran sferase OS=Escherichia marmotae OX=1499973 GN=tgt PE=3 SV=1
MKFELDTTDGRARRGRLVFDRGVVETPCFMPVGTYGTVKGMTPEEVEATGAQIILGNTFHLWLRPGQEIMKLHGDLHDFMQWKGPILTDSGGFQVFSLGDIRKITEQGVHFRNPINGDPIFLDPEKSMEIQYDLGSDIVMIFDECTPYPADWDYAKRSMEMSLRWAKRSRERFDSLGNKNALFGIIQGSVYEDLRDISVKGLVDIGFDGYAVGGLAVGEPKADMHRILEHVCPQIPADKPRYLMGVGKPEDLVEGVRRGIDMFDCVMPTRNARNGHLFVTDGVVKIRNAKYKSDTGPLDPECDCYTCRNYSRAYLHHLDRCNEILGARLNTIHNLRYYQRLMAGLRKAIEEGKLESFVADFYQRQGREVPPLNVD

SEQ ID NO: 55111 - protein, 375 aa, Escherichia sp.; identical to SEQ ID NO: 55110
  misc_feature (1)..(375): tr|A0A4U6CME4|A0A4U6CME4_9ESCH Queuine tRNA-ribosyltran sferase OS=Escherichia sp. MR OX=2575922 GN=tgt PE=3 SV =1

SEQ ID NO: 55112 - protein, 375 aa, Escherichia sp.; identical to SEQ ID NO: 55110
  misc_feature (1)..(375): tr|A0A4Q9JRP9|A0A4Q9JRP9_9ESCH Queuine tRNA-ribosyltran sferase OS=Escherichia sp. E10V4 OX=2478971 GN=tgt PE=3 SV=1

SEQ ID NO: 55113 - protein, 371 aa, Estrella lausannensis
  misc_feature (1)..(371): tr|A0A0H5DP28|A0A0H5DP28_9BACT Queuine tRNA-ribosyltran sferase OS=Estrella lausannensis OX=483423 GN=tgt PE=3 SV=1
MKLKFNIHKKDGKSRARAGEIETAHGTIQTPVFMPVGTKASVKTVTNTQLEEMACRIILGNTYHLMLRPGMDIIRKAGGLHAFMGWNQSILTDSGGFQVFSLSSLRKITDEGVYFQSHIDGSRHFLGPKESMEVQKALNSDIVMCFDECVSYPSELKEVEKAMERTHLWASICRDYPLGADQNLFGIVQGGVDPSLRAASAQFLRTLDFEGYAIGGLSVGEPGEIMYRVIDAVEPHLPEEKPRYLMGVGTPRNLIEAVMRGVDMFDCVMPTRNARNGTAFTWQGKVTIKAARYSEDFTPLDPETKSEASRHTKAYIRHLLNVDEVTGLTLVTLQNLAFYLDFMKKIRHAILEGTLDELYAKVKAIYPESGD

SEQ ID NO: 55114 - protein, 376 aa, Ethanoligenens harbinense
  misc_feature (1)..(376): tr|E6U6Z2|E6U6Z2_ETHHY Queuine tRNA-ribosyltransferase OS=Ethanoligenens harbinense (strain DSM 18485 / JCM 12 961 / CGMCC 1.5033 / YUAN-3) OX=663278 GN=tgt PE=3 SV=1
MFELLQTEGKARRGRFTTVHGKVETPAFMNVATSAAIKGGISSYDLVDLHCQVELCNTYHLHLRPGDDVVSDMGGLRAFMGWQGPVLTDSGGFQVFSLAPLRRITEDGVYFSSHIDGSHIFMGPEESMRIQSNLGSTIAMAFDECVANPAEYEYAVQSCARTTRWLERCKKEMACLNAAPGTINPHQMLFGINQGATFDDLRVAHMRQIAEMDLDGYAIGGLAVGEPAEDMYRIISCVEPHMPVGKPRYLMGVGTPLNLLEAVERGIDLFDCVMPSRNARHAHVFTRAGKRNLMNAKYTRDSAPIDETCDCPVCKKHSRAYLHHLFKAEELLAMRLSVMHNLYFYNRLMEDIRAAIEEGRFAAFKRELSRTIDRRI

SEQ ID NO: 55115 - protein, 376 aa, Ethanoligenens harbinense; identical to SEQ ID NO: 55114
  misc_feature (1)..(376): tr|A0A386XKL7|A0A386XKL7_9FIRM Queuine tRNA-ribosyltran sferase OS=Ethanoligenens harbinense OX=253239 GN=tgt P E=3 SV=1

SEQ ID NO: 55116 - protein, 380 aa, Eubacteriaceae bacterium
  misc_feature (1)..(380): tr|A0A143Y2E6|A0A143Y2E6_9FIRM Queuine tRNA-ribosyltran sferase OS=Eubacteriaceae bacterium CHKCI004 OX=1780380 GN=tgt PE=3 SV=1
MYTLLTRDGLAKRGRLETVHGTIETPVFMNVGTVGAIKGAVSTDDLKTIETQVELSNTYHLHVRTGDELIKKFGGLHKFMAWDRPILTDSGGFQVFSLSGLRRIKEEGVYFQSHIDGHHIFMGPEESMQIQSNLGSTIAMAFDECPPSKADESYIRNSVARTTRWLARCKAKMAELNSLPDTVNPHQLLFGINQGGILADVRKEHARIISEMDLDGYAIGGLAVGETHEEMYHILDETVPCLPADKPTYLMGVGTPANIVEAVDRGVDFFDCVYPSRNGRHGHVYTAHGKLNLFNKKYELDPRPIEEGCGCPACRTYSRAYIRHLLKAKEMLGMRLCVLHNLYFYNHLMERIRAAIEEHRYKEFKKETLEGFLTPEEELR

SEQ ID NO: 55117 - protein, 376 aa, Eubacteriaceae bacterium
  misc_feature (1)..(376): tr|A0A143ZTS9|A0A143ZTS9_9FIRM Queuine tRNA-ribosyltran sferase OS=Eubacteriaceae bacterium CHKCI005 OX=1780381 GN=tgt PE=3 SV=1
MYQLLKKEGAARRGQFDTPHGSVQTPAFMNVATAGAIKGAVSAHDLADLKCQVMLCNTYHLHLRPGDKLVHDFGGLHSFTGWQGPILTDSGGFQVFSLSKLRKIKEEGVHFSSHIDGRKIFMGPEESMQIQSHLGSTIAMAFDECIENPSPYDYVADSCARTVRWLKRCRQEMTRLNGLPDTLNPQQMLFGINQGGTFDDLRVAHMQEIAELDLDGYAIGGLAVGEPAEDMYRIISAVETFMPVNKPRYLMGVGTPVNILEAVHRGVDLFDCVMPTRNGRHAHVFTWEGIRNLLNEKYQLDHAPIDEHCDCPTCRRYSRAYLRHLFKSGEMLAMRLCVMHNLYFYNTLLERIRAALDEGQFEAFYQTHRLVLDKRI

SEQ ID NO: 55118 - protein, 371 aa, Eubacterium aggregans
  misc_feature (1)..(371): tr|A0A1H4BSI5|A0A1H4BSI5_9FIRM Queuine tRNA-ribosyltran sferase OS=Eubacterium aggregans OX=81409 GN=tgt PE=3 S V=1
MFKYELIKEEKDTGARLGRITTDHGVIETPIFMPVGTQATVKSMDVHDLETMGAQIILGNTYHLYLRPGQEIMEKAGGLHSFMNWQHPILTDSGGFQVFSLGDLRKITEEGVHFVSHLDGSRHFMSPEKSIEMQNSIGADIIMCFDECAPADADYDYTKKSLEMTSRWAARCKAAHKRPDEQALFGIVQGGMFKDLRAQSAREITAMDFPGYSIGGLSVGESKEIMYEMLSHTVPLLPEDKPHYLMGVGSVDALFEGVIRGIDMFDCVLQTRIARNGTAMTSQGKVVVRNATYAEDFSPLDPECDCYVCRNHTRAYLRHLIKCNEILGARLLTYHNLYFTLRIMEKIREAIKNDTLLALKEEVFQKYGITS

SEQ ID NO: 55119 - protein, 371 aa, Eubacterium barkeri
  misc_feature (1)..(371): tr|A0A1H3CAC0|A0A1H3CAC0_EUBBA Queuine tRNA-ribosyltran sferase OS=Eubacterium barkeri OX=1528 GN=tgt PE=3 SV=1
MFKYELIKEEKDTGARLGRITTDHGVIETPIFMPVGTQATVKSMDVHDLETMGAQIILGNTYHLYLRPGQEIMEKAGGLHSFMNWQHPILTDSGGFQVFSLGDLRKITEEGVHFVSHLDGSRHFMSPEKSIEMQNSIGADIIMCFDECAPADADYDYTKKSLEMTSRWAARCKAAHKRPDEQALFGIVQGGMFKDLRAQSAREITAIDFPGYSIGGLSVGESKSVMYEMLSHTVPLLPKDKPHYLMGVGSVDALFEGVIRGIDMFDCVLQTRIARNGTAMTSQGKVVVRNATYAEDFSPLDPECDCYVCRNHTRAYLRHLIKCNEILGARLLTYHNLYFTLRIMEKIREAIKNDRLLALKEEIFQKYGITS

SEQ ID NO: 55120 - protein, 377 aa, Eubacterium brachy
  misc_feature (1)..(377): tr|V1CQ67|V1CQ67_9FIRM Queuine tRNA-ribosyltransferase OS=Eubacterium brachy ATCC 33089 OX=1321814 GN=tgt PE=3 SV=1
MRGSMSALKFILEKKDKSDKARAGKIILPHGEVETPVFMPVGTAATVKSMKPEDVERLGAEIILSNTYHLYLRPGSKIIRDAGGLHKFMNWNRPILTDSGGFQVFSLGEMRKITEQGVEFRSFIDGSKHTLTPEKSIEVQCDLGSDIMMAFDECTPYPADRDYVKNSLERTTRWLKRCIKAQQDTEKQALFGIMQGGMYRDLREESARQIVDLDLPGYAIGGLSVGEPKELMCEVLDYAVDFLPENKPRYLMGVGTPDYIFEGIQRGIDMFDCVLPTRIARNGTAMTSIGRVNIKNAKYERDFEPLDRECDCYTCRNYSKSYLRHLFKANEILSSILLSTHNLHFLVKMTKNIRKAILEDRFFEYKTEFYSKYGYDE

SEQ ID NO: 55121 - protein, 369 aa, Eubacterium callanderi; identical to SEQ ID NO: 52981
  misc_feature (1)..(369): tr|E3GG70|E3GG70_9FIRM Queuine tRNA-ribosyltransferase OS=Eubacterium callanderi OX=53442 GN=tgt PE=3 SV=1

SEQ ID NO: 55122 - protein, 399 aa, [Eubacterium] cellulosolvens
  misc_feature (1)..(399): tr|I5ARC8|I5ARC8_EUBCE Queuine tRNA-ribosyltransferase OS=[Eubacterium] cellulosolvens 6 OX=633697 GN=tgt PE=3 SV=1
MAEYKLMKVCGRAKRAEFTTVHGTVQTPVFMNVGTVAAIKGGVSTEDLEKIGTQIELSNTYHLHVRTGDETIKKLGGLHKFMSWNKPILTDSGGFQVFSLADMRKIKEEGVTFRSHIDGHYIFMGPEESMQIQSNLGSTIAMAFDECPSSVATQQYVKKSIERTTRWLDRCKKKMQELNMREDTVNPHQLLFGINQGAVYNDLRIEHAKMITERELDGYAVGGLAVGETHQQMYDVLDHVVPYLPQDKPTYLMGVGTPANIIEAVDRGIDFFDCVYPSRNGRHGHVYTHHGHLNLMNAQYELDDNPIEEGCGCPVCQRYSRAYIRHLLKAKEMLGLRFCTLHNLYFYNHLMEEIREAIDSDNWDSWKKKTLDDLNEEKQNHKVMNQPKFYQKVINEELK

SEQ ID NO: 55123 - protein, 377 aa, Eubacterium coprostanoligenes
  misc_feature (1)..(377): tr|A0A1T4LTI0|A0A1T4LTI0_9FIRM Queuine tRNA-ribosyltran sferase OS=Eubacterium coprostanoligenes OX=290054 GN=t gt PE=3 SV=1
MGYKLLKTENKARRGEFSTVHGTVQTPCFMNVATVAAIKGGLSTVDLKEVGAQVMLCNTYHLHVRPGDDKVKTLGGLHKFTNWDRPILTDSGGFQVFSLAKLNKITEDGVTFNSHVDGRKIFMGPEESMQIQSNLGSTIAMAFDECVANPAKYEYSKEACARTLRWLERCKVEMDRLNSLPDTINKNQMLFGINQGCTFDDLRVEHMKEIAKMDLDGYAIGGLAVGEPKEDMYRIISAVEPFAPVDKPRYLMGVGTPGNILEGVSRGVDLFDCVMPARNARHGQLFTKKGIININNAKYILDDHPIDEECQCPTCRNYSRAYVRHLLKAGEMLGMRLAVMHNLYFYNNLMTEIRENIDNNSFEDYKNEYVDRLDTRI

SEQ ID NO: 55124 - protein, 405 aa, Eubacterium dolichum; identical to SEQ ID NO: 50910
  misc_feature (1)..(405): tr|R7G8W1|R7G8W1_9FIRM Queuine tRNA-ribosyltransferase OS=Eubacterium dolichum CAG:375 OX=1263076 GN=BN631_002 42 PE=3 SV=1

SEQ ID NO: 55125 - protein, 378 aa, [Eubacterium] eligens
  misc_feature (1)..(378): tr|A0A415MFP4|A0A415MFP4_9FIRM Queuine tRNA-ribosyltran sferase OS=[Eubacterium] eligens OX=39485 GN=tgt PE=3 S V=1
MYKILKTDGRAKRAEFTTVHGTVQTPVFMNVGTVAAIKGAVATTDLQQIGTQIELSNTYHLHVRPGDKIIKQLGGLHKFMNWDKPILTDSGGFQVFSLAGLRKIKEEGVTFQSHIDGHKIFMGPEESMQIQSNLGSTIAMAFDECAPAKADRKYIQNSVDRTYRWLERCKKEMARLNSLPDTVNPDQMLFGIDQGGVCNDIRIDHAKRISELDLDGYAVGGLAVGETHEEMYDVLDNVVPYLPKDKPTYLMGVGTPANILEAVDRGIDFFDCVYPSRNGRHGHVYTKFGKINLFNAKYETDTAPIEEGCGCPCCQNYSRAYVRHLLKAKEMLGMRLCVLHNLYYYNHLMTDIRAAIEEGRYAGFKEEALYQMKTYNKQ

SEQ ID NO: 55126 - protein, 378 aa, [Eubacterium] eligens
  misc_feature (1)..(378): tr|A0A174ZAW4|A0A174ZAW4_9FIRM Queuine tRNA-ribosyltran sferase OS=[Eubacterium] eligens OX=39485 GN=tgt PE=3 S V=1
MYKILKTDGRAKRAEFTTVHGTVQTPVFMNVGTVAAIKGAVATTDLQQIGTQIELSNTYHLHVRPGDKIIKQLGGLHKFMNWNKPILTDSGGFQVFSLAGLRKIKEEGVTFQSHIDGHKIFMGPEESMQIQSNLGSTIAMAFDECAPAKADRKYIQNSVDRTYRWLERCKKEMARLNSLPDTVNPDQMLFGIDQGGVFNDIRIDHAKRISELDLDGYAVGGLAVGETHEEMYDVLDNVVPYLPKDKPTYLMGVGTPANILEAVDRGIDFFDCVYPSRNGRHGHVYTKFGKINLFNAKYETDTAPIEEGCGCPCCQNYSRAYVRHLLKAKEMLGMRLCVLHNLYYYNHLMTDIRAAIEEGRYAGFKEEALYQMKTYDKQ

SEQ ID NO: 55127 - protein, 378 aa, Eubacterium eligens
  misc_feature (1)..(378): sp|C4Z563|TGT_EUBE2 Queuine tRNA-ribosyltransferase OS= Eubacterium eligens (strain ATCC 27750 / VPI C15-48) OX =515620 GN=tgt PE=3 SV=1
MYKILKTDGRAKRAEFTTVHGTVQTPVFMNVGTVAAIKGAVATTDLQQIGTQIELSNTYHLHVRPGDKIIKQLGGLHKFMNWDKPILTDSGGFQVFSLAGLRKIKEEGVTFQSHIDGHKIFMGPEESMQIQSNLGSTIAMAFDECAPAKADRKYIQNSVDRTYRWLERCKKEMARLNSLPDTVNPDQMLFGIDQGGVFNDIRIDHAKRISELDLDGYAVGGLAVGETHEEMYDVLDNVVPYLPQDKPTYLMGVGTPANILESVDRGIDFFDCVYPSRNGRHGHVYTKFGKINLFNAKYETDTAPIEEGCGCPCCQNYSRAYVRHLLKAKEMLGMRLCVLHNLYYYNHLMTDIRAAIEEGRYAGFKEEALYQMKTYDKQ

SEQ ID NO: 55128 - protein, 378 aa, Eubacterium eligens
  misc_feature (1)..(378): tr|R6A5C6|R6A5C6_9FIRM Queuine tRNA-ribosyltransferase OS=Eubacterium eligens CAG:72 OX=1263077 GN=tgt PE=3 SV =1
MYKILKTDGRAKRAEFTTVHGTVQTPVFMNVGTVAAIKGAVATTDLQQIGTQIELSNTYHLHVRPGDKIIKQLGGLHKFMNWNKPILTDSGGFQVFSLAGLRKIKEEGVTFQSHIDGHKIFMGPEESMQIQSNLGSTIAMAFDECAPAKADRKYIQNSVDRTYRWLERCKKEMARLNSLPDTVNPEQMLFGIDQGGVFNDIRIDHAKRISELDLDGYAVGGLAVGETHEEMYDVLDNVVPYLPKDKPTYLMGVGTPANILEAVDRGIDFFDCVYPSRNGRHGHVYTKFGKINLFNAKYETDTAPIEEGCGCPCCQNYSRAYVRHLLKAKEMLGMRLCVLHNLYYYNHLMTDIRAAIEEGRYAGFKEEALYQMKTYDKQ

SEQ ID NO: 55129 - protein, 380 aa, Eubacterium hallii
  misc_feature (1)..(380): tr|R6G0T6|R6G0T6_9FIRM Queuine tRNA-ribosyltransferase OS=Eubacterium hallii CAG:12 OX=1263078 GN=tgt PE=3 SV= 1
MYKLLTKDGMAKRGEFETVHGTIQTPVFMNVGTVGAIKGAVSTDDLRTIGTQVELSNTYHLHVRTGDKLIKQFGGLHKFMGWDKPILTDSGGFQVFSLSGLRKIKEEGVYFQSHIDGHHIFMGPEESMQIQSNLGSTIAMAFDECPSSRADRTYIQNSVDRTTRWLERCKKKMQELNSLPDTVNPHQMLFGINQGGVFADIRIEHAKRISELDLDGYAVGGLAVGETHDEMYYILDEVVPYLPENKPTYLMGVGTPANIIEAVDRGIDFFDCVYPSRNGRHGHVYTHHGKLNLFNKKFELDPRPIEEGCQCPSCRTYSRAYIRHLLKAKEMLGMRLCVLHNLYFYNHLMEEIRGAIDEHRYKEFKKTTLEGFLTPEEEYR

SEQ ID NO: 55130 - protein, 373 aa, [Eubacterium] infirmum
  misc_feature (1)..(373): tr|A0A377FN19|A0A377FN19_9FIRM Queuine tRNA-ribosyltran sferase OS=[Eubacterium] infirmum OX=56774 GN=tgt PE=3 SV=1
MKHAVSYELKRKDKNSGARRGVLHTPHGDIQTPVFMPVGTQATVKAMTPEQVEATGAKLILGNTYHLFLRPGHEIVREAGGLHKFMNWNHAILTDSGGFQVFSLGKLRKISEEGVTFRSHIDGSKKFISPEIAIEIQNSLGADIIMAFDECAPYPADRRYVEDSLKRTTRWLKRCKDAHKDVERQSLFGIMQGGMYSDLRKMSADQIVELNLPGYAIGGLSVGEPKELMLEVLDNCVDYLPSEKARYLMGVGTVDYIFEGVERGIDMFDCVQPTRIARHGMATTANGKLNIKNVKFERDFSSLDEECDCYTCRNFSKAYLRHLFKANEMLCSTLLSIHNIYFLEKMMEGIQKAIEEDRFLEFKKEFYDKYGEF

SEQ ID NO: 55131 - protein, 373 aa, Eubacterium infirmum
  misc_feature (1)..(373): tr|H1PM16|H1PM16_9FIRM Queuine tRNA-ribosyltransferase OS=Eubacterium infirmum F0142 OX=883109 GN=tgt PE=3 SV= 1
MKHAVSYELKRKDKNSEARRGVLHTPHGDIQTPVFMPVGTQATVKAMTPEQVEATGAKLILGNTYHLFLRPGHEIVREAGGLHKFMNWNHAILTDSGGFQVFSLGKLRKISEEGVTFRSHIDGSKKFISPEIAIEIQNALGADIIMAFDECAPYPADRRYVEDSLKRTTRWLKRCKDAHKDVERQSLFGIMQGGMYSDLRKMSADQIVEMNLPGYAIGGLSVGEPKELMLEVLDNCVDYLPSEKARYLMGVGTVDYIFEGVERGIDMFDCVQPTRIARHGMATTANGKLNIKNVKFERDFSSLDEECDCYTCRNFSKAYLRHLFKANEMLCSTLLSIHNIHFLEKMMEGIQKAIEEDRFLEFKKEFYDKYGEF

SEQ ID NO: 55132 - protein, 369 aa, Eubacterium limosum
  misc_feature (1)..(369): tr|A0A317RWB9|A0A317RWB9_EUBLI Queuine tRNA-ribosyltran sferase OS=Eubacterium limosum OX=1736 GN=tgt PE=3 SV=1
MFRYELIKEDKHTGARLGKIHTSHGVINTPIFMPVGTQATVKSMTSEDLEEMDANIILGNTYHLYLRPGQEIMEKAGGLHNFMNWDRPILTDSGGFQVFSLNDLRKITEEGVEFCSHLDGSRHFMSPEKSIDMQNTIGADIIMCFDECAPADADYEYTKKSMEMTTRWAKRCKDAHKRPDDQALFGIVQGGMYEDLRAESVRGLTEIDFPGYSIGGLSVGESKDTMYRILDATVPLLPKDKPRYLMGVGSVDALLEGVIRGVDMFDCVLQTRIARNGTAMTSQGKVVVRNATYKEDFTPLDPECDCFVCRNYTRAYLRHLVKCNEILGARLLTYHNLYFTLKLMEKVRNAIMEDNLLAFKESFFQKYGI

SEQ ID NO: 55133 - protein, 369 aa, Eubacterium limosum
  misc_feature (1)..(369): tr|A0A0U2MHP0|A0A0U2MHP0_EUBLI Queuine tRNA-ribosyltran sferase OS=Eubacterium limosum OX=1736 GN=tgt PE=3 SV=1
MFRYELIKEDKHTGARLGKIHTNHGVINTPIFMPVGTQATVKSMTSEDLKEMDANIILGNTYHLYLRPGQEIMEKAGGLHKFMNWDRPILTDSGGFQVFSLNDLRKITEEGVEFCSHLDGSRHFMSPEKSIDMQNTIGADIIMCFDECAPADADYEYTKKSMEMTTRWAKRCKDAHKRPDDQALFGIVQGGMYEDLRAESVRGLTEIDFPGYSIGGLSVGESKDTMYRILDATVPLLPKDKPRYLMGVGSVDALLEGVIRGVDMFDCVLQTRIARNGTAMTSQGKVVVRNATYKEDFTPLDPECDCFVCRNYTRAYLRHLVKCNEILGARLLTYHNLYFTLKLMEKVRNAIMEDSLLAFKESFFQKYGI

SEQ ID NO: 55134 - protein, 369 aa, Eubacterium maltosivorans; identical to SEQ ID NO: 55133
  misc_feature (1)..(369): tr|A0A4P9CC77|A0A4P9CC77_9FIRM Queuine tRNA-ribosyltran sferase OS=Eubacterium maltosivorans OX=2041044 GN=tgt PE=3 SV=1

SEQ ID NO: 55135 - protein, 373 aa, Eubacterium minutum
  misc_feature (1)..(373): tr|A0A223B3W3|A0A223B3W3_9FIRM Queuine tRNA-ribosyltran sferase OS=Eubacterium minutum ATCC 700079 OX=888721 GN =tgt PE=3 SV=1
MTYRLLHRDSKTGARRGVIHTPHGDIQTPVFMPVGTQAAVKAMRPEQIDDMGAEIILANTYHLYLRPGDNLIADAGGLHKFMNWKKPILTDSGGFQVFSLGKLRKITEEGVKFQSHIDGAKHILTPEKAVEIQQNLGSDIMMAFDECAPYPADRAYIKESMNRTIRWLRRCREAQLEGFHGNTDKQALFGIVQGGMYKDLRHECVKTMVDMDLPGYALGGLSVGEPKERMIDILDECVDDLPAGKPRYLMGVGTPDYLFEAVEHGIDMCDCVEPTRIARHGLATTSRGRINIKNAKFERDFMPLDPECDCYTCRNYSKSYIRHVFKAGEMMAAMLLSNHNLHFLIKLMQNMRTAIEEDRFLEFKEEFYARYYG

SEQ ID NO: 55136 - protein, 372 aa, Eubacterium nodatum
  misc_feature (1)..(372): tr|W2BZ79|W2BZ79_9FIRM Queuine tRNA-ribosyltransferase OS=Eubacterium nodatum ATCC 33099 OX=1161902 GN=tgt PE= 3 SV=1
MDHAVTYELLHKDKETGARRGVIHTPHGDIQTPVFMPVGTQAAVKSMRPEQVKDMGAEVILSNTYHLYLRPGHEIIREAGGLHKFMNWDRAILTDSGGFQVFSLGKLRKITEEGVRFQSHIDGSRHILTPEKAVEIQNALGSDIIMAFDECAPYPSDRTYIKDSMNRTIRWLERCKKAHKNIEHQSLFAIVQGGMYKDLRHECAKIMVDMEFPGYAFGGLSVGEPKEEMIDILDDCVEDLPVDKPRYLMGVGTPDYLFEAVEHGIDMCDCVEPTRIARHGLATTSQGRLNIKNKKFEKDFTPLDSECDCYTCRNYSRAYIRHTFKAGEMMAAMLISNHNLHFLVRLMANMRKAIEEDRFLEFKEEFYEKYYE

SEQ ID NO: 55137 - protein, 376 aa, Eubacterium oxidoreducens
  misc_feature (1)..(376): tr|A0A1G6AXW6|A0A1G6AXW6_EUBOX Queuine tRNA-ribosyltran sferase OS=Eubacterium oxidoreducens OX=1732 GN=tgt PE= 3 SV=1
MYELLKTEGRAKRGVLHTVHGDIQTPVFMNVGTAAAIKGAVSTEDLEQIKTQVQLSNTYHLHVRPGDEIVKKMGGLHKFMSWDKPILTDSGGFQVFSLAGLRKIKEEGVTFHSHVDGRKIFMGPEESMQIQSNLGSTIAMAFDECPPALAERDYVMRSVERTTRWLKRCKLEMARLNQLEDTVNPHQLLFGINQGAIYADIRIEHAKQIADMELPGYAVGGLAVGESHEQMYYILEEVVPYLPKNKPTYLMGVGTPANILEAVERGVDFFDCVYPSRNGRHGHVYTNNGKLNLFNKKFELDARPIEEGCGCPACRRYSRAYIRHLLKAKEMLGMRLCVLHNLYFYNTMMEEIRAALDEGRFAEYKKQKLDQMQSDV

SEQ ID NO: 55138 - protein, 378 aa, Eubacterium plexicaudatum
  misc_feature (1)..(378): tr|N2AB22|N2AB22_9FIRM Queuine tRNA-ribosyltransferase OS=Eubacterium plexicaudatum ASF492 OX=1235802 GN=tgt P E=3 SV=1
MYELLKQEGRAKRGIFHTVHGDIQTPVFMNVGTCGAIKGAVSTDDLKGIKTQVELSNTYHLHVRPGDFLIKKMGGLHRFIAWDKPILTDSGGFQVFSLAGLRKIKEEGVYFHSHVDGRKIFMGPEQSMQIQSNLASTIAMAFDECPSSRADRTYVQNSVDRTTRWLKRCQDEMKRLNRLEDTINKNQLLFAINQGAVFDDIRIEHAKRIAEMETDGYALGGLAVGETHEEMYHILDVTVPHLPVNKPTYLMGVGTPENILEGVERGVDFFDCVYPTRNGRHGHVYTNNGKLNLFNRQFEMDERPIEEGCQCPACRTYSRAYIRHLLKAKEMLGMRLCVLHNLYFYNTMMEEIRGALDEGNFAAYKAKKLEGFRCGART

SEQ ID NO: 55139 - protein, 375 aa, Eubacterium pyruvativorans
  misc_feature (1)..(375): tr|A0A1I7HMH2|A0A1I7HMH2_9FIRM Queuine tRNA-ribosyltran sferase OS=Eubacterium pyruvativorans OX=155865 GN=tgt PE=3 SV=1
MSNLAVTYELLHRDKKTGARRGVVHTPHGDIQTPVFMPVGTQAAVKAMRPEQVRDMGAEIILSNTYHLYLRPGHELIREAGGLHKFMNWNRAILTDSGGFQVFSLGKLRKITEEGVRFQSHIDGSRHILTPEKAIEIQEALGSDIMMAFDECAPYPADHSYIEDSMLRTCRWLKRCQDAQTSPEKQALFGIMQGGMYEDLRRESAARIVDMDLQGYSIGGLSVGEPKAKMLEVLDYCVDLLPVEKPRYLMGVGTPDYIFEGVERGLDMFDCVEPTRIARHGVAMTSHGRINLKNAKFARDFTPLDEECDCYACRHYTKAYIRHTLKAGELMSAMLLSEHNLHFLIHMMQEMRKAIEEDRFLEYKQEFYEKYGIND

SEQ ID NO: 55140 - protein, 376 aa, Eubacterium ramulus
  misc_feature (1)..(376): tr|A0A2V1JT18|A0A2V1JT18_EUBRA Queuine tRNA-ribosyltran sferase OS=Eubacterium ramulus OX=39490 GN=tgt PE=3 SV= 1
MYKLLKKDGRAKRAEVTTVHGTIQTPVFMNVGTAAAIKGAVSTDDLQQIKTQVQLSNTYHLHVRPGDKLIKDLGGLHRFMVWDKPILTDSGGFQVFSLAGLRKIKEEGVHFHSHVDGRKIFMGPEESMQIQSNLGSTIAMAFDECPPALADRSYVQPSVDRTTRWLERCKKEMQRLNSLEDTINKNQMLFGINQGAIYDDIRIDHAKRISEMDLDGYAVGGLAVGESHEEMYHILDVTVPHLPEDKPTYLMGVGTPANILEAVDRGVDFFDCVYPSRNGRHGHVYTNFGKLNLFNQKFERDMRPIEEGCQCPACRTYSRAYIRHLLKAKEMLGMRLCVLHNLYFYNTMMEEIRDAIDAGNYQNYKAEKLYRMEHGE

SEQ ID NO: 55141 - protein, 376 aa, Eubacterium ramulus
  misc_feature (1)..(376): tr|U2PSD7|U2PSD7_EUBRA Queuine tRNA-ribosyltransferase OS=Eubacterium ramulus ATCC 29099 OX=1256908 GN=tgt PE= 3 SV=1
MYKLLKKDGRAKRAEVTTVHGTIQTPVFMNVGTAAAIKGAVSTDDLQQIKTQVELSNTYHLHVRPGDKLIKELGGLHKFMVWDKPILTDSGGFQVFSLAGLRKIKEEGVQFHSHVDGRKIFMGPEESMQIQSNLGSTIAMAFDECPPALADRNYVQPSVDRTTRWLERCKKEMQRLNSLEDTINKNQMLFGINQGAIFDDIRIDHAKRISEMDLDGYAVGGLAVGESHEEMYHILDVTVPHLPEDKPTYLMGVGTPANILEAVDRGVDFFDCVYPSRNGRHGHVYTNFCKLNLFNQKFERDMRPIEVGCQCPACRTYSRAYIRHLLKAKEMLGMRLCVLHNLYFYNTMMEEIRDAIDMGNYQNYKAEKLYRMEHGE

SEQ ID NO: 55142 - protein, 380 aa, [Eubacterium] rectale; identical to SEQ ID NO: 51324
  misc_feature (1)..(380): tr|D6E576|D6E576_9FIRM Queuine tRNA-ribosyltransferase OS=[Eubacterium] rectale DSM 17629 OX=657318 GN=tgt PE= 3 SV=1

SEQ ID NO: 55143 - protein, 380 aa, [Eubacterium] rectale
  misc_feature (1)..(380): tr|A0A414I123|A0A414I123_9FIRM Queuine tRNA-ribosyltran sferase OS=[Eubacterium] rectale OX=39491 GN=tgt PE=3 S V=1
MAKYELLKQEGRAKRGTFHTVHGDIQTPVFMNVGTVGAIKGAVSTDDLKEIKCQVELSNTYHLHVRTGDKIIKELGGLHKFMVWDRPILTDSGGFQVFSLAGLRKIKEEGVYFNSHIDGAKIFMGPEESMQIQSNLGSTIAMAFDECPSSVADRQYVTNSVNRTARWLERCKKEMARLNSLPDTINKEQLLFGINQGAIYDDIRIDHAKRISELELDGYAVGGLAVGESHEEMYHILDETVPHLPVNKPTYLMGVGTPANILEGVERGIDFFDCVYPSRNGRHGHVYTNHGKLNLFNQKYQKDMRPIEEGCNCPACRTYSRAYIRHLLKAKEMLGMRLCVLHNLYFYNNMMEEIRDSLDAGCFASYKAEKLYGMTQGEQS

SEQ ID NO: 55144 - protein, 380 aa, Eubacterium rectale; identical to SEQ ID NO: 51324
  misc_feature (1)..(380): tr|R6U3B2|R6U3B2_9FIRM Queuine tRNA-ribosyltransferase OS=Eubacterium rectale CAG:36 OX=1263079 GN=tgt PE=3 SV =1

SEQ ID NO: 55145 - protein, 393 aa, Eubacterium ruminantium
  misc_feature (1)..(393): tr|A0A1H5WQS2|A0A1H5WQS2_9FIRM Queuine tRNA-ribosyltran sferase OS=Eubacterium ruminantium OX=42322 GN=tgt PE=3 SV=1
MNWVTLFPTDQADEKMYKLITTDKRAKRGVFSTPHGDIQTPVFMNVGTAAAIKGAVATSDLEDIDTQVMLCNTYHLHVRPGDEIVKKLGGLHKFTDWHRPILTDSGGFQVYSLAKLRNIKEEGVTFNSHVDGRKIFMGPEESMTIQSNLASTIAMAFDECPPAKAERNYIINSVERTYRWLIRCRDKMNELNSREDTINKAQMLFGINQGGVFDDIRIDHAKRISELDLPGYAVGGLAVGETHEEMYHILDVTVPFLPQDKPTYLMGVGTPANILEAVERGVDFFDCVYPTRNGRHGQLYTNRGKMNIKNKKYELDESPIAEDCDCPVCRRYSRAYIRHLLKADEMLGMRFCVLHNLHFYNNLLKEIREAIEEHRFESYKAERLQGFKEYEGK

SEQ ID NO: 55146 - protein, 377 aa, Eubacterium ruminantium
  misc_feature (1)..(377): tr|A0A1T4PJG0|A0A1T4PJG0_9FIRM Queuine tRNA-ribosyltran sferase OS=Eubacterium ruminantium OX=42322 GN=tgt PE=3 SV=1
MYKLITKDGKAKRGVFSTPHGDIQTPVFMNVGTAAAIKGAVATSDLEDIDTQVMLCNTYHLHVRPGDEIVKQLGGLHEFTNWKRPILTDSGGFQVYSLAKLRNIKEEGVTFNSHVDGRKIFMGPEESMTIQSNLASTIAMAFDECPPAKAERSYIEKSVARTYRWLIRCRDKMNELNSMEGTINKEQMLFGINQGGVLDDIRIDHAKMITELDLPGYAIGGLAVGESHEEMYHVLDVTVPYLPEDKPTYLMGVGTPANILEAVERGVDFFDCVYPTRNGRHGQLYTNQGKINIKNKKYELDTRPIAEDCDCPVCKKYTRAYIRHLLKADEMLGMRFCVLHNLHFYNKLMKEIRIAIEEHRFKAFKSAKLRGFEEGDR

SEQ ID NO: 55147 - protein, 377 aa, Eubacterium saphenum
  misc_feature (1)..(377): tr|C7GZ12|C7GZ12_9FIRM Queuine tRNA-ribosyltransferase OS=Eubacterium saphenum ATCC 49989 OX=592031 GN=tgt PE= 3 SV=1
MKIGGNMLDFKLLITDSKSNARRGVIKTKSSTIQTPVFMPVGTQASIKSVPADMVYDAGAKIILSNTYHLYLRPGEDIVKEAGGIRQFMNFNGSVLTDSGGFQVFSLAKMRNITEEGVEFKSHIDGSTHFFSPEKSMQIQRDLGSDIVMAFDECIPYPSDYDYVKKSTERTTRWLGRCASFKLQPHQSLFGIMQGGMDRDLRKLSADGITEYDLDGYAIGGLSVGESIEMMQSILEVCTNYLPKDKPRYLMGVGSPIELLNGVKNGIDMFDCVLPTRYGRHGIAMTDNGNISIKKKMYERDFTPLDHTCDCPACRNYSKAYIRHLYRAGEGLAATLLSIHNIRFLLRLMERIRDSIEREEFQKFYDEYSSNYKGRTV

SEQ ID NO: 55148 - protein, 377 aa, [Eubacterium] siraeum
  misc_feature (1)..(377): tr|A0A174ZSM7|A0A174ZSM7_9FIRM Queuine tRNA-ribosyltran sferase OS=[Eubacterium] siraeum OX=39492 GN=tgt PE=3 S V=1
MFKVLKTDGVARRGEFHTPHGVIQSPFFMNVGTSAAIKGGISSLDLKDLKCQVELCNTYHLHVRPGDDIIYKMGGLHKFMNWDRPILTDSGGFQVFSLAKLRKIKEEGVYFNSHVDGRRIFMGPEESMRIQSHLASTIAMAFDECIENPSPYDYVKKSVDRTTRWLQRCIDEMARLNSLPETINRQQMLFAINQGGTYDDIRAEHMKTIANMNVDGVAIGGLAVGEPTDVMYRIIETVIPHAPTDKPRYLMGVGTPSNIIEAVYRGVDMFDCVMPSRNARHATVFTWNGITHVTNQCFETDSLPIDPECDCPTCRNFSRAYIRHLFKSGEMLGGRLAVQHNLYFYNTLMEKIRAAIEEGTFEEFRNHYSPLLASKLV

SEQ ID NO: 55149 - protein, 377 aa, [Eubacterium] siraeum
  misc_feature (1)..(377): tr|D4MMF4|D4MMF4_9FIRM Queuine tRNA-ribosyltransferase OS=[Eubacterium] siraeum V10Sc8a OX=717961 GN=tgt PE=3 SV=1
MFKVLKTDGVARRGEFHTPHGVIQSPFFMNVGTSAAIKGGISSLDLKDLKCQVELCNTYHLHVRLGDDIIYKMGGLHKFMNWDRPILTDSGGFQVFSLAKLRKIKEEGVYFNSHVDGRRIFMGPEESMRIQSHLASTIAMAFDECIENPSPYDYVKKSVDRTTRWLQRCIDEMARLNSLPETINRQQMLFAINQGGTYDDIRAEHMKTIANMNVDGVAIGGLAVGEPTDVMYRIIETVIPHAPTDKPRYLMGVGTPSNIIEAVYRGVDMFDCVMPSRNARHATVFTWNGITHVTNQCFETDSLPIDPECDCPTCRNFSRAYIRHLFKSGEMLGGRLAVQHNLYFYNTLMEKIRAAIDEGTFEEFRNHYSPLLASKLV

SEQ ID NO: 55150 - protein, 377 aa, Eubacterium siraeum; identical to SEQ ID NO: 55148
  misc_feature (1)..(377): tr|R6SQT7|R6SQT7_9FIRM Queuine tRNA-ribosyltransferase OS=Eubacterium siraeum CAG:80 OX=1263080 GN=tgt PE=3 SV =1

SEQ ID NO: 55151 - protein, 378 aa, Eubacterium sp.
  misc_feature (1)..(378): tr|A0A416WC93|A0A416WC93_9FIRM Queuine tRNA-ribosyltran sferase OS=Eubacterium sp. AF15-50 OX=2293103 GN=tgt PE =3 SV=1
MFKVLAKDGAAKYGRFETVHGTIETPVFMNVGTAGAIKGAVAAEDLKEIKTQVELSNTYHLHVRPGDKIVKQLGGLHRFMNWDKPILTDSGGFQVFSLAGLRKIKEEGVYFNSHVDGRKIFMGPEESMQIQSNLASTIAMAFDECPSSVASRDYIENSVARTARWLKRCRKEMNRLNGLEDTINKNQMLFGINQGGIYDDVRIEHAKAISDIDLDGYAIGGLAVGESHAEMYRIIEKVVPYLPGDKPVYLMGVGTPANILEAVERGVDFFDCVYPSRNGRHGHVYTNAGKLNLFNAKYETDDRPIEEGCQCPACKYHTRAYIRHLLKAKEMLGMRLCVLHNLYFYNTMMEEIREAIKAGRYSEYKNNKLEGFKENDKN

SEQ ID NO: 55152 - protein, 326 aa, Eubacterium sp.
  misc_feature (1)..(326): tr|R5KUY7|R5KUY7_9FIRM Queuine tRNA-ribosyltransferase OS=Eubacterium sp. CAG:161 OX=1262881 GN=BN508_01171 PE =3 SV=1
MELSNTYHLHVRPGDKIVKQLGGLHRFMNWDKPILTDSGGFQVFSLAGLRKIKEEGVYFNSHVDGRKIFMGPEESMQIQSNLASTIAMAFDECPSSVASRDYIENSVARTARWLKRCRKEMNRLNGLEDTINKNQMLFGINQGGIYDDVRIEHAKAISDIDLDGYAIGGLAVGESHAEMYRIIEKVVPYLPGDKPVYLMGVGTPANILEAVERGVDFFDCVYPSRNGRHGHVYTNAGKLNLFNAKYETDDRPIEEGCQCPACKYHTRAYIRHLLKAKEMLGMRLCVLHNLYFYNTMMEEIREAIKAGRYSEYKNNKLEGFKENDKN

SEQ ID NO: 55153 - protein, 373 aa, Eubacterium sulci
  misc_feature (1)..(373): tr|X8K2W3|X8K2W3_9FIRM Queuine tRNA-ribosyltransferase OS=Eubacterium sulci ATCC 35585 OX=888727 GN=tgt PE=3 S V=1
MKHAVSYELKKKDKNSGARRGVLHTPHGDIQTPVFMPVGTQATVKAMTPEQVEATGARLILGNTYHLFLRPGHEIVREAGGLHKFMNWNHAILTDSGGFQVFSLGKLRKISEEGVTFRSHIDGSKKFISPEIAIEIQNALGADIIMAFDECAPYPADRRYVEASLNRTTRWLKRCKDAHKDIEKQSLFGIMQGGMYSDLRKMSAEQIVELDLPGYAIGGLSVGEPKELMIEVLDSCVDYLPKEKARYLMGVGTVDYIFEGVERGIDMFDCVQPTRIARHGMATTANGKVNIKNAKYERDFSPLDNECDCYTCRNFSKAYLRHLFKANEMLCSTLLSIHNIHFLEKMMEGIQKAIEEDRFLEYKKEFYDKYGEF

SEQ ID NO: 55154 - protein, 380 aa, Eubacterium uniforme
  misc_feature (1)..(380): tr|A0A1T4V3Q0|A0A1T4V3Q0_9FIRM Queuine tRNA-ribosyltran sferase OS=Eubacterium uniforme OX=39495 GN=tgt PE=3 SV =1
MYKIIETDGNAKSAEFTTVHGVVQTPVFMNVGTAAAIKGAVATTDLQNIKTQIELSNTYHLHVRPGDKIVKQLGGLHKFMNWDKPILTDSGGFQVFSLAGLRKIKEEGVYFNSHVDGRKIFMGPEESMQIQSNLASTIAMAFDECPSSRADEKYIRDSVDRTTRWLQRCKDEMARLNSLPDTINKQQMLFAINQGGVFNDIRVEHAKVISEMNLDGYAIGGLAVGESHEEMYDVLEHVVPFLPKDKPTYLMGVGTPANILEAVERGVDFFDCVYPSRNGRHGHVYTNKGKLNLFNAKYELDSKPIEEGCGCPACQNYSRAYIRHLLKAKEMLGMRLCVLHNLYFYNTMMEEIREAIRNKSFSAYKKSKLEGFKENDLKSK

SEQ ID NO: 55155 - protein, 378 aa, Eubacterium ventriosum
  misc_feature (1)..(378): tr|A0A413RC08|A0A413RC08_9FIRM Queuine tRNA-ribosyltran sferase OS=Eubacterium ventriosum OX=39496 GN=tgt PE=3 SV=1
MFKVLAKDGNAKRGEFTTVHGKIQTPVFMNVGTAAAIKGAVAAEDLKTIKTQVELSNTYHLHVRPGDKVVKKLGGLHKFMNWDRPILTDSGGFQVFSLAGLRKIKEEGVYFNSHVDGRKIFMGPEESMQIQSNLASTIAMAFDECPSSVASRQYIENSVARTTRWLERCKKEMNRLNGLEDTINKNQLLFGINQGGIYDDIRVEQAKAIADMDLDGYAVGGLAVGESHEEMYRIIEKVEPHLPKDKPIYLMGVGTPANILEAVERGVDFFDCVYPSRNGRHGHVYTNAGKLNLFNAKYETDSRPIEEGCECPACKYHSRAYIRHLLKAKEMLGMRLCVLHNLYFYNTMMEEIRDAIEAGNYAEYKAKKLEGFKENDKK

SEQ ID NO: 55156 - protein, 378 aa, Eubacterium ventriosum
  misc_feature (1)..(378): tr|A0A415LD19|A0A415LD19_9FIRM Queuine tRNA-ribosyltran sferase OS=Eubacterium ventriosum OX=39496 GN=tgt PE=3 SV=1
MFKVLAKDGNAKRGEFTTVHGKIQTPVFMNVGTAAAIKGAVAAEDLKTIKTQVELSNTYHLHVRPGDKVVKKLGGLHKFMNWDRPILTDSGGFQVFSLAGLRKIKEEGVYFNSHVDGRKIFMGPEESMQIQSNLASTIAMAFDECPSSVASRQYIENSVARTTRWLERCKKEMNRLNGLEDTINKNQLLFGINQGGIYDDIRVEQAKAIADMDLDGYAIGGLAVGESHEEMYRIIEKVEPHLPKDKPIYLMGVGTPANILEAVERGVDFFDCVYPSRNGRHGHVYTNAGKLNLFNAKYETDSRPIEEGCECPACKYHSRAYIRHLLKAKEMLGMRLCVLHNLYFYNTMMEEIRDAIEAGNYAEYKAKKLEGFKENDKK

SEQ ID NO: 55157 - protein, 373 aa, [Eubacterium] yurii
  misc_feature (1)..(373): tr|E0QGN9|E0QGN9_9FIRM Queuine tRNA-ribosyltransferase OS=[Eubacterium] yurii subsp. margaretiae ATCC 43715 OX =864565 GN=tgt PE=3 SV=1
MNKPLKFEVIKKCNQSKARLGKIKTLHNEFETPVFMPVGTNATVKSMNEKELKEIGANIILSNTYHLHLRPGDEIVKKAGGLHEFMHWDRSILTDSGGFQVFSLGDLRKIKEEGVYFSSHLDGSKHFMGPEESIAVQNNLGSDIMMSFDECAPYPASYEYIRDSYKRTSRWAKRGKDANRNPKTQALFGIIQGGMFEDLRYESANELVEMDFDGYSIGGLSVGEPKELMYEVLDYTVDIIPSEKPRYLMGVGSPDDLFEGVIRGVDMFDCVLPTRIARNGTAMTSNGKVVVRNATYAEDFTPLDHECDCYVCKNYSRAYIRHLVKANEILGARLITYHNLYFLLRMMEKIRQSIRDGRLLEYKKEFFTKYYGV

SEQ ID NO: 55158 - protein, 373 aa, [Eubacterium] yurii
  misc_feature (1)..(373): tr|A0A1T5J2G7|A0A1T5J2G7_9FIRM Queuine tRNA-ribosyltran sferase OS=[Eubacterium] yurii OX=39498 GN=tgt PE=3 SV= 1
MNKPLKFEVIKKCSQTKSRLGKIKTLHNEFETPVFMPVGTNATVKSMNEKELKEIGANIILSNTYHLHLRPGDEIVKKAGGLHEFMHWDRSILTDSGGFQVFSLGDLRKIKEEGVYFSSHLDGSKHFMGPEESISVQNNLGSDIMMSFDECAPYPASYEYIRDSYKRTSRWAKRGKDANKNPETQALFGIIQGGMFEDLRYESANELVEMDFDGYSIGGLSVGEPKELMYEVLDYTVDIIPSEKPRYLMGVGSPDDLFEGVIRGVDMFDCVLPTRIARNGTAMTSNGKVVVRNATYAEDFTPLDHECDCYVCKNYSRAYIRHLVKANEILGARLITYHNLYFLLRMMEKIRQSIRDGRLLEYKKEFFTKYYGV

SEQ ID NO: 55159 - protein, 373 aa, Euhalothece natronophila
  misc_feature (1)..(373): tr|A0A5B8NM54|A0A5B8NM54_9CHRO Queuine tRNA-ribosyltran sferase OS=Euhalothece natronophila Z-M001 OX=522448 GN =tgt PE=3 SV=1
MTNISFKFSCDHHCPDSKARAGTFITPHGKVETPRFMPVGTAATVKGLTPAQLESAQAQMILANTYHLHLQPGEEIIAKAGGLHSFMGWKQPILTDSGGFQVFSLSDLRKINEDGVTFRSPRDGRIIDFTPERAIQVQNDLGADVIMAFDECPPYPADYETVLLATERTERWLERCIAAHSRPETQALFGIVQGGVYRDLRQYAAKRLVEFDLPGYAIGGVSVGEPGELIHEIVATTAPLLPPEKPRYLMGVGTYQEMVSAIAQGVDLFDCVIPTRLGRHGTALVQGERWNLKNARFREDFTPLDKTCPCYCCQNFSRAYLGHLIRSREMLGYLLLSLHNVTELIRFTQRIRTAILEDRFLNDFGQWLQPNPT

SEQ ID NO: 55160 - protein, 366 aa, Euhalothece sp.
  misc_feature (1)..(366): tr|A0A2K2ZUM7|A0A2K2ZUM7_9CHRO Queuine tRNA-ribosyltran sferase OS=Euhalothece sp. KZN 001 OX=1884791 GN=tgt PE =3 SV=1
MSFKFYCERNCRQTQARAGIFETPHGKVETPRFMPVGTIATVKGLTPAQLEAAQAQMILANTYHLHLQPGEEIIKQAGGLHEFMGWKQPILTDSGGFQVFSLSELRKISEEGVTFRSPRDGRIIDFTPEKAIQVQNALGADVIMAFDECPPYPADYDAVLLATERTERWLERCIQAHDRSESQALFGIVQGGVYEDLRRQAAKRLVEFDLPGYAIGGVSVGEPGTLINQIVAVTAPLLPQEKPRYLMGVGTYSEMVNAIAQGVDLFDCVIPTRLGRHGSALVQGERWNLKNARFREDFTPLDDRCPCYCCKTFSRAYLSHLIRSREMLGYLLISLHNVTELIRFTERIRTAILHDRFLAEFGHWLR

SEQ ID NO: 55161 - protein, 376 aa, Euzebyella marina
  misc_feature (1)..(376): tr|A0A3G2LBY5|A0A3G2LBY5_9FLAO Queuine tRNA-ribosyltran sferase OS=Euzebyella marina OX=1761453 GN=tgt PE=3 SV= 1
MKFTLHHKDPQSKARAGTMVTDHGAIETPIFMPVGTVASVKSVHQRELKDDINPDIILGNTYHLFLRPKIDILKKAGGLHKFMGWDRNILTDSGGYQVYSLSGNRKIKEEGVKFKSHIDGSVHLFTPERVMEIQRVIGADIIMAFDECTPYPCDYKYAERSMHMTHRWLERCITHLKKTPFEYDYAQTFFPIVQGSTYLDLRKRSAEYIAGIEAEGNAIGGLSVGEPAEEMYAMTDVVCSILPEDKPRYLMGVGTPINILENIALGVDMFDCVMPTRNARNGMLFTAYGTINIKNKKWEDDFSPIDEMGITFVDKEYTKAYLRHLFAANEYLGKQIATIHNLGFYMWLVREARKHILEGDFLDWKNRMVKQMDNRL

SEQ ID NO: 55162 - protein, 376 aa, Evtepia gabavorous
  misc_feature (1)..(376): tr|A0A3E2B6R9|A0A3E2B6R9_9FIRM Queuine tRNA-ribosyltran sferase OS=Evtepia gabavorous OX=2211183 GN=tgt PE=3 SV =1
MFTLLKTEGRARRGQLTCAHGTAQTPVFMNVGTQGAIKGAVSAQDLREIGCQIELSNTYHLHLRPGDELVKEMGGLHRFMRWDGPILTDSGGFQVFSLSGRRKIQEEGVTFASHIDGRRIFMGPEESIQIQWNLGSDIAMAFDECVENPAPYAYVKQSCERTFRWLERCKTEHARLKQLADGVNPQQMLFGINQGGILPDLRVWHMQQIASLDCDGYAIGGLAVGEPAETMYEIIEAVEPYMPAEKPRYLMGVGTPVNILEGVARGVDMFDCVLPARNARHGKLYTWNGAMNIKNEKYKRDEQPIDPACRCPVCRSFSRAYLRHLFAAGEMLAMRLAVLHNLYFYNALMDRIRLALEEGTFEAFYREYREKLGARM

SEQ ID NO: 55163 - protein, 374 aa, Ewingella americana
  misc_feature (1)..(374): tr|A0A085G7B9|A0A085G7B9_9GAMM Queuine tRNA-ribosyltran sferase OS=Ewingella americana ATCC 33852 OX=910964 GN= tgt PE=3 SV=1
MKYELSTTDGRARRGRLVFERGVVETPAFMPVGTYGTVKGMTPEEVKDTGAQILLGNTFHLWLRPGQEIMKLHGDLHDFMNWHGPILTDSGGFQVFSLGAMRKIKEEGVHFRNPINGDPVFLSPEKSMEIQNDLGSDIVMIFDECTPYPADWDYAKRSMEMSLRWAKRSRDRHNELNNKNALFGIIQGSVYEDLRDVSLKGLVEIGFDGYAVGGLAVGEPKEDMHRILEHVCPQIPEDKPRYLMGVGKPEDLVEGVRRGVDMFDCVMPTRNARNGHLFVTDGIVKIRNAKHKDDTSTLDEHCDCYTCRNYSRAYLHHLDRCNEILGARLNTIHNLRYYQRLMAGLRQAIEEGKLELFVKDFYERKGKEVPPLNF

SEQ ID NO: 55164 - protein, 374 aa, Ewingella americana
  misc_feature (1)..(374): tr|A0A502GQ00|A0A502GQ00_9GAMM Queuine tRNA-ribosyltran sferase OS=Ewingella americana OX=41202 GN=tgt PE=3 SV= 1
MKYELSTTDGRARRGRLVFERGVVETPAFMPVGTYGTVKGMTPEEVKETGAQILLGNTFHLWLRPGQEIMKLHGDLHDFMNWHGPILTDSGGFQVFSLGAMRKIKEEGVHFRNPINGDPVFLSPEKSMEIQNDLGSDIVMIFDECTPYPADWDYAKRSMEMSLRWAKRSRDRHNELNNKNALFGIIQGSVYEDLRDVSLKGLVDIGFDGYAVGGLAVGEPKEDMHRILEHVCPQIPEDKPRYLMGVGKPEDLVEGVRRGVDMFDCVMPTRNARNGHLFVTDGIVKIRNARYKDDTTTLDEHCDCYTCRNYSRAYLHHLDRCNEILGARLNTIHNLRYYQRLMAGLRQAIEEGKLELFVKDFYEGKGKEVPPLNF

SEQ ID NO: 55165 - protein, 381 aa, Exiguobacterium antarcticum
  misc_feature (1)..(381): tr|K0ADW4|K0ADW4_EXIAB Queuine tRNA-ribosyltransferase OS=Exiguobacterium antarcticum (strain B7) OX=1087448 G N=tgt PE=3 SV=1
MTKHAVTYEHIKTCKQSGARLGIVHTPHGSFETPVFMPVGTQATVKTMAPEQIKDMNANIILSNTYHLWVRPGHDVIKEAGGLHKFMNWDGAILTDSGGFQVFSLADLRNITEEGVHFRNHLNGDKLFLSPEKAMEIQNALGSDIMMAFDECPPFPASHEYMKASVERTSRWAERCLAAHERPQDQALFGIIQGGEYEDLRRQSARDLASLDFPGYAVGGLSVGEPKDVMYRALDFTTPLMPEDKPRYLMGVGSPDALIEGAIRGIDMFDCVLPTRIARNGTLMTSSGRLVVRNAKYARDFRPLDEKCDCYACKNYSRAYIHHLIRAQETFGLHLCSTHNLHFLVKLMEGVRQAIREDRLLDFKDEFFEEYGYNLPNAKNF

SEQ ID NO: 55166 - protein, 381 aa, Exiguobacterium aurantiacum
  misc_feature (1)..(381): tr|A0A377FV76|A0A377FV76_9BACL Queuine tRNA-ribosyltran sferase OS=Exiguobacterium aurantiacum OX=33987 GN=tgt PE=3 SV=1
MTKHAVTYEHIHTCKQTGARHGIVHTPHGSFETPVFMPVGTQASVKTMAPEQVRAMGANIILSNTYHLWIRPGHEVVKQAGGLHKFMNWDGAILTDSGGFQVFSLADLRNIQEEGVHFRNHLNGDKLFLSPEKAMEIQNALGSDIMMAFDECPPFPATHEYMKKSVERTSRWAERCLEAHTRPEDQALFGIIQGGEYEDLRRQSAADLVSLDFPGYAVGGLSVGEPKDVMYRALEFTTPFMPEDKPRYLMGVGSPDALIEGSIRGIDMFDCVLPTRIARNGTLMTSKGRVTIKHAKHKTDFGPIDEKCDCYTCKNYSRAYVHHLIRADEMFGLHLCSTHNLHFLVKLMEQVRQAIREDRLRDFKEEFFEEYGYNKPNAKNF

SEQ ID NO: 55167 - protein, 381 aa, Exiguobacterium chiriqhucha
  misc_feature (1)..(381): tr|U1MWL0|U1MWL0_9BACL Queuine tRNA-ribosyltransferase OS=Exiguobacterium chiriqhucha RW-2 OX=1345023 GN=tgt P E=3 SV=1
MTKHAVTYEHIHTCKQTGARHGIVHTPHGSFETPVFMPVGTQATVKTMAPEQVKAMGANIILSNTYHLWIRPGHEVVKQAGGLHKFMNWDGAILTDSGGFQVFSLADLRNIQEEGVHFRNHLNGDKLFLSPEKAMEIQNALGSDIMMAFDECPPFPATHEYMKKSVERTSRWAERCLAAHERPEDQALFGIIQGGEYEDLRRQSAADLVSLDFPGYAVGGLSVGEPKDVMYRALEFTTPFMPENKPRYLMGVGSPDALIEGSIRGIDMFDCVLPTRIARNGTLMTSKGRVTIKHAKHKTDFGPIDEKCDCYTCKNYSRAYVHHLIRADEMFGLHLCSTHNLHFLVNLMSQVRQAIREDRLLDFKEEFFEEYGYNKPNAKNF

SEQ ID NO: 55168 - protein, 381 aa, Exiguobacterium enclense
  misc_feature (1)..(381): tr|A0A0V8GJX5|A0A0V8GJX5_9BACL Queuine tRNA-ribosyltran sferase OS=Exiguobacterium enclense OX=1017277 GN=tgt P E=3 SV=1
MTKHAVTYEHIKTCKQSGARLGIVHTPHGSFETPVFMPVGTQATVKTMAPEQIKDMNANIILANTYHLWVRPGHDVIKEAGGLHKFMNWDGAILTDSGGFQVFSLADLRNISEEGVHFRNHLNGDKLFLSPEKAMEIQNALGSDIMMAFDECPPYPASHEYMKASVERTSRWAERCLAAHERPHDQALFGIIQGGEYEDLRRQSAKDLVALDFPGYAVGGLSVGEPKDVMYRALEFTTPLMPEDKPRYLMGVGSPDALIEGAIRGIDMFDCVLPTRIARNGTLMTSQGRLVVRNAKYARDFRPLDEKCDCYACKNYSRSYIHHLIRAQETFGLHLCSTHNLHFLVKMMEGVRQAIREDRLLDFKEEFFEEYGYNLPNAKNF

SEQ ID NO: 55169 - protein, 381 aa, Exiguobacterium mexicanum; identical to SEQ ID NO: 55167
  misc_feature (1)..(381): tr|A0A099DGH8|A0A099DGH8_9BACL Queuine tRNA-ribosyltran sferase OS=Exiguobacterium mexicanum OX=340146 GN=tgt P E=3 SV=1

SEQ ID NO: 55170 - protein, 381 aa, Exiguobacterium sibiricum
  misc_feature (1)..(381): tr|B1YJQ9|B1YJQ9_EXIS2 Queuine tRNA-ribosyltransferase OS=Exiguobacterium sibiricum (strain DSM 17290 / JCM 13 490 / 255-15) OX=262543 GN=tgt PE=3 SV=1
MTKHAVTYEHIKTCKQSGARLGIVHTPHGSFETPVFMPVGTQATVKTMAPEQIKNMNANIILSNTYHLWVRPGHDVIKEAGGLHKFMNWDGAILTDSGGFQVFSLADLRNITEEGVNFRNHLNGDKLFLSPEKAMEIQNALGSDIMMAFDECPPFPASHEYMKASVERTSRWAERCLEAHERPQDQALFGIIQGGEYEDLRRQSARDLASLDFPGYAVGGLSVGEPKDVMYRALDFTTPLMPEDKPRYLMGVGSPDALIEGAIRGIDMFDCVLPTRIARNGTLMTSSGRLVVRNAKYARDFRPLDEKCDCYACKNYSRAYIHHLIRAQETFGLHLCSTHNLHFLVKLMEGVRQAIREDRLLDFKDEFFEEYGYNLPNAKNF

SEQ ID NO: 55171 - protein, 381 aa, Exiguobacterium sp.
  misc_feature (1)..(381): tr|A0A248L8J7|A0A248L8J7_9BACL Queuine tRNA-ribosyltran sferase OS=Exiguobacterium sp. N4-1P OX=2051906 GN=tgt PE=3 SV=1
MTKHAVTYEHIKTCKQSGARLGIVHTPHGSFETPVFMPVGTQATVKTMAPEQIKDMNANIILSNTYHLWVRPGHDVIKEAGGLHKFMNWDGAILTDSGGFQVFSLADLRNITEEGVHFRNHLNGDKLFLSPEKAMEIQNALGSDIMMAFDECPPFPASHEYMKASVERTSRWAERCLTAHERPQDQALFGIIQGGEYEDLRRQSARDLASLDFPGYAVGGLSVGEPKDVMYRALEFTTPLMPEDKPRYLMGVGSPDALIEGAIRGIDMFDCVLPTRIARNGTLMTSSGRLVVRNAKYARDFRPLDEKCDCYACKNYSRAYIHHLIRAQETFGLHLCSTHNLHFLVKLMEGVRQAIREDRLLDFKDEFFEEYGYNLPNAKNF

SEQ ID NO: 55172 - protein, 381 aa, Exiguobacterium sp.
  misc_feature (1)..(381): tr|A0A069EUT9|A0A069EUT9_9BACL Queuine tRNA-ribosyltran sferase OS=Exiguobacterium sp. AB2 OX=1484479 GN=tgt PE =3 SV=1
MTKHAVTYEHIHTCKQTGARHGIVHTPHGSFETPVFMPVGTQASVKTMAPEQVKAMGANIILSNTYHLWIRPGHEVVKQAGGLHKFMNWDGAILTDSGGFQVFSLADLRNIQEEGVHFRNHLNGDKLFLSPEKAMEIQNALGSDIMMAFDECPPFPATHEYMKKSVERTSRWAERCLEAHERPQDQALFGIIQGGEYEDLRRQSAADLVSLDFPGYAVGGLSVGEPKDVMYRALEFTTPFMPEDKPRYLMGVGSPDALIEGSIRGIDMFDCVLPTRIARNGTLMTSEGRVTIKHAKHKTDFGPIDEKCDCYTCKNYSRAYVHHLIRADEMFGLHLCSTHNLHFLVKLMEQVRQAIREDRLLDFKEEFFEEYGYNKPNAKNF

SEQ ID NO: 55173 - protein, 416 aa, Extensimonas vulgaris
  misc_feature (1)..(416): tr|A0A369AJ63|A0A369AJ63_9BURK Queuine tRNA-ribosyltran sferase OS=Extensimonas vulgaris OX=1031594 GN=tgt PE=3 SV=1
MLSECADRGSVAAGRGTPAALGQCAPMLQFDLLATDPASHARRARLTLHHGVVETPIFMPVGTYGTVKGVLPQSLHAMGAQIILGNTFHLWMRPGLDVLRNFGGLHAFENWHKPILTDSGGFQVWSLGEMRKITEQGVHFASPVNGDKLFLSPEISMQIQTVLDSDIVMQFDECTPYETKGHITTEHEARASMELSLRWARRSQEEFARLQNRNALFGIVQGGMFEHLREESLAALVALDLPGYAVGGVSVGEPKEDMLRIMAHTPHRLPAHKPRYLMGVGTPEDLVEGVAQGVDMFDCVMPTRNARNGTLFTRYGDLKIRNARHKSDPRPLDTSCRCEACAGPSGVPWDEGGRTGFSRAYLHHLDRCGEMLAPMLCTIHNLHYYLQLMQEMRSALEAGEFSAFRARFREERARGV

SEQ ID NO: 55174 - protein, 377 aa, Extibacter muris
  misc_feature (1)..(377): tr|A0A4R4FHD1|A0A4R4FHD1_9FIRM Queuine tRNA-ribosyltran sferase OS=Extibacter muris OX=1796622 GN=tgt PE=3 SV=1
MYKVLARDGLAKRGRLQTVHGVIETPVFMNVGTAAAIKGAVSTDDLQGIKTQVELSNTYHLHVRPGDDVVKKLGGLHKFMVWDKPILTDSGGFQVFSLAGLRRIKEEGVYFNSHIDGRKIFMGPEESMQIQSNLASTIAMAFDECPSSVADRPYMEKSVERTTRWLGRCKEEMRRLNGLKDTINPRQMLFGINQGGIYEDIRIRHAKEIAAMDLDGYAIGGLAVGESHEDMYRILDAVVPHLPADRPTYLMGVGTPANILEAVDRGVDFFDCVYPSRNGRHGHVYTNHGKLNLFNARYELDGRPIEEGCGCPACRTYTRAYIRHLLKAKEMLGMRLCVLHNLYFYNTMMEEIREAVERGCYMEYKAEKLARMTGCEV

SEQ ID NO: 55175 - protein, 376 aa, Fabibacter misakiensis
  misc_feature (1)..(376): tr|A0A1E5T0Z6|A0A1E5T0Z6_9BACT Queuine tRNA-ribosyltran sferase OS=Fabibacter misakiensis OX=1563681 GN=tgt PE= 3 SV=1
MDFKLVAEDSGSKARSGVISTDHGEIKTPIFMPVGTAGTVKAVHQRELKEDVAAQIILGNTYHLYLRPGLDVIEGAGGLHKFNGWDRPMLTDSGGYQVYSLANTRKIKEEGVTFKSHIDGSKHTFTPEYAIDIQRTIGADIIMAFDECTPYPCEYGYARESMEMTHRWLKRCCDRFDATSSKYGYSQTLFPIVQGSTYKDLREKSAETIASFGREGNAIGGLSVGEPAEMMYEHTEIVCNILPKDKPRYLMGVGTPENILECIALGVDMFDCVMPTRNARHGLLFTSEGIINIKNEKWKKDYSPIDEALGGYVDTFYSKAYLRHLTHSKEYLGAQIASIHNLAFYLWLVDEARKHIEQGTFIDWKNVMVKKLTTRL

SEQ ID NO: 55176 - protein, 376 aa, Fabibacter pacificus
  misc_feature (1)..(376): tr|A0A1I0R4V7|A0A1I0R4V7_9BACT Queuine tRNA-ribosyltran sferase OS=Fabibacter pacificus OX=1267423 GN=tgt PE=3 SV=1
MDFKLTANDKGTKARAGEVTTDHGTIETPIFMPVGTAGTVKAVHQRELKEDVNAQIILGNTYHLYLRPGLDIIEKAGGLHKFNGWDRPILTDSGGYQVYSLSGTRKIKEEGVTFKSHIDGSKHVFTPENVMDIQRTIGADIIMAFDECTPYPCDYGYARESMEMTHRWLKRCCDRFDATEGKYGYSQTLFPIVQGSTYKDLRVKSAETIASFEREGNAIGGLSVGEPAEMMYEHTEIVCDILPKDKPRYLMGVGTPENILECIALGVDMFDCVMPTRNARNGMLFTSEGILNMRNEKWKDDFSPIDPNLGGYVSSFYSKAYLRHLITSKEILGAQIASIHNLSFYLWLVKEARKHIIDGTFVDWKNEMVKKVTTRL

SEQ ID NO: 55177 - protein, 376 aa, Fabibacter pacificus
  misc_feature (1)..(376): tr|A0A4D7JGP9|A0A4D7JGP9_9BACT Queuine tRNA-ribosyltran sferase OS=Fabibacter pacificus OX=1267423 GN=tgt PE=3 SV=1
MEFKITGKDSNSSARAGVLKTDHGEIPTPIFMPVGTAGTVKAVHQRELEDDIQAKIILGNTYHLYLRPGLDVLENAGGIHKFNGWEKPILTDSGGYQVYSLSNTRKIKEEGVEFRSHIDGSKHFFTAENVMDIQRTIGADIIMAFDECTPYPCDYDYAKKSMHMTHRWLKRCIKRVDETEGKYGYSQSLFPIVQGSVYEDLRKQSAEEIASHEREGNAIGGLSVGEPHEMMYDMTELVCEILPEDKPRYLMGVGTPANILEGIARGVDMFDCVMPTRNARHGILFTSEGVINIKNKKWQKDFTPIDPEIGGYASTFYTKAYLRHLIHTNEILGAQIASVHNLTFYLWLVNQARDHIMAGDFNSWKNEMALKLSERL

SEQ ID NO: 55178 - protein, 376 aa, Fabibacter sp.
  misc_feature (1)..(376): tr|A0A1E5SQQ6|A0A1E5SQQ6_9BACT Queuine tRNA-ribosyltran sferase OS=Fabibacter sp. 4D4 OX=1889784 GN=tgt PE=3 SV =1
MDFKLETEDKGSKARAGTITTDHGKIETPIFMPVGTAGTVKAVHQRELKEDVKAEIILGNTYHLYLRPGLEIIEKAGGLHKFNGWDRPLLTDSGGYQVYSLANTRKIKEEGVTFKSHIDGSKHTFSPEYAIDIQRTIGADIIMAFDECTPYPCEYGYARTSMEMTHRWLKRCCDRFDQTEGKYGYNQTLFPIVQGSTYKDLRQKSAETIASFEREGNAIGGLSVGEPHEILYEQTEVVCDILPKDKPRYLMGVGTPENILECIALGVDMFDCVMPTRNARHGLLFTSEGIINIRNEKWKDDFSPVDPNLDGYVDSFYTKAYLRHLTHSKEILAAQIASIHNLTFYLWLVKEARKHIQAGTFIDWKNVMVKKLVTRL

SEQ ID NO: 55179 - protein, 379 aa, Facklamia hominis
  misc_feature (1)..(379): tr|K1LID8|K1LID8_9LACT Queuine tRNA-ribosyltransferase OS=Facklamia hominis CCUG 36813 OX=883111 GN=tgt PE=3 S V=1
MPAVTYELIKEEKHTGARLGILHTPHGSFETPMYMPVGTLATVKSLSPEELKAMGAGVILSNTYHLWLRPGEDIVEDAGGLHTFMNWDQGLLTDSGGFQVFSLSDMRHIEEEGVHFRNHLSGEKLFLTPEKAIHIQNALGSDIMMSFDECPEFHQPYDYVKKSIDRTTRWAERGLEAHQNPDRQALFGICQGAGYKDLRLQHAKDMVSLDFPGYSIGGLSVGETKEEMNTVLDYLMPVLPTNKPRYLMGVGSPDALIDGAIRGVDMFDCVLATRIARNGTCMTSKGRLVVKNACYARDYTPIDPKCDCYTCKHYTRAYVRHLIKCDETFGLRLTSIHNTYFLLNLMRQVRQAIREDQLLEFRQAFREEYGYNKPGAPAF

SEQ ID NO: 55180 - protein, 381 aa, Facklamia ignava
  misc_feature (1)..(381): tr|K1LR04|K1LR04_9LACT Queuine tRNA-ribosyltransferase OS=Facklamia ignava CCUG 37419 OX=883112 GN=tgt PE=3 SV =1
MSKPAVTYELIKEEKYTGARLGILHTPHGSYETPMYMPVGTLATVKGLSPEELIDAGAGVILSNTYHLWLTPGEDIVERAGGLHSFMNWPQGVLTDSGGFQVFSLSANRKIVEEGVHFRHHLNGSKLFLTPERSIEIQNALGADMIMSFDECPPFDQTHDYVEKSINRTTRWAERGLKAHQKPDQQALFGIIQGAGYKDLRLQHAKDLVSLDFPGYSIGGLSVGETKEEMNEVLDYITPVIPKNKPRYLMGVGTPDSLIDGVIRGIDMFDCVLATRIGRNGTCMTHDGRLVVKNAKYKDDFTPIDPDCDCYACRHYTRAYIRHLIHTNEMFGLRLASLHNTHFLLNHMANIRQAIRDDQLLDYREYFFERYGYNKPNAKDF

SEQ ID NO: 55181 - protein, 381 aa, Facklamia ignava
  misc_feature (1)..(381): tr|A0A2I1K3R4|A0A2I1K3R4_9LACT Queuine tRNA-ribosyltran sferase OS=Facklamia ignava OX=137730 GN=tgt PE=3 SV=1
MSKPAVTYELIKEEKYTGARLGILHTPHGSYETPMYMPVGTLATVKGLSPEELIDAGAGVILSNTYHLWLTPGEDIVERAGGLHSFMNWPQGVLTDSGGFQVFSLSANRKIVEEGVHFRHHLNGSKLFLTPERSIEIQNALGADMIMSFDECPPFDQTHDYVEKSINRTTRWAERGLKAHQKPDQQALFGIIQGAGYKDLRLQHAKDLVSLDFPGYSIGGLSVGETKEEMNEVLDYITPVIPKNKPRYLMGVGTPDSLIDGVIRGIDMFDCVLATRIGRNGTCMTHDGRLVVKNAKYKDDFTPIDSDCDCYACRHYTRAYIRHLIHTNEMFGLRLASLHNTHFLLNHMANIRQAIRDDQLLDYREYFFERYGYNKPNAKDF

SEQ ID NO: 55182 - protein, 379 aa, Facklamia languida
  misc_feature (1)..(379): tr|H3NKB6|H3NKB6_9LACT Queuine tRNA-ribosyltransferase OS=Facklamia languida CCUG 37842 OX=883113 GN=tgt PE=3 SV=1
MAAITYELIKEEKHTGARLGILHTPHGSFPTPMYMPVGTLATVKALSPEELKEMGAGVILSNTYHLWLRPGEDIVQEAGGLHSFMNWDQGILTDSGGFQVFSLSEMRQIEEEGVHFRNHLSGEKLFLTPEKAIAIQNALGADLIMSFDECPDYHQSYDYVKNSIARTTRWAERGLKAHQHPDRQALFGICQGAGYKDLRLQHARDMAALDFPGYSIGGLSVGETKEEMNAVLDYLTPELPKDKPRYLMGVGSPDALIDGAIRGVDMFDCVLATRIARNGTCMTSQGRLVVKNAQYARDYTPIDPKCDCYTCRHYTRAYIRHLIKCDETFGLRLTSIHNTHFLLNLMVQVRQAIQDDQLLEFRQAFREEYGYNRPNAPEF

SEQ ID NO: 55183 - protein, 379 aa, Facklamia miroungae
  misc_feature (1)..(379): tr|A0A1G7R2T0|A0A1G7R2T0_9LACT Queuine tRNA-ribosyltran sferase OS=Facklamia miroungae OX=120956 GN=tgt PE=3 SV =1
MAAVSYELIKEEKHTGARLGILHTPHGSFETPMYMPVGTLATVKSLSPEELKAMGAGVILSNTYHLWLRPGEDIVEEAGGLHQFMNWDQGILTDSGGFQVFSLSEIRDIEEEGVHFRNHISGEKLFLSPEKAIQIQNALGSDIMMSFDECPDYHQPYDYVKKSIARTTRWAERGLKAHQNPDKQALFGICQGAGYKDLRLEHAKDMIALDFPGYSIGGLSVGETKEEMNEVLDYLMPVFPKNKPRYLMGVGSPDALIDGAIRGVDMFDCVLATRIARNGTCMTSQGRLVVKNAKYARDYSPIDLKCDCYTCRNYSRAYVRHLMKSQETFGLRLTSIHNTHFLLQLMRDVRQAIREDNLLDFRQAFREEYGYNKPNAPEF

SEQ ID NO: 55184 - protein, 381 aa, Faecalibacterium cf.
  misc_feature (1)..(381): tr|E2ZIS2|E2ZIS2_9FIRM Queuine tRNA-ribosyltransferase OS=Faecalibacterium cf. prausnitzii KLE1255 OX=748224 G N=tgt PE=3 SV=1
MPSLTTYKLLKQEHDARRGEFKTVHGTVQTPAFQNVATAGAIKGGLSAQDLKDIGAQVMLCNTYHLHLRPGDKLVADMGGLHKFTRWNGPILTDSGGFQVFSLAKLRKITEEGVTFASHLDGHRIFMGPEESMQIQANLGSTIAMAFDECVENPAQHDYSKASCERTTRWLKRCKIEMARLKHEGISVNPDQLLFGINQGCTFADLRVEHMKQIADLDLDGYAIGGLAVGEPTEVMYEMISQVEPHMPKDKIRYLMGVGTPGNIIEAVSRGVDLFDCVMPSRNARHGHLNTWGGIINIKNAKYERDERPIDPACGCPVCRSYSRAYIRHLFKAEEILGMRLAVMHNLWFYNHLMERIRDELDAGTFTAFHDKYVKLLDTRI

SEQ ID NO: 55185 - protein, 409 aa, Faecalibacterium prausnitzii
  misc_feature (1)..(409): tr|A8SFA1|A8SFA1_9FIRM Queuine tRNA-ribosyltransferase OS=Faecalibacterium prausnitzii M21/2 OX=411485 GN=tgt PE=3 SV=1
MIILITCRLVACIEAARLFSVRRKERIIMPSLTTYTLLKQEHSARRGEFKTVHGTVQTPAFQNVATAGAIKGGLSAQDLKDIGAQVMLCNTYHLHLRPGDKLVADMGGLHKFTRWNGPILTDSGGFQVFSLAKLRKITEEGVTFASHLDGHRIFMGPEESMQIQANLGSTIAMAFDECVENPAQHDYSKDSCERTTRWLKRCKAEMARLKHEGISVNPDQLLFGINQGCTYADLRVEHMKQIAELELDGYAIGGLAVGEPTEVMYEMISQVEPHMPKDKIRYLMGVGTPGNIIEAVARGVDLFDCVMPSRNARHGHLNTWSGIINIKNAKYERDERPIDPACGCPVCRNYSRAYIRHLLKADEMLGMRLTVMHNLWFYNHLMERIRDELDAGTFTAFHDRYVKLLDTRI

SEQ ID NO: 55186 - protein, 381 aa, Faecalibacterium prausnitzii
  misc_feature (1)..(381): tr|A0A173QYG6|A0A173QYG6_9FIRM Queuine tRNA-ribosyltran sferase OS=Faecalibacterium prausnitzii OX=853 GN=tgt P E=3 SV=1
MPSLTTYTLLKQEHNARRGEFKTVHGTVQTPAFQNVATAGAIKGGLSAQDLKDIGAQVMLCNTYHLHLRPGDKLVADMGGLHKFTRWNGPILTDSGGFQVFSLAKLRKITEEGVTFASHLDGHRIFMGPEESMQIQANLGSTIAMAFDECVENPAQHDYSKDSCERTTRWLKRCKAEMARLKHEGISVNPDQLLFGINQGCTYADLRVEHMKQIAELELDGYAIGGLAVGEPTEVMYEMISQVEPHMPKDKIRYLMGVGTPGNIIEAVARGVDLFDCVMPSRNARHGHLNTWSGIINIKNAKYERDERPIDPACGCPVCRNYSRAYIRHLLKADEMLGMRLTVMHNLWFYNHLMERIRDELDAGTFTAFHDRYVKLLDTRI

SEQ ID NO: 55187 - protein, 381 aa, Faecalibacterium sp.
  misc_feature (1)..(381): tr|A0A416KK51|A0A416KK51_9FIRM Queuine tRNA-ribosyltran sferase OS=Faecalibacterium sp. AF28-13AC OX=2292234 GN =tgt PE=3 SV=1
MPSLTTYKLLKKEHDARRGEFKTVHGTVQTPAFQNVATAGAIKGGLSAQDLKDIGAQVMLCNTYHLHLRPGDKLVADMGGLHKFTRWNGPILTDSGGFQVFSLSKLRKITEEGVTFASHLDGHRIFMGPEESMQIQANLGSTIAMAFDECVENPAQHDYSKASCDRTVRWLARCKAEMARLKHEGRAVNPDQLLFGINQGCTFADLRVEHMKQIAEMDLDGYAIGGLAVGEPTDVMYEMISQVEPHMPKDKIRYLMGVGTPGNIIEAVSRGVDLFDCVMPSRNARHGHLNTWGGIINIKNAKYERDERPIDPTCGCPACRNYSRAYIRHLFKAEELLGMRLAVMHNLWFYNHLMERIRDELDAGTFTAFHDRYVKLLDTRI

SEQ ID NO: 55188 - protein, 371 aa, Faecalibacterium sp.
  misc_feature (1)..(371): tr|R5FLU9|R5FLU9_9FIRM Queuine tRNA-ribosyltransferase OS=Faecalibacterium sp. CAG:1138 OX=1262896 GN=tgt PE=3 SV=1
MFKYEILHECKQSGARIGRLTTPHGVIETPVFMPVGTMATVKSLSPEEVEGLGSQIILSNTYHLYLRPGHEIIRQAGGLHKFMNWHKPILTDSGGFQIFSLSSMRKITEEGATFSSFIDGSKHFIGPEESMEIQKALGSDIVMAFDQCTSADTDYNGAKKAMELTLRWLDRCSKVDFEGKQMLFPIVQGNMYEDLRLESLRRTIPYAKCGLAIGGLSVGEPKEVMYRMLDVMKPYYPREMPRYLMGVGSADCFVEGIARGIDMMDCVLPTRIARNGTAMTMKGEITIRNAKYKDDFTPVEEGCDCYCCKNYTRAYVRHLINTDEIFGGRLLSVHNIRFLHRLTDRIKDAIRNDRLLDFRDEFMAEYSPKIK

SEQ ID NO: 55189 - protein, 419 aa, Faecalibaculum rodentium
  misc_feature (1)..(419): tr|A0A1Q9YMU9|A0A1Q9YMU9_9FIRM Queuine tRNA-ribosyltran sferase OS=Faecalibaculum rodentium OX=1702221 GN=BO223 _01580 PE=3 SV=1
METSDNSFSFEIEKRLNGLGRAGIIHTPHGDIHTPAFMCVGTRGEVPFVSMEDLHEIGAQAMLSNGYHLRNASEDIAAQGGLAQWSGWSGPTLTDSGGFQVMSLGSGMGKVVAMENQENLTNTPHRERLAHVTEDGIRFWDPVIEREDFIGPRESMEIQCRIGADIHMAFDELTSLADDYDYNKEALARTERWAQTSLEVHRQHRDDLGYRQSLYGVLQGGRWEDLRRATARKLGAMDFDGYGLGGAFLKDDLGEILRWCSEELPEDKPRHLLGLSHPDDILVGISMGADTFDCVAPTREARHGRVYSLDGPVNLGPWKDSDRLIDDECDCATCRAGWTRGQLRELWKSRQDKEKLYQYFHLASVHNLRFILRLMEQARVAILDGTFEEFKESFLQRYYGKTKAAGHEAAGKHRRTTAK

SEQ ID NO: 55190 - protein, 425 aa, Faecalibaculum rodentium
  misc_feature (1)..(425): tr|A0A140DRB4|A0A140DRB4_9FIRM Queuine tRNA-ribosyltran sferase OS=Faecalibaculum rodentium OX=1702221 GN=AALO1 7_00570 PE=3 SV=1
MTTPEVSELPEIKESEPVLETSDNSFSFEIEKRLNGLGRAGIIHTPHGDIHTPAFMCVGTRGEVPFVSMEDLHEIGAQAMLSNGYHLRNASEDIAAQGGLAQWSGWSGPTLTDSGGFQVMSLGSGMGKVVAMENQENLTNTPHRERLAHVTEDGIRFWDPVIEREDFIGPRESMEIQCRIGADIHMAFDELTSLADDYDYNKEALARTERWAQTSLEVHRQHRDDLGYRQSLYGVLQGGRWEDLRRATARKLGAMDFDGYGLGGAFLKDDLGEILRWCSEELPEDKPRHLLGLSHPDDILVGISMGADTFDCVAPTREARHGRVYSLDGPVNLGPWKDSDRLIDDECDCATCRAGWTRGQLRELWKSRQDKEKLYQYFHLASVHNLRFILRLMEQARVAILDGTFEEFKESFLQRYYGKTGSSGT

SEQ ID NO: 55191 - protein, 375 aa, Faecalicatena contorta
  misc_feature (1)..(375): tr|A0A316A4M9|A0A316A4M9_9FIRM Queuine tRNA-ribosyltran sferase OS=Faecalicatena contorta OX=39482 GN=tgt PE=3 SV=1
MYELLKRDGLAKRGRLHTVHGVIETPVFMNVGTAAAIKGAVSTDDLNTIKTQVELSNTYHLHVRPGDGVVKKLGGLHKFMKWDKPILTDSGGFQVFSLSDLRKIKEEGVHFHSHVDGRKIFMGPEESMQIQSNLASTIAMAFDECPSSVADREYMRDSVARTTRWLKRCQTEMERLNALPDTINKEQMLFGINQGGVYEDIRVEHAKQIAELDMEGYAIGGLAVGESHEEMYRILDAVVPHLPVEKPTYLMGVGTPANILEGVDRGVDFFDCVYPTRNGRHGHVYTNHGKLNLFNARYELDGQPIEEGCQCPACRSYSRAYIRHLLKAKEMLGMRLCVLHNLYFYNTMMEEIRAAIEAGEYKSYKKRKLDGMAGL

SEQ ID NO: 55192 - protein, 378 aa, Faecalicatena contorta
  misc_feature (1)..(378): tr|A0A174G5Y7|A0A174G5Y7_9FIRM Queuine tRNA-ribosyltran sferase OS=Faecalicatena contorta OX=39482 GN=tgt PE=3 SV=1
MYELLKRDGLAKRGRFHTVHGAIETPVFMNVGTAAAIKGAVSTDDLQTIKTQVELSNTYHLHVRPGDEVVKKLGGLHRFMKWDKPILTDSGGFQVFSLADLRKIREEGVHFHSHIDGRKIFMGPEESMQIQSNLASTIAMAFDECPSSVADREYMTDSVARTTRWLRRCKTEMARLNSLPDTINPQQMLFGINQGGIYEDIRIEHAKQITELELDGYAVGGLAVGESHEDMYRILDAVVPYLPLEKPTYLMGVGTPANILEGVDRGVDFFDCVYPTRNGRHGHVYTNHGKLNLFNAKFELDDSPIEEGCQCPACRSYSRAYIRHLLKAKEMLGMRLCVLHNLYFYNTMMEEIRAAIEAGEYKAYKKKKLDGMEGMKEA

SEQ ID NO: 55193 - protein, 378 aa, Faecalicatena orotica
  misc_feature (1)..(378): tr|A0A2Y9BBU9|A0A2Y9BBU9_9FIRM Queuine tRNA-ribosyltran sferase OS=Faecalicatena orotica OX=1544 GN=tgt PE=3 SV =1
MYELIKRDGLAKRGRFHTVHGVIETPVFMNVGTAAAIKGAVSTDDLRGIKTQVELSNTYHLHVRPGDEVVKKMGGLHKFMNWDKPILTDSGGFQVFSLSDLRKIREEGVHFHSHVDGRKIFMGPEESMQIQSNLASTIAMAFDECPSSIADREYMRDSVARTTRWLARCRTEMDRLNSLPDTINQKQMLFGINQGGIYEDIRVEHAKQITEMELDGYAIGGLAVGESHEEMYRILEAVVPYLPVEKPTYLMGVGTPANILEGVERGVDFFDCVYPTRNGRHGHVYTNHGKLNLFNAKFELDDSPIEEGCQCPACRSYSRGYIRHLLKAKEMLGMRLCVLHNLYFYNTMMEEIRAAIEAGEYKSYKEKKLEGMKNGKDI

SEQ ID NO: 55194 - protein, 405 aa, Faecalicoccus pleomorphus
  misc_feature (1)..(405): tr|A0A380LM62|A0A380LM62_9FIRM Queuine tRNA-ribosyltran sferase OS=Faecalicoccus pleomorphus OX=1323 GN=tgt PE= 3 SV=1
MTDYQNNNTFSFEIEKRLEGKLGRAGIIHTPHGDIKTPAFMCVGTRGSVNFLSMEDLKAIQAQAMLSNGYHLRNASFEIAQNGGLAAWSKWNGPTLTDSGGFQVMSLGSGSGKVVSMKVGHDLKNTEPEHRFAKVTEDGVAFTDPNSGQDDFIGPEESMQIQCRIGADIHMAFDELTSLADDYDYNVEALARTERWALRSIEEHRKHQYDLGYYQALYGVIQGGRWEDLRRSTSKKFAKMDFDGYGLGGAFLKENLGDILRWCCEELPENKPRHLLGLSHPDDILIGIEMGADTFDCVAPTREARHGKIYTRYGNINLANSRFKDSLEPLDDDCDCPVCKAGWTKGQLRELLKSQDKEKRHLYFNLSSQHNLRFILRLTEEARQALIDDTFYEYRSQFLKDYYHK

SEQ ID NO: 55195 - protein, 405 aa, Faecalicoccus pleomorphus
  misc_feature (1)..(405): tr|A0A3E3E700|A0A3E3E700_9FIRM Queuine tRNA-ribosyltran sferase OS=Faecalicoccus pleomorphus OX=1323 GN=tgt PE= 3 SV=1
MTDYQNDNTFSFEIEKRLEGKLGRAGIIHTPHGDIKTPAFMCVGTRGSVNFLSMDDLKAIQAQAMLSNGYHLRNASYEIAQNGGLAAWSKWNGPTLTDSGGFQVMSLGSGSGKVVSMKVGHDLKNTEPEHRFAKVTEDGVAFTDPNSGQDDFIGPEESMQIQCRIGADIHMAFDELTSLADDYDYNVEALARTERWALRSIEEHRKHQYDLGYYQALYGVIQGGRWEDLRRSTSKKFAKMDFDGYGLGGAFLKENLGDILRWCCEELPENKPRHLLGLSHPDDILIGIEMGADTFDCVAPTREARHGKIYTRYGNINLANSRFKDSMEPLDDDCDCPVCKAGWTKGQLRELLKSQDKEKRHLYFNLASQHNLRFILRLTEEARQALIDDTFYEYRSQFLKDYYHK

SEQ ID NO: 55196 - protein, 377 aa, Faecalimonas umbilicata; identical to SEQ ID NO: 54159
  misc_feature (1)..(377): tr|A0A4R3JNB4|A0A4R3JNB4_9FIRM Queuine tRNA-ribosyltran sferase OS=Faecalimonas umbilicata OX=1912855 GN=tgt PE =3 SV=1

SEQ ID NO: 55197 - protein, 404 aa, Faecalitalea cylindroides
  misc_feature (1)..(404): tr|A0A1Y4LIE6|A0A1Y4LIE6_9FIRM Queuine tRNA-ribosyltran sferase OS=Faecalitalea cylindroides OX=39483 GN=B5F14_ 09715 PE=3 SV=1
MNHNYQNNNTFSFEITKRIPGQLGRAGIIHTPHGDIKTPAFMCVGTYGEVRFMSMEDLHAINAQAMLSNGYHLRNISPEIAQKGGLAAWSGWNGPTLTDSGGFQVMSLGSGMGKVVSMDREKEVTNTDPKERLAHVSEDGVEFFDPFTNQKDFIGPEESMQIQCRIGADIHMAYDELTSLADSYEYNVEALARTERWALRSLEEHKKCHMDLGYYQALYGVIQGGRWEDLRRSTCKKFAKMDFDGYGLGGAFLKESLGEILKWCNEELPEHKPRHLLGLSRPDDILIGAQNGADTFDCVAPSREARHGRIYTRHGNISIKKFTDSEEPLDIGCDCPTCQAGWTKKRLRELLKSENKEDKYLYFNLATAHNLRFIIRLTEEIHQAILEERFEEYKNKFLKDFYGN

SEQ ID NO: 55198 - protein, 404 aa, Faecalitalea cylindroides
  misc_feature (1)..(404): tr|U2R4F4|U2R4F4_9FIRM Queuine tRNA-ribosyltransferase OS=Faecalitalea cylindroides ATCC 27803 OX=649755 GN=HM PREF0367_00892 PE=3 SV=1
MNHNYQNNNTFSFEITKRIPGQLGRAGIIHTPHGDIKTPAFMCVGTYGEVRFMSMEDLHAINAQAMLSNGYHLRNISPEIAQKGGLAAWSGWNGPTLTDSGGFQVMSLGSGMGKVVSMDREKEVTNTDPKERLAHVSEDGVEFFDPFTNQKDFIGPEESMQIQCRIGADIHMAYDELTSLADSYEYNVEALARTERWALRSLEEHKKRHMDLGYYQALYGVIQGGRWEDLRRSACKKFAKMDFDGYGLGGAFLKESLGEILKWCNEELPEHKPRHLLGLSRPDDILIGAQNGADTFDCVAPSREARHGRIYTRHGNISIKKFTDSEEPLDIGCDCPTCQAGWTKKRLRELLKSENKEDKYLYFNLATAHNLRFIIRLTEEIHQAILEERFEEYKNKFLKDFYGN

SEQ ID NO: 55199 - protein, 379 aa, Falsibacillus pallidus
  misc_feature (1)..(379): tr|A0A370GK17|A0A370GK17_9BACI Queuine tRNA-ribosyltran sferase OS=Falsibacillus pallidus OX=493781 GN=tgt PE=3 SV=1
MTAIRYELIKTCKQTGARLGIIHTPHGSFETPMFMPVGTLATVKTMAPEELKAMGAGIILSNTYHLWLRPGHEIIKEAGGLHKFMNWDQPILTDSGGFQVFSLSEFRNIEEEGVHFRNHLNGDKLFLSPEKAMEIQNALGSDIMMAFDECPPFPATFDYMKKSVERTSRWAERCLQAHQRPEDQGLFGIVQGGEYEELRKMSARDLVSMDFPGYAVGGLSVGEPKDIMNRVLEFTTPLLPDNKPRYLMGVGSPDSLIDGAMRGIDMFDCVLPSRIARNGTLMTSSGRLVVKNAKFARDFGPLDENCDCYTCRNYSRAYIRHLIKCDETFGIRLTTYHNLYFLLNLMKQVREAIREDRLGDFREEFFEQYGFNKPGAKNF

SEQ ID NO: 55200 - protein, 379 aa, Falsibacillus sp.
  misc_feature (1)..(379): tr|A0A3L7K4X4|A0A3L7K4X4_9BACI Queuine tRNA-ribosyltran sferase OS=Falsibacillus sp. GY 10110 OX=2478915 GN=tgt PE=3 SV=1
MTAIRYELIKTCKQTGARLGIIHTPHGSFETPMFMPVGTLATVKTMSPEELKQMGAGIILSNTYHLWLRPGHEIVKEAGGLHKFMNWDQPILTDSGGFQVFSLSEFRNIEEEGVHFRNHLNGDKLFLSPEKAMEIQNALGSDIMMAFDECPPYPASFEYMKKSVERTSRWAERCLTAHQRPADQGLFGIVQGGEYEELRQMSAKDLVSMDFPGYAVGGLSVGEPKDVMNRVLEFTTPLLPDNKPRYLMGVGSPDSLIDGAMRGIDMFDCVLPSRIARNGTLMTSSGRLVVKNAKFARDFGPLDENCDCYTCRNYSRAYIRHLIKCDETFGIRLTTYHNLYFLLNLMKQVRQAIREDRLGDFREEFFEKYGFNQPGAKNF

SEQ ID NO: 55201 - protein, 377 aa, Falsochrobactrum ovis
  misc_feature (1)..(377): tr|A0A364JY70|A0A364JY70_9RHIZ Queuine tRNA-ribosyltran sferase OS=Falsochrobactrum ovis OX=1293442 GN=tgt PE=3 SV=1
MSSEEFEFKVLATDGSARRGEISMPRGIVRTPAFMPVGTGGTVKAMYMSQVKELGADIILGNTYHLMLRPGAERIARLGGLHKFGGWEGPILTDSGGFQVMSLAQLRKINEQGVTFRSHIDGRAYEMSPERSIEIQGLLDADIQMQLDECVALPSSEANTERAMELSLRWAERCKVAFGDQPGKAMFGIVQGGDSPRLRERSALALKAMDLKGYSVGGLAVGEPQEVMMDMLEVVCPILPTEKPRYLMGVGTPDDILKSVARGIDMFDCVMPTRAGRHGLAFTRFGKVNLRNARHADDPRPLDPESDCPAARDYSRAYLHHLVKSGEALASMLLTWNNLAYYQYLMQSIRSAISQGRFTDFAAETSEGWARGDLPVL

SEQ ID NO: 55202 - protein, 377 aa, Falsochrobactrum sp.
  misc_feature (1)..(377): tr|A0A316J8F1|A0A316J8F1_9RHIZ Queuine tRNA-ribosyltran sferase OS=Falsochrobactrum sp. HN4 OX=2201899 GN=tgt P E=3 SV=1
MSSEKFEFQVLARDGAARQGEISMPRGVVRTPAFMPVGTAGTVKAMYMDQVKELGADIILGNTYHLMLRPGAERVARLGGLHEFGGWKGPILTDSGGFQVMSLAQLRKLNENGVTFQSHIDGKPYEMTPERSIEIQGLLDSDIQMQLDECVALPSPEANTERAMELSLRWAERCKIAFGDQPGKAMFGIVQGGDNARLRERSAQALKAMDLKGYSVGGLAVGEPQQVMLDMLEVVCPILPAEKPRYLMGVGTPDDILKSVARGIDMFDCVMPTRAGRHGLAFTRFGKVNLRNARHAEDPRPLDPESDCPAARDYSRAYLHHLVKSGETLASMLLTWNNLAYYQYLMKGIRAAIAQGDFAGFSAETSARWARGDMPAL

SEQ ID NO: 55203 - protein, 393 aa, Fastidiosipila sanguinis
  misc_feature (1)..(393): tr|A0A2S0KQ07|A0A2S0KQ07_9FIRM Queuine tRNA-ribosyltran sferase OS=Fastidiosipila sanguinis OX=236753 GN=tgt PE =3 SV=1
MNKSKFPVWHEILHIDKKTGARLGVLHTPNGSFKTPMFMPVGTAASVKGISPRELEEMGAGVVLSNTYHLWLRPGEDVVKEAGGLHEFMQWPKGILTDSGGFQVFSLTKAKDITEEGVHFRSHIDGRKLFLTPEKSMQIQNDLGADIIMAFDECIPYPADRDYAARSSERTTRWLERCIKAHKRPDEQALFGIVQGGMYPDLRRKSIEEICSFDLPGFGIGGLSVGEPKEKFFEMLEATIPYMPEDKPRYLMGVGTADYMLEAVKHGVDMFDCVNPTRIGRNGTVMTRFGRLIIRDKSSEKAFIPIDENCKCYVCQNFTRAYIRHLLKANEMFGLRLASYHNLYFLIDLMKQAQDAIAEDRYLEFIEEFELDYGDGKYSQDRVDASKARKNLL

SEQ ID NO: 55204 - protein, 376 aa, Fermentimonas caenicola
  misc_feature (1)..(376): tr|A0A098C2X3|A0A098C2X3_9PORP Queuine tRNA-ribosyltran sferase OS=Fermentimonas caenicola OX=1562970 GN=tgt PE =3 SV=1
MDFQLIHTDTKSNARAGLIKTDHGEIETPVFMPVGTVGSVKAVHINELKSDIGAEIILGNTYHLYLRPGLEILKGAGGLHKFNSWNKPMLTDSGGFQVFSLTENRKLTEEGAEFRSHIDGSKHFFTPEKVMDIQRTIGADIIMAFDECTPGDADYAYAKESLELTERWLERCIKRFNETECPYGHKQSLFPIVQGCVYPDLRRRAAENIAALEADGNAIGGLAVGEPTEKMYEMVELVNDILPKDKPRYLMGVGKPENLLEAIERGVDMFDCIMPTRNGRNGQIFTKQGVMNMRNEKWKNDFSPIEEDGASYVDTLYSKAYLRHLINSNEILGLQIASIHNLAFYIWLMKEARKHIIDGTFSQWKPMMIENVTRRL

SEQ ID NO: 55205 - protein, 374 aa, Ferrimicrobium acidiphilum
  misc_feature (1)..(374): tr|A0A0D8FYV2|A0A0D8FYV2_9ACTN Queuine tRNA-ribosyltran sferase OS=Ferrimicrobium acidiphilum DSM 19497 OX=1121 877 GN=tgt PE=3 SV=1
MTRLCVTDNAGSARRGSLKLRSASVDTPFFMPVATRGIVRYVPTELIADLGYQVLLSNTYHLMLRPGVEVIQQMGGLNAFTGFQGSSLTDSGGFQIMSLEASITTEGARFRNVYDGSWVTLTPEQAMVNQQRIGADIAMALDVCTQLPSSRDQLEANLRLTSEWAERSRLAHTDSTQALFGIIQGGIDLELRRQSTEAITALDFDGYAVGGLAVGESHESTLEAVRTVVDGLPADKPRYLMGVGDPYLLAHATALGIDMFDCVSPTRIARHGTALTDQGPVRVKGLPNRGLDEPLESGCGCRVCQRVSRGLLHHLSHVDTESAGALLSLHNLAFQFRLISRLRQAIVENTVEEVLADVDSVWSRPAIRTGVSSD

SEQ ID NO: 55206 - protein, 374 aa, Ferrimonas balearica
  misc_feature (1)..(374): tr|E1SRQ8|E1SRQ8_FERBD Queuine tRNA-ribosyltransferase OS=Ferrimonas balearica (strain DSM 9799 / CCM 4581 / P AT) OX=550540 GN=tgt PE=3 SV=1
MKFELITTDGRARRGRLTFERGTVETPAFMPVGTYGTVKGMTPEEVEATGAEICLGNTFHLWLRPGNEIMQKHGDLHGFMNWHKPILTDSGGFQVFSLGHMRKITEQGVHFRHPINGDKIFLDPEGSMEIQYYLGSDIVMIFDECTPYPATEEEAATSMRMSLRWAQRSRDAFDKLGNKNALFGIIQGGVYEYLRDESLDGLMNIGFDGYAIGGLAVGEPKEDMHRILEHICPKIPEDKPRYLMGVGKPEDLVEGVRRGVDMFDCVMPTRNARNGHLFTGEGVVKIRNAKHRDDTSPLDADCDCYTCKNYTRAYLYHLDRCNEILGARLNTIHNLRYYQRVMEGLRGAIERGTLDDFVAEFYARQGREVPPLND

SEQ ID NO: 55207 - protein, 374 aa, Ferrimonas marina
  misc_feature (1)..(374): tr|A0A1M5S6V4|A0A1M5S6V4_9GAMM Queuine tRNA-ribosyltran sferase OS=Ferrimonas marina OX=299255 GN=tgt PE=3 SV=1
MKFELKATDGRARRGTLTFERGTVETPAFMPVGTYGTVKGMTPEEVEATGAEICLGNTFHLWLRPGTEIMEKHGDLHDFMNWHKPILTDSGGFQVFSLGHIRKITEAGVHFRHPINGDKIFLDPEKSMQIQYSLGSDVVMIFDECTPYPATEKEAADSMRMSLRWAQRSRDEFDRLGNPNNLFGIIQGGVYEHLRDESLEGLLNIGFDGYAVGGLAVGEPKEDMHRILEHICPKIPEEKPRYLMGVGKPEDLVEGVRRGIDMFDCVMPTRNARNGHLFTTTGVVKIRNAKHRDDTSPLDAECDCYTCKNYSRAYLYHLDKCNEILGARLNTIHNLRFYQRVMEGLRGAIEKGNLDDFVAEFYAKQGRDVPPLND

SEQ ID NO: 55208 - protein, 374 aa, Ferrimonas sediminum
  misc_feature (1)..(374): tr|A0A1G8QFK3|A0A1G8QFK3_9GAMM Queuine tRNA-ribosyltran sferase OS=Ferrimonas sediminum OX=718193 GN=tgt PE=3 S V=1
MKFDLITTQGRARRGRLTFERGTVETPAFMPVGTYGTVKGMTPEEVEATGAEICLGNTFHLWLRPGTEIMQKHGDLHDFMNWHKPILTDSGGFQVFSLGHIRKITEEGVHFRHPINGDKIFLDPEKSMEIQYHLGSDIVMIFDECTPYPATEEEAGKSMRMSMRWAQRSRDAFDKLENPNSLFGIIQGGVYEHLRDESLEGLMNIGFDGYAVGGLAVGEPKEDMHRILEHICPKIPEDKPRYLMGVGKPEDLVEGVRRGIDMFDCVMPTRNARNGHLFTAEGVVKIRNAKHRDDTSPLDSECDCYTCKNYSRSYLHHLDRCNEILGARLNTIHNLRYYQKVMEGLRGAIEQGKLDDFVETFYSKQGRPVPPVID

SEQ ID NO: 55209 - protein, 374 aa, Ferrimonas sp.
  misc_feature (1)..(374): tr|A0A4U1BFH0|A0A4U1BFH0_9GAMM Queuine tRNA-ribosyltran sferase OS=Ferrimonas sp. IMCC35001 OX=2569538 GN=tgt P E=3 SV=1
MKFDLITTDGRARRGRLTFERGTVETPAFMPVGTYGTVKGMTPEEVEATGAEICLGNTFHLWLRPGTEIMQKHGDLHDFMNWQKPILTDSGGFQVFSLGDIRKITEEGVHFRHPINGDKIFLDPEKSMEIQYHLGSDIVMIFDECTPYPATEEEAGKSMRMSLRWAQRSRDAFDKLGNPNNLFGIIQGGVYEHLRDESLEGLMNIGFDGYAVGGLAVGEPKEDMHRILEHICPKIPEDKPRYLMGVGKPEDLVEGVRRGIDMFDCVMPTRNARNGHLFTSEGVVKIRNAKHRDDTRPLDQECDCYTCKNYSRSYLHHLDRCNEILGARLNTIHNLRYYQKVMEGLRGAIEQGKLEHFVQEFYSKQGRPVPPLND

SEQ ID NO: 55210 - protein, 374 aa, Ferrimonas sp.
  misc_feature (1)..(374): tr|A0A4U1BPV9|A0A4U1BPV9_9GAMM Queuine tRNA-ribosyltran sferase OS=Ferrimonas sp. IMCC35002 OX=2569539 GN=tgt P E=3 SV=1
MKFDLITTDGRARRGRLTFDRGVVETPAFMPVGTYGTVKGMTPEEVEATGAQICLGNTFHLWLRPGTEIMQKHGDLHDFMNWQKPILTDSGGFQVFSLGHIRKITEEGVHFRHPINGDKIFLDPEKSMDIQYHLGSDIVMIFDECTPYPATEQEAGASMRMSLRWAQRSRDEFDRLGNKNSLFGIIQGGVYEHLRDESLEGLVNIGFDGYAVGGLAVGEPKEDMHRILEHTCPKIPEDKPRYLMGVGKPEDLVEGVRRGIDMFDCVMPTRNARNGHLFTSEGVVKIRNAKHRDDTSPLDPECDCYTCKNYTRSYLYHLDKCNEILGARLNTIHNLHYYQTVMKGLRGAIEQGKLDDFVAEFYTKQGRPVPPAID

SEQ ID NO: 55211 - protein, 368 aa, Ferriphaselus amnicola
  misc_feature (1)..(368): tr|A0A2Z6GA41|A0A2Z6GA41_9PROT Queuine tRNA-ribosyltran sferase OS=Ferriphaselus amnicola OX=1188319 GN=tgt PE= 3 SV=1
MEFKLHTTSDAARRGTLTLAHGKLETPAFMPVGTYGTVKAMSPVELKDIGAQIVLGNTFHLWLRPGLHVIEQFGGLHKFMGWDGPILTDSGGFQVFSLGDLRKITGGGVEFRSPINGDKCFLSPEESMRIQKVLNSDIVMIFDECTPYPADEQVAGVSMRLSLGWAERSKKAHEGNPNALFGIVQGGMHEHLRDESLAGLTNIGFDGYAIGGLSVGEPKGDMMRILRHTAPQLPADKPRYLMGVGTPEDLVDAVEQGIDMFDCVMPTRNARNGHLFTRFGDVRIKNAVHKADTRPLDEQCECYCCRNFSRAYLHHLQRAGEILGARLNTIHNLHYYQELMRDIRAAIERGQFAEFAASFRVQRGSLSK

SEQ ID NO: 55212 - protein, 367 aa, Ferrithrix thermotolerans
  misc_feature (1)..(367): tr|A0A1M4SHX5|A0A1M4SHX5_9ACTN Queuine tRNA-ribosyltran sferase OS=Ferrithrix thermotolerans DSM 19514 OX=11218 81 GN=tgt PE=3 SV=1
MTTLSGRFEILKESGSYRNGRFLGERHSFLTPVFMPVGTRGSVRLFPHDLLDQIGFEVVLANTYHMMLRPGADVVAKLGGLHRFSGWPNAILTDSGGFQVMSLDANFDLDGVSFRSVYDGAKAYLTPENAVRMQELLGSDIAMVLDVCTMLPASTDQLKEALYLTISWAKRSKAAHNRSDQSLFGIVQGGTDATLRKISIEATCEIGFDGYAIGGLAVGEERSLTLETVQLCCDSLPQDAPRYLMGVGDPYSIVHAVELGVDMFDCVAPSRVARHGVGWTSNGKVSVKQARYVASEEPLDPNCECDTCVRYPMALLNHLFKVDPVTLGVLLTRHNLTFMKTLISWCRKAVEEGNFNDPKRFVETYYS

SEQ ID NO: 55213 - protein, 374 aa, Ferrovibrio sp.
  misc_feature (1)..(374): tr|A0A516H431|A0A516H431_9PROT Queuine tRNA-ribosyltran sferase OS=Ferrovibrio sp. K5 OX=2594003 GN=tgt PE=3 SV =1
MTLRFTVSATDGAARRGRLETAHGAIDTPAFMPVGTAATVKAMTPEAVVETGAQIILGNTYHLMLRPSAERVAKLGGLHRFMNWPGPILTDSGGFQVMSLSQLNKVSEAGVSFQSHIDGAKYDLTPERSIEIQHLLDATITMQLDECVKLPADDKRVSEAMQLSLRWAERCKTAFKLRDGYGLFGIVQGGTNGALREQSAKGLIKTGFDGYAVGGLAVGETQAEMFATLDVTTPHLPQDRPRYLMGVGKPSDLVGAVQRGIDMFDCVMPTRSGRNGQAFTRRGTINIRNARHAEDPRPIDEHCRCPACRNYSRAYVHHLVRSDEILGSMLMTAHNLTYYQDVMQGLRAAIAEGRLEAFAAGFHAGEASGDIPPL

SEQ ID NO: 55214 - protein, 374 aa, Ferrovibrio sp.
  misc_feature (1)..(374): tr|A0A2M8U077|A0A2M8U077_9PROT Queuine tRNA-ribosyltran sferase OS=Ferrovibrio sp. OX=1917215 GN=tgt PE=3 SV=1
MTLKFTVSATDGAARRGRLETAHGAIDTPAFMPVGTAATVKAMTPEGVRETGAQIILGNTYHLMLRPSAERVAKLGGLHTFMNWPGPILTDSGGFQVMSLSQLNKVTEQGVSFQSHIDGAKYDLTPERSIEIQHLLDATITMQLDECVKLPADDKRVSEAMQLSLRWAERCKAAFQQRDGYGLFGIVQGGTNGGLREESAKGLIRTGFDGYAVGGLAVGETQAEMFATLDVTMPHLPQDRPRYLMGVGKPSDLVGAVQRGIDMFDCVMPTRSGRNGQAFTRRGTINIRNARHAEDPRPIDEHCRCPACRSYSRAYVHHLVRSDEILGSMLMTAHNLTYYQDVMQGMRAAIAEGRLNAFAADFHAGEASGDIDPL

SEQ ID NO: 55215 - protein, 369 aa, Ferrovum sp.
  misc_feature (1)..(369): tr|A0A0R0LG95|A0A0R0LG95_9PROT Queuine tRNA-ribosyltran sferase OS=Ferrovum sp. JA12 OX=1356299 GN=tgt PE=3 SV= 1
MKFTLLSEEGLARRGRLELVHGVVETPVFMPVGTYGSVKGLSPHELVDLGAQIILGNTFHLWLRPGLEVFEEVGGLHGLMAWHKPILTDSGGFQVFSLGALRKISEEGVTFRSPINGDRLLLTPEESMRIQRILNSDIVMAFDECTPYPATHEQAKQSMELSLRWAERSLRAHEGNHNALFGIVQGGMYEDLREVSVRAMIAMDFPGYAMGGLSVGEPQADRERILAHTPTLLPKHKPRYLMGMGTPEDLVLAVESGIDMLDCVMPTRNARNGWLFTRFGNIKIRNARYKHDHRPLDETCGCYTCQHFSRSYLHHLQQAKEILGARLNTIHNLFYYQQIMAQMRDAIADQRFQSFKEEFHGNRQLHGKI

SEQ ID NO: 55216 - protein, 368 aa, Ferrovum sp.
  misc_feature (1)..(368): tr|A0A149VY45|A0A149VY45_9PROT Queuine tRNA-ribosyltran sferase OS=Ferrovum sp. Z-31 OX=1789004 GN=tgt PE=3 SV= 1
MKFEVLAQDGKARRARLSLPHGVVETPVFMPVGTYGAVKGVTPDELTALGAQIILGNTFHLWLRPGLEVFRAQGGLHGFMNWQAPILTDSGGFQVFSLGALRKISEEGVIFRSPLNGDRLFLTPEISMEIQRVLNSDIVMAFDECTPYPATEPEARNSMELSLRWADRSLRGHEGNPNALFGIIQGGMYESLREISAQEMVALDFPGYAIGGLSVGEPPADRARILAHTPTLLPAHKPRYLMGMGTPEDIVNAVSAGIDMMDCVMPTRNARNGWLFTRFGNVKIRNAGYKNDGRPLDPTCLCYTCQHFSRSYLHHLQQAKEMLGARLNTLHNLHYYQTLMSELRTAIETGTLTKFTQQFQADRAHGVK

SEQ ID NO: 55217 - protein, 379 aa, Ferruginibacter sp.
  misc_feature (1)..(379): tr|A0A3M9N7S7|A0A3M9N7S7_9BACT Queuine tRNA-ribosyltran sferase OS=Ferruginibacter sp. BO-59 OX=2294116 GN=tgt PE=3 SV=1
MADLQFTLQHADTSTKARAGKIRTDHGEILTPIFMPVGTVGSVKALTQQQLKDDVHAQIILGNTYHLYMRPGLDVLEAAGGLHKFMNWEKPILTDSGGYQVFSLSGTRKISEEGVVFQSHIDGSKHLFSPEKVIDIQRIIGADIIMAFDECPPGASEYSYAKKSLELTNRWLDRCFQRFHETENKYGYSQNLFPIVQGGVHHELRKISCEYVSSKEATGNAIGGLSVGEPTEKMYEICGLCCENLPVNKPRYLMGVGTPWNILECISLGVDMFDCVMPTRNGRNAMLFTNRGIINIDNKKWEKDFSPIDEELENEVSNYYSKAYLRHLIKSKEILGLQIASIHNLAFYLHIVRQARVQIQNGNFASWKKEMAVQWQHRL

SEQ ID NO: 55218 - protein, 378 aa, Fervidicella metallireducens
  misc_feature (1)..(378): tr|A0A017RY91|A0A017RY91_9CLOT Queuine tRNA-ribosyltran sferase OS=Fervidicella metallireducens AeB OX=1403537 GN=tgt PE=3 SV=1
MGAVRYELIKQCKQSGARLGRLHTPHGVIETPIFMPVGTQATVKTMTPEELKNIGSQIILSNTYHLYLRPGHKLVEKAGGLHKFMNWDKPILTDSGGFQVFSLSDLRDITEEGVTFKSHLDGSKHFLSPERAIEIENSLGADIIMAFDECLPYPCDYDYAKNSLHRTIRWAERCLNAHKNTEKQALFGIIQGGMYRDLREESVREMVKLDFPGYAIGGLSIGEPKPIMYEVLDWTAHLLPENKARYLMGIGSPDALIEGAIRGIDMFDCVLPTRIARNGTAFTSRGRVVIKNAKYAEDFGPLDAECDCYTCRNYSRAYLRHLFKAEEILGPRLVTIHNLRFLLRLMENVRQAILEDRLLDFRDEFFEKYGYNESSRNF

SEQ ID NO: 55219 - protein, 368 aa, Fervidicola ferrireducens
  misc_feature (1)..(368): tr|A0A140LCE3|A0A140LCE3_9THEO Queuine tRNA-ribosyltran sferase OS=Fervidicola ferrireducens OX=520764 GN=tgt P E=3 SV=1
MRFEVLNRAEKCSARTGLLETYHGIVKTPVFMPVGTQATVKTMTSEELEQIGAKIILSNTYHLYLRPGHKLIEEAGGLHKFMNWKGSILTDSGGYQVFSLGELREIKEEGVTFRSHIDGSLHFISPEMSIEIQNSIGADIIMAFDECIPYPATYEYAKNSVERTTRWAERCKKHHKRNDQALFGIVQGGLYRDLREKSAKDLVAMDFEGYAVGGLSVGEPKECMYEVLDYVVPLLPEEKPRYLMGVGSPDSIFEGIQRGIDMFDCVLPTRIARHGTVFTARGKLVVRNATYARDFSPLDPECDCYVCKNYTRAYIRHLLNAGEILGLRLTTYHNLYFLLRLVEKIREAIEGDYFLDLKEEFFSKYGYR

SEQ ID NO: 55220 - protein, 372 aa, Fervidobacterium changbaicum
  misc_feature (1)..(372): tr|A0A1G7ZP00|A0A1G7ZP00_9BACT Queuine tRNA-ribosyltran sferase OS=Fervidobacterium changbaicum OX=310769 GN=tg t PE=3 SV=1
MGSLRFEVLKTVGNARRGRIHLPHGVVETPTFMPVGTNANVKLVTPHILKENNVQIILSNAFHLYLKPGLDVIREFGGLHNFMNWDRPILTDSGGFQVFSLKKGQKITDDGVWIMSPTDGSKHYITPELSMEIQATLGSDIVMAFDYCADPKDGYEEAKRSVKLTTKWAKRSLEHLRRISHQAIFGIIQGAVYEDLREMSLREITELDFDGFAIGGLSVGEPREVTLKMVEFVGPKMPENKPRYFMGGGSPDLLVDLVANGVDMFDSVFPTRVARHGLAVTWNGKFNIRSARYKYDKTPIDENCTCYTCRNFSKGYIRHLFDREEVLGQILLTIHDVHFMMEFGEKMRESIENGTFFEFREKVKKAYEKQSS

SEQ ID NO: 55221 - protein, 375 aa, Fervidobacterium gondwanense
  misc_feature (1)..(375): tr|A0A1M7T8Z5|A0A1M7T8Z5_FERGO Queuine tRNA-ribosyltran sferase OS=Fervidobacterium gondwanense DSM 13020 OX=11 21883 GN=tgt PE=3 SV=1
MGLLKFELLKTVGQARRGRMHLPHGVVETPTFMPVGTNANVKLVTPHILKENDVQIILSNAFHLYLKPGLDVIRDFGGLHNFMNWDRPILTDSGGFQVFSLKKGQKITDDGVWIMSPLDGSKHFITPELSMEIQATLGSDIVMAFDYCADPKDGYEESKKSVKLTTKWAKRSLEHLRRISHQALFGIIQGAIYEDLREQSLSDITQYDFDGFAIGGLSVGEPREVTMKIVEFTAPKMPYDKPRYFMGGGSPDLLVDLVANGVDIFDSVFPTRVARHGLAVTWNGKFNIRSARYKYDKTPIDENCTCYTCRNFSKGYLRHLFDREEVLGQILLTIHDVHFMMEFGKKMRESIENGTFEVFRERVKKAYEKKDNTNN

SEQ ID NO: 55222 - protein, 372 aa, Fervidobacterium islandicum
  misc_feature (1)..(372): tr|A0A1B0VK60|A0A1B0VK60_FERIS Queuine tRNA-ribosyltran sferase OS=Fervidobacterium islandicum OX=2423 GN=tgt P E=3 SV=1
MGSLRFEVLKTVGNARRGRIHLPHGVVETPTFMPVGTNANVKLVTPHILKENNVQIILSNAFHLYLKPGLDVIREFGGLHNFMNWDRPILTDSGGFQVFSLKKGQKITDDGVWIMSPIDGSKHYITPELSMEIQATLGSDIVMAFDYCADPKDGYEEAKRSVKLTTKWAKRSLEHLRRISHQAIFGIIQGAVYEDLREMSLREITELDFDGFAIGGLSVGEPREVTLKMVEFVGPKMPENKPRYFMGGGSPDLLVDLVANGVDMFDSVFPTRVARHGLAVTWNGKFNIRSARYKYDKTPIDENCTCYTCRNFSKGYIRHLFDREEVLGQILLTIHDVHFMMEFGEKMRESIENGTFFEFREKVKKAYEKQSS

SEQ ID NO: 55223 - protein, 373 aa, Fervidobacterium nodosum
  misc_feature (1)..(373): tr|A7HLH0|A7HLH0_FERNB Queuine tRNA-ribosyltransferase OS=Fervidobacterium nodosum (strain ATCC 35602 / DSM 53 06 / Rt17-B1) OX=381764 GN=tgt PE=3 SV=1
MGSLRFEIINTQGHARRGRIHLPHGVVETPTFMPVGTNANVKLVTPHILEENNVQIILSNAFHLYLKPGLDVIREFGGLHNFMRWNKPILTDSGGFQVFSLKKGQKITDDGVWIMSPIDGSKHYITPELSMEIQATLGSDIVMAFDYCADPKDGYDEAKRAVKLTTKWAKRSLEHLRRISNQATFGIIQGATYEDLRELSLHEITQFDFDGFAIGGLSVGEPREVTIKMVEFIGPKMPQDKPRYFMGGGSPDLLVDLVANGVDMFDSVFPTRVARHGLAVTWNGKFNIRSARYKYDKTPIDENCTCYTCRNFSKGYIRHLFDRQEVLGQILLTIHDIHFMMEFGEKMRESLENGTFEEFRKGIKKAYEKTAND

SEQ ID NO: 55224 - protein, 374 aa, Fervidobacterium pennivorans
  misc_feature (1)..(374): tr|A0A172T136|A0A172T136_FERPE Queuine tRNA-ribosyltran sferase OS=Fervidobacterium pennivorans OX=93466 GN=tgt PE=3 SV=1
MGSLRFEVLKTVGNARRGRMHLPHGIVETPTFMPVGTNANVKLVTPHILKENNVQIILSNAFHLYLKPGLDVIREFGGLHNFMNWDRPILTDSGGFQVFSLKKGQKITDDGVWIMSPIDGSRHYITPELSMEIQATLGSDIVMAFDYCADPKDGYDEAKRSVKLTTKWAKRSLEHLRRISHQAIFGIIQGAIYEDLREMSLKEITEFDFDGFAIGGLSVGEPHEVTLKMVEFIGPRMPSDKPRYFMGGGSPDLLVDLVANGVDIFDSVFPTRVARHGLAVTWNGKFNIRSARYKYDKTPIDENCTCYTCRNFSKGYIRHLFDREEVLGQILLTIHDIHFMMEFGEKMRESIENGTFYEFREKVKKAYEKQASEG

SEQ ID NO: 55225 - protein, 374 aa, Fervidobacterium pennivorans
  misc_feature (1)..(374): tr|H9UDC0|H9UDC0_FERPD Queuine tRNA-ribosyltransferase OS=Fervidobacterium pennivorans (strain DSM 9078 / Ven5 ) OX=771875 GN=tgt PE=3 SV=1
MGSLRFEVLKTVGNARRGRMHLPHGIVETPTFMPVGTNANVKLVTPHILKENNVQIILSNAFHLYLKPGLDVIREFGGLHNFMNWDRPILTDSGGFQVFSLKKGQKITDDGVWIMSPIDGSKHYITPELSMEIQATLGSDIVMAFDYCADPKDGYDEAKRSVKLTTKWAKRSLEHLRRISHQAIFGIIQGAIYEDLREMSLKEITEFDFDGFAIGGLSVGEPHEVTLKMVEFIGPKMPPDKPRYFMGGGSPDLLVDLVASGVDIFDSVFPTRVARHGLAVTWNGKFNIRSARYKYDKTPIDENCTCYTCRNFSKGYIRHLFDREEVLGQILLTIHDIHFMMEFGEKMRESIENGTFYEFREKVKKAYEKQASEG

SEQ ID NO: 55226 - protein, 373 aa, Fervidobacterium sp.
  misc_feature (1)..(373): tr|A0A3D2GD39|A0A3D2GD39_9BACT Queuine tRNA-ribosyltran sferase OS=Fervidobacterium sp. OX=1871331 GN=tgt PE=3 SV=1
MDSLGFEVLRKEGHARRGRIHLTHGVVETPTFMPVGTNANVKLVTPHVLKENNVQIILSNAFHLYLKPGLDVIRQFNGLHEFMRWDRPILTDSGGFQVFSLKRGQKITDDGVWIMSPIDGSKHFITPELSMEIQATLGSDIVMAFDYCADPKDGYEESKKSVKLTTKWAKRSLEHLRDISNQAIFGIIQGAIYEDLREMSLNEIAQMEFNGFAMGGLSVGEPRKETIKMVEFLGPKMPEDKPRYFMGGGSPDLLVDLVANGVDMFDSVFPTRVARHGLAVTWNGKFNIRSARYKYDKTPIDENCNCYTCQNFSRGYIRHLFDRQEVLGQILLTIHDIHFLMEFGEKLRESLENSTFEMFRGGIKKVYEKNFDC

SEQ ID NO: 55227 - protein, 373 aa, Fervidobacterium thailandense
  misc_feature (1)..(373): tr|A0A1E3G330|A0A1E3G330_9BACT Queuine tRNA-ribosyltran sferase OS=Fervidobacterium thailandense OX=1008305 GN= tgt PE=3 SV=1
MGSLRFEVLTTDGSARRGRIHLPHGVVETPTFMPVGTNANVKLVTPDILKENNVQIILSNAFHLYLKPGLDVIREFGGLHNFMNWDRPILTDSGGFQVFSLKKGQKITDDGVWIVSPIDGSKHYITPELSMEIQATLGSDIVMAFDYCADPKDGYDEAKRAVKLTTKWARRSLEHLRRISHQAIFGIIQGAVYEDLRELSLQEITEMDFDGFAIGGLSVGEPREVTVKMVEFVAPKMPAEKPRYFMGGGSPDLLVDLVASGVDMFDSVFPTRVARHGLAVTWNGKFNIRAARYKYDKRPIDEHCNCYTCRNFSRGYIRHLFDREEVLGQILLTIHDIHFMMEFGQRMRESIEKGQFQKFREGIKDAYAKPFID

SEQ ID NO: 55228 - protein, 376 aa, Fibrella aestuarina
  misc_feature (1)..(376): tr|I0KE81|I0KE81_9BACT Queuine tRNA-ribosyltransferase OS=Fibrella aestuarina BUZ 2 OX=1166018 GN=tgt PE=3 SV= 1
MTFTIEQTDPQSQARTGTLTTDHGAIQTPIFMPVGTAGTVKAVHQRELETDINAHIILGNTYHLYLRPGLDVLRQAGGLHGFNGWQRPILTDSGGYQVYSLSNTRKIKEEGVTFKSHIDGSKHTFTPEGVMDIQRTIGADIMMAFDECTPYPCDYAYAKASMDMTHRWLDRCIRRFDETEGHYGYQQYLFPIVQGSTYPDLRRQSAETIASKERTGNAIGGLAVGEPAEDMYKTIDLVNEILPRDKPRYLMGVGTPANILEAIALGVDMFDCVMPTRNARHGLLFTTAGIINIKNEKWSRDFSPIDATLGGYASTFYSKAYLRHLFKADELLGGQIASLQNLTFYLWLVRQARAHIAAGDFVAWKNEMTTRLMVRM

SEQ ID NO: 55229 - protein, 376 aa, Fibrella sp.
  misc_feature (1)..(376): tr|A0A1W6E8I3|A0A1W6E8I3_9BACT Queuine tRNA-ribosyltran sferase OS=Fibrella sp. ES10-3-2-2 OX=1834519 GN=tgt PE =3 SV=1
MTFTIQHNDPASQARTGTLTTDHGTIQTPIFMPVGTAGTVKAVHQRELETDINADIILGNTYHLYLRPGLDVLQQAGGLHGFNGWKRPILTDSGGYQVYSLSGTRKIKEEGVTFKSHIDGSKHTFTPEGVMDIQRTIGADIIMAFDECTPYPCDYAYAKQSMDMTHRWLDRCIRRFDDTEGHYGYNQYLFPIVQGSTYPDLRRESAAVIAGKERAGNAIGGLAVGEPAEEMYKTIDLVNEILPRHKPRYLMGVGTPANILEAIGLGVDMFDCVMPTRNGRHGLLFTTEGMINMKNEKWSRDFSPIDAGLGGYASTFYTKAYVRHLYKADELLAGQIGSLQNLTFYLWLVRQARAHIEAGDFVSWKNDMVKRLMVRL

SEQ ID NO: 55230 - protein, 376 aa, Fibrisoma limi
  misc_feature (1)..(376): tr|I2GCI0|I2GCI0_9BACT Queuine tRNA-ribosyltransferase OS=Fibrisoma limi BUZ 3 OX=1185876 GN=tgt PE=3 SV=1
MTFSISAQDQQSKARTGTLTTDHGPIHTPIFMPVGTAGTVKAVHQRELETDVQAEIILGNTYHLYLRPGLDVLSQAGGLHKFNGWSHPILTDSGGYQVYSLSNTRKIKEEGVTFKSHIDGSTHRFTPEGVMDIQRTIGADIIMAFDECTPYPCEYGYARQSMEMTHRWLDRCIGRFDATEGYYGYQQTLFPIVQGSTYPDLRRQSAEFIASKEREGNAIGGLAVGEPAEEMYKTIELVNEILPVDKPRYLMGVGTPANILEAIALGVDMFDCVMPTRNARHGILFTTEGIMNLKNEKWSRDFSPIDAGLGGYASTFYTKAYLRHLFKAEEILAAQIASLHNLTFYLWLVRQARVHIDAGDYVTWKNEMVERLMRRL

SEQ ID NO: 55231 - protein, 376 aa, Fibrisoma sp.
  misc_feature (1)..(376): tr|A0A418M1A4|A0A418M1A4_9BACT Queuine tRNA-ribosyltran sferase OS=Fibrisoma sp. HYT19 OX=2305895 GN=tgt PE=3 S V=1
MTFEILARDPQSKARTGTLTTDHGLIQTPIFMPVGTAGTVKAVHQRELETDVQAEIILGNTYHLYLRPGLEVLSQAGGLHRFNGWSHPILTDSGGYQVYSLSNTRKIKEEGVTFKSHIDGSTHRFSPEGVMDIQRTIGADIIMAFDECTPYPCDYGYARQSMEMTHRWLDRCIGRFDATEGHYGYQQTLFPIVQGSTYPDLRRQSAEFIASKGREGNAIGGLAVGEPAEEMYKSIELVNEILPINKPRYLMGVGTPANILEAIALGVDMFDCVMPTRNARHGILFTTEGIMNLKNEKWSRDFSPIDANLGGYASTFYSKAYLRHLFKAEEILAAQIASLHNLTFYLWLVRQARAHIEAGDYVTWKNQMVERLMRRL

SEQ ID NO: 55232 - protein, 380 aa, Fibrobacter intestinalis
  misc_feature (1)..(380): tr|A0A1T4M9I9|A0A1T4M9I9_9BACT Queuine tRNA-ribosyltran sferase OS=Fibrobacter intestinalis OX=28122 GN=tgt PE= 3 SV=1
MNPPFFELLQVSENSKARLGKIRTAHGDVSTPVFMPVGTNATVKGLAVRDLREMQAEIILANTYHLYLRPETQTICAAGGVQRFMGWNAPMLTDSGGFQVWSLKRFRKIHPEGVAFRSYLDGSSHFFSPESVMLAEREIGADIIMAFDECTPYPCSQEEAEKSLAYTTDWTQKAKAWLDLHPPLFGYPQYFFGIVQGGMFLDLRKKAIEDLVKIDPDGYAMGGLSVGEPAEMMYRVADFCTDYLPKDKPRYVMGVGTPWNLLELIRRGVDMFDCILPAKHAQDGLVYTSRGILRYKSARYAKSFDAPLDPECDCACCRHYSRGYLRHLFKTKEPLGWTLSAIHNLHFYVRLMQQARAHISAKTFEEWSRDECQKLQQICL

SEQ ID NO: 55233 - protein, 380 aa, Fibrobacter intestinalis
  misc_feature (1)..(380): tr|A0A1T4L2K9|A0A1T4L2K9_9BACT Queuine tRNA-ribosyltran sferase OS=Fibrobacter intestinalis OX=28122 GN=tgt PE= 3 SV=1
MQKNCFELLKTSAKSKARLGKIKTGHGEITTPIFMPVGTQASVKGLTPRDLDEAQAEIILGNTYHLYLRPGTELIKNAGGLHRFMHWHGPILTDSGGFQVWSLKDLRKIKKDGIEFRSNLDGSKHFFSPESVMKAEREIGADIIMALDECTPYPSTEQEALKSLNYTLHWTRLAKEYLEKNPPLFGYDQSFFGIIQGGMHKELRAKAIAEIQKINPDGYALGGLSVGEPTETLYEIADFCTNLMPEDKPRYVMGVGTPWNLLELIFRGVDMCDCVMPTRNARNGMLFTSEGVLHYKAGRYAKSLDLAPDPNCDCYCCKNFSRAYLRHLFHSGEILAMTLASIHNVHFYLKLMRDAKAHIQSDTFEEWGKEQIIKLQHVCD

SEQ ID NO: 55234 - protein, 378 aa, Fibrobacter sp.
  misc_feature (1)..(378): tr|A0A1M5DWW5|A0A1M5DWW5_9BACT Queuine tRNA-ribosyltran sferase OS=Fibrobacter sp. UWB8 OX=1896207 GN=tgt PE=3 SV=1
MNRFELLKISQKSKARLGVVHTDHGDVTTPIFMPVGTEATVKAVTPAQLKDIKAEIILANTYHLYLRPTTPRIAKAGGIHKFMAWDGPVLTDSGGFQVWSLKDLRKITPEGVEFRSILDGSKHFFSPASVMNAQREIGADIIMALDECTPFPSTAKEAEHSLKFTLKWTAEAMQWLKEHPPIHGYDQQFFGIIQGGMHKDLRKQAIERIAELGPDGYAMGGLSVGEPTETMYEIADFCTDILPKDHARYVMGVGTPWNLLELIERGVDMCDCVMPTRNARNGMLFTSEGVLRYKAARHAEEFDKPVDPNCDCYCCRNFSRAYLRHLHHAGESLGFTLASIHNLHFYLHLMREAKQHIADDTFEEWKREKCEILQRDLQ

SEQ ID NO: 55235 - protein, 378 aa, Fibrobacter sp.
  misc_feature (1)..(378): tr|A0A254SRH9|A0A254SRH9_9BACT Queuine tRNA-ribosyltran sferase OS=Fibrobacter sp. UWB1 OX=1964355 GN=tgt PE=3 SV=1
MNRFELLKTSKKSKARLGVVHTDHGDVTTPIFMPVGTEATVKAVTPAQLKDIKAEIILANTYHLYLRPTTPRIAKAGGIHKFMGWDGPVLTDSGGFQVWSLKDLRKITPEGVEFRSILDGSKHFFSPASVMNAQREIGADIIMALDECTPFPSTAKEAEHSLKFTLKWTAEAMQWLKEHPPIHGYDQQFFGIIQGGMHKDLRRQAIERIAELGPDGYAMGGLSVGEPTETMYEIADFCTDILPKDHARYVMGVGTPWNLLELIERGVDMCDCVMPTRNARNGMLFTSEGVLRYKAARHAEEFDKPVDPNCDCYCCRNFSRAYLRHLHHAGESLGFTLASIHNLHFYLHLMREAKQHIADDTFEEWKKEKCEILQRDLQ

SEQ ID NO: 55236 - protein, 382 aa, Fibrobacter succinogenes
  misc_feature (1)..(382): tr|A0A380RX39|A0A380RX39_FIBSU Queuine tRNA-ribosyltran sferase OS=Fibrobacter succinogenes OX=833 GN=tgt PE=3 SV=1
MKLNENPFELLKKSAKSKARLGVIHTAHGDVTTPVFMPVGTAATVKGLTSRDIREIDAEIILANTYHLYLRPGTKLIAEAGGVQKFMSWNKPMLTDSGGFQVWSLKQFRKITEEGVQFKSLLDGSRHLFTPASVMNAQREIGADIIMAFDECTPYPSTVEEAEKSLALTLKWTREAKEWLLANPPIHGYPQFFFGIVQGGMHKELRQKSIEALKEIEPDGYAMGGLSVGEPVETMYEIADFCTNLLPEDRARYVMGVGTPWNLLELVKRGVDMCDCILPAKNAQDGLVYTSRGVLRYKGAKFAHQHDLPLDPNCDCYCCRNYSRAYLRHLFKEKEPLGWTLAAIHNLHFYIHLMKSVKAHIADDTFEDWADEQIKILQQSAE

SEQ ID NO: 55237 - protein, 382 aa, Fibrobacter succinogenes
  misc_feature (1)..(382): tr|C9RPU1|C9RPU1_FIBSS Queuine tRNA-ribosyltransferase OS=Fibrobacter succinogenes (strain ATCC 19169 / S85) O X=59374 GN=tgt_1 PE=3 SV=1
MKLNENPFELLKKSAKSKARLGVIHTAHGDVTTPVFMPVGTAATVKGLTSRDIREIDAEIILANTYHLYLRPGTKLIAEAGGVQKFMSWNKPMLTDSGGFQVWSLKQFRKITEEGVQFKSLLDGSRHLFTPASVMNAQREIGADIIMAFDECTPYPSTVEEAEKSLALTLKWTREAKEWLLANPPIHGYPQFFFGIVQGGMHKELRQKSIEALKEIEPDGYAMGGLSVGEPVETMYEIADFCTNLLPEDRARYVMGVGTPWNLLELVKRGVDMCDCILPAKNAQDGLVYTSRGVLRYKGAKFAHQHDLPLDPNCDCYCCRNYSRAYLRHLFKEKEPLGWTLAAIHNLHFYIHLMKDVKSNIADDTFEEWADEQVKMLQENAG

SEQ ID NO: 55238 - protein, 356 aa, Fibrobacteres bacterium
  misc_feature (1)..(356): tr|A0A3C0PIP2|A0A3C0PIP2_9BACT Queuine tRNA-ribosyltran sferase (Fragment) OS=Fibrobacteres bacterium OX=205216 0 GN=DCO75_12370 PE=3 SV=1
IINTPIFMPVGTQATVKALSPLELEECGCPIILANTYHLRLRPGDELVAKAGGLHKFENWKRAILTDSGGFQVFSLRDISKITEDGVMFQSYIDGSKHFFSPERVMEIEHNLGADIIMMFDECPPATADAEHVGNAVDRTLRWAGRCMSHHEKTPFIHGYPQALFGIVQGATYKALREKCARELVAMDCPGYAIGGMAVGESTELLYSMTEFTCDILPENKPRYCMGVGMPENIIECIKRGADMFDCVLPTRNARNGSVFTWSGTVNIRNAKHTADFNHGLDAACSCYTCKNFSRAYLRHLFISGEILATRLLTLHNVFFYMQLTRTAREHIINGTFTEWSEKFLAGIENGKSGEI

SEQ ID NO: 55239 - protein, 378 aa, Fibrobacteres bacterium
  misc_feature (1)..(378): tr|A0A3C1WJT2|A0A3C1WJT2_9BACT Queuine tRNA-ribosyltran sferase OS=Fibrobacteres bacterium OX=2052160 GN=tgt PE =3 SV=1
MTFFTLEKKSSASKARAGTLRTAHAEIQTPVFMPVGTAGAVKAVSPREVESTGARIILGNTYHLYLRPGCDLIAQAGGLHRFINWPHAMLTDSGGFQVWSLETLRKVSENGVEFRSHLDGSKHLFTPESVMEAQRKLGADIFMAFDECTPYPATKEEAAKSLALTKLWHERAVRWLTDHPELHGYPQYFFGIAQGGMHEELRAEAIEHIAGLELPGYALGGLSVGEPAEEMYRIADYATNLMPAGKPRYVMGVGTPANLLELISRGVDMFDCVLPTRAARHGTVFTWNGPLHYKAARHAQELDTPIDPDCGCYACRNFSRAYIRHLFVSNEILALELATLHCLHFYQEMMQVARQQILDGTFEVWKKALLEKWKTSEE

SEQ ID NO: 55240 - protein, 380 aa, Fictibacillus aquaticus
  misc_feature (1)..(380): tr|A0A235FAJ7|A0A235FAJ7_9BACI Queuine tRNA-ribosyltran sferase OS=Fictibacillus aquaticus OX=2021314 GN=tgt PE =3 SV=1
MKPAVTYELIKTCKQSGARLGKVHTPHGTFETPVFMPVGTLATVKTLSPEELKEMDAGIILSNTYHLWLRPGHEIIKEAGGLHKFMNWDRAILTDSGGFQVFSLSDLRKITEEGVHFRNHLNGEKLFLSPEGAMEIQNALGSDIMMAFDECPPYPAEYDYMKASVERTSRWAERCLAGHKRPEDQALFGIVQGGEYEELRKQSAKDLVSLDFPGYAIGGLSVGEPKDVMNRVLDFTTPWLPADKPRYLMGVGSPDSLIDGAIRGVDMFDCVLPTRIARNGTCMTSEGRLVVRNAKYARDFRPLDENCDCHVCKTYSRAYIRHLVKVNETFGFRLTSYHNLYFLANLMKQVRQAIMDDRLLDFKEEFFEKYGFNKEGAKNF

SEQ ID NO: 55241 - protein, 380 aa, Fictibacillus arsenicus
  misc_feature (1)..(380): tr|A0A1B1Z6F3|A0A1B1Z6F3_9BACI Queuine tRNA-ribosyltran sferase OS=Fictibacillus arsenicus OX=255247 GN=tgt PE= 3 SV=1
MKPAVTYELIKTCKQSGARLGKVHTPHGSFETPIFMPVGTLATVKTMSPEELKELGAEIILSNTYHLWLRPGHDIVKEAGGLHTFMNWDRPILTDSGGFQVFSLSDLREIKEEGVHFRNHLSGEKLFLSPEGAMEIQNALGSDIMMAFDECPPYPAEFEYMKASVERTSRWAERCLKGHARPQDQALFGIVQGGEYEELRKQSARDLVSLDFPGYAVGGLSVGEPKDVMNRVLDFTTPHLPENKPRYLMGVGSPDSLIDGAIRGIDMFDCVLPTRIARNGTCMTSEGRLVVRNAKYARDFRPIDENCDCHVCRTYSRAYIRHLVKANETFGFRLTSYHNLYFLVNLMKQVRQAIMEDRLLDFRNEFFEKYGFNKPNARNF

SEQ ID NO: 55242 - protein, 380 aa, Fictibacillus arsenicus
  misc_feature (1)..(380): tr|A0A1V3GAB4|A0A1V3GAB4_9BACI Queuine tRNA-ribosyltran sferase OS=Fictibacillus arsenicus OX=255247 GN=tgt PE= 3 SV=1
MKPAVTYELIKTCKQSGARLGKVHTPHGSFETPIFMPVGTLATVKTMSPEELKELGAEIILSNTYHLWLRPGHDIVKEAGGLHTFMNWDRPILTDSGGFQVFSLSDLREIKEEGVHFRNHLSGEKLFLSPEGAMEIQNALGSDIMMAFDECPPYPAEYEYMKASVERTSRWAERCLKGHARPQDQALFGIVQGGEYEELRKQSARDLVSLDFPGYAVGGLSVGEPKDVMNRVLDFTTPHLPENKPRYLMGVGSPDSLIDGAIRGIDMFDCVLPTRIARNGTCMTSEGRLVVRNAKYARDFRPIDENCDCHVCRTYSRAYIRHLVKANETFGFRLTSYHNLYFLVNLMKQVRQAIMEDRLLDFRNEFFEMYGFNKPNARNF

SEQ ID NO: 55243 - protein, 380 aa, Fictibacillus enclensis
  misc_feature (1)..(380): tr|A0A0V8J9E3|A0A0V8J9E3_9BACI Queuine tRNA-ribosyltran sferase OS=Fictibacillus enclensis OX=1017270 GN=tgt PE =3 SV=1
MTAAVRYELIKTCKQSGARLGKVHTPHGVFETPVFMPVGTLATVKTMSPEELKDLGANIILSNTYHLWLRPGHEIVREAGGLHKFMNWDRSILTDSGGFQVFSLSDLRKITEEGVHFRNHLNGEKLFLSPEGAMEIQNALGSDIMMAFDECPPYPAEYEYMKSSVERTSRWAERCLNAHERPHDQGLFGIVQGGEYEDLRRQSAEDLVSLDFPGYAVGGLSVGEPKDVMNRVLEFTTPYLPGNKPRYLMGVGSPDSLIDGAIRGIDMFDCVLPTRIARNGTLMTSEGRLVVRNAKYAKDFRPLDENCDCYTCRNYSRAYIRHLVKSNETFGFRLTSYHNLYFLVNLMEQVKQAIREDRLLDFREEFFEQYGFNKPDAKNF

SEQ ID NO: 55244 - protein, 380 aa, Fictibacillus macauensis
  misc_feature (1)..(380): tr|I8AHV9|I8AHV9_9BACI Queuine tRNA-ribosyltransferase OS=Fictibacillus macauensis ZFHKF-1 OX=1196324 GN=tgt P E=3 SV=1
MTAAVRYELIKTCKQSGARLGKVHTPHGVFETPVFMPVGTLATVKTMSPEEVKDLGANIILSNTYHLWLRPGHEIIREAGGLHKFMNWDRSILTDSGGFQVFSLSDLRKITEEGVHFRNHLSGEKLFLSPEGAMDIQNALGSDIMMAFDECPPYPASHEYMKASVERTSRWAERCLEAHQRPQDQGLFGIVQGGEYEDLRRKSAEDLVSLDFPGYAVGGLSVGEPKDVMNRVLEFTTPHLPSNKPRYLMGVGSPDSLIDGAIRGIDMFDCVLPTRIARNGTLMTSEGRLVVRNAKYARDFRPLDEKCDCYTCKNYSRAYIRHLVKSNETFGFRLTSYHNLYFLVNLMEQVKQAIREDRLLDFREEFFEAYGFNKPNARNF

SEQ ID NO: 55245 - protein, 380 aa, Fictibacillus phosphorivorans
  misc_feature (1)..(380): tr|A0A163RRT7|A0A163RRT7_9BACI Queuine tRNA-ribosyltran sferase OS=Fictibacillus phosphorivorans OX=1221500 GN= tgt PE=3 SV=1
MKPAVTYELIKTCKQSGARLGKVHTPHGSFETPIFMPVGTLATVKTMSPEELKELGAEIILSNTYHLWLRPGHDIVKEAGGLHKFMNWDRPILTDSGGFQVFSLSDLREIKEEGVHFRNHLSGEKLFLSPEGAMEIQNALGSDIMMAFDECPPYPAEYEYMKASVERTSRWAERCLKGHARPQDQALFGIVQGGEYEELRKQSAKDLVSLDFPGYAVGGLSVGEPKDVMNRVLDFTTPHLPENKPRYLMGVGSPDSLIDGAIRGIDMFDCVLPTRIARNGTCMTSEGRLVVRNAKYARDFRPIDEKCDCHVCRTYSRAYIRHLVKANETFGFRLTSYHNLYFLVNLMKQVRQAIMEDRLLDFRNEFFEMYGFNKPNARNF

SEQ ID NO: 55246 - protein, 380 aa, Fictibacillus phosphorivorans
  misc_feature (1)..(380): tr|A0A160INR6|A0A160INR6_9BACI Queuine tRNA-ribosyltran sferase OS=Fictibacillus phosphorivorans OX=1221500 GN= tgt PE=3 SV=1
MKPAVTYELIKTCKQSGARLGKVHTPHGTFETPIFMPVGTLATVKTMSPEELKELGAEIILSNTYHLWLRPGHDIVKEAGGLHKFMNWDRPILTDSGGFQVFSLSDLREIKEEGVHFRNHLSGEKLFLSPEGAMEIQNALGSDIMMAFDECPPYPAEYDYMKASVERTSRWAERCLKGHGRPQDQALFGIVQGGEYEELRKQSARDLVSLDFPGYAVGGLSVGEPKDVMNRVLDFTTPHLPENKPRYLMGVGSPDSLIDGAIRGIDMFDCVLPTRIARNGTCMTSEGRLVVRNAKYARDFRPIDEKCDCHVCRTYSRAYIRHLVKANETFGFRLTSYHNLYFLVNLMKQVRQAIMEDRLLDFRNEFFEMYGFNKPNARNF

SEQ ID NO: 55247 - protein, 380 aa, Fictibacillus solisalsi
  misc_feature (1)..(380): tr|A0A1G9WQY0|A0A1G9WQY0_9BACI Queuine tRNA-ribosyltran sferase OS=Fictibacillus solisalsi OX=459525 GN=tgt PE= 3 SV=1
MTAAVRYELIKTCKQSGARLGKVHTPHGVFETPVFMPVGTLATVKTMSPEELKDLGANIILSNTYHLWLRPGHEIVREAGGLHKFMNWDRSILTDSGGFQVFSLSDLRKITEEGVHFRNHLNGEKLFLSPEGAMEIQNALGSDIMMAFDECPPYPAEYEYMKSSVERTSRWAERCLNAHERPHDQGLFGIVQGGEYEDLRRQSAEDLVSLDFPGYAVGGLSVGEPKDVMNRVLEFTTPYLPDNKPRYLMGVGSPDSLIDGAIRGIDMFDCVLPTRIARNGTLMTSEGRLVVRNAKYAKDFRPLDENCDCYTCRNYSRAYIRHLVKSNETFGFRLTSYHNLYFLVNLMEQVKQAIREDRLLDFREEFFEQYGFNKPDAKNF

SEQ ID NO: 55248 - protein, 380 aa, Fictibacillus sp.
  misc_feature (1)..(380): tr|A0A4Q2HS88|A0A4Q2HS88_9BACI Queuine tRNA-ribosyltran sferase OS=Fictibacillus sp. S7 OX=2212476 GN=tgt PE=3 SV=1
MTAAVRYELIKTCKQSGARLGKVHTPHGVFETPVFMPVGTLATVKTMSPEELKDLGANIILSNTYHLWLRPGHEIVREAGGLHKFMNWDRSILTDSGGFQVFSLSDLRKITEEGVHFRNHLNGEKLFLSPEGAMEIQNALGSDIMMAFDECPPYPAEYEYMKSSVERTSRWAERCLNAHERPHDQGLFGIVQGGEYEDLRRQSAEDLVSLDFPGYAVGGLSVGEPKDVMNRVLEFTTPYLPRNKPRYLMGVGSPDSLIDGAIRGIDMFDCVLPTRIARNGTLMTSEGRLVVRNAKYAKDFRPLDENCDCYTCRNYSRAYIRHLVKSNETFGFRLTSYHNLYFLVNLMEQVKQAIREDRLLDFREEFFEQYGFNKPDAKNF

SEQ ID NO: 55249 - protein, 380 aa, Fictibacillus sp.
  misc_feature (1)..(380): tr|A0A4Q7QQB9|A0A4Q7QQB9_9BACI Queuine tRNA-ribosyltran sferase OS=Fictibacillus sp. BK138 OX=2512121 GN=tgt PE =3 SV=1
MKPAVTYELIKTCKQSGARLGKVHTPHGSFETPIFMPVGTLATVKTMSPEELKELGAEIILSNTYHLWLRPGHDIVKEAGGLHKFMNWDRPILTDSGGFQVFSLSDLREIKEEGVHFRNHLSGEKLFLSPEGAMEIQNALGSDIMMAFDECPPYPAEYEYMKSSVERTSRWAERCLKGHARPQDQALFGIVQGGEYEELRKQSARDLVSLDFPGYAVGGLSVGEPKEVMNRVLDFTTPHLPENKPRYLMGVGSPDSLIDGAIRGIDMFDCVLPTRIARNGTCMTSEGRLVVRNAKYARDFRPIDENCDCHVCRTYSRAYIRHLVKANETFGFRLTSYHNLYFLVNLMKQVRQAIMEDRLLDFRNEFFEMYGFNKPNARNF

SEQ ID NO: 55250 - protein, 375 aa, Unknown
  misc_feature (1)..(375): tr|A0A2T1FYL9|A0A2T1FYL9_9CYAN Queuine tRNA-ribosyltran sferase OS=filamentous cyanobacterium Phorm 6 OX=210770 6 GN=tgt PE=3 SV=1
MTEDAKFSFKCQANCSHTQARAGVFATPHGIVETPKFMPVGTLANVKTLTPAHLEDAGAQMVLANTYHLHLQPGEAIVAGAGGLHKFMAWPGPILTDSGGFQVFSLSQARTISEDGVIFRSPRDGRMINLTPEKSIEIQNELGADVIMAFDECPPYPATRDEVEAATDRTYRWLKRCMQAHSRPDQVLFGIVQGGVFPDLRSRAANQLVDLDLPGYAIGGVSVGESGDLIAEIVKVTAPLLPANKPRYLMGIGTYREMALAVASGVDMFDCVIPTRLGRHGTAFVRGERWNLKNARFREDFAPLDESCPCYTCQKFSRAYLAHLARANEALGYTLLALHNVTELIRFTGRMREAILADRFTEEFAHWLTPTVDRT

SEQ ID NO: 55251 - protein, 380 aa, Unknown
  misc_feature (1)..(380): tr|A0A2P8W8I3|A0A2P8W8I3_9CYAN Queuine tRNA-ribosyltran sferase OS=filamentous cyanobacterium CCT1 OX=2107702 G N=tgt PE=3 SV=1
MTQAFSFHCDARCSHTQARAGTFNTPHGPVHTPRFMPVGTLANVKTVTPAQLATTGAQMVLSNTYHLHLQPGEDIVAEAGGLHRFMGWDGPMLTDSGGFQVFSLSQMRTITEDGVTFKSPKDGRIINIRPETSIQIQNDLGADVIMAFDECPPYPCSRETIKASTDRTWRWLQRCVEAHKRPDQALFGIVQGGVYPDLRTEAAQQLATLDLPGYAIGGVSVGEPPELIETIVKATAPCLPEHKPRYLMGVGTYKEMAQAIAAGVDLFDCVIPTRLARHGAALVDGERWNLKNQRFRRDYTPLDATCPCYTCQHFTRAYLCHLIHAKEMLAFTLISIHNITELVRFTQRIREAIVGDRFAQEFAPWLEPNSGVTAIDAPHP

SEQ ID NO: 55252 - protein, 379 aa, Filibacter sp.
  misc_feature (1)..(379): tr|A0A3P5XD07|A0A3P5XD07_9BACL Queuine tRNA-ribosyltran sferase OS=Filibacter sp. TB-66 OX=2483811 GN=tgt PE=3 SV=1
MAAITYEHIKTCKQTGARLGIVHTPHGSFETPTFMPVGTQATVKTMSPEELKEIGSGIILSNTYHLWLRPGHDIIKEAGGLHKFMNWDRPILTDSGGFQVFSLSKFRKIEEEGVHFRHHLNGSKLFLSPEKCMDIQNALGSDIMMAFDECPPFPATYEYMKSSVERTSRWAERCLKAHARPEDQGLFGIIQGGEFEELRTQSAKDLVSLDFPGYAIGGLSVGEPKDIMNRMLEHTTPLMPANKPRYLMGVGSPDSLIDGAIRGVDMFDCVLPTRIARNGTLMTSEGRLNIKNAKFERDFGPLDEKCSCHVCKTYSRAYIRHLIRADETFGIRLTSYHNLHFLLNLMEQVRDAIRHDCLGDFREEFFESYGFNKPNAKNF

SEQ ID NO: 55253 - protein, 373 aa, Filifactor alocis
  misc_feature (1)..(373): tr|D6GTP4|D6GTP4_FILAD Queuine tRNA-ribosyltransferase OS=Filifactor alocis (strain ATCC 35896 / D40 B5) OX=54 6269 GN=tgt PE=3 SV=1
MNAIKYELIKVCKQSGARLGKLHTPHGTIDTPVFMPVGTQATIKSMTPEELKQMDAKIILSNTYHLYLRPGHHLVEKAGGLHKFMNWDRAILTDSGGFQVFSLGDLRKITEEGVTFRSHLDGSKHFLSPEKVMEIENALGADIIMSFDECTPYPADYNYTKNSMERTLRWAERGKNAHKKTDVQALFGIVQGGMYKDLRYESAMRTQEIDFPGYSIGGLSVGESKEMMRDILEHTAPLLPTDKPRYLMGVGSPDDLIDGVIRGIDMFDCVLPTRIARNGTAMTSQGKVVVRNANYAESFEPLDSHCNCYTCQNYSRAYIRHLVKTNEILGARLITTHNLHFLINLMKQIREAIAEDRLLDFRKEFFESYGYQL

SEQ ID NO: 55254 - protein, 379 aa, Filimonas endophytica
  misc_feature (1)..(379): tr|A0A561J4G4|A0A561J4G4_9BACT Queuine tRNA-ribosyltran sferase OS=Filimonas endophytica OX=1500311 GN=tgt PE=3 SV=1
MAALSFELQGVDNNSKARAGVITTDHGTIQTPIFMPVGTAGSVKAVTQQQLYNEINAQIILGNTYHLYLRPGTEVLEAAGGLHRFNGWHRPILTDSGGYQVFSLAENRKITEQGVLFQSHIDGSRHLFTPESVMDIQRSIGADIIMAFDECPPYPSEYKYAKNSMELTHRWLDRCFARLAETPDKYGYSQNLFPIVQGSTYPDLRRASSEYIASKNAAGNAIGGLSVGEPEEMMYEYTALCCEYLPESKPRYLMGVGTPWNILEGISLGVDMFDCVMPTRNGRNGMLFTTEGVVNIRNKKWATDFSVIDPSLECETSRYYSKAYLRHLFVANEILALQIASIHNLAFYLWLVKEARAHILAGDFNNWKQNIIPVLKQRL

SEQ ID NO: 55255 - protein, 379 aa, Filimonas lacunae
  misc_feature (1)..(379): tr|A0A1N7R737|A0A1N7R737_9BACT Queuine tRNA-ribosyltran sferase OS=Filimonas lacunae OX=477680 GN=tgt PE=3 SV=1
MAALSFELAGVDSNSKARAGVITTDHGVIQTPIFMPVGTVGSVKAVTQQQLYSEINAQIILGNTYHLYLRPGVDVLEAAGGLHHFNGWHRPILTDSGGYQVFSLAENRKITEQGVLFQSHIDGSRHLFTPESVMDIQRSIGADIIMAFDECPPYPSEYTYARKSMELTHRWLDRCFARLAETPDKYGYTQNLFPIIQGSTFPDLRRASSEYIASCNATGNAIGGLSVGEPEEMMYEYTALCCDILPADKPRYLMGVGTPWNILEGISLGVDMFDCVMPTRNGRNGMLFTTQGVVNIRNKKWATDFSVIDPSLDCETSRYYTKAYLRHLFVANEILALQIASIHNLAFYLWLVKEARLRILAGDFDSWKKNIIPVLKQRL

SEQ ID NO: 55256 - protein, 379 aa, Filimonas sp.
  misc_feature (1)..(379): tr|A0A2U0Z9A3|A0A2U0Z9A3_9BACT Queuine tRNA-ribosyltran sferase OS=Filimonas sp. YR581 OX=2135469 GN=tgt PE=3 S V=1
MAALSFQLQGVDSNSRARAGVITTDHGTIQTPIFMPVGTVGSVKAVTQQQLYSEINAQIILGNTYHLYLRPGMEVLEAAGGLHCFNGWHRPILTDSGGYQVFSLAENRKITEQGVLFQSHIDGSRHLFTPESVMDIQRTIGADIIMAFDECPPYPSEYKYAKQSMELTHRWLDRCFTRLGETPDKYGYSQNLFPIVQGSTYPDLRRASSEYIASCNAAGNAIGGLSVGEPEEMMYEYTALCCEYLPEDKPRYLMGVGTPWNILEGISLGVDMFDCVMPTRNGRNGMLFTTQGVINIRNKKWAADFSVIDPSLDCETSRYYSKAYLRHLFVANEILALQIASIHNLAFYLWLVKEARTQIVSGNFNSWKQNIIPVLKQRL

SEQ ID NO: 55257 - protein, 379 aa, Filimonas sp.
  misc_feature (1)..(379): tr|A0A4Q1DCT8|A0A4Q1DCT8_9BACT Queuine tRNA-ribosyltran sferase OS=Filimonas sp. TTM-71 OX=2508721 GN=tgt PE=3 SV=1
MAALSFRLETTDPHSAARAGTITTDHGVIQTPIFMPVGTVGSVKAVTQQQLKHEVQAQIILGNTYHLYLRPGTEVLEAAGGLHRFNGWDRPILTDSGGYQVFSLAEKRKLTEEGALFQSHIDGSRHMFTPENVMDIQRSIGADIIMAFDECPPYPSEYAYARKSMELTHRWLDRCIKRLSETPDKYGYTQNLFPIVQGSTYKDLRKASSEYIASRNAAGNAIGGLSVGEPEEMMYEFTALCCENLPADKPRYLMGVGTPWNILEGIALGVDMFDCVMPTRNGRNGMLFTTQGVINIRNKKWASDFSAIDEGLSNETSRFYTKAYLRHLFVANEILALQIASMHNLNFYLWLVTEARKHIMAGDFNSWKNEMVPHLKQRL

SEQ ID NO: 55258 - protein, 379 aa, Filobacillus milosensis
  misc_feature (1)..(379): tr|A0A4Y8ISS2|A0A4Y8ISS2_9BACI Queuine tRNA-ribosyltran sferase OS=Filobacillus milosensis OX=94137 GN=tgt PE=3 SV=1
MTAVSYELIKTCKQTGARLGRVTTPHGSFETPVFMPVGTLATVKTMAPEELESMGANIILSNTYHLWLRPGEDIVEEAGGLHSFMNWGGSILTDSGGFQVFSLSERRKIEEDGVHFRHHLSGEKLFLSPEGAMRIQNSLGSDIMMAFDECPPYPATHEYMKASVERTSRWAERCLEAHQKPDQQGLFGIVQGGEYEELRKQSAKDLISMDFPGYAIGGLSVGEPKDVMNRVLDFTTPLLPEDKPRYLMGVGSPDSLVDGAIRGVDMFDCVLPTRIARNGTCMTSNGRLVVRNAKFAKDFTPLDENCDCYTCRNYTKAYIRHLIKTNETLGIRLTTYHNLYFLIKLMENVREAIREDRLGDFRDQFFDQYGFNKPNAKNF

SEQ ID NO: 55259 - protein, 383 aa, Filomicrobium sp.
  misc_feature (1)..(383): tr|A0A2D7FCX3|A0A2D7FCX3_9RHIZ Queuine tRNA-ribosyltran sferase OS=Filomicrobium sp. OX=2024831 GN=tgt PE=3 SV= 1
  misc_feature (7)..(7): Xaa can be any naturally occurring amino acid
  misc_feature (12)..(12): Xaa can be any naturally occurring amino acid
  misc_feature (33)..(33): Xaa can be any naturally occurring amino acid
  misc_feature (48)..(48): Xaa can be any naturally occurring amino acid
  misc_feature (177)..(178): Xaa can be any naturally occurring amino acid
MTEAFSXEVSHXDGEARTGAISTPRGKIRTPAXMPVGTAATVKAVYVXQVKDAGADILLGNTYHLMLRPGAERVARLGGLHDFMRWDKPILTDSGGFQVMSLSKLRKLTEQGVEFQSHLDGSRHMLTPERSIEIQCLLGADIQMQLDECIELPSSFENAERAMELSVRWAERSKNAXXQQRRHGGAGPGQALFGIVQGGTDAGLRRRSAEALVGLDLPGYAIGGLAVGEGHDLMVATISETVPHLPTTKPRYLMGVGTPADLMEAVARGIDMFDCVMPTRSGRHGQAFTWHGRVNLRNARHGDDPSPLDPNSQCPAARDYSRAYLHHLHRSGEYLGAMLTSWSNTWFYQELMQAMRDAIAEGRLAAFIAEHKERLSSPEIPAD

SEQ ID NO: 55260 - protein, 369 aa, Fimbriiglobus ruber
  misc_feature (1)..(369): tr|A0A225DV69|A0A225DV69_9BACT Queuine tRNA-ribosyltran sferase OS=Fimbriiglobus ruber OX=1908690 GN=tgt PE=3 S V=1
MSITFQVHRRDGAARTGSLATPHGVVETPMFMPVGTQATVKGLTPDQIAATGATIILGNTYHLTLRPGDELIAEMGGLHRFMCWDKPILTDSGGFQVFSLTSQRKITDAGAKFRSHIDGSPLELTPEKAVEIQQNLGSDIAMVLDECPPGDAPPDAMRDAVRRTILWAERCKRHHTRPDQSLFAIVQGGTDLDLRAECARELVAMDFPGYALGGFSVGEAPAAMHVALPTCAALLPDHKPRYLMGVGRPEDLLEGVAAGIDLFDCVMPTRSGRNALAFTYDGPLRLRNARHRRDPAPLESGCPCYTCGHFSRAYLHHLFAADEMLGPTLLSLHNVAFYLRLMADARAAIVDGRFGLFRDRCLARWHPAP

SEQ ID NO: 55261 - protein, 332 aa, Fimbriimonas ginsengisoli
  misc_feature (1)..(332): tr|A0A068NS89|A0A068NS89_9BACT Queuine tRNA-ribosyltran sferase OS=Fimbriimonas ginsengisoli Gsoil 348 OX=66147 8 GN=tgt PE=3 SV=1
MPVGTQGTVKTVGSEDIEGLGFEQVLSNTYHLSLRPGADLVEQLGGLHRFMSWNGAILTDSGGYQVMSLSNTRKIDDQGVTFRSHLDGSLHYLPPERSIEIQGQLGVDISMCLDECPPYPCTRDEAANAMRRTHLWAPRNLAVRRETQAVFGIVQGGVHEDLRRESAEFISSLPFDGVAIGGVSVGEPTEMQYPVVEFTAPLLPADKARYLMGVGHPKDILHGVASGIDMFDCVLPTRMARHHALYTLDGRVNIRAKRWADHNGPVDEGSVFPQTERYSAAYMRHLFVAGEALGARLATLHNLAFYARLMREIREAIEQGTWPELAARYAQA

SEQ ID NO: 55262 - protein, 379 aa, Finegoldia magna
  misc_feature (1)..(379): tr|B0S1J1|B0S1J1_FINM2 Queuine tRNA-ribosyltransferase OS=Finegoldia magna (strain ATCC 29328) OX=334413 GN=tg t PE=3 SV=1
MFKFTLEKKSSQCKARTGTIETNHGVIKTPVFMPVGTRATVKAMNNDELKSIGSQIILSNTYHLYLKPGQEIIRKADGLHKFMNWDRPILTDSGGFQVFSLSKTRKITEEGVQFRSHIDGSKHFISPEKSMEIQNDLGSDIMMAFDECVPYPASYEYTEDSMKRTLRWLKRCKDYHKNIDRQNLFGIIQGGMYKDLREYSAKNTIDFDLPGYAIGGLSVGEPRDLMIELLDFTTDFMPENKPRYLMGVGTPDYLFEAVEHGVDMCDCVLPTRIARNGTALTSKGKLVVKNAKYKDDFAPLDENCDCYACKNHTRAYIRHLLNVDEILGARLLSIHNLRFLIKMMENIRKSIEEDRYLEFKDEFYRNYGYDYHQKCDNIK

SEQ ID NO: 55263 - protein, 379 aa, Finegoldia magna
  misc_feature (1)..(379): tr|A0A233VIZ2|A0A233VIZ2_FINMA Queuine tRNA-ribosyltran sferase OS=Finegoldia magna OX=1260 GN=tgt PE=3 SV=1
MFKFTLEKKSSQCKARTGTIETNHGVIKTPVFMPVGTRATVKAMNNDELKSIGSQIILSNTYHLYLKPGQEIIRKADGLHKFMNWDRPILTDSGGFQVFSLSKTRKITEEGVQFRSHIDGSKHFISPEKSMEIQNDLGSDIMMAFDECVPYPASYEYTEDSMKRTLRWLKRCKDYHKNTDKQNLFGIIQGGMYKDLREYSAKNTIDFDLPGYAIGGLSVGEPRDLMIDLLDFTTDFMPENKPRYLMGVGTPDYLFEAVEHGVDMCDCVLPTRIARNGTALTSKGKLVVKNAKYKDDFSALDDNCDCYACKNHTRAYIRHLLNVDEILGARLLSIHNLRFLIKLMENIRKSIEEDRYLEFKDEFYRNYGYDYHQKCDNIK

SEQ ID NO: 55264 - protein, 373 aa, Firmicutes bacterium
  misc_feature (1)..(373): tr|R6ERJ7|R6ERJ7_9FIRM Queuine tRNA-ribosyltransferase OS=Firmicutes bacterium CAG:145 OX=1263005 GN=tgt PE=3 SV=1
MKHAVTYELIKKDKKTGARRGVLHTPHGDIQTPVFMPVGTQATVKAMKPEEVKAMGADIILSNTYHLYLRPGHELVKEAGGLHKFMNWDRAILTDSGGFQVFSLGPLRKITEEGVSFRSHIDGSAHFITPEKSIEIQNALGSDIMMAFDECAPYPADRSYVKNSLERTTRWLRRCRDFHKDWERQSLFGIMQGGMYKDLRRQSAEEIVDLDLPGYAIGGLSVGEPKELMLEVLDDCVEYLPGHKARYLMGVGTPDYLFEGVQRGVDMFDCVLPTRIARHGLAMTSRGKVNIKNAKYEKDFEPLDSECDCYTCRNYSKAYLRHLFKSGEMLSAMLLSNHNLHFLIKMMENIRKSIEEDRFGEYKEEFYGKYGEF

SEQ ID NO: 55265 - protein, 377 aa, Firmicutes bacterium
  misc_feature (1)..(377): tr|A0A416P070|A0A416P070_9FIRM Queuine tRNA-ribosyltran sferase OS=Firmicutes bacterium AF22-6AC OX=2292887 GN= tgt PE=3 SV=1
MYRLIKQEGRAKRGEFTTVHGVIQTPVFMNVGTVAAIKGAVSTADLEQIGTQVELSNTYHLHVRPGDRIIKQMGGLHKFMSWNKPILTDSGGFQVFSLAGLRKIKEEGVTFRSHIDGHKIFMGPEESMQIQSNLGSTIAMAFDECAPSKADRMYVQNSVERTTRWLQRCQVEMKRLNSLEDTVNPHQLLFGINQGAIYEDIRIEHAKRIAEMDLDGYAVGGLAVGETHEEMYHILDEVVPYLPVNKPTYLMGVGTPANILEGVERGVDFFDCVYPTRNGRHGHLYTNHGKINLFNAKYELDSRPIEEGCGCPACQRYSRAYIRHLLKAKEMLGMRLCVLHNLYFYNTMMTEIRDALDAGRFAEYKRHKLDSMATPLE

SEQ ID NO: 55266 - protein, 371 aa, Fischerella major
  misc_feature (1)..(371): tr|A0A1U7H555|A0A1U7H555_9CYAN Queuine tRNA-ribosyltran sferase OS=Fischerella major NIES-592 OX=210994 GN=tgt PE=3 SV=1
MSANFSFQCLASCSHTKARAGLFYTPHGVVETPRFMPVGTLATVKTLTPAQLKETGAQMVLSNTYHLHLQPGEAIVAGGGGLHKFMGWSGPMLTDSGGFQVFSLSEMRKISEEGVTFRSPHDGQIIKFTPEKSIEIQNTLGADVIMAFDECPPATASRQEVEAATERTYRWLLRCIEAHQRPQEQALFGIVQGGVHLDLRAQAAEALMKLDLPGYAIGGVSVGEEPELIHQVVQVTAPLLPYHKPRYLMGVGTYQEMVVAIASGVDLFDCVIPTRWARHGTAMVQGDRWNLKNAKFREDFTPLDETCPCYTCQNFTRAYISHLVRSQEILAYTLLSIHNITELIRFTQKIREAILNDTFVAEFGEWLTPRE

SEQ ID NO: 55267 - protein, 369 aa, Fischerella muscicola
  misc_feature (1)..(369): tr|A0A2N6K3V7|A0A2N6K3V7_FISMU Queuine tRNA-ribosyltran sferase OS=Fischerella muscicola CCMEE 5323 OX=2019572 GN=tgt PE=3 SV=1
MSSTFSFQCLACCSQTKARAGVFYTPHGVVETPRFMPVGTLATVKTLTPAQLKETGAQMVLSNTYHLHLQPGEAIVAGGGGLHKFMGWSGPMLTDSGGFQVFSLSEMRKISEEGVTFRSPHDGQIIKFTPEKSIEIQNTLGADVIMAFDECPPATASRQEVEAATERTYRWLLRCIEAHQRSQDQALFGIVQGGVYLDLRCQAAEALTKLDLPGYAIGGVSVGEEPELIHQVVQATAPLLPHHKPRYLMGVGTYQEMVVAIASGVDLFDCVIPTRWARHGTAMVGGDRWNLKNAKFREDFTPLDETCPCYTCQNFTRAYISHLVRSQEILAYTLLSIHNITELIRFTQKIREAILNDTFVAEFGKWLGN

SEQ ID NO: 55268 - protein, 378 aa, Fischerella sp.
  misc_feature (1)..(378): tr|A0A1Z4TTL5|A0A1Z4TTL5_9CYAN Queuine tRNA-ribosyltran sferase OS=Fischerella sp. NIES-4106 OX=2005456 GN=tgt PE=3 SV=1
MTNDQQNTLLTTNFSFQCLAQCSQSKARAGVFYTPHGVVETPRFMPVGTLATVKTLTPAQLKETGAQMVLSNTYHLHLQPGEAIVSGGGGLHKFMGWNGPMLTDSGGFQVFSLSEMRKISEEGVTFRSPHDGQIIKFTPEKSIEIQNTLGADVIMAFDECPPATANRQEVEAATERTYRWLLRCIEAHQGHKEQALFGIVQGGVYLDLRAQAAEALHKLDLPGYAIGGVSVGEEPELIHQVVQVTAPLLPYHKPRYLMGVGTYQEMVIAIASGIDLFDCVIPTRWARHGTAMVQGDRWNLKNAKFREDFTPLDETCPCYTCQNFTRAYISHLVRSQEILAYTLLSIHNITELIHFTQKIRKAILNNTFAIEFGKWLKN

SEQ ID NO: 55269 - protein, 336 aa, Fischerella sp.
  misc_feature (1)..(336): tr|A0A0S3TTA1|A0A0S3TTA1_9CYAN Queuine tRNA-ribosyltran sferase OS=Fischerella sp. NIES-3754 OX=1752063 GN=tgt PE=3 SV=1
MPVGTLATVKTLTPAQLKETGAQMVLSNTYHLHLQPGEAIVAGGGGLHKFMGWSGPMLTDSGGFQVFSLSEMRKISEEGVTFRSPHDGQIIKFTPEKSIEIQNTLGADVIMAFDECPPATASRQEVEAATERTYRWLLRCIEAHQRPQEQALFGIVQGGVHLDLRAQAAEALMKLDLPGYAIGGVSVGEEPELIHQVVQVTAPLLPYHKPRYLMGVGTYQEMVVAIASGVDLFDCVIPTRWARHGTAMVQGDRWNLKNAKFREDFTPLDETCPCYTCQNFTRAYISHLVRSQEILAYTLLSIHNITELIRFTQKIREAILNDTFVAEFGEWLTPRE

SEQ ID NO: 55270 - protein, 285 aa, Fischerella thermalis
  misc_feature (1)..(285): tr|A0A2N6LTQ1|A0A2N6LTQ1_9CYAN Queuine tRNA-ribosyltran sferase (Fragment) OS=Fischerella thermalis CCMEE 5319 OX=2019665 GN=tgt PE=3 SV=1
DSGGYQVFSLAENRKITEEGARFKSHIDGSYHMFTPEGVMDIQRSIGADVVMAFDECPPWPCDERYVEESMHLTHRWLERCISRFDETPSLYGYEQSLFGIVQGGTVSRLRKESAEFVASKNLSGNAIGGLSVGEPAELMYEMTDLVTDILPADRPRYLMGVGTPENILNSIALGVDMFDCVMPTRNGRNGMLFTTEGIINIKNRRWADDFSPIDPAGISRVDFQYSKAYLRHLFVADEFLGRQIASVHNLAFYLWLVREARRHIVQGDFVEWKNEILPVISRRL

SEQ ID NO: 55271 - protein, 371 aa, Fischerella thermalis
  misc_feature (1)..(371): tr|A0A2N6M463|A0A2N6M463_9CYAN Queuine tRNA-ribosyltran sferase OS=Fischerella thermalis CCMEE 5205 OX=2019671 GN=tgt PE=3 SV=1
MSANFSFQCLASCSHTKARAGVFYTPHGVVETPRFMPVGTLATVKTLTPAQLKETGAQMVLSNTYHLHLQPGEAIVAGGGGLHKFMGWSGPMLTDSGGFQVFSLSEMRKISEEGVTFRSPHDGQIIKFTPEKSIEIQNTLGADVIMAFDECPPATASRQEVEAATERTHRWLLRCIEAHQRPQEQALFGIVQGGVHLDLRAQAAEALKKLDLPGYAIGGVSVGEEPELIHQVVQVTAPLLPYHKPRYLMGVGTYQEMVVAIASGVDLFDCVIPTRWARHGTAMVQGDRWNLKSAKFREDFTPLDETCPCYTCQNFTRAYISHLVRSQEILAYTLLSIHNITELIRFTQKIREAILNDTFVAEFGKWLTLRE

SEQ ID NO: 55272 - protein, 376 aa, Flagellimonas aquimarina
  misc_feature (1)..(376): tr|A0A316KUH0|A0A316KUH0_9FLAO Queuine tRNA-ribosyltran sferase OS=Flagellimonas aquimarina OX=2201895 GN=tgt P E=3 SV=1
MKFTLEKKDNLSKARAGKMTTDHGTIQTPIFMPVGTVASVKGVHQRELKDEINPDIILGNTYHLYLRPGTKILEQAGGLHKFMGWDRNILTDSGGYQVYSLSANRKINEEGVNFKSHIDGSNHFFTPENVMEIQRTIGADIIMAFDECTPYPCDYNYAKRSMHMTHRWLERCISHLEKLPYKYGYSQTFFPIVQGSTYKDLRKQSAEYIASVGAEGNAIGGLSVGEPAEEMYEMSEIVCDILPEDKPRYLMGVGTPINILENIALGVDMFDCVMPTRNARNGMLFTAHGTINIKNKKWEDDFSPIDDMGITFVDTEYSKAYLRHLFAANEYLGKQIATIHNLGFYLWLVRTARERILAGDFLEWKTKMVQQMDKRL

SEQ ID NO: 55273 - protein, 376 aa, Flagellimonas eckloniae
  misc_feature (1)..(376): tr|A0A0Q1DKV0|A0A0Q1DKV0_9FLAO Queuine tRNA-ribosyltran sferase OS=Flagellimonas eckloniae OX=346185 GN=tgt PE= 3 SV=1
MEFTLKQKDSKSKARAGELSTDHGTIQTPIFMPVGTVASVKGVHQRELKDEINPDVILGNTYHLYLRPGIEILEQAGGLHKFMGWDRNILTDSGGYQVYSLSGNRKIKEEGVNFKSHIDGSSHFFTPENVMEIQRVIGADIIMAFDECTPYPCEYNYAKRSMHMTHRWLDRCISHLEKLPFKYGYSQSFFPIVQGSTYKDLRKQSAEYIASVGAEGNAIGGLSVGEPAEEMYEMAEIVCDILPEDKPRYLMGVGTPINILENIALGVDMFDCVMPTRNARNGMLFTAHGTINIKNKKWEADFSPIDEMGITFVDTEYSKAYLRHLFAANEYLGKQIATIHNLGFYLWLVRTARERILAGDFQEWKTNMVQQMDKRL

SEQ ID NO: 55274 - protein, 376 aa, Flagellimonas flava
  misc_feature (1)..(376): tr|A0A1M5PRE5|A0A1M5PRE5_9FLAO Queuine tRNA-ribosyltran sferase OS=Flagellimonas flava OX=570519 GN=tgt PE=3 SV =1
MKFTLEHKDNQSKARAGTLTLDHSTIQTPIFMPVGTVASVKGVHQRELREEINPDIILGNTYHLYLRPKTAILEEAGGLHKFMGWDRNILTDSGGYQVYSLSNNRKIKEEGVKFKSHIDGSNHFFTPENVMEIQRTIGADIIMAFDECTPYPCDYNYAKRSMHMTHRWLDRCINHLEKLPFKYGYSQSFFPIVQGSTYKDLRQQSAEYIASVGAEGNAIGGLSVGEPAEEMYAMAELVCDILPEDKPRYLMGVGTPINILENIALGVDMFDCVMPTRNARNGMLFTAHGTINIKNKKWEADFSPIDEMGITFVDTEYSKAYLRHLFAANEYLGKQIATIHNLGFYLWLVRTARERILVGDFQEWKTKMVQQMDKRL

SEQ ID NO: 55275 - protein, 376 aa, Flagellimonas maritima
  misc_feature (1)..(376): tr|A0A2Z4LV38|A0A2Z4LV38_9FLAO Queuine tRNA-ribosyltran sferase OS=Flagellimonas maritima OX=1383885 GN=tgt PE= 3 SV=1
MKFTLKQTDTKSKARAGELSTDHGTIKTPIFMPVGTVASVKGVHQRELKDDIDPDIILGNTYHLYLRPGAKILEKAGGLHKFMGWDRNILTDSGGYQVYSLSANRKINEEGVNFKSHIDGSSHFFTPENVMEIQRTIGADIIMAFDECTPYPCEYNYAKRSMHMTHRWLDRCITHLEKLPYKYGYSQSFFPIVQGSTYKDLRAQSAEYIASVGAEGNAIGGLSVGEPAEEMYEMAEIVCGILPEDKPRYLMGVGTPINILENIALGVDMFDCVMPTRNARNGMLFTAHGTINIKNKKWEDDFSPIDEMGITFVDTEYSKAYLRHLFAANEYLGKQIATIHNLGFYLWLVRSARERILAGDFQEWKIKMVKQMDKRL

SEQ ID NO: 55276 - protein, 376 aa, Flagellimonas pacifica
  misc_feature (1)..(376): tr|A0A285MZB7|A0A285MZB7_9FLAO Queuine tRNA-ribosyltran sferase OS=Flagellimonas pacifica OX=1247520 GN=tgt PE= 3 SV=1
MKFTLLQKDDKSKARAGELMTDHGKIETPIFMPVGTVASVKGVHQRELKDEINPDVILGNTYHLYLRPGTGILEHAGGLHKFMGWDRNILTDSGGYQVYSLSNNRKIKEEGVNFKSHIDGSRHFFTPENVMEIQRTIGADIIMAFDECTPYPCDYNYAKRSMHMTHRWLDRCMAHLDKLPFKYGYSQSFFPIVQGSTYKDLRKQSAEYIASVGAEGNAIGGLSVGEPAEEMYEMAEIVCDILPEEKPRYLMGVGTPINILENIALGVDMFDCVMPTRNARNGMLFTSHGTINIKNKKWEDDFSPIDEMGITFVDTEYSKAYLRHLFAANEYLGKQIATIHNLGFYLWLVRTARERILAGDFQEWKTKMVQQMDKRL

SEQ ID NO: 55277 - protein, 376 aa, Flagellimonas sp.
  misc_feature (1)..(376): tr|A0A5C8V0I1|A0A5C8V0I1_9FLAO Queuine tRNA-ribosyltran sferase OS=Flagellimonas sp. 176CP5-101 OX=2603628 GN=t gt PE=3 SV=1
MEFTLAHKDTQSKARAGELSTDHGVIQTPIFMPVGTVASVKSVHQRELKDDINPDVILGNTYHLYLRPGTGILEQAGGLHKFMGWDRNILTDSGGYQVYSLSGNRKINEEGVNFKSHIDGSSHFFTPENVMEIQRTIGADIIMAFDECTPYPCDYDYAKRSMHMTHRWLDRCITHLEKLPFKYDYAQSFFPIVQGSTYKDLRKQSAEYIASVGAEGNAIGGLSVGEPAEEMYEMAEIVCDILPEDKPRYLMGVGTPINILENIALGVDMFDCVMPTRNARNGMLFTAHGTINIKNKKWEADFSPIDEMGITFVDTEYSKAYLRHLFVAKEYLGKQIATIHNLGFYLWLVRTARERILAGDFQEWKTKMVKQMDKRL

SEQ ID NO: 55278 - protein, 378 aa, Flammeovirga kamogawensis
  misc_feature (1)..(378): tr|A0A553GHR9|A0A553GHR9_9BACT Queuine tRNA-ribosyltran sferase OS=Flammeovirga kamogawensis OX=373891 GN=tgt P E=3 SV=1
MGLKFEVKHKDPQTKARAGKITTDHGEIQTPIFMPVGTAGTVKAVHQRELKEDINADIILGNTYHLYLRPGTEILEKAGGLHKFNGWDRPILTDSGGYQVFSLAQTRKIKEEGVTFRSHIDGSKHLFTPERVMDIQRSIGADIIMAFDECPPYPSDYTYAKNSMHLTHRWLQRCVDRLDETVPLYGHHQALFPIVQGSTYKDLRTQSAEKIASFEREGNAIGGLSVGEPAEMMYEFTELCCDILPEDKPRYLMGVGTPANILENIALGVDMLDCVMPTRQARHGHVFTTQGIMNLKNKKWEDDFTPIDQELGGYVSTFYSKGYLRHMFKANEALAGMVASVHNLTFYLWLVREARQHIIDGDFREWKNAIIPTLMQRL

SEQ ID NO: 55279 - protein, 378 aa, Flammeovirga pacifica
  misc_feature (1)..(378): tr|A0A1S1Z4Y7|A0A1S1Z4Y7_9BACT Queuine tRNA-ribosyltran sferase OS=Flammeovirga pacifica OX=915059 GN=tgt PE=3 SV=1
MGLTFELSHKDPQTKARAGKITTEHGEIKTPIFMPVGTAGTVKAVHQRELKEDINAEIILGNTYHLYLRPGVEILEKAGGLHKFNGWDRPILTDSGGYQVFSLANNRKIKEEGVTFRSHIDGSKHLFTPEKVMDIERTIGADIIMAFDECPPYPSDYTYAKNSMHLTHRWLQRCVDRLDETEPKYGYHQALFPIVQGSTYRDLRTQSAEKIASFECEGNAIGGLSVGEPAEMMYEHTELVCSILPEDKPRYLMGVGTPANILENIALGVDMFDCVMPTRQARHGMVFTTQGIMNLKNKKWEDDYTPLDAQLGGYASTFYSKAYLRHLFKAGEALGGMIASVHNLTFYLWLVREARQHIIDGDFREWKNAIIPTLMQRL

SEQ ID NO: 55280 - protein, 378 aa, Flammeovirga sp.
  misc_feature (1)..(378): tr|A0A1B1FNM7|A0A1B1FNM7_9BACT Queuine tRNA-ribosyltran sferase OS=Flammeovirga sp. MY04 OX=1191459 GN=tgt PE=3 SV=1
MGLTFELSHKDPQTKARAGKITTEHGEIKTPIFMPVGTAGTVKAVHQRELKEDINAEIILGNTYHLYLRPGMEILEKAGGLHKFNGWDRPILTDSGGYQVFSLANNRKIKEEGVTFRSHIDGSKHLFTPEKVMDIERTIGADIIMAFDECPPYPSDYTYAKNSMHLTHRWLQRCVDRLDETEPKYGYHQALFPIVQGSTYRDLRTQSAETIASFECEGNAIGGLSVGEPAEMMYEHTELVCSILPEDKPRYLMGVGTPANILENIALGVDMFDCVMPTRQARHGMVFTTQGIMNLKNKKWEDDYSPLDAQLGGYASTFYTKAYMRHLFKAGEALGGMIASVHNLTFYLWLVREARQHIIDGDFREWKNAIIPTLMQRL

SEQ ID NO: 55281 - protein, 378 aa, Flammeovirga sp.
  misc_feature (1)..(378): tr|A0A150AKB5|A0A150AKB5_9BACT Queuine tRNA-ribosyltran sferase OS=Flammeovirga sp. SJP92 OX=1775430 GN=tgt PE= 3 SV=1
MALTFEIKQKDPQTKARAGKITTAHGEILTPIFMPVGTAGTVKAVHQRELKEDINAEIILGNTYHLYLRPGTEILEKAGGLHKFNGWDRPILTDSGGYQVFSLANNRKIKEEGVTFRSHIDGSKHLFTPEKVMDIERSIGADIIMAFDECPPYPSDYTYAKNSMHMTHRWLQRCVDRLAETEPLYGYHQSLFPIVQGSTYKDLRTQSAETIASFEREGNAIGGLSVGEPAEMMYEFTELCCDILPEDKPRYLMGVGTPANILENIALGVDMFDCVMPTRQARHGHVFTTQGIMNLKNKKWEDDFTPLDAELGGYVSTFYSKGYLRHMFKANEALAGMVASVHNLTFYLWLVREARQHILDGDFREWKNAITPKLMQRL

SEQ ID NO: 55282 - protein, 381 aa, Flammeovirgaceae bacterium
  misc_feature (1)..(381): tr|A0A1Z9SDW5|A0A1Z9SDW5_9BACT Queuine tRNA-ribosyltran sferase OS=Flammeovirgaceae bacterium TMED262 OX=198669 9 GN=tgt PE=3 SV=1
  misc_feature (74)..(75): Xaa can be any naturally occurring amino acid
  misc_feature (219)..(219): Xaa can be any naturally occurring amino acid
  misc_feature (237)..(237): Xaa can be any naturally occurring amino acid
  misc_feature (281)..(281): Xaa can be any naturally occurring amino acid
  misc_feature (307)..(307): Xaa can be any naturally occurring amino acid
  misc_feature (327)..(327): Xaa can be any naturally occurring amino acid
  misc_feature (357)..(357): Xaa can be any naturally occurring amino acid
  misc_feature (376)..(376): Xaa can be any naturally occurring amino acid
MFFKLLNTSSKTNARCGKIFTDRGTISTPIFMPVGTLGSVKGVHQHELKNEIKSQIILSNTYHLYLRPGTEVLXXAGGLHKFINWDKPILTDSGGYQVFSLSNNVKIFEKGVNFNSHIDGSKHLFTPESVIHTQREIGSDICMVLDECIKYPCEYSYAKESLELTHRWLDRSIEEFKISNSLYNRNQFLFPIVQGSTFKDLRIKSAEYVSKKNLPGNAXGGLSVGEPKEVIYENVDXVCNILPSDKPRYLMGVGTPENILECISLGVDMFDCVMPTRNGRXGMLFTQNGTINIKNKKWEKDFSPIDXELGLLSSLYSKSYLRHLIIXKEMLGSQIASIHNLSFYIWLVKEARKHIIXDDFHIWKTKILNKVSNRLXSEDFK

SEQ ID NO: 55283 - protein, 375 aa, Flammeovirgaceae bacterium
  misc_feature (1)..(375): tr|A0A3R7V542|A0A3R7V542_9BACT Queuine tRNA-ribosyltran sferase OS=Flammeovirgaceae bacterium TMED290 OX=198670 0 GN=tgt PE=3 SV=1
MFFKLTHRSSKTNARSGKIFTDRGTISTPIFMPVGTLGTVKGVHQHELENDIQAEIILSNTYHLYLRPGLDVINSAGGLHKFINWNKPILTDSGGYQVFSLSKNVKIMDEGVQFYSHIDGSKHLFTPESVIKTQRKIGSDICMVLDECLKYPCDYSYASQSLDLTHIWLERSIEEFNRTENLYEKKQFLFPIVQGSTFKDLRTKSAEFIGNKNMVGNAIGGLSVGEPKDIIYENVDLVCNILPKDKPRYLMGVGTPENILECISMGVDMFDCVMPSRNGRNGMIFTKNGIINIKNKKWEKDFSSIDEDLGIISSNYSKSYLRHLIINKEMLGAQIATIHNLSFYIWLVKKARERIISDDFHIWKERIIKRLIKRL

SEQ ID NO: 55284 - protein, 379 aa, Flaviaesturariibacter sp.
  misc_feature (1)..(379): tr|A0A4R1BKC7|A0A4R1BKC7_9BACT Queuine tRNA-ribosyltran sferase OS=Flaviaesturariibacter sp. 17J68-12 OX=250278 0 GN=tgt PE=3 SV=1
MAALSFQLHKTDDQSSARAGSITTDHGVIETPIFMPVGTVGSVKALSQQQLKTEVDPHIILGNTYHLYLRPGMETMEAAGGLHQFINWERPILTDSGGYQVFSLAANRKITEEGVTFRSHIDGSKHLFSPERVMDIERTIGADIMMAFDECPPANSEYRYALDSMKLTHRWLDRCWTRFNDTPDKYGHTQNLFPIVQGAVFHDLRKASCEYIASKGATGNAIGGLSVGEPEPVMYEIAALCCEHLPKDKPRYLMGVGTPWNILENIALGVDMFDCVMPTRNGRNAMLFTTQGVINIDNKKWERDFSPIDPGLNCETSQYYSKAYLRHLFKAGEYLSLSIASIQNLAFYLWLVREARKHILAGDFKSWKDEMVPRLKTRL

SEQ ID NO: 55285 - protein, 379 aa, Flaviaesturariibacter sp.
  misc_feature (1)..(379): tr|A0A4R4DU64|A0A4R4DU64_9BACT Queuine tRNA-ribosyltran sferase OS=Flaviaesturariibacter sp. 17J68-15 OX=254576 1 GN=tgt PE=3 SV=1
MAALSFQLHQTDAQSAARAGTITTDHGVIETPIFMPVGTVGSVKALSQQQLKTEVDPRIILGNTYHLYLRPGMETMEAAGGLHQFINWDRPMLTDSGGYQVFSLAANRKITEEGVTFRSHIDGSKHLFTPESVMDVERTIGADIMMAFDECPPANCEYRYALDSMNRTHRWLDRCFARFNDTPDKYGHTQNLFPIVQGAVFHDLRNASCDYIAAKGATGNAIGGLSVGEPEAVMYEIAALCCERLPKDKPRYLMGVGTPWNILENIALGVDMFDCVMPTRNGRNAMLFTTRGVINIDNKKWERDFSPIDPGLDCETSQYYTKAYLRHLFKAGEYLALTIASIQNLAFYLWLVREARKHILAGDFLSWKNELVPVLKTRL

SEQ ID NO: 55286 - protein, 422 aa, Flaviflexus salsibiostraticola
  misc_feature (1)..(422): tr|A0A3Q8WUP5|A0A3Q8WUP5_9ACTO Queuine tRNA-ribosyltran sferase OS=Flaviflexus salsibiostraticola OX=1282737 GN =tgt PE=3 SV=1
MTFTVGARLDGLGRTGTMTTPHGTVETPAFIPVGTKATVKAVLPETVKDLGAQAVLANAYHLFLQPGSDIVDAAGGLGRFMNWPGPTFTDSGGFQVMSLGTGYQKVLSEQFAGTGQKGRDGSDLEVAENKIRRAHVDDDGVTFRSHLDGTKHRFTAEVSMRIQHELGADIIFAFDELTTLLNSRAYQVEALERTRLWAERCLIAHRQLTEERADKPYQQLFGVIQGAQYEDLRRQAARDLGSMEIDGQSFDGFGIGGALEKENLGTIVGWVSEELPENRARHLLGISEPDDLFAAVEAGADTFDCVNPSRVARNAAIYSPDGRFNITRSEFRRNFTPLVEGCGCYTCTHYTKAYLHHTFKAKEMISSTLATIHNEYYTVQLVDSIRRSIIDGSFDELKEETLGRFYARTATRGVRSVAGTPR

SEQ ID NO: 55287 - protein, 414 aa, Flaviflexus sp.
  misc_feature (1)..(414): tr|A0A3S9PZ79|A0A3S9PZ79_9ACTO Queuine tRNA-ribosyltran sferase OS=Flaviflexus sp. H23T48 OX=2496867 GN=tgt PE= 3 SV=1
MTFTVSSRLDGVQGRTGTIHTPHGDVRTPAFIPVGTKATVKAVLPESIKDIGAQAVLANAYHLFLQPGSDIVDEAGGLGKFMNWDGPTYTDSGGFQVMSLGTGYKKVLSEQFAGTGKKGRDGSDLEVAENKIRRAHIDDDGVTFRSHLDGTKLRFTSEVSMRIQHELGADIIFAFDELTTLLNSREYQEEALERTRLWAERCLVAHKQLTIDRADKPYQQLFGVIQGAQYEDLRRKAARDVGSMEVDGQSFDGFGIGGALEKENLGTIVEWVSEELPENKARHLLGISEPDDLFAAIEAGADTFDCVNPSRVARNAAIYSPDGRFNITRAEFKRNFSPLVEGCDCYTCTHYTKAYLHHTFKAKEMIANTLATIHNEHYTVKLVDSIRDSIDNGTFAELKEETLGRFYAKKANGS

SEQ ID NO: 55288 - protein, 379 aa, Flavihumibacter petaseus
  misc_feature (1)..(379): tr|A0A0E9MUV6|A0A0E9MUV6_9BACT Queuine tRNA-ribosyltran sferase OS=Flavihumibacter petaseus NBRC 106054 OX=1220 578 GN=tgt PE=3 SV=1
MPVLKFEMTHRDPGSSARRGTIYTDHGIVETPIFMPVGTVGSVKAVSQQQLQHDVQAEIILGNTYHLYLRPGTEVLEAAGGLHRFMGWNKPILTDSGGYQVFSLAANRKLTEEGALFQSHIDGSKHLFTAENVMDIQRSIGADIIMAFDECPPYPSDYGYAKKSMELTHRWVDRCIARLDDTPDLYGYTQNLFPIVQGSTFPDLRKASCDYISSRGAAGNAIGGLSVGEPESMMYELTALCCENLPVEKPRYLMGVGTPWNILENIALGIDMFDCVMPTRNGRNGMLFTSQGVINIDNKKWEKDFSPIDEGIGSGISAYYSKAYLRHLVKSKEILGLTIASVHNLAFYLWLVREARAHIVAGDYFSWKNEMIPLLKTRL

SEQ ID NO: 55289 - protein, 379 aa, Flavihumibacter solisilvae
  misc_feature (1)..(379): tr|A0A0C1IMX8|A0A0C1IMX8_9BACT Queuine tRNA-ribosyltran sferase OS=Flavihumibacter solisilvae OX=1349421 GN=tgt PE=3 SV=1
MAALSFTLSAQDPNSKARAGEFVTDHGTVQTPIFMPVGTVGSVKAVSQQQLKEEVKAEIILGNTYHLYLRPGLEVLEAAGGLHKFNGWDGPILTDSGGYQVFSLAGNRKLTEDGALFQSHIDGSKHLFSPESVMDIQRIIGGDIIMAFDECPPYPSDYAYARKSLDLTHRWLDRCFKRLDETPDKYGYSQNLFPIVQGSTFGDLRKESCAYISSKNAVGNAIGGLSVGEPEEMMYELAGLCCENLPENKPRYLMGVGTPWNILENISLGVDMFDCVMPTRNGRNAMLFTSRGVINIDNKKWEKDFSPIDDGIDCTFSHYYSKAYLRHLVKAKEILGLTIASVHNLAFYLWLVKEARKHILAGDFNSWKNEMIPIIKTRL

SEQ ID NO: 55290 - protein, 379 aa, Flavihumibacter sp.
  misc_feature (1)..(379): tr|A0A162NE02|A0A162NE02_9BACT Queuine tRNA-ribosyltran sferase OS=Flavihumibacter sp. CACIAM 22H1 OX=1812911 G N=tgt PE=3 SV=1
MAALSFQLCGKDAGSNARAGLVSTDHGTIETPIFMPVGTVGSVKAVSQQQLQTEVNAQIILGNTYHLYLRPGQQVLEAAGGLHRFMGWDRPILTDSGGYQVFSLAGNRKLTEEGALFQSHIDGSKHLFTPESVMDIQRSIGADIIMAFDECPPYPSDYSYAQKSMELTHRWLNRCFKRLEETPDKYGYTQNLFPIVQGSTYKDLRRASAEFVASKGAAGNAIGGLSVGEPEEMMYEHAAHCCEFLPADKPRYLMGVGTPWNILENISLGIDMFDCVMPTRNGRNAMLFTSKGVINIDNKKWEKDFSPIDDGIDNAFSQYYSKAYLRHLVKSKEILALTIASVHNLAFYLWLVKEARRHILAGDFTSWKNEQILLLKTRL

SEQ ID NO: 55291 - protein, 379 aa, Flavihumibacter sp.
  misc_feature (1)..(379): tr|A0A0C1KRW6|A0A0C1KRW6_9BACT Queuine tRNA-ribosyltran sferase OS=Flavihumibacter sp. ZG627 OX=1463156 GN=tgt PE=3 SV=1
MSALSFCLQHQDPSSKARAGIINTDHGSIQTPIFMPVGTVGSVKAVSQQQLQDEVKATIILGNTYHLYLRPGTEVLQAAGGLHRFNGWNHPILTDSGGYQVFSLAGNRKLTEDGALFQSHIDGSKHMFTPESVMDIQRVIGADIIMAFDECPPYPSNYEYARKSMDLTHRWLSRCVNRLAETPDLYGYSQNLFPIVQGSTFADLRKASCEYISSKGAVGNAIGGLSVGEPEEMMYELTALCCENLPEDKPRYLMGVGTPWNILENISLGVDMFDCVMPTRNGRNAMLFTSKGVINIDNKKWEKDFSPIDEGIDCNFSNYYSKAYLRHLVKAKEILGLTIASIHNLGFYLWLVKQAREHIIVGDFQRWKNEMIPVLKTRC

SEQ ID NO: 55292 - protein, 376 aa, Flavimaricola marinus
  misc_feature (1)..(376): tr|A0A238LDT1|A0A238LDT1_9RHOB Queuine tRNA-ribosyltran sferase OS=Flavimaricola marinus OX=1819565 GN=tgt PE=3 SV=1
MPEKFSFALAATDGAARTGTISTPRGDIRTPAFMPVGTAATVKAMMPESVAATGADILLGNTYHLMLRPTAERIARLGGLHDFMNWQRPILTDSGGFQVMSLADLRKLTERGVTFRSHIDGSKHELTPERSMEIQRLLGSDIVMAFDECPALPADRDRIAESMALSMRWAARSRDAFGDRPGHALFGIQQGGLERDLREQSAEALRDIEFDGYAVGGLAVGEGQEAMFGVLDFAPAMLPQDKPRYLMGVGKPDDIVGAVKRGIDMMDCVLPSRSGRTGQAWTRRGQVNIKNARHQDDPRPLDEACTCPTCRGYSRAYLHHVFRAGEMISGMLLTWHNLHYYQELMSEMRAAISEARFAAWEASFHDLRAEGDIAQL

SEQ ID NO: 55293 - protein, 376 aa, Flavipsychrobacter stenotrophus
  misc_feature (1)..(376): tr|A0A2S7T0D4|A0A2S7T0D4_9BACT Queuine tRNA-ribosyltran sferase OS=Flavipsychrobacter stenotrophus OX=2077091 G N=tgt PE=3 SV=1
MEFELQAQDSASSARAGKMTTAHGEIETPIFMPVGTVGSVKAVTHEQLIKEVKAEIILGNTYHLYLRPGTEVLKAAGGLHKFAGWPRPILTDSGGYQVFSLAANRKIKEEGVVFQSHIDGSRHLFTPENVVDTQRAIGADIIMAFDECPPYPSEYTYAKNSMELTHRWLARCVKHMSDTEPLYGYDQALFPIVQGSTYRDLRKISAEFIASMGADGNAIGGLSVGEPEEMMYELCALTCEYLPQDKPRYLMGVGTPWNILENISLGVDMFDCVMPTRNGRNGMLFTSKGVVNIRNKKWATDFSVIDDGIDCYTSNYYSKGYLRHLFIAGEILAMQIASIHNLAFYLHLVKQAREHIIAGDFTSWKNEMIPLLKTRL

SEQ ID NO: 55294 - protein, 384 aa, Flaviramulus basaltis
  misc_feature (1)..(384): tr|A0A1K2ITN3|A0A1K2ITN3_9FLAO Queuine tRNA-ribosyltran sferase OS=Flaviramulus basaltis OX=369401 GN=tgt PE=3 SV=1
MPIEVMIYMKFELKAKDTQSKARAGKITTDHGVIETPIFMPVGTVATVKGVHQRELKEEINPDIILGNTYHLYLRPQTQVLEKAGGLHKFMNWDRNILTDSGGYQVYSLSANRKIKEEGVKFKSHIDGSYHTFTPENVMEIQRTIGADIIMAFDECTPYPCDYNYAKRSMHMTHRWLDRCINHLEKTPLKYGYNQAFFPIVQGSTYKDLRMQSAEYIANSGAVGNAIGGLSVGEPAEEMYAMTDVVCSILPEDKPRYLMGVGTPINILENIALGVDMFDCVMPTRNARNGMLFTAFGSINIKNLKWAEDFSPIDDMGITFVDTEYSKAYLRHLFTVNELLGKQIATIHNLGFYLWLVREARKHILAGDFKTWKDKMVKQMDNRL

SEQ ID NO: 55295 - protein, 387 aa, Flavisolibacter ginsengisoli
  misc_feature (1)..(387): tr|A0A1M5CW77|A0A1M5CW77_9BACT Queuine tRNA-ribosyltran sferase OS=Flavisolibacter ginsengisoli DSM 18119 OX=11 21884 GN=tgt PE=3 SV=1
MQPNFLDLMPALAFDLLKTDDRSAARAGKITTDHGLIETPIFMPVGTIGSVKAVSQQQLKSEVDPHIILGNTYHLYLRPGMQTLEAAGGLHNFMNWDRPILTDSGGFQVFSLSGNRKINEEGVMFQSHIDGSRHLFTPEKVMDIERIIGADIMMAFDECPPANSEYKYALDSMNLTHRWLDRCFTHFNGTQDRYGHTQNLFPIVQGAVFHDLRKASCEYVSSKNATGNAIGGLSVGEPEPVMYEICQLCCESLPTEKPRYLMGVGTPWNILECIALGIDMFDCVMPTRNGRNAMLFTTKGVINIDNKKWEQDFSPIDDGLDSEFSHYYSKAYVRHLFKAGELLGLTIASVQNLAFYLWLVKEARKHILAGDFLSWKEEMIPILKTRL

SEQ ID NO: 55296 - protein, 379 aa, Flavisolibacter ginsenosidimutans
  misc_feature (1)..(379): tr|A0A5B8UG51|A0A5B8UG51_9BACT Queuine tRNA-ribosyltran sferase OS=Flavisolibacter ginsenosidimutans OX=661481 GN=tgt PE=3 SV=1
MPALSFSLEKTDNLSVARAGTITTDHGQIQTPIFMPVGTIGSVKAVPQQLLKEQVKAQIILGNTYHLYLRPGMETIEAAGGLHRFMNWDKPILTDSGGFQVFSLAAARKIKEEGVTFQSHIDGSKHLFTPEKVMDIERTIGADIMMAFDECPPANSIYKYALDSMNLTHRWLDRCFKHFNNTPDKWGHTQNLFPIVQGAVYHDLRKASCDYISSKNATGNAIGGLSVGEPEPVMYEICQLCCENLPQNKPRYLMGVGTPWNILECIALGVDMFDCVMPTRNGRNAMLFTTKGVINIDNKKWEKDFSPIDEGLDCEWSHYYNKAYVRHLFKSSELLGLTIASVQNLAFYLWLVTEARRHILLGDFLSWKNEMVPVLKTRL

SEQ ID NO: 55297 - protein, 379 aa, Flavisolibacter tropicus
  misc_feature (1)..(379): tr|A0A172U231|A0A172U231_9BACT Queuine tRNA-ribosyltran sferase OS=Flavisolibacter tropicus OX=1492898 GN=tgt P E=3 SV=1
MPALQFQLEITDAKSAARAGTITTDHGTIQTPIFMPVGTIGSVKAVTQQQLADPIKAQIILGNTYHLYLRPGMQVMEKAGGLHQFMNWNKPILTDSGGFQVFSLAGNRKINEEGVMFQSHIDGSKHLFTPEKVMDIERTIGADIMMAFDECPPANAEYKYALNSMNLTHRWLDRCFKHFNATPDKYGHTQNLFPIVQGAVHHDLRKASCEYIASKEATGNAIGGLSVGEPEPVMYEICQLCCENLPTQKPRYLMGVGTPWNILECIALGIDMFDCVMPTRNGRNAMLFTSKGIINIDNKKWEYDFSPIDDGIDCEWSHYYSKSYVRHLFKASEILGLTIASVQNLAFYLWLVKEARKHIQQGDFLAWKNEMVPVLKTRL

SEQ ID NO: 55298 - protein, 376 aa, Flavivirga eckloniae
  misc_feature (1)..(376): tr|A0A2K9PMS7|A0A2K9PMS7_9FLAO Queuine tRNA-ribosyltran sferase OS=Flavivirga eckloniae OX=1803846 GN=tgt PE=3 SV=1
MKFELKAKDAQSKARAGKITTDHGVIETPIFMPVGTVATVKGVHQRELKDDINPDIILGNTYHLYLRPQTDIIEKAGGLHKFMNWDRNILTDSGGYQVYSLSANRKIKEEGVKFKSHIDGSYHIFTPENVMEIQRSIGADIIMAFDECTPYPCDYNYAKRSMHMTHRWLDRCINHLEKTPLKYDYNQAFFPIVQGSTYKDLRMQSAEYIANSGAVGNAIGGLSVGEPAEEMYAMTDVVCAILPEDKPRYLMGVGTPINILENIALGVDMFDCVMPTRNARNGMLFTAYGTINIKNLKWAEDFSPIDEMGITFVDTEYSKAYLRHLFSVNELLGKQIATIHNLGFYLWLVREARKHILAGDFKTWKDKMVKQMDNRL

SEQ ID NO: 55299 - protein, 376 aa, Flavivirga sp.
  misc_feature (1)..(376): tr|A0A4S1DZC4|A0A4S1DZC4_9FLAO Queuine tRNA-ribosyltran sferase OS=Flavivirga sp. RZ03 OX=2559571 GN=tgt PE=3 S V=1
MKFELKAKDAQSKARAGKITTDHGVIETPIFMPVGTVATVKGVHQRELKEDINPDIILGNTYHLYLRPQTPILEKAGGLHKFMNWDRNILTDSGGYQVYSLSANRKIKEEGVKFKSHIDGSYHTFTPENVMEIQRTIGADIIMAFDECTPYPCDYNYAKRSMHMTHRWLDRCINHLEKAPLKYGYNQAFFPIVQGSTYKDLRKQSAEYIANSGAVGNAIGGLSVGEPAEEMYAMTDVVCAILPEDKPRYLMGVGTPINILENIALGVDMFDCVMPTRNARNGMLFTAHGTINIKNLKWADDFSPIDDMGITFVDTEYSKAYLRHLFTVNELLGKQIATIHNLGFYLWLVREARKHILAGDFKTWKAKMVKQMDNRL

SEQ ID NO: 55300 - protein, 376 aa, Flavobacteria bacterium
  misc_feature (1)..(376): tr|Q26DG7|Q26DG7_FLABB Queuine tRNA-ribosyltransferase OS=Flavobacteria bacterium (strain BBFL7) OX=156586 GN= tgt PE=3 SV=1
MKFDLLQTDSQSQARAGVVHTDHGAIETPIFMPVGTVGTVKGVHQRELEEEVNPDIILANTYHLYLRPGIDVLEKAGGLHKFMNWDRPILTDSGGYQVYSLSANRKIKEEGVKFKSHIDGSYHFFTPERAMDIQRSIGADIIMAFDECTPYPCEYNYARRSMHMTHRWLKRCIEHFNNTPNKYGFNQTLFPIIQGSTYKDLREQSAEFIANCDMPANAIGGLSVGEPAEEMYAMTDVVTAVLPKDKPRYLMGVGTPINLLENVALGVDMFDCVMPTRNGRNGMIFTAHGTMNMKNKKWETDFSPLDPADYAWVDTAYSKAYVRHLFTVNEMLGRQICTIHNLSFYLWLMREARKHILAGDFRTWKDKMVKQMDNRL

SEQ ID NO: 55301 - protein, 376 aa, Flavobacteria bacterium
  misc_feature (1)..(376): tr|A3J5C1|A3J5C1_9FLAO Queuine tRNA-ribosyltransferase OS=Flavobacteria bacterium BAL38 OX=391598 GN=tgt PE=3 SV=1
MKFDLITKDPKSKARAGKITTDHGVIETPIFMPVGTVASVKGVHQRELREDINPDIILGNTYHLYLRPQTKILEAAGGLHKFMNWDRNILTDSGGYQVYSLSGRRKIKEEGVKFKSHIDGSYHFFSPENVMEIQRTIGADIIMAFDECTPYPCDYRYAKRSMHMTHRWLDRCINHLEKLPFKYGYEQTFFPIVQGSTYKDLREQSAEYIANAGAQGNAIGGLSVGEPAEEMYAMTEIVTAILPEDKPRYLMGVGTPINILENIALGIDMFDCVMPTRNARNGMLFTAYGSINIKNKKWEDDFSPIDEMGHTWVDTEYSKAYLRHLFAANEFLGKQIATIHNLGFYMWLVREARRQIIAGTFREWKDKMVIQMSQRL

SEQ ID NO: 55302 - protein, 376 aa, Flavobacteriaceae bacterium
  misc_feature (1)..(376): tr|A0A504JCK5|A0A504JCK5_9FLAO Queuine tRNA-ribosyltran sferase OS=Flavobacteriaceae bacterium M625 OX=2589995 GN=tgt PE=3 SV=1
MKFDLLGKDALSKARVGNITTDHGVIETPIFMPVGTVATVKGVHQRELKNDINPDIILGNTYHLYLRPQTSILEKAGGLHKFMNWDRNILTDSGGYQVYSLSANRKIKEEGVKFKSHIDGSYHVFTPENVMEIQRTIGADIIMAFDECTPYPCDYNYAKRSMHMTHRWLDRCMQHLNKIPVKYGYDQAFFPIVQGSTYKDLRIQSAEYIANAGAVGNAIGGLSVGEPAEEMYAMTEVVTDILPEDKPRYLMGVGTPINILENIALGVDMFDCVMPTRNGRNGMLFTAHGTINIKNKKWEDDFSPIDEMGITYVDTEYTKAYLRHLFSVNEMLGRQIATIHNLGFYLWLVREARKHILAGDFYSWKNMMVKQMDKRL

SEQ ID NO: 55303 - protein, 376 aa, Flavobacteriaceae bacterium
  misc_feature (1)..(376): tr|A0A2M7NNB2|A0A2M7NNB2_9FLAO Queuine tRNA-ribosyltran sferase OS=Flavobacteriaceae bacterium CG_4_10_14_3_um_ filter_31_253 OX=1973987 GN=tgt PE=3 SV=1
MKFDLKFTDPKSKARAGVITTDHGEIQTPIFMPVGTVGTVKGVHQTELKNEINPDIILGNTYHLFLRPKTDILEQAGGLHKFMNWDRNILTDSGGYQVYSLSSNRKINEEGVKFKSHIDGSTHVFTPENVMEIQRSIGADIIMAFDECTPYPCEYNYAKRSMHMTHRWLDRCINHLDKLPYKYGYEQTFFPIVQGSTYKDLRKQSAEYIANAGAQGNAIGGLSVGEPAEEMYAMTEIVTAILPEDKPRYLMGVGTPINILENIALGIDMFDCVMPTRNARNGMLFTANGTINMKNKKWENDFSEIDEMGITFVDTLYSKAYLRHLFAANEMLGKQIATIHNLGFYMWLVREARKHILAGDFREWKDKMVIQMDKRL

SEQ ID NO: 55304 - protein, 376 aa, Flavobacteriales bacterium
  misc_feature (1)..(376): tr|A0A2H0G8R6|A0A2H0G8R6_9FLAO Queuine tRNA-ribosyltran sferase OS=Flavobacteriales bacterium CG18_big_fil_WC_8 _21_14_2_50_32_9 OX=1974008 GN=tgt PE=3 SV=1
MKFKLEKKDLQSKARAGEIITEHGVIKTPIFMPVGTAGTVKGVHQHELNSDTKAQIILGNTYHLYLRPKLEIIQQAGGLHQFMNWDKPILTDSGGYQVYSLSARRKIKEEGATFASHIDGSKHLFTPENVMDIQRTIGADIIMAFDECTPYPCDYKYAKNSMHLTHRWLKRCCERFDETEPHYGYNQALFPIVQGSVYKDLRKQSAEKIASFEREGNAIGGLSVGEPDDEMYEMCDIVTAILPEDKPRYLMGVGTPINLLENIALGIDMFDCVMPTRNARNGMLFTKNGFINIKNKKWEADFSPLDAEGTSHVDSFYSKAYLRHLIISKEILGAQIATLHNLSFYLWLVNEAREHILLGDFTTWKNKMVKQLAARL

SEQ ID NO: 55305 - protein, 376 aa, Flavobacteriales bacterium
  misc_feature (1)..(376): tr|A0A2E7TMZ6|A0A2E7TMZ6_9FLAO Queuine tRNA-ribosyltran sferase OS=Flavobacteriales bacterium OX=2021391 GN=tgt PE=3 SV=1
MKFILEKTNPETKARAGTIKTDHGEIKTPIFMPVGTAATVKAVHQREVEEDIKAQIILGNTYHLYLRPNTDTLNKAGGLHKFMNWEKPILTDSGGFQVYSLSGTRKIKEEGVKFQSHIDGSYHMFSPEKVMDIQREIGADIIMAFDECTPYPCDYNYAKNSMHMTHRWLKRCCDRFDNTDSLYGYNQTLFPIVQGSTYKDLRVESAETIASFERDGNAIGGLSVGEPAEEMYAMTDLVCSILPENKPRYLMGVGTPENILENIALGIDMFDCVMPTRNARNGMLFTREGIINIKNKKWEQDFSPLDPHGTSYVDQFYSKSYVRHLIQSKEILGKQICSIHNLAFYLWLVTEARKHIIEGDFYNWKNQMVKKVTNRL

SEQ ID NO: 55306 - protein, 376 aa, Flavobacteriia bacterium
  misc_feature (1)..(376): tr|A0A432IQ26|A0A432IQ26_9BACT Queuine tRNA-ribosyltran sferase OS=Flavobacteriia bacterium OX=2044941 GN=tgt P E=3 SV=1
MKFEIKGKDQHSKARAATITTEHGKIQTPIFMPVGTAASVKGVHQTELKDEINAEIILGNTYHLYLRPKTDILEQAGGLHKFMNWDRPILTDSGGYQVYSLSNTRKIKEEGVKFKSHIDGSAHFFSPEFSMEIQRSIGADIIMAFDECTPYPCDYNYARNSMHMTHRWLDRCVDYLAENPEKYGFKQTLFPIVQGSTYKDLRKQSAEYIAGVGAEGNAIGGLSVGEPAEEMYEMTELVCNILPEDKPRYLMGVGTPINILENIALGVDMFDCVMPTRNARNGMLFTAHGTINIKNKKWENDFSPIDDTAITFVDTMYSKAYLRHLFAANEYLGKQIASIHNLGFYLWLVREARNHILAGDFLQWKNIMVKQMDKRL

SEQ ID NO: 55307 - protein, 376 aa, Flavobacteriia bacterium
  misc_feature (1)..(376): tr|A0A1Q3ZJM6|A0A1Q3ZJM6_9BACT Queuine tRNA-ribosyltran sferase OS=Flavobacteriia bacterium 40-80 OX=1895763 GN =tgt PE=3 SV=1
MHFELQHRDTKSNARTGKLVTDHGEIQTPIFMPVGTVGTVKGVHQHELEQTINAQIILGNTYHLYLRPGIDVLESAGGLHNFINWKKPILTDSGGFQVYSLSKSRKITEEGVRFQSVYDGAYHFFTPEYAMDVQRAIGGDIIMAFDECTPYPCDYRYAKNSMNMTHRWLDRCISHFKNTPPKYDYEQALFPIVQGSVYEDLRKASAEYVASKDMLGNAIGGLSVGEPEEEMYAMTELVTAILPEEKPRYLMGVGTPWNILESIARGIDMFDCVMPSRNARHGLLFTWEGTINIKNQKWEKDFSPLDSSGKTYVDNTYSKAYLRHLIKVNEYLGVQIATIHNLGFYLDLVKEARKRILDGTFSTWKDQVIPKLKQRL

SEQ ID NO: 55308 - protein, 383 aa, Flavobacterium aciduliphilum
  misc_feature (1)..(383): tr|A0A328YDK9|A0A328YDK9_9FLAO Queuine tRNA-ribosyltran sferase OS=Flavobacterium aciduliphilum OX=1101402 GN=t gt PE=3 SV=1
MPVENAFMKFELIQKDTNSKARAGKITTDHGVIETPIFMPVGTVASVKGVHQRELKEEINPDIILGNTYHLYLRPQTEILEKAGGLHKFMNWDRNILTDSGGYQVYSLSANRKIKEEGVKFKSHIDGSYHFFSPENVMDIQRTIGADIIMAFDECTPYPCDYRYAKRSMHMTHRWLDRCVNHLNSTPPKYGYEQTLFPIVQGSTYKDLRQQSAEYIANVGAQGNAIGGLSVGEPAEEMYAMTEVVCDILPEDKPRYLMGVGTPINILENIALGVDMFDCVMPTRNARNGMLFTAHGVINIKNKKWEDDFSPIDEMGHTFVDLEYTKAYLRHLFAANEYLGKQIATIHNLGFYLWLVREARKHILAGDFRVWKERMVTQMNQRL

SEQ ID NO: 55309 - protein, 376 aa, Flavobacterium akiainvivens
  misc_feature (1)..(376): tr|A0A0M8MFV4|A0A0M8MFV4_9FLAO Queuine tRNA-ribosyltran sferase OS=Flavobacterium akiainvivens OX=1202724 GN=tg t PE=3 SV=1
MKFDLVTKDPASKARAGVVTTDHGAIQTPIFMPVGTVGTVKGVHQRELKQEINPDIILGNTYHLYLRPQLDVLEQAGGLHKFMNWDRPILTDSGGYQVYSLSANRKIKEEGVKFKSHIDGSYHFFSPESVMEIQRTIGADIIMAFDECTPYPCDYRYAKRSMHMTHRWLDRCISHLDKLPYKYGYSQAFFPIVQGSTYTDLRKESAEYIANAGAVGNAIGGLSVGEPAEEMYAMTDVVCSILPEDKPRYLMGVGTPINILENIALGVDMFDCVMPTRNARNGMLFTANGTINIKNKKWEADFSPIDEMGITFVDTEYSKAYLRHLFAANEFLGKQIATIHNLGFYMWLVRQAREHIIAGDFYAWKEKMVKQMSQRL

SEQ ID NO: 55310 - protein, 376 aa, Flavobacterium album
  misc_feature (1)..(376): tr|A0A2S1QYI9|A0A2S1QYI9_9FLAO Queuine tRNA-ribosyltran sferase OS=Flavobacterium album OX=2175091 GN=tgt PE=3 SV=1
MKFDLLTKDPQSKARAGSITTDHGTIETPIFMPVGTVASVKGVHQRELKDDINPDIILGNTYHLYLRPQTEILEKAGGLHKFMNWDRNILTDSGGYQVYSLSANRKIKEEGVKFKSHIDGSYHFFSPESVMEIQRTIGADIIMAFDECTPYPCDYRYAKRSMHMTHRWLDRCITHLEKVPFKYGYSQAFFPIVQGSTYTDLRQQSAEYIANAGAVGNAIGGLSVGEPAEEMYAMTDVVCSILPEDKPRYLMGVGTPINILENIALGVDMFDCVMPTRNARNGMLFTANGTINIKNKKWEADFSPLDEMGITFVDTEYTKAYLRHLFAANEYLGKQIATIHNLGFYMWLVREARKHILAGDFREWKDKMVKQMSNRL

SEQ ID NO: 55311 - protein, 376 aa, Flavobacterium alvei
  misc_feature (1)..(376): tr|A0A2S5AF89|A0A2S5AF89_9FLAO Queuine tRNA-ribosyltran sferase OS=Flavobacterium alvei OX=2080416 GN=tgt PE=3 SV=1
MKFDLLQKDPHTKARAGSITTDHGVIETPIFMPVGTVASVKGVHQRELKEEINPDIILGNTYHLYLRPQTEILEKAGGLHKFMNWDRNILTDSGGYQVYSLSSNRKIKEEGVKFKSHIDGSYHVFTPENVMEIQRTIGADIIMAFDECTPYPCDYRYAQRSMHMTHRWLDRCINHLEKVPFKYGYEQTFFPIVQGSTYKDLRRQSAEYIANSGQQGNAIGGLSVGEPAEEMYAMTEVVCEILPEDKPRYLMGVGTPINILENIALGIDMFDCVMPTRNARNGMLFTANGTINIKNKKWEDDFSVIDEMGHTFVDTEYSKAYLRHLFAANEYLGKQIATIHNLGFYMWLVREARKHILAGDFRTWKEMMVRNMSQRL

SEQ ID NO: 55312 - protein, 376 aa, Flavobacterium anhuiense
  misc_feature (1)..(376): tr|A0A444VVQ6|A0A444VVQ6_9FLAO Queuine tRNA-ribosyltran sferase OS=Flavobacterium anhuiense OX=459526 GN=tgt PE =3 SV=1
MKFDLLQKDPQSKARAGSITTDHGVIETPIFMPVGTVASVKGVHQRELKEEINPDIILGNTYHLYLRPQTEILEKAGGLHKFMNWDRNILTDSGGYQVYSLSSNRKIKEEGVKFKSHIDGSYHFFTPENVMEIQRTIGADIIMAFDECTPYPCDYRYAQRSMHMTHRWLDRCINHLDKVPYKYGYEQTFFPIVQGSTYKDLRRQSAEYIANAGQQGNAIGGLSVGEPAEEMYAMTEVVCEILPEDKPRYLMGVGTPINILENIALGIDMFDCVMPTRNARNGMLFTANGTINIKNKKWEADFSPIDEMGHTFVDTEYTKAYLRHLFAANEYLGKQIATIHNLGFYMWLVREARKHILAGDFRPWKEMMVKNMSQRL

SEQ ID NO: 55313 - protein, 376 aa, Flavobacterium anhuiense
  misc_feature (1)..(376): tr|A0A1G5JJI4|A0A1G5JJI4_9FLAO Queuine tRNA-ribosyltran sferase OS=Flavobacterium anhuiense OX=459526 GN=tgt PE =3 SV=1
MKFDLLQKDPQSKARAGSITTDHGVIETPIFMPVGTVASVKGVHQRELKEEINPDIILGNTYHLYLRPQTEILEKAGGLHKFMNWDRNILTDSGGYQVYSLSSNRKIKEEGVKFKSHIDGSYHFFTPENVMEIQRTIGADIIMAFDECTPYPCDYRYAQRSMHMTHRWLDRCIAHLEKVPYKYGYEQTFFPIVQGSTYKDLRRQSAEYIANAGQQGNAIGGLSVGEPAEEMYAMTEVVCEILPEDKPRYLMGVGTPINILENIALGIDMFDCVMPTRNARNGMLFTANGTINIKNKKWEADFSPIDEMGHTFVDTEYTKAYLRHLFAANEYLGKQIATIHNLGFYMWLVREARKHILAGDFRPWKEMMVKNMSQRL

SEQ ID NO: 55314 - protein, 376 aa, Flavobacterium aquaticum
  misc_feature (1)..(376): tr|A0A327YFF1|A0A327YFF1_9FLAO Queuine tRNA-ribosyltran sferase OS=Flavobacterium aquaticum OX=1236486 GN=tgt P E=3 SV=1
MKFDLITKDPKSKARAGKITTDHGVIETPIFMPVGTVASVKGVHQRELRDDINPDIILGNTYHLYLRPQTKILEAAGGLHKFMNWDRNILTDSGGYQVYSLSSNRKIKEEGVKFKSHIDGSYHFFSPENVMEIQRTIGADIIMAFDECTPYPCDYRYAKRSMHMTHRWLDRCITHLDKLPFKYGYEQTFFPIVQGSTYKDLREQSAEYIANAGAQGNAIGGLSVGEPAEEMYAMTEIVTAILPEDKPRYLMGVGTPINILENIALGIDMFDCVMPTRNARNGMLFTAHGTMNMKNKKWAEDFSPIDEMGHTWVDTEYSKAYLRHLFAADEFLAKQIATIHNLGFYMWLVREARRQIIAGTFREWKDKMVVQMSQRL

SEQ ID NO: 55315 - protein, 376 aa, Flavobacterium aquatile
  misc_feature (1)..(376): tr|A0A095SYD9|A0A095SYD9_9FLAO Queuine tRNA-ribosyltran sferase OS=Flavobacterium aquatile LMG 4008 = ATCC 1194 7 OX=1453498 GN=tgt PE=3 SV=1
MKFDLLQKDPNSNARAGTITTDHGVIETPIFMPVGTVASVKGVHQRELKDDINPDIILGNTYHLYLRPQTEILEKAGGLHKFMNWDRNILTDSGGYQVYSLSANRKIKEEGVKFKSHIDGSYHFFTPENVMEIQRTIGADIIMAFDECTPYPCDYRYAQRSMKMTHRWLDRCINHLDKLPFKYGYEQTFFPIVQGSTYKDLRQQSAEYIANSNQQGNAIGGLSVGEPAEEMYAMTEVVCEILPEDKPRYLMGVGTPINILENIALGIDMFDCVMPTRNARNGMLFTANGTINIKNKKWEADFSPVDEMGITFVDTEYTKAYLRHLFAANEYLGKQIATIHNLGFYMWLVREARKHILAGDFRTWKDMMVKNMSQRL

SEQ ID NO: 55316 - protein, 376 aa, Flavobacterium aquicola
  misc_feature (1)..(376): tr|A0A3E0E940|A0A3E0E940_9FLAO Queuine tRNA-ribosyltran sferase OS=Flavobacterium aquicola OX=1682742 GN=tgt PE =3 SV=1
MKFDLLKTDPQSKARAGSITTDHGVIETPIFMPVGTVASVKGVHQRELKEEINPDIILGNTYHLYLRPQTEILEKAGGLHKFMNWDRNILTDSGGYQVYSLSNNRKIKEEGVKFKSHIDGSYHFFTPENVMEIQRSIGADIIMAFDECTPYPCDYRYAQRSMHMTHRWLDRCISHLDKVPFKYGYEQTFFPIVQGSTYKDLRRQSAEYIANSGQQGNAIGGLSVGEPAEEMYAMTEVVCEVLPEDKPRYLMGVGTPINILENIALGIDMFDCVMPTRNARNGMLFTANGTINIKNKKWEADFSVIDEMGHTFVDLEYSKAYLRHLFAANEYLGKQIATIHNLGFYMWLVREARKHILAGDFRPWKEMMVKNMSQRL

SEQ ID NO: 55317 - protein, 376 aa, Flavobacterium aquidurense
  misc_feature (1)..(376): tr|A0A0Q0RZL5|A0A0Q0RZL5_9FLAO Queuine tRNA-ribosyltran sferase OS=Flavobacterium aquidurense OX=362413 GN=tgt PE=3 SV=1
MKFDLLKKDPQSKARAGSITTDHGVIETPIFMPVGTVASVKGVHQRELKEDINPDIILGNTYHLYLRPQTEILEKAGGLHKFMNWDRNILTDSGGYQVYSLSNNRKIKEEGVKFKSHIDGSYHFFSPESVMEIQRTIGADIIMAFDECTPYPCDYRYAQRSMHMTHRWLDRCINHLDKVPYKYGYEQTFFPIVQGSTYKDLRQQSAEYIANSGQQGNAIGGLSVGEPAEEMYAMTEVVCEILPEDKPRYLMGVGTPINILENIALGIDMFDCVMPTRNARNGMLFTANGTINIKNKKWEADFSPIDEMGHTFVDTEYTKAYLRHLFAANEYLGKQIATIHNLGFYMWLVREARKHILAGDFRPWKEMMVKNMSQRL

SEQ ID NO: 55318 - protein, 376 aa, Flavobacterium aquidurense
  misc_feature (1)..(376): tr|A0A1H3QF85|A0A1H3QF85_9FLAO Queuine tRNA-ribosyltran sferase OS=Flavobacterium aquidurense OX=362413 GN=tgt PE=3 SV=1
MKFDLLQKDPQSKARAGSITTDHGVIETPIFMPVGTVASVKGVHQRELKEDINPDIILGNTYHLYLRPQTEILEKAGGLHKFMNWDRNILTDSGGYQVYSLSNNRKIKEEGVKFKSHIDGSYHFFTPENVMEIQRTIGADIIMAFDECTPYPCDYRYAQRSMHMTHRWLDRCISHLDKVPYKYGYEQTFFPIVQGSTYKDLRRQSAEYIANSGQQGNAIGGLSVGEPAEEMYAMTEVVCEILPEDKPRYLMGVGTPINILENIALGIDMFDCVMPTRNARNGMLFTANGTINIKNKKWEADFSPIDEMGHTFVDTEYTKAYLRHLFAANEYLGKQIATIHNLGFYMWLVREARKHILAGDFRPWKEMMVKNMSQRL

SEQ ID NO: 55319 - protein, 376 aa, Flavobacterium araucananum
  misc_feature (1)..(376): tr|A0A227P4R1|A0A227P4R1_9FLAO Queuine tRNA-ribosyltran sferase OS=Flavobacterium araucananum OX=946678 GN=tgt PE=3 SV=1
MKFDLLQKDPQSKARAGSITTDHGVIETPIFMPVGTVASVKGVHQRELKEDINPDIILGNTYHLYLRPQTEILEKAGGLHKFMNWDRNILTDSGGYQVYSLSNNRKIKEEGVKFKSHIDGSYHFFSPESVMEIQRTIGADIIMAFDECTPYPCDYRYAQRSMHMTHRWLDRCISHLDKVPFKYGYEQTFFPIVQGSTYKDLRQQSAEYIANSGQQGNAIGGLSVGEPAEEMYAMTEVVCEILPEDKPRYLMGVGTPINILENIALGIDMFDCVMPTRNARNGMLFTANGTINIKNKKWEADFSPIDEMGHTFVDTEYTKAYLRHLFAANEYLGKQIATIHNLGFYMWLVREARKHILAGDFRPWKEMMVKNMDQRL

SEQ ID NO: 55320 - protein, 376 aa, Flavobacterium arcticum
  misc_feature (1)..(376): tr|A0A345H910|A0A345H910_9FLAO Queuine tRNA-ribosyltran sferase OS=Flavobacterium arcticum OX=1784713 GN=tgt PE =3 SV=1
MKFDLFTKDPQSKARAGAITTDHGVIETPIFMPVGTVASVKGVHQRELRDDINPDIILGNTYHLYLRPQTEILEKAGGLHKFMNWDRPILTDSGGYQVYSLSASRKIKEEGVKFKSHIDGSYHFFSPENVMEIQRTIGADIIMAFDECTPYPCDYRYAKRSMHMTHRWLDRCITHLDKLPYKYGYSQAFFPIVQGSTYTDLRQQSAEYIANAGAVGNAIGGLSVGEPAEEMYAMTDVVCSILPEDKPRYLMGVGTPINILENIALGVDMFDCVMPTRNARNGMLFTANGTINIKNKKWEDDFSPIDEMGITFVDTEYSKAYLRHLFAANEYLGKQIATIHNLGFYMWLVREARKHILAGDFREWKDMMVKNMNQRL

SEQ ID NO: 55321 - protein, 376 aa, Flavobacterium aurantiibacter
  misc_feature (1)..(376): tr|A0A255ZDT0|A0A255ZDT0_9FLAO Queuine tRNA-ribosyltran sferase OS=Flavobacterium aurantiibacter OX=2023067 GN= tgt PE=3 SV=1
MEFNLLHTDPHSRARAGKITTDHGIIETPIFMPVGTVASVKGVHQRELREEINPDIILGNTYHLYLRPQLDILERAGGLHKFMNWDRNILTDSGGYQVYSLSANRKIKEEGVKFKSHIDGSYHFFTPENVMEIQRTIGADIIMAFDECTPYPCDYRYAQRSMHMTHRWLDRCIAHLEKVPYKYGYSQAFFPIVQGSTYKDLRRQSAEYIANSNQVGNAIGGLSVGEPAEEMYAMTEVVTEILPQDKPRYLMGVGTPINILENIALGIDMFDCVMPTRNARNGMLFTANGTINIKNKKWEADFSPLDENGTTFVDHEYSKAYLRHLFAANEYLGKQIATIHNLGFYMWLVREARKQILAGTFAEWKNKMVKQMNQRL

SEQ ID NO: 55322 - protein, 376 aa, Flavobacterium beibuense
  misc_feature (1)..(376): tr|A0A444W4A8|A0A444W4A8_9FLAO Queuine tRNA-ribosyltran sferase OS=Flavobacterium beibuense OX=657326 GN=tgt PE =3 SV=1
MKFDLITKDPQSKARAGLITTDHGPIETPIFMPVGTVATVKGVHQRELKNDINPDIILGNTYHLYLRPQTPIIEKAGGLHKFMNWDRNILTDSGGYQVYSLSGNRKIKEEGVKFKSHIDGSYHFFSPESVMEIQRTIGADIIMAFDECTPYPCDYRYAKRSMHMTHRWLDRCIAHLEKVPVKYGYDQAFFPIVQGSTYTDLRAQSAEYIANAGAVGNAIGGLSVGEPAEEMYAMSEVVCNILPEDKPRYLMGVGTPINILENIALGIDMFDCVMPTRNARNGMLFTANGTINIKNKKWEDDFSPIDEMGITFVDTEYTKAYLRHLFAANEFLGKQIATIHNLGFYMWLVREARKHILAGDFREWKDKMVKQMSQRL

SEQ ID NO: 55323 - protein, 376 aa, Flavobacterium beibuense
  misc_feature (1)..(376): tr|A0A0A2LSD4|A0A0A2LSD4_9FLAO Queuine tRNA-ribosyltran sferase OS=Flavobacterium beibuense F44-8 OX=1406840 GN =tgt PE=3 SV=1
MKFDLITKDPQSKARAGLITTDHGPIETPIFMPVGTVATVKGVHQRELKNDINPDIILGNTYHLYLRPQTPILEKAGGLHKFMNWDRNILTDSGGYQVYSLSGNRKIKEEGVKFKSHIDGSYHFFSPESVMEIQRTIGADIIMAFDECTPYPCDYRYAKRSMHMTHRWLDRCIAHLEKVPVKYGYDQAFFPIVQGSTYKDLRAQSAEYIANAGAVGNAIGGLSVGEPAEEMYAMSEVVCNILPEDKPRYLMGVGTPINILENIALGIDMFDCVMPTRNARNGMLFTANGSINIKNKKWEDDFSPIDEMGITFVDTEYSKAYLRHLFAANEFLGKQIATIHNLGFYMWLVREARKHILAGDFREWKEKMVKQMSQRL

SEQ ID NO: 55324 - protein, 376 aa, Flavobacterium branchiophilum
  misc_feature (1)..(376): tr|A0A2H3KTK6|A0A2H3KTK6_9FLAO Queuine tRNA-ribosyltran sferase OS=Flavobacterium branchiophilum OX=55197 GN=tg t PE=3 SV=1
MKFDLLKTDPQSKARAGSITTDHGVIETPIFMPVGTVASVKGVHQRELKEEINPDIILGNTYHLYLRPQTAILEKAGGLHKFMNWDRNILTDSGGYQVYSLSANRKIKEEGVKFKSHIDGSYHFFTPENVMEIQRTIGADIIMAFDECTPYPCDYRYAQRSMHMTHRWLDRCIQHLEKLPFKYGYEQTFFPIVQGSTYKDLRKQSAEYIANSNQQGNAIGGLSVGEPAEEMYAMTEVVCNILPEDKPRYLMGVGTPINILENIALGIDMFDCVMPTRNARNGMLFTAYGTINIKNKKWEADFSPIDPMGITFVDTEYTKAYLRHLFAANEYLGKQIATIHNLGFYMWLVREARKHIIEGDFRSWKDKMVVQMSQRL

SEQ ID NO: 55325 - protein, 376 aa, Flavobacterium branchiophilum
  misc_feature (1)..(376): tr|G2Z0I5|G2Z0I5_FLABF Queuine tRNA-ribosyltransferase OS=Flavobacterium branchiophilum (strain FL-15) OX=1034 807 GN=tgt PE=3 SV=1
MKFDLLKTDPQSKARAGSITTDHGMIETPIFMPVGTVASVKGVHQRELKEEINPDIILGNTYHLYLRPQTAILEKAGGLHKFMNWDRNILTDSGGYQVYSLSANRKIKEEGVKFKSHIDGSYHFFTPENVMEIQRTIGADIIMAFDECTPYPCDYRYAQRSMHMTHRWLDRCILHLEKLPFKYGYEQTFFPIVQGSTYKDLRKQSAEYIANSNQQGNAIGGLSVGEPAEEMYAMTEVVCNILPEDKPRYLMGVGTPINILENIALGIDMFDCVMPTRNARNGMLFTAYGTINIKNKKWEADFSPIDPMGITFVDTEYTKAYLRHLFAANEYLGKQIATIHNLGFYMWLVREARKHIIEGDFRSWKDKMVVQMSQRL

SEQ ID NO: 55326 - protein, 376 aa, Flavobacterium caeni
  misc_feature (1)..(376): tr|A0A1G5HUB8|A0A1G5HUB8_9FLAO Queuine tRNA-ribosyltran sferase OS=Flavobacterium caeni OX=490189 GN=tgt PE=3 S V=1
MEFELLHKDPQTQARAGKITLGHGVIETPIFMPVGTVASVKGVHQRELKDDINPDIILGNTYHLYLRPQMDVLEKAGGLHKFMNWDRNILTDSGGYQVYSLSANRKIKEEGVKFKSHIDGSYHVFTPENVMEIQRTIGADIIMAFDECTPYPCDYRYAQRSMHMTHRWLDRCIKHLDNLPFKYGYEQAFFPIVQGSTYKDLRQQSAEYIANANQPGNAIGGLSVGEPAEEMYAMTEVVTAILPEDKPRYLMGVGTPANILENIALGIDMFDCVMPTRNARNGMLFTANGTINIKNKKWEADFSPLDEMGHTFVDREYTKAYLRHLFAANEYLGKQIATIHNLGFYMWLVREARKHILAGDFREWKNKMVKQMDQRL

SEQ ID NO: 55327 - protein, 376 aa, Flavobacterium cauense
  misc_feature (1)..(376): tr|V6RYB7|V6RYB7_9FLAO Queuine tRNA-ribosyltransferase OS=Flavobacterium cauense R2A-7 OX=1341154 GN=tgt PE=3 SV=1
MKFDLLLKDPQTKARAGSITTDHGVIETPIFMPVGTVASVKGVHQRELKDDINPDIILGNTYHLYLRPQTEILEKAGGLHKFMNWDRNILTDSGGYQVYSLSSNRKIKEEGVKFKSHIDGSYHFFSPENVMEIQRTIGADIIMAFDECTPYPCDYRYAQKSMKMTHRWLDRCINHLEKLPFKYGYEQTFFPIVQGSTYKDLRRQSAEYIANAGAQGNAIGGLSVGEPAEEMYAMTEVVTAILPEDKPRYLMGVGTPINILENIALGIDMFDCVMPTRNARNGMLFTANGTINIKNKKWEADFSPIDEMGHTFVDTEYTKAYLRHLFAANEYLGKQIATIHNLGFYMWLVREARKHILAGDFREWKEMMVKNMSQRL

SEQ ID NO: 55328 - protein, 376 aa, Flavobacterium cheniae
  misc_feature (1)..(376): tr|A0A562KC21|A0A562KC21_9FLAO Queuine tRNA-ribosyltran sferase OS=Flavobacterium cheniae OX=295428 GN=tgt PE=3 SV=1
MKFDLITKDPKSKARAGKITTDHGVIETPIFMPVGTVASVKGVHQRELRDDINPDIILGNTYHLYLRPQTKILEAAGGLHKFMNWDRNILTDSGGYQVYSLSSNRKIKEEGVKFKSHIDGSYHFFSPENVMEIQRTIGADIIMAFDECTPYPCDYRYAKRSMHMTHRWLDRCINHLEKLPFKYGYEQTFFPIVQGSTYKDLREQSAEYIANAGAQGNAIGGLSVGEPAEEMYAMTEIVTAILPEDKPRYLMGVGTPINILENIALGIDMFDCVMPTRNARNGMLFTAHGTMNMKNKKWEADFSPIDEMGHTWVDTEYSKAYLRHLFAADEFLGKQIATIHNLGFYMWLVREARRQIIAGTFREWKDKMVIQMSQRL

SEQ ID NO: 55329 - protein, 376 aa, Flavobacterium chilense
  misc_feature (1)..(376): tr|A0A1M7G360|A0A1M7G360_9FLAO Queuine tRNA-ribosyltran sferase OS=Flavobacterium chilense OX=946677 GN=tgt PE= 3 SV=1
MKFDLLQKDPQSKARAGSINTDHGVIETPIFMPVGTVASVKGVHQRELKNDINPDIILGNTYHLYLRPQTEILEKAGGLHKFMNWDRNILTDSGGYQVYSLSSNRKIKEEGVKFKSHIDGSYHFFTPENVMEIQRTIGADIIMAFDECTPYPCDYRYAQRSMHMTHRWLDRCINHLDKVPYKYGYEQTFFPIVQGSTYKDLRRQSAEYIANAGQQGNAIGGLSVGEPAEEMYAMTEVVCEILPEDKPRYLMGVGTPINILENIALGIDMFDCVMPTRNARNGMLFTANGTINIKNKKWEADFSPIDEMGHTFVDTEYTKAYLRHLFAANEYLGKQIATIHNLGFYMWLVREARKHILAGDFRPWKEMMVKNMSQRL

SEQ ID NO: 55330 - protein, 376 aa, Flavobacterium circumlabens
  misc_feature (1)..(376): tr|A0A4Y7U678|A0A4Y7U678_9FLAO Queuine tRNA-ribosyltran sferase OS=Flavobacterium circumlabens OX=2133765 GN=tg t PE=3 SV=1
MKFDLLQKDPQSKARAGSITTDHGVIETPIFMPVGTVASVKGVHQRELKEDINPDIILGNTYHLYLRPQTEILEKAGGLHKFMNWDRNILTDSGGYQVYSLSNNRKIKEEGVKFKSHIDGSYHFFSPESVMEIQRTIGADIIMAFDECTPYPCDYRYAQRSMHMTHRWLDRCISHLDKLPYKYGYEQTFFPIVQGSTYKDLRRQSAEYIANSGQQGNAIGGLSVGEPAEEMYAMTEVVCEILPEDKPRYLMGVGTPINILENIALGIDMFDCVMPTRNARNGMLFTANGTINIKNKKWEDDFSPIDEMGHTFVDTEYTKAYLRHLFAANEYLGKQIATIHNLGFYMWLVREARKHILAGDFRPWKEMMVKNMSQRL

SEQ ID NO: 55331 - protein, 376 aa, Flavobacterium columnare
  misc_feature (1)..(376): tr|A0A0X8C189|A0A0X8C189_9FLAO Queuine tRNA-ribosyltran sferase OS=Flavobacterium columnare OX=996 GN=tgt PE=3 SV=1
MKFELLYTDPQTQARAGKVITDHGVIETPIFMPVGTVASVKGVHQRELKNDINPDIILGNTYHLYLRPQTKILEQAGGLHKFMNWDRNILTDSGGYQVYSLSSNRKIKEEGVKFKSHIDGSYHFFSPESVMEIQRSIGADIIMAFDECTPYPCDYRYAKRSMHMTHRWLDRCVDHLKKVPEMYGYEQTLFPIVQGSTYKDLRAQSAEYIANVGAQGNAIGGLSVGEPAEEMYAMTEVVTAILPKEKPRYLMGVGTPINILENIALGIDMFDCVMPTRNARNGMLFTANGVINIKNRKWADDFSPIDEMGHTFVDTDYTKAYLRHLFAADEYLGKQIATIHNLGFYMWLVREARKHILAGDFREWKEKMVKQMAQRL

SEQ ID NO: 55332 - protein, 376 aa, Flavobacterium columnare
  misc_feature (1)..(376): tr|A0A246G8H6|A0A246G8H6_9FLAO Queuine tRNA-ribosyltran sferase OS=Flavobacterium columnare OX=996 GN=tgt PE=3 SV=1
MKFELLHTDPQTQARAGKVITDHGVIETPIFMPVGTVASVKGVHQRELKNDINPDIILGNTYHLYLRPQTKILEQAGGLHKFMNWDRNILTDSGGYQVYSLSSNRKIKEEGVKFKSHIDGSYHFFSPESVMEIQRSIGADIIMAFDECTPYPCDYRYAKRSMHMTHRWLDRCVEHLKKVPTMYGYEQTLFPIVQGSTYKDLRAQSAEYIANVGAEGNAIGGLSVGEPAEEMYAMTEVVTAILPKEKPRYLMGVGTPINILENIALGIDMFDCVMPTRNARNGMLFTANGVINIKNRKWADDFSPIDEMGHTFVDTEYTKAYLRHLFAADEYLGKQIATIHNLGFYMWLVREARRHILAGDFREWKEKMVKQMAQRL

SEQ ID NO: 55333 - protein, 376 aa, Flavobacterium commune
  misc_feature (1)..(376): tr|A0A1D9P736|A0A1D9P736_9FLAO Queuine tRNA-ribosyltran sferase OS=Flavobacterium commune OX=1306519 GN=tgt PE= 3 SV=1
MKFDLLQKDPLSKARAGSITTDHGVIETPIFMPVGTVASVKGVHQRELKNDINPDIILGNTYHLYLRPQTKILEAAGGLHKFMNWDRNILTDSGGYQVYSLSNSRKIKEEGVKFKSHIDGSYHVFTPENVMEIQRTIGADIIMAFDECTPYPCDYNYAKRSMHMTHRWLDRCINHLDKVPVKYGYDQAFFPIVQGSTYKDLRRQSAEYIANSGQVGNAIGGLSVGEPAEEMYAMTEVVTEILPEDKPRYLMGVGTPINILENIALGIDMFDCVMPTRNARNGMLFTANGTINIKNKKWEADFSPIDEMGITFVDTEYTKAYLRHLFAANEYLGKQIATIHNLGFYMWLVREARKHILAGDFRPWKEMMVKNMSQRL

SEQ ID NO: 55334 - protein, 376 aa, Flavobacterium crassostreae
  misc_feature (1)..(376): tr|A0A1B9E8V5|A0A1B9E8V5_9FLAO Queuine tRNA-ribosyltran sferase OS=Flavobacterium crassostreae OX=1763534 GN=tg t PE=3 SV=1
MKFDLLKKDPLSKARAGSITTDHGVIETPIFMPVGTVASVKGVHQRELKQDINPDIILGNTYHLYLRPQTEILEKAGGLHKFMNWDRNILTDSGGYQVYSLSANRKIKEEGVKFKSHIDGSYHVFTPENVMEIQRTIGADIIMAFDECTPYPCDYNYAKRSMKMTHRWLDRCVNHLEKLPVKYGYDQAFFPIVQGSCYKDLRRQSAEYIANSNQVGNAIGGLSVGEPAEEMYAMTEVVCEILPEDKPRYLMGVGTPINILENIALGIDMFDCVMPTRNARNGMLFTANGTINIKNKKWEADFSPIDSMAITFVDTEYSKAYLRHLFAANEYLGKQIATIHNLGFYMWLVREARKHILAGDFRPWKEEMVKNMSQRL

SEQ ID NO: 55335 - protein, 376 aa, Flavobacterium croceum
  misc_feature (1)..(376): tr|A0A2S4N7U8|A0A2S4N7U8_9FLAO Queuine tRNA-ribosyltran sferase OS=Flavobacterium croceum DSM 17960 OX=1121886 GN=tgt PE=3 SV=1
MKFDLLQKDPNSNARAGVITTDHGVIETPIFMPVGTVASVKGVHQRELKQDINPDIILGNTYHLYLRPQTTILEKAGGLHKFMNWDRNILTDSGGYQVYSLSANRKIKEEGVKFKSHIDGSYHFFSPESVMEIQRSIGADIIMAFDECTPYPCDYRYAKRSMHMTHRWLDRCVTHLEKVPEKYGYEQTLFPIVQGSTYKDLRQQSAEYIAGVGAQGNAIGGLSVGEPAEEMYAMTDVVCAILPQDKPRYLMGVGTPINILENIALGIDMFDCVMPTRNARNGMLFTAHGIINIKNKKWEDDFSPIDEMGHTFVDTEYTKAYLRHLFAANEFLGKQIATIHNLGFYLWLVREARRQILAGTFRAWKDKMVVQMATRL

SEQ ID NO: 55336 - protein, 376 aa, Flavobacterium crocinum
  misc_feature (1)..(376): tr|A0A2S1YFA1|A0A2S1YFA1_9FLAO Queuine tRNA-ribosyltran sferase OS=Flavobacterium crocinum OX=2183896 GN=tgt PE =3 SV=1
MKFDLLQKDPQSKARAGSITTDHGVIETPIFMPVGTVASVKGVHQRELKEEINPDIILGNTYHLYLRPQTEILEKAGGLHKFMNWDRNILTDSGGYQVYSLSSNRKIKEEGVKFKSHIDGSYHFFTPENVMEIQRTIGADIIMAFDECTPYPCDYRYAQRSMHMTHRWLDRCINHLEKVPYKYGYEQTFFPIVQGSTYKDLRRQSAEYIANAGQQGNAIGGLSVGEPAEEMYAMTEVVCEILPEDKPRYLMGVGTPINILENIALGIDMFDCVMPTRNARNGMLFTANGTINIKNKKWEADFSPIDEMGHTFVDTEYTKAYLRHLFAANEYLGKQIATIHNLGFYMWLVREARKHILAGDFRPWKEMMVKNMSQRL

SEQ ID NO: 55337 - protein, 376 aa, Flavobacterium cucumis
  misc_feature (1)..(376): tr|A0A1M7ZZP2|A0A1M7ZZP2_9FLAO Queuine tRNA-ribosyltran sferase OS=Flavobacterium cucumis OX=416016 GN=tgt PE=3 SV=1
MKFDLITKDPKSKARAGKITTDHGVIETPIFMPVGTVASVKGVHQRELKQDINPDIILGNTYHLYLRPQTKILEAAGGLHKFMNWDRNILTDSGGYQVYSLSGRRKIKEEGVKFKSHIDGSYHFFSPENVMEIQRTIGADIIMAFDECTPYPCDYRYAKRSMHMTHRWLDRCITHLEKLPFKYGYEQTFFPIVQGSTYKDLRAQSAEYIANVGAQGNAIGGLSVGEPAEEMYAMTEVVTAILPEDKPRYLMGVGTPINILENIALGIDMFDCVMPTRNARNGMLFTAYGSINIKNKKWEADFSPIDEMGHTWVDTEYSKAYLRHLFAANEFLGKQIATIHNLGFYMWLVREARRQILAGTFREWKDKMVIQMSQRL

SEQ ID NO: 55338 - protein, 376 aa, Flavobacterium cupreum
  misc_feature (1)..(376): tr|A0A434A392|A0A434A392_9FLAO Queuine tRNA-ribosyltran sferase OS=Flavobacterium cupreum OX=2133766 GN=tgt PE= 3 SV=1
MKFDLLQKDPQSKARAGSITTDHGVIETPIFMPVGTVASVKGVHQRELKEDINPDIILGNTYHLYLRPQTEILEKAGGLHKFMNWDRNILTDSGGYQVYSLSNNRKIKEEGVKFKSHIDGSYHFFTPENVMEIQRTIGADIIMAFDECTPYPCDYRYAQRSMHMTHRWLDRCISHLDKVPYKYGYEQTFFPIVQGSTYKDLRRQSAEYIANSGQQGNAIGGLSVGEPAEEMYAMTEVVCEILPEDKPRYLMGVGTPINILENIALGIDMFDCVMPTRNARNGMLFTSNGTINIKNKKWEADFSPIDEMGHTFVDTEYTKAYLRHLFAANEYLGKQIATIHNLGFYMWLVREARKHILAGDFRPWKEMMVKNMSQRL

SEQ ID NO: 55339 - protein, 376 aa, Flavobacterium cutihirudinis
  misc_feature (1)..(376): tr|A0A3D9FJ61|A0A3D9FJ61_9FLAO Queuine tRNA-ribosyltran sferase OS=Flavobacterium cutihirudinis OX=1265740 GN=t gt PE=3 SV=1
MKFDLLQKDPQSKARAGSITTDHGVIETPIFMPVGTVASVKGVHQRELKDDINPDIILGNTYHLYLRPQTEILEKAGGLHKFMNWDRNILTDSGGYQVYSLSSNRKIKEEGVKFKSHIDGSYHFFTPENVMEIQRTIGADIIMAFDECTPYPCDYRYAQRSMHMTHRWLDRCINHLEKVPYKYGYEQTFFPIVQGSTYKDLRRQSAEYIANAGQQGNAIGGLSVGEPAEEMYAMTEVVCEILPEDKPRYLMGVGTPINILENIALGIDMFDCVMPTRNARNGMLFTANGTINIKNKKWEADFSPIDEMGHTFVDTEYTKAYLRHLFAANEYLGKQIATIHNLGFYMWLVREARKHILAGDFRPWKEMMVKNMSQRL

SEQ ID NO: 55340 - protein, 376 aa, Flavobacterium cyanobacteriorum
  misc_feature (1)..(376): tr|A0A255Z7X9|A0A255Z7X9_9FLAO Queuine tRNA-ribosyltran sferase OS=Flavobacterium cyanobacteriorum OX=2022802 G N=tgt PE=3 SV=1
MKFDLVTKDPLSKARAGTITTDHGAIQTPIFMPVGTVASVKGVHQRELKEEINPDIILGNTYHLYLRPQADILEKAGGLHKFMNWDRNILTDSGGYQVYSLSANRKIKEEGVKFKSHIDGSYHFFSPESVMEIQRAIGADIIMAFDECTPYPCDYRYAKRSMHMTHRWLDRCIAHLEKVPYKYGYEQTFFPIVQGSTYKDLRAESAEYIANAGAQGNAIGGLSVGEPAEEMYAMTDVVCSILPEDKPRYLMGVGTPVNILENIALGVDMFDCVMPTRNARNGMLFTANGTINIKNKKWEDDFSPLDEMGITFVDTEYTKAYLRHLFAANEYLGKQIATIHNLGFYLWLVREARKHIIEGDFYTWKEKMVKQMSQRL

SEQ ID NO: 55341 - protein, 391 aa, Flavobacterium daejeonense
  misc_feature (1)..(391): tr|A0A0Q0WC70|A0A0Q0WC70_9FLAO Queuine tRNA-ribosyltran sferase OS=Flavobacterium daejeonense OX=350893 GN=tgt PE=3 SV=1
MRSRIVGKTIGRETSMKFDLLQKDPLSKARAGSITTDHGVIETPIFMPVGTVASVKGVHQRELKDDINPDIILGNTYHLYLRPQTKILEQAGGLHKFMNWDRNILTDSGGYQVYSLSNSRKIKEEGVKFKSHIDGSYHTFTPENVMEIQRTIGADIIMAFDECTPYPCDYHYAKRSMHMTHRWLDRCINHLDKVPVKYGYDQAFFPIVQGSTYKDLRRQSAEYIANSGQVGNAIGGLSVGEPAEEMYAMTEVVTEILPEDKPRYLMGVGTPINILENIALGIDMFDCVMPTRNARNGMLFTANGTINIKNKKWEADFSPIDEMGITFVDTEYSKAYLRHLFSANEYLGKQIATIHNLGFYMWLVREARKHILAGDFRPWKEMMVKNMSQRL

SEQ ID NO: 55342 - protein, 376 aa, Flavobacterium dankookense
  misc_feature (1)..(376): tr|A0A4R6QE13|A0A4R6QE13_9FLAO Queuine tRNA-ribosyltran sferase OS=Flavobacterium dankookense OX=706186 GN=tgt PE=3 SV=1
MKFELLANDPNSKARAGTITTDHGVIETPIFMPVGTVGTVKGVHQRELKEDINPDIILGNTYHLYLRPQTEILEKAGGLHKFMNWDRNILTDSGGYQVYSLSANRKIKEEGVKFKSHIDGSYHFFTPENVMEIQRSIGADIIMAFDECTPYPCDYRYAKRSMHMTHRWLDRCITHLDKLPFKYGYEQTFFPIVQGSTYKDLRQQSAEYIANAGQQGNAIGGLSVGEPAEEMYAMTEVVCEILPEDKPRYLMGVGTPINILENIALGIDMFDCVMPTRNARNGMLFTANGTINMKNKKWEADFSPIDEMGITFVDTQYTKAYLRHLFTVNELLGKQIATIHNLGFYMWLVREARKHILAGDFRTWKDMMVKNMSQRL

SEQ ID NO: 55343 - protein, 376 aa, Flavobacterium defluvii
  misc_feature (1)..(376): tr|A0A1M5MXX8|A0A1M5MXX8_9FLAO Queuine tRNA-ribosyltran sferase OS=Flavobacterium defluvii OX=370979 GN=tgt PE= 3 SV=1
MKFDLLQKDPQSKARAGSITTDHGVIETPIFMPVGTVASVKGVHQRELKDDINPDIILGNTYHLYLRPQTEILEKAGGLHKFMNWDRNILTDSGGYQVYSLSSNRKIKEEGVKFKSHIDGSYHVFTPENVMEIQRTIGADIIMAFDECTPYPCDYRYAQRSMHMTHRWLDRCINHLEKVPYKYGYEQTFFPIVQGSTYKDLRRQSAEYIANAGQQGNAIGGLSVGEPAEEMYAMTEVVCEILPEDKPRYLMGVGTPINILENIALGIDMFDCVMPTRNARNGMLFTANGTINIKNKKWEADFSPIDEMGHTFVDVQYTKAYLRHLFAANEYLGKQIATIHNLGFYMWLVREARKHILAGDFKPWKEMMVKNMSQRL

SEQ ID NO: 55344 - protein, 376 aa, Flavobacterium degerlachei
  misc_feature (1)..(376): tr|A0A1H3GAL7|A0A1H3GAL7_9FLAO Queuine tRNA-ribosyltran sferase OS=Flavobacterium degerlachei OX=229203 GN=tgt PE=3 SV=1
MKFDLLQKDPQSKARAGSITTDHGVIETPIFMPVGTVASVKGVHQRELKLDINPDIILGNTYHLYLRPQTEILEKAGGLHKFMNWDRNILTDSGGYQVYSLSANRKIKEEGVKFKSHIDGSYHFFTPENVMEIQRTIGADIIMAFDECTPYPCDYNYAKRSMKMTHRWLDRCVNHLDKVPVKYGYDQAFFPIVQGSCYKDLRQQSAEYIANSNQVGNAIGGLSVGEPAEEMYAMTEVVCEILPEDKPRYLMGVGTPINILENIALGVDMFDCVMPTRNARNGMLFTANGTINIKNKKWEDDFSPIDEMAITYVDTEYTKAYLRHLFAANEYLGKQIATIHNLGFYMWLVREARKHIIAGDFRPWKEMMVKNMSQRL

SEQ ID NO: 55345 - protein, 376 aa, Flavobacterium endophyticum
  misc_feature (1)..(376): tr|A0A495LZY5|A0A495LZY5_9FLAO Queuine tRNA-ribosyltran sferase OS=Flavobacterium endophyticum OX=1540163 GN=tg t PE=3 SV=1
MKFELLQNDPNSKARAGKITTDHGVIETPIFMPVGTVASVKGVHQRELKNDINPDIILGNTYHLYLRPQTQILEKAGGLHKFMNWDRNILTDSGGYQVYSLSSNRKIKEEGVKFKSHIDGSYHVFTPENVMEIQRTIGADIIMAFDECTPYPCDYRYAQRSMHMTHRWLDRCINHLDKLPYKYGYEQTFFPIVQGSTYKDLRQQSAEYIANAGAQGNAIGGLSVGEPAEEMYAMTEVVTEILPKDKPRYLMGVGTPINILENIALGIDMFDCVMPTRNARNGMLFTAHGTINIKNKKWEDDFSPLDEMGHTFVDTEYTKAYLRHLFAANEYLGKQIATIHNLGFYMWLVREARKHILAGDFRVWKEMMVKQMDQRL

SEQ ID NO: 55346 - protein, 376 aa, Flavobacterium enshiense
  misc_feature (1)..(376): tr|V6S9H4|V6S9H4_9FLAO Queuine tRNA-ribosyltransferase OS=Flavobacterium enshiense DK69 OX=1107311 GN=tgt PE=3 SV=1
MKFDLVQKDPQTKARAGFITTDHGVIETPIFMPVGTVATVKGVHQRELKDDINPDIILGNTYHLYLRPQTEILEKAGGLHKFMNWDRNILTDSGGYQVYSLSSNRKIKEEGVKFKSHIDGSYHFFTPENVMEIQRTIGADIIMAFDECTPYPCDYRYAQKSMKMTHRWLDRCIRHLDNLPFKYGYEQTFFPIVQGSTYKDLRAQSAEYIANAGAQGNAIGGLSVGEPAEEMYAMTEVVTAILPEDKPRYLMGVGTPINILENIALGIDMFDCVMPTRNARNGMLFTANGTINIKNKKWEADFSPIDEMGHTFVDTEYSKAYLRHLFSVNEYLGKQIATIHNLGFYMWLVREARTRILAGDFREWKEMMVKNMSQRL

SEQ ID NO: 55347 - protein, 376 aa, Flavobacterium faecale
  misc_feature (1)..(376): tr|A0A2S1LJ18|A0A2S1LJ18_9FLAO Queuine tRNA-ribosyltran sferase OS=Flavobacterium faecale OX=1355330 GN=tgt PE= 3 SV=1
MKFDLLKKDPQSKARAGSITTDHGVIETPIFMPVGTVASVKGVHQRELREDINPDIILGNTYHLYLRPKTEILEKAGGLHKFMNWDRPILTDSGGYQVYSLSSNRKIKEDGVKFKSHIDGSYHVFTPENVMEIQRTIGADIIMAFDECTPYPCDYHYARRSMNMTHRWLERCITHLDKLPMKYGYNQHFFPIIQGSVYKDLREKSAEYIANTNQVGNAIGGLSVGEPAEEMYAMTEVVTAILPEDKPRYLMGVGTPINILENIALGIDMFDCVMPTRNARNGMLFTANGTINIKNKKWEADFSPIDDMAITWVDTEYTKAYLRHLFAANEYLGKQIATIHNLGFYMWLVREARKHIIAGDFRTWKDMMVKNMSQRL

SEQ ID NO: 55348 - protein, 376 aa, Flavobacterium flevense
  misc_feature (1)..(376): tr|A0A4Y4B4S0|A0A4Y4B4S0_9FLAO Queuine tRNA-ribosyltran sferase OS=Flavobacterium flevense OX=983 GN=tgt PE=3 S V=1
MKFDLLQKDPLSKARAGSITTDHGVIETPIFMPVGTVASVKGVHQRELKNDINPDIILGNTYHLYLRPQTKILEAAGGLHKFMNWDRNILTDSGGYQVYSLSNNRKIKEEGVKFKSHIDGSYHFFSPESVMEIQRTIGADIIMAFDECTPYPCDYRYAQRSMHMTHRWLDRCINHLDKVPVKYGYDQAFFPIVQGSTYKDLRRQSAEYIANSNQVGNAIGGLSVGEPAEEMYAMTEVVTEILPEDKPRYLMGVGTPINILENIALGIDMFDCVMPTRNARNGMLFTANGTINIKNKKWEDDFSPIDEMGITFVDTEYSKAYLRHLFAANEYLGKQIATIHNLGFYMWLVREARKHIIAGDFRSWKEMMVKNMSQRL

SEQ ID NO: 55349 - protein, 376 aa, Flavobacterium fluvii
  misc_feature (1)..(376): tr|A0A1M5P3W2|A0A1M5P3W2_9FLAO Queuine tRNA-ribosyltran sferase OS=Flavobacterium fluvii OX=468056 GN=tgt PE=3 SV=1
MKFDLLQKDPHTKARAGSITTDHGVIETPIFMPVGTVASVKGVHQRELKEEINPDIILGNTYHLYLRPQTEILEKAGGLHKFMNWDRNILTDSGGYQVYSLSANRKIKEEGVKFKSHIDGSYHFFTPENVMEIQRTIGADIIMAFDECTPYPCDYRYAQRSMHMTHRWLDRCINHLEKVPTKYGYDQTFFPIIQGSTYKDLRRQSAEYIANSGQQGNAIGGLSVGEPAEEMYAMTEVVCEILPEDKPRYLMGVGTPINILENIALGIDMFDCVMPTRNARNGMLFTANGTINIKNKKWEADFSPVDEMGHTFVDTEYTKAYLRHLFAANEYLGKQIATIHNLGFYMWLVREARKHILAGDFRTWKEMMVRNMSQRL

SEQ ID NO: 55350 - protein, 376 aa, Flavobacterium fontis
  misc_feature (1)..(376): tr|A0A1M5CJU4|A0A1M5CJU4_9FLAO Queuine tRNA-ribosyltran sferase OS=Flavobacterium fontis OX=1124188 GN=tgt PE=3 SV=1
MKFELLHTDPQSQARAGKITTDHGFIETPIFMPVGTVASVKGVHQRELRDDINPDIILGNTYHLYLRPQLDILEKAGGLHKFMNWDRNILTDSGGYQVYSLSANRKIKEEGVKFKSHIDGSYHFFSPENVMEIQRTIGADIIMAFDECTPYPCDYRYAKRSMHMTHRWLDRCVAHLKTLPPKYGYEQTLFPIVQGSTYKDLRQMSAEYIANVGAEGNAIGGLSVGEPAEEMYAMTEVVTAVLPKDKPRYLMGVGTPINILENIALGIDMFDCVMPTRNARNGMLFTAHGVINIKNKKWEDDFSPIDEMGITFVDTEYSKAYLRHLFAANEYLGKQIATIHNLGFYLWLVREARKHIIAGDFRDWKNKMVQQMSQRL

SEQ ID NO: 55351 - protein, 376 aa, Flavobacterium frigidimaris
  misc_feature (1)..(376): tr|A0A1M5VUY8|A0A1M5VUY8_FLAFR Queuine tRNA-ribosyltran sferase OS=Flavobacterium frigidimaris OX=262320 GN=tgt PE=3 SV=1
MKFDLLKKDPQSKARAGSITTDHGVIETPIFMPVGTVASVKGVHQRELKQDINPDIILGNTYHLYLRPQTEILEKAGGLHKFMNWDRNILTDSGGYQVYSLSNNRKIKEEGVKFKSHIDGSYHFFSPESVMEIQRTIGADIIMAFDECTPYPCDYRYAQRSMHMTHRWLDRCISHLDKLPFKYGYEQTFFPIVQGSTYKDLRQQSAEYIANSGQQGNAIGGLSVGEPAEEMYAMTEVVCEILPEDKPRYLMGVGTPINILENIALGIDMFDCVMPTRNARNGMLFTANGTINIKNKKWEDDFSPIDEMGHTFVDTEYTKAYLRHLFAANEYLGKQIATIHNLGFYMWLVREARKHILAGDFRPWKEMMVKNMSQRL

SEQ ID NO: 55352 - protein, 376 aa, Flavobacterium frigoris
  misc_feature (1)..(376): tr|H7FLH8|H7FLH8_FLAFP Queuine tRNA-ribosyltransferase OS=Flavobacterium frigoris (strain PS1) OX=1086011 GN=t gt PE=3 SV=1
MKFDLLKKDPQSKARAGSITTDHGVIETPIFMPVGTVASVKGVHQRELKLDINPDIILGNTYHLYLRPQTEILEKAGGLHKFMNWDRNILTDSGGYQVYSLSANRKIKEEGVKFKSHIDGSYHFFTPENVMEIQRTIGADIIMAFDECTPYPCDYNYAKRSMKMTHRWLDRCVNHLEKVPVKYGYDQAFFPIVQGSCYKDLRQQSAEYIANSNQVGNAIGGLSVGEPAEEMYAMTEVVCEILPEDKPRYLMGVGTPINILENIALGVDMFDCVMPTRNARNGMLFTANGTINIKNKKWEDDFSPIDEMAITYVDTEYTKAYLRHLFAANEYLGKQIATIHNLGFYMWLVREARKHILAGDFRPWKEMMVKNMNQRL

SEQ ID NO: 55353 - protein, 376 aa, Flavobacterium frigoris
  misc_feature (1)..(376): tr|A0A1H9RLU7|A0A1H9RLU7_FLAFI Queuine tRNA-ribosyltran sferase OS=Flavobacterium frigoris OX=229204 GN=tgt PE= 3 SV=1
MKFDLLQKDPQTKARAGSITTDHGVIETPIFMPVGTVASVKGVHQRELKEDINPDIILGNTYHLYLRPQMEILEKAGGLHKFMNWDRNILTDSGGYQVYSLSANRKIKEEGVKFKSHIDGSFHFFTPENVMEIQRTIGADIIMAFDECTPYPCDYRYAQRSMKMTHRWLDRCVSHLETVPVKYGYDQAFFPIVQGSCYKDLRQQSAEYIANSNQVGNAIGGLSVGEPAEEMYAMTEIVCEILPEDKPRYLMGVGTPINILENIALGVDMFDCVMPTRNARNGMLFTANGTINIKNKKWADDFSPIDEMAITYVDTEYTKAYLRHLFAANEYLGKQIATIHNLGFYMWLVREARKHILAGDFRTWKEMMVRNMSQRL

SEQ ID NO: 55354 - protein, 376 aa, Flavobacterium fryxellicola
  misc_feature (1)..(376): tr|A0A167Y038|A0A167Y038_9FLAO Queuine tRNA-ribosyltran sferase OS=Flavobacterium fryxellicola OX=249352 GN=tgt PE=3 SV=1
MKFDLLKKDPLSKARAGSITTDHGVIETPIFMPVGTVASVKGVHQRELKEDINPDIILGNTYHLYLRPQTEILEKAGGLHKFMNWDRNILTDSGGYQVYSLSANRKIKEEGVKFKSHIDGSYHFFTPENVMEIQRTIGADIIMAFDECTPYPCDYRYAQRSMHMTHRWLDRCVNHLEKVPTKYGYDQTFFPIVQGSTYKDLRRQSAEYIANSNQQGNAIGGLSVGEPAEEMYAMTEVVCEVLPEDKPRYLMGVGTPINILENIALGIDMFDCVMPTRNARNGMLFTANGTINIKNKKWADDFSPIDEMAITYVDTEYTKAYLRHLFAANEYLGKQIATIHNLGFYMWLVREARKHILAGDFRSWKEMMVKNMSQRL

SEQ ID NO: 55355 - protein, 376 aa, Flavobacterium gillisiae
  misc_feature (1)..(376): tr|A0A1H4FIA9|A0A1H4FIA9_9FLAO Queuine tRNA-ribosyltran sferase OS=Flavobacterium gillisiae OX=150146 GN=tgt PE =3 SV=1
MKFDLLQKDPQTKARAGSITTDHGVIETPIFMPVGTVASVKGVHQRELKEDINPDIILGNTYHLYLRPQMEILEKAGGLHKFMNWDRNILTDSGGYQVYSLSANRKIKEEGVKFKSHIDGSFHFFTPENVMEIQRTIGADIIMAFDECTPYPCDYRYAQRSMKMTHRWLDRCVDHLDKVPVKYGYDQAFFPIVQGSCYKDLRQQSAEYIANSNQVGNAIGGLSVGEPAEEMYAMTEIVCEILPEDKPRYLMGVGTPINILENIALGVDMFDCVMPTRNARNGMLFTANGTINIKNKKWADDFSPIDEMAITYVDTEYTKAYLRHLFAANEYLGKQIATIHNLGFYMWLVREARKHILAGDFRTWKEMMVRNMNQRL

SEQ ID NO: 55356 - protein, 376 aa, Flavobacterium gilvum
  misc_feature (1)..(376): tr|A0A085EP61|A0A085EP61_9FLAO Queuine tRNA-ribosyltran sferase OS=Flavobacterium gilvum OX=1492737 GN=tgt PE=3 SV=1
MKFDLLKTDPQSKARAGSITTDHGVIETPIFMPVGTAASVKGVHQRELKEEINPDIILGNTYHLYLRPQTEILEKAGGLHKFMNWDRNILTDSGGYQVYSLSANRKIKEEGVKFKSHIDGSYHFFTPENVMEIQRTIGADIIMAFDECTPYPCDYRYAQRSMHMTHRWLDRCINHLEKLPFKYGYEQTFFPIVQGSTYKDLRRQSAEYIANSGQQGNAIGGLSVGEPAEEMYAMTEVVCEILPEDKPRYLMGVGTPINILENIALGIDMFDCVMPTRNARNGMLFTANGTINIKNKKWEADFSPIDEMGYTFVDTEYSKAYLRHLFAANEYLGKQIATIHNLGFYMWLVREARKHILAGDFKPWKEMMVKNMSQRL

SEQ ID NO: 55357 - protein, 376 aa, Flavobacterium glaciei
  misc_feature (1)..(376): tr|A0A562Q795|A0A562Q795_9FLAO Queuine tRNA-ribosyltran sferase OS=Flavobacterium glaciei OX=386300 GN=tgt PE=3 SV=1
MKFDLLKKDPQSKARAGSITTDHGVIETPIFMPVGTVASVKGVHQRELKEDINPDIILGNTYHLYLRPQTEILEKAGGLHKFMNWDRNILTDSGGYQVYSLSANRKIKEEGVKFKSHIDGSYHFFTPENVMEIQRTIGADIIMAFDECTPYPCDYNYAKRSMKMTHRWLDRCINHLDTLPFKYGYEQTFFPIVQGSTYKDLRAQSAEYIANSNQQGNAIGGLSVGEPAEEMYAMTEVVCEILPEDKPRYLMGVGTPINILENIALGIDMFDCVMPTRNARNGMLFTANGTINIKNKKWEADFSPIDEMGITFVDTEYTKAYLRHLFAANEYLGKQIATIHNLGFYMWLVREARKHILAGDFRPWKEMMVKNMSQRL

SEQ ID NO: 55358 - protein, 376 aa, Flavobacterium glycines
  misc_feature (1)..(376): tr|A0A1B9DTS4|A0A1B9DTS4_9FLAO Queuine tRNA-ribosyltran sferase OS=Flavobacterium glycines OX=551990 GN=tgt PE= 3 SV=1
MKFDLLQKDPLSKARAGSITTDHGVIETPIFMPVGTVASVKGVHQRELREEINPDIILGNTYHLYLRPQTKILEAAGGLHKFMNWDRNILTDSGGYQVYSLSNSRKIKEEGVKFKSHIDGSYHTFTPENVMEIQRTIGADIIMAFDECTPYPCDYNYAKRSMHMTHRWLDRCINHLDKVPVKYGYDQAFFPIVQGSTYKDLRRQSAEYIANSGQVGNAIGGLSVGEPAEEMYAMTEVVTEILPEDKPRYLMGVGTPINILENIALGIDMFDCVMPTRNARNGMLFTANGTINIKNKKWEADFSPIDEMGITFVDTEYSKAYLRHLFAANEYLGKQIATIHNLGFYMWLVREARKHILAGDFRSWKEMMVKNMSQRL

SEQ ID NO: 55359 - protein, 376 aa, Flavobacterium granuli
  misc_feature (1)..(376): tr|A0A1M5QRX1|A0A1M5QRX1_9FLAO Queuine tRNA-ribosyltran sferase OS=Flavobacterium granuli OX=280093 GN=tgt PE=3 SV=1
MKFDLLQKDPQSKARAGSITTDHGVIETPIFMPVGTVASVKGVHQRELKEDINPDIILGNTYHLYLRPQTEILEKAGGLHKFMNWDRNILTDSGGYQVYSLSSNRKIKEEGVKFKSHIDGSYHFFTPENVMEIQRTIGADIIMAFDECTPYPCDYNYAKRSMKMTHRWLDRCVNHLEKVPVKYGYDQAFFPIVQGSCYKDLRQQSAEYIANSNQVGNAIGGLSVGEPAEEMYAMTEVVCEILPEDKPRYLMGVGTPINILENIALGVDMFDCVMPTRNARNGMLFTANGTINIKNKKWEADFSPIDEMGHTFVDTEYTKAYLRHLFAANEYLGKQIATIHNLGFYMWLVREARKHIIAGDFRSWKEMMVRNMSQRL

SEQ ID NO: 55360 - protein, 376 aa, Flavobacterium haoranii
  misc_feature (1)..(376): tr|A0A1M6B7P7|A0A1M6B7P7_9FLAO Queuine tRNA-ribosyltran sferase OS=Flavobacterium haoranii OX=683124 GN=tgt PE= 3 SV=1
MKFDLLKKDPKSQARAGVVTTDHGVIETPIFMPVGTVASVKGVHQRELKDDINPDIILGNTYHLYLRPQTDILEKAGGLHKFMNWDRNILTDSGGYQVYSLSSNRKIKEEGVKFKSHIDGSYHFFSPENVMEIQRTIGADIIMAFDECTPYPCDYRYAKRSMHMTHRWLDRCVTHFNNTPAKYGYEQTLFPIVQGSTYKDLRQQSAEYIANVGAQGNAIGGLSVGEPAEEMYAMTEVVTAILPEDKPRYLMGVGTPVNILENIALGIDMFDCVMPTRNARNGMLFTANGIINIKNKKWEADFSPIDEMGHTFVDLEYSKSYLRHLFAANEYLGKQIATIHNLGFYLWLVREARRQILAGTFREWKDKMVIQLAQRL

SEQ ID NO: 55361 - protein, 376 aa, Flavobacterium hercynium
  misc_feature (1)..(376): tr|A0A226HN72|A0A226HN72_9FLAO Queuine tRNA-ribosyltran sferase OS=Flavobacterium hercynium OX=387094 GN=tgt PE =3 SV=1
MKFDLLQKDPQSKARAGSITTDHGVIETPIFMPVGTVASVKGVHQRELKDDINPDIILGNTYHLYLRPQTEILEKAGGLHKFMNWDRNILTDSGGYQVYSLSNNRKIKEEGVKFKSHIDGSYHFFTPENVMEIQRTIGADIIMAFDECTPYPCDYRYAQRSMHMTHRWLDRCINHLDKVPYKYGYEQTFFPIVQGSTYKDLRRQSAEYIANSGQQGNAIGGLSVGEPAEEMYAMTEVVCEILPEDKPRYLMGVGTPINILENIALGIDMFDCVMPTRNARNGMLFTANGTINIKNKKWEADFSPVDEMGHTFVDTEYTKAYLRHLFAANEYLGKQIATIHNLGFYMWLVREARKHILAGDFRPWKEMMVKNMSQRL

SEQ ID NO: 55362 - protein, 376 aa, Flavobacterium hibernum
  misc_feature (1)..(376): tr|A0A0D0F9X2|A0A0D0F9X2_9FLAO Queuine tRNA-ribosyltran sferase OS=Flavobacterium hibernum OX=37752 GN=tgt PE=3 SV=1
MKFDLLQKDPQSKARAGSITTDHGVIETPIFMPVGTVASVKGVHQRELKEDINPDIILGNTYHLYLRPQTEILEKAGGLHKFMNWDRNILTDSGGYQVYSLSNNRKIKEEGVKFKSHIDGSYHFFSPESVMEIQRTIGADIIMAFDECTPYPCDYRYAQRSMHMTHRWLDRCINHLDKVPYKYGYEQTFFPIVQGSTYKDLRRQSAEYIANAGQQGNAIGGLSVGEPAEEMYAMTEVVCEILPEDKPRYLMGVGTPINILENIALGIDMFDCVMPTRNARNGMLFTANGTINIKNKKWEADFSPIDEMGHTFVDTEYTKAYLRHLFAANEYLGKQIATIHNLGFYMWLVREARKHILAGDFRPWKEMMVKNMSQRL

SEQ ID NO: 55363 - protein, 376 aa, Flavobacterium hydatis
  misc_feature (1)..(376): tr|A0A085ZCB4|A0A085ZCB4_FLAHY Queuine tRNA-ribosyltran sferase OS=Flavobacterium hydatis OX=991 GN=tgt PE=3 SV =1
MKFDLLQKDLQSKARAGSITTDHGVIETPIFMPVGTVASVKGVHQRELKNDINPDIILGNTYHLYLRPQTEILEKAGGLHKFMNWDRNILTDSGGYQVYSLSANRKIKEEGVKFKSHIDGSYHFFTPENVMEIQRTIGADIIMAFDECTPYPCDYRYAQRSMHMTHRWLDRCISHLDKVPFKYGYEQTFFPIVQGSTYKDLRRQSAEYIANAGQQGNAIGGLSVGEPAEEMYAMTEIVCEILPEDKPRYLMGVGTPINILENIALGVDMFDCVMPTRNARNGMLFTANGSINIKNKKWEADFSPIDEMGITFVDTEYTKAYLRHLFAANEYLGKQIATIHNLGFYMWLVREARKHILAGDFMPWKEMMVKNMSQRL

SEQ ID NO: 55364 - protein, 376 aa, Flavobacterium indicum
  misc_feature (1)..(376): tr|H8XU77|H8XU77_FLAIG Queuine tRNA-ribosyltransferase OS=Flavobacterium indicum (strain DSM 17447 / CIP 10946 4 / GPTSA100-9) OX=1094466 GN=tgt PE=3 SV=1
MKFDLLKKDPKSKARAGVVTTDHGVIETPIFMPVGTVASVKGVHQRELKQDINPDIILGNTYHLYLRPQTDILEKAGGLHKFMNWDRNILTDSGGYQVYSLSSNRKIKEEGVKFKSHIDGSYHFFSPENVMEIQRTIGADIIMAFDECTPYPCDYRYAKRSMHMTHRWLDRCIAHLDKLPFKYGYSQAFFPIVQGSTYKDLRQQSAEYIASVGAEGNAIGGLSVGEPAEEMYAMTEVVTAILPEDKPRYLMGVGTPINILENIALGIDMFDCVMPTRNARNGMLFTANGIINIKNKKWEADFSPIDEMGHTFVDLEYSKAYLRHLFAANEYLGKQIATIHNLGFYMWLVREARRQILAGTFREWKEKMVVQMAQRL

SEQ ID NO: 55365 - protein, 376 aa, Flavobacterium johnsoniae
  misc_feature (1)..(376): tr|A5FNZ0|A5FNZ0_FLAJ1 Queuine tRNA-ribosyltransferase OS=Flavobacterium johnsoniae (strain ATCC 17061 / DSM 2 064 / UW101) OX=376686 GN=tgt PE=3 SV=1
MKFDLLQKDPQSKARAGSITTDHGVIETPIFMPVGTVASVKGVHQRELKEEINPDIILGNTYHLYLRPQTEILEKAGGLHKFMNWDRNILTDSGGYQVYSLSSNRKIKEEGVKFKSHIDGSYHFFTPENVMEIQRTIGADIIMAFDECTPYPCDYRYAQRSMHMTHRWLDRCINHLEKVPYKYGYEQTFFPIVQGSTYKDLRRQSAEYIANAGQQGNAIGGLSVGEPAEEMYAMTEVVCEILPEDKPRYLMGVGTPINILENIALGIDMFDCVMPTRNARNGMLFTANGTINIKNKKWEADFSPIDEMAHTFVDTEYSKAYLRHLFAANEYLGKQIATIHNLGFYMWLVREARKHILAGDFRPWKEMMVKNMSQRL

SEQ ID NO: 55366 - protein, 376 aa, Flavobacterium johnsoniae
  misc_feature (1)..(376): tr|A0A2W5TH73|A0A2W5TH73_FLAJO Queuine tRNA-ribosyltran sferase OS=Flavobacterium johnsoniae OX=986 GN=tgt PE=3 SV=1
MKFELLQNDPNSKARAGKITTDHGVIETPIFMPVGTVASVKGVHQRELKNDINPDIILGNTYHLYLRPQTDILEKAGGLHKFMNWDRNILTDSGGYQVYSLSSNRKIKEEGVKFKSHIDGSYHVFTPENVMEIQRTIGADIIMAFDECTPYPCDYRYAQRSMHMTHRWLDRCISHLDKVPYKYGYEQTFFPIVQGSTYKDLRQQSAEYIANAGAEGNAIGGLSVGEPAEEMYAMTEVVTEILPKDKPRYLMGVGTPINILENIALGIDMFDCVMPTRNARNGMLFTAHGTINIKNKKWESDFSPLDEMGHTFVDTEYTKAYLRHLFAANEYLGKQIATIHNLGFYMWLVREARKHILAGDFRVWKEMMVKQMDQRL

SEQ ID NO: 55367 - protein, 376 aa, Flavobacterium kingsejongi
  misc_feature (1)..(376): tr|A0A2S1LTK3|A0A2S1LTK3_9FLAO Queuine tRNA-ribosyltran sferase OS=Flavobacterium kingsejongi OX=1678728 GN=tgt PE=3 SV=1
MKFDFVTKDPHTKARAGAITTDHGVIETPIFMPVGTVASVKGVHQRELKEEINPDIILGNTYHLYLRPKTEILEKAGGLHKFMNWDRNILTDSGGYQVYSLSANRKIKEEGVKFKSHIDGSYHFFTPENVMEIQRTIGADIIMAFDECTPYPCDYRYAQRSMHMTHRWLDRCINHLEKLPFKYGYEQTFFPIVQGSTYKDLRMQSAEYIANSGQQGNAIGGLSVGEPAEEMYAMTEVVCDILPEDKPRYLMGVGTPINILENIALGVDMFDCVMPTRNARNGMLFTAHGTINIKNRKWEDDFSPLDENGTTFVDREYSKAYLRHLFAANEYLGKQIATIHNLGFYMWLVREARKHIIGGDFRVWKEMMVKQMDKRL

SEQ ID NO: 55368 - protein, 376 aa, Flavobacterium lacus
  misc_feature (1)..(376): tr|A0A328WM75|A0A328WM75_9FLAO Queuine tRNA-ribosyltran sferase OS=Flavobacterium lacus OX=1353778 GN=tgt PE=3 SV=1
MKFDLLTTDPHSQARAGSITTDHGVIETPIFMPVGTVASVKGVHQRELKNDINPDIILGNTYHLYLRPQTEILEKAGGLHKFMNWDRNILTDSGGYQVYSLSSNRKIKEEGVKFKSHIDGSYHFFSPENVMEIQRTIGADIIMAFDECTPYPCDYNYARRSMHMTHRWLDRCINHLEKLPFQYGFEQTFFPIVQGSTYKDLRQQSAEYIANAGAQGNAIGGLSVGEPAEEMYAMTEVVTAILPQDKPRYLMGVGTPINILENIALGIDMFDCVMPTRNARNGMLFTANGSINIKNKKWEDDFSPIDEMGITFVDTEYTKAYLRHLFAANEYLGKQIATIHNLGFYMWLVREARKHIIAGDFKVWKDQMVKQMSQRL

SEQ ID NO: 55369 - protein, 376 aa, Flavobacterium limicola
  misc_feature (1)..(376): tr|A0A495RSN7|A0A495RSN7_9FLAO Queuine tRNA-ribosyltran sferase OS=Flavobacterium limicola OX=180441 GN=tgt PE= 3 SV=1
MKFDLLKKDPQSKARAGSITTDHGVIETPIFMPVGTVASVKGVHQRELKEDINPDIILGNTYHLYLRPQTEILEKAGGLHKFMNWDRNILTDSGGYQVYSLSANRKIKEEGVKFKSHIDGSYHFFTPENVMEIQRTIGADIIMAFDECTPYPCDYNYAKRSMKMTHRWLDRCINHLDTQPVKYGYDQAFFPIVQGSCYKDLRQQSAEYIANSNQVGNAIGGLSVGEPAEEMYAMTEVVCEILPEDKPRYLMGVGTPINILENIALGIDMFDCVMPTRNARNGMLFTANGTINIKNKKWEADFSPIDEMAITYVDTEYTKAYLRHLFAANEYLGKQIATIHNLGFYMWLVREARKHILAGDFRPWKEMMVKNMSQRL

SEQ ID NO: 55370 - protein, 376 aa, Flavobacterium limnosediminis
  misc_feature (1)..(376): tr|V6SK12|V6SK12_9FLAO Queuine tRNA-ribosyltransferase OS=Flavobacterium limnosediminis JC2902 OX=1341181 GN=t gt PE=3 SV=1
MKFDLLKKDPQTKARAGSITTDHGVIETPIFMPVGTVASVKGVHQRELKDDINPDIILGNTYHLYLRPQTDILEKAGGLHKFMNWDRNILTDSGGYQVYSLSSNRKIKEEGVKFKSHIDGSYHVFTPENVMEIQRTIGADIIMAFDECTPYPCDYRYAQKSMKMTHRWLDRCINHLEKLPFKYGYEQTFFPIVQGSTYKDLRAQSAEYIANAGAQGNAIGGLSVGEPAEEMYAMTEVVTAILPEDKPRYLMGVGTPANILENIALGIDMFDCVMPTRNARNGMLFTANGTINIKNKKWEADFSPIDEMGHTFVDTEYSKAYLRHLFAANEYLGKQIATIHNLGFYMWLVREARMHILAGDFREWKEMMVKNMSQRL

SEQ ID NO: 55371 - protein, 387 aa, Flavobacterium lindanitolerans
  misc_feature (1)..(387): tr|A0A497TZU3|A0A497TZU3_9FLAO Queuine tRNA-ribosyltran sferase OS=Flavobacterium lindanitolerans OX=428988 GN= tgt PE=3 SV=1
MPPKVWDKEKRMKFELLQNDPNSKARAGKITTDHGVIETPIFMPVGTVASVKGVHQRELKNDINPDIILGNTYHLYLRPQTDILEKAGGLHKFMNWDRNILTDSGGYQVYSLSSNRKIKEEGVKFKSHIDGSYHVFTPENVMEIQRTIGADIIMAFDECTPYPCDYRYAQRSMHMTHRWLDRCISHLDKVPYKYGYEQTFFPIVQGSTYKDLRQQSAEYIANAGAEGNAIGGLSVGEPAEEMYAMTEVVTEILPKDKPRYLMGVGTPINILENIALGIDMFDCVMPTRNARNGMLFTAHGTINIKNKKWESDFSPLDEMGHTFVDTEYTKAYLRHLFAANEYLGKQIATIHNLGFYMWLVREARKHILAGDFRVWKEMMVKQMDQRL

SEQ ID NO: 55372 - protein, 376 aa, Flavobacterium macacae
  misc_feature (1)..(376): tr|A0A3P3WIB2|A0A3P3WIB2_9FLAO Queuine tRNA-ribosyltran sferase OS=Flavobacterium macacae OX=2488993 GN=tgt PE= 3 SV=1
MKFELLHTDPATQARAGKITTDHGVIETPIFMPVGTVASVKGVHQRELKEEINPDIILGNTYHLYLRPQTQILEKAGGLHKFMNWDRNILTDSGGYQVYSLSSNRKIKEEGVKFKSHIDGSYHVFTPENVMEIQRTIGADIIMAFDECTPYPCDYRYAQRSMHMTHRWLDRCINHLDKLPYKYGYEQTFFPIVQGSTYKDLRQQSAEYIANAGAQGNAIGGLSVGEPAEEMYAMTEVVTAILPKDKPRYLMGVGTPINILENIALGIDMFDCVMPTRNARNGMLFTAHGTINIKNKKWEDDFSPIDEMAHTFVDTEYSKAYLRHLFAANEYLGKQIATIHNLGFYMWLVREARKHILAGDFRAWKEMMVKQMDKRL

SEQ ID NO: 55373 - protein, 376 aa, Flavobacterium magnum
  misc_feature (1)..(376): tr|A0A2S0RE67|A0A2S0RE67_9FLAO Queuine tRNA-ribosyltran sferase OS=Flavobacterium magnum OX=2162713 GN=tgt PE=3 SV=1
MKFDLLQKDPQSKARAGRITTDHGVIETPIFMPVGTVASVKGVHQRELKDEINPDIILGNTYHLYLRPQTEILEKAGGLHKFMNWDRNILTDSGGYQVYSLSANRKIKEEGVKFKSHIDGSYHYFTPENVMEIQRTIGADIIMAFDECTPYPCDYRYAQRSMHMTHRWLDRCISHLDKLPFKYGYEQTFFPIVQGSTYKDLRKQSAEYIANAGQQGNAIGGLSVGEPAEEMYAMTEVVCDILPEDKPRYLMGVGTPINILENIALGIDMFDCVMPTRNARNGMLFTAHGTINIKNKKWEADFSPLDEMAHTFVDVEYSKAYLRHLFAANEYLGKQIATIHNLGFYMWLVREARKHILAGDFREWKEKMVKQMDQRL

SEQ ID NO: 55374 - protein, 376 aa, Flavobacterium marinum
  misc_feature (1)..(376): tr|A0A1H6K597|A0A1H6K597_9FLAO Queuine tRNA-ribosyltran sferase OS=Flavobacterium marinum OX=1159016 GN=tgt PE= 3 SV=1
MTFDLLHTDINSKARAGVITTDHGVIETPIFMPVGTAATVKGVHQRELKEDINPDIILGNTYHLYLRPKTEILEKAGGLHKFMNWDRNILTDSGGFQVYSLSGRRKIKEEGVKFKSHIDGSYHFFSPENVMEIQRTIGADIIMAFDECTPYPCDYRYAKRSMHMTHRWLDRCISHLEKVPVKYGYDQAFFPIVQGSTFKDLRAESAEYIANAGAVGNAIGGLSVGEPAEEMYEMCEIVTNILPKDKPRYLMGVGTPINILENIALGIDMFDCVMPTRNARNGMLFTSEGFINIKNKKWADDFSPIDPMAITWVDTDYSKAYLRHLFISDEYLAKQIATIHNLGFYMWLVREARKQILAGTFYAWKEKMVKQMATRL

SEQ ID NO: 55375 - protein, 376 aa, Flavobacterium micromati
  misc_feature (1)..(376): tr|A0A1M5GKF0|A0A1M5GKF0_9FLAO Queuine tRNA-ribosyltran sferase OS=Flavobacterium micromati OX=229205 GN=tgt PE =3 SV=1
MKFDLLKKDPLSKARAGSITTDHGVIETPIFMPVGTVASVKGVHQRELKQDINPDVILGNTYHLYLRPQTEILEKAGGLHKFMNWDRNILTDSGGYQVYSLSANRKIKEEGVKFKSHIDGSYHFFTPENVMEIQRTIGADIIMAFDECTPYPCDYRYAQRSMHMTHRWLNRCVDHLAKTPVKYGYDQAFFPIVQGSTYKDLRRQSAEYIANSNQVGNAIGGLSVGEPAEEMYAMTEVVCEILPEDKPRYLMGVGTPINILENIALGVDMFDCVMPTRNARNGMLFTANGSINIKNKKWEADFSPIDEMGITFVDTEYTKAYLRHLFAANEYLGKQIATIHNLGFYMWLVREARKHILAGDFKPWKEMMVKNMNQRL

SEQ ID NO: 55376 - protein, 376 aa, Flavobacterium nitrogenifigens; identical to SEQ ID NO: 55336
  misc_feature (1)..(376): tr|A0A521EN68|A0A521EN68_9FLAO Queuine tRNA-ribosyltran sferase OS=Flavobacterium nitrogenifigens OX=1617283 GN =tgt PE=3 SV=1

SEQ ID NO: 55377 - protein, 376 aa, Flavobacterium noncentrifugens
  misc_feature (1)..(376): tr|A0A1G9CDC5|A0A1G9CDC5_9FLAO Queuine tRNA-ribosyltran sferase OS=Flavobacterium noncentrifugens OX=1128970 GN =tgt PE=3 SV=1
MKFDLLKTDPQTKARAGKITTDHGVIETPIFMPVGTVASVKGVHQRELKDDINPDIILGNTYHLYLRPQTEILEKAGGLHKFMNWDRNILTDSGGYQVYSLSANRKIKEEGVKFKSHIDGSYHFFTPENVMEIQRTIGADIIMAFDECTPYPCDFHYARRSMHMTHRWLDRCISHLDKLPFKYGFEQTFFPIVQGSTYKDLRVQSAEYIANAGQQGNAIGGLSVGEPAEEMYAMTEIVTAILPEDKPRYLMGVGTPINILENIALGIDMFDCVMPTRNARNGMLFTSQGTINIKNKKWEADFSPLDNMGHTFVDTEYTKAYLRHLFAANEYLGKQIATIHNLGFYMWLVREARKHILAGDFREWKEKMVKQMDQRL

SEQ ID NO: 55378 - protein, 376 aa, Flavobacterium omnivorum
  misc_feature (1)..(376): tr|A0A1G7X1P2|A0A1G7X1P2_9FLAO Queuine tRNA-ribosyltran sferase OS=Flavobacterium omnivorum OX=178355 GN=tgt PE =3 SV=1
MKFDLLKKDPLSKARAGSITTDHGVIETPIFMPVGTVASVKGVHQRELKEDINPDIILGNTYHLYLRPQTEILEKAGGLHKFMNWDRNILTDSGGYQVYSLSANRKIKEEGVKFKSHIDGSYHFFTPENVMEIQRTIGADIIMAFDECTPYPCDYRYAQRSMHMTHRWLDRCVNHLEKVPTKYGYDQTFFPIVQGSTYKDLRRQSAEYIANSNQQGNAIGGLSVGEPAEEMYAMTEVVCEILPEDKPRYLMGVGTPINILENIALGIDMFDCVMPTRNARNGMLFTANGTINIKNKKWADDFSPIDEMAITYVDTEYTKAYLRHLFAANEYLGKQIATIHNLGFYMWLVREARKHILAGDFRTWKEMMVKNMSQRL

SEQ ID NO: 55379 - protein, 376 aa, Flavobacterium oncorhynchi
  misc_feature (1)..(376): tr|A0A226I0J1|A0A226I0J1_9FLAO Queuine tRNA-ribosyltran sferase OS=Flavobacterium oncorhynchi OX=728056 GN=tgt PE=3 SV=1
MKFDLLQKDPQSKARAGSITTDHGVIETPIFMPVGTVASVKGVHQRELKDDINPDIILGNTYHLYLRPQTEILEKAGGLHKFMNWDRNILTDSGGYQVYSLSSNRKIKEEGVKFKSHIDGSYHFFTPENVMEIQRTIGADIIMAFDECTPYPCDYRYAQRSMHMTHRWLDRCINHLEKVPYKYGYEQTFFPIVQGSTYKDLRRQSAEYIANAGQQGNAIGGLSVGEPAEEMYAMTEVVCEILPEDKPRYLMGVGTPINILENIALGIDMFDCVMPTRNARNGMLFTANGTINIKNKKWEADFSPIDEMGHTFVDTEYSKAYLRHLFAANEYLGKQIATIHNLGFYMWLVREARKHILAGDFRPWKEMMVKNMSQRL

SEQ ID NO: 55380 - protein, 376 aa, Flavobacterium pallidum
  misc_feature (1)..(376): tr|A0A2S1SHR7|A0A2S1SHR7_9FLAO Queuine tRNA-ribosyltran sferase OS=Flavobacterium pallidum OX=2172098 GN=tgt PE =3 SV=1
MKFDLLQKDSQSKARAGSITTDHGVIETPIFMPVGTVASVKGVHQRELKEEINPDIILGNTYHLYLRPQTEILEKAGGLHKFMNWDRNILTDSGGYQVYSLSANRKIKEEGVKFKSHIDGSYHFFTPENVMEIQRTIGADIIMAFDECTPYPCDYRYAQRSMHMTHRWLDRCISHLDTLPFKYGYEQTFFPIVQGSTYKDLRRQSAEYIANAGQQGNAIGGLSVGEPAEEMYAMTEVVCEILPEDKPRYLMGVGTPINILENIALGIDMFDCVMPTRNARNGMLFTSNGTINIKNKKWEADFSPLDEMGHTFVDTEYTKAYLRHLFAANEYLGKQIATIHNLGFYMWLVREARKHILAGDFREWKEKMVKQMDQRL

SEQ ID NO: 55381 - protein, 376 aa, Flavobacterium pectinovorum
  misc_feature (1)..(376): tr|A0A1M7M549|A0A1M7M549_9FLAO Queuine tRNA-ribosyltran sferase OS=Flavobacterium pectinovorum OX=29533 GN=tgt PE=3 SV=1
MKFDLLQKDPQSKARAGSITTDHGVIETPIFMPVGTVASVKGVHQRELKEDINPDIILGNTYHLYLRPQTEILEKAGGLHKFMNWDRNILTDSGGYQVYSLSSNRKIKEEGVKFKSHIDGSYHFFTPENVMEIQRTIGADIIMAFDECTPYPCDYRYAQRSMHMTHRWLDRCINHLDKLPYKYGYEQTFFPIVQGSTYKDLRRQSAEYIANSGQQGNAIGGLSVGEPAEEMYAMTEVVCEILPEDKPRYLMGVGTPINILENIALGIDMFDCVMPTRNARNGMLFTANGTINIKNKKWEDDFSPIDEMGHTFVDTEYTKAYLRHLFAANEYLGKQIATIHNLGFYMWLVREARKHILAGDFRPWKEMMVKNMSQRL

SEQ ID NO: 55382 - protein, 376 aa, Flavobacterium pectinovorum
  misc_feature (1)..(376): tr|A0A502ENT9|A0A502ENT9_9FLAO Queuine tRNA-ribosyltran sferase OS=Flavobacterium pectinovorum OX=29533 GN=tgt PE=3 SV=1
MKFDLLQKDPQSKARAGSITTDHGVIETPIFMPVGTVASVKGVHQRELKEDINPDIILGNTYHLYLRPQTEILEKAGGLHKFMNWDRNILTDSGGYQVYSLSNNRKIKEEGVKFKSHIDGSYHFFSPESVMEIQRTIGADIIMAFDECTPYPCDYRYAQRSMHMTHRWLDRCINHLDKVPFKYGYEQTFFPIVQGSTYKDLRQQSAEYIANSGQQGNAIGGLSVGEPAEEMYAMTEVVCEILPEDKPRYLMGVGTPINILENIALGIDMFDCVMPTRNARNGMLFTANGTINIKNKKWEDDFSPIDEMGHTFVDTDYTKAYLRHLFAANEYLGKQIATIHNLGFYMWLVREARKHILAGDFRPWKEMMVKNMSQRL

SEQ ID NO: 55383 - protein, 376 aa, Flavobacterium phragmitis
  misc_feature (1)..(376): tr|A0A1I1VVT6|A0A1I1VVT6_9FLAO Queuine tRNA-ribosyltran sferase OS=Flavobacterium phragmitis OX=739143 GN=tgt P E=3 SV=1
MKFDLLQKDPQSKARAGSITTDHGVIETPIFMPVGTVASVKGVHQRELKEEINPDIILGNTYHLYLRPQTEILEKAGGLHKFMNWDRNILTDSGGYQVYSLSSNRKIKEEGVKFKSHIDGSYHFFTPENVMEIQRTIGADIIMAFDECTPYPCDYRYAQRSMHMTHRWLDRCINHLEKVPYKYGYEQTFFPIVQGSTYKDLRRQSAEYIANSGQQGNAIGGLSVGEPAEEMYAMTEVVCEILPEDKPRYLMGVGTPINILENIALGIDMFDCVMPTRNARNGMLFTANGTINIKNKKWEADFSPIDEMGHTFVDTEYSKAYLRHLFAANEYLGKQIATIHNLGFYMWLVREARKHILAGDFRPWKEMMVKNMSQRL

SEQ ID NO: 55384 - protein, 376 aa, Flavobacterium psychrolimnae; identical to SEQ ID NO: 55369
  misc_feature (1)..(376): tr|A0A366B5B9|A0A366B5B9_9FLAO Queuine tRNA-ribosyltran sferase OS=Flavobacterium psychrolimnae OX=249351 GN=tg t PE=3 SV=1

SEQ ID NO: 55385 - protein, 304 aa, Flavobacterium psychrophilum
  misc_feature (1)..(304): tr|A0A1Z5HL71|A0A1Z5HL71_FLAPS Queuine tRNA-ribosyltran sferase OS=Flavobacterium psychrophilum OX=96345 GN=FPS 14_contig00039-0017 PE=3 SV=1
MKFDLLKKDPQTKARAGSITTDHGVIETPIFMPVGTVASVKGVHQRELKEEINPDIILGNTYHLYLRPKTDILEKAGGLHKFMNWDRNILTDSGGYQVYSLSANRKIKEEGVKFKSHIDGSYHFFTPENVMEIQRTIGADIIMAFDECTPYPCDYRYAQRSMKMTHRWLDRCINHLDKLPFKYGYEQTFFPIVQGSCYKDLREQSAEYIANAGAQGNAIGGLSVGEPAEEMYAMTEIVTAILPEDKPRYLMGVGTPINILENIALGIDMFDCVMPTRNARNGMLFTANGTINIKIKNGKPIFLQ

SEQ ID NO: 55386 - protein, 376 aa, Flavobacterium psychrophilum
  misc_feature (1)..(376): tr|A6GX92|A6GX92_FLAPJ Queuine tRNA-ribosyltransferase OS=Flavobacterium psychrophilum (strain JIP02/86 / ATCC 49511) OX=402612 GN=tgt PE=3 SV=1
MKFDLLKKDPQTKARAGSITTDHGVIETPIFMPVGTVASVKGVHQRELKEEINPDIILGNTYHLYLRPKTDILEKAGGLHKFMNWDRNILTDSGGYQVYSLSANRKIKEEGVKFKSHIDGSYHFFTPENVMEIQRTIGADIIMAFDECTPYPCDYRYAQRSMKMTHRWLDRCINHLDKLPFKYGYEQTFFPIVQGSCYKDLREQSAEYIANAGAQGNAIGGLSVGEPAEEMYAMTEIVTAILPEDKPRYLMGVGTPINILENIALGIDMFDCVMPTRNARNGMLFTANGTINIKNKKWEADFSPVDEMGITFVDTEYTKAYLRHLFAANEYLGKQIATIHNLGFYMWLVREARKHIIAGDFREWKDMMVKNMSQRL

SEQ ID NO: 55387 - protein, 376 aa, Flavobacterium reichenbachii
  misc_feature (1)..(376): tr|A0A085ZI07|A0A085ZI07_9FLAO Queuine tRNA-ribosyltran sferase OS=Flavobacterium reichenbachii OX=362418 GN=tg t PE=3 SV=1
MKFDLLQKDPQSKARAGSITTDHGVIETPIFMPVGTVASVKGVHQRELKDDINPDIILGNTYHLYLRPQTEILEKAGGLHKFMNWDRNILTDSGGYQVYSLSNNRKIKEEGVKFKSHIDGSYHFFTPENVMEIQRTIGADIIMAFDECTPYPCDYRYAQRSMHMTHRWLDRCINHLDKVPYKYGYEQTFFPIVQGSTYKDLRRQSAEYIANSGQQGNAIGGLSVGEPAEEMYAMTEVVCEILPEDKPRYLMGVGTPINILENIALGIDMFDCVMPTRNARNGMLFTANGTINIKNKKWEADFSPIDEMGHTFVDTEYTKAYLRHLFAANEYLGKQIATIHNLGFYMWLVREARKHILAGDFRPWKEMMVKNMSQRL

SEQ ID NO: 55388 - protein, 376 aa, Flavobacterium resistens
  misc_feature (1)..(376): tr|A0A521EJN0|A0A521EJN0_9FLAO Queuine tRNA-ribosyltran sferase OS=Flavobacterium resistens OX=443612 GN=tgt PE =3 SV=1
MKFDLLQKDPQSKARAGSITTDHGVIETPIFMPVGTVASVKGVHQRELKDDINPDIILGNTYHLYLRPQTEILEKAGGLHKFMNWDRNILTDSGGYQVYSLSSNRKIKEEGVKFKSHIDGSYHFFTPENVMEIQRTIGADIIMAFDECTPYPCDYRYAQRSMHMTHRWLDRCINHLEKVPYKYGYEQTFFPIVQGSTYKDLRRQSAEYIANSGQQGNAIGGLSVGEPAEEMYAMTEVVCEILPEDKPRYLMGVGTPINILENIALGIDMFDCVMPTRNARNGMLFTANGTINIKNKKWEADFSPIDEMGHTFVDTEYTKAYLRHLFAANEYLGKQIATIHNLGFYMWLVREARKHILAGDFRPWKEMMVKNMSQRL

SEQ ID NO: 55389 - protein, 376 aa, Flavobacterium rivuli
  misc_feature (1)..(376): tr|A0A0A2M8N1|A0A0A2M8N1_9FLAO Queuine tRNA-ribosyltran sferase OS=Flavobacterium rivuli WB 3.3-2 = DSM 21788 O X=1121895 GN=tgt PE=3 SV=1
MKFDLVTKDPLSKARAGSLTTDHGVIQTPIFMPVGTMGTVKGVHQRELKEDINPDIILGNTYHLYLRPQTEILEKAGGLHKFMNWDRSILTDSGGYQVYSLSANRKIKEEGVKFKSHIDGSYHFFSPESVMEIQRTIGADIIMAFDECTPYPCDYRYAKRSMHMTHRWLDRCISHLEKLPYKYGYSQAFFPIVQGSTYTDLRQQSAEYIANAGAVGNAIGGLSVGEPAEEMYAMTDVVCSILPEDKPRYLMGVGTPINILENIALGVDMFDCVMPTRNARNGMLFTANGTINIKNKKWEDDFSPVDEMGITFVDTQYTKAYLRHLFAANEYLGKQIATIHNLGFYMWLVREAREHIIAGDFYAWKEKMVKQMSQRL

SEQ ID NO: 55390 - protein, 376 aa, Flavobacterium saccharophilum
  misc_feature (1)..(376): tr|A0A1M7JCJ3|A0A1M7JCJ3_9FLAO Queuine tRNA-ribosyltran sferase OS=Flavobacterium saccharophilum OX=29534 GN=tg t PE=3 SV=1
MKFDLLQKDPQSKARAGSITTDHGVIETPIFMPVGTVASVKGVHQRELKEDINPDIILGNTYHLYLRPQTEILEKAGGLHKFMNWDRNILTDSGGYQVYSLSSNRKIKEEGVKFKSHIDGSYHFFTPENVMEIQRTIGADIIMAFDECTPYPCDYRYAQRSMHMTHRWLDRCINHLDKLPYKYGYEQTFFPIVQGSTYKDLRRQSAEYIANSGQQGNAIGGLSVGEPAEEMYAMTEVVCEILPEDKPRYLMGVGTPINILENIALGIDMFDCVMPTRNARNGMLFTANGTINIKNKKWEADFSPIDEMGHTFVDTEYTKAYLRHLFAANEYLGKQIATIHNLGFYMWLVREARKHILAGDFRPWKEMMVKNMSQRL

SEQ ID NO: 55391 - protein, 376 aa, Flavobacterium saliperosum
  misc_feature (1)..(376): tr|A0A1G4V1M9|A0A1G4V1M9_9FLAO Queuine tRNA-ribosyltran sferase OS=Flavobacterium saliperosum OX=329186 GN=tgt PE=3 SV=1
MKFDLLLKDPQTKARAGSITTDHGVIETPIFMPVGTVASVKGVHQRELKDDINPDIILGNTYHLYLRPQTEILEKAGGLHKFMNWDRNILTDSGGYQVYSLSSNRKIKEEGVKFKSHIDGSYHFFSPENVMEIQRTIGADIIMAFDECTPYPCDYRYAQKSMKMTHRWLDRCINHLEKLPFKYGYEQTFFPIVQGSTYKDLREQSAEYIANAGAQGNAIGGLSVGEPAEEMYAMTEVVTAILPEDKPRYLMGVGTPINILENIALGIDMFDCVMPTRNARNGMLFTANGTINIKNKKWEADFSPIDEMGHTFVDTEYTKAYLRHLFAANEYLGKQIATIHNLGFYMWLVREARKHILAGDFREWKEMMVKNMSQRL

SEQ ID NO: 55392 - protein, 376 aa, Flavobacterium sediminis
  misc_feature (1)..(376): tr|A0A2U8QRM1|A0A2U8QRM1_9FLAO Queuine tRNA-ribosyltran sferase OS=Flavobacterium sediminis OX=2201181 GN=tgt P E=3 SV=1
MKFDLIKKDEKSKARAGIVTTDHGVIETPIFMPVGTVASVKGVHQRELKDDINPDIILGNTYHLYLRPQTDILEKAGGLHKFMNWDRNILTDSGGYQVYSLSSNRKIKEEGVKFKSHIDGSYHFFSPENVMEIQRTIGADIIMAFDECTPYPCDYRYAKRSMHMTHRWLDRCVDHLGKVPAKYGYEQTLFPIVQGSTYKDLRQQSAEYIANVGAEGNAIGGLSVGEPAEEMYAMTEVVTAILPEDKPRYLMGVGTPVNILENIALGIDMFDCVMPTRNARNGMLFTANGIINIKNKKWEADFSPIDSMGHTFVDLEYSKAYLRHLFAANEYLGKQIATIHNLGFYLWLVREARRQILAGTFREWKDKMVIQLAQRL

SEQ ID NO: 55393 - protein, 376 aa, Flavobacterium segetis
  misc_feature (1)..(376): tr|A0A1M5ECZ7|A0A1M5ECZ7_9FLAO Queuine tRNA-ribosyltran sferase OS=Flavobacterium segetis OX=271157 GN=tgt PE=3 SV=1
MKFDLLKKDPLSKARAGSITTDHGVIETPIFMPVGTVASVKGVHQRELKEDINPDIILGNTYHLYLRPQTEILEKAGGLHKFMNWDRNILTDSGGYQVYSLSANRKIKEEGVKFKSHIDGSYHFFTPENVMEIQRTIGADIIMAFDECTPYPCDYRYAQRSMHMTHRWLNRCIDHLVKTPVKYGYDQAFFPIVQGSTYKDLRRQSAEYIANSNQVGNAIGGLSVGEPAEEMYAMTEVVCEILPEDKPRYLMGVGTPINILENIALGVDMFDCVMPTRNARNGMLFTANGSINIKNKKWEADFSPIDEMGITFVDTDYTKAYLRHLFAANEYLGKQIATIHNLGFYMWLVREARKHILAGDFKPWKEMMVKNMNQRL

SEQ ID NO: 55394 - protein, 397 aa, Flavobacterium seoulense
  misc_feature (1)..(397): tr|A0A066WTN7|A0A066WTN7_9FLAO Queuine tRNA-ribosyltran sferase OS=Flavobacterium seoulense OX=1492738 GN=tgt P E=3 SV=1
MSLFSKLNYLCQPNNRKKNPSMKFDLLQKDPLSKARAGSITTDHGVIETPIFMPVGTVASVKGVHQRELKEEINPDIILGNTYHLYLRPQTKILEAAGGLHKFMNWDRNILTDSGGYQVYSLSNNRKIKEEGVKFKSHIDGSYHFFTPENVMEIQRTIGADIIMAFDECTPYPCDYNYAKRSMHMTHRWLDRCISHLDKVPVKYGYNQAFFPIVQGSTYKDLRRQSAEYIANSGQVGNAIGGLSVGEPAEEMYAMTEVVTEILPEDKPRYLMGVGTPINILENIALGIDMFDCVMPTRNARNGMLFTANGTINIKNKKWEDDFSPIDEMGITFVDTEYSKAYLRHLFAANEYLGKQIATIHNLGFYMWLVREARKHIIAGDFRAWKEMMVKNMSQRL

SEQ ID NO: 55395 - protein, 376 aa, Flavobacterium sinopsychrotolerans; identical to SEQ ID NO: 55369
  misc_feature (1)..(376): tr|A0A1H8NK65|A0A1H8NK65_9FLAO Queuine tRNA-ribosyltran sferase OS=Flavobacterium sinopsychrotolerans OX=604089 GN=tgt PE=3 SV=1

SEQ ID NO: 55396 - protein, 376 aa, Flavobacterium sp.
  misc_feature (1)..(376): tr|A0A2N0HFJ1|A0A2N0HFJ1_9FLAO Queuine tRNA-ribosyltran sferase OS=Flavobacterium sp. 5 OX=2035199 GN=tgt PE=3 SV=1
MKFDLLKTDPQSKARAGSITTDHGVIETPIFMPVGTVASVKGVHQRELKEEINPDIILGNTYHLYLRPQTEILEKAGGLHKFMGWDRNILTDSGGYQVYSLSNNRKIKEEGVKFKSHIDGSYHFFTPENVMEIQRTIGADIIMAFDECTPYPCDYRYAQRSMHMTHRWLDRCINHLDKLPFKYGYEQTFFPIVQGSTYKDLRRQSAEYIANSGQQGNAIGGLSVGEPAEEMYAMTEVVCEVLPEDKPRYLMGVGTPINILENIALGIDMFDCVMPTRNARNGMLFTANGTINIKNKKWEADFSPIDEMAHTFVDTEYSKAYLRHLFAANEYLGKQIATIHNLGFYMWLVREARKHILAGDFRPWKEMMVKNMDQRL

SEQ ID NO: 55397 - protein, 376 aa, Flavobacterium sp.
  misc_feature (1)..(376): tr|A0A4V2YTX9|A0A4V2YTX9_9FLAO Queuine tRNA-ribosyltran sferase OS=Flavobacterium sp. AT-3-2 OX=2541732 GN=tgt PE=3 SV=1
MKFDLLKKDPLSKARAGSITTDHGVIETPIFMPVGTVASVKGVHQRELKEDINPDIILGNTYHLYLRPQTEILEKAGGLHKFMNWDRNILTDSGGYQVYSLSANRKIKEEGVKFKSHIDGSYHFFTPENVMEIQRTIGADIIMAFDECTPYPCDYNYAKRSMKMTHRWLDRCINHLDTQPVKYGYDQAFFPIVQGSCYKDLRQQSAEYIANSNQVGNAIGGLSVGEPAEEMYAMTEVVCEILPEDKPRYLMGVGTPINILENIALGIDMFDCVMPTRNARNGMLFTAHGTINIKNKKWEDDFSPIDEMGITFVDTEYTKAYLRHLFAANEYLGKQIATIHNLGFYMWLVREARKHILAGDFKPWKEMMVKNMSQRL

SEQ ID NO: 55398 - protein, 376 aa, Flavobacterium spartansii
  misc_feature (1)..(376): tr|A0A1S1J172|A0A1S1J172_9FLAO Queuine tRNA-ribosyltran sferase OS=Flavobacterium spartansii OX=1278819 GN=tgt PE=3 SV=1
MKFDLLQRDPQSKARAGSITTDHGVIETPIFMPVGTVASVKGVHQRELKDDINPDIILGNTYHLYLRPQTEILEKAGGLHKFMNWDRNILTDSGGYQVYSLSNNRKIKEEGVKFKSHIDGSYHFFSPESVMEIQRTIGADIIMAFDECTPYPCDYRYAQRSMHMTHRWLDRCINHLDKVPYKYGYEQTFFPIVQGSTYKDLRRQSAEYIANAGQQGNAIGGLSVGEPAEEMYAMTEVVCEILPEDKPRYLMGVGTPINILENIALGIDMFDCVMPTRNARNGMLFTANGTINIKNKKWEADFSPIDEMGHTFVDTEYTKAYLRHLFAANEYLGKQIATIHNLGFYMWLVREARKHILAGDFRPWKEMMVKNMSQRL

SEQ ID NO: 55399 - protein, 376 aa, Flavobacterium subsaxonicum
  misc_feature (1)..(376): tr|A0A0A2MI79|A0A0A2MI79_9FLAO Queuine tRNA-ribosyltran sferase OS=Flavobacterium subsaxonicum WB 4.1-42 = DSM 21790 OX=1121898 GN=tgt PE=3 SV=1
MKFDLVTKDPLSKARAGTLTTDHGVIQTPIFMPVGTMGTVKGVHQRELKEDINPDIILGNTYHLYLRPQTEILEKAGGLHKFMNWDRPILTDSGGYQVYSLSANRKIKEEGVKFKSHIDGSYHFFSPESVMEIQRTIGADIIMAFDECTPYPCDYRYAKRSMHMTHRWLDRCITHLEKLPFKYGYSQAFFPIVQGSTYTDLRQQSAEYIANAGAVGNAIGGLSVGEPAEEMYAMTEVVTAILPEDKPRYLMGVGTPINILENIALGIDMFDCVMPTRNARNGMLFTANGTINIKNKKWEDDFSPVDEMGITYVDTQYTKAYLRHLFAANEYLGKQIATIHNLGFYMWLVREAREHIIAGDFYAWKEKMVKQMSQRL

SEQ ID NO: 55400 - protein, 376 aa, Flavobacterium succinicans
  misc_feature (1)..(376): tr|A0A199XTK6|A0A199XTK6_9FLAO Queuine tRNA-ribosyltran sferase OS=Flavobacterium succinicans OX=29536 GN=tgt P E=3 SV=1
MKFDLLQKDTQSKARAGSITTDHGVIETPIFMPVGTAGTVKGVHQRELKDDINPDIILGNTYHLYLRPQTPILEKAGGLHKFMNWDRNILTDSGGYQVYSLSANRKIKEEGVKFKSHIDGSYHFFTPENVMEIQRTIGADIIMAFDECTPYPCDYRYAQRSMHMTHRWLNRCINHLEKVPYKYGYEQTFFPIVQGSTYKDLRRQSAEYIANAGQQGNAIGGLSVGEPAEEMYAMTEIVCDILPEDKPRYLMGVGTPINILENIALGVDMFDCVMPTRNARNGMLFTANGSINIKNKKWEDDFSPIDEMGITYVDTFYTKAYLRHLFASNEMLGKQIATIHNLGFYMWLVREARKHILADDFRPWKEMMVKNMSQRL

SEQ ID NO: 55401 - protein, 376 aa, Flavobacterium succinicans
  misc_feature (1)..(376): tr|A0A1I4SNG5|A0A1I4SNG5_9FLAO Queuine tRNA-ribosyltran sferase OS=Flavobacterium succinicans OX=29536 GN=tgt P E=3 SV=1
MKFDLLQKDTQSKARAGSITTDHGVIETPIFMPVGTAGTVKGVHQRELKEDINPDIILGNTYHLYLRPQTPILEKAGGLHKFMNWDRPILTDSGGYQVYSLSASRKIKEEGVKFKSHIDGSYHFFTPENVMEIQRTIGADIIMAFDECTPYPCDFRYAQRSMHMTHRWLDRCINHLEKVPYKYGYEQTFFPIVQGSTYKDLRRQSAEYIANAGQQGNAIGGLSVGEPAEEMYEMTEIVCDILPEDKPRYLMGVGTPINILENIALGVDMFDCVMPTRNARNGMLFTANGTINIKNKKWEDDFSPLDEMGMTYVDTHYTKAYLRHLFAANEYLGKQIATIHNLGFYMWLVREARKHILAGDFRPWKDMMVKNMSQRL

SEQ ID NO: 55402 - protein, 376 aa, Flavobacterium suncheonense
  misc_feature (1)..(376): tr|A0A0A2MB14|A0A0A2MB14_9FLAO Queuine tRNA-ribosyltran sferase OS=Flavobacterium suncheonense GH29-5 = DSM 177 07 OX=1121899 GN=tgt PE=3 SV=1
MKFDLVQKDPQTKARAGFITTDHGIIETPIFMPVGTVASVKGVHQRELKDDINPDIILGNTYHLYLRPQTDILEKAGGLHKFMNWDRNILTDSGGYQVYSLSSNRKIKEEGVKFKSHIDGSYHFFSPENVMEIQRTIGADIIMAFDECTPYPCDYHYARRSMHMTHRWLDRCVKHLENLPFKYGYEQTLFPIVQGSTYKDLRAQSAEYIANVGAQGNAIGGLSVGEPAEEMYAMTEVVTAILPEDKPRYLMGVGTPINILENIALGIDMFDCVMPTRNARNGMLFTANGTINIKNKKWADDFSPIDEMGHTFVDIEYTKAYLRHLFAADEYLGKQIATIHNLGFYMWLVREARKHILAGDFRQWKEMMVKNMSQRL

SEQ ID NO: 55403 - protein, 376 aa, Flavobacterium swingsii
  misc_feature (1)..(376): tr|A0A1I0VAJ3|A0A1I0VAJ3_9FLAO Queuine tRNA-ribosyltran sferase OS=Flavobacterium swingsii OX=498292 GN=tgt PE= 3 SV=1
MKFDLLKKDPQTKARAGTITTDHGVIETPIFMPVGTVASVKGVHQRELKEEINPDIILGNTYHLYLRPQTEILEKAGGLHKFMNWDRNILTDSGGYQVYSLSANRKIKEEGVKFKSHIDGSYHFFTPENVMEIQRTIGADIIMAFDECTPYPCDYHYANRSMKMTHRWLDRCIKHLEKVPTKYGYDQTFFPIVQGSCYKDLRMQSAEYIANAGAQGNAIGGLSVGEPAEEMYAMTEIVTAILPEDKPRYLMGVGTPINILENIALGIDMFDCVMPTRNARNGMLFTANGTINIKNKKWEADFSPVDEMGLTFVDTEYSKAYLRHLFAANEYLGKQIATIHNLGFYMWLVREARKHIIAGDFREWKEMMIKNMSQRL

SEQ ID NO: 55404 - protein, 383 aa, Flavobacterium terrae
  misc_feature (1)..(383): tr|A0A1M6FLJ1|A0A1M6FLJ1_9FLAO Queuine tRNA-ribosyltran sferase OS=Flavobacterium terrae OX=415425 GN=tgt PE=3 SV=1
MPTIFDSMKFDLVQKDPQTKARAGFVTTDHGVIETPIFMPVGTVASVKGVHQRELKEEVNPDIILGNTYHLYLRPQTEILEKAGGLHKFMNWDRNILTDSGGYQVYSLSSNRKIKEEGVKFKSHIDGSYHFFSPESVMEIQRSIGADIIMAFDECTPYPCDYRYAKRSMHMTHRWLDRCVSHLENLPFKYGYEQTLFPIVQGSTYKDLRQQSAEYIANVGAQGNAIGGLSVGEPAEEMYAMTEVVTAILPEDKPRYLMGVGTPINILENIALGIDMFDCVMPTRNARNGMLFTAHGTINIKNKKWEADFSPIDEMGHTFVDTEYTKAYLRHLFAANEYLGKQIATIHNLGFYMWLVREARKHILAGDFREWKEKMVKQMSQRL

SEQ ID NO: 55405 - protein, 376 aa, Flavobacterium terrigena
  misc_feature (1)..(376): tr|A0A1H6R2V9|A0A1H6R2V9_9FLAO Queuine tRNA-ribosyltran sferase OS=Flavobacterium terrigena OX=402734 GN=tgt PE =3 SV=1
MKFDLLKTDAQSQARAGLVTTDHGVIETPIFMPVGTVASVKGVHQRELKNDINPDIILGNTYHLYLRPKLDILEKAGGLHKFMNWDRNILTDSGGYQVYSLSGRRKIKEEGVKFKSHLDGAYHFFSPENVMETQRTIGADIIMAFDECTPYPCDYRYAQRSMHMTHRWLDRCINHLDTLPFKYDYSQAFFPIVQGSTYKDLRQQSAEFIASRDQVGNAIGGLSVGEPAEEMYAMTEVVTAILPKDKPRYLMGVGTPANILENIALGIDMFDCVMPTRNARNGMLFTSEGFINIKNKKWEEDFSPIDTMAHTYVDTDYSKAYLRHLFIANEFLGKQIATIHNLGFYMWLVREARQQILAGTFREWKDIMVKKVTTRL

SEQ ID NO: 55406 - protein, 380 aa, [Flavobacterium] thermophilum
  misc_feature (1)..(380): tr|A0A377G369|A0A377G369_9BACL Queuine tRNA-ribosyltran sferase OS=[Flavobacterium] thermophilum OX=1414643 GN= tgt PE=3 SV=1
MTTPIRFELIKTCRQTGARLGILHTPHGSFETPMFMPVGTLATVKTLSPEELKEMGAGVILSNTYHLWLRPGHDIVEEAGGLHAFMNWDRGILTDSGGFQVFSLSEFRRIEEEGVYFRNHLNGDKLFLSPEKAMEIQNALGADIIMAFDECPPYPATYDYMKWSVERTSRWAERCLKAHRRPDEQGLFGIVQGGEYEELRRQSARDLVSLDFPGYAVGGLSVGEPKEVMNRVLEFTTPLLPADKPRYLMGVGSPDSLIDGAIRGIDMFDCVLPTRIGRNGTVMTSEGRVVIKNAQYARDFSPLDPNCDCYTCRNYTRAYIRHLIKCDETFGIRLTSYHNVYFLIKLMEQVRQAIREDRLADFREEFFERYGFNKPNAKNF

SEQ ID NO: 55407 - protein, 376 aa, Flavobacterium tiangeerense
  misc_feature (1)..(376): tr|A0A562KVN6|A0A562KVN6_9FLAO Queuine tRNA-ribosyltran sferase OS=Flavobacterium tiangeerense OX=459471 GN=tgt PE=3 SV=1
MKFDLLKNDPLSKARAGTITTDHGVIETPIFMPVGTVASVKGVHQRELKNDINPDIILGNTYHLYLRPQTEILEKAGGLHKFMNWDRNILTDSGGYQVYSLSANRKIKEEGVKFKSHIDGSYHFFTPENVMEIQRTIGADIIMAFDECTPYPCDYNYAKRSMKMTHRWLDRCINHLDTLPFKYGYEQTFFPIVQGSTYKDLRRQSAEYIANSNQQGNAIGGLSVGEPAEEMYAMTEVVCEILPEDKPRYLMGVGTPINILENIALGIDMFDCVMPTRNARNGMLFTAHGTINIKNKKWEADFSPIDEMGITFVDTEYTKAYLRHLFAANEYLGKQIATIHNLGFYMWLVREARKHILAGDFKPWKEMMVKNMSQRL

SEQ ID NO: 55408 - protein, 376 aa, Flavobacterium tibetense
  misc_feature (1)..(376): tr|A0A365NYL9|A0A365NYL9_9FLAO Queuine tRNA-ribosyltran sferase OS=Flavobacterium tibetense OX=2233533 GN=tgt P E=3 SV=1
MKFDLITKDPKSKARAGKITTDHGVIETPIFMPVGTVASVKGVHQRELREDINPDIILGNTYHLYLRPQTKILEAAGGLHKFMNWDRNILTDSGGYQVYSLSSNRKIKEEGVKFKSHIDGSYHFFSPENVMEIQRTIGADIIMAFDECTPYPCDYRYAKRSMHMTHRWLDRCINHLETLPFKYGYEQTFFPIVQGSTYKDLRAQSAEYIANAGAQGNAIGGLSVGEPAEEMYAMTEVVTAILPEDKPRYLMGVGTPINILENIALGIDMFDCVMPTRNARNGMLFTAHGTINMKNKKWEADFSPIDEMGHTWVDTEYSKAYLRHLFAANEFLGKQIATIHNLGFYMWLVREARKQILAGTFREWKDKMVVQMSQRL

SEQ ID NO: 55409 - protein, 376 aa, Flavobacterium ummariense
  misc_feature (1)..(376): tr|A0A1I4XT54|A0A1I4XT54_9FLAO Queuine tRNA-ribosyltran sferase OS=Flavobacterium ummariense OX=913024 GN=tgt P E=3 SV=1
MKFDLLHTDINSKARAGVITTDHGVIETPIFMPVGTAATVKGVHQRELKEDINPDIILGNTYHLYLRPKTEILEKAGGLHKFMNWDRNILTDSGGFQVYSLSGRRKIKEEGVKFKSHIDGSYHFFSPENVMEIQRTIGADIIMAFDECTPYPCDYRYAQRSMHMTHRWLDRCINHLEKVPTKYGYDQAFFPIVQGSTFKDLRAQSAEYIANAGAVGNAIGGLSVGEPAEEMYEMCEVVTNILPKDKPRYLMGVGTPINILENIALGIDMFDCVMPTRNARNGMLFTSEGFINIKNKKWADDYSPIDPMGNTWVDTDYSKAYLRHLFVSDEYLGKQIATIHNLGFYMWLVREARKQIIAGTFYAWKEKMVKQMATRL

SEQ ID NO: 55410 - protein, 376 aa, Flavobacterium urocaniciphilum
  misc_feature (1)..(376): tr|A0A1H8YWV9|A0A1H8YWV9_9FLAO Queuine tRNA-ribosyltran sferase OS=Flavobacterium urocaniciphilum OX=1299341 GN =tgt PE=3 SV=1
MKFDLLKKDAQSQARAGQITTDHGVIETPIFMPVGTVASVKGVHQRELKNDINPDIILGNTYHLYLRPQLDVLEKAGGLHKFMNWDRNILTDSGGYQVYSLSGRRKIKEEGVKFKSHIDGSYHFFSPENVMEIQRTIGADIIMAFDECTPYPCDYRYAQRSMHMTHRWLDRCINHLETLPFKYGYSQAFFPIVQGSTYKDLRQQSAEFIASRNAVGNAIGGLSVGEPAEEMYAMTEVVTAILPQDKPRYLMGVGTPANILENIALGIDMFDCVMPTRNARNGMLFTSEGFINIKNKKWEDDFSPVDPMGLTYVDTDYSKAYLRHLFVANEFLGKQIATIHNLGFYMWLVREARKQILAGTFRDWKEMMVKKVTTRL

SEQ ID NO: 55411 - protein, 376 aa, Flavobacterium urumqiense
  misc_feature (1)..(376): tr|A0A1H5ZVH9|A0A1H5ZVH9_9FLAO Queuine tRNA-ribosyltran sferase OS=Flavobacterium urumqiense OX=935224 GN=tgt P E=3 SV=1
MKFDLLKKDPLSKARAGSITTDHGVIETPIFMPVGTVASVKGVHQRELKEDINPDIILGNTYHLYLRPQTEILEKAGGLHKFMNWDRNILTDSGGYQVYSLSANRKIKEEGVKFKSHIDGSYHFFTPENVMEIQRTIGADIIMAFDECTPYPCDFRYAQRSMHMTHRWLDRCISHLDKVPVKYGYDQAFFPIVQGSTYKDLRRQSAEYIANSNQVGNAIGGLSVGEPAEEMYAMTEVVCEILPEDKPRYLMGVGTPINILENIALGIDMFDCVMPTRNARNGMLFTANGSINIKNKKWADDFSPVDEMGITFVDTEYTKAYLRHLFAANEYLGKQIATIHNLGFYMWLVREARKHILAGDFKPWKEMMVKNMNQRL

SEQ ID NO: 55412 - protein, 376 aa, Flavobacterium weaverense
  misc_feature (1)..(376): tr|A0A3L9ZS77|A0A3L9ZS77_9FLAO Queuine tRNA-ribosyltran sferase OS=Flavobacterium weaverense OX=271156 GN=tgt P E=3 SV=1
MKFDLLKTDPLSKARAGTITTDHGVIETPIFMPVGTVASVKGVHQRELKEDINPDIILGNTYHLYLRPQTEILEKAGGLHKFMNWDRNILTDSGGYQVYSLSANRKIKEEGVKFKSHIDGSYHFFTPENVMEIQRTIGADIIMAFDECTPYPCDYRYAQRSMHMTHRWLDRCINHLDKVPVKYGYDQAFFPIIQGSTYKDLRRQSAEYIANSNQVGNAIGGLSVGEPAEEMYAMTEVVCEILPEDKPRYLMGVGTPINILENIALGIDMFDCVMPTRNARNGMLFTANGTINIKNKKWEADFSPIDEMGMTFVDTEYTKAYLRHLFAANEYLGKQIATIHNLGFYMWLVREARKHILAGDFKPWKEMMVKNMNQRL

SEQ ID NO: 55413 - protein, 376 aa, Flavobacterium xanthum
  misc_feature (1)..(376): tr|A0A1M6XDW5|A0A1M6XDW5_9FLAO Queuine tRNA-ribosyltran sferase OS=Flavobacterium xanthum OX=69322 GN=tgt PE=3 SV=1
MKFDLLKKDPLSKARAGSITTDHGVIETPIFMPVGTVASVKGVHQRELKEDINPDIILGNTYHLYLRPQTEILEKAGGLHKFMNWDRNILTDSGGYQVYSLSANRKIKEEGVKFKSHIDGSYHFFTPENVMEIQRTIGADIIMAFDECTPYPCDYRYAQRSMHMTHRWLDRCVNHLEKVPTKYGYNQAFFPIVQGSCYKDLRQQSAEYIANSNQVGNAIGGLSVGEPAEEMYAMTEVVCEILPEDKPRYLMGVGTPINILENIALGIDMFDCVMPTRNARNGMLFTANGTINIKNKKWADDFSPIDEMAITYVDTEYTKAYLRHLFAANEYLGKQIATIHNLGFYMWLVREARKHILAGDFRTWKEMMVKNMSQRL

SEQ ID NO: 55414 - protein, 412 aa, Flavobacterium xinjiangense
  misc_feature (1)..(412): tr|A0A1M7PNB1|A0A1M7PNB1_9FLAO Queuine tRNA-ribosyltran sferase OS=Flavobacterium xinjiangense OX=178356 GN=tgt PE=3 SV=1
MSGTHFFISSEEKYFFDVGFKLTYLCQPNNRVKYVTMKFDLLKKDPLSKARAGSITTDHGVIETPIFMPVGTVGSVKGVHQRELKDDINPDIILGNTYHLYLRPQTEILEKAGGLHKFMNWDRNILTDSGGYQVYSLSANRKIKEEGVKFKSHIDGSYHFFTPENVMEIQRTIGADIIMAFDECTPYPCDYNYAKRSMKMTHRWLDRCINHLDTQPFKYGYEQTFFPIVQGSCYKDLRQQSAEYIANSNQQGNAIGGLSVGEPAEEMYAMTEVVCEILPEDKPRYLMGVGTPINILENIALGIDMFDCVMPTRNARNGMLFTANGSINIKNKKWEADFSPIDEMGITYVDTEYTKAYLRHLFAANEYLGKQIATIHNLGFYMWLVREARKHILAGDFKPWKEMMVKNMNQRL

SEQ ID NO: 55415 - protein, 376 aa, Flavobacterium xueshanense
  misc_feature (1)..(376): tr|A0A1I2IUX6|A0A1I2IUX6_9FLAO Queuine tRNA-ribosyltran sferase OS=Flavobacterium xueshanense OX=935223 GN=tgt PE=3 SV=1
MKFDLLKKDPLSKARAGSITTDHGVIETPIFMPVGTVASVKGVHQRELKEDINPDIILGNTYHLYLRPQTEILEKAGGLHKFMNWDRNILTDSGGYQVYSLSANRKIKEEGVKFKSHIDGSYHFFTPENVMEIQRTIGADIIMAFDECTPYPCDYNYAKRSMKMTHRWLDRCINHLDTQPVKYGYDQTFFPIVQGSCYKDLRQQSAEYIANSNQQGNAIGGLSVGEPAEEMYAMTEIVCEILPEDKPRYLMGVGTPINILENIALGIDMFDCVMPTRNARNGMLFTANGTINIKNKKWEADFSPVDEMGITFVDTEYTKAYLRHLFAANEYLGKQIATIHNLGFYMWLVREARKHILAGDFKPWKEMMVKNMNQRL

SEQ ID NO: 55416 - protein, 376 aa, Flavonifractor plautii
  misc_feature (1)..(376): tr|A0A4R2MLV4|A0A4R2MLV4_FLAPL Queuine tRNA-ribosyltran sferase OS=Flavonifractor plautii DSM 6740 OX=649753 GN =tgt PE=3 SV=1
MFEVLKTEGKARRGVFTCAHGTVQTPVFMNVGTQGAIKGAVSAHDLKEIGCQVELSNTYHLHLRPGDQVVRQMGGLHRFMRWDGPILTDSGGFQVFSLSGLRKIKEEGVTFASHIDGRRIFMGPEESMQIQSNLGSDIAMAFDECVENPATYEYAKASCERTLRWLARCKAEHDRLNALPDTVNPRQMLFGINQGATFPELRIWHMKETAKIDCEGYAIGGLAVGEPTQVMYDIIDAVEPYMPAEKPRYLMGVGTPSNIIEGVARGVDFFDCVMPARNARHAKLFTWSGALNIRNEKYKLDERPIDPDCDCPVCRSFSRAYLRHLFAAEEMLAMRLAVLHNLYFYNKLAERIRQALDAGQFAAFRAEYSEKLAGRL

SEQ ID NO: 55417 - protein, 376 aa, Flavonifractor plautii
  misc_feature (1)..(376): tr|G9YNG6|G9YNG6_FLAPL Queuine tRNA-ribosyltransferase OS=Flavonifractor plautii ATCC 29863 OX=411475 GN=tgt P E=3 SV=1
MFEVLKTEGKARRGVFTCAHGTVQTPVFMNVGTQGAIKGAVSAHDLKEIGCQVELSNTYHLHLRPGDQVVRQMGGLHRFMRWDGPILTDSGGFQVFSLSGLRKIKEEGVTFASHIDGRRIFMGPEESMQIQSNLGSDIAMAFDECVENPATYEYAKASCERTLRWLARCKAEHDRLNALPDTVNPRQMLFGINQGATFPELRIWHMKETAKIDCEGYAIGGLAVGEPTQVMYDIIDAVEPYMPADKPRYLMGVGTPSNIIEGVARGVDFFDCVMPARNARHAKLFTWSGALNIRNEKYKLDERPIDPDCDCPVCRSFSRAYLRHLFAAEEMLAMRLAVLHNLYFYNKLAERIRQALDAGQFAAFRAEYSEKLAGRL

SEQ ID NO: 55418 - protein, 376 aa, Flavonifractor sp.
  misc_feature (1)..(376): tr|A0A1Y3XFC3|A0A1Y3XFC3_9FIRM Queuine tRNA-ribosyltran sferase OS=Flavonifractor sp. An52 OX=1965642 GN=tgt PE =3 SV=1
MFEVIKTEGKARRGVFTCAHGTVQTPVFMNVGTQGAIKGALSAFDLKDIGCQVELSNTYHLHLRPGDQVVRQMGGLHKFMRWDGPILTDSGGFQVFSLSGLRKIKEEGVTFASHIDGRRIFMGPEESMQIQSNLGSDIAMAFDECVENPATYEYAKASCERTLRWLQRCKVEHDRLNALPDTVNPHQMLFGINQGATFPDLRVWHMKETAKIDCEGYAIGGLAVGEPTQVMYDIIDAVEPHMPADKPRYLMGVGTPSNIIEGVARGVDFFDCVMPARNARHAKLFTWSGAMNIRNEKYKTDERPIDPDCDCPVCRNFSRAYLRHLFVADEMLAMRLAVMHNLYFYNKLAQRIRDALDAGQFTAFRAEYSEKLAGRI

SEQ ID NO: 55419 - protein, 376 aa, Flavonifractor sp.
  misc_feature (1)..(376): tr|A0A1Y4WHZ1|A0A1Y4WHZ1_9FIRM Queuine tRNA-ribosyltran sferase OS=Flavonifractor sp. An10 OX=1965537 GN=tgt PE =3 SV=1
MFEVLKTEGKARRGVFTCAHGTVQTPVFMNVGTQGAIKGAVSALDLKEIGCQVELSNTYHLHLRPGDQVVRQMGGLHKFMRWDGPILTDSGGFQVFSLSGLRKIKEEGVTFASHIDGRRIFMGPEESMQIQSNLGSDIAMAFDECVENPATYEYAKASCERTLRWLERCVAEHNRLNALPDTVNPRQMLFGINQGATFEDLRIWHMKEIAKLDCDGYAIGGLAVGEPTQVMYDIIDAVEPWMPADKPRYLMGVGTPSNIIEGVARGVDFFDCVMPARNARHAKLFTWSGALNIRNEKYKLDERPIDPDCDCPVCRNFSRAYLRHLFAAEEMLAMRLAVLHNLYFYNKLTQRIRQALDEGQFAAFRAEYSEKLSGRL

SEQ ID NO: 55420 - protein, 377 aa, Flectobacillus sp.
  misc_feature (1)..(377): tr|A0A267TIJ4|A0A267TIJ4_9BACT Queuine tRNA-ribosyltran sferase OS=Flectobacillus sp. BAB-3569 OX=1509483 GN=tg t PE=3 SV=1
MTFDIHSTDPNSKARAGVIHTDHGDIQTPIFMPVGTAGSVKAVHQRELKEDIKAQIILGNTYHLYLRPGLDVLERAGGLHKFNGWDRPILTDSGGYQVYSLAGTGRKIKEEGVTFKSHIDGSIHHFTPERVMDIQRSIGADIIMAFDECTPYPCDYTYARESMEMTHRWLKRCCDHFDATEPKYGYSQTLFPIVQGSVYKDLRVKSAEVIASFEREGNAIGGLSVGEPAEMMYETTDIVTDILPKDKPRYLMGVGTPANILEGIGLGIDMFDCVMPTRNARNGMLFTTEGIINIKNEKWKDDYSPIDAGLDSYVSNAYTKAYLRHLVKAEEILGAMIASVHNLTFYLWLVGQAREHILAGTFRAWKDQMVVKLMQRL

SEQ ID NO: 55421 - protein, 376 aa, Flexibacter flexilis
  misc_feature (1)..(376): tr|A0A1I1FRR8|A0A1I1FRR8_9BACT Queuine tRNA-ribosyltran sferase OS=Flexibacter flexilis DSM 6793 OX=927664 GN=t gt PE=3 SV=1
MQFKLEAQDAGSKARAGLITTDHGTIETPIFMPVGTAASVKAIHQRELKEDIKAQIILGNTYHLYLRPGLSVLEQAGGLHKFNGWDRPILTDSGGYQVYSLSGTRKIKEEGVTFKSHIDGSKHIFTPEGVMDIQRTIGADIMMAFDECTPYPCDYEYARKSMDMTHRWLKRCISRFDSTEPKYGYSQTLFPIVQGSTYKDLRKASAEFIAEQNREGNAIGGLSVGEPAEDMYEMTELVCDILPKDKPRYLMGVGTPANILEGIALGVDMFDCVMPTRNGRNGMIFTTQGIVNIRNEKWKNDFSPLDPGLDGYVSSFYTKAYIRHLFISEEILGMQIASLQNLSFYLHLVQQARQKIKEGTFAAWKTQTIKQVMQRL

SEQ ID NO: 55422 - protein, 376 aa, [Flexibacter] sp.; identical to SEQ ID NO: 55317
  misc_feature (1)..(376): tr|A0A1V2C8A1|A0A1V2C8A1_9FLAO Queuine tRNA-ribosyltran sferase OS=[Flexibacter] sp. ATCC 35103 OX=1937528 GN=t gt PE=3 SV=1

SEQ ID NO: 55423 - protein, 376 aa, [Flexibacter] sp.
  misc_feature (1)..(376): tr|A0A1V2B1M9|A0A1V2B1M9_9BACT Queuine tRNA-ribosyltran sferase OS=[Flexibacter] sp. ATCC 35208 OX=1936242 GN=t gt PE=3 SV=1
MIFELTTTDSESKARAGVITTGHGVIETPIFMPVGTVGSVKALTQEQVKQDVQAQIILGNTYHLYLRPGTEILSKAGGLHKFNGWDRPILTDSGGYQVFSLAANRKIKEEGCLFQSHIDGSRHLFTPENVMDIQRTIGADIIMAFDECPPYPSEYRYAKKSMELTHRWLDRCIARLKETQPAYGYEQTLFPIVQGSTFKDLRTISATEIAARECAGNAIGGLSVGEPEADMYEMCGLVCDILPKEKPRYLMGVGTPWNILENIALGVDMFDCVMPTRNGRNGMLFTWNGVINIKNKKWADDFSPIDENSPCFASSQYSKAYLRHLFVAGEILGMTLASIHNLAFYLELVKEARKQILTGNYAQWKNRMVPQLKQRL

SEQ ID NO: 55424 - protein, 376 aa, Flexibacter sp.
  misc_feature (1)..(376): tr|A0A2M7NKT7|A0A2M7NKT7_9BACT Queuine tRNA-ribosyltran sferase OS=Flexibacter sp. CG_4_10_14_3_um_filter_32_15 OX=1975530 GN=tgt PE=3 SV=1
MKFELHTTDKETSARAGTITTAHGQIQTPIFMPVGTLGTVKGVPPEALKDQVKAQIILGNTYHLYLRPNTEVLEAAGGLHKFMNWDRPILTDSGGYQVYSLGQIRKIKEEGVIFSSHIDGSKLNFTPEYVMDIQRSIGADIIMAFDECPPYPSDYEYAKKSMEMTHRWLTRCINRFDSTEGKYGYEQTLFPIVQGSTYKDLRKASAEFIAEQNRDGNAIGGLSVGEPAEKMYEFTELVCDILPKDKPRYLMGVGTPANILEGIALGVDMFDCVMPTRNARNGMLFTTKGVINIKNKKWEKDFSVLDEGLDCHVSNTYSKSYLRHLNKANELLGAYIASTHNLAFYLYLVGEARKHILAGDFTSWKREQVEVLMQRL

SEQ ID NO: 55425 - protein, 385 aa, Flexilinea flocculi
  misc_feature (1)..(385): tr|A0A0S7BZ44|A0A0S7BZ44_9CHLR Queuine tRNA-ribosyltran sferase OS=Flexilinea flocculi OX=1678840 GN=tgt PE=3 S V=1
MLETNSINGKISSVMTKDNFSFELLATDGKARAGIFHTPHGPIPTPIFAPVGTQATVKAVTPEQLEALDASLVLSNTYHLYLRPGADLVAELGGLHQFMAWPKPILTDSGGFQVFSLTGLRKIDDDGVTFKSYLDGSIHRFSPEISIAVQEKLGADIIMAFDECSNPNDYAYNIKSMERTHRWLERCIAAKKRNDQALFGIVQGGIFEDLRKASAEFVSSFDLPGFAIGGLSVGESKAEMNAILDIVPAMLPNNKPRYLMGVGSPEDLINGILRGIDIFDCVLPTRLARHGAAMTFLGRLNMNNAIFAHDSRPITEECDCYACRNFSRAYIRHLILSKEMLAATLLSIHNIATLEKLVKQSRQAIFDGTYTQYAENFLKNYKTVS

SEQ ID NO: 55426 - protein, 373 aa, Flexistipes sinusarabici
  misc_feature (1)..(373): tr|A0A5D0MY34|A0A5D0MY34_FLESI Queuine tRNA-ribosyltran sferase OS=Flexistipes sinusarabici OX=2352 GN=tgt PE=3 SV=1
MFDFTIEAEDNSCKARATKIKTHSGTIETPVFMPVGTVGSVKTLTPDELKDCGAEIILGNTYHLYLRPGTDVLEHFNGIHNFISWDRNILTDSGGFQVFSLSELRDISDEGVYFKSHLDGSKFFMSPEKSMEIQKSIGSDIVMAFDECVNNNLERSYFEKSVDLTTKWAERCKKVPLQSHQSLFGIIQGGTYKDLRRKSAEDIVNIGFNGYAIGGLSVGETTEKMYETTDYTTDFMPKNAPRYLMGVGTPEDILNGIEFGVDMFDCVMPTRNARNGMLFTSSGKLHIKRAQWGYSDEPLDNECSCYTCRNFSKGYLRHLYKAGEILALRLNSIHNINFYLSLVKGARNAIKRGCFAKFKSEVINKMKTGGDNV

SEQ ID NO: 55427 - protein, 373 aa, Flexistipes sinusarabici
  misc_feature (1)..(373): tr|A0A3D5QBB9|A0A3D5QBB9_FLESI Queuine tRNA-ribosyltran sferase OS=Flexistipes sinusarabici OX=2352 GN=tgt PE=3 SV=1
MFDFTIEAEDSSCKARAAKIKTHSGTIETPVFMPVGTVGSVKTLTPDELKDCGAEIILGNTYHLYLRPGTDVLEHFNGIHNFISWDRNILTDSGGFQVFSLSELRDISEEGVYFKSHLDGSKFFMSPEKSMEIQKSIGSDIVMAFDECVNNNLERSYFEKSVDLTTKWAERCKNVPLQSHQNLFGIIQGGTYRDLRKKSAEDIVRVGFKGYAIGGLSVGETTEKMYEITDYTTDFMPEKAPRYLMGVGTPEDILNGIEFGIDMFDCVMPTRNARNGMLFTSRGKLHIKRAQWIYSDEPLDNECSCYTCRNFSKGYLRHLYKSGEILALRLNTIHNINFYLSLVKGARNAIKRGCFAKFKSEMINKMKTGGDNV

SEQ ID NO: 55428 - protein, 381 aa, Floricoccus penangensis
  misc_feature (1)..(381): tr|A0A1E8GFK5|A0A1E8GFK5_9LACT Queuine tRNA-ribosyltran sferase OS=Floricoccus penangensis OX=1859475 GN=tgt PE =3 SV=1
MKDSPIKYRLIKTEKHTGARLGEIITPHGTFPTPMFMPVGTLATVKTQSPEELKEMGAGIILSNTYHLWLRPGDELVKKAGGLHKFMNWDQPILTDSGGFQVFSLADTRKIEEEGVHFKSHLNGAPLFLSPEKAIQIQNNLGSDIMMSFDECPQFYQPYDYVKASVERTSRWAERGLNAHANKDRQGLFGIVQGAGFEDLRRQSARDLVSMDFPGYSIGGLAVGESHEEMNAVLDFTTSMLPTNKPRYLMGVGAPDSLIDGVIRGIDMFDCVLPTRIARNGTCMTSRGRLVVKNAQYAEDFRPLDENCDCYTCKNYTRAYIRHLIKCDETFGMRLTSTHNLHFLINLMKNVRQAIMDDNLLEFRQDFCEAYGYNKEGAKDF

SEQ ID NO: 55429 - protein, 381 aa, Floricoccus tropicus
  misc_feature (1)..(381): tr|A0A1E8GK36|A0A1E8GK36_9LACT Queuine tRNA-ribosyltran sferase OS=Floricoccus tropicus OX=1859473 GN=tgt PE=3 SV=1
MKDSPIKYRLIKTEKHTGARLGEIITPHGTFPTPMFMPVGTLATVKTQSPEELKEMGAGIILSNTYHLWLRPGDELVKKAGGLHKFMNWDQPILTDSGGFQVFSLADTRKIEEEGVHFKSHLNGAPLFLSPEKAIQIQNNLGSDIMMSFDECPQFYQPYDYVKASVERTSRWAERGLNAHAKKDSQGLFGIVQGAGFEDLRRQSAQDLVSMDFPGYSIGGLAVGESHEEMNAVLDFTTPMLPTNKPRYLMGVGAPDSLIDGVIRGIDMFDCVLPTRIARNGTCMTSRGRLVVKNAQYAEDFRPLDENCDCYACKNYTRAYIRHLIKCDETFGMRLTSTHNLHFLINLMKNVRQAIMDDNLLEFREDFCEAYGYNKEGAKDF

SEQ ID NO: 55430 - protein, 386 aa, Fluoribacter bozemanae
  misc_feature (1)..(386): tr|A0A0W0S1T3|A0A0W0S1T3_FLUBO Queuine tRNA-ribosyltran sferase OS=Fluoribacter bozemanae OX=447 GN=tgt PE=3 SV =1
MKTFSCDVLYKHSATQARVTRVTTAHGEFITPVFMPVGTRAGVNNMTPVELRDAHSQIILGGNTYHMLCAPGMEVIEKAGGMHPFMGWHGPMLTDSGGFQVFSLSKNKEICTIDEEGAHFRLPGSERLIHMTPEMSLETQKIIGADIIMAFDQCTPDSCTKDEVSHIMTRTHRWLKQSMQYHQQYPNSRYGYEQALFGIIQGGTFKDLRRESADFVSSMNTEGIAIGGETIGFDMKTTVEVIRWVRDYLPENKPRYTMGVGMSPQDLLDVVAEGIDMFDCVAPTRNARHGSLYCGELIREGNWLRFASEYESERIQIKKSCFADDMSPIMAQCSCYTCLNYSRSYLHQLAKQKTNLFTALASIHNVHVMHDVCDKMRELIMSERSN

SEQ ID NO: 55431 - protein, 398 aa, Fluoribacter dumoffii
  misc_feature (1)..(398): tr|A0A377G656|A0A377G656_9GAMM Queuine tRNA-ribosyltran sferase OS=Fluoribacter dumoffii OX=463 GN=tgt_1 PE=3 S V=1
MAIIGVLNYFKQMKTFSCNVLHKHSATQARVTRVTTAHGEFVTPVFMPVGTRAGVNNMTPPELRDAHSQIILGGNTYHMLCAPGMEVIEKAGGMHPFMGWHGPMLTDSGGFQVFSLSKNKEICTIDEEGAHFRLPGSQRLIHMTPEMSLETQKIIGADIIMAFDQCTPDNCTKDEVSHIMERTHRWLKQSLQYHHQHPNSRYGYQQALFGIIQGGTFKDLRRESADFIASMNTEGIAIGGETIGFDMKTTVEVIRWVRDYLPEQKPRYTMGVGMSPQDLLDVVAEGIDMFDCVAPTRNARHGSLYCGELIRQGNWLRFVSDYENERIQIKKSCFADDMSPIMKQCSCYTCRNYSRSYLHQLAKQKTNLFTALASIHNVHVMHDVCDKMRELIINESSN

SEQ ID NO: 55432 - protein, 277 aa, Fluoribacter dumoffii
  misc_feature (1)..(277): tr|A0A377G7U5|A0A377G7U5_9GAMM Queuine tRNA-ribosyltran sferase OS=Fluoribacter dumoffii OX=463 GN=tgt_2 PE=4 S V=1
MLTAVQNFIPVLTSEAGLCLTTANWQEAKVTAASYSLEQLLYKPGQELLKSIDDLSHYLVCPGITVLNALSLRSNKEGVYVLKSPYDGSIIKFTSKDLIHLVQHLKPAAVILPANILQNFPEIWDNWNDEIIPFLHAQELKNQQLSQPHGVYFNVLDEVDWEQLERWSHLPRYVTGCFDAELVWRLGNKGIGFIETDEPAQAAMQGKVYSHAGDVDLTDSKTQMQFELIDADCVCPTCSQQFTRAYLHHLLQHTPLLCQRFLIQHNVYYVQNSKPSS

SEQ ID NO: 55433 - protein, 386 aa, Fluoribacter gormanii
  misc_feature (1)..(386): tr|A0A377GG04|A0A377GG04_9GAMM Queuine tRNA-ribosyltran sferase OS=Fluoribacter gormanii OX=464 GN=tgt_1 PE=3 S V=1
MKTFSCDVLHKHSSTQARVTRVTTAHGEFITPVFMPVGTRAGVNNMTPAELHDAHSQIILGGNTYHMLCAPGMEVIEKAGGMHPFMGWHGPMLTDSGGFQVFSLSKNKEICTIDEDGAHFRLPGSQRLIHMTPEMSLETQKIIGADIIMAFDQCTPDSCTKDEVSHIMTRTHRWLKQSIHYHQQYPNSRYGYVQALFGIIQGGTFKDLRRESADFVSSMDTDGIAIGGETIGFDMKTTVEVIRWVRDYLPENKPRYTMGVGMSPQDLLDVVAEGIDMFDCVAPTRNARHGSLYCGELIREGNWLRFVSEYENERIQIKKSCFADDMSPIMARCTCYTCRNYSRSYLHQLTKQKANLFTALASIHNVHVMHDVCDKMRELIINERVN

SEQ ID NO: 55434 - protein, 274 aa, Fluoribacter gormanii
  misc_feature (1)..(274): tr|A0A377GHB5|A0A377GHB5_9GAMM Queuine tRNA-ribosyltran sferase OS=Fluoribacter gormanii OX=464 GN=tgt_2 PE=4 S V=1
MLAAVQNFIPVLTSEAGLCLTTANWQEVKVSAASYSLERLLYKPGQVALQKISDLAHYLACPGRMIINAASLVANKEKVYVLKSPYDGSRVKITLEELIGLIQHLKPDAVLLPQNIMRDFPQIWDDWDDAIVPFIHGDDLEQHVVMRPHGVYFKILNESNWVKLEQWSHIPRYVMGCFESEIIQRLRHRGIGFIETDEPAQAAMQGKVYSKTGTVDLMDSKTQMQFEMIDANCACPTCSQQFTRAYLHHLLQHTPLLCQRFLIQHNVFYVQNLG

SEQ ID NO: 55435 - protein, 376 aa, Fluviibacterium aquatile
  misc_feature (1)..(376): tr|A0A4R6AQN7|A0A4R6AQN7_9RHOB Queuine tRNA-ribosyltran sferase OS=Fluviibacterium aquatile OX=2552766 GN=tgt P E=3 SV=1
MTQRFSYQLQSTDGQARQGIVHTPRGDIRTPAFMPVGTAATVKAMMPSSVRETGADILLGNTYHLMLRPTAERIASLGGLHRFMNWDGPILTDSGGFQVMSLAELRKLTEEGVSFRSHIDGSRHMLTPERSMEIQRLLGSDIVMCFDECPALPADRARLESSMQLSMRWAQRSRDAFGDRPGHALFGIQQGGDDEELRGQSAEALRAIEFDGYAVGGLAVGEGQEIMFRVLDYAPAMLPTDKPRYLMGVGKPDDLVGAVKRGIDMFDCVLPSRSGRTGQAFTARGVVNIKNARHQDDPRPLEEGCPCPACSGYSRAYLHHVFRAKEIISSMLLTWHNLTYYQRLMADMRAAIAEQKFAEFEAKFHAGRAQGDVEPV

SEQ ID NO: 55436 - protein, 370 aa, Fluviicoccus keumensis
  misc_feature (1)..(370): tr|A0A4Q7ZBI9|A0A4Q7ZBI9_9GAMM Queuine tRNA-ribosyltran sferase OS=Fluviicoccus keumensis OX=1435465 GN=tgt PE= 3 SV=1
MQFKLMATDGAARRGELTLQHGKVQTPAFMPVGTYGTVKGMLPRDIHDIGADIILGNTFHLWLRPGTDVVSQFGGLHGFINWEKPILTDSGGFQVFSLGALRKISEEGVKFQSPIDGSKVFLTPEISMQIQRALNSDIVMIFDECTPYPATEKQARESMELSLRWAARCKTAHEGNPNALFGIVQGGMYENLRDVSLAGLMDIGFDGYAIGGLSVGEPKEEMIKVLDHVPQRLPADKPRYLMGVGKPEDIVEAVRRGVDMFDCVMPTRNARNGHYFVTDGIVRIRNTQYKTDNLPVDPHCDCYACRNFSRAYLHHLDKCGEMLGAMLGTIHNLRYYQRLMAGLRTAIETGTLHDFVHDFYARRDLPVPAL

SEQ ID NO: 55437 - protein, 376 aa, Fluviicola sp.
  misc_feature (1)..(376): tr|A0A1G0CHK9|A0A1G0CHK9_9FLAO Queuine tRNA-ribosyltran sferase OS=Fluviicola sp. RIFCSPHIGHO2_12_FULL_43_24 OX =1798019 GN=tgt PE=3 SV=1
MHFELKHTDPRSKARAGILQTDHGAIETPIFMPVGTQGTVKGVHQQELRDDVNAQIILGNTYHLYMRPGIEVMEAAGGLHQFMGWERPILTDSGGYQVYSLAGSRKITEEGVRFQSHINGSYHFFTPEYAIDIQRTIGADIIMAFDECTPYPCDYDYAQRSMHMTHRWLKRCIAQMDKTESKYGHNQMLFPIVQGSVYPDLRKQSAEFIAEQGAVGNAIGGLSVGEPDEDLYSMTDLVCSTLPTEKPRYLMGVGTPVNILEAIALGVDMFDCVMPSRNARHGMLFTWEGTINIKNEKWKMDFSPLDSAGTAYVDQVYTKAYLHHLVKAKENLAIQIATIHNLAFYLALVKEARRRILDGTFRTWKDEQVQKLGRRI

SEQ ID NO: 55438 - protein, 376 aa, Fluviicola sp.
  misc_feature (1)..(376): tr|A0A556MYX6|A0A556MYX6_9FLAO Queuine tRNA-ribosyltran sferase OS=Fluviicola sp. MAH-3 OX=2597671 GN=tgt PE=3 SV=1
MHFELKHTDPHSKARAGLIHTDHGTIETPIFMPVGTQGTVKGVHQQELRDDVEAQIILGNTFHLYLRPGLDVIEGAGGLHQFIGWERPILTDSGGYQVYSLATSRKITEEGVRFQSHHDGSYHFFSPERAIDIQRTIGADIIMAFDECTPYPCEYNYAKRSMHMTHRWLKRCITQMDSTEPKYGYSQALFPIVQGSVYPDLRKESAEFIAEQHAVGNAIGGLSVGEPDEDMYSMTDLVCSILPTDKPRYLMGVGTPVNILESIALGVDMFDCVMPSRNARHGMLFTSEGTINIKNHKWRMDYSPLDPNGTTYVDQVYTKAYLHHLIKAKENLAIQIATIHNLAFYLALVKEARRRILDGTFRTWKDEQVKKLGRRI

SEQ ID NO: 55439 - protein, 376 aa, Fluviicola taffensis
  misc_feature (1)..(376): tr|F2IHA9|F2IHA9_FLUTR Queuine tRNA-ribosyltransferase OS=Fluviicola taffensis (strain DSM 16823 / NCIMB 13979 / RW262) OX=755732 GN=tgt PE=3 SV=1
MHFELKHTDPHSKARAGLVHTDHGTIETPIFMPVGTQGTVKGVHQQELRDDVQAQIILGNTFHLYLRPGLDVIEGAGGLHQFIGWERPILTDSGGYQVYSLATSRKITEEGVRFQSHHDGSYHFFSPERAIDIQRSIGADIIMAFDECTPYPCDYNYAKRSMHMTHRWLKRCITQMDSTEPKYGFSQALFPIVQGSVYPDLRKESAEFIASQNAEGNAIGGLSVGEPDEDLYSMTDLVCSILPADKPRYLMGVGTPVNILESIAMGVDMFDCVMPSRNARHGMLFTSEGTINIKNQKWKMDFSPLDVNGTAYVDQVYSKAYLHHLIKAKENLAIQIATIHNLAFYLALVKEARARILDGTFRKWKDEQVKILGRRI

SEQ ID NO: 55440 - protein, 375 aa, Fodinibius salinus
  misc_feature (1)..(375): tr|A0A5D3YJ47|A0A5D3YJ47_9BACT Queuine tRNA-ribosyltran sferase OS=Fodinibius salinus OX=860790 GN=tgt PE=3 SV= 1
MFELKKTADSSKARLGTLTTDHGEIDTPIFMPVGTLATVKAVKQNDLINKIKAQIILGNTYHLYLRPGCDIIENAGGLHPFMSWDRPILTDSGGYQVFSLSDNRELTEEGAEFKSHLDGSKHMFTPESVVDIQRTLGSDIMMVLDECPPHPCSYEYAKESMELTHRWEKRGRDAFLNTDPKYGHKQAQFGIVQGGTFEDLRIESAKRVTDMDFEGIAIGGLSVGEPTDLMYEMTDLNTDYLPENKPRYLMGVGKPANLLHCIARGVDMFDCVLPTRNARNGQIFTENGYINISNAKWKNHNEPLDPNFPSDLCSKYKMSYIHHLFRNNELLGLELASLHNLIFYLSLMDEVKERIANDTFHNWYEDKAELLNTKI

SEQ ID NO: 55441 - protein, 381 aa, Fontibacillus panacisegetis
  misc_feature (1)..(381): tr|A0A1G7Q7Y7|A0A1G7Q7Y7_9BACL Queuine tRNA-ribosyltran sferase OS=Fontibacillus panacisegetis OX=670482 GN=tgt PE=3 SV=1
MIILAAITYEHIKTCKQSGARLGRVHTPHGIIETPVFMPVGTQATVKTMSPEELKEMDARIILSNTYHLFLRPGHEIIREAGGLHKFMNWDRAILTDSGGFQVFSLSEMRKITEEGVHFRSHLSGDKLFLSPEVAMEIQNALGSDIMMAFDECAPYPAEYDYVKHSLERTTRWAERCLKSHARPDDQGLFAIVQGGMYEDLRKQSARDLTSMDFPGYAIGGLSVGEPKHLMYDVLDYTVPLLPTDKPRYLMGVGSPDALIEGSIRGIDMFDCVLPTRIARNGTTMTSQGRLVVRNAQYAKDFGPLDPECDCYTCRNYSRAYLRHLIKADETFGLRLTTYHNLHFLVNLMGKVRQAIMDDRLLDFRDEFFEQYGLIGNEKGF

SEQ ID NO: 55442 - protein, 379 aa, Fontibacillus phaseoli
  misc_feature (1)..(379): tr|A0A369BLH1|A0A369BLH1_9BACL Queuine tRNA-ribosyltran sferase OS=Fontibacillus phaseoli OX=1416533 GN=tgt PE= 3 SV=1
MAAAITYEHIKTCKQSGARLGRVHTPHGTIETPVFMPVGTQATVKTMSPEELKEMDARIILSNTYHLFLRPGHELVREAGGLHKFMNWDRAILTDSGGFQVFSLSEMRKITEEGVHYRSHLNGDKLFLSPEVVMEIENALGPDIMMAFDECAPYPADYDYVKKSMERTTRWAERCLKSHARPHDQGLFGIVQGGMFEDLRKQSARDLTSLDFPGYAIGGLSVGEPKHLMYEMLECTVPLLPSDKPRYLMGVGSPDALIEGAIRGVDMFDCVLPTRIARNGTTMTSQGRLVVRNAQYANDFGPLDPECGCYTCRNYSRAYLRHLIKADETFGLRLTTYHNLHFLINLMGKVRQAIMDDRLLDFRDEFFEQYGLIGNEKGF

SEQ ID NO: 55443 - protein, 374 aa, Fonticella tunisiensis
  misc_feature (1)..(374): tr|A0A4R7K9F6|A0A4R7K9F6_9CLOT Queuine tRNA-ribosyltran sferase OS=Fonticella tunisiensis OX=1096341 GN=tgt PE= 3 SV=1
MGAIRYELIKQCRQTGARRGRLHTPHGIIETPIFMPVGTQATVKAMTPEELKEIGAQIILSNTYHLHMRPGEKLIEKAGGLHKFMNWDRPILTDSGGFQVFSLSELRDIKEEGVTFKSHIDGSKHFISPEKAIEIENALGADIIMAFDECPPYPADYDYTKKSLYMTIRWAERCKAAHRNTEKQALFGIIQGGMYKDLREEAVREMVKLDFPGYSIGGLSIGEPKPIMYEVLDWTTHLMPENKPRYLMGVGSPDALIEGVIRGIDMFDCVLPTRIARNGTVFTSRGKVVVRNAEYAEDFRPLDEECDCYACRNYSRAYIRHLFKAKEILAARLATIHNLRFLLKLMENIRQAIMEDSLLDFKKEFFAKYGYSEK

SEQ ID NO: 55444 - protein, 378 aa, Fontimonas thermophila
  misc_feature (1)..(378): tr|A0A1I2K6E0|A0A1I2K6E0_9GAMM Queuine tRNA-ribosyltran sferase OS=Fontimonas thermophila OX=1076937 GN=tgt PE= 3 SV=1
MNFQLLATCGAARRGRLVFERGTVETPAFMPVGTYGTVKTMTPEELRAIGAEIVLGNTFHLMLRPGERTIRALGGLHRFMNWDGPILTDSGGFQVWSLSGLRKITEEGVKFASPVNGDRIFLSPERAIEIQHALGSDVIMQFDECTPYPATAKQARKSMELSARWAERCKAAHGDHPGALFGIVQGGMYPELRLESLRRLRAIGFDGYAVGGLSVGEAESERLAVLDALAPELPHESPRYLMGVGTPRDLVLAVARGIDMFDCVMPTRNARNGHLFTSQGVVKIRNAVHREDPRPLDPACDCYTCRNYSRAYLHHLDRCNEILGARLNTIHNLRYYQNHMRAIRAAIEENRYAEFAEAFLASPAGAPSRSRMQQEPQV

SEQ ID NO: 55445 - protein, 370 aa, Formivibrio citricus
  misc_feature (1)..(370): tr|A0A1I4ZRY0|A0A1I4ZRY0_9NEIS Queuine tRNA-ribosyltran sferase OS=Formivibrio citricus OX=83765 GN=tgt PE=3 SV =1
MKFELKAVSGAARRGSLQLNHGVVETPVFMPVGTYGTVKAMTPRDLNDIGAQIVLGNTFHLWLRPGLEVIETFGGLHGFMGWDKPILTDSGGFQVFSLGELRKITEEGVKFQSPINGDKLFLTPEESMRIQSVLNSDIVMIFDECTPYPADRRQAGESMRLSLRWAKRSRNEFDRLQNHNALFGIVQGGMHEDLRDESLAGLKDIGFHGYAIGGLSVGEPKEDFARILAHTAPKLPTHSPRYLMGVGTPEDLVFAVGQGVDMFDCVMPTRNARNGMLFTRWGDVRIKNAKYRNDARPLDEGCGCYTCRHFSRAYLHHLFRAGEILGSQLNTIHNLHYYQELMRDIRAAIEADGFAAFTTRFAQERARGVD

SEQ ID NO: 55446 - protein, 376 aa, Formosa agariphila
  misc_feature (1)..(376): tr|T2KIH5|T2KIH5_FORAG Queuine tRNA-ribosyltransferase OS=Formosa agariphila (strain DSM 15362 / KCTC 12365 / LMG 23005 / KMM 3901) OX=1347342 GN=tgt PE=3 SV=1
MIFDLKAKDTQSNARAGVITTDHGKIETPIFMPVGTVGSVKGVHQRELKNDINPDIILGNTYHLYLRPKTKILEKAGGLHKFINWDRNILTDSGGYQVYSLSSNRKIKEEGVKFKSHIDGSYHVFTPENVMEIQRSIGADIIMAFDECTPYPCDYNYARRSMHMTHRWLERCLTHLDKTPFTYDYAQTFFPIVQGSTYKDLRKQSAEYIAGVGAEGNAIGGLSVGEPAEEMYAMTEVVTDILPWDKPRYLMGVGTPINILENIALGVDMFDCVMPTRNARNGMLFTAYGSINIKNKKWEDDFSPIDDMGITFVDTEYSKAYLKHLFSVNELLGKQIATIHNLGFYMWLVREARKHILAGDFRVWKDMMVKQMDNRL

SEQ ID NO: 55447 - protein, 376 aa, Formosa algae
  misc_feature (1)..(376): tr|A0A2K2Z377|A0A2K2Z377_9FLAO Queuine tRNA-ribosyltran sferase OS=Formosa algae OX=225843 GN=tgt PE=3 SV=1
MTFDLKAQDPQSKARAGVITTDHGKIETPIFMPVGTVGSVKGVHQRELKNDINPDIILGNTYHLYLRPKTKILEKAGGLHKFINWDRNILTDSGGYQVYSLSSNRKIKEEGVKFKSHIDGSYHVFTPENVMEIQRSIGADIIMAFDECTPYPCDYNYARRSMHMTHRWLERCLTHLDKTPYTYDYAQTFFPIVQGSTYKDLRKQSAEYIASVGAEGNAIGGLSVGEPAEEMYAMTEVVTDILPWDKPRYLMGVGTPINILENIALGVDMFDCVMPTRNARNGMLFTAYGSINIKNKKWEDDFSPIDEMGITFVDTEYSKAYLKHLFSVNELLGKQIATIHNLGFYLWLVREARKHILAGDFRVWKDMMVKQMDNRL

SEQ ID NO: 55448 - protein, 376 aa, Formosa sp.
  misc_feature (1)..(376): tr|A0A2D4WWE8|A0A2D4WWE8_9FLAO Queuine tRNA-ribosyltran sferase OS=Formosa sp. OX=2018467 GN=tgt PE=3 SV=1
  misc_feature (236)..(236): Xaa can be any naturally occurring amino acid
MKFNLITTDTNSKARAATLATDHGVIETPIFMPVGTVGTVKGVHQRELKNDINPDIILGNTYHLYLRPQVQILEKAGGLHKFMNWDRNILTDSGGYQVYSLSANRKIKEEGVKFRSHIDGGYHVFTPENVMEIQRNIGADIIMAFDECTPYPCDYNYAKRSMHMTHRWLDRCVNHLEKLPFKYGFSQAFFPIVQGSVYKDLRQQSAEYIANTNAVGNAIGGLSVGEPAEEMYAMTXVVCAILPEDKPRYLMGVGTPINILENIALGIDMFDCVMPTRNARNGMLFTAHGTINIRNKKWTDDFSPIDEMAITWVDTEYSKAYLRHLFSVNELLGKQIATIHNLGFYMWLVREARKRILAGDFLSWKTMMIVQMDKRL

SEQ ID NO: 55449 - protein, 376 aa, Formosa sp.
  misc_feature (1)..(376): tr|A0A5D0G1J9|A0A5D0G1J9_9FLAO Queuine tRNA-ribosyltran sferase OS=Formosa sp. 1494 OX=2592046 GN=tgt PE=3 SV=1
MLFELKGKDTKSNARGGEITTDHGTIETPIFMPVGTVASVKGVHQRELKNDINPDIILGNTYHLYLRPQTNILEQAGGLHKFMNWDRNILTDSGGYQVYSLSSNRKIKEEGVKFKSHIDGSYHTFTPENVMEIQRTIGADIIMAFDECTPYPCDYHYAKRSMHMTHRWLDRCINHLEKTPFKYDYSQSFFPIVQGSTYKDLRKQSAEYIANAGAEGNAIGGLSVGEPAEEMYAMTEIVTNILPVDKPRYLMGVGTPINILENIALGVDMFDCVMPTRNARNGMLFTAHGTINIKNLKWADDFSPIDDMGITFVDTDYTKAYLRHLFSVNERLGAQIATIHNLGFYMWLVREARKHILAGDFRTWKDMMVKQMDKRL

SEQ ID NO: 55450 - protein, 376 aa, Formosa spongicola
  misc_feature (1)..(376): tr|A0A316DKF1|A0A316DKF1_9FLAO Queuine tRNA-ribosyltran sferase OS=Formosa spongicola OX=570520 GN=tgt PE=3 SV= 1
MIFELKGKDTQSNARAGEITTDHGKIETPIFMPVGTVASIKGVHQRELKNDINPDIILGNTYHLYLRPQTTILEQAGGLHKFMNWDRNILTDSGGYQVYSLSANRKIKEEGVKFKSHIDGSYHTFTPENVMEIQRTIGADIIMAFDECTPYPCDYHYAKRSMHMTHRWLDRCINHLEKTPFKYNYSQTFFPIVQGSTYKDLRKQSAEYIANAGAEGNAIGGLSVGEPAEEMYAMTEIVTDILPEDKPRYLMGVGTPINILENIALGVDMFDCVMPTRNARNGMLFTAHGTINIKNLKWADDFSPVDDMGITFVDTDYTKAYLRHLFTVNERLGAQIATIHNLGFYMWLVREARKHILAGDFRTWKDMMVKQMDKRL

SEQ ID NO: 55451 - protein, 377 aa, Fournierella massiliensis
  misc_feature (1)..(377): tr|A0A4R1R0C7|A0A4R1R0C7_9FIRM Queuine tRNA-ribosyltran sferase OS=Fournierella massiliensis OX=1650663 GN=tgt PE=3 SV=1
MPYRLLKTEHNARRGEFETVHGTVQTPAFMNVATAAAIKGGLSAFDLKDIHCQVMLCNTYHLHLRPGDKLVAEMGGLHKFTRWEGPILTDSGGFQVFSLSKLRKITEEGVTFNSHLDGHKIFMGPEESMQIQANLGSTIAMAFDECVENPAEYKYSKASCDRTVRWLKRCKAEMERLKREGLAVNPDQMLFGINQGCTYEDLRVEHMKQIAELDLDGYAIGGLAVGEPAEDMYRIISAVEPHMPKDKIRYLMGVGTPGNIIEAVSRGVDLFDCVMPSRNARHGHLNTWSGIINIKNLKYQKDEGPIDPECDCPVCRNFSRAYLRHLFKADEMLGMRLGVMHNLYFYNRLMERIRQALDEGNFQEFHDRYVTLLDTRI

SEQ ID NO: 55452 - protein, 367 aa, Francisella adeliensis
  misc_feature (1)..(367): tr|A0A2Z4Y056|A0A2Z4Y056_9GAMM Queuine tRNA-ribosyltran sferase OS=Francisella adeliensis OX=2007306 GN=tgt PE= 3 SV=1
MTVMKFDLLKTEGKARRGKISFPRGDIQTPAFMPVGTYGAVKSLSPAELKEMGADIILGNTFHLWLRPGTEIIKKHGTLHNFNGWDKPILTDSGGFQVFSLGKMRKLTEEGVTFKSPINGSKVFLSPEISMQVQRDLGSDIVMCFDECTPYPATEKEAKDSMELSMRWAQRSKEAHGDNPSALFGIIQGGMYEHLRDESLEALKKIDFDGFAIGGLSVGEPKDEMIKILDHTAHQMPEDKPRYLMGVGTPKDLVEAVYRGVDMFDCVMPSRNARNGHIFTSEGTIRIRNSKFKEDTSALDPNCDCYTCKNFSRSYLHHLDKTKEILGSRLNTIHNLTYYQNLMKKIRNSLEEGTFEEFREEFLENYS

SEQ ID NO: 55453 - protein, 367 aa, Francisella halioticida
  misc_feature (1)..(367): tr|A0A2Z2L1L4|A0A2Z2L1L4_9GAMM Queuine tRNA-ribosyltran sferase OS=Francisella halioticida OX=549298 GN=tgt PE= 3 SV=1
MTVMKFDLIKKEGKARRGKISFPRGNIQTPAFMPVGTYGAVKSLSPVELNEMGADIILGNTFHLWLRPGTDIIKKHGSLHGFNGWDKPILTDSGGFQVFSLGKMRKLTEDGVTFKSPINGSKVFLSPEISMQVQRDLGSDIVMCFDECTPYPATEKEAKESMKLSMRWAKRSKNAHEDNQSALFGIIQGGMYEHLRDESLAALEEIGFDGFAIGGLSVGEPKEDMIRILDHIAHQMPEDKPRYLMGVGTPKDLVEAVYRGIDMFDCVMPSRNARNGHIFTSEGVIKIRNAKHKDDISPLDPNCDCYTCKNFSRSYLHHLDKTKEILGSRLNTIHNLTFYQNLMENIRKAIEEVRFEEFRKDFLENYK

SEQ ID NO: 55454 - protein, 367 aa, Francisella hispaniensis
  misc_feature (1)..(367): tr|F4BKD7|F4BKD7_9GAMM Queuine tRNA-ribosyltransferase OS=Francisella hispaniensis OX=622488 GN=tgt PE=3 SV=1
MTVMKFELLKKEGKARRAKISFPRGDIQTPAFMPVGTYGAVKSLSPVELKEMGAEIILGNTFHLWLRPGTEIIKKHGSLHGFNGWDKPILTDSGGFQVFSLGKMRKLTEDGVTFKSPINGSKVFLSPEISMQVQRDLGSDIVMCFDECTPYPATEKEAKESMELSMRWAKRSKDAHGDNPSALFGIIQGGMYEHLRDESLAKLKEIDFDGFAIGGLSVGEPKEDMIRILDHTAHQMPEDKPRYLMGVGTPKDLVEAVYRGVDMFDCVMPSRNARNGHIFTSEGVIKIRNSKYKDDISPLDPNCDCYTCKNFTKSYLHHLDKTKEILGSRLNTIHNLTFYQNLMKSIRKALDEGRFAEFRKEFLANYK

SEQ ID NO: 55455 - protein, 367 aa, Francisella hispaniensis
  misc_feature (1)..(367): tr|A0A153JIS5|A0A153JIS5_9GAMM Queuine tRNA-ribosyltran sferase OS=Francisella hispaniensis FSC454 OX=1088883 G N=tgt PE=3 SV=1
MTVMKFELLKKEGKARRAKISFPRGDIQTPAFMPVGTYGAVKSLSPVELRQMGAEIILGNTFHLWLRPGTEIIKKHGSLHGFNGWDKPILTDSGGFQVFSLGKMRKLTEDGVTFKSPINGSKVFLSPEISMQVQRDLGSDIVMCFDECTPYPATEKEAKESMELSMRWAKRSKDAHGDNPSALFGIIQGGMYEHLRDESLAKLKEIDFDGFAIGGLSVGEPKEDMIRILDHTAHQMPEDKPRYLMGVGTPKDLVEAVYRGVDMFDCVMPSRNARNGHIFTSEGVIKIRNSKYKDDISPLDPNCDCYTCKNFTKSYLHHLDKTKEILGSRLNTIHNLTFYQNLMKSIRKALDEGRFAEFRKEFLANYK

SEQ ID NO: 55456 - protein, 368 aa, Francisella marina
  misc_feature (1)..(368): tr|A0A5C2C2H0|A0A5C2C2H0_9GAMM Queuine tRNA-ribosyltran sferase OS=Francisella marina OX=2249302 GN=tgt PE=3 SV =1
MTVMKFDLIKKEGKARRGKISFPRGDIQTPAFMPVGTYGAVKSLSPVELKEMGADIILGNTFHLWLRPGTEIIRKHGTLHDFNGWDKPILTDSGGFQVFSLGKMRKLTEEGVTFKSPINGSKVFLSPEISMQVQRDLGSDIVMCFDECTPYPATEKEAKDSMELSMRWAKRSKDAHGDNPSALFGIIQGGMYEHLRDESLKALKEIDFDGFAIGGLSVGEPKEDMIRILDHTAHQMPEDKPRYLMGVGTPKDLVEAVYRGVDMFDCVMPSRNARNGHMFTSEGVVRIRNAKHKDDVSPLDSNCDCYTCQNFSRSYLHHLDKTQEILGSRLNTIHNLTYYQNLMKNIRQALEEGRFEEFRKEFLESYKG

SEQ ID NO: 55457 - protein, 368 aa, Francisella noatunensis
  misc_feature (1)..(368): tr|I2AZW8|I2AZW8_FRANT Queuine tRNA-ribosyltransferase OS=Francisella noatunensis subsp. orientalis (strain To ba 04) OX=1163389 GN=tgt PE=3 SV=1
MTVMKFDLIKKEGKARRGKISFPRGDIQTPAFMPVGTYGAVKSLSPVELKEMDADIILGNTFHLWLRPGTEIIKKHGTLHDFNGWDKPILTDSGGFQVFSLGKMRKLTEEGVTFKSPINGSKVFLSPEISMQVQRDLGSDIVMCFDECTPYPATEKEAKDSMELSMRWAKRSKDAHGDNPSALFGIIQGGMYEHLRDESLKALKEIDFDGFAIGGLSVGEPKEDMIRILDHTAHQMPEDKPRYLMGVGTPKDLVEAVYRGVDMFDCVMPSRNARNSHMFTSEGVIRIRNAKHKEDTSPLDSNCDCYTCKNFSRSYLHHLDKTQEILGSRLNTIHNLTYYQNLMKNIRQALEEGKFEEFRKEFLENYKG

SEQ ID NO: 55458 - protein, 368 aa, Francisella noatunensis; identical to SEQ ID NO: 55457
  misc_feature (1)..(368): tr|A0A5C1RX02|A0A5C1RX02_9GAMM Queuine tRNA-ribosyltran sferase OS=Francisella noatunensis subsp. orientalis OX =299583 GN=tgt PE=3 SV=1

SEQ ID NO: 55459 - protein, 367 aa, Francisella novicida
  misc_feature (1)..(367): tr|A0A2L1CIC2|A0A2L1CIC2_FRANO Queuine tRNA-ribosyltran sferase OS=Francisella novicida OX=264 GN=tgt PE=3 SV=1
MTVMKFDLIKKEGKARRGKISFPRGDIQTPAFMPVGTYGAVKSLSPVELKEMGAEIILGNTFHLWLRPGTEIIKKHGSLHGFNGWDKPILTDSGGFQVFSLGKMRKLTEEGVTFKSPINGSKVFLSPEISMQVQRDLGSDIVMCFDECTPYPATEKEAKESMELSMRWAKRSKDAHGDNPSALFGIIQGGMYEHLRDESLAKLKEIDFDGFAIGGLSVGEPKEDMIRILDHTAHQMPEDKPRYLMGVGTPKDLVEAVYRGVDMFDCVMPSRNARNGHIFTSEGVIKIRNSKYKDDTSPLDPNCDCYTCKNFTKSYLHHLDKTKEILGSRLNTIHNLTFYQNLMKSIRKALDEGRFAEFRKEFLANYK

SEQ ID NO: 55460 - protein, 367 aa, Francisella persica
  misc_feature (1)..(367): tr|A0A0K2JR25|A0A0K2JR25_9GAMM Queuine tRNA-ribosyltran sferase OS=Francisella persica ATCC VR-331 OX=1086726 G N=tgt PE=3 SV=1
MTIMKFELLKKEGKARRAKISFPRGDIQTPAFMPVGTYGAVKSLSPVELKEMGAEIILGNTFHLWLRPGTEIVKKHGSLHQFNGWDRPILTDSGGFQVFSLGKMRKLTEEGVTFKSPINGSKVFLSPEISIQVQRDLGSDIVMCFDECTPYPATEKEAKKSMELSMRWAKRSKDAHDENPSALFGIIQGGMYEHLRDESLAKLKEINFDGFAIGGLSVGEPKEDMIRILDHTAHQMPEDKPRYLMGVGTPKDLVEAVYRGIDMFDCVMPSRNARNGHIFTSEGEIKIRNAKYKDDTSPLDQNCGCYTCKNFTKSYLHHLDKTKEILGSRLNTIHNLTFYQNLMKSIRKALDEYKFVEFRKEFLVNYK

SEQ ID NO: 55461 - protein, 368 aa, Francisella philomiragia
  misc_feature (1)..(368): sp|B0TYY3|TGT_FRAP2 Queuine tRNA-ribosyltransferase OS= Francisella philomiragia subsp. philomiragia (strain AT CC 25017) OX=484022 GN=tgt PE=3 SV=1
MTVMKFDLIKKEGKARRGKISFPRGDIQTPAFMPVGTYGAVKSLSPVELKEMGADIILGNTFHLWLRPGTEIIKKHGTLHDFNGWDKPILTDSGGFQVFSLGKMRKLTEEGVTFKSPINGSKVFLSPEISMQVQRDLGSDIVMCFDECTPYPATEKEAKDSMELSMRWAKRSKDAHGDNPSALFGIIQGGMYEHLRDESLKALKEIDFDGFAIGGLSVGEPKEDMIRILDHTAHQMPEDKPRYLMGVGTPKDLVEAVYRGVDMFDCVMPSRNARNGHMFTSEGVVRIRNAKHKDDVSLLDPNCDCYTCQNFSRSYLHHLDKTQEILGSRLNTIHNLTYYQNLMKNIRQALEEGRFEEFRKEFLENYKG

SEQ ID NO: 55462 - protein, 365 aa, Francisella philomiragia
  misc_feature (1)..(365): tr|A0A0E3A081|A0A0E3A081_9GAMM Queuine tRNA-ribosyltran sferase OS=Francisella philomiragia OX=28110 GN=tgt PE= 3 SV=1
MKFDLIKKEGKARRGKISFPRGDIQTPAFMPVGTYGAVKSLSPVELKEMGADIILGNTFHLWLRPGTEIIKKHGTLHDFNGWDKPILTDSGGFQVFSLGKMRKLTEEGVTFKSPINGSKVFLSPEISMQVQRDLGSDIVMCFDECTPYPATEKEAKDSMELSMRWAKRSKDAHGDNPSALFGIIQGGMYEHLRDESLKALKEIDFDGFAIGGLSVGEPKEDMIRILDHTAHQMPEDKPRYLMGVGTPKDLVEAVYRGVDMFDCVMPSRNARNGHMFTSEGVVRIRNAKHKDDVSPLDPNCDCYTCQNFSRSYLHHLDKTQEILGSRLNTIHNLTYYQNLMKNIRQALEEGRFEEFRKEFLENYKG

SEQ ID NO: 55463 - protein, 367 aa, Francisella sp.
  misc_feature (1)..(367): tr|A0A073A8B1|A0A073A8B1_9GAMM Queuine tRNA-ribosyltran sferase OS=Francisella sp. W12-1067 OX=1385420 GN=tgt P E=3 SV=1
MTVMKFEISKKQGKARRGKITFPRGEIQTPAFMPVGTYGAVKSLSPVELKEMGADIILGNTFHLWLRPGTDIIKKHGDLHDFIGWDKPILTDSGGFQVFSLGKLRKLTEDGVTFSSPVNGSKVFLSPEISMQVQKDLGSDIVMCFDECTPYPATEKEAKESMELSMRWAKRSKDAHGNNSSALFGIIQGGMYEHLRDESLEKLTEIDFDGYAIGGLSVGEPKEDMIRILDHIACKMPEDKPRYLMGVGTPKDLVEAVYRGVDMFDCVMPSRNARNGHIFTSEGIIRIRNSKYKEDTSALDPNCDCYTCKNFSKSYLHHLDKTKEILGSRLNTIHNLTFYQSLMKKIRKAIEEDSFEEFRNGFLENYK

SEQ ID NO: 55464 - protein, 364 aa, Francisella sp.
  misc_feature (1)..(364): tr|A0A1S2WWH7|A0A1S2WWH7_9GAMM Queuine tRNA-ribosyltran sferase OS=Francisella sp. TX076608 OX=573568 GN=tgt PE =3 SV=1
MKFDLIKKEGKARRGKISFPRGDIQTPAFMPVGTYGAVKSLSPVELKEMGAEIILGNTFHLWLRPGTEIIKKHGSLHGFNGWDKPILTDSGGFQVFSLGKMRKLTEEGVTFKSPINGSKVFLSPEISMQVQRDLGSDIVMCFDECTPYPATEKEAKESMELSMRWAKRSKDAHGDNPLALFGIIQGGMYEHLRDESLAKLKEIDFDGFAIGGLSVGEPKEDMIRILDHTAHQMPEDKPRYLMGVGTPKDLVEAVYRGVDMFDCVMPSRNARNGHIFTSEGVIKIRNSKYKDDTSPLDPNCDCYTCKNFTKSYLHHLDKTKEILGSRLNTIHNLTFYQNLMKSIRNALDEGRFAEFRKEFLANYK

SEQ ID NO: 55465 - protein, 367 aa, Francisella tularensis
  misc_feature (1)..(367): sp|Q5NFU8|TGT_FRATT Queuine tRNA-ribosyltransferase OS= Francisella tularensis subsp. tularensis (strain SCHU S 4 / Schu 4) OX=177416 GN=tgt PE=3 SV=1
MTVMKFDLIKKEGKARRGKITFPRGDIQTPAFMPVGTYGAVKSLSPVELKEMGAEIILGNTFHLWLRPGTEIIKKHGSLHGFNGWDKPILTDSGGFQVFSLGKMRKLTEEGVTFKSPINSSKVFLSPEISMQVQRDLGSDIVMCFDECTPYPATEKEAKESMELSMRWAKRSKEAHGDNPSALFGIIQGGMYEHLRDESLAKLKEIDFDGFAIGGLSVGEPKEDMIRILDHTAHQMPEDKPRYLMGVGTPKDLVEAVYRGVDMFDCVMPSRNARNGHIFTSEGVIKIRNSKYKDDTSPLDPNCDCYTCKNFTKSYLHHLDKTKEILGSRLNTIHNLTFYQNLMKSIRKALDEGRFSEFRKEFLASYK

SEQ ID NO: 55466 - protein, 367 aa, Francisella tularensis
  misc_feature (1)..(367): sp|Q0BMC7|TGT_FRATO Queuine tRNA-ribosyltransferase OS= Francisella tularensis subsp. holarctica (strain OSU18) OX=393011 GN=tgt PE=3 SV=1
MTVMKFDLIKKEGKARRGKITFPRGDIQTPAFMPVGTYGAVKSLSPVELKEMGAEIILGNTFHLWLRPGTEIIKKHGSLHGFNGWDKPILTDSGGFQVFSLGKMRKLTEEGVTFKSPVNSSKVFLSPEISMQVQRDLGSDIVMCFDECTPYPATEKEAKESMELSMRWAKRSKEAHGDNPSALFGIIQGGMYEHLRDESLAKLKEIDFDGFAIGGLSVGEPKEDMIRILDHTAHQMPEDKPRYLMGVGTPKDLVEAVYRGVDMFDCVMPSRNARNGHIFTSEGVIKIRNSKYKDDTSPLDPNCDCYTCKNFTKSYLHHLDKTKEILGSRLNTIHNLTFYQNLMKSIRKALDEGRFSEFRKEFLASYK

SEQ ID NO: 55467 - protein, 375 aa, Franconibacter pulveris
  misc_feature (1)..(375): tr|A0A0J8VTG6|A0A0J8VTG6_9ENTR Queuine tRNA-ribosyltran sferase OS=Franconibacter pulveris OX=435910 GN=tgt PE= 3 SV=1
MKYELQTTDGRARRGRLIFDRGVVETPAFMPVGTYGTVKGMTPEEVEATGAQIILGNTFHLWLRPGQEIMKLHGDLHDFMQWKGPILTDSGGFQVFSLGDIRKITEAGVHFRNPINGDAIFLDPEKSMEIQYDLGSDIVMIFDECTPYPADWDYAKRSMEMSLRWAKRSRDRFDSLGNKNALFGIIQGSVYEDLRDISVKGLVEIGFDGYAVGGLAVGEPKEDMHRILEHVCPQIPADKPRYLMGVGKPEDLVEGVRRGIDMFDCVMPTRNARNGHLFVTTGVVKIRNAKYKSDTAPLDEECDCYTCRNYSRAYLHHLDRCNEILGARLNTIHNLRYYQRVMAGLRKAIEEGKLEHFVADFYQRQGRPVPPLNVD

SEQ ID NO: 55468 - protein, 386 aa, Frankia casuarinae
  misc_feature (1)..(386): tr|Q2J7K9|Q2J7K9_FRACC tRNA-guanine transglycosylase OS =Frankia casuarinae (strain DSM 45818 / CECT 9043 / CcI 3) OX=106370 GN=Francci3_3378 PE=4 SV=1
MPRMSPPVMPVVPAPVLATPHGTVELPTFLPDGTRAAVRSTDPRDLREVGIEAVMCNAFHLAQRPGVRPVKRVGGLRRFMAWDGVVVTDSGGFQVLSLLRRQGQHSAIRPGGVVFRNPADGTKVELTPQRVIEWQFGLGSGVVIALDDCTGPEDSPAEVVASVDRTIRWFRDTRTAFDLQCRQRRLENPPLLVGVVQGGADPDQRKRCVEALVEAGAQGFGFGGWPLDGNGVLEREMFALLSASTPPEAPLFALGVGKPEHLVALCQIDRRWVFDCTIPTRDARHGRLYAFNNAPLAADGSFYQNVHILDERNHRIDEPICPTCDCPTCTRYGRSYLHHLFRVRDGQADRLATLHNLRFYTRLIEQLRAGGRALAAGPAEIGDDDT

SEQ ID NO: 55469 - protein, 383 aa, Frankia sp.
  misc_feature (1)..(383): tr|W9CSZ0|W9CSZ0_9ACTN Queuine/archaeosine tRNA-ribosyl transferase OS=Frankia sp. CcI6 OX=1352929 GN=CcI6DRAFT _04728 PE=4 SV=1
MSPPVMPVVPAPVLATPHGTVELPTFLPDGTRAAVRSTDPRDLREVGIEAVMCNAFHLAQRPGVRPVKRVGGLRRFMAWDGVVVTDSGGFQVLSLLRRQGQHSAIRPGGVVFRNPADGTKVELTPQRVIEWQFGLGSGVVIALDDCTGPEDSPAEVVASVDRTIRWFRDTRTAFDLQCRQRRLENPPLLVGVVQGGADPDQRKRCVEALVEAGAQGFGFGGWPLDGNGVLEREMFALLSASTPPEAPLFALGVGKPEHLVALCQIDRRWVFDCTIPTRDARHGRLYAFNNAPLAADGSFYQNVHILDERNHRIDEPICPTCDCPTCTRYGRSYLHHLFRVRDGQADRLATLHNLRFYTRLIEQLRAGGRALAAGPAEIGDDDT

SEQ ID NO: 55470 - protein, 383 aa, Frankia sp.
  misc_feature (1)..(383): tr|A0A062WV20|A0A062WV20_9ACTN Queuine/archaeosine tRNA -ribosyltransferase OS=Frankia sp. BMG5.23 OX=683305 GN =BMG523Draft_04264 PE=4 SV=1
MSPPVMPVVPAPVLATPHGTVELPTFLPDGTRAAVRSTDPRDLREVGIEAVMCNAFHLAQRPGVRPVKRVGGLRRFMAWDGVVVTDSGGFQVLSLLRRQGQHSAIRPGGVVFRNPADGTKVELTPQRVIEWQFGLGSGVVIALDDCTGPEDSPAEVVASVDRTIRWFRDTRTAFDLQCRQRRLENPPLLVGVVQGGADPDQRKRCVEALVEAGAQGFGFGGWPLDGNGVLEREMFALLSASTPPEAPLFALGVGKPEHLVALCQIDCRWVFDCTIPTRDARHGRLYAFNNAPLAADGSFYQNVHILDERNHRIDEPICPTCDCPTCTRYGRSYLHHLFRVRDGQADRLATLHNLRFYTRLIEQLRAGGRALAAGPAEVGDDDT

SEQ ID NO: 55471 - protein, 376 aa, Frateuria aurantia
  misc_feature (1)..(376): tr|H8L5X4|H8L5X4_FRAAD Queuine tRNA-ribosyltransferase OS=Frateuria aurantia (strain ATCC 33424 / DSM 6220 / N BRC 3245 / NCIMB 13370) OX=767434 GN=tgt PE=3 SV=1
MTALTFELDATDGAARRGRVHLPHGSLETPAFMPVGTYGSVKAMTPRDLKESGAEIILGNTFHLFLRPGLEVISRFGGLHKFVGWDRPMLTDSGGFQVFSLAHKRKITEEGVTFASPVDGSKVFLSPEVSMQIQSTLNSDIAMIFDECTPYPATEPVAAESMRLSLRWAERSRQAFTELGSGNALFGIVQGSVYESLRRESAEGLVKIGFDGYAVGGLAVGEPEDARNHTLDFTVPMLPQDKPRYLMGVGRPEDIVEAVRRGIDMFDCVMPTRNARNGFLFTAQGTLRIRNAKFALDTAVIEEGCDCYTCASGFSRAYLRHLDRCNEILGSQLATIHNLRYYQRLMQGLRDAIAARRLDDFVAEFYALRQGAAAAA

SEQ ID NO: 55472 - protein, 375 aa, Frateuria sp.
  misc_feature (1)..(375): tr|A0A0Q9PC17|A0A0Q9PC17_9GAMM Queuine tRNA-ribosyltran sferase OS=Frateuria sp. Soil773 OX=1736407 GN=tgt PE=3 SV=1
MTSLTFDLLATDGAARRGRLAFARGTVETPAFMPVGTYGSVKAMTPRDIVGIGAEIILGNTFHLFLRPGLEIVEAFGGLHRFIGWDKPILTDSGGFQVFSLAHKRKLAEEGVTFASPVDGSKVFLSPEVSMKIQKTLDSDVAMIFDECTPYPATEKVAAESMELSLRWAERSRRAFDELRNPNALFGIVQGSVYEPLRRRSAEGLVRIGFDGYAVGGLAVGEPEAERNHTLDFTVSLLPQDKPRYLMGVGRPEDIVEAVRRGIDMFDCVMPTRNARNGFLFVPEGTLRIRNAKFAADTRVVEEGCDCYACANGFSRAYLRHLDRCNEILASQLATMHNLRHYQRLMAGLRDAIAAGRLEDFAARFYALRQGAQAA

SEQ ID NO: 55473 - protein, 373 aa, Frateuria terrea
  misc_feature (1)..(373): tr|A0A1H6Y8A0|A0A1H6Y8A0_9GAMM Queuine tRNA-ribosyltran sferase OS=Frateuria terrea OX=529704 GN=tgt PE=3 SV=1
MTFQLLARDGAARRGRLAFDRGTVETPAFMPVGTYGSVKAMTPRDLTELGAEIILGNTFHLYLRPGLEIVEKFAGLHRFIGWDKPILTDSGGFQVFSLAHKRKLAEEGVTFASPVDGSKVFLSPEVSMKIQTVLDSDIAMIFDECTPYPATEQQAGDSMAMSLRWAERSRRAFDELKNPNALFGIVQGGVYEPLRRRSAEGLVGIGFDGYAVGGLAVGEPEAERNHTLDFTVSMLPQDKPRYLMGVGRPEDIVEAVRRGIDMFDCVMPTRNARNGFLFVPEGTLRIRNARYADDTRVIEEGCDCYACANGFSRAYLRHLDRCNEILASQLATHHNLRHYQRLMAGLRAAIAAGTLEDFVAAFYARRQGGTPDA

SEQ ID NO: 55474 - protein, 384 aa, Frederiksenia canicola
  misc_feature (1)..(384): tr|A0A3N4XFR3|A0A3N4XFR3_9PAST Queuine tRNA-ribosyltran sferase OS=Frederiksenia canicola OX=123824 GN=tgt PE=3 SV=1
MKYELHKTSGNARRGRLTFSRPKGEFHVETPAFMPVGTYGTVKGMTPEEVAATGAQILLGNTFHLWLRPGQEIMKLHGDLHDFMQWHGPILTDSGGFQVFSLGKLRKIKEEGVTFQNPISGEKIFLSPEKSMEIQYDLGSDIVMIFDECTPYPATFDYAKQSMEMSLRWAKRSRDRFDELENPNALFGIIQGGVYEELRKISVEKLVEIGFDGYAVGGLAVGEPKEDMHRILEYVCPQIPADKPRYLMGVGKPEDLVEGVRRGIDMFDCVMPTRNARNGHLFVSNGVVKIRNAKYRNDTSPLDAECDCYTCKNYTKAYLYHLDKCNEILGARLNTIHNLRYYQRLMAQIRQAIEEDRFDEFVVAFYQKIGKEIPPLQLGNNENA

SEQ ID NO: 55475 - protein, 605 aa, Fremyella diplosiphon
  misc_feature (1)..(605): tr|A0A1Z4M8K0|A0A1Z4M8K0_MICDP Queuine tRNA-ribosyltran sferase OS=Fremyella diplosiphon NIES-3275 OX=1973485 G N=tgt PE=4 SV=1
MKITKSPLTKTLVSTSTISRLRTLIITSCTGKKLHNPTNQLTIEDFKDTKRLRERTQSLSEFSCSACQMYTGLQHLRLMEGVDILRSRFGKEVVDVKIISAGYGLIPEDKVIVPYSVTFNSMKSDEISSWANFIGIHKDFQETVIGYDLVFVLLGDKYLRALNLPVETHPKQTFIILASNKSRNLVFLEDTNFELLTFSNADASRFGCALVGLKGQLLKLIASESRREPNLLSELYNNPKILEKVLNNQPQQLELPLEITSTTSKKTNINKKSQKQKKTIANLDEFLKLPRAINTHLIMKYFIPEWDDKVDNGYNFLLDEATKNRSAYKDDIYAHEIYSEPNYDGILVSKVVVDKIKNKRADIEKLGGIRNFVRFPGEIMGDCGAFGYIKLEIPPYNTVEILDYYEKLQFNYGVSIDHLIVGPFAEPGVREKRYDLTLRNAEEFISKHHKIGYNFTPIGVAQGWNPQTYADAVKKLVEMGYDYIAIGGVARTPTIEILEILKEVYQHLTPNTRLHLFGVGRIDALPYFRHLGITSFDSASPLRKAWFDAVENYHTLSGKAYAAVRIPFIDKQSPRIKHLFKSGFTSNYFDYLNHDGGNKNTAPLG

SEQ ID NO: 55476 - protein, 332 aa, Fremyella diplosiphon
  misc_feature (1)..(332): tr|A0A1Z4MPR9|A0A1Z4MPR9_MICDP Queuine tRNA-ribosyltran sferase OS=Fremyella diplosiphon NIES-3275 OX=1973485 G N=tgt PE=3 SV=1
MPVGTLANVKTVTPAQLRDTGAQMVLSNTYHLHLQPGEAIVAGGGGLHKFMGWNGPMLTDSGGFQVFSLSEMRKITEEGVTFRSPHDGQIIKLTPERSIEIQNTLGADVIMAFDECPPYPATRQEVEAATERTYRWLERCIVAHKRSDQALFGIVQGGVYLDLRSQAAVALAKLNLPGYAIGGVSVGEPPELMAQIVQTTAPLLPPEKPRYLMGVGTYKEMAIAIASGVDLFDCVIPTRWARHGTAIVQGERWNLKNAKFREDFTPLDETCPCYACQNFSRAYISHLVRSQEILAYTLLSIHNITELIRFTQRIREAILSDRFESEFGHWLE

SEQ ID NO: 55477 - protein, 378 aa, Fretibacterium fastidiosum
  misc_feature (1)..(378): tr|D4MAS8|D4MAS8_9BACT Queuine tRNA-ribosyltransferase OS=Fretibacterium fastidiosum OX=651822 GN=tgt PE=3 SV= 1
MFEFKVLAVCPETGARAGELTTPHGVIRTPVFMPVGTQATVKAMAPWELEEIGAQIVLGNTYHLYLRPGAELVAEAGGLHRFMSWAHPILTDSGGFQVFSLADLNRVTDEAVVCRSHLDGSRHVMSPEWSMRVQELLGSDIAMCFDQCGPFPADHGQAEAALVRTTLWARRSQEAHRREDQALFGIVQGSVYDDLRLRSAEEIIELGFPGFGIGGLSVGEPHEVMYHVLDLLNGVMPREKPRYLMGVGYPSNVVEGIARGVDMFDCVLPTRNGRNGTLFTSFGRVNIKGKQYEHDFGSIDPECGCRLCRGFSRAYLRHLYHCGEILAARLCTLHNLSFTLNLAARAREAILDGTFPAFRAEFNAKFVDGPGRDAGGER

SEQ ID NO: 55478 - protein, 372 aa, Fretibacterium sp.
  misc_feature (1)..(372): tr|A0A3P1Y4I2|A0A3P1Y4I2_9BACT Queuine tRNA-ribosyltran sferase OS=Fretibacterium sp. OH1220_COT-178 OX=2491047 GN=tgt PE=3 SV=1
MFEFKVEAVCPRTGARAGVLRTPHGPVRTPVFMPVGTQATVKAMTPPELEEIGAQIILGNTYHLYLRPGAELVAEAGGLHRFMGWNRPILTDSGGFQVFSLAQLNKVTDQDVRCRSHLDGSEHVMSPEWAMRVQELLGSDIAMCFDQCGPFPATHAQAETALERTTLWAERSKAAHSRPDQALFGIVQGSVYDDLRLRSAREIVGMDFPGYGIGGLSVGESHDVMYRVLDLLDGVMPREKPRYLMGVGYPPNIVEGVARGVDMFDCVLPTRNGRNGTLFTSFGRVNIKAQRYERDFGPVDPECDCYLCRDFSRAYLRHLYRCGEILAARLCTWHNLRYTVRLAERAREAILAGSFPEFRERFREGFQDGERG

SEQ ID NO: 55479 - protein, 383 aa, Frischella perrara
  misc_feature (1)..(383): tr|A0A0A7S8S8|A0A0A7S8S8_FRIPE Queuine tRNA-ribosyltran sferase OS=Frischella perrara OX=1267021 GN=tgt PE=3 SV =1
MKFELDNTDGLARRGRMKFDRRGVEYTVETPAFMPVGTYGTVKGMTPEEVAATGAQILLGNTFHLWLRPGQDIMRKHGDLHDFMQWKGPILTDSGGFQVFSLGELRKIKEEGVHFRNPINGDAIFLSPEISMEIQYDLGSDIVMIFDECAPFPADWDYVKKSMEMSLRWAKRSRQRFDELGNKNALFGIVQGGIHQELRDISIKGLTEIGFDGYAVGGLAVGEPKADMHRILEGTCPQLPADKPRYLMGVGKPEDLVEGVRRGIDMFDCVMPTRNARNGHLFVTNGVIKIRNAKYRDDTTPLDPECDCYTCKHYTKSYLHHLDKCGEILGARLNTIHNLRYYQRLMAEIRQAVAEQRYEEFVQEFYQQIGKTPAPFNHETSVK

SEQ ID NO: 55480 - protein, 383 aa, Frischella perrara
  misc_feature (1)..(383): tr|A0A318MUY0|A0A318MUY0_FRIPE Queuine tRNA-ribosyltran sferase OS=Frischella perrara OX=1267021 GN=tgt PE=3 SV =1
MKFELDNTDGLARRGRMKFDRRGVEYTVETPAFMPVGTYGTVKGMTPEEVAATGAQILLGNTFHLWLRPGQDIMRKHGDLHDFMQWKGPILTDSGGFQVFSLGELRKIKEEGVHFRNPINGDAIFLSPEISMEIQYDLGSDIVMIFDECAPFPADWDYVKKSMEMSLRWAKRSRQRFDELGNKNALFGIVQGGIHQELRDISIKGLTEIGFDGYAVGGLAVGEPKADMHRILEGTCPQLPADKPRYLMGVGKPEDLVEGVRRGIDMFDCVMPTRNARNGHLFVTNGVIKIRNAKYRDDTTPLDPECDCYTCKHYTKSYLHHLDKCGEILGARLNTIHNLRYYQRLMAEIRQAVAEQRYEEFVQEFYQRIGKTPAPFYHETSVK

SEQ ID NO: 55481 - protein, 378 aa, Frisingicoccus caecimuris
  misc_feature (1)..(378): tr|A0A4R2L6Q4|A0A4R2L6Q4_9FIRM Queuine tRNA-ribosyltran sferase OS=Frisingicoccus caecimuris OX=1796636 GN=tgt PE=3 SV=1
MYKLLTTDGSAKRGQFTTVHGTIQTPVFMNVGTAAAIKGAVATTDLQQIKTQVELSNTYHLHLRPGDKIVKKLGGLHKFMNWDKPILTDSGGFQVFSLTSLRKIKEEGVYFNSHIDGHKIFMGPEESMQIQSNLASTIAMAFDECPSSLATRDYIQNSVDRTTRWLHRCKAEMQRLNSLPDTINPNQMLFGINQGGTFADIRIEHAKAISELDLDGYALGGLAVGETHEEMYHIIEETVPYLPQNKPTYLMGVGTPANILEAVDRGVDFFDCVYPSRNGRHGHVYTNHGKLNLFNAKFELDERPIEEGCGCPACKNYSRAYIRHLLKAKEMLGMRLCVLHNLYFYNTMMEEIREAIEEHRYASYKKTKLEGFEMKEEN

SEQ ID NO: 55482 - protein, 405 aa, Fructobacillus durionis
  misc_feature (1)..(405): tr|A0A1I1FPP6|A0A1I1FPP6_9LACT Queuine tRNA-ribosyltran sferase OS=Fructobacillus durionis OX=283737 GN=tgt PE= 3 SV=1
MTDKKPAVWYEHLHTEKHTGARRGRLHTPHGVYETPMFMPVGTQGAVKGVNTRTLKEIGSQFILANTYHLWVRPGDELIAQAGGLHKYMGWDQAILTDSGGFQVFSLSDARKLKEEGVTFQNHVNGDKMSLSPEVAMRIQNNLGSDVMMQLDEAIPYFETYDYVKESMQRSLRWADRAQQYHKKTDTQALFGIVQGAGFRDLRTESANELVKMDLPGYAVGGLSVGESKKEMNRVLDFTMPLLPEDKPRYLMGVAAPDSLIDGVIRGVDMFDCVLPTRIGRKGTLMTSKGRVVIKNSRYKDDFSPIDPDLTYYSDNPIRKNQFGNLAQYDLPNYSPYQNLSRSYLHHLFNAHERLGEQIASEHNLRYLLHLMEEMRKAIEEDRLLEFREQVLEEYGYNKKNARLF

SEQ ID NO: 55483 - protein, 405 aa, Fructobacillus ficulneus
  misc_feature (1)..(405): tr|A0A0K8MGG0|A0A0K8MGG0_9LACT Queuine tRNA-ribosyltran sferase OS=Fructobacillus ficulneus OX=157463 GN=tgt PE =3 SV=1
MTQEKGAVWYEHLHTEKHTGARRGRLHTPHGTFETPMFMPVGTQGAVKGVNNKTLKEIGSQFILANTYHLWVRPGDELIAEAGGLHKYMGWDQAILTDSGGFQVFSLADARKLTEEGATFRNHVNGSKMFLSPEVAMRIQNNLGSDVMMQLDEAIPYFESYEYIKDSMQRSLRWADRAQQYHKKTDTQALFGIVQGAGFKGLRTESAQELVKLDLPGYAVGGLSVGESKKEMNRVLDFTMPLLPEDKPRYLMGVAAPDSLIDSVIRGVDMFDCVLPTRVGRKGTLMTRRGRVVIKNSKYKNDFSPIDPDLDYYSKNPIRQEQFGNLAQYDVPGYSPYQNLSRSYLHHLFNANELLGAQIASEHNLRYLLNLMEEMRTAIENDQLLEFRERVLEEYGYNKANARLF

SEQ ID NO: 55484 - protein, 369 aa, Fructobacillus fructosus
  misc_feature (1)..(369): tr|A0A3F3I265|A0A3F3I265_9LACT Queuine tRNA-ribosyltran sferase OS=Fructobacillus fructosus KCTC 3544 OX=930946 GN=tgt PE=3 SV=1
MFMPVGTQGAVKGVNTRTLKEIGSQFILANTYHLWVRPGDELIAQAGGLHKYMGWDQAILTDSGGFQVFSLSDARKLKEEGVTFQNHVNGDKMFLSPEVAMRIQNNLGSDVMMQLDEAIPYFETYDYIKDSMQRSLRWADRAQKYHQKTDTQALFGIVQGAGFRDLRTESATELVKMDLPGYAVGGLSVGESKTEMNRVLDFTVPLLPEDKPRYLMGVAAPDSLIDGVIRGIDMFDCVLPTRIGRKGTLMTSKGRVVIKNSRYKADFSPIDPDLTYYSDNPIRKNQFGNLAQYDLPNYSPYQNLSRSYLHHLFNANERLGAQIASEHNLRYLLHLMEEMRTAIEEDRLLEFRERILEEYGYNKKNARLF

SEQ ID NO: 55485 - protein, 405 aa, Fructobacillus pseudoficulneus
  misc_feature (1)..(405): tr|A0A3F3GS76|A0A3F3GS76_9LACT Queuine tRNA-ribosyltran sferase OS=Fructobacillus pseudoficulneus OX=220714 GN= tgt PE=3 SV=1
MTQQKGAVWYEHLHTEKHTGARRGRIHTPHGTFETPMFMPVGTQGAVKGVNNKTLKEIGSQFILANTYHLWVRPGDELIAEAGGLHKYMGWDQAILTDSGGFQVFSLSDSRKLDESGATFRNHVNGDKMFLSPEVAMRIQNNLGSDVMMQLDEAIPYFETYDYIKDSMQRSLRWADRAQQYHKKTDTQALFGIVQGAGFRDLRTESAQELVKMDLPGYAVGGLSVGESKVEMNRVLDFTMPLLPEDKPRYLMGVAAPDSLIDSVIRGVDMFDCVLPTRVGRKGTLMTRRGRVVIKNSKYKKDFSPIDPDLEYYSKNPIRTEQFGNLAQYDVPGYSPYQNLSRSYLHHLFNANELLAAEIASEHNLRYLLNLMEEMRTAIENDQLLEFRERVLEEYGYNKENARLF

SEQ ID NO: 55486 - protein, 405 aa, Fructobacillus sp.
  misc_feature (1)..(405): tr|A0A0J5PBL7|A0A0J5PBL7_9LACT Queuine tRNA-ribosyltran sferase OS=Fructobacillus sp. EFB-N1 OX=1658766 GN=tgt PE=3 SV=1
MTQQKGAVWYEHLHTEKHTGARRGRLHTPHGTFETPMFMPVGTQGAVKGVNNRTLKEIGSQFILANTYHLWVRPGDELIAEAGGLHKYMDWDQAILTDSGGFQVFSLSDSRKLSEEGATFRNHVNGDKMFLSPEVAMRIQNNLGSDVMMQLDEAIPYFETYEYIRDSMQRSLRWADRAQQYHKKTDTQALFGIVQGAGFRDLRTESAKELVKMDLPGYAVGGLSVGESKKEMNRVLDFTMPILPEDKPRYLMGVAAPDSLIDSVIRGVDMFDCVLPTRVGRKGTLMTKRGRVVIKNSKYKNDFSPIDSDLEYYSKNPIRTNQFGNLAQYDLPSYSPYQNLSRSYLHHLFNANELLGAQIASEHNLRYLLNLMEEMRTAIEEDRLLEFREQVLEDYGYNKANARLF

SEQ ID NO: 55487 - protein, 405 aa, Fructobacillus tropaeoli
  misc_feature (1)..(405): tr|A0A3F3H0S3|A0A3F3H0S3_9LACT Queuine tRNA-ribosyltran sferase OS=Fructobacillus tropaeoli OX=709323 GN=tgt PE =3 SV=1
MTQQKGAVWYEHLHTEKHTGARRGRLHTPHGTFETPMFMPVGTQGAVKGVNNRTLKEIGSQFILANTYHLWVRPGDELIAEAGGLHKYMGWDQAILTDSGGFQVFSLSDSRKLSEEGATFRNHVNGDKMFLSPEVAMRIQNNLGSDVMMQLDEAIPYFETYEYIRDSMQRSLRWADRAQQYHKKTDTQALFGIVQGAGFRDLRTESAKELVKMDLPGYAVGGLSVGESKKEMNRVLDFTMPILPEDKPRYLMGVAAPDSLIDSVIRGVDMFDCVLPTRVGRKGTLMTKRGRVVIKNSKYKNDFSPIDPDLEYYSKNPIRTNQFGNLAQYDLPSYSPYQNLSRSYLHHLFNANELLGAQIASEHNLRYLLNLMEEMRTAIEEDRLLEFREQVLEDYGYNKANARLF

SEQ ID NO: 55488 - protein, 372 aa, Fuerstia marisgermanicae
  misc_feature (1)..(372): tr|A0A1P8WLS0|A0A1P8WLS0_9PLAN Queuine tRNA-ribosyltran sferase OS=Fuerstia marisgermanicae OX=1891926 GN=tgt P E=3 SV=1
MTHFAFHLDATDTETAARAGRWETPHGVVDTPAFMPVGTLATVKGLLPEQLKATGAQMVLSNTYHLALRPGSDIVKEMGGLHKFMDWEGPILTDSGGFQVFSLAGLRKLTDEKAVFRSHIDGSLLELSPEKAVKIQEDLGADCIMCLDECPPANDVPEKIKAAVDRTTLWAKRCRDAQVRDDQALFGIVQGGISEEMRTRSAEGLVPLGFPGYAVGGLSVGEAPVDMYRTLDFTVPHLPVEKPRYLMGVGRPEDILEAVYRGIDLFDCVLPTRNGRNAMAFTSDGPVRLRNAVHQRDERPLDPECDCTACTRYSRAYLRHLFIAKEMLGGILLSLHNIAFYQKLVRDLRNAVNSGTVAQFRANQLARWQAQS

SEQ ID NO: 55489 - protein, 376 aa, Fulvimarina manganoxydans
  misc_feature (1)..(376): tr|A0A1W1YL75|A0A1W1YL75_9RHIZ Queuine tRNA-ribosyltran sferase OS=Fulvimarina manganoxydans OX=937218 GN=tgt P E=3 SV=1
MSDEFRFNLIATDGKARRGEITMPRGTVRTPAFMPVGTAGTVKAMYLDQVRDLGSDIILGNVYHLMLRPGAERVARLGGLHEFARWPYPILTDSGGFQIMSLADLRKLDERGVKFKSHVDGSEYELTPERSIEIQNLLDSDIQMQLDECIRLPAERAEIERAMELSLRWAERSAKAFGNQPGKAMFGIVQGGDVIDLRLRSAEALAAMDLKGYSVGGLAVGEPQEVMLKVLEETLPAMPGEKPRYLMGVGTPDDLLQSVARGIDMFDCVMPTRAGRHGLAYTRFGKINLRNARHADDPRPLDETSDCPATRDYSRAYLHHLVRANESLAGMLLTWTNLAYYQSLMAGMRSAIEAGRFADFRSETMEAWARGDIEAI

SEQ ID NO: 55490 - protein, 376 aa, Fulvimarina pelagi
  misc_feature (1)..(376): tr|Q0G037|Q0G037_9RHIZ Queuine tRNA-ribosyltransferase OS=Fulvimarina pelagi HTCC2506 OX=314231 GN=tgt PE=3 SV =1
MTERFRFNLLATNGKARRGEITMPRGTVRTPAFMPVGTAGTVKAMYLDQVRELGSDIILGNVYHLMLRPGAERVARLGGLHEFARWPYPILTDSGGFQVMSLADLRKLDETGVRFKSHIDGTEYSLTPERSIEIQGLLDSDIQMQLDECIRLPAERSEIERAMELSLRWAERSAKAFGDQPGKAMFGIVQGGDVPDLRIRSAEALAAMDLKGYSIGGLAVGEPQDVMLKTLEETLPVLPETKPRYLMGVGTPDDLLQSVARGVDMFDCVMPTRAGRHGLAYTRFGKINLRNARHAEDQRPLDETSDCPAARDYSRAYLHHLVRANESLAGMLLTWSNLAYYQSLMAGIRAAIETGRFDDFKTETEHGWKCGDLLPI

SEQ ID NO: 55491 - protein, 376 aa, Fulvimarina pelagi; identical to SEQ ID NO: 55490
  misc_feature (1)..(376): tr|A0A0N7KZ20|A0A0N7KZ20_9RHIZ Queuine tRNA-ribosyltran sferase OS=Fulvimarina pelagi OX=217511 GN=tgt PE=3 SV= 1

SEQ ID NO: 55492 - protein, 376 aa, Fulvimarina sp.
  misc_feature (1)..(376): tr|A0A2E1H7Z8|A0A2E1H7Z8_9RHIZ Queuine tRNA-ribosyltran sferase OS=Fulvimarina sp. OX=1969479 GN=tgt PE=3 SV=1
MTERFSFQLLATDGKARRGEITMPRGTVRTPAFMPVGTAGTVKAMYLDQVRALGADIILGNVYHLMLRPGAERVARLGGLHDFALWPHPILTDSGGFQVMSLAELRKLDEKGVTFRSHVDGSVHSLSPERSIEIQGLLDSDIQMQLDECIRLPAERAEIERAMELSLRWAERCKVAFGEQPGKAMFGIVQGGDQIDLRQRSASSLAGMDLKGYAVGGLAVGEPQAVMLATLDETVPVLPEEKPRYLMGVGTPDDLIRSVARGIDMFDCVMPTRAGRHGLAYTRRGKINLKNARHAEDHRPLDEESDCPAARDYSRAYLHHLVRSDESLGGMLLTWNNLAYYQDLMAGIRAAIEAKRYADFCEEVSGAWAKGDLPPL

SEQ ID NO: 55493 - protein, 376 aa, Fulvimarina sp.
  misc_feature (1)..(376): tr|A0A371X7G9|A0A371X7G9_9RHIZ Queuine tRNA-ribosyltran sferase OS=Fulvimarina sp. 85 OX=2293836 GN=tgt PE=3 SV =1
MTERFTFTLQATDGKARRGEITMPRGTVRTPAFMPVGTAGTVKAMYLDQVRDLGSDIILGNVYHLMLRPGAERVARLGGLHEFARWPHPILTDSGGFQVMSLAALRKLDERGVTFKSHIDGTEYELTPERSIEIQHLLDSDIQMQLDECIRLPAERAEIERAMELSLRWAERSAKAFGDQPGKAMFGIVQGGDVPDLRIRSAERLAAMDLKGYSIGGLAVGEPQAVMLKTLEETLPVLPEHKPRYLMGVGTPDDLLQSVARGIDMFDCVMPTRAGRHGLAYSCFGKINLRNARHADDHRPLDEASACPAARDYSRAYLHHLVRCNEALGGMLLTWINLAYYQDLMAGMRAAIEAGRFADFKAETEAGWARGDIAPL

SEQ ID NO: 55494 - protein, 374 aa, Fulvimonas soli
  misc_feature (1)..(374): tr|A0A316IGK5|A0A316IGK5_9GAMM Queuine tRNA-ribosyltran sferase OS=Fulvimonas soli OX=155197 GN=tgt PE=3 SV=1
MTSLTFDLLATDGAARRGRLSFDRGTVETPAFMPVGTYGSVKAMTPRDLVEVGAEVILGNTFHLFLRPGLEIVEKFGGLHRFIGWEKPVLTDSGGFQVFSLAHRRKLTEEGVTFASPVDGSKVFLSPEVSMKIQTVLDSDIAMIFDECTPYPATERQASDSMELSLRWAGRSRRAFDDLGNPNSLFGIVQGSVYEPLRRRSAEGLVGIGFDGYAVGGLAVGEPEAERNRTLDFTVALLPKDRPRYLMGVGRPEDIVEAVRRGIDMFDCVMPTRNARNGFLFVPEGTLRIRNARYADDTRVIEEGCDCYACAHGFSRAYLRHLDRCNEILASQLATMHNLRHYQRLMAGLREAIAAGRLEDFVAAFYARRQGAAG

SEQ ID NO: 55495 - protein, 376 aa, Fulvivirga imtechensis
  misc_feature (1)..(376): tr|L8JQL5|L8JQL5_9BACT Queuine tRNA-ribosyltransferase OS=Fulvivirga imtechensis AK7 OX=1237149 GN=tgt PE=3 SV =1
MEFKLEATDKGSKARTGIITTDHGEIKTPIFMPVGTAGSVKAVHQRELKEDIKAQIILGNTYHLYLRPGLEIIEKAGGLHKFNGWDRPILTDSGGYQVYSLSETRKIKEEGVTFKSHIDGSKHIFTPEAVMDIQRTIGADIIMAFDECTPYPCEYDYAEQSMHMTHRWLKRCCEYFDKTEGKYGYSQTLFPIVQGSVYKDLRKQSAEVIASYQREGNAIGGLSVGEPAEMMYEMTELVCDILPYDKPRYLMGVGTPANILECITLGIDMFDCVMPTRNARNGMLFTSEGIINIKNKKWESDFSPVDPELSGYVDTFYSKAYLRHLIISKEILGAQIASIHNLTFYLWLVGEARAQIEAGTFAEWKSGMVKKVSQRL

SEQ ID NO: 55496 - protein, 376 aa, Fulvivirga sp.
  misc_feature (1)..(376): tr|A0A553FFC4|A0A553FFC4_9BACT Queuine tRNA-ribosyltran sferase OS=Fulvivirga sp. M361 OX=2594266 GN=tgt PE=3 S V=1
MKFEIQGADSNSKARAGKVTTDHGDILTPIFMPVGTAGSVKAVHQRELENDIKAQIILGNTYHLYLRPGLDIIESAGGLHAFNGWRKPILTDSGGYQVYSLADSRKIKEEGVTFQSHIDGSKHVFTPENVMDIQRTIGADIIMAFDECTPYPCDYQYAKDSMHMTHRWLERCCHRFDATEGKYGYNQTLFPIVQGSVYKDLRKEAAETVASFGREGNAIGGLSVGEPAEMMYEMTELVCDILPVDKPRYLMGVGTPANLLECIALGIDMFDCVMPTRNARNGMLFTSEGIINIKNKKWEGDHGPIDPELGGYVDTFYSRAYLRHLIMSKEILGAQIASIHNLTFYLWLMNSAREEIQKGTFFDWKSGMVEKVNRRL

SEQ ID NO: 55497 - protein, 376 aa, Fusibacter sp.
  misc_feature (1)..(376): tr|A0A1B6BFU4|A0A1B6BFU4_9FIRM Queuine tRNA-ribosyltran sferase OS=Fusibacter sp. 3D3 OX=1048380 GN=tgt PE=3 SV =1
MAIRYELIKECKQTGARLGRLHTPHGVIETPIFMPVGTQATVKAMTPEELKEMNAQIILSNTYHLYLRPGHDLVRAAGGLHKFMNWDRPILTDSGGFQVFSLGDLRKITEEGVEFQSHIDGSKHFLTPEKVMEIETALGADIIMAFDECAPFPAEWQYVKDSLERTTRWAVRCKAAHTNTDNQALFGIVQGGMYRDLREQSAKELVALDFPGYSIGGLSVGEPKELMYEVLDYTTPLLPKNKPRYLMGVGSPDALIEGSIRGIDMFDCVLPTRIARNGTAMTSQGKVIIKNAKYTRDFTPLDPECDCYACKHYTRAYIRHLYKADEILSSRLLSTHNLHFLINLMKQVREAIMEDRLGDFRNAFFAKYYGETSKED

SEQ ID NO: 55498 - protein, 372 aa, Fusibacter sp.
  misc_feature (1)..(372): tr|A0A4V1PPH1|A0A4V1PPH1_9FIRM Queuine tRNA-ribosyltran sferase OS=Fusibacter sp. A1 OX=2283630 GN=tgt PE=3 SV= 1
MAVKYELIKTCKQSGARLGRLTTPHGVIDTPIFMPVGTKATVKAMTPEEVEGLGAQIILSNTYHLYMRPGHDLIKEAGGLHKFMNWNKPILTDSGGFQVFSLGSLRKIKEEGVEFRSHIDGSKHFISPEKAVEIQTALGSDIMMAFDECAPYPAEHDYVKKSLERTTRWAKRCKDAHTNTENQALFGIVQGGMYKDLREQSVRELVALDFPGYAIGGLSVGEPKDLMYEVLDYTAPLLPEDKARYLMGVGSPDALFEGAIRGIDMFDCVLPTRTARMGTAMTSVGPVSIKQAKYQRDFTTLDAECECYTCKNYTKAYLRHLYKENEILSARLFTIHNLHFLINLMSEIRQAIMDDRLLDFKNEFFKKYGYES

SEQ ID NO: 55499 - protein, 378 aa, Fusicatenibacter saccharivorans
  misc_feature (1)..(378): tr|A0A174IBW5|A0A174IBW5_9FIRM Queuine tRNA-ribosyltran sferase OS=Fusicatenibacter saccharivorans OX=1150298 G N=tgt PE=3 SV=1
MYKILKMEGRAKRAHMETVHGNIETPVFMNVGTAAAIKGAVSTEDLQQIGTQVELSNTYHLHVRPGDEVVKKMGGLHKFMVWDKPILTDSGGFQVFSLAGLRKIKEEGVYFHSHVDGRKIFMGPEESMQIQSNLASTIAMAFDECPSSVAERRYVQNSVDRTARWLQRCKNKMQELNQREDTINKHQLLFGINQGAIYEDIRIDHAKRISEMDLDGYAVGGLAVGESHEEMYHILDEVVPYLPKDKPTYLMGVGTPANILEGVERGIDFFDCVYPSRNGRHGHVYTNHGKMNLFNQKYELDPRPIEEGCQCPACRHYSRAYIRHLLKAKEMLGMRLCVLHNLYFYNNMMTEIRTALDEGSFASYKRAKLAGFEEYDKK

SEQ ID NO: 55500 - protein, 379 aa, Fusicatenibacter saccharivorans
  misc_feature (1)..(379): tr|A0A174PVN9|A0A174PVN9_9FIRM Queuine tRNA-ribosyltran sferase OS=Fusicatenibacter saccharivorans OX=1150298 G N=tgt PE=3 SV=1
MYKILKMEGRAKRAHMETVHGNIETPVFMNVGTAAAIKGAVSTEDLQQIGTQVELSNTYHLHVRPGDEVVKKMGGLHKFMVWDKPILTDSGGFQVFSLAGLRKIKEEGVYFHSHVDGRKIFMGPEESMQIQSNLASTIAMAFDECPSSVADRRYVQNSVDRTTRWLQRCKDKMQELNQREDTINKHQLLFGINQGAIYEDIRIDHAKRISEMDLDGYAVGGLAVGETHEEMYHILDEVVPYLPKEKPTYLMGVGTPANILEGVERGVDFFDCVYPSRNGRHGHVYTNHGKMNLFNQKYELDPRPIEEGCQCPACRHYSRAYIRHLLKAKEMLGMRLCVLHNLYFYNNMMTEIRTALDEGNFASYKRAKLAGFEEYDKKE

SEQ ID NO: 55501 - protein, 377 aa, Fusicatenibacter sp.; identical to SEQ ID NO: 54888
  misc_feature (1)..(377): tr|A0A174WUL3|A0A174WUL3_9FIRM Queuine tRNA-ribosyltran sferase OS=Fusicatenibacter sp. 2789STDY5834925 OX=1806 509 GN=tgt PE=3 SV=1

SEQ ID NO: 55502 - protein, 387 aa, Fusobacteriaceae bacterium
  misc_feature (1)..(387): tr|A0A349GT35|A0A349GT35_9FUSO Queuine tRNA-ribosyltran sferase OS=Fusobacteriaceae bacterium OX=2053555 GN=tgt PE=3 SV=1
MNKLPVNYELSHIDGKARAGVITTPHGNIKTPVFMPVGTQATVKTMNPEEVRELGADIILGNTYHLFLRPGDDVVAKFGGLHKFMNWPHPILTDSGGFQVFSLGAIRKIKEEGVYFRSHIDGSRRFISPEKSIDIQNNLGSDIVMLFDECPPGQSSREYLIPSIERTTRWAKRCVTAHKKPNEQGLFAIVQGGIYEDLRDKSMNELMEMDESFSGYAIGGLAVGEPREDMYRILDYITPKLPEHKPRYLMGVGEPLDMLEAVEHGVDMMDCVQPSRIGRHGTTFTKYGRLVIKNAKYALDPRPLDEDCDCYVCKNYTRGYIRHLFKANEMLGQKLATYHNLYFLIKMMNGARDAIINKRFVAFKEEFIENYTQGKDSEWIIPQRIEE

SEQ ID NO: 55503 - protein, 374 aa, Fusobacterium canifelinum
  misc_feature (1)..(374): tr|A0A3P1USQ8|A0A3P1USQ8_9FUSO Queuine tRNA-ribosyltran sferase OS=Fusobacterium canifelinum OX=285729 GN=tgt P E=3 SV=1
MKLPVTYKIEDKDGKARAGVITTPHGEIETPVFMPVGTQATVKTMSKEELFDIGSEIILGNTYHLYLRPNDELIARLGGLHKFMNWDKPILTDSGGFQVFSLGSLRKIKEEGVYFSSHIDGSKHFISPEKSIQIQNNLGSDIVMLFDECPPGLSTREYIIPSIERTTRWAKRCVEAHQKKDSQGLFAIVQGGIYEDLRQKSLDELSQMDENFSGYAIGGLAVGESREDMYRILDYIVEKCPEEKPRYLMGVGEPVDMLNAVESGIDMMDCVQPTRLARHGTVFTKDGRLVIKSERYKEDTKPLDEECDCYVCKNYSRAYIRHLIKVQEVLGLRLTSYHNLYFLIKLMKDAREAIKEKRFKEFKEKFIQRYEGKE

SEQ ID NO: 55504 - protein, 379 aa, Fusobacterium equinum
  misc_feature (1)..(379): tr|A0A133NEZ9|A0A133NEZ9_9FUSO Queuine tRNA-ribosyltran sferase OS=Fusobacterium equinum OX=134605 GN=tgt PE=3 SV=1
MKKLPVTYTLEMTDGKARAGKIQTPHGIIETPVFMPVGTQATVKAMTKEELDDIGTQIILGNTYHLFLRPGDDLIDRLGGLHQFMSWKKPILTDSGGFQVFSLGALRKIKEEGVYFSSHIDGSKRFISPEKSIEIQNHLGSDIAMLFDECPPGLSTREYLIPSIERTTRWAKRCVEAHQKADKQGLFAIVQGGIYEDLRQKSLEELLEMDEHFSGYAIGGLAVGEPREDMYRILDSIVEKCPENKPRYLMGVGEPIDMLEAVESGIDMMDCVQPTRIARHGTVFTKHGRLVIKNAEYAEDTRALDEECDCYVCRNYSRAYIRHLLKVDEILGARLTSYHNLYFLVQLMKDAREAIKKGEFQKFKKEFIDKYNINIHRRK

SEQ ID NO: 55505 - protein, 379 aa, Fusobacterium gonidiaformans; identical to SEQ ID NO: 55504
  misc_feature (1)..(379): tr|E5BEF9|E5BEF9_9FUSO Queuine tRNA-ribosyltransferase OS=Fusobacterium gonidiaformans 3-1-5R OX=469605 GN=tgt PE=3 SV=1

SEQ ID NO: 55506 - protein, 373 aa, Fusobacterium hwasookii
  misc_feature (1)..(373): tr|A0A0S2ZHN6|A0A0S2ZHN6_9FUSO Queuine tRNA-ribosyltran sferase OS=Fusobacterium hwasookii ChDC F300 OX=1307444 GN=tgt PE=3 SV=1
MKLPVTYKIEDKDGKARAGVITTPHGEIETPVFMPVGTQATVKTMSKEELIDIGSEIILGNTYHLYLRPNDELIARLGGLHKFMNWNKPILTDSGGFQVFSLGSLRKIKEEGVYFSSHIDGSKHFISPEKSIQIQNNLGSDIVMLFDECPPGLSTREYIIPSIERTTRWAKRCVEAHKNKDSQGLFAIVQGGIYEDLRQKSLDELSEMDKHFSGYAIGGLAVGEPREDMYRILDYIVEKCPEEKPRYLMGVGEPVDMLNAVESGIDMMDCVQPTRLARHGTVFTKDGRLVIKSERYKEDTKPLDEECDCYVCKNYSRAYIRHLIKVQEVLGLRLTSYHNLYFLIKLMKDAREAIKEKRFKEFKEKFIQRYEGK

SEQ ID NO: 55507 - protein, 373 aa, Fusobacterium hwasookii
  misc_feature (1)..(373): tr|J8VGG6|J8VGG6_9FUSO Queuine tRNA-ribosyltransferase OS=Fusobacterium hwasookii ChDC F128 OX=1216362 GN=tgt PE=3 SV=1
MKLPVTYKIEDKDGKARAGVITTPHGEIETPVFMPVGTQATVKTMSKEELLDIGSEIILGNTYHLYLRPNDELIARLGGLHKFMNWNKPILTDSGGFQVFSLGSLRKIKEEGVYFSSHIDGSKHFISPEKSIQIQNNLGSDIVMLFDECPPGLSTREYIIPSIERTTRWAKRCVEAHKNKDSQGLFAIVQGGIYEDLRQKSLDELSEMDEHFSGYAIGGLAVGETREDMYRILDYIVEKCPEEKPRYLMGVGEPVDMLNAVESGIDMMDCVQPTRLARHGTVFTKDGRLVIKSERYKEDTKPLDEECDCYVCKNYSRAYIRHLIKVQEVLGLRLTSYHNLYFLIKLMKDAREAIKEKRFKEFKENFIQRYEGK

SEQ ID NO: 55508 - protein, 388 aa, Fusobacterium mortiferum
  misc_feature (1)..(388): tr|C3WCD2|C3WCD2_FUSMR Queuine tRNA-ribosyltransferase OS=Fusobacterium mortiferum ATCC 9817 OX=469616 GN=tgt PE=3 SV=1
MTKKLPVTYELQKKSGKARAGKITTPHGEIETPVFMPVGTQATVKAMTPEELEAIGSQIILGNTYHLYLRPSDELVAKFGGLHKFMNWKKPILTDSGGFQVFSLGALRKITEEGVRFSSHLDGSKHFLTPEKSINIQNNLGSDIVMLFDECPPGLSSREYMIPSIERTTRWAKRCIEAHKRPDEQGLFAIVQGGIYEDLRDKSLRELSEMDEHFSGYAIGGLAVGEPREDMYRILDYIVEKCPENKPRYLMGVGEPLDMLEAVESGIDMMDCVQPTRIGRHGTVFTKYGRLVIKNAMYSEDDRPLDEDCDCYVCRNFKRGYIRHLFKAEEILGQRLATYHNLYFLIKLMKNAREAILEDRFTEFKEEFIRNYNMGKESDWIKPKKIGE

SEQ ID NO: 55509 - protein, 388 aa, Fusobacterium mortiferum
  misc_feature (1)..(388): tr|A0A414PML5|A0A414PML5_FUSMR Queuine tRNA-ribosyltran sferase OS=Fusobacterium mortiferum OX=850 GN=tgt PE=3 SV=1
MTKKLPVTYELQKKSGKARAGKITTPHGEIETPVFMPVGTQATVKAMTPEELEAIGSQIILGNTYHLYLRPSDELVAKFGGLHKFMNWKKPILTDSGGFQVFSLGALRKITEEGVRFSSHLDGSKHFLTPEKSINIQNNLGSDIVMLFDECPPGLSSREYMIPSIERTTRWAKRCIEAHKRPDEQGLFAIVQGGIYEDLRDKSLRELSEMDEHFSGYAIGGLAVGEPREDMYRILDYIVEKCPENKPRYLMGVGEPLDMLEAVESGIDMMDCVQPTRIGRHGTVFTKYGRLVIKNAMYSEDDRPLDEDCDCYVCRNFKRGYIRHLFKAEEILGQRLATYHNLYFLIKLMKNAREAILEDRFTEFKEEFIKNYNMGKESDWIKPKKIGE

SEQ ID NO: 55510 - protein, 383 aa, Fusobacterium naviforme
  misc_feature (1)..(383): tr|A0A2P8EK60|A0A2P8EK60_9FUSO Queuine tRNA-ribosyltran sferase OS=Fusobacterium naviforme OX=77917 GN=tgt PE=3 SV=1
MKYKILATEGRAKRAHMETVHGSIETPVFMNVGTVAAIKGAVSTDDLKEIGTQVELSNTYHLHVRPGDRERSGDELIRAFGGLHRFMHWDRPILTDSGGFQVFSLAGLRKIREEGVTFHSHIDGRKIFMGPEESITIQSNLGSTIAMAFDECPPSLAERSYIEKSVARTTRWLRRCKEKIAELNGREDTVNREQLLFGINQGGILEDVRIAHADEISAMDCDGYAVGGLAVGESAEEMYRILDAVVPHLPKEKPTYLMGVGTPVNILEGVERGVDFFDCVYPSRNGRHGHVYTNQGKLNLFNRKYELDSRPIEEGCGCPACRSYSRAYIRHLLKAGEMLGMRLCVLHNLYFYNTMMYEIRESIEQGRFAEYKKKKMEGMEAKA

SEQ ID NO: 55511 - protein, 388 aa, Fusobacterium necrogenes
  misc_feature (1)..(388): tr|A0A377GWN0|A0A377GWN0_9FUSO Queuine tRNA-ribosyltran sferase OS=Fusobacterium necrogenes OX=858 GN=tgt PE=3 SV=1
MTKKLPVTYELQKKSGKARAGKITTPHGEIETPVFMPVGTQATVKAMTPEELEAIGSQIILGNTYHLYLRPSDELVAKFGGLHKFMNWKKPILTDSGGFQVFSLGALRKITEEGVRFSSHLDGSKHFLTPEKSINIQNNLGSDIVMLFDECPPGLSSREYMIPSIERTTRWAKRCIEAHKRPDEQGLFAIVQGGIYEDLRDKSLRELSEMDEHFSGYAIGGLAVGEPREDMYRILDYIVEKCPENKPRYLMGVGEPLDMLEAVESGIDMMDCVQPTRIGRHGTVFTKYGRLVIKNAMYSEDDRPLDEDCDCYVCRNFKRGYIRHLFKAEEILGQRLATYHNLYFLIKLMKNAREAILEDRFTEFKEEFIRNYNMGKEFDWIKPKKIVG

SEQ ID NO: 55512 - protein, 379 aa, Fusobacterium necrophorum
  misc_feature (1)..(379): tr|A0A2P1RLU7|A0A2P1RLU7_9FUSO Queuine tRNA-ribosyltran sferase OS=Fusobacterium necrophorum subsp. funduliform e OX=143387 GN=tgt PE=3 SV=1
MKKLPITYTLESKDGRARVGRIQTPHGEIETPVFMPVGTQATVKAMTKEELDEIGTQIILGNTYHLFLRPGDDVIDRLGGLHSFMNWKKPILTDSGGFQVFSLGALRKIQEEGVYFRSHIDGSKRFISPEKSIEIQNHLGSDIAMLFDECPPGLSSREYLIPSIERTTRWAKRCVEAHQKAEKQGLFAIVQGGVYEDLRQKSLEELLEMDEHFSGYAIGGLAVGEPREDMYRILDYIVEKCPENKPRYLMGVGEPLDMLEAVESGIDMMDCVQPTRIARHGTVFTKQGRLVVKNAEYAEDTKPLDEECHCYVCRNYSRAYIRHLLKVDEILGARLTSYHNLYFLVHLMKDARIAIQEGRFQQFKAEFIEKYNTNQHRRK

SEQ ID NO: 55513 - protein, 379 aa, Fusobacterium necrophorum
  misc_feature (1)..(379): tr|J5TR32|J5TR32_9FUSO Queuine tRNA-ribosyltransferase OS=Fusobacterium necrophorum subsp. funduliforme Fnf 10 07 OX=1161424 GN=tgt PE=3 SV=1
MKKLPITYTLESKDGRARAGRIQTPHGEIETPVFMPVGTQATVKAMTKEELDEIGTQIILGNTYHLFLRPGDDVIDRLGGLHSFMNWKKPILTDSGGFQVFSLGALRKIQEEGVYFRSHIDGSKRFISPEKSIEIQNHLGSDIAMLFDECPPGLSSREYLIPSIERTTRWAKRCVEAHQKAEKQGLFAIVQGGVYEDLRQKSLEELLEMDEHFSGYAIGGLAVGEPREDMYRILDYIVEKCPENKPRYLMGVGEPLDMLEAVESGIDMMDCVQPTRIARHGTVFTKQGRLVVKNAEYAEDTKPLDEECHCYVCRNYSRAYIRHLLKVDEILGARLTSYHNLYFLVHLMKDARIAIQEGRFQQFKAEFIEKYNTNQHRRK

SEQ ID NO: 55514 - protein, 373 aa, Fusobacterium nucleatum
  misc_feature (1)..(373): sp|Q8RDN0|TGT_FUSNN Queuine tRNA-ribosyltransferase OS= Fusobacterium nucleatum subsp. nucleatum (strain ATCC 2 5586 / CIP 101130 / JCM 8532 / LMG 13131) OX=190304 GN= tgt PE=3 SV=1
MKLPVTYKVEDKDGKARAGVITTLHGEIETPVFMPVGTQATVKTMSKEELLDIGSEIILGNTYHLYLRPNDELIARLGGLHKFMNWDRPILTDSGGFQVFSLGSLRKIKEEGVYFSSHIDGSKHFISPEKSIQIQNNLGSDIVMLFDECPPGLSTREYIIPSIERTTRWAKRCVEAHQKKDIQGLFAIVQGGIYEDLRQKSLDELSEMDENFSGYAIGGLAVGEPREDMYRILDYIVEKCPEEKPRYLMGVGEPVDMLNAVESGIDMMDCVQPTRLARHGTVFTKDGRLVIKSERYKEDTKPLDEECDCYVCKNYSRAYIRHLIKVQEVLGLRLTSYHNLYFLIKLMKDAREAIKEKRFKEFKEKFIQRYEGK

SEQ ID NO: 55515 - protein, 374 aa, Fusobacterium nucleatum
  misc_feature (1)..(374): tr|U7T267|U7T267_FUSNU Queuine tRNA-ribosyltransferase OS=Fusobacterium nucleatum CTI-5 OX=1316586 GN=tgt PE=3 SV=1
MKLPITYKIENKDGKARAGVITTPHGEIETPVFMPVGTQATVKTMSKEELIDIGSEIILGNTYHLYLRPNDELIARLGGLHKFMNWDRPILTDSGGFQVFSLGSLRKIKEEGVYFSSHIDGSKHFISPEKSIQIQNNLGSDIAMLFDECPPGLSSREYIIPSIERTTRWAKRCVEAHQKKDSQGLFAIVQGGIYEDLRQKSLDELSEMDENFSGYAIGGLAVGEPREDMYRILDYIVEKCPEEKPRYLMGVGEPVDMLNAVESGIDMMDCVQPTRLARHGTVFTKDGRLVIKSERYKEDTKPLDEECDCYVCRNYSRAYIRHLIKVQEVLGLRLTSYHNLYFLIKLMKDARKAIKEKRFKEFKENFIKRYENKK

SEQ ID NO: 55516 - protein, 378 aa, Fusobacterium periodonticum
  misc_feature (1)..(378): tr|D4CSN7|D4CSN7_9FUSO Queuine tRNA-ribosyltransferase OS=Fusobacterium periodonticum ATCC 33693 OX=546275 GN= tgt PE=3 SV=1
MIGELMKLAVTYKVENKDGKARAGLITTPHGEIETPVFMPVGTQATVKTMSKEELIDIGSEIILGNTYHLYLRPNDELIAKLGGLHKFMNWDKPILTDSGGFQVFSLGSLRKIKEEGVYFSSHIDGSKHFISPEKSIQIQNNLGSDIVMLFDECPPGLSTREYIIPSIERTTRWAKRCVEAHQKKDSQGLFAIVQGGIYEDLRQKSLDELSEMDEHFSGYAIGGLAVGEPREDMYRILDYIVEKCPEDKPRYLMGVGEPVDMLNAVESGIDMMDCVQPTRLARHGTVFTKKGRLIIKSERYKEDTAPLDEECDCYVCKNYSRAYIRHLIKVQEVLGLRLTSYHNLHFLIKLMKDAREAIKEKRFKEFKNDFIKKYEGK

SEQ ID NO: 55517 - protein, 373 aa, Fusobacterium periodonticum
  misc_feature (1)..(373): tr|A0A2D3NPY0|A0A2D3NPY0_9FUSO Queuine tRNA-ribosyltran sferase OS=Fusobacterium periodonticum OX=860 GN=tgt PE =3 SV=1
MKLAVTYKVENKDGKARAGLITTPHGEIETPVFMPVGTQATVKTMSKEELIDIGSEIILGNTYHLYLRPNDELIARLGGLHKFMNWDKPILTDSGGFQVFSLGSLRKIKEEGVYFSSHIDGSKHFISPEKSIQIQNNLGSDIVMLFDECPPGLSTREYIIPSIERTTRWAKRCVEAHQKKDTQGLFAIVQGGIYEDLRQKSLDELSEMDEHFSGYAIGGLAVGEPREDMYRILDYIVEKCPEDKPRYLMGVGEPVDMLNAVESGIDMMDCVQPTRLARHGTVFTKKGRLIIKSERYKEDTAPLDEECDCYVCKNYSRAYIRHLIKVQEVLGLRLTSYHNLHFLIKLMKDAREAIKEKRFKEFKDDFIKKYEGK

SEQ ID NO: 55518 - protein, 373 aa, Fusobacterium sp.
  misc_feature (1)..(373): tr|A0A1E9EJC7|A0A1E9EJC7_9FUSO Queuine tRNA-ribosyltran sferase OS=Fusobacterium sp. HMSC064B12 OX=1739279 GN=t gt PE=3 SV=1
MKLPVRYKIEDKDGKARAGVITTPHGEIKTPVFMPVGTQATVKTMSKEELLAIGSEIILGNTYHLYLRPNDELIARLGGLHKFMNWDKPILTDSGGFQVFSLGSLRKIKEEGVYFSSHIDGSKHFISPEKSIQIQNNLGSDIAMLFDECPPGLSTREYIIPSIERTTRWAKRCVEAHQKKDSQGLFAIVQGGIYEDLRQKSLDELSEMDENFSGYAIGGLAVGEPREDMYRILDYIVEKCPEEKPRYLMGVGEPVDMLNAVESGIDMMDCVQPTRLARHGTVFTKDGRLVIKSERYKEDIKPLDEECDCYVCKNYSRAYIRHLIKVQEVLGLRLTSYHNLYFLIKLMKDARRAIKEKRFKEFKENFIKRYENK

SEQ ID NO: 55519 - protein, 374 aa, Fusobacterium sp.
  misc_feature (1)..(374): tr|R5X085|R5X085_9FUSO Queuine tRNA-ribosyltransferase OS=Fusobacterium sp. CAG:649 OX=1262900 GN=tgt PE=3 SV= 1
MKLPITYKIENKDGKARAGVITTPHGEIETPVFMPVGTQATVKTMSKEELIDIGSEIILGNTYHLYLRPNDELIARLGGLHKFMNWDKPILTDSGGFQVFSLGSLRKIKEEGVYFSSHIDGSKHFISPEKSIQIQNNLGSDIAMLFDECPPGLSSREYIIPSIERTTRWAKRCVEAHQKKDSQGLFAIVQGGIYEDLRQKSLDELSEMDENFSGYAIGGLAVGEPREDMYRILDYIVEKCPEEKPRYLMGVGEPVDMLNAVESGIDMMDCVQPTRLARHGTVFTKDGRLVIKSERYKEDTKPLDEECDCYVCKNYSRAYIRHLIKVQEVLGLRLTSYHNLYFLIKLMKDARKAIKEKRFKEFKENFIKRYENKK

SEQ ID NO: 55520 - protein, 389 aa, Fusobacterium ulcerans
  misc_feature (1)..(389): tr|H1PPK1|H1PPK1_9FUSO Queuine tRNA-ribosyltransferase OS=Fusobacterium ulcerans 12-1B OX=457404 GN=tgt PE=3 S V=1
MTIKLPVTYELVKKQGKARAGKITTPHGEIETPVFMPVGTQATVKTMTPEELETIGAEIILGNTYHLYLRPSDELIAKFGGLHKFMNWNKPILTDSGGFQVFSLGALRKITEEGVKFSSHIDGSKHFLSPEKSIDIQNNLGSDIVMLFDECPPGLSTREYIIPSIERTTRWAKRCIEAHKRPDEQGLFAIVQGGVYEDLRDKSLNELMEMDESFSGYAIGGLAVGEPREDMYRILHHIVERCPEDKPRYLMGVGEPLDMLEAIEAGIDMMDCVQPSRIGRHGTVFTKYGRLVIKNASYAEDDRPLDEDCDCYVCRNYTRGYIRHLFKAEEILGQRLATYHNLYFLLKLMKNARKAILADNFEEYKDNFVKNYTMGKESEWIKPKKISEK

SEQ ID NO: 55521 - protein, 389 aa, Fusobacterium ulcerans; identical to SEQ ID NO: 55520
  misc_feature (1)..(389): tr|A0A2P1S874|A0A2P1S874_9FUSO Queuine tRNA-ribosyltran sferase OS=Fusobacterium ulcerans OX=861 GN=tgt PE=3 SV =1

SEQ ID NO: 55522 - protein, 385 aa, Fusobacterium varium
  misc_feature (1)..(385): tr|A0A250LVH6|A0A250LVH6_FUSVA Queuine tRNA-ribosyltran sferase OS=Fusobacterium varium OX=856 GN=tgt PE=3 SV=1
MTIKLPVTYELVKKQGKARAGKITTPHGEIETPVFMPVGTQATVKTMTPEELETIGAEIILGNTYHLYLRPSDELIAKFGGLHKFMNWNKPILTDSGGFQVFSLGALRKITEEGVKFSSHIDGSKHFLSPEKSIDIQNNLGSDIVMLFDECPPGLSTREYIIPSIERTTRWAKRCIEAHKRPNEQGLFAIVQGGVYEDLRDKSLNELMEMDESFSGYAIGGLAVGEPREDMYRILHHIVEKCPEEKPRYLMGVGEPLDMLEAVEAGIDMMDCVQPSRIGRHGTVFTKYGRLVIKNASYAEDDRPLDEECDCYVCKNYTRGYIRHLFKAEEILGQRLATYHNLYFLLKLMKNARKAILADKFEEYKNNFIKNYILGKDSEWIKPKK

SEQ ID NO: 55523 - protein, 389 aa, Fusobacterium varium
  misc_feature (1)..(389): tr|A0A414TLH8|A0A414TLH8_FUSVA Queuine tRNA-ribosyltran sferase OS=Fusobacterium varium OX=856 GN=tgt PE=3 SV=1
MTIKLPVTYELVKKQGKARAGKITTPHGEIETPVFMPVGTQATVKTMTPEELETIGAEIILGNTYHLYLRPSDELIAKFGGLHKFMNWNKPILTDSGGFQVFSLGALRKITEEGVKFSSHIDGSKHFLSPEKSIEIQNNLGSDIVMLFDECPPGLSTREYIIPSIERTTRWAKRCIEAHKRPDEQGLFAIVQGGVYEDLRDKSLNELMEMDNSFSGYAIGGLAVGEPREDMYRILHHIVERCPEEKPRYLMGVGEPLDMLEAVEAGIDMMDCVQPSRIGRHGTVFTKYGRLVIKNASYAEDDRPLDEDCDCYVCRNYTRGYIRHLFKAEEILGQRLATYHNLYFLLKLMKNARKAILADKFEEYKNDFVKNYTLGKESEWIKPKKIIEK

SEQ ID NO: 55524 - protein, 376 aa, Gaetbulibacter sp.
  misc_feature (1)..(376): tr|A0A2G5GM70|A0A2G5GM70_9FLAO Queuine tRNA-ribosyltran sferase OS=Gaetbulibacter sp. 4G1 OX=1891971 GN=tgt PE= 3 SV=1
MTFELKAKDSQSKARAGEVTTDHGVIETPIFMPVGTVATVKGVHQRELKEEINPDIILGNTYHLYLRPQTHILEKAGGLHKFMNWDRSILTDSGGYQVYSLSANRKIKEEGVKFKSHIDGSYHTFTPENVMEIQRTIGADIIMAFDECTPYPCDYNYAKRSMHMTHRWLDRCINHLEKTPLKYDYSQAFFPIVQGSTYKDLRMQSAEYIANSGAVGNAIGGLSVGEPAEEMYAMTDVVCSILPEDKPRYLMGVGTPINILENIALGVDMFDCVMPTRNARNGMLFTAHGTINIKNLKWADDFSPIDEMGITFVDTEYSKAYLRHLFTVNELLGKQIATIHNLGFYLWLVREARKHILAGDFGIWKDKMVKQMNNRL

SEQ ID NO: 55525 - protein, 376 aa, Gaetbulibacter sp.
  misc_feature (1)..(376): tr|A0A2G5KN86|A0A2G5KN86_9FLAO Queuine tRNA-ribosyltran sferase OS=Gaetbulibacter sp. 5U11 OX=1889780 GN=tgt PE =3 SV=1
MTFDLKAKDTQSNARAGVITTDHGVIETPIFMPVGTAGTVKGVHQRELKDDINPDIILGNTYHLYLKPQIDVLEKAGGLHKFMNWDRNILTDSGGYQVYSLSGNNKIKEEGVKFKSHIDGSYHTFTPENVMEIQRSIGADIIMAFDECTPYPCEYNYARRSMHMTHRWLERCLTHLDKTPFKYDYSQSFFPIVQGSTYKDLRKQSAEYIAGVGAEGNAIGGLSVGEPAEEMYAMTEVVTDILPWDKPRYLMGVGTPINILENIALGVDMFDCVMPTRNARNGMLFTAYGSINIKNLKWRDDFSPIDEMGITYVDTEYSKAYLRHLFNTNELLGKQIATIHNLGFYLWLTREARKHILAGDFRAWKDKMVKQMNNRL

SEQ ID NO: 55526 - protein, 368 aa, Gaiellales bacterium
  misc_feature (1)..(368): tr|A0A419GRL2|A0A419GRL2_9ACTN Queuine tRNA-ribosyltran sferase OS=Gaiellales bacterium OX=2093372 GN=tgt PE=3 SV=1
MPLTGFSLQAVDGPARSGLLTTPHGAVETPCFMPVGTQATVKTLSPRDLREAGAGIVLANAYHLYFRPGVETVESLGALHRFMSWDGPILTDSGGFQVFSLAARARVKGDGVEFRSIYDGSRHFFTPELATDIQQRLGADIIMCFDECVPAGADRAYLEESVRRTAAWAARCRRSHQRDDQMLMGIVQGGIDLQLRRESVELTLELDFPGYAIGGLSVGEERGAMLEAMAFTAGLLPAEKPRYFMGLGDPEGILDAIAAGIDMFDCVLPTRAARNGGAYTSGGRLNLKNARFARDAGPLDPQCGCYACTGFSRAYLRHLVTQKEILGLRLLSLHNVTFLLDLTRQAREAIKVGRFTQFRASVRLEPES

SEQ ID NO: 55527 - protein, 376 aa, Galbibacter marinus
  misc_feature (1)..(376): tr|K2PS29|K2PS29_9FLAO Queuine tRNA-ribosyltransferase OS=Galbibacter marinus OX=555500 GN=tgt PE=3 SV=1
MDFKILAKDTAGKARAATITTDHGTIETPIFMPVGTVASVKGVHQRELKEDINPDIILGNTYHLYLRPKTPILEAAGGLHKFMNWDRNILTDSGGYQVYSLSGTRKIKEEGVKFKSHIDGSYHVFSPENVMDIQRTIGADIIMAFDECTPYPCDYNYAKRSMHMTHRWLDRCINRFQQTQPKYGYNQTLFPIVQGSTYKDLRIQSAEYIANAGAQGNAIGGLSVGEPAEEMYAMTEVVCDILPEDKPRYLMGVGTPINILENIALGVDMFDCVMPTRNARNGMLFTAHGTINIKNKKWEDDFSPIDEMGITYVDTYYSKAYLRHLFAANEYLGKQIATIHNLGFYLWLVRQARKHILAGDFTTWKNTMVKQMDKRL

SEQ ID NO: 55528 - protein, 372 aa, Gallaecimonas pentaromativorans
  misc_feature (1)..(372): tr|A0A3N1P9J1|A0A3N1P9J1_9GAMM Queuine tRNA-ribosyltran sferase OS=Gallaecimonas pentaromativorans OX=584787 GN =tgt PE=3 SV=1
MKYELFNTDGQARRGQLVFERGTVQTPAFMPVGTYGTVKGMTPEEVADTGAEILLGNTFHLWLRPGQDVMKAHGDLHDFMHWHGPILTDSGGFQVFSLGDIRKITEAGVHFRNPINGDKIFLDPEKSMEIQTDLGSDIVMIFDECTPYPATHDEAKKSMEMSLRWAKRSRDHFDKLENPNALFGIIQGSVYEDLRDVSIKGLTEIGFDGYAVGGLAVGEPKDDMHRILSHVNPQLPADKPRYLMGVGKPEDLVEGVRRGIDMFDCVMPTRNARNGHLFVTEGVIKIRNAKHRSDTSPLDGECDCYTCKHYSKAYLHHLDRCNEILGARLNTIHNLRYYQRVMEGLRGAIEQGRLDAFVKDFYERKGMEVPAL

SEQ ID NO: 55529 - protein, 372 aa, Gallaecimonas xiamenensis
  misc_feature (1)..(372): tr|K2JKE2|K2JKE2_9GAMM Queuine tRNA-ribosyltransferase OS=Gallaecimonas xiamenensis 3-C-1 OX=745411 GN=tgt PE= 3 SV=1
MKYELFNTDGQARRGQLVFERGIVQTPAFMPVGTYGTVKGMTPEEVADTGAEILLGNTFHLWLRPGQEVMKAHGDLHDFMHWHGPILTDSGGFQVFSLGDIRKITEEGVHFRNPINGDKIFLDPEKSMEIQTDLGSDIVMIFDECTPYPATHDEAKKSMEMSLRWAKRSRDHFDKLENPNALFGIIQGSVYEDLRDVSIKGLVDIGFDGYAVGGLAVGEPKDDMHRILSHVNPQLPADKPRYLMGVGKPEDLVEGVRRGIDMFDCVMPTRNARNGHLFVTEGVIKIRNAKHRDDTSPLDAECDCYTCKHYSKAYLHHLDRCNEILGARLNTIHNLRYYQRVMEGLRGAIEQGRLDAFVKDFYERKGMEVPAL

SEQ ID NO: 55530 - protein, 385 aa, Gallibacterium anatis
  misc_feature (1)..(385): tr|A0A0A2XB62|A0A0A2XB62_9PAST Queuine tRNA-ribosyltran sferase OS=Gallibacterium anatis OX=750 GN=tgt PE=3 SV= 1
MKYQLKNTDGRARRGELTFERPQGTFTVQTPAFMPVGTYGTVKGMTPEEVRETGAEILLGNTFHLWLRPGQEIMRKHGDLHDFMQWHRPILTDSGGFQVFSLGKLRKITEEGVKFQNPINGERIFLSPEKSMEIQYDLGSDIVMIFDECTPYPSTFDYAKNSMELSLRWAKRCRTRFDELGNKNALFGIIQGGVHENLRQISLDGLLEIGFDGYAVGGLAVGEPKEDMHRILEYICPKIPQDKPRYLMGVGKPEDLVEGVRRGIDMFDCVMPTRNARNGHLFVTDGVVKIRNAKYRDDTSTLDPECDCYTCRHYTKSYLHHLDKCGEILGARLNTIHNLRYYQRLMAQIRQAIEEERFEEFVQEFYARIGKPVPPLNQYHPFEQD

SEQ ID NO: 55531 - protein, 380 aa, Gallibacterium anatis
  misc_feature (1)..(380): tr|F4HEB3|F4HEB3_GALAU Queuine tRNA-ribosyltransferase OS=Gallibacterium anatis (strain UMN179) OX=1005058 GN= tgt PE=3 SV=1
MKYQLKNTDGGARRGELTFERPQGVFTVQTPAFMPVGTYGTVKGMTPEEVRETGAEILLGNTFHLWLRPGQEIMRKHGDLHDFMQWHRPILTDSGGFQVFSLGKLRKITEEGVKFQNPINGERIFLSPEKSMEIQYDLGSDIVMIFDECTPYPSTFEYAKNSMELSLRWAKRCRVHFDKLGNKNALFGIIQGGVHENLRQISLDGLLEIGFDGYAVGGLAVGEPKEDMHRILEYICPKIPQDKPRYLMGVGKPEDLVEGVRRGIDMFDCVMPTRNARNGHLFVTDGVVKIRNAKYRDDTSTLDPECDCYTCRHYTKSYLHHLDKCGEILGARLNTIHNLRYYQRLMAQIRQAIEEQRFEAFVKTFYERMGKPVPPLNTSY

SEQ ID NO: 55532 - protein, 380 aa, Gallibacterium genomosp.
  misc_feature (1)..(380): tr|A0A0A2YPM6|A0A0A2YPM6_9PAST Queuine tRNA-ribosyltran sferase OS=Gallibacterium genomosp. 1 OX=155515 GN=tgt PE=3 SV=1
MKYQLKNTDGGARRGELTFERPQGTFTVQTPAFMPVGTYGTVKGMTPEEVRATGAEILLGNTFHLWLRPGQEIMRKHGDLHDFMQWHRPILTDSGGFQVFSLGKLRKITEEGVKFQNPINGERIFLSPEKSMEIQYDLGSDIVMIFDECTPYPSTFEYAKNSMELSLRWAKRCRVHFDKLGNKNALFGIIQGGVHENLRQISLDGLLEIGFDGYAVGGLAVGEPKEDMHRILEYICPKIPQDKPRYLMGVGKPEDLVEGVRRGIDMFDCVMPTRNARNGHLFVTDGVVKIRNAKYRDDTSTLDPECDCYTCRHYTKSYLHHLDKCGEILGARLNTIHNLRYYQRLMAQIRQAIEEQRFEAFVKTFYERMGKPVPPLNTSY

SEQ ID NO: 55533 - protein, 380 aa, Gallibacterium genomosp.
  misc_feature (1)..(380): tr|A0A0A2XHU0|A0A0A2XHU0_9PAST Queuine tRNA-ribosyltran sferase OS=Gallibacterium genomosp. 2 OX=155517 GN=tgt PE=3 SV=1
MKYQLKNTDGGARRGELTFERPQGVFTVQTPAFMPVGTYGTVKGMTPEEVRETGAEILLGNTFHLWLRPGQEIMRKHGDLHDFMQWHRPILTDSGGFQVFSLGKLRKITEEGVKFQNPINGERIFLSPEKSMEIQYDLGSDIVMIFDECTPYPSTFEYAKNSMELSLRWAKRCRVHFDKLGNKNALFGIIQGGVHENLRQISLDGLLEIGFDGYAVGGLAVGEPKEDMHRILEYICPKIPQDKPRYLMGVGKPEDLVEGVRRGIDMFDCVMPTRNARNGHLFVTDGVVKIRNAKYRDDTSTLDPECDCYTCRHYTKSYLHHLDKCGEILGARLNTIHNLRYYQRLMAQIRQAIEEQRFEAFVKTFYERIGKPVPPLNTSY

SEQ ID NO: 55534 - protein, 384 aa, Gallibacterium salpingitidis
  misc_feature (1)..(384): tr|A0A1A7NX17|A0A1A7NX17_9PAST Queuine tRNA-ribosyltran sferase OS=Gallibacterium salpingitidis OX=505341 GN=tg t PE=3 SV=1
MKYELKKTDGRARRGQLTFERPQGTFTVQTPAFMPVGTYGTVKGMTPEEVRATGAEILLGNTFHLWLRPGQEVMRKHGDLHDFMQWHRPILTDSGGFQVFSLGKLRKITEEGVKFQNPINGERIFLSPEKSMEIQYDLGSDIVMIFDECTPFPSTFDYAKQSMELSLRWAKRCRDRFDQLGNKNALFGIIQGGIHEELRQVSLDGLVNIGFDGYAVGGLAVGEPKEDMHRILEYICPKIPQDKPRYLMGVGKPEDLVEGVRRGIDMFDCVMPTRNARNGHLFVTDGVVKIRNAKYRDDTTPLDPECDCYTCKHYTKSYLYHLDKCGEILGARLNTIHNLRYYQRLMEQIRQAIEAERFEEFVQEFYARIGKPVPPLNQYHPFEG

SEQ ID NO: 55535 - protein, 372 aa, Gallionella capsiferriformans
  misc_feature (1)..(372): tr|D9SJA9|D9SJA9_GALCS Queuine tRNA-ribosyltransferase OS=Gallionella capsiferriformans (strain ES-2) OX=39549 4 GN=tgt PE=3 SV=1
MEFTLYKTSGKARRGQLTLAHGTVQTPAFMPVGTYGTVKAMSPLELRDIGANIVLGNTFHLWLRPGLDVIAAHGGLHDFMGWDGPILTDSGGFQVFSLGALRKITEEGVKFQSPVNGDKLFLTPEESMRIQRVLNSDIVMIFDECTPYPATEREAADSMRLSLRWAARSKAAHEGNPNALFGIVQGGMFEGLRDESLSELVNIGFDGFAIGGLSVGEPKEDMRRILEHTAPKLPQDKPRYLMGVGTPEDLVASVAQGIDMFDCVMPTRNARNGMLFTQHGDIKIKNAQYRLDTRPLDEGCSCYTCRNFSRAYLHHLYRLKEILSARLNTIHNLHYYQQLMAEIRASIEADAFAEFAVRFAERRAGLCADIKP

SEQ ID NO: 55536 - protein, 424 aa, Gallionella sp.
  misc_feature (1)..(424): tr|A0A522X7V0|A0A522X7V0_9PROT Queuine tRNA-ribosyltran sferase OS=Gallionella sp. OX=2052161 GN=tgt PE=3 SV=1
MNFTLHKTDGLARRGILQLAHGTVETPAFMPVGTYGTVKAMSPAELHEIGAHIVLGNTFHLWLRPGLEVIAAHGGLHRFMGWDGPILTDSGGFQVFSLGALRKITEEGVKFQSPVNGDKLFLTPEESMRIQRVLNSDIVMIFDECTPYPATEREAAESMRLSLRWAARSRAAHDGNPNGHSNKACYARSSLPNPLPQTAPLSNSLPQAGERTNVKGNLESLGEGANESLREFNTNALFGIVQGGMYEGLRDESLAGLANIGFDGYAIGGLSVGEPKEDMLRILAHTAPRLPQDKPRYLMGVGTPEDIVAAVAQGIDMFDCVMPTRNARNGHLFTRHGDVRIKNARYRLDTRPLDEQCGCYTCRNFTRAYLHHLHRLNEILGARLNTIHNLHYYQQLMGEIRSAIEADAFDAFVARFGQMRGGAT

SEQ ID NO: 55537 - protein, 372 aa, Gallionella sp.
  misc_feature (1)..(372): tr|A0A3D2H376|A0A3D2H376_9PROT Queuine tRNA-ribosyltran sferase OS=Gallionella sp. OX=2052161 GN=tgt PE=3 SV=1
MEFTLYKTSGKARRGQLTLAHGTVQTPAFMPVGTYGTVKAMSPLELRDIGANIVLGNTFHLWLRPGLDVIAAHGGLHDFMGWDGPILTDSGGFQVFSLGALRKITEEGVKFQSPVNGDKLFLTPEESMRIQRVLNSDIVMIFDECTPYPATMHEAADSMRLSLRWAARSKAAHEGNPNALFGIVQGGMYEELRDESLSELTRIGFDGFAIGGLSVGEPKEDMRRILEHTAPKLPQDKPRYLMGVGTPEDLVASVAQGIDMFDCVMPTRNARNGMLFTQHGDIKIKNSQYRLDTRPLDENCSCYTCQNFSRAYLHHLYRLKEILSARLNTIHNLHYYQQLMAEIRASIEADAFAEFAVRFAEQRAGLCTDIKP

SEQ ID NO: 55538 - protein, 372 aa, Gallionellaceae bacterium
  misc_feature (1)..(372): tr|A0A1J4TKL9|A0A1J4TKL9_9PROT Queuine tRNA-ribosyltran sferase OS=Gallionellaceae bacterium CG1_02_60_325 OX=1 805162 GN=tgt PE=3 SV=1
MKFTLHNTSGAARRGTLELTHGKVETPAFMPVGTYGTVKAMSPQELHDIDAHIVLGNTFHLWLRPGLEVIAAHGGLHRFMGWDGPILTDSGGFQVFSLGELRKITGGGVEFRSPVNGDKCFLSPEESMRIQKVLNSDIVMIFDECTPYPADEQIAGASMRMSLDWAARSKRAHEGNPNALFGIVQGGMHEPLRDESLAGLQDIGFDGFAIGGLSVGEPKEDMRRILAHTAPQLPQDRPRYLMGVGTPEDLVEAVGQGIDMFDCVMPTRNARNGHLFTRYGDVRIKNAIHRLDTRPLDPQCTCYTCRNFSRAYLHHLHRLGEILGARLNTIHNLHYYQELMRDIRAAIEAGRYAEFAAAFHAARATPGALPAD

SEQ ID NO: 55539 - protein, 371 aa, Gallionellaceae bacterium
  misc_feature (1)..(371): tr|A0A521Q6U3|A0A521Q6U3_9PROT Queuine tRNA-ribosyltran sferase OS=Gallionellaceae bacterium OX=2052162 GN=tgt PE=3 SV=1
MKFTLHNTSGVARRGTLELAHGKLETPAFMPVGTYGTVKAMSPLELKNMGAQIVLGNTFHLWLRPGLEVIAAHGGLHRFMGWDGPILTDSGGFQVFSLGPLRKITGGGVEFKSPVNGDKCFLSPEESMRIQKVLNSDIVMIFDECTPYPADEQTAAVSMRLSMSWAERSKKAHEGNANALFGIVQGGMHEHLRDESLAGLVNIGFDGFAIGGLSVGEPKEDMLRILRHTAPQLPQDKPRYLMGVGTPEDLVDAVAAGIDMFDCVMPTRNARNGHLFTRSGDVRIKNAQYRMDTKPLDPQCTCYTCRNFTRAYLHHLHRLNEILGARLNSIHNLHYYQELMADMRAAIERDQLAEFVAAFRLARAGKRVPGA

SEQ ID NO: 55540 - protein, 368 aa, Gallionellales bacterium
  misc_feature (1)..(368): tr|A0A1G0CXE3|A0A1G0CXE3_9PROT Queuine tRNA-ribosyltran sferase OS=Gallionellales bacterium GWA2_59_43 OX=17982 45 GN=tgt PE=3 SV=1
MEFTLYKTSGMARRGQVSLAHGNVQTPAFMPVGTYGTVKAMSPAELRDIDAHIVLGNTFHLWLRPGLDVIAAHGGLHRFMGWDGPILTDSGGFQVFSLGALRKITGGGVEFRSPVNGDKCFLSPEESMRIQKVLNSDIVMIFDECTPYPADEKVAGESMRMSLGWAERSKRGHEGNPNALFGIVQGGMHEHLRDESLAGLTNIGFDGYAIGGLSVGEPKDDMLRILTHTAPQLPADKPRYLMGVGTPEDIVAAVSQGIDMFDCVMPTRNARNGHLFTRHGDVRIKNAQYRMDTRPLDEECGCYTCRNFTRAYLHHLHRLGEILGARLNTIHNLHYYQDLMRDIRASIEAGRFPDFVEEFAHRRAGGKL

SEQ ID NO: 55541 - protein, 362 aa, Gallionellales bacterium
  misc_feature (1)..(362): tr|A0A2M8DWF8|A0A2M8DWF8_9PROT Queuine tRNA-ribosyltran sferase (Fragment) OS=Gallionellales bacterium CG_4_9_1 4_0_8_um_filter_55_61 OX=1974015 GN=CO070_06595 PE=3 SV =1
MEFTLYKTSGLARRGQLTLAHGRVQTPAFMPVGTYGTVKAMSPQELHDIGAHIVLGNTFHLWLRPGLEVIAAHGGLHGFMGWSGPILTDSGGFQVFSLGALRKISEEGVAFQSPVNGDKLFLSPEESMRIQRVLNSDIVMIFDECTPFPATEREAADSMRLSLRWAARSRAAHQGNPNALFGIVQGGMYENLRDESLAELVNIGFDGYAIGGLSVGEPKQDMQRILEHTAPKLPQDKPRYLMGVGTPEDLVAAVAQGIDMFDCVMPTRNARNGMLFTQYGDIKIKNAQYKLDTRPLDAECTCYTCQHFSRGYLHHLHRLKEILGARLNTIHNLHYYQQLMGEMRAAIEADAFAEFMVGFALR

SEQ ID NO: 55542 - protein, 373 aa, Unknown
  misc_feature (1)..(373): tr|E1VLQ4|E1VLQ4_9GAMM Queuine tRNA-ribosyltransferase OS=gamma proteobacterium HdN1 OX=83406 GN=tgt PE=3 SV=1
MQFDLLSTDGRARRGQLQFARGAVQTPAFMPVGTYGTVKGMLPRDIEGIGAEIILGNTFHLMLRPGTSVVKAHGDLHDFIGWNRPILTDSGGFQVFSLGESRKITEEGVTFRSPVDGSKIFMSPEISMQVQRELGSDIVMIFDECTPYPASVDQARQSMELSLRWARRSRTAHGDNPNALFGIVQGGMHEALRKISLDALVEIGFDGYAIGGLSVGEPKEDMIRILDFLPHQMPAHAPRYLMGVGRPEDIVEAVRRGIDMFDCVMPTRNARNGHLFTSTGVVRIRNAVHRHDTGPLDAACDCYTCQNFSRSYLHHLDRCGEMLASQLNTIHNLRYYQLLMAGLRRAIEQGTFVRFVEDFYEKRGELVPALAFA

SEQ ID NO: 55543 - protein, 369 aa, Unknown
  misc_feature (1)..(369): tr|A0A2U0AJ08|A0A2U0AJ08_9GAMM Queuine tRNA-ribosyltran sferase OS=gamma proteobacterium symbiont of Ctena orbi culata OX=1968598 GN=tgt PE=3 SV=1
MKFNILEQDGASRRGRLEFPRGSVETPAFMPVGTYGTVKAMTPEELTDLGAEIILGNTFHLMLRPGTEVISKHGDLHGFTHWEKPILTDSGGFQVFSLGDMRKISEEGVTFQSLIDGSKVFMGPEESMQVQRELGSDIVMIFDECTPYPASEEESRLSMELSLRWAQRSRAAHGDNPSALFGIVQGGMFEHLRERSLQGLIEIGFDGYAVGGLSVGEPEADRWRVLDYLSTRMPADKPRYLMGVGTPEDIVESVHRGIDMFDCVMPTRNARNGHLFTHQGVVRIRHSAHQYDEGPLDPECDCYTCRNYSRAYLRHLDKCNEILGARLNTIHNLYYYQKLMRDLRGAIESGTLGEFTERFYDKRVVPLTG

SEQ ID NO: 55544 - protein, 392 aa, Gammaproteobacteria bacterium
  misc_feature (1)..(392): tr|W2UFH8|W2UFH8_9GAMM Queuine tRNA-ribosyltransferase OS=Gammaproteobacteria bacterium MOLA455 OX=1411685 GN= tgt PE=3 SV=1
MSSTPDTQTDSQANTQSKRKCFMNFSVSATDGKARRGEMTFPRGKVQTPAFMPVGTYGTVKGMLPKDIVEIGAEMILGNTFHLMLRPGTEVIKTHGDLHDFTQWQGPILTDSGGFQVFSLGDMRKITEEGVKFKSPIDGSPVFIDPETSMQVQADLGSDVVMIFDECTPHPATVKQASDSMQLSLRWAKRSKTAHGDSPSALFGIVQGGMYESLRDESLKGLVDIGFDGYAIGGLSVGEPKEDMMRILDHLAHQMPADRPRYLMGVGKPEDLVEGVRRGIDMFDCVMPTRNARNGHLFTSTGVVKIRNARHRHDTDTLDSQCDCYTCTNFSRGYLHHLERCGEMLSAQLNTIHNLRFYQTLMAGLREAIAENRLEAFADQFYLQQGKDKPAL

SEQ ID NO: 55545 - protein, 381 aa, Gammaproteobacteria bacterium
  misc_feature (1)..(381): tr|A0A1G0I5M7|A0A1G0I5M7_9GAMM Queuine tRNA-ribosyltran sferase OS=Gammaproteobacteria bacterium RIFCSPHIGHO2_1 2_FULL_43_28 OX=1798287 GN=A3F14_06075 PE=3 SV=1
MTNQYHSSIVKKHKTLPARVMQFSTPHGNVLTPAFMPVGTRAMLNYLTPTDLKAAGSEIILGGNTYHMLVAPGMDVLQAVGGMHRFMGWDKAMLTDSGGFQVLSLSKKGQICLIDEEGAHFKHPITGKIIHLNPHTSIGTQKIIGADIIMAFDQCTPETGGREAALAALDRTHRWLLLCKEEQEKNPNSAYGLRQALFGIIQGGSFRDLRDTSTEFVVNLDLDGIAIGGEVIGFDMPKTAEIIDWVRPMLPANKIRYTMGVGLNPQDLIDVVAKGIDIFDCVAPTRNARHGTLYHGDLVERDGWLAFEGERISIKKGLYAKDDQPLMQDCTCYTCQRFSRAYLHYLFKEGLIAYFHLASIHNVHVMQMTCAKMREIMLRDD

SEQ ID NO: 55546 - protein, 372 aa, Garciella nitratireducens
  misc_feature (1)..(372): tr|A0A1T4K1W1|A0A1T4K1W1_9FIRM Queuine tRNA-ribosyltran sferase OS=Garciella nitratireducens DSM 15102 OX=11219 11 GN=tgt PE=3 SV=1
MAIKFEVIKEEKYTGARLGKLYTPHGVIDTPIFMPVGTQATVKTMTPEELKEIETQIILSNTYHLYLRPGHELVKEAGGLHQFMHWDGPILTDSGGFQVFSLSSLRNITEEGVTFRSHLNGSKHFIGPEKAIEIQNALGSDIIMAFDECTPYPSNYEYVKNSLERTIRWAKRCKKAHKKESEQALFGIIQGGTYQDLREQSVKEMLELDFPGYSIGGLSVGEPKDLMYQVLDYTIPLMPKNKPRYLMGVGSPDALIEGVIRGIDMFDCVLQTRIARNGTAMTSMGKIVIKNATYERDFSPLDPNCHCYTCQNYSRAYLRHLFKTKEILGLRLTTYHNLYFTLQLMKNIRQAIKEDRLLDFKKEFFLNYGYTQ

SEQ ID NO: 55547 - protein, 433 aa, Gardnerella sp.
  misc_feature (1)..(433): tr|A0A2K0X4H6|A0A2K0X4H6_9BIFI Queuine tRNA-ribosyltran sferase OS=Gardnerella sp. KA00735 OX=1973156 GN=tgt PE =3 SV=1
MNNLIEHPRGAEPNKPGDRSEFYFTSKTRLPDSENGKGLNGARYGRTGIIHTPHGDIHTPAFVPVATQAAMKAVLPETIKDLGAQCMLSNAFHLYERPGADTLDEAGGLAKFMNWNGPTFTDSGGFQVLSLGAGFKKTLAMDVTGMKSDDVIAEGKERMAFVDEDGVTFKSPLNGAKHRFSAEISMGIQHKLGADIMFAFDELTTLMNTRHYQEESVERTFRWAKRCVDEHKRLTQERLGKPYQALYGVVQGANYEDLRRRAASQIASLDFDGVGIGGAIEKRIIGDTCAWICDAMPENRPRHVLGIAAVDDIFACVENGGDTFDCVAPARCGRNGAIFTRHGRYNVKRADFKHDQGPLEEGCDCYTCTHYSRMYVNHLLRAKEMNGYTLATIHNERFFVKLLDDIRSSIDNGYFEEFRDESLAHYYENGSKG

SEQ ID NO: 55548 - protein, 433 aa, Gardnerella sp.
  misc_feature (1)..(433): tr|A0A2K0X9V3|A0A2K0X9V3_9BIFI Queuine tRNA-ribosyltran sferase OS=Gardnerella sp. DNF01162 OX=1973155 GN=tgt P E=3 SV=1
MTSLLEHPRGAEPGKPGDRKEFSFTTKTRLSNTAEGKGRDGARYGRTGVIHTPHGDIQTPAFVPVATQAAMKAVLPESIKDLGAQCMLSNAFHLYERPGADVLDEAGGLGKFMNWDKPTFTDSGGFQVLSLGAGFKKTLAMDVTGMKSDDVIAAGKERMAFVDEDGVTFKSPLNGAKHRFSAEISMGIQHKLGADIMFSFDELTTLMNTRRYQEESVERTFRWAKRCVAEHQRLTEERVGKPYQALYGVVQGANYEDLRRHAAEQIASLDFDGVGIGGAIEKRIIGDTCAWICDAMPENRPRHVLGIAAVDDIFACVENGGDTFDCVAPARCGRNGAIFTRHGRYNVKRAEFKHDQRPLEEGCDCYTCTHYSRMYVDHLLRASEMNGFTLATIHNERFFVKLLDDIRASIDGGYFEEFRDETLAHYYENGSKG

SEQ ID NO: 55549 - protein, 404 aa, Gardnerella vaginalis
  misc_feature (1)..(404): tr|A0A2W5D0V0|A0A2W5D0V0_GARVA Queuine tRNA-ribosyltran sferase OS=Gardnerella vaginalis OX=2702 GN=tgt PE=3 SV =1
MENTASGKGKDGARYGRTGVIRTPHGDIHTPAFVPVATQAAMKAVLPESIKDLGGQCMLSNAFHLYERPGEDILDEAGGLAKFMNWDGPTFTDSGGFQVLSLGAGFKKTLAMDVTGMKSDDVIAEGKERMAFVDEDGVTFKSPLNGSKHRFSAEISMGIQHKLGADIMFAFDELTTLMNTRRYQEESVERTFRWAKRCVAEHKRLTEARLGKPYQALYGVVQGANYEDLRRHAAEQIASLDFDGVGIGGAIEKRIIGDTCAWICDAMPENRPRHVLGIAAVDDIFACVENGGDTFDCVAPARCGRNGAIFTRHGRYNVKRAEFKHNQGPLEAGCDCYTCTHYSRMYVNHLLRAKEMNGYTLATIHNERFFVKLLDDIRASIDGGYFEDFRDESLAHYYENGSRG

SEQ ID NO: 55550 - protein, 433 aa, Gardnerella vaginalis
  misc_feature (1)..(433): tr|I4LMA5|I4LMA5_GARVA Queuine tRNA-ribosyltransferase OS=Gardnerella vaginalis 0288E OX=698952 GN=tgt PE=3 SV =1
MTNLIEHPRGAEPGKPGDRREFSFTTKTRLENTASGKGKDGARYGRTGVIRTPHGDIHTPAFVPVATQAAMKAVLPESIKDLGGQCMLSNAFHLYERPGEDILDEAGGLAKFMNWDGPTFTDSGGFQVLSLGAGFKKTLAMDVTGMKSDDVIAEGKERMAFVDEDGVTFKSPLNGSIHRFSAEISMGIQHKLGADIMFAFDELTTLMNTRRYQEESVERTFRWAKRCVAEHKRLTEARLGKPYQALYGVVQGANYEDLRRHAAEQIASLDFDGVGIGGAIEKRIIGDTCAWICDAMPENRPRHVLGIAAVDDIFACVENGGDTFDCVAPARCGRNGAIFTRHGRYNVKRAEFKHDQGPLEAGCDCYTCTHYSRMYVSHLLRAKEMNGYTLATIHNERFFVKLLDDIRASIDGGYFEEFRDESLAHYYENGSRG

SEQ ID NO: 55551 - protein, 374 aa, Geitlerinema sp.
  misc_feature (1)..(374): tr|K9SAG9|K9SAG9_9CYAN Queuine tRNA-ribosyltransferase OS=Geitlerinema sp. PCC 7407 OX=1173025 GN=tgt PE=3 SV= 1
MSQSAFSYQCQAQCCHTHARAGVFMTPHGPVETPRFMPVGTLANVKTLTPAQLKDTGAQMVLANTYHLHLQPGENIVAQAGGLHRFMHWQGPMLTDSGGFQVFSLSEMRVISEEGVKFRSPKDGQLINLTPERSIEIQNALGADVIMAFDECPPYPASREAVQEATARTYRWLQRCIAAHQRSDQALFGIVQGGVYGDLRQAAARQLVELDLPGYAIGGVSVGEPADLIEGIVQATAPLLPAHKPRYLMGVGTYREMVQAIAAGVDLFDCVIPTRFARHGAVLSHGTRWNIKNSQYREDFSPIDETCPCYTCQHFTRAYLCHLVRSQELLAYTLLSIHNVTELIRFTQRIRDSIFAGTFTTEFAEWLSPESLRA

SEQ ID NO: 55552 - protein, 376 aa, Gelidibacter algens
  misc_feature (1)..(376): tr|A0A1A7QYY1|A0A1A7QYY1_9FLAO Queuine tRNA-ribosyltran sferase OS=Gelidibacter algens OX=49280 GN=tgt PE=3 SV= 1
MKFELKGKDLQSKARAGTITTDHGVIETPIFMPVGTVASVKGVHQRELKNDINADIILGNTYHLYLRPQTRILEQAGGLHKFMNWDRNILTDSGGYQVYSLSANRKIKEEGVKFKSHIDGSYHTFTPENVMEIQRTIGADIIMAFDECTPYPCDYNYAKRSMHMTHRWLDRCINHLDTLPFKYGYEQSFFPIVQGSTYKDLRLQSAEYIANAGAVGNAIGGLSVGEPADEMYAMTEVVCGVLPEDKPRYLMGVGTPINILENIALGIDMFDCVMPTRNARNGMLFTAHGSINIKNKKWEDDFSALDEMDMTYVDTEYSKAYLRHLFSVNERLAMQIATIHNLGFYLWLVREARKHILAGDFRTWKEMMVKQMDKRL

SEQ ID NO: 55553 - protein, 376 aa, Gelidibacter gilvus
  misc_feature (1)..(376): tr|A0A4Q0XBG4|A0A4Q0XBG4_9FLAO Queuine tRNA-ribosyltran sferase OS=Gelidibacter gilvus OX=59602 GN=tgt PE=3 SV= 1
MKFELKGKDPQSKARAGKLTTDHGVIETPIFMPVGTVGSVKGVHQRELKNDINADVILGNTYHLYLRPQTRILEQAGGLHKFMNWDRNILTDSGGYQVYSLSANRKIKEEGVKFKSHIDGSYHTFTPENVMEIQRIIGADIIMAFDECTPYPCDYNYAKRSMHMTHRWLDRCINHLEKLPFKYGYEQSFFPIVQGSTYKDLRAQSAEYIANAGAVGNAIGGLSVGEPADEMYAMTEVVCEILPEDKPRYLMGVGTPINILENIALGVDMFDCVMPTRNARNGMLFTAHGSINIKNKKWEDDFSPLDEMAMTYVDTEYSKAYLRHLFSVNERLAMQIATIHNLGFYMWLVREARKHILAGDFRTWKDMMVKQMDKRL

SEQ ID NO: 55554 - protein, 376 aa, Gelidibacter salicanalis
  misc_feature (1)..(376): tr|A0A5C7ACB9|A0A5C7ACB9_9FLAO Queuine tRNA-ribosyltran sferase OS=Gelidibacter salicanalis OX=291193 GN=tgt PE =3 SV=1
MKFELKGKDLQSKARAGVLTTDHGVIETPIFMPVGTVASVKGVHQRELKNDINADVILGNTYHLYLRPQTRILEQAGGLHKFMNWDRNILTDSGGYQVYSLSANRKIKEEGVKFKSHIDGSYHTFTPENVMEIQRTIGADIIMAFDECTPYPCDYNYAKRSMHMTHRWLDRCVNHLEKLPFKYGYEQSFFPIVQGSTYKDLRLQSAEYIANAGAVGNAIGGLSVGEPAEEMYAMTEVVCGVLPEDKPRYLMGVGTPINILENIALGIDMFDCVMPTRNARNGMLFTAHGTINIKNKKWEDDFSALDEMDMTYVDTEYSKAYLRHLFSVNERLAMQIATIHNLGFYLWLVREARKHILAGDFRPWKEMMVKQMDKRL

SEQ ID NO: 55555 - protein, 376 aa, Gelidibacter sediminis
  misc_feature (1)..(376): tr|A0A4R7PKJ4|A0A4R7PKJ4_9FLAO Queuine tRNA-ribosyltran sferase OS=Gelidibacter sediminis OX=1608710 GN=tgt PE= 3 SV=1
MKFELKGKDLQSKARAGVITTDHGVIETPIFMPVGTVASVKGVHQRELKNDINADIILGNTYHLYLRPQTKILEQAGGLHKFMNWERNILTDSGGYQVYSLSANRKIKEEGVKFKSHIDGSYHTFTPENVMEIQRIIGADIIMAFDECTPYPCDYNYAKRSMHMTHRWLDRCINHLEKLPFKYGYEQSFFPIVQGSTYKDLRLQSAEYIANAGAVGNAIGGLSVGEPAAEMYAMTEVVCSVLPEDKPRYLMGVGTPINILENIALGIDMFDCVMPTRNARNGMLFTAHGTINIKNKKWEADFSALDDMGMTYVDTEYSKAYLRHLFSVNERLAMQIATIHNLGFYLWLVREARKHILAGDFRPWKEMMVKQMDKRL

SEQ ID NO: 55556 - protein, 384 aa, Gemella asaccharolytica
  misc_feature (1)..(384): tr|A0A133ZT67|A0A133ZT67_9BACL Queuine tRNA-ribosyltran sferase OS=Gemella asaccharolytica OX=502393 GN=tgt PE= 3 SV=1
MRNIKKNAVWYQHIKTCKQTGARLGIVHTPHGSFETPVFMPVGTQATVKTMSPEEVKNLGADIILSNTYHLWLRPGEKIIENAGGLHKFMNYNSSILTDSGGFQVFSLSKLRKIEEEGVYFKNHLSGADLFLSPEKSVQIQTALGSDIMMAFDECPGFNHDYNYIKKSVERTSRWAERCLNEQKNPDKQSLFGIIQGEGYKDLRYQSAKDLVSLDFPGYAIGGLSVGEPKDVMYRVLDETTSLLPSNKPRYLMGVGSPDALIEGVIRGIDMFDCVLPTRIARNGTCMTSIGRIVIKNAKYSADYTPLDPECDCYCCKNYTRAYLRHLFKSNEIFGARLATTHNIYFLIKLMKNIRKAILEDRLLDFKNEFFEKYGLNKNNPKNF

SEQ ID NO: 55557 - protein, 384 aa, Gemella bergeri
  misc_feature (1)..(384): tr|U2Q013|U2Q013_9BACL Queuine tRNA-ribosyltransferase OS=Gemella bergeri ATCC 700627 OX=1321820 GN=tgt PE=3 S V=1
MRDVRENAVWYEHIKTCKQSGARLGIVHTPHGSFETPVFMPVGTQATVKAMAPEEVKSMGANIILSNTYHLWLRPGESVVEKAGGLHKFMNWDGSILTDSGGFQVFSLSDLRKIEEEGVHFRNHLSGEKLFLSPEKAMFIQNSLGSDIMMAFDECPDFNHDYKYIRQSVERTSRWAERCLKAHKNPKTQSIFGIVQGAGYDDLRKQSAKDLVSLDFPGYAIGGLSVGEPKHEMYRVLEYLTPLLPTNKARYLMGVGSPDALFEGVLRGVDMFDCVLPTRIARNGTCMTSQGRVVVKNAKYAEDFTPLDPECDCYCCKNYTKAYLRHLFKADEIFGARLTSTHNIHFLINMMKNIRKAIMEDRLLDYKEEFFEKYGLNQKNPKNF

SEQ ID NO: 55558 - protein, 384 aa, Gemella haemolysans
  misc_feature (1)..(384): tr|A0A134A2N6|A0A134A2N6_9BACL Queuine tRNA-ribosyltran sferase OS=Gemella haemolysans OX=1379 GN=tgt PE=3 SV=1
MRDVKENAVWYEHIKTCKQSGARLGIVHTPHGSFETPVFMPVGTQATVKAMSPEEVKGMGADIILSNTYHLWLRPGEEIVERAGGLHKFMNWDGSILTDSGGFQVFSLSEMRKIEEEGVHFKNHLSGEKLFLSPEKAMHIQNALGSDIMMAFDECPDYNHDYKYIRQSVERTSRWAESCLEAHKNPKTQSIFGIVQGAGFNDLREQSAKDLVSMDFPGYAIGGLSVGEPKHEMYRVLEHVTPLLPANKARYLMGVGSPDALFEGVLRGVDMFDCVLPTRIARNGTCMTSEGRVVVKNAKYAEDFTPLDPECSCYCCKNYTRAYLRHLFKADEIFGARLATTHNIHFLINMMKDIRQAIREDRLLDFKEEFFEKYGLNQENPKNF

SEQ ID NO: 55559 - protein, 384 aa, Gemella haemolysans
  misc_feature (1)..(384): tr|F3A175|F3A175_9BACL Queuine tRNA-ribosyltransferase OS=Gemella haemolysans M341 OX=562981 GN=tgt PE=3 SV=1
MRDVKENAVWYEHIKTCKQSGARLGIVHTPHGSFETPVFMPVGTQATVKAMSPEEVKGMGADIILSNTYHLWLRPGEEIVEKAGGLHKFMNWDGSILTDSGGFQVFSLSEMRKIEEEGVHFKNHLSGEKLFLSPEKAMHIQNALGSDIMMAFDECPDYNHDYKYIRQSVERTSRWAERCLAAHKNPKTQSIFGIVQGAGFNDLREQSAKDLVSMDFPGYAIGGLSVGEPKHEMYRVLEHVTPLLPANKARYLMGVGSPDALFEGVLRGVDMFDCVLPTRIARNGTCMTSAGRVVVKNAKYAEDFTPLDPECSCYCCKNYTKAYLRHLFKADEIFGARLATTHNIHFLINMMKDIRQAIREDRLLDFKEEFFEKYGLNQENPKNF

SEQ ID NO: 55560 - protein, 384 aa, Gemella morbillorum
  misc_feature (1)..(384): tr|E5V237|E5V237_9BACL Queuine tRNA-ribosyltransferase OS=Gemella morbillorum M424 OX=562982 GN=tgt PE=3 SV=1
MRDVKENAVWYEHIKTCKQSGARLGIVHTPHGSFGTPVFMPVGTQATVKTMAPEEVKSMGADIILSNTYHLWLRPGEKIVEKAGGLHKFMNWDGSILTDSGGFQVFSLSDFRKIEEEGVHFKNHLSGEKLFLSPEKAMHIQNALGSDIMMAFDECPDFNHDYKYIRQSVERTSRWAERCLEAHKNPKTQSIFGIVQGAGFNDLREQSAKDLVSMDFPGYAIGGLSVGEPKQEMYRVLEHVTPLLPANKARYLMGVGSPDALFEGVLRGIDMFDCVLPTRIARNGTCMTSQGRVVIKNAKYAEDFTPLDSECSCYCCKNYTKAYLRHLFKADEIFGARLATTHNIHFLINMMKDIRQAIMEDRLLDFKEEFFKKYGLNKKNPKNF

SEQ ID NO: 55561 - protein, 384 aa, Gemella morbillorum
  misc_feature (1)..(384): tr|A0A2X4NBN9|A0A2X4NBN9_9BACL Queuine tRNA-ribosyltran sferase OS=Gemella morbillorum OX=29391 GN=tgt PE=3 SV= 1
MRDVKENAVWYEHIKTCKQSGARLGIVHTPHGSFETPVFMPVGTQATVKTMAPEEVKSMGADIILSNTYHLWLRPGEKVVEKAGGLHKFMNWDGSILTDSGGFQVFSLSDFRKIEEEGVHFKNHLSGEKLFLSPEKAMHIQNALGSDIMMAFDECPDFNHDYKYIRQSVERTSRWAERCLEAHKNPKTQSIFGIVQGAGFNDLREQSAKDLVSMDFPGYAIGGLSVGEPKQEMYRVLEHVTPLLPANKARYLMGVGSPDALFEGVLRGIDMFDCVLPTRIARNGTCMTSQGRVVIKNAKYAEDFTPLDSECSCYCCKNYTKAYLRHLFKADEIFGARLATTHNIHFLINMMKDIRQAIMEDRLLDFKEEFFEKYGLNKKNPKNF

SEQ ID NO: 55562 - protein, 384 aa, Gemella sanguinis
  misc_feature (1)..(384): tr|A0A2N6SH38|A0A2N6SH38_9BACL Queuine tRNA-ribosyltran sferase OS=Gemella sanguinis OX=84135 GN=tgt PE=3 SV=1
MRDVKENAVWYEHIKTCKQSGARLGIVHTPHGSFETPVFMPVGTQATVKTMSPEEVKAMGADIILSNTYHLWLRPGEKIVEKAGGLHKFMNWNGSILTDSGGFQVFSLSDFRKIEEEGVHFKNHLSGEKLFLSPEKAMHIQNSLGSDIMMAFDECPDFNHDYKYIRQSVERTSRWAERCLEAHKNPKTQSIFGIVQGAGYNDLREQSAKDLVSMDFPGYAIGGLSVGEPKHEMYRVLEHVTPLLPANKARYLMGVGSPDALFEGVLRGIDMFDCVLPTRIARNGTCMTSEGRVVIKNAKYAEDFTPLDPECSCYCCKNYTRAYLRHLFKADEVFGARLATTHNIHFLINMMKNIRQAIMEDRLLDYKEEFFEKYGLNKENPKNF

SEQ ID NO: 55563 - protein, 384 aa, Gemella sp.
  misc_feature (1)..(384): tr|A0A533I423|A0A533I423_9BACL Queuine tRNA-ribosyltran sferase OS=Gemella sp. OX=1966354 GN=tgt PE=3 SV=1
MRDVKENAVWYEHIKTCKQSGARLGIVHTPHGSFETPVFMPVGTQATVKAMSPEEVKGMGADIILSNTYHLWLRPGEEIVEKAGGLHKFMNWDGSILTDSGGFQVFSLSEMRKIEEEGVHFKNHLSGEKLFLSPEKAMHIQNSLGSDIMMAFDECPDYNHDYKYIRQSVERTSRWAERCLEAHKNPKTQSIFGIVQGAGFNDLREQSAKDLVSMDFPGYAIGGLSVGEPKHEMYRVLEHVTPLLPANKARYLMGVGSPDALFEGVLRGVDMFDCVLPTRIARNGTCMTSEGRVVVKNAKYAEDFTPLDPECSCYCCKNYTRAYLRHLFKADEIFGARLATTHNIHFLINMMKDIRQAIREDRLLDFKEEFFEKYGLNQENPKNF

SEQ ID NO: 55564 - protein, 384 aa, Gemella sp.
  misc_feature (1)..(384): tr|A0A0X8KLI1|A0A0X8KLI1_9BACL Queuine tRNA-ribosyltran sferase OS=Gemella sp. oral taxon 928 OX=1785995 GN=tgt PE=3 SV=1
MRDVRENAVWYEHIKTCKQSGARLGIVHTPHGSFETPVFMPVGTQATVKAMSPEEVKSMGANIILSNTYHLWLRPGEGIVEKAGGLHKFMNWDGSILTDSGGFQVFSLSDLRKIEEEGVHFRNHLSGEKLFLSPEKAMAIQNSLGSDIMMAFDECPDFNHDYKYIRQSVERTSRWAERCLKAHKNPKTQSIFGIVQGAGYDDLRKQSAKDLVSLDFPGYAIGGLSVGEPKHEMYRVLEYLTPLLPTNKARYLMGVGSPDALFEGVLRGVDMFDCVLPTRIARNGTCMTSQGRVVVKNAKYAEDFTPLDSECDCYCCKNYTKAYLRHLFKADEIFGARLTSTHNIHFLINMMKNIRKAIMEDRLLDYKEEFFEKYGLNQENPKNF

SEQ ID NO: 55565 - protein, 375 aa, Geminicoccus sp.
  misc_feature (1)..(375): tr|A0A2D6C0V8|A0A2D6C0V8_9PROT Queuine tRNA-ribosyltran sferase OS=Geminicoccus sp. OX=2024832 GN=tgt PE=3 SV=1
MSDFSFEILASDGAARRGRLHTAHGTVETPAFMPVGTAATVKAMMPESVRATGAEIILGNTYHLMIRPTAERIHHLGGLHKFMHWDGPILTDSGGYQVMSLADLRKMTEEGVTFRSHIDGSKHRLTPEDSMHIQHLLGSTITMALDECTPYPIDKLGADTSMQLSMRWAKRSRDAWVDRPGYGIYGIAQGSTFADLREESIRALEPMDFHGIAVGGLAVGEGQELMFKTLDDCEPHLPQHKPRYLMGVGKPLDLVGAVRRGIDQFDCVLPTRSGRTGQAFTWRGPINMRNARHQDDPRPIDEDCSCPACRNYSRAYIRHLHRADEMLGAMLLSWHNIQHYQDLMARMRSAIEAGAFADFEAGVVAGYARGDIDPL

SEQ ID NO: 55566 - protein, 375 aa, Geminicoccus sp.
  misc_feature (1)..(375): tr|A0A2E3IRK8|A0A2E3IRK8_9PROT Queuine tRNA-ribosyltran sferase OS=Geminicoccus sp. OX=2024832 GN=tgt PE=3 SV=1
MSDFSFEILASDGAARRGRLHTAHGTVETPAFMPVGTAATVKAMMPESVRATGAEIILGNTYHLMIRPTAERIHHLGGLHKFMHWDGPILTDSGGYQVMSLAGLRKMTEEGVTFRSHIDGSKHRLTPEDSMHIQHLLGSTITMALDECTPYPIDKLGADTSMQLSMRWAKRSRDAWVGRLGYGVYGIAQGSTFADLREESIRALEPMDFHGIAVGGLAVGEGQEMMFKTLDDCEPHLPQHKPRYLMGVGKPLDLVGAVRRGIDQFDCVLPTRSGRTGQAFTWRGPINMRNARHQDDPRPIDEDCSCPACHNYSRAYIRHLHRADEMLGAMLLSWHNIQHYQDLMARMRSAIEAGAFADFEAGVVAGYAQGDIDPL

SEQ ID NO: 55567 - protein, 367 aa, Geminocystis sp.
  misc_feature (1)..(367): tr|A0A0D6AS76|A0A0D6AS76_9CHRO Queuine tRNA-ribosyltran sferase OS=Geminocystis sp. NIES-3709 OX=1617448 GN=tgt PE=3 SV=1
MTFSYSLIASCSHTKARAGVFSTPHGDVETPKFMPVGTVGTVKGITPSQLKDVNAQMILGNTYHLHIQPGEEIIAKAGGLHSFVGWDKPMLTDSGGFQVFSLAKLRQITDDGVKFRSPRDGRIINMTPENSIRIQNALGADVIMAFDECPPATATKEEVVIAVERTYKWLQRCINAHGNTDKQALFGIVQGGIYADLRTQSALDLVGLDLPGYAIGGVSVGEKPELIHQIIQWTTPLLPVNKPRYLMGVGSYKEMVIAIASGIDLFDCVIPTRLGRHGAALVQGERINLRNAQYKEDFTPLDPQCSCYTCKNFTRAYLNHLIRSGEMLGYILLSLHNLHELIEFTNKIRQAIINDRFILEFGHWLEL

SEQ ID NO: 55568 - protein, 365 aa, Geminocystis sp.
  misc_feature (1)..(365): tr|A0A0D6AJQ3|A0A0D6AJQ3_9CHRO Queuine tRNA-ribosyltran sferase OS=Geminocystis sp. NIES-3708 OX=1615909 GN=tgt PE=3 SV=1
MSFSYSLIASCSHTKARAGVFSTPHGDVETPKFMPVGTIGTVKGITPAQLKDVNAQMILGNTYHLHIQPGEGIIEKAGGLHNFVGWDRPMLTDSGGFQVFSLSKLRQLTDDGVKFRSPKDGRIINMTPENSIRIQNALGADVIMAFDECPPATATKDEVIIAVERTYKWLQRCINAHAKSDKQALFGIVQGGIYADLRTQSAQDLISLDLPGYAIGGVSVGEKPELIHQIIQWTTPLLPVNKPRYLMGVGTYREMVIAIASGIDLFDCVIPTRLGRHGAALVQGKRINLKNAPYKEDFTPLDPECSCYTCKNFTRAYLNHLLRSGEMLGFILLSIHNLHELVNFTNKIRRAIINDTFISEFGHWL

SEQ ID NO: 55569 - protein, 369 aa, Gemmata obscuriglobus
  misc_feature (1)..(369): tr|A0A2Z3H869|A0A2Z3H869_9BACT Queuine tRNA-ribosyltran sferase OS=Gemmata obscuriglobus OX=114 GN=tgt PE=3 SV= 1
MAISFTLHATDGAARAGTVHTPHGDVSTPAFMPVGTQGTVKGLTPEMVRDAGAHILLGNTYHLALRPGDEIVRDLGGLHTFMNWNRPILTDSGGFQVFSLAGQVKITDHGAKFKSHIDGSPLELTPERAVEIQQNLGSDIAMVLDECPPADGAPEVIRRAVTRSIKWAERCKRHHSRPDQAQFAIVQGGLNLDLRAECAKELVAMDFPGYALGGFSVGEAPEAMHAALPACAACLPEHKPRYLMGVGRPQDLLAGVASGIDMFDCVMPTRNGRNALAFTDEGPVRLRNAKHRRDPKPLMSGCGCYCCANYSRGYLHHLFAAEEMLGPTLLSLHNISFYLNLMAGARDAIRAGRFAEFRAGCLARWTPAS

SEQ ID NO: 55570 - protein, 369 aa, Gemmata sp.
  misc_feature (1)..(369): tr|A0A142XA89|A0A142XA89_9BACT Queuine tRNA-ribosyltran sferase OS=Gemmata sp. SH-PL17 OX=1630693 GN=tgt PE=3 S V=1
MLFPFTLQATDGAARAGTLTTPHGEVPTPAFMPVGTQATVKGLTPEMVRAAGAHIILGNTYHLALRPGDEIVRDFGGLHKFMHWDGPILTDSGGFQVFSLAGQVKITDHGAKFKSHIDGSPLELTPERAVEIQQNLGSDIAMVLDECPPATSEPAKMRAAVLRTIRWAERCKKHHSRPGQAQFAIVQGGLNLDLRAECARELVAMDFPGYALGGFSVGEAPEAMHAALPTCAACLPEHKPRYLMGVGRPQDLLAGVASGIDMFDCVMPTRNGRNALAFTSDGPIRLRNAKHRRDPAPVASDCACYCCENYSRGYLHHLFAADEMLGPTLLSLHNIAFYLRLMADARRAITEGRFAAFRAGCLARWNADS

SEQ ID NO: 55571 - protein, 370 aa, Gemmataceae bacterium
  misc_feature (1)..(370): tr|A0A4V0HZG9|A0A4V0HZG9_9BACT Queuine tRNA-ribosyltran sferase OS=Gemmataceae bacterium OX=2052164 GN=tgt PE=3 SV=1
MAISFQLDATDQQARAGTMATPHGAVRTPVFMPVGTQGTVKGLTPEMVRDAGSQIILGNTYHLALRPGDELVRDLGGLHRFMNWPGPILTDSGGFQVFSLATQVKITDDGAKFRSHIDGSPLELTPERAVRIQENLGSDIAMVLDECPSLKETTPAKVRAAVTRTVRWAARCKACHTRPDQAQFAIVQGGLDIELRAECARELVAMDFPGYALGGFSVGESPESMHAALPACAALLPEGKPRYLMGVGRPQDLLAGVAAGIDMFDCVMPTRNGRNALAFTADGPIRLRNAKHRRDPAPVESGCGCYCCANYSRAYLHHLFAADEMLGPTLLSLHNVEFYLRLMRDARDAIIAGRYAAFHAGCLARWNAAP

SEQ ID NO: 55572 - protein, 372 aa, Gemmataceae bacterium
  misc_feature (1)..(372): tr|A0A5C1A9W4|A0A5C1A9W4_9BACT Queuine tRNA-ribosyltran sferase OS=Gemmataceae bacterium PX52 OX=2598579 GN=tgt PE=3 SV=1
MTFSFELLHRDGPARVGRMATPHGVVETPVFMPVGTQATVKGLTPDMVRDAGAQIILGNTYHLALRPGGDLVAELGGLHKFMKWDGPILTDSGGFQVFSLASQAKITDAGAKFRSHVDGSLLELTPEKAVEIQQQLGSDIAMVLDECPPGDAPPEVVRRAVTRSIRWAERCKAHHTRKDQVQFAIVQGGTNLDLRAECAKELVAMDFPGYALGGFSVGESPAAMHAALPTCAACLPEEKPRYLMGVGRPEDLLAGVASGIDMFDCVMPTRNGRNATAFTYAGIVKLRNSRHQRDPAPLEADCPCYCCRTFSRAYLHHLFRVDEMLGPILLSLHNIAFYLRLMRDSRRAIVEGRFADFHAECLAGWKRPAPAA

SEQ ID NO: 55573 - protein, 385 aa, Gemmatimonadaceae bacterium
  misc_feature (1)..(385): tr|A0A2E8H3A5|A0A2E8H3A5_9BACT Queuine tRNA-ribosyltran sferase OS=Gemmatimonadaceae bacterium OX=2026741 GN=tg t PE=3 SV=1
MSDGDSSFRYELIAEDGATGARAGLLHTPHGAIETPVFMPVGTRATVKALSQQDLLQLDASIILGNAYHLYLRPGHERIERFGGLHGFMSWPRPILTDSGGFQVFSLQELRRITEDGVRFQSHLDGSSHLFTPESVMDIEHSLGADIIMAFDECTPYPATEEYARDSMERTQRWAERCLRRHEELQTVQVAAGRPPQALFGIVQGGVYPQLRRRSARDLVALDLPGYAIGGLAVGEPRPEMLSTLEETVPELPTRKPRYLMGVGLPQDLIDGVERGIDMFDCVIPTRNARNSTLFTSTGRVRMKNAVHADDNGPLDAACDCLTCRQYHRGYLRHLFQTDEILGLHLATLHNVHFFLQLMRAMRAAIIERRFADWRGAFSATYQDG

SEQ ID NO: 55574 - protein, 380 aa, Gemmatimonadaceae bacterium
  misc_feature (1)..(380): tr|A0A2E0DR44|A0A2E0DR44_9BACT Queuine tRNA-ribosyltran sferase OS=Gemmatimonadaceae bacterium OX=2026741 GN=tg t PE=3 SV=1
  misc_feature (9)..(9): Xaa can be any naturally occurring amino acid
  misc_feature (61)..(61): Xaa can be any naturally occurring amino acid
  misc_feature (99)..(99): Xaa can be any naturally occurring amino acid
  misc_feature (270)..(270): Xaa can be any naturally occurring amino acid
  misc_feature (288)..(288): Xaa can be any naturally occurring amino acid
  misc_feature (318)..(318): Xaa can be any naturally occurring amino acid
  misc_feature (331)..(331): Xaa can be any naturally occurring amino acid
  misc_feature (352)..(352): Xaa can be any naturally occurring amino acid
MFDYTLSAXEGSARAGSFTTPHGSVSTPAFMPVGTAGTVKSLIMEEVKELGAQVVLANTYXLYLRPGQDLVRQLGGLHDFMRWDGPILTDSGGYQVFSXKGMRKVHDDGVDFQSHVDGSRHVFTPESVMDIQRALGADIVMAFDECPPGGCDRQTAEQANRRTLEWLGRCRARFDELEKVGEFPEQSLFPVLQGNVFDDLRKEHADQFMSLNDWDGFGIGGLSVGESKPDMWRTLELLDDVLPKERPRYLMGVGYPDDLLEAIKRGCDLXDCVAPTRNARHGTAWTSXEGQINLKAARFRSDTRPIDTECDCYTCARXDRAYLRHLVVSGXWLPLRLISIHNLRFLVRLGEXARRRVIDGSFDHWHRDWLERYKKEGKAS

SEQ ID NO: 55575 - protein, 376 aa, Gemmatimonadales bacterium
  misc_feature (1)..(376): tr|A0A524HQD9|A0A524HQD9_9BACT Queuine tRNA-ribosyltran sferase OS=Gemmatimonadales bacterium OX=2448054 GN=tgt PE=3 SV=1
MFEFTLHATADAARAGSLLLPHGTVDTPAFMPVGTYGVVRGLHPSELERAGAQIILANTYHLHVRPGEATIQAVGGLHHFTTWRRPMLTDSGGFQVFSLKGLRTITEDGVEFQNPLNGDIHFLTPERAVEIQYALGADIAMAFDHVVPGQSSHEAARDGMERTLRWLERCATRHATLDRGQGRQTLWPIVQGGGHDDLRTRSATDTLTRGPWSGIAIGGLSVGEPKPRMHHVLELLHPVLPPTLPRYLMGVGFPPDLLEGIARGIDLFDCVAATRNGRHGSAWTVSGALNIRAARHRTAREPIDPECDCETCARFSRAYLRHLFMAEDMLGLRLVSIHNVRFAIRLAEQARARILDGSFAGWSRNWLERYYARGNE

SEQ ID NO: 55576 - protein, 371 aa, Gemmatimonadales bacterium
  misc_feature (1)..(371): tr|A0A524IVR6|A0A524IVR6_9BACT Queuine tRNA-ribosyltran sferase OS=Gemmatimonadales bacterium OX=2448054 GN=tgt PE=3 SV=1
MEARCGTARAGTLRLRHGDVVTPCFMPVGTVGTVKFLTPEDLRAAGATIILGNTYHLYLRPGTEVIEAAGGLAPFMHWDGPILTDSGGFQVYSLSNLNRVEEHGATFRSHIDGSSHLLTPENVVDIQAVIGSDVMMALDVCPPGNADRQTANDAVERTLRWLARCRSRREELLHKSDSRAGLLFPIVQGSSFEDLRLESARRTQEMADWSGIAIGGLSVGEPKHVTYEMLEVLDPVLSTDRPRYLMGVGYPDDLVESIRRGADMFDCVAPTRNGRNGTAFTSYGQVNVRKAAFRTDFQPLDPNCACECCRNYSRAYLRHLFKCGELLGHRLLSVHNVAFLLSLAARAREEILAGSFEGWASSWLERYPAGP

SEQ ID NO: 55577 - protein, 376 aa, Gemmatimonadetes bacterium
  misc_feature (1)..(376): tr|A0A1Q7E3V1|A0A1Q7E3V1_9BACT Queuine tRNA-ribosyltran sferase OS=Gemmatimonadetes bacterium 13_1_40CM_66_11 O X=1805195 GN=tgt PE=3 SV=1
MFDFWIDGQSGAARSGSLTLPHGTVETPVFMPVGTQATVRTLSPADLKAVGAQIVLANTYHLHVRPGEDVIAQLGGLHKFMAWERPLLTDSGGFQVFSLEGFRKVDEAGVEFQSHVDGGRRTLTPERAIEIQATLGSDIAMAFDHVIPGGADEATARDALDRTLRWLARCKKRHDELQTSEQTLWPIIQGGTLPALRTECLDRILELGPWTGIAIGGLSVGEAKDVMYQTIDVLEARLPPALPRYLMGVGFPADLVAAVERGVDLFDCVAPTRGGRNGSAFTPEGTLNIRNAAYRTDDSPLDPSCDCETCTTYSRGYLRHLFVAGELLGLRLLSLHNVRFLIRLAAEMRAAIQRGGDAFRVWADDWRRRYQPTGVA

SEQ ID NO: 55578 - protein, 372 aa, Gemmatimonadetes bacterium
  misc_feature (1)..(372): tr|A0A1Q7AC12|A0A1Q7AC12_9BACT Queuine tRNA-ribosyltran sferase OS=Gemmatimonadetes bacterium 13_2_20CM_2_69_23 OX=1805204 GN=tgt PE=3 SV=1
MFEFTIEATSSAARTGTLVLPHGTIETPAFMPVGTQGTVRTLSPADLKSVGAQLVLANTYHLHVRPGEGVVQRLGGLHRFMGWDRPLLTDSGGFQVFSLEGSRRVDEDGVEFQSHVDGSRRHLTPERATEIQWTLGADIAMAFDHVVPGGADEATARDALERTLRWLERCAARHRELADGRQTLWPILQGGTHLGLREEGLRRIGDLASWTGLAIGGLSVGEPKPVMYQMLEGLEPRLPPAWPRYLMGVGFPEDLVAAVERGMDLFDCVAPTRNGRNGSAFTPDGPVNIRNAEHREDPRPLDATCDCETCGTFSRGYLRHLFVAEELLGLRLLSLHNVRFLIRLAREMGAATRAGTFPRWAAEWRRRYTRSD

SEQ ID NO: 55579 - protein, 405 aa, Gemmatimonas aurantiaca
  misc_feature (1)..(405): tr|C1AC58|C1AC58_GEMAT Queuine tRNA-ribosyltransferase OS=Gemmatimonas aurantiaca (strain T-27 / DSM 14586 / J CM 11422 / NBRC 100505) OX=379066 GN=tgt PE=3 SV=1
MTDFGFSTSHASGAARLGAFRTPHGVVQTPAFMPVGTHASVRGLAMHEIRDAGAQMVLANAYHLYLRPGDEMVRALGGVHAFARWDGPMLTDSGGYQVFSLSRYRTVTEDGVEFRSKLDGSRHRYTPEKVMQIERNIGADVIMQLDELIEGGSSFDASRSAMERSLRWLERCRVEFERLSREGRAPVASMSVPDGAPPLATHDVERDRLAPPQALFPIVQGGTYAELRRASIEGILSAGDWVGVAVGGLSVGEAKEAMYDTFDVCSPLLPADKPRYLMGVGFPDDLLEAVSRGMDLFDCVAPTRMGRHGTVFTRDGKMQIQKSSNRTDRRPLTDACPCPACTQYDRAYLRHLMVTEEPLGPRLLALHNLTFLMELMRETRVALRDGVFAGWSGEWLARYRRKEKD

SEQ ID NO: 55580 - protein, 405 aa, Gemmatimonas aurantiaca; identical to SEQ ID NO: 55579
  misc_feature (1)..(405): tr|A0A3D4VC53|A0A3D4VC53_9BACT Queuine tRNA-ribosyltran sferase OS=Gemmatimonas aurantiaca OX=173480 GN=tgt PE= 3 SV=1

SEQ ID NO: 55581 - protein, 384 aa, Gemmatimonas phototrophica
  misc_feature (1)..(384): tr|A0A143BIG5|A0A143BIG5_9BACT Queuine tRNA-ribosyltran sferase OS=Gemmatimonas phototrophica OX=1379270 GN=tgt PE=3 SV=1
MSHFSFETQHTDGHARAGVFHTPHGPVETPQFMPVGTLASVKSLDPEDLSRLGATMVLANAYHLRLRPGDELVRTMGGLHQFMQWSGPMLTDSGGFQVFSLEGLRTIQEEGVEFRSHLDGSLQQFTPESVMRIERNLGADVIMQFDHVVPGQSPHDLAKVAMERSIRWLDRCRIAFDELQATDLSAPTPVQALFPIVQGGIHADLRRASAQAIRNAGDWVGYGIGGLSVGEAKPDMYAMLDVVNEELPTDRPRYLMGVGFPEDLVEGVARGVDVFDCVAPTRMGRTGAFFTSTGRRSIKNAQWRTDPEPLEVGCTCAACTRFSKAYIRHLFVAEEILGLRLLSLHNVHFLVALMRDARAAVQAGTFEGWSRDWLARYHSRKTAS

SEQ ID NO: 55582 - protein, 405 aa, Gemmatimonas phototrophica
  misc_feature (1)..(405): tr|A0A143BLC1|A0A143BLC1_9BACT Queuine tRNA-ribosyltran sferase OS=Gemmatimonas phototrophica OX=1379270 GN=tgt PE=3 SV=1
MTAFGFRTSHANGHARLGWFTTPHGVVETPAFMPVGTHASVRGLAMQEIRDAGAQMILANAYHLYLRPGDQMVRALGGLHAFSRWEGPMLTDSGGYQVFSLARYRKVSEEGVEFRNKIDGSLHQYTPEKVMQIERNIGADVIMQLDELIEGGSEHRASYRAMERSLRWLERCRVEFERLDRDGRAPVRGLTVPDGAPALSTQDMTRDVVAPPQALFPIVQGGTYADLRTASINGILQSGDWAGIAVGGLSVGEAKSAMYDTFDTCAPLLPLDKPRYLMGVGFPDDLLEAVSRGMDLFDCVAPTRMGRHGTVFTSDGKVQIQKSSNRTDRRPLTDDCACPACMQYDRAYLRHLMVTEEPLGPRLLALHNLTFLMALMAKAREQLAAGEFGAWSSGWLSRYRSKGMG

SEQ ID NO: 55583 - protein, 379 aa, Gemmatimonas sp.
  misc_feature (1)..(379): tr|A0A0S8B7J6|A0A0S8B7J6_9BACT Queuine tRNA-ribosyltran sferase OS=Gemmatimonas sp. SG8_28 OX=1703357 GN=tgt PE =3 SV=1
MFDFTLEATGGPARAGRLTLPHGVVSTPAFMPVGTQGTVRALSPQDLTAVGATMVLANTYHLHVRPGEDTVAALGGLHRFMAWSGPILTDSGGFQVFSLEGFRRVAEEGVEFQSHVDGGRRHLGPERAVEIQWVLGSDVAMAFDHVVPGGVDVSTAEDAMDRTTRWLARCLARHRELATEDPERQTLWPILQGAAHTSLRRVHARQVLGLADWTGLAIGGLAVGEPKPVMYEVLEALAPDLPPDRPRYLMGVGFPGDLLGSIARGVDLFDCVAPTRNGRNGSAYTVEGPVNIRNAAHRTDLAPLDPECDCETCRTYSRGYLRHLFVAEELLGLRLLSLHNVRFLVRLAAQARQHIVAGTFETWHREWLDRYNTRGQRDT

SEQ ID NO: 55584 - protein, 380 aa, Gemmatimonas sp.
  misc_feature (1)..(380): tr|A0A0S7Z3I9|A0A0S7Z3I9_9BACT Queuine tRNA-ribosyltran sferase OS=Gemmatimonas sp. SG8_23 OX=1703356 GN=tgt PE =3 SV=1
MFDYDLTSRAGAARAGTFTTPHGEVPTPAFMPVGTAATVKGLIMEEVEALGARMVLANTYHLYLRPGHDLIRRLGGLHDFMRWEGPILTDSGGYQVFSLADIRSIHEEGVEFQSHVDGSRHTFTPESVMDVQRALGADVIMAFDECPPGGCDRATAEAANRRTLAWLERCRARFEELAGERAVPEQALFPVLQGNVYDDLRREHAQQFMDLADWPGYGIGGLSVGEAKEDMWRTLELLDGILPEDRPRYLMGVGYPDDLLEAVARGCDLFDCVAPTRNARHGTAWTSEEGQVNLKAARFREDTRPIDPGCDCYTCSRYDRAYLRHLVVCAEWLPVRLLSIHNLRFLVRLGEEARRRIGDGSFDGWSRDWLERYRNARSSA

SEQ ID NO: 55585 - protein, 433 aa, Gemmatirosa kalamazoonesis
  misc_feature (1)..(433): tr|W0RH39|W0RH39_9BACT Queuine tRNA-ribosyltransferase OS=Gemmatirosa kalamazoonesis OX=861299 GN=tgt PE=3 SV= 1
MPFDFTTHGMLGRARTGTFTTPHGPIATPTFMAVGTLATVKSLDPEDLRAMGATMILANAYHLHLRPGDELVREMGGLHRFMAWDRPILTDSGGFQVFSLEGLRTIDEDGVDFRSHIDGSRRRFTPESVMRIERNLGADVVMQFDHVPPGQSEPAVARDAMERSLRWLARCRAEHARLRSDDPDAPTPEQALFPIVQGGIHAELRQASARGIRDMGDWVGYGVGGLSVGEAKPDMYAMLEVVDDELPADRPRYLMGVGYPEDLVEAVRRGVDLFDCVAPTRMGRNGAALTQDGRINLKNARYRNEPGPLDEACDCTACRRFSRAYVRHLVAADEMLGLRLLSLHNVHFLVALMRDARAAIERGTFDGWSAAWLDRYLAGERARGAVSRPVLPHAKKSGLGTRDSGLGSPEPTSPESRVPSPESRVPSPESRNR

SEQ ID NO: 55586 - protein, 377 aa, Gemmiger formicilis
  misc_feature (1)..(377): tr|A0A1T4WQD6|A0A1T4WQD6_9FIRM Queuine tRNA-ribosyltran sferase OS=Gemmiger formicilis OX=745368 GN=tgt PE=3 SV =1
MPYRLIKQEGAARRGEFTTVHGTVQTPAFQNVATAAAIKGGLSALDLKDIRAQVMLCNTYHLHLRPGDKLVAEMGGLHKFTKWDGPILTDSGGFQVFSLAKLRHITEEGVTFNSHLDGHRIFMGPEQSMQIQANLGSTIAMAFDECVENPATYEYAKNSCARTARWLLRCKDEMNRLKHEEKAVNPDQLLFGINQGCTFADLRVEHMKQIAEYDLDGYAIGGLAVGEPAEVMYDIISAVEPFAPKNKIRYLMGVGTPGNIIEGVYRGVDLFDCVMPSRNARHGHLFTWDGIINIKNLKYERDESPIDPHCDCPVCRNFSRAYIRHLQKADELLGMRLAVMHNLYFYNHLMERIREALDNGTFQQFHDTYVHKLDTRI

SEQ ID NO: 55587 - protein, 377 aa, Gemmiger sp.
  misc_feature (1)..(377): tr|A0A1Y3XJJ2|A0A1Y3XJJ2_9FIRM Queuine tRNA-ribosyltran sferase OS=Gemmiger sp. An50 OX=1965639 GN=tgt PE=3 SV= 1
MPYRLLKTEHNARRGEFETVHGTVQTPAFMNVATAAAIKGGLSAFDLKDIHCQVMLCNTYHLHLRPGDKLVAEMGGLHKFTRWDGPILTDSGGFQVFSLSKLRKITEEGVTFNSHLDGHKIFMGPEESMQIQANLGSTIAMAFDECVENPAEYKYSKDSCDRTVRWLKRCKAEMERLKREGLAVNPNQMLFGINQGCTYEDLRVEHMKQIAELDLDGYAIGGLAVGEPAEDMYRIISAVEPHMPKDKIRYLMGVGTPGNIIEAVSRGVDLFDCVMPSRNARHGHLNTWSGIINIKNLKYQKDEGPIDPECDCPVCRNFSRAYLRHLFKADEMLGMRLGVMHNLYFYNRLMERIRQALDEGNFQEFHDRYVTLLDTRI

SEQ ID NO: 55588 - protein, 381 aa, Gemmiger sp.
  misc_feature (1)..(381): tr|A0A1Y4TMB7|A0A1Y4TMB7_9FIRM Queuine tRNA-ribosyltran sferase OS=Gemmiger sp. An120 OX=1965549 GN=tgt PE=3 SV =1
MDTPLPYTLLKQEHNARRGQFETVHGTVQTPAFMNVATAAAIKGGLSALDLKDIRCQVMLCNTYHLHLRPGDKIVAELGGLHKMTRWDGPILTDSGGFQVFSLSKLRKITEEGVTFQSHLDGHRIFMGPEESMQIQANLGSTIAMAFDECVENPAEYAYSKASCDRTVRWLARCKAEMARLKNEGKAVNPHQLLFGINQGCTFDDLRVEHMKQIAELDLDGYAIGGLAVGEPTEEMYRVISAVEPHMPKDKIRYLMGVGTPGNIIEAVSRGVDLFDCVMPSRNARHGHLNTWSGIINIKNLKYQKDEQPIDPECDCPVCRTFTRAYLRHLFKADEMLGMRLAVMHNLYFYNRLMERIREALDNGTFAQFHDQYVTLLDTRI

SEQ ID NO: 55589 - protein, 376 aa, Gemmobacter aquatilis
  misc_feature (1)..(376): tr|A0A1H8CA48|A0A1H8CA48_9RHOB Queuine tRNA-ribosyltran sferase OS=Gemmobacter aquatilis OX=933059 GN=tgt PE=3 SV=1
MSGKFGFQLQATDGAARTGVISTPRGEIRTPAFMPVGTAATVKAMMPESVRATGADILLGNTYHLMLRPTAERIARLGGLHKFMNWERPILTDSGGFQVMSLASLRKLTEEGVKFSSHIDGSKHMLSPERSMEIQKLLGSDIVMCFDECPALPATEGEVAKSMRLSMRWAQRSRDAFGDRPGHALFGIMQGGVTPELREESAKALTAIGFDGYAVGGLAVGEGQEAMFGVLDYAPGYLPADKPRYLMGVGKPDDIVGAVERGIDMMDCVLPSRSGRTGQGWTRRGQVNIKNARHMDDPRPLDEDCTCPCCRNYSRAYLHHVFKSQEIISSMLLTWHNLHYFQELMQGLRDAIAGQRLAAFVAAFHAQRAEGDIEPL

SEQ ID NO: 55590 - protein, 376 aa, Gemmobacter caeni
  misc_feature (1)..(376): tr|A0A2T6AP46|A0A2T6AP46_9RHOB Queuine tRNA-ribosyltran sferase OS=Gemmobacter caeni OX=589035 GN=tgt PE=3 SV=1
MTQRFGFQLHATNGRARTGVISTPRGEIRTPAFMPVGTAATVKAMLPESVRATGADILLGNTYHLMLRPTAERIARLGGLHKFMNWDRPILTDSGGFQVMSLASLRKLTEEGVRFSSHVDGSKHMLTPERSMEIQRLLGSDIVMCFDECPALPATEDEVAKSMRLSMRWAQRSRDAFGDRPGHALFGIMQGGVTPELREESAAALKSIGFDGYAVGGLAVGEGQEAMLGVLDYAPGYLPEDKPRYLMGVGKPDDIVGAVERGIDMMDCVLPSRSGRTGQAWTRRGQVNIKNARHQDDPRPLDENCTCPACRSYSRAYLHHVFRAGEMISGMLLTWHNLHYYQELMQGLRDAIAEGRMAAFVADFHARRAEGDIDPL

SEQ ID NO: 55591 - protein, 376 aa, Gemmobacter intermedius
  misc_feature (1)..(376): tr|A0A444MFF9|A0A444MFF9_9RHOB Queuine tRNA-ribosyltran sferase OS=Gemmobacter intermedius OX=1553448 GN=tgt PE =3 SV=1
MAEGFGFTLKATDGAARTGVIHTTRGEIRTPAFMPVGTAATVKAMMPDSVRATGADILLGNTYHLMLRPGAERVARLGGLHKFMNWERPILTDSGGFQVMSLSSLRKLTEEGVTFRSHYDGSKHVLTPERSMEIQKLLGSDIVMCFDECPALPATEAEVAKSMRLSMRWAQRSRDAFGDRPGHALFGIMQGGVTRDLREESAEKLKSIGFDGYAVGGLAVGEGQEAMFDVLNYAPGFLPEDKPRYLMGVGKPDDIVGAVERGIDMMDCVLPSRSGRTAQGWTRRGQVNLRNARHQDDPRPLDENCSCPACRNYSRGYLHHVIRAQEIIGSMLLTWHNLHYYQDLMQGLRDAIEAQNLKAFVADFHAKRAEGDIDPL

SEQ ID NO: 55592 - protein, 376 aa, Gemmobacter lutimaris
  misc_feature (1)..(376): tr|A0A398BP81|A0A398BP81_9RHOB Queuine tRNA-ribosyltran sferase OS=Gemmobacter lutimaris OX=2306023 GN=tgt PE=3 SV=1
MTQRFGFQLHATDGRARTGVISTPRGEIRTPAFMPVGTAATVKAMLPESVRATGADILLGNTYHLMLRPTAERIARLGGLHKFMNWDRPILTDSGGFQVMSLASLRKLTEEGVRFSSHVDGSKHMLSPERSMEIQRLLGSDIVMCFDECPALPATEDEVAKSMRLSMRWAQRSRDAFGDRPGHALFGIMQGGVTPELREESAEALKAIGFDGYAVGGLAVGEGQEAMFGVLDYAPGYLPEDKPRYLMGVGKPDDIVGAVERGIDMMDCVLPSRSGRTGQAWTRRGQVNIKNARHQDDPRPLDENCTCPACRSYSRAYLHHVFRAGEMISGMLLTWHNLHYYQELMQGLRDAIAEGRLAAFVADFHAQRGAGDIEPL

SEQ ID NO: 55593 - protein, 376 aa, Gemmobacter megaterium
  misc_feature (1)..(376): tr|A0A1N7QSL6|A0A1N7QSL6_9RHOB Queuine tRNA-ribosyltran sferase OS=Gemmobacter megaterium OX=1086013 GN=tgt PE= 3 SV=1
MIPSFRFHISTSCGMARTGVISTPRGEIRTPAFMPVGTAGTVKAMMPDSVRATGADILLGNTYHLMLRPGAERVARLGGLHRFMNWERPILTDSGGFQVMSLSSLRKLTEEGVTFRSHYDGSRHKLTPERSMEIQRLLGSDIVMCFDECPALPATEAEVAKSMQLSMRWAQRSRDAFGDRPGHALFGIMQGGVTRDLREESAQALRAIGFDGYAVGGLAVGEGQAAMFGVLDYAPGFLPEDKPRYLMGVGKPDDIVGAVERGIDMMDCVLPSRSGRTGQGWTRRGSVNIRNARHADDPRPLDEACTCPACRNYSRAYLHHVVRSGEIIGSMLLTWHNLHYFQELMQGLRDAITAGRLPQFVADFHALRAEGDIEPL

SEQ ID NO: 55594 - protein, 376 aa, Gemmobacter sp.
  misc_feature (1)..(376): tr|A0A3P3DGY6|A0A3P3DGY6_9RHOB Queuine tRNA-ribosyltran sferase OS=Gemmobacter sp. YIM 102744-1 OX=2488730 GN=t gt PE=3 SV=1
MAEGFGFTLKATDGAARTGVIHTTRGEIRTPAFMPVGTAATVKAMMPESVRATGADILLGNTYHLMLRPGAERVDRLGGLHKFMNWERPILTDSGGFQVMSLSSLRKLTEEGVTFRSHYDGSKHVLTPERSMEIQKLLGSDIVMCFDECPALPATEAEVAKSMRLSMRWAQRSRDAFGDRPGHALFGIMQGGVTRDLREESAEKLKSIGFDGYAVGGLAVGEGQEAMFDVLNYAPGFLPEDKPRYLMGVGKPDDIVGAVERGIDMMDCVLPSRSGRTAQGWTRRGQVNLRNARHQDDPRPLDENCSCPACRNYSRGYLHHVIRAQEIIGSMLLTWHNLHYYQDLMQGLRDAIESQNLKAFVAAFHAKRAEGDIDPL

SEQ ID NO: 55595 - protein, 376 aa, Gemmobacter sp.
  misc_feature (1)..(376): tr|A0A2S0UKS2|A0A2S0UKS2_9RHOB Queuine tRNA-ribosyltran sferase OS=Gemmobacter sp. HYN0069 OX=2169400 GN=tgt PE =3 SV=1
MATGFGFTVQATDGKARTGVIETTRGAVRTPAFMPVGTAGTVKAMLPESVRATGADILLGNTYHLMLRPTAERIAALGGLHKFMNWDRPILTDSGGFQVMSLASLRKMTEEGVRFSSHIDGSKHMLTPERSMEIQKLLGSDIVMCFDECPALPATDAEVAKSMRMSMRWAQRSRDAFGDRPGHALFGIMQGGVTRALREESAEALTAIGFDGYAVGGLAVGEGQEAMFDVLNYAPGMLPEDKPRYLMGVGKPDDIVGAVERGIDMMDCVLPSRSGRTGQAWTRMGQINIKNARHQNDPRPLDEACTCPACRNYSRAYLHHVNKAGEIIASMLMTWHNLHYYQELMQGLRDAIAGGRLAAFVADFHAKRAQGDIEPL

SEQ ID NO: 55596 - protein, 378 aa, Geoalkalibacter ferrihydriticus
  misc_feature (1)..(378): tr|A0A1G9PXR0|A0A1G9PXR0_9DELT Queuine tRNA-ribosyltran sferase OS=Geoalkalibacter ferrihydriticus OX=392333 GN =tgt PE=3 SV=1
MNHFQFSLLTADPESAARRGRIQTPRGVIETPIFMPVGTQGTVKGMLPEALKDIGAQIILANTYHLFLRPGHERVQRLGGLHRFMNWDRPILTDSGGFQVFSLGELRRITEEGVVFQSHLDGSAHLLSPELSIGVQQALGADIIMAFDECIPYPATREYVLQSTLRSTRWALRCKNALGEKGQQALFGIVQGGMHSDLRRQSSDQLQEIGFDGYAVGGLSVGEEAEVMYEAMDFTLPLLPQDRPRYVMGVGTPENLIEGIRRGVDMFDCVMPTRNARNGVLFTSFGKISIKQARYMDDQQPVDSVCSCYVCRNYSRAYLRHLYQSGEILASVLNTHHNLHYYLDLMTQARQAIEEGSFSRFRREFYRIRQEQNLLSES

SEQ ID NO: 55597 - protein, 374 aa, Geoalkalibacter ferrihydriticus
  misc_feature (1)..(374): tr|A0A0C2HL74|A0A0C2HL74_9DELT Queuine tRNA-ribosyltran sferase OS=Geoalkalibacter ferrihydriticus DSM 17813 OX =1121915 GN=tgt PE=3 SV=1
MFQFELLHTDRTSRARRGRLSTPHGVIETPIFMPVGTHGALKAMTTAQVEETGAQIILSNTYHLHLRPGEGLVEKAGGLHRFMNWSKPILTDSGGFQVFSLPKKKITDDGVFFRHEVSGNEIFLGPQEATRIQNALGADIIMAFDECIPYPSTHAYAAQSIKKTLRWAELCLKSHSRSDQALFAIVQGSVYADLRRDCAQALVDLDFPGYAVGGVSVGEGLELLKKVVDDTAPYLPENKPRYLMGVGLPEDILESIERGMDMFDCVIPTRYARSATLFTSHGRLRLTHRRYRRDFFPVDPACECYCCRNFTRAYLHHLYNANEILSATLAAIHNVHFYLNLTTQARKAIEQDEFQAFKQDFLGRYQSQGKDEQP

SEQ ID NO: 55598 - protein, 372 aa, Geoalkalibacter subterraneus
  misc_feature (1)..(372): tr|A0A0B5FQM9|A0A0B5FQM9_9DELT Queuine tRNA-ribosyltran sferase OS=Geoalkalibacter subterraneus OX=483547 GN=tg t PE=3 SV=1
MIPFSFDLLHQDTRTQARRGRIHTSRGKIETPIFMPVGTQATVKGLLPEALKEVGAQIILANTYHLFLRPGHQTVQDLGGLHRFMNWDRPILTDSGGFQVFSLGQLRKISEEGVLFQSHLDGSTHLLTPELATGVQEALGADIIMAFDECIAYPSPRDYVQRSTDLSARWARRCKEARREGDGSALFGIVQGGMFPDLRRKSCEDLLEIGFDGYALGGLSVGEEASVMYDVMEATLPHLPHDHPRYVMGVGTPENLIEGISRGVDMFDCVMPTRNARNGVLFTSFGRISIKQARYARDEQPVDPACGCYVCRNYSRAYLRHLYQSGEILASVLNTHHNIHYYLDLMASARSAIEANSFVEFKRDFYHQRATH

SEQ ID NO: 55599 - protein, 370 aa, Geoalkalibacter subterraneus
  misc_feature (1)..(370): tr|A0A0B5FWL0|A0A0B5FWL0_9DELT Queuine tRNA-ribosyltran sferase OS=Geoalkalibacter subterraneus OX=483547 GN=tg t PE=3 SV=1
MKFDLIKKDPTTRARRGRVTTPHGTIETPIFMPVGTHAALKAMSPAQVEETGAQIILSNTYHLHLRPGEGLISKAGGLHKFMSWDKPILTDSGGFQVFSLPKKKIAEDGVYFRHEISGQEIFLGPAEATRIQNELGADIAMAFDECIPYPSTHAYAAQSIKKTLRWAEICMKSHARPDQALFGIVQGSTFEDLRRDCAKALVDMDFPGYAVGGVSVGEGLELLKKVVDYTEPFLPENKPRYLMGVGLPEDILESIERGMDMFDCVIPTRYARSATLFTSHGRLRLTHRRYRRDFFPVDPACDCYCCRNFSRAYLHHLYNANEILSATLAAIHNVRFYLNMVAGARDAIEQGTFAEFKREFLAEYNSQGKS

SEQ ID NO: 55600 - protein, 380 aa, Geobacillus galactosidasius
  misc_feature (1)..(380): tr|A0A226QL16|A0A226QL16_9BACI Queuine tRNA-ribosyltran sferase OS=Geobacillus galactosidasius OX=883812 GN=tgt PE=3 SV=1
MTSPIRFELIKTCKQTGARLGILHTPHGSFETPMFMPVGTLATVKTLSPEELKEIGAGIILSNTYHLWLRPGHEIVKEAGGLHSFMNWDRGILTDSGGFQVFSLSEFRRIEEEGVYFRNHLNGDKLFLSPEKAIEIQNALGSDIMMAFDECPPYPATYEYMKQSVERTSRWAERCLKAHKRPNEQGLFGIVQGGEFEDLRRQSAQDLVSLDFPGYAVGGLSVGEPKEVMNRVLEFTTPLLPANKPRYLMGVGSPDSLIDGAIRGIDMFDCVLPTRIGRNGTVMTSQGRVVIKNAQYARDFSPLDPNCDCYTCRNYTRAYIRHLIKCDETFGIRLTSYHNVYFLIKLMEQVRQAIREDRLGDFREEFFEQYGFNKPNAKNF

SEQ ID NO: 55601 - protein, 380 aa, Geobacillus kaustophilus
  misc_feature (1)..(380): tr|A0A4D7QBU7|A0A4D7QBU7_GEOKU Queuine tRNA-ribosyltran sferase OS=Geobacillus kaustophilus NBRC 102445 OX=1220 595 GN=tgt PE=3 SV=1
MTTPIRFELIKTCRQTGARLGILHTPHGSFETPMFMPVGTLATVKTLSPEELKTMGAGVILSNTYHLWLRPGHDIVAEAGGLHAFMNWDRGILTDSGGFQVFSLSEFRRIEEEGVYFRNHLNGDKLFLSPEKAVEIQNALGADIIMAFDECPPYPATYEYMKQSIERTSRWAERCLKAHRRPNEQGLFGIVQGGEYEDLRRQSARDLVSLDFPGYAVGGLSVGEPKEVMNRVLEFTTPLLPADKPRYLMGVGSPDSLIDGAIRGIDMFDCVLPTRIGRNGTVMTSEGRVVIKNAQYARDFSPLDPNCDCYTCRNYTRAYIRHLIKCDETFGIRLTSYHNVYFLIKLMEQVRQAIREDRLADFREEFFERYGFNKPNAKNF

SEQ ID NO: 55602 - protein, 380 aa, Geobacillus kaustophilus
  misc_feature (1)..(380): sp|Q5KWR4|TGT_GEOKA Queuine tRNA-ribosyltransferase OS= Geobacillus kaustophilus (strain HTA426) OX=235909 GN=t gt PE=3 SV=1
MTTPIRFELIKTCRQTGARLGILHTPHGSFETPMFMPVGTLATVKTLSPEELKEMGAGVILSNTYHLWLRPGHDIVEEAGGLHAFMNWDRGILTDSGGFQVFSLSEFRRIEEEGVYFRNHLNGDKLFLSPEKAVEIQNALGADIIMAFDECPPYPATYEYMKQSIERTSRWAERCLKAHRRPNEQGLFGIVQGGEYEELRRQSARDLVSLDFPGYAVGGLSVGEPKEVMNRVLEFTTPLLPADKPRYLMGVGSPDSLIDGAIRGIDMFDCVLPTRIGRNGTVMTSEGRVVIKNAQYARDFSPLDPNCDCYTCRNYTRAYIRHLIKCDETFGIRLTSYHNVYFLIKLMEQVRQAIREDRLADFREEFFECYGFNKPNAKNF

SEQ ID NO: 55603 - protein, 380 aa, Geobacillus lituanicus
  misc_feature (1)..(380): tr|A0A223DUL1|A0A223DUL1_9BACI Queuine tRNA-ribosyltran sferase OS=Geobacillus lituanicus OX=169283 GN=tgt PE=3 SV=1
MTTPIRFELIKTCRQTGARLGILHTPHGSFETPMFMPVGTLATVKTLSPEELKEMGAGVILSNTYHLWLRPGHDIVAEAGGLHAFMNWDRGILTDSGGFQVFSLSEFRRIEEEGVYFRNHLNGDKLFLSPEKAVEIQNALGADIIMAFDECPPYPATYEYMKQSIERTSRWAERCLKAHRRPNEQGLFGIVQGGEYEDLRRQSARDLVSLDFPGYAVGGLSVGEPKEVMNRVLEFTTPLLPADKPRYLMGVGSPDSLIDGAIRGIDMFDCVLPTRIGRNGTVMTSEGRVVIKNAQYARDFSPLDPNCDCYTCRNYTRAYIRHLIKCDETFGIRLTSYHNVYFLIKLMEQVRQAIREDRLADFREEFFERYGFNKPNAKNF

SEQ ID NO: 55604 - protein, 380 aa, Geobacillus proteiniphilus
  misc_feature (1)..(380): tr|A0A1Q5TA29|A0A1Q5TA29_9BACI Queuine tRNA-ribosyltran sferase OS=Geobacillus proteiniphilus OX=860353 GN=tgt PE=3 SV=1
MTTPIRFELIKTCRQTGARLGILHTPHGSFETPMFMPVGTLATVKTLSPEELKEMGAGVILSNTYHLWLRPGHDIVAEAGGLHAFMNWDRGILTDSGGFQVFSLSEFRRIEEEGVYFRNHLNGDKLFLSPEKAVEIQNALGADIIMAFDECPPYPATYEYMKQSIERTSRWAERCLKAHRRPNEQGLFGIVQGGEYEELRRQSARDLVSLDFPGYAVGGLSVGEPKEVMNRVLEFTTPLLPADKPRYLMGVGSPDSLIDGAIRGIDMFDCVLPTRIGRNGTVMTSEGRVVIKNAQYARDFSPLDPHCDCYTCRNYTRAYIRHLIKCDETFGIRLTSYHNVYFLIKLMEQVRQAIREDRLADFREEFFERYGFNKPNAKNF

SEQ ID NO: 55605 - protein, 380 aa, Geobacillus sp.
  misc_feature (1)..(380): tr|L7ZUI9|L7ZUI9_9BACI Queuine tRNA-ribosyltransferase OS=Geobacillus sp. GHH01 OX=1233873 GN=tgt PE=3 SV=1
MTTPIRFELIKTCRQTGARLGILHTPHGSFETPMFMPVGTLATVKTLSPEELKEMGAGVILSNTYHLWLRPGHDIVAEAGGLHAFMNWDRGILTDSGGFQVFSLSEFRRIEEEGVYFRNHLNGDKLFLSPEKAVEIQNALGADIIMAFDECPPYPATYEYMKQSIERTSRWAERCLKAHRRPNEQGLFGIVQGGEYEELRRQSARDLVSLDFPGYAVGGLSVGEPKEVMNRVLEFTTPLLPADKPRYLMGVGSPDSLIDGAIRGIDMFDCVLPTRIGRNGTVMTSEGRVVIKNAQYARDFSPLDPNCDCYTCRNYTRAYIRHLIKCDETFGIRLTSYHNVYFLIKLMEQVRQAIREDRLADFREEFFERYGFNKPNAKNF

SEQ ID NO: 55606 - protein, 380 aa, Geobacillus sp.
  misc_feature (1)..(380): tr|A0A0Q0YE42|A0A0Q0YE42_9BACI Queuine tRNA-ribosyltran sferase OS=Geobacillus sp. Sah69 OX=1737624 GN=tgt PE=3 SV=1
MTTPIRFELIKTCRQTSARLGILHTPHGSFETPMFMPVGTLATVKTLSPEELKTMGAGVILSNTYHLWLRPGHDIVAEAGGLHAFMNWDRGILTDSGGFQVFSLSEFRRIEEEGVYFRNHLNGDKLFLSPEKAVEIQNALGADIIMAFDECPPYPATYEYMKQSIERTSRWAERCLKAHRRPNEQGLFGIVQGGEYEDLRRQSARDLVSLDFPGYAVGGLSVGEPKDVMNRVLEFTTPLLPADKPRYLMGVGSPDSLIDGAIRGIDMFDCVLPTRIGRNGTVMTSEGRVVIKNAQYARDFSPLDPNCDCYTCRNYTRAYIRHLIKCDETFGIRLTSYHNVYFLIKLMEQVRQAIREDRLADFREEFFERYGFNKPNAKNF

SEQ ID NO: 55607 - protein, 380 aa, Geobacillus stearothermophilus
  misc_feature (1)..(380): tr|A0A0K2H646|A0A0K2H646_GEOSE Queuine tRNA-ribosyltran sferase OS=Geobacillus stearothermophilus 10 OX=272567 GN=tgt PE=3 SV=1
MTTPIRFELIKTCRQTGARLGILHTPHGSFETPMFMPVGTLATVKTLSPEELKEMGAGVILSNTYHLWLRPGHDIVAEAGGLHAFMNWDRGILTDSGGFQVFSLSEFRRIEEEGVYFRNHLNGDKLFLSPEKAVEIQNALGADIIMAFDECPPYPATYEYMKQSIERTSRWAERCLKAHRRPNEQGLFGIVQGGEYEELRRQSARDLVSLDFPGYAVGGLSVGEPKEVMNRVLEFTTPLLPVDKPRYLMGVGSPDSLIDGAIRGIDMFDCVLPTRIGRNGTVMTSEGRVVIKNAQYARDFSPLDPNCDCYTCRNYTRAYIRHLIKCDETFGIRLTSYHNVYFLIKLMEQVRKAIREDRLADFREEFFERYGFNKPNAKNF

SEQ ID NO: 55608 - protein, 380 aa, Geobacillus stearothermophilus; identical to SEQ ID NO: 55601
  misc_feature (1)..(380): tr|A0A0K9HJK2|A0A0K9HJK2_GEOSE Queuine tRNA-ribosyltran sferase OS=Geobacillus stearothermophilus OX=1422 GN=tg t PE=3 SV=1

SEQ ID NO: 55609 - protein, 380 aa, Geobacillus subterraneus
  misc_feature (1)..(380): tr|A0A143MJ81|A0A143MJ81_9BACI Queuine tRNA-ribosyltran sferase OS=Geobacillus subterraneus OX=129338 GN=tgt PE =3 SV=1
MTTPIRFELIKTCRQTGARLGILHTPHGSFETPMFMPVGTLATVKTLSPEELKDMGAGVILSNTYHLWLRPGHDIVAEAGGLHAFMNWDRGILTDSGGFQVFSLSEFRRIEEEGVHFRNHLNGDKLFLSPEKATEIQNALGADIIMAFDECPPYPATHDYMKQSVERTSRWAERCLKAHRRPNEQGLFGIVQGGEYEDLRRQSARDLVSLDFPGYAVGGLSVGEPKEVMNRVLEFTTPLLPADKPRYLMGVGSPDSLIDGAIRGIDMFDCVLPTRIGRNGTVMTSEGRVVIKNAQYARDFTPLDPHCDCYTCRNYTRAYLRHLIKCDETFGIRLTSYHNVYFLIKLMEQVRQAIREDRLADFREEFFERYGFNKPNAKNF

SEQ ID NO: 55610 - protein, 380 aa, Geobacillus thermocatenulatus
  misc_feature (1)..(380): tr|A0A226QAV2|A0A226QAV2_9BACI Queuine tRNA-ribosyltran sferase OS=Geobacillus thermocatenulatus OX=33938 GN=tg t PE=3 SV=1
MTTPIRFELIKTCRQTGARLGILHTPHGSFETPMFMPVGTLATVKTLSPEELKEMGAGIILSNTYHLWLRPGHDIVAEAGGLHAFMNWDRGILTDSGGFQVFSLSEFRRIEEEGVHFRNHLNGDQLFLSPEKAMEIQNALGADIIMAFDECPPYPATYEYMKQSIERTSRWAERCLKAHRRPNEQGLFGIVQGGEYEELRRQSARDLVSLDFPGYAVGGLSVGEPKEVMNRVLEFTTPLLPADKPRYLMGVGSPDSLIDGAIRGIDMFDCVLPTRIGRNGTVMTSEGRVVIKNAQYARDFSPLDPNCDCYTCRNYTRAYIRHLIKCDETFGIRLTSYHNVYFLIKLMKQVRQAIREDRLADFREEFFERYGFNKPNAKNF

SEQ ID NO: 55611 - protein, 380 aa, Geobacillus thermodenitrificans
  misc_feature (1)..(380): sp|A4IRA9|TGT_GEOTN Queuine tRNA-ribosyltransferase OS= Geobacillus thermodenitrificans (strain NG80-2) OX=4202 46 GN=tgt PE=3 SV=1
MTTPIRFELIKTCRQTGARLGILHTPHGSFETPMFMPVGTLATVKTLSPEELKEMGAGVILSNTYHLWLRPGHDIVAEAGGLHAFMNWDRGILTDSGGFQVFSLSEFRRIEEEGVYFRNHLNGDKLFLSPEKATEIQNALGADIIMAFDECPPYPATYDYMKRSVERTSRWAERCLKAHRRSNEQGLFGIVQGGEYEDLRRQSARDLVSLDFPGYAVGGLSVGEPKDVMNRVLEFTTPLLPTDKPRYLMGVGSPDSLIDGAIRGIDMFDCVLPTRIGRNGTVMTSEGRVVIKNAQYARDFTPLDPNCDCYTCRNYTRAYIRHLIKCDETFGIRLTSYHNVYFLIKLMEQVRQAIREDRLADFREEFFERYGFNKPNAKNF

SEQ ID NO: 55612 - protein, 380 aa, Geobacillus thermodenitrificans; identical to SEQ ID NO: 55611
  misc_feature (1)..(380): tr|A0A1W6VU76|A0A1W6VU76_GEOTD Queuine tRNA-ribosyltran sferase OS=Geobacillus thermodenitrificans OX=33940 GN= tgt PE=3 SV=1

SEQ ID NO: 55613 - protein, 380 aa, Geobacillus thermoleovorans; identical to SEQ ID NO: 55602
  misc_feature (1)..(380): tr|G8N3I1|G8N3I1_GEOTH Queuine tRNA-ribosyltransferase OS=Geobacillus thermoleovorans CCB_US3_UF5 OX=1111068 G N=tgt PE=3 SV=1

SEQ ID NO: 55614 - protein, 387 aa, Geobacillus thermoleovorans
  misc_feature (1)..(387): tr|A0A098L157|A0A098L157_GEOTH Queuine tRNA-ribosyltran sferase OS=Geobacillus thermoleovorans B23 OX=1406857 G N=tgt PE=3 SV=1
MRKENSTLTTPIRFELIKTCRQTGARLGILHTPHGSFETPMFMPVGTLATVKTLSPEELKEMGAGVILSNTYHLWLRPGHDIVEEAGGLHAFMNWDRGILTDSGGFQVFSLSEFRRIEEEGVYFRNHLNGDKLFLSPEKAVEIQNALGADIIMAFDECPPYPATYEYMKQSIERTSRWAERCLKAHRRPNEQGLFGIVQGGEYEELRRQSARDLVSLDFPGYAVGGLSVGEPKEVMNRVLEFTTPLLPADKPRYLMGVGSPDSLIDGAIRGIDMFDCVLPTRIGRNGTVMTSEGRVVIKNAQYARDFSPLDPNCDCYTCRNYTRAYIRHLIKCDETFGIRLTSYHNVYFLIKLMEQVRQAIREDRLADFREEFFECYGFNKPNAKNF

SEQ ID NO: 55615 - protein, 371 aa, Geobacter argillaceus
  misc_feature (1)..(371): tr|A0A562VNC0|A0A562VNC0_9DELT Queuine tRNA-ribosyltran sferase OS=Geobacter argillaceus OX=345631 GN=tgt PE=3 SV=1
MRFTLLKTDPHTAARRGRLETPHGTIETPIFMPVGTHAAMKAMTPEQVEATGAQIILSNTYHLHLRPGEGLVAKAGGLHRFMAWDRPILTDSGGFQVFSLPNKRITEHGAYFKHEITGDEVFLDPAKAIAIQEALGADIIMAFDECIPYPCDRQYAAASTNKTIRWAEACKKAQTRADQALFGIVQGSVFEDLRALCARELVAMDFPGYAIGGVSVGEGLELLKKVVAMTAPFLPTDKPRYLMGVGLPEDILESVERGMDMFDCVIPTRYARSATLFTNRGKIRLTHKNYKRDFYPIEPNCTCYTCQNFTRAYLHHLFNANEVLSAILASIHNVHFYLAMMADIRQAIEDGRFAEYKRTFLAEYLGKGSTN

SEQ ID NO: 55616 - protein, 379 aa, Geobacter argillaceus
  misc_feature (1)..(379): tr|A0A562WQY7|A0A562WQY7_9DELT Queuine tRNA-ribosyltran sferase OS=Geobacter argillaceus OX=345631 GN=tgt PE=3 SV=1
MSAIQFTLIRQDGNARLGSLTTPHGTIETPIFMPVGTQGTVKAMTPDELRQVGSQIILGNTYHLYLRPGHELVARLGGLHRFMAWDGPILTDSGGFQVFSLGELRKITEEGVRFQSHLDGSYHLLTPERSIAVQEALGADIIMCFDECPPEPGDFAYVSRSLELTTRWARRCREAHHRSDQALFGIVQGGLFPELRERSVQELREIGFDGYALGGVSVGEEKARMREVMAFSAPFFPQDQPRYVMGIGTPEDLVEAVAAGYDMFDCVMPTRNARNGMLFTSFGRVSIKRGEYAADEGPLDPECDCYVCRTFSRAYLRHLYRAGEILASRLNTWHNLHYYLNLMSQMRQAIGDGRFAEFRREFYAKRQDAKGSGLRADSL

SEQ ID NO: 55617 - protein, 372 aa, Geobacter bemidjiensis
  misc_feature (1)..(372): tr|B5EFX8|B5EFX8_GEOBB Queuine tRNA-ribosyltransferase OS=Geobacter bemidjiensis (strain Bem / ATCC BAA-1014 / DSM 16622) OX=404380 GN=tgt-2 PE=3 SV=1
MAAISFELIKKDPGSLARLGSLTTTHGSIQTPIFMPVGTQATVKAMTPEELVEVGSQIILANTYHLYLRPGHELIARLGGLHRFMHWDRPMLTDSGGFQVFSLGELRKISEEGVNFRSHIDGSRHFISPEVSIAIQEALGADIAMCFDECPPYPAEYSYVQKSLELTTRWAQRCKNAHQRPDQALFGIVQGGMHPELRRESAKQITDIGFDGYALGGLSVGEEKEVMHRMMHECSDILPENSPRYIMGIGAPEDLVEAVNAGFDMFDCVMPTRNARNGALFTSFGRINIKAAVFAEDQSPIDPACSCYVCRNYSRAYLRHLYRSQEILASRLNSWHNLHYFLDLMAQMRAAIGRGEFSSFRKDFYAARSQQL

SEQ ID NO: 55618 - protein, 368 aa, Geobacter bemidjiensis
  misc_feature (1)..(368): tr|B5EAJ1|B5EAJ1_GEOBB Queuine tRNA-ribosyltransferase OS=Geobacter bemidjiensis (strain Bem / ATCC BAA-1014 / DSM 16622) OX=404380 GN=tgt-1 PE=3 SV=1
MIFKLLKKDPKSGARRGVVTTAHGEIQTPIFMPVATHAAMKAMTPAQVHDTGAQIILSNTYHLHLHPGEALVQKAGGLHQFMGWDGPILTDSGGFQVFSLPKKRITEEGVFFRHEDTGEEVFLDPAKAVAIQEALGADIIMNFDECIPYPCEKSYAERSTEKTIRWAKQCREAHKREKQYLFGIVQGSVFEDLRKRCAKELVKMDFPGYAIGGVSVGEGLELLKQVVGYTAPHLPEDKPRYLMGVGLPEDILESVERGIDMFDCVIPTRYARSATLFTNRGRIRLTNKNYRRDFYPIEPNCTCYTCRNFTRAYLHHLFTANEVLSAILASIHNVHFYLNMMAEIRNSIEEGRFKEYKETFLASYLKGK

SEQ ID NO: 55619 - protein, 369 aa, Geobacter daltonii
  misc_feature (1)..(369): tr|B9M7F0|B9M7F0_GEODF Queuine tRNA-ribosyltransferase OS=Geobacter daltonii (strain DSM 22248 / JCM 15807 / F RC-32) OX=316067 GN=tgt PE=3 SV=1
MTMFTLIKKDSKTAARRGQLTTPHGTIETPIFMPVGTHAAMKAMTPQQVKETGAQIILSNTYHLHLRPGESLVEKAGGLHRFMAWEGPILTDSGGFQVFSLPNKRITDDGAYFKHEITGEEVFLDPAKAIAIQEALGSDIIMAFDECIPYPCDKRYADQSTQKTIRWAEACKKAQTRKDQALFGIVQGSVFEDLREMCAKELVGMDFPGYAIGGVSVGEGLELLKKVVAMTAPFLPEDKPRYLMGVGLPEDILESVERGMDMFDCVIPTRYARSATLFTNRGKIRLTNKNYRRDFYPIDPNCSCYACRNFTRAYIHHLFNANEVLSAILASIHNVHFYLEMMAGIRKAIEEDRFPQFKQEFLASYLKGK

SEQ ID NO: 55620 - protein, 375 aa, Geobacter daltonii
  misc_feature (1)..(375): tr|B9M5N5|B9M5N5_GEODF Queuine tRNA-ribosyltransferase OS=Geobacter daltonii (strain DSM 22248 / JCM 15807 / F RC-32) OX=316067 GN=tgt PE=3 SV=1
MSAIHFNLIKTCSTSGARLGSLTTPHGRIDTPIFMPVGTQATVKAMTPEELVQAGAQIILANTYHLYMRPGHELVARLGGLHRFMHWQGPILTDSGGFQVFSLGELRKITEEGVKFQSHLDGSYHFISPETSIAIQEALGSDIMMCFDECPPYPADYAYVAKSMEMTTRWALRCKNAKKGKDQALFGIVQGGMVPELRERSALALQEIGFDGYALGGVSVGEEKKLMHEVMNFSAPFFPMDKPRYVMGIGAPEDLIEGINAGFDMFDCVMPTRNARNGMVFTSFGRLNIKGARYAEDSLPIDPECDCYVCRNYSRAYLRHLFRSGEILASRLNTWHNLHYYLSLMESARKAIAEDRFAGFRKNFYEKRSGIDGTL

SEQ ID NO: 55621 - protein, 380 aa, Geobacter lovleyi
  misc_feature (1)..(380): tr|B3E2S0|B3E2S0_GEOLS Queuine tRNA-ribosyltransferase OS=Geobacter lovleyi (strain ATCC BAA-1151 / DSM 17278 / SZ) OX=398767 GN=tgt PE=3 SV=1
MPDHFQVEHQDGGCRARTGRLTTPHGEIQTPIFMPVGTNASVKAMRPEDLTDAGAQIILANTYHLYLRPGHRLVEELGGLHRFMSWDRPILTDSGGFQVYSLTELRKITEEGVKFRSHIDGSMHLLTPELSIKVQEALGADIIMCFDECPPADAGREYVERSLAMTTRWAQRSKDAHTRRDQLLFGIVQGGRFSDLRQRSLQELQGIGFDGYALGGLSVGEEKPVMHEVMDACSDLLPADYPRYIMGIGTPEDLVEAVWRGYDMFDCVMPTRNARNGMLFTSQGRVNIKRKQYEQDQGPLDPACSCYVCRNYSRAYLRHLFRSGEILASMLNTHHNIAWYLSLMGRIREAIRQDQFEAFRKEFYHQQHTTAENNKEEYNV

SEQ ID NO: 55622 - protein, 380 aa, Geobacter lovleyi
  misc_feature (1)..(380): tr|B3E2S6|B3E2S6_GEOLS Queuine tRNA-ribosyltransferase OS=Geobacter lovleyi (strain ATCC BAA-1151 / DSM 17278 / SZ) OX=398767 GN=tgt PE=3 SV=1
MNFTLLKKDTHSAARLGILQTSHGEIQTPIFMPVATHGAMKPLTPAQIHETGAQIILSNTYHLHLQPGEGLVKKAGGLHRFMAWEKPILTDSGGFQVFSLPKKRITEDGVFFKHELTGEEIYLDPAKAIGIQQELGSDIMMAFDECIPYPCDKAYAEQSTKKTIRWLKECQKAWTNRETQALFGIVQGSVYEDLRIMCAKEMRKLDLPGYAIGGVSVGEGLELLKKVVGWTAPHLPEDKPRYLMGVGLPEDILESVERGMDMFDCVIPTRYARSATLFTRRGKIRVTNKNYKRDFFPVDPSCSCYTCQNFSRAYLHHLFAANEVLSAVLSAIHNVTFYLQMMAEIRQAIADNRFMAYKQAFLAEYLASEKQPQGPKKHTK

SEQ ID NO: 55623 - protein, 370 aa, Geobacter metallireducens
  misc_feature (1)..(370): tr|Q39XD0|Q39XD0_GEOMG Queuine tRNA-ribosyltransferase OS=Geobacter metallireducens (strain GS-15 / ATCC 53774 / DSM 7210) OX=269799 GN=tgt PE=3 SV=1
MIHFKLIKKDGAARLGSLTTPRGTIETPIFMPVGTQATVKAMTPEELKTIGARIILANTYHLYIRPGHELVRRMGGLHRFMNWDRPILTDSGGFQVFSLNELRKITEEGVKFRSHLDGSYHFISPEDAIAIQGALGSDIAMCFDECTPYPATHDYARRSMEMTTRWARRCKDAKTREDQALFGIVQGGMYRDLRERSAAELREIGFDGYAMGGLSVGEEKEVMHEVLEYAAPMLPEDRPRYVMGIGAPEDLIEAVWHGFDMFDCVMPTRNARNGMLFTSFGRVNIKGAAYAEDAGPLDSECDCYVCRTYSRAYLRHLYRSGEILASRLNTYHNLYYYLSLMAKARAAIAEGRFAAFRQEFYAKRELQGQS

SEQ ID NO: 55624 - protein, 368 aa, Geobacter metallireducens
  misc_feature (1)..(368): tr|Q39T01|Q39T01_GEOMG Queuine tRNA-ribosyltransferase OS=Geobacter metallireducens (strain GS-15 / ATCC 53774 / DSM 7210) OX=269799 GN=tgt PE=3 SV=1
MKFTLNKKDRKTAARRGTLVTPHGTIETPIFMPVGTHAAMKAMTPVQVKETGAQIILSNTYHLHLRPGEELVAKAGGLHSFMAWDGPILTDSGGFQVFSLPNKRITEEGAYFKHEVSGEEVFLDPARAIAIQEDLGADIIMAFDECIPYPCDRKYAAKSTRKTLRWAEQCKKAQTRKDQALFGIVQGSVFEDLRAMCAKELVQMDFPGYAIGGVSVGEGLDLLKKVVEYTAPYLPENKPRYLMGVGLPEDILESVERGMDMFDCVIPTRYARSATLFTNRGKIRLTNRKYRRDFYPIEPNCTCYTCRNFTRAYIHHLFNANEVLSAILASIHNVHFYLNMMAEIRRAIEEGRFTDYKREFLESYLKGA

SEQ ID NO: 55625 - protein, 369 aa, Geobacter pelophilus
  misc_feature (1)..(369): tr|A0A1W7QQ84|A0A1W7QQ84_9DELT Queuine tRNA-ribosyltran sferase OS=Geobacter pelophilus OX=60036 GN=tgt PE=3 SV =1
MAAISFELIKKDPGSLARLGSLTTTHGSIQTPIFMPVGTQATVKAMTPEELVEVGSQIILANTYHLYLRPGHELIGRLGGLHRFMHWDRPMLTDSGGFQVFSLGELRKISEEGVNFRSHIDGSRHFISPEVSIAIQEALGADIAMCFDECPPYPAEYSYVQKSLELTTRWALRCKKAHQRPDQALFGIVQGGMHPELRRESARQITDIGFDGYALGGLSVGEEKEVMHRMMHECSDILPENSPRYIMGIGAPEDLVEAVNAGFDMFDCVMPTRNARNGALFTSFGRINIKAAVYAEDQSPIDPACSCYVCRNYSRAYLRHLYRSQEILASRLNSWHNLHYFLDLMAQIRAAIGRGEFASFRKDFYAARG

SEQ ID NO: 55626 - protein, 368 aa, Geobacter pelophilus
  misc_feature (1)..(368): tr|A0A1W7QTY6|A0A1W7QTY6_9DELT Queuine tRNA-ribosyltran sferase OS=Geobacter pelophilus OX=60036 GN=tgt PE=3 SV =1
MIFKLLKKDPTSGARRGVVTTAHGQIQTPIFMPVATHAAMKAMTPAQVHDTGAQIILSNTYHLHLHPGEALVQKAGGLHQFMGWDGPILTDSGGFQVFSLPKKRITEEGVFFRHEDTGEEVFLDPAKAVAIQEALGADIIMNFDECIPYPCEKSYAERSTEKTIRWAKQCRDAHKRENQYLFGIVQGSVFEDLRKRCAKELVKMDFPGYAIGGVSVGEGLELLKQVVGYTAPHLPEDKPRYLMGVGLPEDILESVERGVDMFDCVIPTRYARSATLFTNRGRIRLTNKNYRRDFYPVEPNCSCYTCRNFTRAYLHHLFTANEVLSAILASIHNVHFYLNMMSEIRTSIEEGRFKQYKEKFLGSYLKGK

SEQ ID NO: 55627 - protein, 368 aa, Geobacter pickeringii
  misc_feature (1)..(368): tr|A0A0B5B8T1|A0A0B5B8T1_9DELT Queuine tRNA-ribosyltran sferase OS=Geobacter pickeringii OX=345632 GN=tgt PE=3 SV=1
MKFTLKKTDRSTSARRGTLVTPHGTIETPIFMPVGTHAAMKAMTPAQVKETGAQIILSNTYHLHLRPGEELVAKAGGLHRFMAWDGPILTDSGGFQVFSLPNKRITEEGAYFKHEVTGEEIFLDPARAIAIQEALGADIIMAFDECIPYPCDRQYAAKSTRKTLRWAEQCRKAQTRKDQALFGIVQGSVFEDLRAMCAKELVQMDFPGYAIGGVSVGEGLDLLKKVVEYTAPFLPENKPRYLMGVGLPEDIFESVERGIDMFDCVIPTRYARSATLFTNRGKIRLTNRNYRRDFYPVDPNCGCYTCRNFTRAYLHHLFNANEVLSAILASIHNVHFYLNMMEGIRIAIEEGRFAEHKKEFLSGYLKGK

SEQ ID NO: 55628 - protein, 370 aa, Geobacter pickeringii
  misc_feature (1)..(370): tr|A0A0B5B7N7|A0A0B5B7N7_9DELT Queuine tRNA-ribosyltran sferase OS=Geobacter pickeringii OX=345632 GN=tgt PE=3 SV=1
MPALDFTLITQDGNARLGSLTTPRGTIETPIFMPVGTQATVKAMTPEELTGIGAQIILANTYHLYIRPGHEVVRRLGGLHRFMHWDRPILTDSGGFQVFSLNDLRKITEEGVRFRSHLDGSYHFISPEDAIAIQEALGSDIAMCFDECTPYPATHDYARRSMEMTSRWARRCKEARRREDQALFGIVQGGMYRDLRERSAMELREIGFDGYAVGGLSVGEEKELMYEVMEYAAPMLPADRPRYVMGIGAPEDLIEAVHHGFDMFDCVMPTRNARNGMLFTSFGRVNIKGAAYAEDNGPLDPECDCYVCRNYSRAYLRHLYRSGEILSARLNTYHNLHYYLSLMAQARAAIAEGRFAAFRREFYAKRTLSV

SEQ ID NO: 55629 - protein, 369 aa, Geobacter soli
  misc_feature (1)..(369): tr|A0A0C1QSY7|A0A0C1QSY7_9DELT Queuine tRNA-ribosyltran sferase OS=Geobacter soli OX=1510391 GN=tgt PE=3 SV=1
MAAIQFRLLKQDGAARLGSLTTPHGLIETPIFMPVGTQATVKAMTPEELDAIGARIILANTYHLYIRPGHELIRRLGGLHRFMHWDRPILTDSGGFQVFSLNELRKITEEGVRFQSHLDGSYHTIRPEDAVAIQEALGSDIAMCFDECTPYPATHDYARRSMELTTRWARRCKDAHSRGDQALFGIVQGGMYRDLRERSAAELVEIGFDGYAVGGLSVGEEKEHMYGVMEWTAPLLPADQPRYVMGIGTPEDLVEAVWRGFDMFDCVMPTRNARNGMLFTSFGRLNIKGAAYAEDQGPVDPACGCYVCRNYSRAYLRHLYRSGEILASRLNTYHNLAYYLDLMAQIRAAIAEGKFDSFRREFHGRRETQ

SEQ ID NO: 55630 - protein, 368 aa, Geobacter soli
  misc_feature (1)..(368): tr|A0A0C1U4W4|A0A0C1U4W4_9DELT Queuine tRNA-ribosyltran sferase OS=Geobacter soli OX=1510391 GN=tgt PE=3 SV=1
MKFKLIKKDTRTSARRGSLTTPHGTIETPIFMPVGTHAAMKAMTPSQVKETGAQIILSNTYHLHLRPGEDLVAKAGGLHRFMGWDGPILTDSGGFQVFSLPNKKITDEGVFFRHEVSGEEVFLDPARATAIQEALGADIIMAFDECIPYPCDKKYAAASTRKTIRWAEACKKAHTRKDQALFGIVQGSVFEDLRAQCARELVQLDFPGYAVGGVSVGEGLELLKKVVEYTAPFLPENKPRYLMGVGLPEDILESVERGMDMFDCVIPTRYARSATLFTNRGKIRLTHRNYRRDFYPVDPNCTCYTCRNFTRAYLHHLFNANEILSATLASIHNVHFYLNMMAEIRAAIEEGRFADYKRNFLASYLKGK

SEQ ID NO: 55631 - protein, 371 aa, Geobacter sp.
  misc_feature (1)..(371): tr|A0A212PHV4|A0A212PHV4_9DELT Queuine tRNA-ribosyltran sferase OS=Geobacter sp. DSM 9736 OX=1277350 GN=tgt PE= 3 SV=1
MKFKLLQKDKKTAARRGTLTTPHGTIETPIFMPVATHAAMKAMTPVQVVATGAQIILSNTYHLHLRPGESLVKKAEGLHKFMGWDKPILTDSGGFQVFSLPNKRITEEGVFFRHEVTGEEVFLDPASAMKIQEDLGADIIMAFDECIPYPCDRTYAERSTRKTIRWAKQCKESHQSQSQALFGIIQGSVFEDLRVLCARELVRLDLPGYAIGGVSVGEGLELLKQVVSVTAPHLPEDKPRYLMGVGLPEDILESVERGMDMFDCVIPTRYARSATLFTNRGRIRLTNKKYRRDFYPIDPNCGCYTCQTFTRAYLHHLFVANEVLSAILASIHNVTFYLTMMQGIRNAIEEQRFSEYKRSFLESYLAGEHKA

SEQ ID NO: 55632 - protein, 368 aa, Geobacter sp.
  misc_feature (1)..(368): tr|A0A556SXC7|A0A556SXC7_9DELT Queuine tRNA-ribosyltran sferase OS=Geobacter sp. OX=46610 GN=tgt PE=3 SV=1
MIYKLLKKDKRSAARRGVVKTAHGEIQTPIFMPVATHAAMKAMTPAQVKETGAQIILSNTYHLHLHPGEALVEKAGGLHKFMCWDGPILTDSGGFQVFSLPKKRITEEGVFFRHEDTGEEIFLDPAKAVAIQEALGADIIMNFDECIPYPCDKAYAERSTEKTIRWAKQCREAHSRENQYLFGIVQGSVFEDLRKRCAKALVKMDFPGYAIGGVSVGEGLELLKQVVGYTAPHLPEDKPRYLMGVGLPEDILESVERGVDMFDCVIPTRYARSATLFTNRGRIRLTNKNYRRDFYPIEPNCTCYTCRNFTRAYLHHLFTSNEVLSAILASIHNVHFYLNMMSEIRTAIEEDRFVEYKEQFLAAYMKGK

SEQ ID NO: 55633 - protein, 368 aa, Geobacter sulfurreducens
  misc_feature (1)..(368): tr|Q74DZ0|Q74DZ0_GEOSL Queuine tRNA-ribosyltransferase OS=Geobacter sulfurreducens (strain ATCC 51573 / DSM 12 127 / PCA) OX=243231 GN=tgt-1 PE=3 SV=1
MKFKLIKKDTKTSARRGSLTTPHGTIETPIFMPVGTHAAMKAMTPSQVKETGAQIILSNTYHLHLRPGEDLIAKAGGLHRFMGWDGPILTDSGGFQVFSLPNKKITDEGVFFRHEVSGEEVFLDPARATAIQEALGADIIMAFDECIPYPCDKKYAAASTRKTIRWAEACKKAHTRKDQALFGIVQGSVFEDLRAQCARELVQLDFPGYAVGGVSVGEGLELLKKVVEYTAPFLPENKPRYLMGVGLPEDILESVERGMDMFDCVIPTRYARSATLFTNRGKIRLTHRNYRRDFYPVDPNCTCYTCRNFTRAYLHHLFNANEILSATLASIHNVHFYLNMMAEIRAAIEEERFAEYKRNFLESYLKGK

SEQ ID NO: 55634 - protein, 368 aa, Geobacter sulfurreducens; identical to SEQ ID NO: 55633
  misc_feature (1)..(368): tr|A0A0D5NB65|A0A0D5NB65_GEOSN Queuine tRNA-ribosyltran sferase OS=Geobacter sulfurreducens OX=35554 GN=tgt PE= 3 SV=1

SEQ ID NO: 55635 - protein, 377 aa, Geobacter thiogenes
  misc_feature (1)..(377): tr|A0A1T4RQ77|A0A1T4RQ77_9DELT Queuine tRNA-ribosyltran sferase OS=Geobacter thiogenes OX=115783 GN=tgt PE=3 SV =1
MPDHFRLLHQDTGCRARTGRITTPHGEIQTPIFMPVGTSASVKAMRPENLKDAGAQIILSNTYHLYLRPGHRLVEQMGGLHKFMAWDRPILTDSGGFQVYSLTELRKISEEGVKFRSHIDGSMHLLTPELSIKIQESLGADIIMCFDECPPAEADREYVERSLAMTTRWAQRCKDAHSRSDQLLFGIVQGGRFAELRQRSLQELQEIGFDGYALGGLSVGETKPVMHEVMDACSDLLPPDHPRYIMGIGTPEDLVEAVWRGYDMFDCVMPTRNARNGMLFTSQGRLNIKRKQYEDDQGPIDPTCDCYVCRTYSRSYLRHLFRSGEILSSMLNTHHNIAWYLNLMARMREAITQDRFEAFRKEFYHQQQSETENHKEE

SEQ ID NO: 55636 - protein, 380 aa, Geobacter thiogenes
  misc_feature (1)..(380): tr|A0A1T4RPT7|A0A1T4RPT7_9DELT Queuine tRNA-ribosyltran sferase OS=Geobacter thiogenes OX=115783 GN=tgt PE=3 SV =1
MNFTLLKKDKDSAARLGILQTSHGEIQTPIFMPVATHGAMKPLTPAQIHDTGAQIILSNTYHLHLQPGEGLVKKAGGLHKFMAWEKPILTDSGGFQVFSLPKKRITEDGVFFKHELTGEEIYLDPAKAINIQQELGSDIMMAFDECIPYPCDKVYAEQSTRKTIRWLKECQNAWTNRETQALFGIVQGSVYEDLRIMCAKEMRKLDLPGYAIGGVSVGEGLELLKKVVGWTAPHLPEDKPRYLMGVGLPEDILESVERGIDMFDCVIPTRYARSATLFTRRGKIRVSNKNYKRDFFPVDPSCSCYTCQNFSRAYLHHLFAANEVLSAVLSAIHNVTFYLQMMTEIRQAIADNRFMAYKQAFLADYLASEKQTQGSKKHSK

SEQ ID NO: 55637 - protein, 371 aa, Geobacter uraniireducens
  misc_feature (1)..(371): tr|A5GEQ6|A5GEQ6_GEOUR Queuine tRNA-ribosyltransferase OS=Geobacter uraniireducens (strain Rf4) OX=351605 GN=t gt PE=3 SV=1
MSAIDFKLIKTDSSSAARLGSLTTPHGKIDTPIFMPVGTHATVKAMTPEELTEVGAQIILANTYHLYMRPGHELVARMGGLHEFMHWQGPILTDSGGFQVFSLGELRKITEEGVKFQSHLDGSYHFISPETSMEIQAALGGDIIMCFDECPPYPADYAYIAKSMEMTSRWALRCKNVKKRADQALFGIVQGGMFSDLRERSALALQEIGFDGYALGGVSVGEEKELMHEVMGFSAPFLPVDKPRYVMGIGAPEDLIEGINAGFDMFDCVMPTRNARNGMVFTSFGRLNIKGARYAEDRLPIDPECGCYVCKNYSRAYLRHLFKSGEILASRLNTWHNLHYYLSLMAGARQAIAEDRFADFRRDFYAKRETM

SEQ ID NO: 55638 - protein, 368 aa, Geobacter uraniireducens
  misc_feature (1)..(368): tr|A5G6K1|A5G6K1_GEOUR Queuine tRNA-ribosyltransferase OS=Geobacter uraniireducens (strain Rf4) OX=351605 GN=t gt PE=3 SV=1
MKFKLLKKDTETAARRGRLETPHGVIETPIFMPVGTHAAMKAMTPQQVKETGAQIILSNTYHLHLRPGESLVEKAGGLHKFMAWDGPILTDSGGFQVFSLPNKRITEDGAYFKHEITGEEVFLDPAKAIAIQEALGADIIMAFDECIPYPCDKQYAAQSTRKTLRWAEACKKAQTRKDQALFGIVQGSVFEDLRAMCAKEMIDMDFPGYAIGGVSVGEGLELLKKVVAMTAPFLPEDKPRYLMGVGLPEDILESVERGMDMFDCVIPTRYARSATLFTNRGKIRLTNKNYRRDFYPVEPNCSCYTCRNFTRAYLHHLFVSNEVLSAILASIHNVHFYLNMMAEIRLAIEEERFAEYKRTFLEGYLKGK

SEQ ID NO: 55639 - protein, 371 aa, Geobacteraceae bacterium
  misc_feature (1)..(371): tr|A0A1G0MQS1|A0A1G0MQS1_9DELT Queuine tRNA-ribosyltran sferase OS=Geobacteraceae bacterium GWC2_53_11 OX=17983 16 GN=tgt PE=3 SV=1
MSETFSVLHQDSSCKARLGSLNTPHGEIETPIFMPVGTNATVKAMTPEDLTAVHAQIILANTYHLYLRPGHRLVEQLGGLHRFMNWDKPILTDSGGFQVFSLGELRKISEEGVKFQSHLDGSYHMLTPELAIHIQESLGADIIMCFDECPPATAEYSYVSRSLELTARWAARCKEAHTRVGQQLFGIIQGGMHYDLRARSVNDICTIGFDGYALGGLSVGEEKEQMYGVMECCSTLLPHDAPRYIMGIGSPEDLVEAVWHGYDMFDCVMPTRNARNGMLFTSQGRVNIKSKIYEDDAGPLDPACSCKVCKNYSRAYLRHLYRSGEILSSQLNTYHNLHFYLDLMRRVREAIRQNSFDDFRKQFKTAMLQKQ

SEQ ID NO: 55640 - protein, 377 aa, Geobacteraceae bacterium
  misc_feature (1)..(377): tr|A0A1G0M567|A0A1G0M567_9DELT Queuine tRNA-ribosyltran sferase OS=Geobacteraceae bacterium GWC2_55_20 OX=17983 17 GN=tgt PE=3 SV=1
MSGKFTIIHSDTSCRARLGSLNTPHGVIETPIFMPVGTNATVKAMTPEDLLAVKAQIILANTYHLYLRPGHRLVEKMGGLHRFMNWDRPILTDSGGFQVFSLGELRKISEEGVRFQSHIDGSRHMLTPELAIGIQEALGADIIMCFDECPPATAEYDYVSRSLELTSRWARRCKDAHSREGQQLFGIIQGGMHYDLRARSVDDICSIGFDGYALGGLSVGEEKEQMYGVMECCSPLLPKESPRYIMGIGAPEDLIEAVWHGYDMFDCVMPTRNARNGMLFTSQGRINIKSKIYEEDAGPLDPECNCLVCRNYSRAYLRHLYRAGEILASQLNTYHNLHYFLDLMQQARSAIRDNSFDNFRKQFLESMRINNRLKEGN

SEQ ID NO: 55641 - protein, 366 aa, Geomicrobium sp.
  misc_feature (1)..(366): tr|A0A061N8W5|A0A061N8W5_9BACL Queuine tRNA-ribosyltran sferase OS=Geomicrobium sp. JCM 19055 OX=1460649 GN=tgt PE=3 SV=1
MTAVYYEHIKTCKQSGARLGKVHTPHGSFDTPMFMPVGTLATVKMMSPDELKEMDAQIILSNTYHLWLRPGEDLIREAGGLHSFMNWDRPILTDSGGFQVFSLSKLRDIDEEGVRFRNHISGEKLFLSPEKAMQIQHALGSDIMMAFDECPPYPAEYKYMKDSVERTSRWAERCLREHEGNTTQGLFGIVQGGEYKDLRRQSAEDLVSMDFPGYAIGGLSVGEPKHVMNKVLEETMPHLPDNKPRYLMGVGSADALIDGAIRGVDMFDCVLPTRIGRNGTCMTSEGRKVIRNAEFARDFRPIDEKCDCYACKNYSRAYIRHLIKSKEAFGFRLTSYHNLYFLLNLMVNVREAIKEDRLLDFKEEFF

SEQ ID NO: 55642 - protein, 379 aa, Geomicrobium sp.
  misc_feature (1)..(379): tr|A0A061NRS2|A0A061NRS2_9BACL Queuine tRNA-ribosyltran sferase OS=Geomicrobium sp. JCM 19037 OX=1460634 GN=tgt PE=3 SV=1
MSAVYYEHIKTCKQSGARLGKVHTPHGSFDTPMFMPVGTLATVKMMSPEELKEMNAQIILSNTYHLWLRPGEDLIEEAGGLHSFMNWDRPILTDSGGFQVFSLSKLRDIQEEGVHFRNHISGEKLFLSPEKAMRIQHSLGSDIMMAFDECPPYPASYEYMKRSVERTSRWAERCLTTHEGNETQGLFGIVQGGEYPDLRAQSAKDLVSMDFPGYAIGGLSVGEPKDVMNRVLEETMPHLPDNKPRYLMGVGSADALIDGSIRGVDMFDCVLPTRIGRNGTCMTSTGRKVIRNAEYARDFRPIDENCSCYACKNYSRAYIRHLIKSKEAFGFRLTSYHNLHFLLNLMVNVREAIKEDRLLDFKEAFFEQYGFNRPDAKNF

SEQ ID NO: 55643 - protein, 368 aa, Geomonas terrae
  misc_feature (1)..(368): tr|A0A4S1CCL2|A0A4S1CCL2_9DELT Queuine tRNA-ribosyltran sferase OS=Geomonas terrae OX=2562681 GN=tgt PE=3 SV=1
MIYKLLKKDKRSAARRGVVKTAHGEIQTPIFMPVATHAAMKAMTPAQVKETGAQIILSNTYHLHLHPGEALVEKAGGLHKFMCWDGPILTDSGGFQVFSLPKKRITEEGVFFRHEDTGEEIFLDPAKAVAIQEALGADIIMNFDECIPYPCDKAYAERSTEKTIRWAKQCREAHKRENQYLFGIVQGSVFEDLRKRCAKALVKMDFPGYAIGGVSVGEGLELLKQVVGYTAPHLPEDKPRYLMGVGLPEDILESVERGVDMFDCVIPTRYARSATLFTNRGRIRLTNKNYRRDFYPVEPNCTCYTCRNFTRAYLHHLFTSNEVLSAILASIHNVHFYLNMMSEIRTAIEEDRFVEYKEQFLAAYMKGK

SEQ ID NO: 55644 - protein, 384 aa, Geomonas terrae
  misc_feature (1)..(384): tr|A0A4S1CGE1|A0A4S1CGE1_9DELT Queuine tRNA-ribosyltran sferase OS=Geomonas terrae OX=2562681 GN=tgt PE=3 SV=1
MAAISFELIKKDPGCAARLGSLTTTHGRIETPIFMPVGTQATVKAMTPEELVEVGSQIILANTYHLYLRPGHELIERLGGLHRFMHWDRPMLTDSGGFQVFSLGELRKISEEGVKFRSHIDGSRHFISPEVSIAIQEALGADIAMCFDECPPYPAERHYVEKSLELTTRWARRCKDAHKREDQALFGIVQGGMHGDLRRESAKQITDIGFDGYALGGLSVGEEKEVMHGMMEECSGILPENAPRYIMGIGAPEDLVEAVYNGFDMFDCVMPTRNARNGALFTSFGRINIKGAQFAEDQGPIDPLCDCYVCRNYSRAYLRHLYRSQEILASRLNSWHNLHFFLNLMKEVREAIGKGEFVQFRKDFYAARSAAFAVKEQENNPGGN

SEQ ID NO: 55645 - protein, 376 aa, Georhizobium profundi
  misc_feature (1)..(376): tr|A0A3Q8XP67|A0A3Q8XP67_9RHIZ Queuine tRNA-ribosyltran sferase OS=Georhizobium profundi OX=2341112 GN=tgt PE=3 SV=1
MSDVFRFDIAATDGAARTGAISMPRGTVRTPAFMPVGTAGTVKAMYLDQVRDLGADIILGNTYHLMLRPGAERVARLGGLHDLIRWPHPILTDSGGFQVMSLSGLRKLDEQGVTFQSHVDGSRHHMSPERSIEIQGLLGSDIQMQLDECVALPAKRSEVERAMDMSVRWAERCKTAFGDQPGKAMFGIVQGGDQPDLRVKSAEALKALDLKGYAVGGLAVGEPQDVMLAMLETTCPVLPSEKPRYLMGVGTPDDIIKSVARGIDMFDCVMPTRAGRHGLAFTRRGRINLRNARHAEDTRPLDEESACPASRDYSRAYLHHLVRANEALGGMLLTWNNLAYYQDLMRGIRQAIAEGRFADFMAETQDEWARGDIAPR

SEQ ID NO: 55646 - protein, 372 aa, Geosporobacter ferrireducens
  misc_feature (1)..(372): tr|A0A1D8GPC9|A0A1D8GPC9_9CLOT Queuine tRNA-ribosyltran sferase OS=Geosporobacter ferrireducens OX=1424294 GN=t gt PE=3 SV=1
MTVTYENIKVCKQSGARLGRVHTPHGTIDTPVFMPVGTQATVKAMTTEELKEIEAQIILSNTYHLYLRPGHKLIEKAGGLHKFMNWDRAILTDSGGFQVFSLGDLRKITEEGVEFRSHLDGSKHFISPEKAIEIQNALGSDIIMAFDECAPYPAEHTYVKNSLERTTRWAKRCKEAHQKPDQQALFGIIQGGMYKDLREQSANEIIELDFPGYAVGGLSVGEPKHLMYEVLEYTTPWMPANKPRYLMGVGTPDCLIEGVIRGIDMFDCVLPTRIARNGTAMTSVGKVVIKNAQYTEDFLPLDPNCECYTCKNYSRAYLRHLYKAQEILSARLVTYHNLHFLIDLMKQIRKAIMEDRLLDFRKEFFQKYGYEV

SEQ ID NO: 55647 - protein, 372 aa, Geosporobacter subterraneus
  misc_feature (1)..(372): tr|A0A1M6BRQ7|A0A1M6BRQ7_9CLOT Queuine tRNA-ribosyltran sferase OS=Geosporobacter subterraneus DSM 17957 OX=112 1919 GN=tgt PE=3 SV=1
MAVTYESIKVCKQSGARLGRVHTPHGVIDTPVFMPVGTQATVKAMTPEELKEIEAKIILSNTYHLYLRPGHKLIEKAGGLHKFMNWDRAILTDSGGFQVFSLGDLRKITEEGVEFRSHLDGSKHFISPEKAIEIQNSLGSDIMMVFDECVPYPAEHSYVKNSLERTTRWAKRCKDAHRKPDQQALFGIIQGGMYKDLREQSAKEIIELDFPGYAVGGLSVGEPKSLMYEVLDYTTPWMPADKPRYLMGVGTPDCLIEGVIRGIDMFDCVLPTRIARNGTAMTSVGKVVIKNAQYVEDFLPLDPNCQCYTCKNYSRAYLRHLYKAQEILSARLVTYHNLYFLIDVMKQVREAIKKDRLLDFRKEFFQKYGYEQ

SEQ ID NO: 55648 - protein, 353 aa, Geothermobacter ehrlichii
  misc_feature (1)..(353): tr|A0A5D3WNB6|A0A5D3WNB6_9DELT Queuine tRNA-ribosyltran sferase OS=Geothermobacter ehrlichii OX=213224 GN=tgt P E=3 SV=1
MQTRRGVVETPVFMPVGTQATVKGMLPETLRQIGAQIILGNTYHLYLRPGHELIKRLGGLHRFMNWDGPILTDSGGFQVFSLGELRRIDEEGAVFQSHLDGSRHQLTPEKSIAIQEALGADIIMAFDECIPYPADRAYVAASTARSGRWARRCRHARREGDGAALFGIVQGGMEPDLRRRSAEELMAIGFEGYALGGLSVGEETSLMYDVMEYSLPLLPEEAPRYVMGVGTPENLIEGIARGADMFDCVMPTRNARNGVLFTSRGKISIKQARYREDERPLDENCSCYVCRHYSRAYLRHLFQANEILSSVLNTHHNLHYYLHLMASARDAIEAGRFGEFRREFHARRQNVES

SEQ ID NO: 55649 - protein, 375 aa, Geothermobacter ehrlichii
  misc_feature (1)..(375): tr|A0A5D3WR01|A0A5D3WR01_9DELT Queuine tRNA-ribosyltran sferase OS=Geothermobacter ehrlichii OX=213224 GN=tgt P E=3 SV=1
MFRFELLAQDSTTCARRGRIHTPHGTIETPIFMPVGTHGALKAMTPDQVAAAGAQIILANTYHLHLRPGEGLVAKAGGLHRFMNWQGPILTDSGGFQVFSLPNKEIGEDGVTFRNEVTGQSTFLGPREAIAIENALGADIIMAFDECIPYPASHDYAAKSIRKTIRWAEACRKAHARSDQALFGIVQGSVYEDLRRQCAQALTEMDFPGYAIGGVSVGEGLELLKQVVEFTEPWLPQDKPRYLMGVGLPEDILESIERGMDMFDCVIPTRYARSATLFTRRGRMRLTQRKYRRDFYPVDTRCECYCCRNFSRAYLHHLFNANEVLSATLAAIHNVHFYLDMVAQARKAIEEGRYRAFKTAFLEEYGFYEKSKKGG

SEQ ID NO: 55650 - protein, 371 aa, Geothermobacter sp.
  misc_feature (1)..(371): tr|A0A1X0Y1K5|A0A1X0Y1K5_9DELT Queuine tRNA-ribosyltran sferase OS=Geothermobacter sp. EPR-M OX=1969733 GN=tgt PE=3 SV=1
MFPFELLANDTGSRARRGRLTTPHGVIETPIFMPVGTHGALKAMTPDQVDAAGAQIILANTYHLHLKPGEGLVEKAGGLHRFMNWDKPILTDSGGFQVFSLPKKQIGEDGVTFRNEVTGEQTFLGPKEAIAIENALGADIIMAFDECIPYPSSHDYAAQSIKKTLRWAESCRKAHRREDQALFGIVQGSVYQDLRRECAEQLAAMDFPGYAVGGVSVGEGLELLKQVVEFTEPFLPEDKPRYLMGVGLPEDILESIERGMDMFDCVIPTRYARSATLFTRRGKLRLTNRRFRRDFYPVDTSCDCYCCRNFTRAYLHHLFNANEVLSATLSAIHNVHFYLTMVAEARRAIERNDFVAFKKAFLEEYGFYRQG

SEQ ID NO: 55651 - protein, 371 aa, Geothermobacter sp.
  misc_feature (1)..(371): tr|A0A2K2HCF0|A0A2K2HCF0_9DELT Queuine tRNA-ribosyltran sferase OS=Geothermobacter sp. HR-1 OX=654845 GN=tgt PE =3 SV=1
MFPFELLANDTDSRARRGRLTTPHGVIETPIFMPVGTHGALKAMTPDQVDAAGAQIILANTYHLHLKPGEGLVEKAGGLHRFMNWDKPILTDSGGFQVFSLPKKQIGEDGVTFRNEVTGEQTFLGPKEAIAIENALGADIIMAFDECIPYPSSHDYAAQSIKKTLRWAEACRKAHRREDQALFGIVQGSVYRDLRRECAEQLAAMDFPGYAVGGVSVGEGLELLKQVVEFTEPFLPENKPRYLMGVGLPEDILESIERGMDMFDCVIPTRYARSATLFTRRGKLRLTNRRFRRDFYPVDTSCDCYCCRNFTRAYLHHLFNANEVLSATLSAIHNVHFYLTMVAEARRAIERNDFVAFKKAFLEEYGFYRQG

SEQ ID NO: 55652 - protein, 375 aa, Geotoga petraea
  misc_feature (1)..(375): tr|A0A1G6M5T2|A0A1G6M5T2_9BACT Queuine tRNA-ribosyltran sferase OS=Geotoga petraea OX=28234 GN=tgt PE=3 SV=1
MSSSPIKYELIHKDKHSGARRGRIHTPRGIIETPVFMPVGTNATVKTLTNKMIRELGSEIILGNAFHLFLRPGLEIMKEFGGIHNFMNWDRPLLTDSGGFQVFSLKDRKITEDGVKFRSPLDGSKIMMTPEKSMEIQQIIGSDIAMAFDECVDANSEYEYFKESVERTYRWAKRSYDAHNKKEQALFGIFQGGLFDDLREKSLEQITSIPFDGYAIGGLAVGEKYQDSEKILKKFGNKMPENKPRYIMGIGSPTMMILSVENGMDMFDCVLPTRMGRHGTALTWKGKLNIKAAKNKFSKDPIEKDCKCYTCRNHTRGYLNHLFKRNENTGKTLLSIHNLHFNITFVKKMREAIENDAFLDFKKEFFENSDYPLEN

SEQ ID NO: 55653 - protein, 373 aa, Geovibrio thiophilus
  misc_feature (1)..(373): tr|A0A410K1L0|A0A410K1L0_9BACT Queuine tRNA-ribosyltran sferase OS=Geovibrio thiophilus OX=139438 GN=tgt PE=3 S V=1
MFEFTLEKTSEKSKARAGRIVTPHGEIETPIFMPVGTVGSVKGVAPRELDEIGAQIILGNTYHLHLRPGEDTVAHFGGLAKFNSWNKPTLTDSGGFQVFSLAKLNKIGEEGVEFRSHLDGSKLFLSPEKSIEIQQKIGADIMMAFDECVPYPSEKIYVEKSLELTTRWAERCLKAKTRDDQALFGIIQGGVFPDLRRRSAEQICALPFEGFAIGGLSVGEDIPTMYEIADFITDHMPADKPRYLMGVGTPEDLLNGIERGIDMFDCVMPTRNARNALLFTNSGKLHIKAARYRLSDEPVDAECGCYTCRNFSRGYLRHLYKTGELLALKLNSIHNLHFYLSLVKRARNAINNGFFEDFKKEILDKITFGGDNV

SEQ ID NO: 55654 - protein, 374 aa, Gibbsiella quercinecans
  misc_feature (1)..(374): tr|A0A250AYN7|A0A250AYN7_9ENTR Queuine tRNA-ribosyltran sferase OS=Gibbsiella quercinecans OX=929813 GN=tgt PE= 3 SV=1
MKYELQKTDGRARRGRMVFERGVVETPAFMPVGTYGTVKGMTPEEVKETGAQILLGNTFHLWLRPGQEIMKLHGDLHDFMQWHGPILTDSGGFQVFSLGAMRKIKEEGVYFRNPINGDKIFLSPEKSMEIQYDLGSDIVMIFDECTPYPADWDYAKRSMEMSLRWAQRSRQRFDELNNKNALFGIIQGGVYEDLRDVSVKGLVDIGFDGYAVGGLAVGEPKEDMHRILEHVCPQIPQDKPRYLMGVGKPEDLVEGVRRGIDMFDCVMPTRNARNGHLFVTEGVVKIRNAKHKDDTSPLDPECDCYTCRHYSRAYLHHLDRCNEILGARLNTIHNLRYYQRLMAGLRRAIEEGKLELFVADFYGRIGKPVPPLKA

SEQ ID NO: 55655 - protein, 390 aa, Giesbergeria anulus
  misc_feature (1)..(390): tr|A0A1H9LND5|A0A1H9LND5_9BURK Queuine tRNA-ribosyltran sferase OS=Giesbergeria anulus OX=180197 GN=tgt PE=3 SV =1
MLQFELLTTDPASHARRGQLTLNHGVVQTPIFMPVGTYGTVKGVMPRSLHDMGAQIILGNTFHLWMRPGLDIMKTFGGLHAFEKWDKPILTDSGGFQVWSLGAMRKITEEGVTFASPVNGDKLFMSPEVSMQIQTVLNSDIVMQLDECTPYETKGHLTTEREARTSMEMSLRWAVRSKNEMERLQNPNALFGIVQGGMYLNLREESLQQLVEMDFPGYAVGGVSVGEPKEEMLGIMAHTPHRLPAHKPRYLMGVGTPEDLVEGVACGVDMFDCVMPTRNARNGTLFTRYGDLKIRNARHKTDHQPLDTSCTCYACAGSSGVAWEQGGREGFSRAYLHHLDRCGEMLGPMLTTVHNLHYYLNLMREVREALDVGQFAAFRARFKAERARGV

SEQ ID NO: 55656 - protein, 378 aa, Gilliamella apicola
  misc_feature (1)..(378): tr|A0A066T8D6|A0A066T8D6_9GAMM Queuine tRNA-ribosyltran sferase OS=Gilliamella apicola OX=1196095 GN=tgt PE=3 S V=1
MKFELDNTDGLARRGRMKFDRRGVEYTVETPAFMPVGTYGTVKGMTPEEVTATGAQILLGNTFHLWLRPGQEIMRKHGDLHDFMQWHGPILTDSGGFQVFSLGDIRKIKEEGVYFRNPINGDSIFLSPEVSMEIQYDLGSDIVMIFDECAPFPADWDYVKKSMEMSLRWAKRSRKRFDELGNKNALFGIVQGGIHQELRDISIKGLTEIGFDGYAVGGLAVGEPKADMHRILEGTCPQLPADKPRYLMGVGKPEDLVEGVRRGIDMFDCVMPTRNARNGHLFVTNGVIKIRNAKYKDDTTPLDPHCDCYTCKNYTKSYLHHLDKCGEILGARLNTIHNLRYYQRLMAEIREAVANKRYEDFVIEFYQRIGKTPAPLSK

SEQ ID NO: 55657 - protein, 238 aa, Gilliamella apicola
  misc_feature (1)..(238): tr|A0A080KBL6|A0A080KBL6_9GAMM Queuine tRNA-ribosyltran sferase (Fragment) OS=Gilliamella apicola SCGC AB-598-B 02 OX=1445513 GN=GASC598B02_004190 PE=3 SV=1
MKFELDNTDGLARRGRMKFDRRGVEYTVETPAFMPVGTYGTVKGMPPEEVAATGAQILLGNTFHLWLRPGQEIMRKHGDLHDFMQWHGPILTDSGGFQVFSLGDIRKIKEEGVYFRNPINGDKIFLSPEISMEIQYDLGSDIVMIFDECAPFPADWDYVKKSMEMSLRWAKRSRKRFDELGNKNALFGIVQGGIHHELRDISIKGLTEIGFDGYAVGGLAVGEPKEDMHRILEGTCPQ

SEQ ID NO: 55658 - protein, 384 aa, Gilliamella apis
  misc_feature (1)..(384): tr|A0A242P6I2|A0A242P6I2_9GAMM Queuine tRNA-ribosyltran sferase OS=Gilliamella apis OX=1970738 GN=tgt PE=3 SV=1
MKFELDNTDGLARRGRMKFDRRGVEYTVETPAFMPVGTYGTVKGMTPEEVKATGAQILLGNTFHLWLRPGQEIIRKHGDLHDFMQWSGPILTDSGGFQVFSLGDIRKIKEEGVYFRNPINGDSIFLSPEISMEIQYDLGSDIVMIFDECAPFPAEWDYVKKSMEMSLRWAKRSRQRFDELNNKNALFGIVQGGIHQELRDISIKGLTEIGFDGYAVGGLAVGEPKEDMHRILEGTCPQLPADKPRYLMGVGKPEDLVEGVRRGIDMFDCVMPTRNARNGHLFVTNGVIKIRNAKYKDDTTPLDPHCDCYTCKNYTKSYLHHLDKCGEILGARLNTIHNLRYYQRLMAEIREAVANRRYEAFVTEFYQRIGKTPAPLGNKAEQSC

SEQ ID NO: 55659 - protein, 383 aa, Gilliamella apis
  misc_feature (1)..(383): tr|A0A2V4DKE2|A0A2V4DKE2_9GAMM Queuine tRNA-ribosyltran sferase OS=Gilliamella apis OX=1970738 GN=tgt PE=3 SV=1
MKFELDNTDGLARRGRMKFDRRGVEYTVETPAFMPVGTYGTVKGMTPEEVKATGAQILLGNTFHLWLRPGQEIMRKHGDLHDFMQWSGPILTDSGGFQVFSLGDIRKIKEEGVYFRNPINGDSIFLSPEISMEIQYDLGSDIVMIFDECAPFPAEWDYVKKSMEMSLRWAKRSRQRFDELNNKNALFGIVQGGIHQELRDISIKGLTEIGFDGYAVGGLAVGEPKEDMHRILEGTCPQLPADKPRYLMGVGKPEDLVEGVRRGIDMFDCVMPTRNARNGHLFVTNGVIKIRNAKYKDDTTPLDPHCDCYTCKNYTKSYLHHLDKCGEILGARLNTIHNLRYYQRLMAEIREAVANKRYEAFVTEFYQRIGKTPAPLGNQTKQS

SEQ ID NO: 55660 - protein, 402 aa, Gilliamella bombicola
  misc_feature (1)..(402): tr|A0A1C4D8L6|A0A1C4D8L6_9GAMM Queuine tRNA-ribosyltran sferase OS=Gilliamella bombicola OX=1798182 GN=tgt PE=3 SV=1
MIQLRIITMIGAKLFIWSQEVNKKMKFELDNTDGLARRGRMKFDRRGIEYTVETPAFMPVGTYGTVKGMTPEEVATTGAQILLGNTFHLWLRPGQEIMRKHGDLHDFMQWHGPILTDSGGFQVFSLGDIRKIKEEGVYFRNPINGDSIFLSPEISMEIQYDLGSDIVMIFDECAPFPADWDYVKKSMEMSLRWAKRSRQRFDELGNKNALFGIVQGGIHQELRDISIKGLTEIGFDGYAVGGLAVGEPKADMHRILEGTCPQLPADKPRYLMGVGKPEDLVEGVRRGIDMFDCVMPTRNARNGHLFVTDGVIKIRNAKYKDDTTPLDPHCDCYTCKNYTKSYLHHLDKCGEILGARLNTIHNLRYYQRLMAEIREAVANKRYEDFVVEFYQRIGKTPAPLSK

SEQ ID NO: 55661 - protein, 378 aa, Gilliamella intestini
  misc_feature (1)..(378): tr|A0A1C4CLP8|A0A1C4CLP8_9GAMM Queuine tRNA-ribosyltran sferase OS=Gilliamella intestini OX=1798183 GN=tgt PE=3 SV=1
MKFELDNTDGLARRGRMKFDRRGVEYTVETPAFMPVGTYGTVKGMTPEEVAATGAQILLGNTFHLWLRPGQEIMRKHGDLHDFMQWHGPILTDSGGFQVFSLGDIRKIKEEGVYFRNPINGDSIFLSPEVSMEIQYDLGSDIVMIFDECAPFPAEWDYVKKSMEMSLRWARRSRNRFDELGNKNALFGIVQGGIHQQLRDISIKGLTEIGFDGYAVGGLAVGEPKADMHRILEGTCPQLPADKPRYLMGVGKPEDLVEGVRRGIDMFDCVMPTRNARNGHLFVTNGVIKIRNAKYKDDTTPLDPHCDCYTCKNYTKSYLHHLDKCGEILGARLNTIHNLRYYQRLMAEIREAVANKRYEDFVIEFYQRIGKTPAPLSK

SEQ ID NO: 55662 - protein, 383 aa, Gilliamella sp.
  misc_feature (1)..(383): tr|A0A242PDV5|A0A242PDV5_9GAMM Queuine tRNA-ribosyltran sferase OS=Gilliamella sp. N-G2 OX=1970471 GN=tgt PE=3 SV=1
MKFELDNTDGLARRGRMKFDRRGVEYTVETPAFMPVGTYGTVKGMTPKEVKATGAQILLGNTFHLWLRPGQEIMRKHGDLHDFMQWSGPILTDSGGFQVFSLGDIRKIKEEGVYFRNPINGDSIFLSPEISMEIQYDLGSDIVMIFDECAPFPAEWDYVKKSMEMSLRWAKRSRQRFDELNNKNALFGIVQGGIHQELRDISIKGLTEIGFDGYAVGGLAVGEPKEDMHRILEGTCPQLPADKPRYLMGVGKPEDLVEGVRRGIDMFDCVMPTRNARNGHLFVTNGVIKIRNAKYKDDTTPLDPHCDCYTCKNYTKSYLHHLDKCGEILGARLNTIHNLRYYQRLMAEIREAVANKRYEAFVTEFYQRIGKTPAPLGNQTKQS

SEQ ID NO: 55663 - protein, 381 aa, Gilliamella sp.
  misc_feature (1)..(381): tr|A0A242NYG3|A0A242NYG3_9GAMM Queuine tRNA-ribosyltran sferase OS=Gilliamella sp. A7 OX=1970465 GN=tgt PE=3 SV =1
MKFELDNTDGLARRGRMKFDRRGVEYTVETPAFMPVGTYGTVKGMTPEEVKATGAQILLGNTFHLWLRPGQEIMRKHGDLHDFMQWPGPILTDSGGFQVFSLGDIRKIKEEGVYFRNPINGDSIFLSPEISMEIQYDLGSDIVMIFDECAPFPAEWDYVKKSMEMSLRWAKRSRQRFDELNNKNALFGIVQGGIHQELRDISIKGLTEIGFDGYAVGGLAVGEPKEDMHRILEGTCPQLPADKPRYLMGVGKPEDLVEGVRRGIDMFDCVMPTRNARNGHLFVTNGVIKIRNAKYKDDTTPLDPHCDCYTCKNYTKSYLHHLDKCGEILGARLNTIHNLRYYQRLMAEIREAVANKRYEAFVTEFYQRIGKTPAPLGNKSK

SEQ ID NO: 55664 - protein, 376 aa, Gillisia hiemivivida
  misc_feature (1)..(376): tr|A0A5C6ZNH4|A0A5C6ZNH4_9FLAO Queuine tRNA-ribosyltran sferase OS=Gillisia hiemivivida OX=291190 GN=tgt PE=3 S V=1
MKFDLLAKDPQSNARAGEITTDHGVIETPIFMPVGTVGSVKGVHQRELKEDINPDIILGNTYHLYLRPQTEILKKAGGLHKFMNWDRSILTDSGGYQVYSLSERRKIKENGVKFKSHIDGSYHIFTPENVMEIQRVIGADIIMAFDECTPYPCDYKYAKRSMHMTHRWLDRCISHLEKTPFEYDYSQAFFPIVQGSTYKDLRKQSAEYIASVGAEGNAIGGLSVGEPAEEMYAMTEVVTEVLPEDKPRYLMGVGTPINILENIALGIDMFDCVMPTRNARNGMLFTAHGTINIKNKKWHDDFSPIDDMAITFVDTDYSKAYLRHLFTVNELLGKQIATIHNLGFYLWLTREARKHILAGDFASWKNRMVQQMNKRL

SEQ ID NO: 55665 - protein, 376 aa, Gillisia limnaea
  misc_feature (1)..(376): tr|H2C081|H2C081_9FLAO Queuine tRNA-ribosyltransferase OS=Gillisia limnaea DSM 15749 OX=865937 GN=tgt PE=3 SV= 1
MNFELLTTDPGSKARAGKITTDHGVIETPIFMPVGTVGSVKGVHQKELKEEINPDVILGNTYHLYLRPSTEILKKAGGLHKFINWDRNILTDSGGYQVYSLSDNRKIKEEGVKFKSHIDGSFHTFTPENVMEIQRVIGADIIMAFDECTPYPCDYRYAKRSMHMTHRWLDRCISHLDKTPYQYDYTQSFFPIVQGSTYKDLRKQSAEYIASVGAEGNAIGGLSVGEPADEMYAMTEVVTEILPEDKPRYLMGVGTPINILENIALGIDMFDCVMPTRNARNGMLFTAHGSINIKNKKWCDDFSQIDEMAITWVDTEYSKAYLRHLFTVNEMLGKQIATIHNLGFYLWLVREARKHILAGDFVTWKNMMVKQMDKRL

SEQ ID NO: 55666 - protein, 376 aa, Gillisia mitskevichiae
  misc_feature (1)..(376): tr|A0A495NY02|A0A495NY02_9FLAO Queuine tRNA-ribosyltran sferase OS=Gillisia mitskevichiae OX=270921 GN=tgt PE=3 SV=1
MKFDLLAKDPQSNARAGKVTTDHGVIETPIFMPVGTVGSVKGVHQRELKEDINPDIILGNTYHLYLRPQTEILKKAGGLHKFMNWDRSILTDSGGYQVYSLSERRKIKESGVKFKSHIDGSYHTFTPENVMEIQRVIGADIIMAFDECTPYPCDYKYAKRSMHMTHRWLDRCITHLEKTPFEYDYSQAFFPIVQGSTYKDLRKQSAEYIASVGAEGNAIGGLSVGEPAEEMYAMTEVVTAVLPEDKPRYLMGVGTPINILENIALGIDMFDCVMPTRNARNGMLFTAHGTINIKNKKWHDDFSPIDDMAITFVDTEYSKAYLRHLFTVNELLGKQIATIHNLGFYLWLVREARKHILAGDFASWKNMMVQQMNKRL

SEQ ID NO: 55667 - protein, 376 aa, Gillisia sp.
  misc_feature (1)..(376): tr|A0A559PPC2|A0A559PPC2_9FLAO Queuine tRNA-ribosyltran sferase OS=Gillisia sp. Hel_I_86 OX=1249981 GN=tgt PE=3 SV=1
MKFNLLAKDPQSNARAGEITTDHGVIETPIFMPVGTVGSVKGVHQRELKEDINPDVILGNTYHLYLRPQTGILKKAGGLHKFMNWDRNILTDSGGYQVYSLSERRKIKENGVKFKSHIDGSYHTFTPENVMEIQRVIGADIIMAFDECTPYPCDYKYAKRSMHMTHRWLDRCISHLEKTPFEYDYSQAFFPIVQGSTYKDLRKQSAEYIASVGAEGNAIGGLSVGEPAEEMYAMTEVVTAVLPEDKPRYLMGVGTPINILENIALGIDMFDCVMPTRNARNGMLFTAHGTINIKNNKWHDDFSPIDDMAITFVDTEYSKAYLRHLFTVNELLGKQIATIHNLGFYLWLVREARKHILAGDFASWKNKMVQQMNKRL

SEQ ID NO: 55668 - protein, 376 aa, Gillisia sp.
  misc_feature (1)..(376): tr|A0A1H1KUK1|A0A1H1KUK1_9FLAO Queuine tRNA-ribosyltran sferase OS=Gillisia sp. Hel1_33_143 OX=1336796 GN=tgt P E=3 SV=1
MNFELLTTDVGSKARAGKITTDHGVIETPIFMPVGTVGTVKGVHQRELKEEINPDIILGNTYHLYLRPQVEILKKAGGLHKFMNWDRNILTDSGGFQVYSLSDRRKIKEEGVKFKSHIDGSYHTFTPENVMEIQRAIGADIIMAFDECTPYPCDYRYAKRSMHMTHRWLDRCISHLEKTPYLYDYSQAFFPIVQGSTYKDLRKQSAEYIASVGAEGNAIGGLSVGEPAEEMYAMTEVVTEILPEDKPRYLMGVGTPINILENIALGIDMFDCVMPTRNARNGMLFTAHGTINIKNKKWEDDFSAIDDMNITWVDTEYTKAYLRHLFSVNELLGKQIATIHNLGFYLWLTREARKHILAGDFTTWKNMMVKQMDKRL

SEQ ID NO: 55669 - protein, 376 aa, Gilvibacter sp.
  misc_feature (1)..(376): tr|A0A1Y0MR43|A0A1Y0MR43_9FLAO Queuine tRNA-ribosyltran sferase OS=Gilvibacter sp. SZ-19 OX=754429 GN=tgt PE=3 SV=1
MQFSLAANDPLSKARAGTITTDHGTIETPIFMPVGTAGTVKGVHQRELKEDIDPDIILGNTYHLYLRPKTDILQKAGGLHKFMNWDRNILTDSGGYQVYSLSGNRKIKEEGVKFQSHIDGSYHMFTPERVMQIQRVIGADIIMAFDECTPYPCDYNYAKRSMLMTHRWLDRCIAELDKLPYTYDYSQAFFPIVQGSTYKDLRKQSAEYIASVDAVGNAIGGLSVGEPAEEMYAMTEVVTEVLPWDKPRYLMGVGTPINILENIALGVDMFDCVMPTRNARNGMLFTSEGTINIKNKKWEDDFSVIDPMGHTYVDTQYTKAYLKHLFSVNELLGKQIATIHNLGFYLWLVREARRQIIAGTFKSWKDKMVRQMDKRL

SEQ ID NO: 55670 - protein, 372 aa, Gimesia maris
  misc_feature (1)..(372): tr|A0A3D3RFJ9|A0A3D3RFJ9_9PLAN Queuine tRNA-ribosyltran sferase OS=Gimesia maris OX=122 GN=tgt PE=3 SV=1
MSHFHFELLHTDTKTSARAGRWHTPHGIVDTPAFMPVGTLASVKGLLPDQLKQVGTQQVLANTYHLALRPGAEIVAEMGGLHKFMNWDGPILTDSGGFQVFSLAQLTKMDDQQVAFRSHIDGSLFELSPEKAVKIQEQLGADCIMCLDECPPHDVPMEKMQDAVDRTTKWAARCRDAQKRDDQALFGIVQGGTDQKMRERSAEGLLPLEFPGYAVGGLSVGEKPEDMYSTLDFTTPMLPVEKPRYLMGVGRPSDLIEAIIRGVDLFDCVMPTRNGRNGMAFTSQGRVNLRNQKHARDPSPLDPEIDSPGSRDYSRAYLRHLFMSREMLGPILISLHNIAFYQKLLRDLRQAILNDQVEEFRAVHLARWNASF

SEQ ID NO: 55671 - protein, 372 aa, Gimesia maris
  misc_feature (1)..(372): tr|A6CC73|A6CC73_9PLAN Queuine tRNA-ribosyltransferase OS=Gimesia maris DSM 8797 OX=344747 GN=tgt PE=3 SV=1
MSHFHFELLHTDTKTSARAGRWHTPHGIVDTPAFMPVGTLASVKGLLPDQLKQVGTQQVLANTYHLALRPGAEIVAEMGGLHKFMNWDGPILTDSGGFQVFSLAQLTKMDDQQVAFRSHIDGSLFELSPEKAVKIQEQLGADCIMCLDECPPHDVPMEKMQDAVDRTTKWAARCRDAQKRDDQALFGIVQGGTDQKMRERSAEGLLPLEFPGYAVGGLSVGENPEDMYTTLDFTTPMLPVEKPRYLMGVGRPSDLIEAIMRGVDLFDCVMPTRNGRNGMAFTSQGRVNLRNQKHVRDPSPLDPEIDSPGSRDYSRAYLRHLFMSREMLGPILISLHNIAFYQKLLRDLRQAILNDQVEEFRAVHLARWNASF

SEQ ID NO: 55672 - protein, 372 aa, Gimesia sp.; identical to SEQ ID NO: 55670
  misc_feature (1)..(372): tr|A0A2D5GVC7|A0A2D5GVC7_9PLAN Queuine tRNA-ribosyltran sferase OS=Gimesia sp. OX=2024833 GN=tgt PE=3 SV=1

SEQ ID NO: 55673 - protein, 372 aa, Gimesia sp.
  misc_feature (1)..(372): tr|A0A2E7K8D7|A0A2E7K8D7_9PLAN Queuine tRNA-ribosyltran sferase OS=Gimesia sp. OX=2024833 GN=tgt PE=3 SV=1
MSQFHFELIHTDSRTQARAGRWHTPHGIVDTPAFMPVGTLASVKGLLPEQLKQVGTQQVLANTYHLALRPGAEIVQELGGLHEFMNWDGPILTDSGGFQVFSLAQLTKMDDEQVVFRSHIDGSLFELSPEKAVKIQEQLGADCIMCLDECPPHDVPLEKMQEAVDRTTKWAARCRDAQKRDDQALFGIVQGGTDQKMRERSAEGLLPLEFPGYAIGGLSVGEKPEDMYSTLDFTTPMLPVEKPRYLMGVGRPSDLIEAIMRGVDLFDCVMPTRNGRNGMAFTSQGRVNLRNQKHARDPSPLDPECDSPGSRDYSRAYLRHLFMAREMLGPILISLHNIAFYQKLVRDLREAILNDQVEEFRAVHLARWNASF

SEQ ID NO: 55674 - protein, 372 aa, Glaciecola nitratireducens
  misc_feature (1)..(372): tr|G4QK25|G4QK25_GLANF Queuine tRNA-ribosyltransferase OS=Glaciecola nitratireducens (strain JCM 12485 / KCTC 12276 / FR1064) OX=1085623 GN=tgt PE=3 SV=1
MKFNLMATDGKARRGQLIFERGVVETPAFMPVGTYGTVKGMTPEELDESGAHICLGNTFHLMLRPGTSIIKQHGDLHDFMNWDKPILTDSGGFQVFSLGDLRKITEHGVTFRSPINGEKILLTPEKSMEVQRDLGSDIVMIFDECTPYPATEKEASDSMEMSLRWAQRSKDAHGDNPSALFGIIQGGMYEHLRDTSLEGLEDIGFDGYAIGGLSVGEPKEDMIRIINHTAPKIPENKPRYLMGVGKPEDIVEAVRRGIDMFDCVMPTRNARNGHLFVTDGVVKIRNAVHKTDTGPLDEKCDCYTCKNYSRSYLHHLDKCNEILGSRLNTIHNLRYYQRIMEGLRTAIAAGELASFVDEFYAQKGLPVPPLED

SEQ ID NO: 55675 - protein, 372 aa, Glaciecola pallidula
  misc_feature (1)..(372): tr|K6ZBZ3|K6ZBZ3_9ALTE Queuine tRNA-ribosyltransferase OS=Glaciecola pallidula DSM 14239 = ACAM 615 OX=1121922 GN=tgt PE=3 SV=1
MKFNLMATDGKARRGQLIFERGVVETPAFMPVGTYGTVKGMTPEELDESGAHICLGNTFHLMLRPGTSIIKQHGDLHDFMNWDKPILTDSGGFQVFSLGDLRKITEHGVTFRSPINGEKILLTPEKSMQVQRDLGSDIVMIFDECTPYPATEKEASDSMEMSLRWAQRSKDAHGDNPSALFGIIQGGMYEHLRDTSLAGLEDIGFDGYAIGGLSVGEPKADMIRIINHTAPKIPENKPRYLMGVGKPEDLVEAVRRGIDMFDCVMPTRNARNGHLFVTDGVVKIRNAVHKTDTGPLDEKCDCYTCKNYSRSYLHHLDKCNEILGSRLNTIHNLRYYQRIMDGLRNAIAAGELVNFVAEFYAQKGLPVPLLEG

SEQ ID NO: 55676 - protein, 370 aa, Glaciecola punicea
  misc_feature (1)..(370): tr|H5T7W0|H5T7W0_9ALTE Queuine tRNA-ribosyltransferase OS=Glaciecola punicea ACAM 611 OX=1121923 GN=tgt PE=3 S V=1
MKFSLLNTDGLARRGQLIFERGVVETPAFMPVGTYGTVKGMTPEELTETGAHICLGNTFHLMLRPGTGIIKDHGDLHDFMHWNKPILTDSGGFQVFSLGAMSKINEEGVTFRSPINGEKILLTPEKSMHVQRDLGSDIVMIFDECTPFPATKDEAQRSMELSLRWAKRSKEAHSDNPSALFGIVQGGMFEDLRDVSLSGLEEIGFDGYAIGGLSVGEPKEDMMRIVKHTAPQIPANKPRYLMGVGKPEDIVEAVRRGIDMFDCVMPTRNARNGHLFVHDGVVKIRNARHKTDIKPLDEKCDCYTCKNYSRSYLHHLDKCNEILGARLNTIHNLRYYQVVMEGLRTAISENALTEFVELFYAQKGMDVPDL

SEQ ID NO: 55677 - protein, 375 aa, Glaciecola sp.
  misc_feature (1)..(375): tr|A0A2Z6UHU1|A0A2Z6UHU1_GLASK Queuine tRNA-ribosyltran sferase OS=Glaciecola sp. (strain KUL10) OX=2161813 GN= tgt PE=3 SV=1
MKFNLKKTDGRARRGQLEFDRGIVETPAFMPVGTYGTVKGMTPEELKESGAHICLGNTFHLMLRPGTSIIKQHGDLHDFMHWDKPILTDSGGFQVFSLGAMRKITEEGVTFKSPINGEKILLTPEKSMEVQRDLGSDIVMIFDECTPYPATEKEAEDSMQLSLRWAQRSKDAHGDNPSALFGIIQGGMYEHLRDVSLEGLENIGFDGYAIGGLSVGEPKEDMIRIINHTAPKIPENKPRYLMGVGKPEDLVEAVRRGIDMFDCVMPTRNARNGHLFVTEGIVKIRNAVHKTDTSPLDENCDCYTCKNYSRSYLHHLDKCNEILGSRLNTIHNLRYYQRVMQGLRDAIDAGELETFVEEFYAQKGKLIPALEAIDE

SEQ ID NO: 55678 - protein, 95 aa, Glaciecola sp.
  misc_feature (1)..(95): tr|A0A348MV09|A0A348MV09_9ALTE tRNA guanosine(34) trans glycosylase Tgt (Fragment) OS=Glaciecola sp. OX=1905676 GN=tgt PE=4 SV=1
MQFKLLATQGKARRGQLVFPRGIVETPAFMPVGTYGTVKGMTPEELTETGAHICLGNTFHLMLRPGTEIIQQHGDLHDFMHWDKPILTDSGGFQV

SEQ ID NO: 55679 - protein, 375 aa, Glaciimonas sp.
  misc_feature (1)..(375): tr|A0A2T6FC25|A0A2T6FC25_9BURK Queuine tRNA-ribosyltran sferase OS=Glaciimonas sp. PCH181 OX=2133943 GN=tgt PE= 3 SV=1
MLEFTLLKTEGKARRGRVKLNHGIVETPIFMPVGTYGSVKAMSPLELKEIDAHIILGNTFHLWLRPGIEVVKKFGGLHKFMGWDKPILTDSGGFQVFSLGAMRKITEEGVKFSSPINGDKLFLSPEVSMQIQKVLNSDIVMQFDECTPYEIDGRPATQIEAAESMRMSLRWAKRSQDEFKGGENPNALFGIVQGGMFEHLREESLAGLNALDFNGIAIGGLSVGEPKEEMMRVLEYIGPKLPANKPHYLMGVGTPEDLVAGVQNGVDMFDCVMPTRNARNGWLFTRFGDVKIKNARYKEDTQPLDESCGCYACKNFSRAYLHHLHRTGEILGARLNTIHNLHYYLDLMQNIRNALDEERFTSFVALFHADRARGV

SEQ ID NO: 55680 - protein, 385 aa, Glaesserella parasuis
  misc_feature (1)..(385): tr|U4SM61|U4SM61_HAEPR Queuine tRNA-ribosyltransferase OS=Glaesserella parasuis D74 OX=1275971 GN=tgt PE=3 SV= 1
MKYELKKTNGNARRGRLTFSRPKGEYHVETPAFMPVGTYGTVKGMTPEEVAQTGAQILLGNTFHLWLRPGQEIMRQHGDLHDFMQWHGPILTDSGGFQVFSLGKLRKIKEEGVYFQNPISGEKVFLSPEKSMEIQYDLGSDIVMIFDECTPYPATFDYAKQSMEMSLRWAKRSRDRFDELQNPNALFGIIQGGVYEELRKVSVEKLVEIGFDGYAVGGLAVGEPKEDMHRILEYVCPQIPADKPRYLMGVGKPEDLVEGVRRGIDMFDCVMPTRNARNGHLFVTNGIVKIRNAKYRNDISPLDPECDCYTCKNYTKAYLYHLDKCGEILGARLNTIHNLRYYQRLMAEIRQAIDEDRFDHFVVEFYQRIGKEVPPLQLAKEGENA

SEQ ID NO: 55681 - protein, 385 aa, Glaesserella parasuis
  misc_feature (1)..(385): tr|U4S324|U4S324_HAEPR Queuine tRNA-ribosyltransferase OS=Glaesserella parasuis str. Nagasaki OX=1117322 GN=tg t PE=3 SV=1
MKYELKKTNGNARRGRLTFSRPKGEYHVETPAFMPVGTYGTVKGMTPEEVAQTGAQILLGNTFHLWLRPGQEIMRQHGDLHDFMQWHGPILTDSGGFQVFSLGKLRKIKEEGVYFQNPISGEKVFLSPEKSMEIQYDLGSDIVMIFDECTPYPATFDYAKQSMEMSLRWAKRSRDRFDELQNPNALFGIIQGGVYEELRKVSVEKLVEIGFDGYAVGGLAVGEPKEDMHRILEYVCPQIPADKPRYLMGVGKPEDLVEGVRRGIDMFDCVMPTRNARNGHLFVTNGIVKIRNAKYRNDISPLDPECDCYTCKNYTKAYLYHLDKCGEILGARLNTIHNLRYYQRLMAEIRQAIDEDRFDDFVVEFYQRIGKEVPPLQLAKEGENA

SEQ ID NO: 55682 - protein, 385 aa, Glaesserella sp.
  misc_feature (1)..(385): tr|A0A328C3A1|A0A328C3A1_9PAST Queuine tRNA-ribosyltran sferase OS=Glaesserella sp. HHC-2018 OX=2094024 GN=tgt PE=3 SV=1
MKYELKKTNGNARRGRLTFSRPKGEYHVETPAFMPVGTYGTVKGMTPEEVAQTGAQILLGNTFHLWLRPGQEIMRQHGDLHDFMQWHGPILTDSGGFQVFSLGKLRKIKEEGVYFQNPISGEKVFLSPEKSMEIQYDLGSDIVMIFDECTPYPATFDYAKQSMEMSLRWAKRSRDRFDELQNPNALFGIIQGGVYEELRKVSVEKLVEIGFDGYAVGGLAVGEPKEDMHRILEYVCPQIPADKPRYLMGVGKPEDLVEGVRRGIDMFDCVMPTRNARNGHLFVTNGIVKIRNAKYRNDISPLDPECDCYTCKNYTKAYLYHLDKCGEILGARLNTIHNLRYYQRLMAEIRQAIDEDRFDDFVVEFYQRIGKEVPPLQLAKESENA

SEQ ID NO: 55683 - protein, 381 aa, Globicatella sanguinis
  misc_feature (1)..(381): tr|A0A2I1PGP4|A0A2I1PGP4_9LACT Queuine tRNA-ribosyltran sferase OS=Globicatella sanguinis OX=13076 GN=tgt PE=3 SV=1
MSEPVIRYELIKEEKHTGARLGKLHTPHGTFDTPMYMPVGTLATVKGLSPEELKEMGAQVVLSNTYHLWLRPGDDLVAEAGGLHKFMNWDQGILTDSGGFQVFSLSDIRRIEEEGVHFRNHLNGSKLFLTPEKAIHIENNLGADMIMSFDECPPFYETHDYVEKSINRTTRWAERGLKAHQRPHDQALFGILQGAGYKDLRLQHARDMISLDFPGYSIGGLSVGESKEEMNEVLEYLTPVIPKDKPRYLMGVGSPDALIDGAIRGVDMFDCVLATRIARNGTTMTSTGRLVVKNAKYARDFRPLDEHCNCYTCRNYSRAYLRHLFKADEMFGLRLASIHNVHFLLNLMKQVRENIMNDSLLEFKEDFFERYGYNKENARAF

SEQ ID NO: 55684 - protein, 381 aa, Globicatella sp.
  misc_feature (1)..(381): tr|A0A1E8Z2Q2|A0A1E8Z2Q2_9LACT Queuine tRNA-ribosyltran sferase OS=Globicatella sp. HMSC072A10 OX=1739315 GN=tg t PE=3 SV=1
MSEPVIRYELIKEEKHTGARLGKLHTPHGTFDTPMYMPVGTLATVKGLSPEELKEMGAQVVLSNTYHLWLRPGDDLVAEAGGLHKFMNWDQGILTDSGGFQVFSLSDIRRIEEEGVHFRNHLNGSKLFLTPEKAIHIENNLGADMIMSFDECPPFYETHDYVEKSINRTTRWAERGLKAHQRPHDQALFGILQGAGYKDLRLQHARDMISLDFPGYSIGGLSVGESKEEMNEVLEYLTPVMPKDKPRYLMGVGSPDALIDGAIRGVDMFDCVLATRIARNGTTMTSTGRLVVKNAKYARDFRPLDEHCNCYTCRNYSRAYLRHLFKADEMFGLRLASIHNVHFLLNLMKQVRENIMNDSLLEFKEDFFERYGYNKENARAF

SEQ ID NO: 55685 - protein, 381 aa, Globicatella sulfidifaciens
  misc_feature (1)..(381): tr|A0A1T4KQJ9|A0A1T4KQJ9_9LACT Queuine tRNA-ribosyltran sferase OS=Globicatella sulfidifaciens DSM 15739 OX=112 1925 GN=tgt PE=3 SV=1
MSEPVIRYELIKEEKHTGARLGKLHTPHGTFDTPMYMPVGTLATVKGLSPEELKEMGAQVILSNTYHLWLRPGDDLVAEAGGLHKFMNWDQGILTDSGGFQVFSLSDIRRIEEEGVHFRNHLNGSKLFLTPEKAIHIENNLGADMIMSFDECPPFYETHDYVEKSINRTTRWAERGLKAHQRPHDQALFGILQGAGYKDLRLQHARDMISLDFPGYSIGGLSVGESKEEMNEVLEYLTPVMPKDKPRYLMGVGSPDALIDGAIRGVDMFDCVLATRIARNGTTMTSTGRLVVKNAKYARDFRPLDEHCNCYTCRNYSRAYLRHLFKADEMFGLRLASIHNVHFLLNLMKQVRENIMNDSLLEFKEDFFERYGYNKENARAF

SEQ ID NO: 55686 - protein, 344 aa, Gloeobacter kilaueensis
  misc_feature (1)..(344): tr|U5QEQ9|U5QEQ9_9CYAN Queuine tRNA-ribosyltransferase OS=Gloeobacter kilaueensis JS1 OX=1183438 GN=tgt PE=3 S V=1
MPVGTQATVKTLTPAQLVEAGAQMILANTYHLSLQPGAEIVAEAGGLHHFMQWPGPILTDSGGFQVFSLSSLRTIDDDGVTFREPRSGSLVRFTPEYAMAVQNALGADVAMAFDECPPYPAERSAVERAVTRTLHWFERCLAAHRRSDQALFGIVQGGVWPDLRAHCAEVLASADLPGYAIGGVSVGEPGMLIEKVVRVTAPLLPEHKPRYLMGVGTFRELAQAAAVGVDLFDCVMPTRVARHGSALLINATGDRRINLKNAQFRRDFAPLDTHCPCYTCRHFSRAYLSHLVRSGEILAMTLLSIHNIATLSRFSAELRAAIIDGSFTQRFAAYLQPEAEVERG

SEQ ID NO: 55687 - protein, 378 aa, Gloeobacter violaceus
  misc_feature (1)..(378): sp|Q7NMG4|TGT_GLOVI Queuine tRNA-ribosyltransferase OS= Gloeobacter violaceus (strain ATCC 29082 / PCC 7421) OX =251221 GN=tgt PE=3 SV=1
MTASFAFTIEHRDGEARAGTFATPHGPVYTPCFMPVGTQATVKTLTPAQLAETGAQMILANTYHLSLQPGADIVAGAGGLHGFMQWPGPILTDSGGFQVFSLSSLRTIDDDGVTFREPKSGALVRFTPEHAVAVQNALGADVIMAFDECPPYPADREQVEGAVERTLRWFERCVEAHRRSDQALFGIVQGGVWPDLRRRCAEGLVAADLPGYAIGGVSVGEPQTLIERVVRVTAPLLPEHKPRYLMGVGTFREMAQAVAVGVDLFDCVMPTRVARHGSALLLGTGGDRRINLKNAQFRRDYEPLDCVCPCYTCRHFSRAYLAHLVRSEEILAMTLLSIHNVATLTRFAALLRCAIATGSFAQEFAHYLQSGPEPVLSN

SEQ ID NO: 55688 - protein, 378 aa, Gloeocapsa sp.
  misc_feature (1)..(378): tr|K9XG73|K9XG73_9CHRO Queuine tRNA-ribosyltransferase OS=Gloeocapsa sp. PCC 7428 OX=1173026 GN=tgt PE=3 SV=1
MSEKFSFQVLAECSQTKARAGFFLTPHGRVATPRFMPVGTLANVKTITTAQLGETGAQMVLANTYHLHLQPGEAIVAKAGGLHSFMHWHGPMLTDSGGFQVFSLSELRQVTDDGVTFRSPRDGQVINITPEKSIQIQNALGADVIMAFDECPPYPASREAVTDATNRTYRWLERCIATHQRQDQALFGIVQGGVYLDLRAQAALEVAKLNLPGYAIGGVSVGEPPELIHQIVEATAPLLPREKPRYLMGVGTYREMAKAVAAGVDLFDCVIPTRLARHGAALVQQGDRWNLKNARFREDFTPLDETCPCYTCQNFTRAYLCHLVRSREILAYTLLSIHNITELIRFTQRMREAILSDSFATEFAPWLTQSAVTDSSNT

SEQ ID NO: 55689 - protein, 371 aa, Gloeocapsa sp.
  misc_feature (1)..(371): tr|L8LM49|L8LM49_9CHRO Queuine tRNA-ribosyltransferase OS=Gloeocapsa sp. PCC 73106 OX=102232 GN=tgt PE=3 SV=1
MGFSFHNQGNCSFTKARAGIWTTPHGCVETPRFMPVGTIATVKGLTPAQLEVSGAQMILGNTYHLHLQPGEEIIAQAGGLHKFMAWNGPILTDSGGFQVFSLSKLRKISEAGVTFRSPRDGRLIEFTPEKSIEIQNILGADVIMAFDECPPASATREEIKAATERTYRWLKRCVQAHQRPQEQALFPIVQGGVYLDLRSQAAQELVELDLPGYAIGGVSVGETPELIHQIVAHTAPLLPQDKPRYLMGVGTYREMVQAIAWGIDVFDCVIPTRLGRHGTALVRGERWNLRNARFRQDFNPLDEHCSCYTCQTFSRAYLNHLVRSREMLGYMLLSLHNIHELIHFTKAIREAILQDRFLTEFGHWLTQRMIP

SEQ ID NO: 55690 - protein, 368 aa, Gloeomargarita lithophora
  misc_feature (1)..(368): tr|A0A1J0AA61|A0A1J0AA61_9CYAN Queuine tRNA-ribosyltran sferase OS=Gloeomargarita lithophora Alchichica-D10 OX= 1188229 GN=tgt PE=3 SV=1
MASFSFRVIQTCSHTHARAGIFPTPHGSVLTPTFMPVGTLGTVKGVAPDQLAGTGAQMILGNTYHLHLQPGEEIVQHCGGLHRFMNWPGPILTDSGGFQVFSLSSLRQITDDGVTFRSPRNGDLIHFTPEKSIQIQNALGADVIMAFDECPPYPASYDEVKNAVNRTDQWLKRCIDAHQRSDQALFGIVQGGVYPELRRLSAQQITEYDLPGYAIGGVSVGEPSELIHDIVKTVAPYLPLDKPRYLMGVGTYREMALAISAGVDLFDCVIPTRLARHGAVLVRGERWNLKNRVFQRDERPLDSTCPCYTCQNFSRAYLSHLFRSRELLGYTLLSIHNLTELMRFSLGLRQAIITGNFAEKLASILSEN

SEQ ID NO: 55691 - protein, 375 aa, Gloeothece citriformis
  misc_feature (1)..(375): tr|B7KCS6|B7KCS6_GLOC7 Queuine tRNA-ribosyltransferase OS=Gloeothece citriformis (strain PCC 7424) OX=65393 GN =tgt PE=3 SV=1
MGFSYNCQATCSQTFARAGVWNTPHGIVETPRFMPVGTLATVKGLTPAQLQTTGAQMILANTYHLHLQPGEAIVEKAGGLHQFMAWKGPILTDSGGFQVFSLSELREIKDSGVTFRSPRDGRIIEITPERSIQIQNALGADVIMAFDECPPANTSRTEVERATQRTYRWLERCINAHQRPQEQALFGIVQGGIYPELRCQAARDLVQLDLPGYAIGGVSVGEKPELIHQIVDITAPLLPPHKPRYLMGVGTYREMAKAVAAGVDLFDCVIPTRFGRHGTAMVQGERWNLKNAQFKEDFRPLDETCSCYTCQHFTRAYLNHLIKSREMLGYILLSLHNIAELIRFTQKMREAILSDRFASEFAYWLKEEDKSLSSF

SEQ ID NO: 55692 - protein, 372 aa, Gloeothece verrucosa
  misc_feature (1)..(372): tr|E0UBH6|E0UBH6_GLOV7 Queuine tRNA-ribosyltransferase OS=Gloeothece verrucosa (strain PCC 7822) OX=497965 GN= tgt PE=3 SV=1
MRFSFNCQATCSQTKARAGVWNTPHGIVETPRFMPVGTLATVKGLTPAQVQTTGAQMILANTYHLHLQPGEGIVQKAGGLHQFMAWKGPILTDSGGFQVFSLSELREIKESGVTFRSPRDGRMIEITPERSIKIQNSLGADVIMAFDECPPANATRVEVERATQRTYRWLERCIQAHERPQEQALFGIVQGGIYPDLRSEAARSLVELDLPGYAIGGVSVGEKLELIHHIVNLTAPLLPPHKPRYLMGVGTYREMVKAVAAGIDLFDCVIPTRFGRHGAAMVKGERWNLKNAQFKEDFTPLDETCPCYTCENFTRAYLNHLIKSREMLGYILLSLHNIAELVRFTQRMREAILSDRFTSEFAEWLNTSPTPR

SEQ ID NO: 55693 - protein, 387 aa, Gluconacetobacter diazotrophicus
  misc_feature (1)..(387): sp|A9HBJ2|TGT_GLUDA Queuine tRNA-ribosyltransferase OS= Gluconacetobacter diazotrophicus (strain ATCC 49037 / D SM 5601 / PAl5) OX=272568 GN=tgt PE=3 SV=1
MSTAFRWVEQARVGRARAGHLHTAHGVVPTPTFMPVGTVGTVKAMTMDSVRSTGAGIVLGNTYHLMLRPGAEKVRALGGLHRFMDWPGPILTDSGGFQVMSLGALRKLDQDGVTFNSHIDGSKHRLTPERSTDIQHALDATITMCFDECPALPAPPETIAQSMRLSMRWAARCREAFVPRAGYAQYGIIQGGTEPELRAESVRALTGIGFEGYAIGGLAVGEGQELMYATLDATVPLIPHDSPRYLMGVGTPDDLLGAVERGVDMFDCVMPTRAGRTARAYTERGTLNLRNARHADDTRPLSPHCDCLACTRHSRAYLHHLFRANEILGPMLLTWHNLAYYQRLMRGMRGAIVAGTLGAHAAGLRAEWAMEDWTPDEMPPPDLPPVP

SEQ ID NO: 55694 - protein, 386 aa, Gluconacetobacter entanii
  misc_feature (1)..(386): tr|A0A318Q0M0|A0A318Q0M0_9PROT Queuine tRNA-ribosyltran sferase OS=Gluconacetobacter entanii OX=108528 GN=tgt P E=3 SV=1
MTAFRWRAQARSGRARAGYLDTAHGTVATPTFMPVGTVGTVKAMTMDAVRSTGAGIVLGNTYHLMLRPGAERVRALGGLHRFMDWPGPILTDSGGFQVMSLGPLRKLDADGVTFRSHIDGSKHRLTPERSTDIQHALDATISMCFDECPALPAPAEAIAQSMRMSMRWAERCRTAFVARPGYAQYGIIQGGTEPQLRAESVRALTDIGFEGYAIGGLAVGEGQELMFSTLDVTVGLIPDDAPRYLMGVGTPDDLLGAVERGVDMFDCVMPTRAGRTARAYTERGTLNLRNARHATDSRPISPHCDCLACSRHSRAYLHHLFRANEMLGPMLLTWHNLAYYQRLMRGIRAAIVDGTLPEHAACLRAQWAMEDWSPDEMPFPDIPPVP

SEQ ID NO: 55695 - protein, 387 aa, Gluconacetobacter liquefaciens
  misc_feature (1)..(387): tr|A0A370G0L9|A0A370G0L9_GLULI Queuine tRNA-ribosyltran sferase OS=Gluconacetobacter liquefaciens OX=89584 GN=t gt PE=3 SV=1
MSTSFRWVEQARSGRARAGHLHTAHGVVPTPTFMPVGTVGTVKAMTMDAVRSTGAGIVLGNTYHLMLRPGAERVRALGGLHRFMDWPGPILTDSGGFQVMSLGPLRKLDQDGVTFSSHIDGSKHRLTPERSTDIQHALDATITMCFDECPALPAAPEVIAQSMRMSMRWAARCREAFVQRPGYAQYGIIQGGTEAELRAESVRALTGIGFEGYAIGGLAVGEGQELMFSTLDATTPLIPWDSPRYLMGVGTPDDLLGSVERGVDMFDCVMPTRAGRTARAYTERGTLNLRNARHAVDSRPISPHCDCLACTCHSRAYLHHLFRTNEILGPMLLTWHNLAYYQRLMRGIRAAIVEGTLEAHAAWLRAQWAMEDWSPDEMPPPDIPPVP

SEQ ID NO: 55696 - protein, 386 aa, Gluconacetobacter sp.
  misc_feature (1)..(386): tr|F3S4J3|F3S4J3_9PROT Queuine tRNA-ribosyltransferase OS=Gluconacetobacter sp. SXCC-1 OX=1004836 GN=tgt PE=3 SV=1
MTTFRWRPEARTGHARAGWLDTAHGSVPTPTFMPVGTVGTVKAMTMDNVRATGAGIVLGNTYHLMLRPGAERVRQLGGLHRFMDWPGPILTDSGGFQVMSLGPLRKLDQDGVTFRSHIDGSKHRLTPERSTDIQHALDATISMCFDECPALPAAPDVIARSMRMSMRWAERCRTAFVQRPGYAQYGIIQGGTEPELRAESVRALTGIGFEGYAIGGLAVGEGQELMFATLDSTVPLIPDASPRYLMGVGTPDDLLGAVERGVDMFDCVMPTRAGRTARAYTERGTLNLRNARHATDSRPISPHCDCLACSRHSRAYLHHLFRANEILGPMLLTWHNLAYYQRLMRGMRAAIVDGAFAAHADHLRAQWAMDDWSGDEMPYPDFPPVP

SEQ ID NO: 55697 - protein, 392 aa, Gluconobacter albidus
  misc_feature (1)..(392): tr|A0A149TLB7|A0A149TLB7_9PROT Queuine tRNA-ribosyltran sferase OS=Gluconobacter albidus OX=318683 GN=tgt PE=3 SV=1
MSNHQTDHATKMTWVPEASCGMARAGHLHTRHGTVPTPTFMPVGTVGTVKGMTMDAVRSTGAGIVLGNTYHLMLRPTADRVQKLGGLHRMMDWPGPILTDSGGFQVMSLGALRKLDEDGVTFRSHIDGSKHRLTPEISTDIQFKLDATITMAFDECPALPATPEVLRKSMEMSMRWAARSREAFVAREGYGQFGIVQGGTERDLREYSIKALTEIGFEGYAIGGLAVGEGQELMFSTLDFTTPMLPQDKARYLMGVGTPDDLLGAVMRGVDMFDCVMPSRAGRTARAYTERGPINLRNARFAEDTRTLTPNDDTPIAGRYSRAYLHHLFRANEMLGPMLLTWHNLAYYQRLMRQIRAAIVDGTLDVLAVKLREDWAKGDWTEDEWPMPDLAL

SEQ ID NO: 55698 - protein, 392 aa, Gluconobacter albidus
  misc_feature (1)..(392): tr|A0A1U9KZX9|A0A1U9KZX9_9PROT Queuine tRNA-ribosyltran sferase OS=Gluconobacter albidus OX=318683 GN=tgt PE=3 SV=1
MSNHQTDHATKMTWVPEASCGMARAGHLHTRHGTVPTPTFMPVGTVGTVKGMTMDAVRSTGAGIVLGNTYHLMLRPTADRVQKLGGLHRMMDWPGPILTDSGGFQVMSLGALRKLDEDGVTFRSHIDGSKHRLTPEISTDIQFKLDATITMAFDECPALPATPEVLRKSMEMSMRWAARSREAFVAREGYGQFGIVQGGTERDLREYSIKALTEIGFEGYAIGGLAVGEGQELMFSTLDFTTPMLPQDKARYLMGVGTPDDLLGAVMRGVDMFDCVMPSRAGRTARAYTERGPINLRNARFAEDTRTLTPHDDTPIAGRYSRAYLHHLFRANEMLGPMLLTWHNLAYYQRLMRQIRAAIVDGTLDVLAVKLREDWAKGDWTEDEWPMPDLAL

SEQ ID NO: 55699 - protein, 388 aa, Gluconobacter cerinus
  misc_feature (1)..(388): tr|A0A1B6VKJ3|A0A1B6VKJ3_9PROT Queuine tRNA-ribosyltran sferase OS=Gluconobacter cerinus OX=38307 GN=tgt PE=3 S V=1
MTEQATKMTWVPEATCGQARAGHLHTRHGTVPTPTFMPVGTVGTVKGMTMDAVRSTGAGIVLGNTYHLMLRPTADRVQKLGGLHKMMDWSGPILTDSGGFQVMSLGALRKLDQDGVTFQSHIDGSKHRLSPEISTDIQYKLDATITMAFDECPALPATPEALRKSMELSMRWAARSREAFVAREGYGQFGIVQGGTERDLREYSIKALTEIGFEGYAIGGLAVGEGQELMFSTLDFTTPMLPQDKARYLMGVGTPDDLLGSVMRGVDMFDCVMPSRAGRTARAYTERGYINLRNARFAEDTRPLTPHDDSPMAGRYTRAYLHHLFRAGEMLGPMLLTWHNLAYYQRLMRQIRAAIVDGTLNELVIKLREDWSKGDWTEDEWPMPSLAL

SEQ ID NO: 55700 - protein, 388 aa, Gluconobacter frateurii
  misc_feature (1)..(388): tr|A0A0D6PRF6|A0A0D6PRF6_9PROT Queuine tRNA-ribosyltran sferase OS=Gluconobacter frateurii M-2 OX=1231354 GN=tg t PE=3 SV=1
MTEQATKMTWVSEATCGQARAGHLHTRHGTVPTPTFMPVGTVGTVKGMTMDAVRSTGAGIVLGNTYHLMLRPTADRVQKLGGLHKMMDWSGPILTDSGGFQVMSLGALRKLDQDGVTFQSHIDGSKHRLSPEISTDIQYKLDATISMTFDECPALPATPEALRKSMELSMRWAARSREAFVAREGYGQFGIVQGGTERDLREYSIKALTEIGFEGYAIGGLAVGEGQELMFSTLDFTTPMLPQDKARYLMGVGTPDDLLGSVMRGVDMFDCVMPSRAGRTARAYTERGYINLRNARFAEDTRPLTPHDDSPMAGRYTRAYLHHLFRAGEMLGPMLLTWHNLAYYQRLMRQIRAAIVDGTLNELAIKLREDWSKGDWTEDEWPMPSLAL

SEQ ID NO: 55701 - protein, 388 aa, Gluconobacter frateurii
  misc_feature (1)..(388): tr|A0A0K8N6K6|A0A0K8N6K6_9PROT Queuine tRNA-ribosyltran sferase OS=Gluconobacter frateurii NBRC 101659 OX=11049 96 GN=tgt PE=3 SV=1
MTEQATKMTWVPEATCGQARAGHLHTRHGTVPTPTFMPVGTVGTVKGMTMDAVRSTGAGIVLGNTYHLMLRPTADRVQKLGGLHKMMDWSGPILTDSGGFQVMSLGALRKLDQDGVTFQSHIDGSKHRLSPEISTDIQYKLDATITMAFDECPALPATPETLRKSMELSMRWAARSREAFTAREGYGQFGIVQGGTERDLREYSVKALTEIGFEGYAIGGLAVGEGQELMFSTLDFTTPLLPQDKARYLMGVGTPDDLLGSVMRGVDMFDCVMPSRAGRTARAYTERGYINLRNARFAEDTRPITPHDDSPMAGRYTRAYLHHLFRAGEMLGPMLLTWHNLAYYQRLMRQIRAAIVDGTLNELAIKLREDWSKGDWTEDEWPMPSLAL

SEQ ID NO: 55702 - protein, 388 aa, Gluconobacter japonicus
  misc_feature (1)..(388): tr|A0A149U6V7|A0A149U6V7_GLUJA Queuine tRNA-ribosyltran sferase OS=Gluconobacter japonicus OX=376620 GN=tgt PE= 3 SV=1
MTEQATKMTWVPEATCGQARAGHLHTRHGTVPTPTFMPVGTVGTVKGMTMDAVRSTGAGIVLGNTYHLMLRPTADRVQKLGGLHKMMDWSGPILTDSGGFQVMSLGALRKLDQDGVTFQSHIDGSKHRLSPEISTEIQYKLDATITMAFDECPALPATPEALRKSMELSMRWAARSREAFVAREGYGQFGIVQGGTERDLREYSIKALTEIGFEGYAIGGLAVGEGQELMFSTLDFTTPMLPQDKARYLMGVGTPDDLLGSVMRGVDMFDCVMPSRAGRTARAYTERGYINLRNARFAEDTRPITPHDDSPMAGRYTRAYLHHLFRAGEMLGPMLLTWHNLAYYQRLMRQIRAAIVDGTLNELAIKLREDWSKGDWTEDEWSMPSLAL

SEQ ID NO: 55703 - protein, 388 aa, Gluconobacter japonicus
  misc_feature (1)..(388): tr|A0A149SHX9|A0A149SHX9_GLUJA Queuine tRNA-ribosyltran sferase OS=Gluconobacter japonicus OX=376620 GN=tgt PE= 3 SV=1
MTEQATKMTWVPEATCGQARAGHLHTRHGTVPTPTFMPVGTVGTVKGMTMDAVRSTGAGIVLGNTYHLMLRPTADRVQKLGGLHKMMDWSGPILTDSGGFQVMSLGALRKLDQDGVTFQSHIDGSKHRLSPEISTDIQYKLDATITMAFDECPALPATPETLRKSMELSMRWAARSREAFTAREGYGQFGIVQGGTERDLREYSVKALTEIGFEGYAIGGLAVGEGQELMFSTLDFTTPLLPQDKARYLMGVGTPDDLLGSVMRGVDMFDCVMPSRAGRTARAYTERGYINLRNARFAEDTRPLTPHDDSPMAGRYTRAYLHHLFRAGEMLGPMLLTWHNLAYYQRLMRQIRAAIVDGTLNELAIKLREDWSKGDWTEDEWPMPSLAL

SEQ ID NO: 55704 - protein, 392 aa, Gluconobacter kanchanaburiensis
  misc_feature (1)..(392): tr|A0A511B9S6|A0A511B9S6_9PROT Queuine tRNA-ribosyltran sferase OS=Gluconobacter kanchanaburiensis NBRC 103587 OX=1307948 GN=tgt PE=3 SV=1
MSDHKTDHATKMTWVPEATCGMARAGHLHTRHGTVPTPTFMPVGTVGTVKGMTMDAVRSTGAGIVLGNTYHLMLRPTADRVQKLGGLHRMMDWPGPILTDSGGFQVMSLGALRKLDEDGVTFRSHIDGSKHRLTPEISTEIQFKLDATITMAFDECPALPATPEALRKSMEMSMRWAARSREAFVAREGYGQFGIVQGGTERDLREYSIKALTEIGFEGYAIGGLAVGEGQELMFSTLDFTTPMLPQDKARYLMGVGTPDDLLGAVMRGVDMFDCVMPSRAGRTARAYTERGAINLRNARFAEDTRTLTPHDDTPVAGRYSRAYLHHLFRANEMLGPMLLTWHNLAYYQRLMRQIRAAIVDGTLNALAIKLREDWAKGDWTEDEWPMPDLTL

SEQ ID NO: 55705 - protein, 388 aa, Gluconobacter morbifer
  misc_feature (1)..(388): tr|G6XMQ0|G6XMQ0_9PROT Queuine tRNA-ribosyltransferase OS=Gluconobacter morbifer G707 OX=1088869 GN=tgt PE=3 S V=1
MTEHATKMTWVPEAACGQARAGHLHTRHGTVQTPTFMPVGTVGTVKGMTMDAVRSTGAGIVLGNTYHLMLRPGAERVRKLGGLHRMMDWQGPILTDSGGFQVMSLGALRKLDQDGVTFQSHIDGSRHRLTPEISTDIQYRLDATISMAFDECPALPATPETLRKSMELSMRWAARSREAFVQRDGYGQFGIVQGGTERDLREYSVKALTEIGFEGYAIGGLAVGEGQELMFSTLDFTTPMLPQDKARYLMGVGTPDDLLGAVMRGVDMFDCVMPSRAGRTARAYTERGHLNLRNARFADDTRPLTPYDDSPLAGRYTRAYLHHLFRANEMLGPMLLTWHNLAYYQRLMRQIRAAIVDGTLDALAVKLRSDWAKGDWTEDEWPMPDLSL

SEQ ID NO: 55706 - protein, 388 aa, Gluconobacter oxydans
  misc_feature (1)..(388): tr|K7SJ16|K7SJ16_GLUOY Queuine tRNA-ribosyltransferase OS=Gluconobacter oxydans H24 OX=1224746 GN=tgt PE=3 SV= 1
MTEQATKMTWVPEATCGQARAGHLHTRHGTVPTPTFMPVGTVGTVKGMTMDAVRSTGAGIVLGNTYHLMLRPTADRVQKLGGLHKMMDWSGPILTDSGGFQVMSLGALRKLDQDGVTFQSHIDGSKHRLSPEISTDIQYKLDATITMAFDECPALPATPETLRKSMELSMRWAARSREAFTAREGYGQFGIVQGGTERDLREYSVKALTEIGFEGYAIGGLAVGEGQELMFSTLDFTTPLLPQDKARYLMGVGTPDDLLGSVMRGVDMFDCVMPSRAGRTARAYTERGYINLRNARFAEDTRPLTPHDDSPMAGRYTRAYLHHLFRAGEMLGPMLLTWHNLAYYQRLMRQIRAAIVDGTLNELAVKLREDWSKGDWTEDEWPMPSLAL

SEQ ID NO: 55707 - protein, 392 aa, Gluconobacter oxydans
  misc_feature (1)..(392): tr|A0A067Z5T7|A0A067Z5T7_GLUOY Queuine tRNA-ribosyltran sferase OS=Gluconobacter oxydans DSM 3504 OX=1288313 GN =tgt PE=3 SV=1
MSDHKTDHATKMTWVPEASCGMARAGHLHTRHGTVPTPTFMPVGTVGTVKGMTMDAVRSTGAGIVLGNTYHLMLRPTADRVQKLGGLHRMMDWSGPILTDSGGFQVMSLGALRKLDEDGVTFRSHIDGSKHRLTPEISTDIQFKLDATITMAFDECPALPATPEVLRKSMEMSMRWAARSREAFVAREGYGQFGIVQGGTERDLREYSIKALTDIGFEGYAIGGLAVGEGQELMFSTLDFTTPMLPQDKARYLMGVGTPDDLLGAVMRGVDMFDCVMPSRAGRTARAYTERGTINLRNARFADDTRPLTPHDDTPIAGRYSRAYLHHLFRANEMLGPMLLTWHNLAYYQRLMRQIRAAIVDGTLDALAVKLREDWAKGDWTEDEWPMPDLAL

SEQ ID NO: 55708 - protein, 392 aa, Gluconobacter roseus
  misc_feature (1)..(392): tr|A0A4Y3M8F7|A0A4Y3M8F7_9PROT Queuine tRNA-ribosyltran sferase OS=Gluconobacter roseus NBRC 3990 OX=1307950 GN =tgt PE=3 SV=1
MSDHPTDHATKMTWVPEASCGMARAGHLHTRHGTVPTPTFMPVGTVGTVKGMTMDAVRSTGAGIVLGNTYHLMLRPTADRVQKLGGLHRMMDWPGPILTDSGGFQVMSLGALRKLDEDGVTFRSHIDGSKHRLTPEISTDIQFKLDATITMAFDECPALPATPEVLRKSMEMSMRWAARSREAFVAREGYGQFGIVQGGTERDLREYSTKALTDIGFEGYAIGGLAVGEGQELMFSTLDFTTPMLPQDKARYLMGVGTPDDLLGAVMRGVDMFDCVMPSRAGRTARAYTERGTINLRNARFADDTRTLTPHDDTPVAGRYSRAYLHHLFRANEMLGPMLLTWHNLAYYQRLMRQIRAAIVDGTLDTLAVKLREDWAKGDWTEDEWPMPDLAL

SEQ ID NO: 55709 - protein, 388 aa, Gluconobacter sp.
  misc_feature (1)..(388): tr|A0A252BNK1|A0A252BNK1_9PROT Queuine tRNA-ribosyltran sferase OS=Gluconobacter sp. DsW_058 OX=1511210 GN=tgt PE=3 SV=1
MTEQATKMTWVPEATCGQARAGHLHTRHGTVPTPTFMPVGTVGTVKGMTMDAVRSTGAGIVLGNTYHLMLRPTADRVQKLGGLHKMMDWSGPILTDSGGFQVMSLGALRKLDQDGVTFQSHIDGSKHRLSPEISTEIQYKLDATISMAFDECPALPATPEALRKSMELSMRWAARSREAFVAREGYGQFGIVQGGTERDLREYSIKALTEIGFEGYAIGGLAVGEGQELMFSTLDFTTPMLPQDKARYLMGVGTPDDLLGSVMRGVDMFDCVMPSRAGRTARAYTERGYINLRNARFAEDTRPLTPHDDSPMAGRYTRAYLHHLFRAGEMLGPMLLTWHNLAYYQRLMRQIRAAIVDGTLNELAIKLREDWSKGDWTEDEWPMPSLAL

SEQ ID NO: 55710 - protein, 392 aa, Gluconobacter sphaericus
  misc_feature (1)..(392): tr|A0A4Y3QCP9|A0A4Y3QCP9_9PROT Queuine tRNA-ribosyltran sferase OS=Gluconobacter sphaericus NBRC 12467 OX=13079 51 GN=tgt PE=3 SV=1
MNDQKTDHATKMIWVPEASCGMARAGHLHTRHGTVPTPTFMPVGTVGTVKGMTMDAVRSTGARIVLGNTYHLMLRPTADRVQKLGGLHRMMDWPGPILTDSGGFQVMSLGALRKLDEDGVTFRSHIDGSKHRLTPEISTDIQFKLDATITMAFDECPALPATPEALRKSMEMSMRWAARSREAFVAREGYGQFGIVQGGTERDLREYSIKALTDIGFEGYAIGGLAVGEGQELMFSTLDFTTPMLPQDKARYLMGVGTPDDLLGAVMRGVDMFDCVMPSRAGRTARAYTERGAINLRNARFAEDTRTLTPHDDTPIAGRYSRAYLHHLFRANEMLGPMLLTWHNLAYYQRLMRQIRAAIVDGTLDALAVKLRENWTKGDWSEDEWPMPNLAL

SEQ ID NO: 55711 - protein, 388 aa, Gluconobacter thailandicus
  misc_feature (1)..(388): tr|M9MAL1|M9MAL1_GLUTH Queuine tRNA-ribosyltransferase OS=Gluconobacter thailandicus NBRC 3255 OX=1291534 GN=t gt PE=3 SV=1
MTEQATKMTWVPEATCGQARAGHLHTRHGTVPTPTFMPVGTVGTVKGMTMDAVRSTGAGIVLGNTYHLMLRPTADRVQKLGGLHKMMDWSGPILTDSGGFQVMSLGALRKLDQDGVTFQSHIDGSKHRLSPEISTDIQYKLDATITMAFDECPALPATPETLRKSMELSMRWAARSREAFMAREGYGQFGIVQGGTERDLREYSVKALTEIGFEGYAIGGLAVGEGQELMFSTLDFTTPMLPQDKARYLMGVGTPDDLLGSVMRGVDMFDCVMPSRAGRTARAYTERGYINLRNARFAEDTRPLTPHDDSPMGGRYTRAYLHHLFRAGEMLGPMLLTWHNLAYYQRLMRQIRAAIVDGTLNELAIKLREDWSKGDWTEDEWPMPSLAL

SEQ ID NO: 55712 - protein, 388 aa, Gluconobacter thailandicus; identical to SEQ ID NO: 55706
  misc_feature (1)..(388): tr|A0A149STK3|A0A149STK3_GLUTH Queuine tRNA-ribosyltran sferase OS=Gluconobacter thailandicus OX=257438 GN=tgt PE=3 SV=1

SEQ ID NO: 55713 - protein, 392 aa, Gluconobacter wancherniae
  misc_feature (1)..(392): tr|A0A511B390|A0A511B390_9PROT Queuine tRNA-ribosyltran sferase OS=Gluconobacter wancherniae NBRC 103581 OX=656 744 GN=tgt PE=3 SV=1
MSDFLTDSAAKMEWKPEAKCGMARAGHLHTRHGTVPTPTFMPVGTAGTVKGMMMDSVRSTGAGIVLGNTYHLMLRPTADRVQKLGGLHKMMDWSGPILTDSGGFQVMSLGALRKIDEDGVTFRSHIDGSKHRLSPEISTDIQFKLDATISMAFDECPALPATPEVLRKSMEMSMRWAARSREAFTQREGYGQFGIVQGGTEKDLRAYSAKALTDIGFEGYAIGGLAVGEGQELMFSTLDFTTPMLPEDKARYLMGVGTPDDLLGAVMRGVDMFDCVMPSRAGRTARAYTERGTLNLRNARFADDTRPITPEDDSPIAGRYTRAYLHHLFRANEMLGPMLLTWHNLAYYQRLMRKIRAAIVDGSLPELAQSLRADWAKGDWTPDEWPLPNLAL

SEQ ID NO: 55714 - protein, 432 aa, Glutamicibacter arilaitensis
  misc_feature (1)..(432): tr|E1VSJ5|E1VSJ5_GLUAR Queuine tRNA-ribosyltransferase OS=Glutamicibacter arilaitensis (strain DSM 16368 / CIP 108037 / IAM 15318 / JCM 13566 / Re117) OX=861360 GN=t gt PE=3 SV=1
MPEKNFDPSAPHARQDEFGFEVGTRLTATDGSPMLGRTGVIRTPHGEIKTPAFIAVGTKATVKAVTPVQVEQLGAQAVLSNAYHLYLQPGADILDEAGGLGKFMGWRGPTFTDSGGFQVMSLGSGFKKVIDMKSVDQSGPDDAVAPGKERLANVDEDGVWFKSHLDGNKHRFSPEISMGVQHQIGADVMFAFDELTTLQNSRGYQVESLERTRRWAERCIAEHFSLTDSRVGKDYQALFGVIQGAQYEDLRRKACQDLGAMAFDGFGIGGALEKENLGTIVGWCSEELPENKPRHLLGISEPDDIFTAIENGADTFDCVSPTRVARNSAFYTPWGRFNLSGARYKRDFTPLVEGCPCYACENFSRAYIHHLYKAKELLSHTLISIHNEHFTVSLVESARQAIEDGTFFELKDKVLSSYYAGTPDPQGKPATA

SEQ ID NO: 55715 - protein, 432 aa, Glutamicibacter arilaitensis
  misc_feature (1)..(432): tr|A0A4Y8TRJ7|A0A4Y8TRJ7_9MICC Queuine tRNA-ribosyltran sferase OS=Glutamicibacter arilaitensis OX=256701 GN=tg t PE=3 SV=1
MPEKNFDPSAPHARQDEFGFEVGTRLTATDGSPMLGRTGVIRTPHGEIKTPAFIAVGTKATVKAVTPVQVEQLGAQAVLSNAYHLYLQPGADILDEAGGLGKFMGWRGPTFTDSGGFQVMSLGSGFKKVIDMKSVDQSGPDDAVAPGKERLANVDEDGVWFKSHLDGNKHRFSPEISMGVQHQIGADVMFAFDELTTLQNSRGYQVESLERTRRWAERCIAEHFSLTDSRVGKDYQALFGVIQGAQYEDLRRKACQDLGAMAFDGFGIGGALEKENLGTIVGWCSEELPENKPRHLLGISEPDDIFTAIENGADTFDCVSPTRVARNSAFYTPWGRFNLSGARYKRDFTPLVEGCPCYACENFSRAYIHHLYKAKELLSHTLISIHNEHFTVSLVESARQAIEDGTFFDLKDKVLSSYYAGTPDPQGKPATA

SEQ ID NO: 55716 - protein, 430 aa, Glutamicibacter creatinolyticus
  misc_feature (1)..(430): tr|A0A5B7WPX0|A0A5B7WPX0_9MICC Queuine tRNA-ribosyltran sferase OS=Glutamicibacter creatinolyticus OX=162496 GN =tgt PE=3 SV=1
MPETTFDPAAAHPQQAEFSFQVGTRLTDGEGNTLPGRTGTITTPHGQIKTPAFIAVGTKATVKALTPVQVQELGAQAVLANAYHLYLQPGADILDAAGGLGSFMGWQGPTFTDSGGFQVMSLGSGFKKVIDMKSVDQSGPDDAVAPGKERMANVDEDGVWFKSHLDGTMHRFSPEISMGVQHQIGADIMFAFDELTTLQNSRGYQVESLERTRRWAERCIAEHFRLTDERSTKPYQALFGVIQGAQYEDLRRKACRDLGAMAFDGFGIGGALEKENLGTIVGWCAQELPEDKPRHLLGISEPDDIFTAIENGADTFDCVSPTRVARNSAFYTPHGRFNLSGARYKRDFTPLVDGCTCYACQHFTRAYIHHLYKAKELLSHTLISIHNEHFTVNLVESARQAIEQGTFFEFKDEVMAKYYAGKPDPQGQPA

SEQ ID NO: 55717 - protein, 432 aa, Glutamicibacter halophytocola
  misc_feature (1)..(432): tr|A0A5B8ISC7|A0A5B8ISC7_9MICC Queuine tRNA-ribosyltran sferase OS=Glutamicibacter halophytocola OX=1933880 GN= tgt PE=3 SV=1
MPEKNFDPSAPHARQEEFGFEVGTRLTAPDGSPMLGRTGVIRTPHGEIKTPAFIAVGTKATVKAVTPAQVEELGAQAVLSNAYHLYLQPGADILDEAGGLGKFMGWHGPTFTDSGGFQVMSLGSGFKKVIDMKSVDQSGPDDAVAPGKERLANVDEDGVWFKSHLDGTKHRFSPEISMGVQHQIGADIMFAFDELTTLQNSRGYQVESLERTRRWAERCIAEHFALTDSREGKEYQALFGVIQGAQYEDLRRKACQDLGAMAFDGFGIGGALEKENLGTIVGWCAEELPEDKPRHLLGISEPDDIFTAIENGADTFDCVSPTRVARNSAFYTPWGRFNLSGARYKRDFTPLVEGCDCYTCQNFTRAYIHHLYKGKELLSHTLISIHNEHFTVGLVESARQALEDGTFFELKDQVLASYYAGKPDPQGQPAAK

SEQ ID NO: 55718 - protein, 432 aa, Glutamicibacter mysorens
  misc_feature (1)..(432): tr|A0A2M9AJE1|A0A2M9AJE1_9MICC Queuine tRNA-ribosyltran sferase OS=Glutamicibacter mysorens OX=257984 GN=tgt PE =3 SV=1
MPEKNFDPSAPHARQNEFGFEVGTRLTAEDGSPMLGRTGVIRTPHGEIKTPAFIAVGTKATVKAVTPVQVEELGAQAVLSNAYHLYLQPGADILDEAGGLGKFMGWEGPTFTDSGGFQVMSLGSGFKKVIDMKSVDQSGPDDAVAPGKERLANVDEDGVWFKSHLDGTKHRFSPEISMGVQHQIGADIMFAFDELTTLQNSRGYQVESLERTRRWAERCIAEHFALTDSRAGKDYQALFGVIQGAQYEDLRRKACQDLGAMAFDGFGIGGALEKENLGTIVGWCAEELPENKPRHLLGISEPDDIFTAIENGADTFDCVSPTRVARNSAFYTPWGRFNLSGARYKRDFTPLVEGCECYACRNFTRAYIHHLYKSKELLSHTLISIHNEQFTVSLVESARQAIEDGTFFELKDKVLSSYYAGKPDPQGQPVTQ

SEQ ID NO: 55719 - protein, 432 aa, Glutamicibacter nicotianae
  misc_feature (1)..(432): tr|A0A4Y3W4D0|A0A4Y3W4D0_GLUNI Queuine tRNA-ribosyltran sferase OS=Glutamicibacter nicotianae OX=37929 GN=tgt P E=3 SV=1
MPEKNFDPSAPHARQNEFGFEVGTRLTAEDGSPMLGRTGVIRTPHGEIKTPAFIAVGTKATVKAVTPVQVEELGAQAVLSNAYHLYLQPGADILDEAGGLGKFMGWEGPTFTDSGGFQVMSLGSGFKKVIDMKSVDQSGPDDAVAPGKERLANVDGDGVWFKSHLDGTKHRFSPEISMGVQHQIGADIMFAFDELTTLQNSRGYQVESLERTRRWAERCIAEHFALTDSRAGKDYQALFGVIQGAQYEDLRRKACQDLGAMAFDGFGIGGALEKENLGTIVGWCAEELPENKPRHLLGISEPDDIFTAIENGADTFDCVSPTRVARNSAFYTPWGRFNLSGARYKRDFTPLVEGCECYACRNFTRAYIHHLYKSKELLSHTLISIHNEQFTVSLVESARQAIEDGTFFELKDKVLSSYYAGKPDPQGQPVTQ

SEQ ID NO: 55720 - protein, 435 aa, Glutamicibacter soli
  misc_feature (1)..(435): tr|A0A365YBQ1|A0A365YBQ1_9MICC Queuine tRNA-ribosyltran sferase OS=Glutamicibacter soli OX=453836 GN=tgt PE=3 S V=1
MPDMNFDPSAPHPRQQEFGFEVGTRLTAEDGTPMLGRTGVIRTPHGEVKTPAFIAVGTKATVKALTPEHVKQLGAQAVLSNAYHLYLQPGADILDEAGGLGKFMGWDGPTFTDSGGFQVMSLGSGFKKVIDMKSVDQSGPDDAVAPGKERLANVDEDGVWFKSHLDGNRHRFSPEISMGVQHQIGADIMFAFDELTTLQNSRGYQVESLERTRRWAERCIAEHFSLTDSREGKDYQALFGVIQGAQYEDLRRKACRDLGAMAFDGFGIGGALEKENLGTIVGWCAEELPEDKPRHLLGISEPDDIFTAIENGADTFDCVSPTRVARNSAFYTPWGRFNLSGARYKRDFTPLVDGCECYACQNFSRAYIHHLYKAKELLSHTLISIHNEHFTVSLVESARQAIEDGTFFQLKERVLASYYAGAPDPQGQPVAQPAK

SEQ ID NO: 55721 - protein, 430 aa, Glutamicibacter sp.
  misc_feature (1)..(430): tr|A0A2A3XYM0|A0A2A3XYM0_9MICC Queuine tRNA-ribosyltran sferase OS=Glutamicibacter sp. BW80 OX=2024404 GN=tgt P E=3 SV=1
MSEKNFNPSNPHSRQAEFGFEVGTRLTSPEGSPMLGRTGVINTPHGQIKTPAFIAVGTKATVKALTPVQVAELGAQAVLANAYHLYLQPGADILDEAGGLGKFMSWEGPTFTDSGGFQVMSLGSGFKKVIDMKSVDQSGPDDAVAPGKERLANVDDDGVWFKSHLDGSKHRFSPEISMNVQHQIGADIMFAFDELTTLQNSRGYQVESLERTRLWAQRCIAEHFALTDSRAGKDYQALFGVIQGAQYEDLRRKACQDLGAMAFDGFGIGGALEKENLGTIVGWCSEELPENKPRHLLGISEPDDIFTAIENGADTFDCVSPTRVARNSAFYTPHGRFNLSGARYKRDFTPLVDGCSCYTCQNFTRAYIHHLHKSKELLSHTLISIHNEHFTVSLVDSVREAIEDGSFFELKEKVLGEYYNGEPDPQGLRA

SEQ ID NO: 55722 - protein, 430 aa, Glutamicibacter sp.
  misc_feature (1)..(430): tr|A0A2A3Y4T5|A0A2A3Y4T5_9MICC Queuine tRNA-ribosyltran sferase OS=Glutamicibacter sp. BW77 OX=2024402 GN=tgt P E=3 SV=1
MSEKNFNPSTPHSRQAEFGFEVGTRLTSPEGEPMLGRTGVINTPHGQIKTPAFIAVGTKATVKALTPVQVEELGAQAVLANAYHLYLQPGSDILDEAGGLGKFMSWEGPTFTDSGGFQVMSLGSGFKKVIDMKSVDQSGPDDAVAPGKERLANVDDDGVWFKSHLDGSKHRFSPEISMNVQHQIGADIMFAFDELTTLQNSRGYQVESLERTRLWAQRCIAEHFSLTDSRAGKKYQALFGVIQGAQYEDLRRKACQDLGAMAFDGFGIGGALEKENLGTIVGWCSEELPENKPRHLLGISEPDDIFTAIENGADTFDCVSPTRVARNSAFYTPHGRFNLSGARYKRDFSPLVEDCSCYTCQNFTRAYIHHLHKSKELLSHTLISIHNEHFTVSLVDSARNAIEDGSFFELKAKVMSEYYAGNPDPQGLPA

SEQ ID NO: 55723 - protein, 431 aa, Glutamicibacter uratoxydans
  misc_feature (1)..(431): tr|A0A4Y4DRY7|A0A4Y4DRY7_9MICC Queuine tRNA-ribosyltran sferase OS=Glutamicibacter uratoxydans OX=43667 GN=tgt PE=3 SV=1
MPQKNFDPSNQHPRQEEFGFEVGTRLTAEDGSPMLGRTGVIRTPHGEVKTPAFIAVGTKATVKALTPAQVKELGAQATLSNAYHLYLQPGADILDEAGGLGKFMGWDGPTFTDSGGFQVMSLGSGFKKVIDMKSVDQSGPDDAVAPGKERLANVDEDGVWFKSHLDGTKHRFSPEISMGVQHQIGADIMFAFDELTTLQNSRGYQVESLERTRRWAERCIAEHFSLTDSREGKDYQALFGVIQGAQYEDLRRKACQDLGAMAFDGFGIGGALEKENLGTIVGWCSEELPENKPRHLLGISEPDDIFTAIENGADTFDCVSPTRVARNSAFYTPWGRFNLSGARYKRDFTPLVEGCECYACKNFTRAYIHHLYKAKELLSHTLISIHNEHFTVNLVESARQAIEDGTFFQLKEQVLSSYYAGKPDPQGQPAA

SEQ ID NO: 55724 - protein, 376 aa, Glycocaulis alkaliphilus
  misc_feature (1)..(376): tr|A0A3T0EBP3|A0A3T0EBP3_9RHOB Queuine tRNA-ribosyltran sferase OS=Glycocaulis alkaliphilus OX=1434191 GN=tgt P E=3 SV=1
MASFPFEIAAVDGQARTGTLKTSRGEIRTPAFMPVGTAATVKALYPDQVRQAGADILLGNTYHLMLRPGAERVKRLGGLHHFMRWDGPILTDSGGFQVWSLAGLRKMSEEGVAFKSHIDGSKHMLTPERSIEIQADLLGADISMQLDECTPFPCERDAAAKSMELSIRWGRRSREAFGGRETQNLFGIVQGSVYPDLRQQSAEALIETGFDGYAVGGLAVGEGFEMMCNVLDVTTPHLPQDRPRYLMGVGRPIDLVEAVARGIDMFDCVMPTRSGRHGQAWSDYGPFNLKNAQYAEDVSPLNEAVNCPASRDYSKAYLHHLVRAGEYLGSMILSWHNVAYYEDLVARMRASIAAGRFEAFRNEFLARWEEGTGKRG

SEQ ID NO: 55725 - protein, 372 aa, Glycocaulis sp.
  misc_feature (1)..(372): tr|A0A550KI83|A0A550KI83_9RHOB Queuine tRNA-ribosyltran sferase OS=Glycocaulis sp. ZYF765 OX=2518983 GN=tgt PE= 3 SV=1
MPFPFRLDATEGAARTGALQTPRGDIRTPAFMPVGTAATVKALYPDQVRQAGADIILGNTYHLMLRPGAERVARLGGLHRFMGWDGPILTDSGGFQVWSLSALRKMSEQGVEFKSHIDGSKHMLTPERSIEIQADLLGADISMQFDECTPFPCERDEAARSMELSVRWGARSKAAFGERQSQALFGIVQGSVYEDLRRQSAEALIETGFDGYAVGGLAVGEGFETMCQVLDATTPHLPGDRPRYLMGVGRPIDLVEAVARGIDMFDCVMPTRSGRHGQAWSDFGPFNLKNARYAEDQSPLDESIDCPASRDWSKAYLHHLVRAGEYLGSMILSWHNVAYYEHLMARMRAAIAEGRFEAFRAEFRARWEQGQA

SEQ ID NO: 55726 - protein, 435 aa, Gordonia aichiensis
  misc_feature (1)..(435): tr|L7KI35|L7KI35_9ACTN Queuine tRNA-ribosyltransferase OS=Gordonia aichiensis NBRC 108223 OX=1220583 GN=tgt PE =3 SV=1
MTPSDTDIPGTADTNPTGLHLRPDHSYAVGTRLDDSLGRTGVITTPHGDIHTPAFVPVGTKATVKTVLPEAVEALGAQAVLANAYHLYLQPGPEIVDAAGGLGAFMNWSGPTYTDSGGFQVMSLGAGFKKVISMDVTGEQDDEKIAEGRERLSRVDDDGVTFKSHLDGSSHRFTPELSMQIQHQLGADIIFAFDELTTLMNTRGYQEDSLERTRQWAIRCLAEHNRLSVERGHRPQQSLWGVLQGAQYEDLRRKAARDLTELSRRDQDAGGKGFGGFGIGGALEKAKLGTIVGWVNSELPEDKPKHLLGISEPDDIFTAIENGADTFDCVSPTRVARNGAIYSLDGRYNITNARYRSDFRSLDPEITNYTSQYSRAYLHHLFKAKEGLAATLATLHNVAFVVQMVDGARRAIESGDYYAYRDEFLGRYYAGNRDN

SEQ ID NO: 55727 - protein, 419 aa, Gordonia alkanivorans
  misc_feature (1)..(419): tr|W9DGL9|W9DGL9_9ACTN Queuine tRNA-ribosyltransferase OS=Gordonia alkanivorans CGMCC 6845 OX=1423140 GN=tgt P E=3 SV=1
MSSTGTEVADPAYTVGTTLPGTRGRTGVIQTPHGAIQTPAFVPVGTKATVKTVLPESVSELGAQAVLANAYHLYLQPGPEIIDQAGGLGAFMNWSGPTYTDSGGFQVMSLGAGFKKVIAMEVGNPDDELTANGKERLSRVDDDGVTFKSHLDGSAHRFTPEVSMQIQHQLGADIIFAFDELTSLMNTRVYQKNSLERTRQWAIRCLAEHNRLSVERAHRPQQALWGVIQGAQYEDLRRKASRDLVALSEADREAGGKGFGGYGIGGALEKHNLGRIVGWVNDELPEDAPKHLLGISEPDDIFTAIENGVDTFDCVSPTRVARNGAIYSLDGRYNITNAKYRNDFRQLDPEIENYTSQYSRAYLHHLFKAKEGLGPTLATLHNVSFIVTLVDRARQAIENGTYIEYRDEFLRRYYGSTRA

SEQ ID NO: 55728 - protein, 418 aa, Gordonia alkanivorans
  misc_feature (1)..(418): tr|F9VW29|F9VW29_9ACTN Queuine tRNA-ribosyltransferase OS=Gordonia alkanivorans NBRC 16433 OX=1027371 GN=tgt P E=3 SV=1
MSSTGTEVADPAYTVGTTLPGTRGRTGVISTPHGAIQTPAFVPVGTKATVKTVLPESVAELGAQAVLANAYHLYLQPGPEIIDQAGGLGAFMNWSGPTYTDSGGFQVMSLGAGFKKVIAMEVSPDDSLIAEGKERLSRVDDDGVTFKSHLDGSSHRFTPEVSMQIQHQLGADIIFAFDELTTLMNTRAYQENSLERTRLWAIRCLAEHNRLSVERAHRPQQALWGVIQGAQYEDLRRKASRDLVALSEADREAGGKGFGGYGIGGALEKHNLGTIVGWVNDELPEDAPKHLLGISEPDDIFTAIENGVDTFDCVSPTRVARNGAIYSLDGRYNITNAKYRNDFRQLDPEIENYTSQYSRAYLHHLFKAKEGLGPTLATLHNVSFIVTLVDRARQAIEDGTYVEYRDEFLRRYYGSTRD

SEQ ID NO: 55729 - protein, 424 aa, Gordonia amarae
  misc_feature (1)..(424): tr|G7GM87|G7GM87_9ACTN Queuine tRNA-ribosyltransferase OS=Gordonia amarae NBRC 15530 OX=1075090 GN=tgt PE=3 SV =1
MTHGPSSDTQPAHSDAVDYTVGTSLPGTLGRTGVIHTPHGDIQTPAFVPVGTKATVKTVLPESVAALGAQAVLANAYHLYLQPGPDIIDAAGGLGAFMNWSGPTYTDSGGFQVMSLGAGFKKVISMDATDAPDDDRIAPGKERLSNVDDDGVTFKSHLDGSKHRFTPEVSMQIQHQLGADIIFAFDELTTLMNTRAYQESSLERTRLWAIRCLAEHNRLSVERSHRPQQSLWGVIQGAQYEDLRRKASRDLVALSEADRAAGGKGFGGYGIGGALEKDNLGTIVGWVNSELPQDAPKHLLGISEPDDIFTAIENGVDTFDCVSPTRVARNGAIYSRDGRYNVTNAKYRKDFGPLDADTENYTSQYSRAYLHHLFKAKEGLAATLATLHNVSFIVNLVDGARRAIESGDYLAYRDDFLGRYYANS

SEQ ID NO: 55730 - protein, 419 aa, Gordonia amicalis
  misc_feature (1)..(419): tr|L7KW36|L7KW36_9ACTN Queuine tRNA-ribosyltransferase OS=Gordonia amicalis NBRC 100051 = JCM 11271 OX=1220574 GN=tgt PE=3 SV=1
MSSTGTEVTDPAYTVGTTLPGTRGRTGVIATAHGEIQTPAFIPVGTKATVKTVLPESVSALGAQAVLANAYHLYLQPGPEIIDQAGGLGAFMNWRGPTYTDSGGFQVMSLGAGFKKVIAMEVSNPDDELTANGKERLSRVDDDGVTFKSHLDGSAHRFTPEVSMQIQHQLGADIIFAFDELTTLMNTRAYQESSLERTRLWALRCLVEHNRLSVERAHRPQQSLWGVIQGAQYEDLRRKASRDLVALSEADRDAGGKGFGGYGIGGALEKHNLGTIVGWVNDELPEDAPKHLLGISEPDDIFTAIENGVDTFDCVSPTRVARNGAIYSLDGRYNVTNAKYRNDFRQLDPEIDNYTSQYSRAYLHHLFKAKEGLGPTLATLHNVSFIVTLVDRARQAIENGTYVEYRDEFLRRYYGSMRD

SEQ ID NO: 55731 - protein, 400 aa, Gordonia araii
  misc_feature (1)..(400): tr|G7GXJ2|G7GXJ2_9ACTN Queuine tRNA-ribosyltransferase OS=Gordonia araii NBRC 100433 OX=1073574 GN=tgt PE=3 SV =1
MGRTGVISTPHGDIATPAFIPVGTKATVKTVVPEAVAELGAQAVLANAYHLYLQPGPGIVDAAGGLGRFMNWPGPTYTDSGGFQVMSLGVGFKKVIEMSAGHAPDDEKIADGKERLAAVDDDGVTFKSHIDGTTHRFTPELSMQIQHQLGADIIFAFDELTTLMNTRGYQESSLERTRLWAIRCLAEHNRLSVERGHRPQQSLWAVIQGAQYEDLRRKASRDLAELGARDEAAGGKGFGGFGIGGALEKDNLGTIVGWVNSELPEDKPKHLLGISEPDDIFVAIENGIDTFDCVSPTRVARNGAIYTRHGRVNITNARFRDDFAPLDAELTNYTSQYSRAYLHHLFKAKEGLGPTLATLHNLSFVIEMVDGARRAIEDGCYREYRDDFLGRYYDGAATGG

SEQ ID NO: 55732 - protein, 417 aa, Gordonia bronchialis
  misc_feature (1)..(417): tr|D0LDC5|D0LDC5_GORB4 Queuine tRNA-ribosyltransferase OS=Gordonia bronchialis (strain ATCC 25592 / DSM 43247 / JCM 3198 / NCTC 10667) OX=526226 GN=tgt PE=3 SV=1
MSSLQTPDQSFAVGTRLPGAKGRTGVITTPHGQIHTPAFVPVGTKATVKTVLPESVAALGAQAVLANAYHLYLQPGPEIIDEAGGLGAFMNWPGPTYTDSGGFQVMSLGAGFKKVISMDPNHTPDDELTANGKERLSRVDDDGVTFKSHLDGSAHRLTPEVSMQIQHQLGADIIFAFDELTTLMNTREYQENSLERTRLWAIRCLAEHNRLTAQRSHRPPQSLWGVIQGAQYEDLRRKASRDLVEMSRRDVEQGGRGFGGYGIGGALTKDDLGTIVGWVNDELPEDAPKHLLGISEPDDIFTAIENGADTFDCVSPTRVARNGAIYSLDGRYNITNARYRKDFRPLDPEIENYTSQYSRAYLHHLFKAKEGLAATLATLHNVSFVVTLVDRARQAIEDGNYAEYRDEFLGRYYAGAS

SEQ ID NO: 55733 - protein, 425 aa, Gordonia effusa
  misc_feature (1)..(425): tr|H0R4Z6|H0R4Z6_9ACTN Queuine tRNA-ribosyltransferase OS=Gordonia effusa NBRC 100432 OX=1077974 GN=tgt PE=3 S V=1
MLAVTAPAEQQDGNRPGFTYGTSLPGTLGRTGVISTPHGEIATPAFVPVGTKATVKTVLPEAVASLGAQAVLANAYHLYLQPGYDIIDQAGGLGAFMNWAGPTYTDSGGFQVMSLGAGFKKVISMDVSGQQDDGKIAEGRERLARVDDDGVTFKSHLDGSAHRFTPELSMRIQHGLGADIIFGFDELTTLMNTRGYQENSLERTRLWAIRCLAEHNRLSAERAHRPQQSLWGVIQGAQYEDLRRKAARDLTAMSEQDVADGGKGFGGFGIGGALEKQNLGTIVGWVNSELPQDKPKHLLGISEPDDIFTAIENGADTFDCVSPTRVARNGAIYSLDGRYNITNARFRTDFGSLDPEIENYTSQYSRAYLHHLFKAKEGLAATLATLHNVSFVINMVDGARRAIENGDYFEYRDAFLGRYYAGKTP

SEQ ID NO: 55734 - protein, 415 aa, Gordonia hirsuta
  misc_feature (1)..(415): tr|L7LES3|L7LES3_9ACTN Queuine tRNA-ribosyltransferase OS=Gordonia hirsuta DSM 44140 = NBRC 16056 OX=1121927 G N=tgt PE=3 SV=1
MTTSEFVARSTLHGTAGRTGIIRTPHGDIATPAFIPVGTKATVKTVLPEAVAALGAQAVLANAYHLYLQPGPEIVDAAGGLGAFMNWPGPTYTDSGGFQVMSLGVGFKKVISMDVEGRQDDSAVAEGKERLADVDDDGVTFKSHLDGSRHRFTPEVSMQIQHQLGADIIFAFDELTTLMNTRGYQESSLERTRQWAIRCLAEHNRLSTARTHRPQQSLWGVVQGAQYEDLRRKATRDLLELSRIDRDAGGKGFGGYGIGGALEKANLGTIVGWVTDELPEDAPRHLLGISEPDDIFTAIENGADTFDCVSPTRVARNGAIYSFDGRYNITNARYKADFSPLDAELDNYSTQYTRAYLHHLFRAKEGLAATLATLHNLSFTVTLVDRARRAIDAGNYFEYRDEFLARYYAGAARRT

SEQ ID NO: 55735 - protein, 423 aa, Gordonia iterans
  misc_feature (1)..(423): tr|A0A2S0KJT7|A0A2S0KJT7_9ACTN Queuine tRNA-ribosyltran sferase OS=Gordonia iterans OX=1004901 GN=tgt PE=3 SV=1
MRRVTTSPSEFTPRVRLQGTAGRTGTLSTPHGEIATPAFVPVGTKATVKTVLPESVAALGAQAVLANAYHLYLQPGPEIVDQAGGLGAFMNWPGPTYTDSGGFQVMSLGVGFKKVISMDVPAGGQAVRQDDSAVAPGKERLANVDDDGVTFKSHIDGSRHRFTPEVSMQIQHQLGADIIFAFDELTTLMNTRGYQEESLERTRQWAIRCLAEHNRLSVERSHRPQQALWGVVQGAQYEDLRRKATRDLVELSRIDQENGGKGFGGYGIGGALEKTNLGTIVGWVTDELPEEAPRHLLGISEPDDVFTAIENGADTFDCVSPTRVARNGAIYSFDGRYNITNAKYRNDFRPLDEELDNYSTQYTRAYLHHLFRAKEGLASTLATLHNLSFTITLVDRARRAIEEGNYFEYRDEFLARYYARSAR

SEQ ID NO: 55736 - protein, 424 aa, Gordonia lacunae
  misc_feature (1)..(424): tr|A0A2C9ZJS3|A0A2C9ZJS3_9ACTN Queuine tRNA-ribosyltran sferase OS=Gordonia lacunae OX=417102 GN=tgt PE=3 SV=1
MLDVSSTGTEIADPTYAVGTTLAGTRGRTGTITTPHGPIHTPAFVPVGTKATVKTVLPESVSALGAQAVLANAYHLYLQPGPEIIDAAGGLGAFMNWRGPTYTDSGGFQVMSLGAGFKKVISMEATGTPDDDLTANGKERLSRVDDDGVTFKSHLDGSAHRFTPEVSMQIQHQLGADIIFAFDELTTLMNTREYQVNSLERTRLWAIRCLVEHNRLSVERAHRPQQSLWGVIQGAQYEDLRRKAARDLVALSEADRAAGGKGFGGYGIGGALEKDNLGTIVGWVNDELPEDSPKHLLGISEPDDIFTAIENGVDTFDCVSPTRVARNGAIYSLDGRYNVTNAKYRSDFRSLDPEVENYTSQYSRAYLHHLFKAKEGLGPTLATLHNVSFIVTLVDRAREAIENGTYTEYRDEFLRRYYGAPTRS

SEQ ID NO: 55737 - protein, 428 aa, Gordonia malaquae
  misc_feature (1)..(428): tr|M3UV49|M3UV49_9ACTN Queuine tRNA-ribosyltransferase OS=Gordonia malaquae NBRC 108250 OX=1223542 GN=tgt PE=3 SV=1
MVPTVANLEQWFLVTSSEFIRRATLDGTAGRTGTIVTPHGEIQTPAFVPVGTKATVKTVVPEQVAALGAQAVLSNAYHLYLQPGADIVDEAGGLGRFMNWPGPTYTDSGGFQVMSLGVGFKKVISMDAAGPQDDTIIAEGKERLANVDDDGVTFKSHIDGTSHRFTPEVSMQIQHQLGADIIFAFDELTTLMNTRGYQEQSLERTRQWAIRCLAEHNRLSTERSHRPQQALWGVIQGAQYEDLRRKATRDLVELSRIDRDNGGKGFGGYGIGGALEKDNLGTIVGWVTEEMPDDAPRHLLGISEPDDIFTAIENGADTFDCVSPTRVARNGAIYSFDGRYNITNAKFKRDFTPLDAELDNYSTQYTRAYLHHLFKAKEGLASTLATLHNLSFTITLVDRARKAIEDGNYFEYRDEFLGRYYAGTKRNG

SEQ ID NO: 55738 - protein, 418 aa, Gordonia namibiensis
  misc_feature (1)..(418): tr|K6VVV0|K6VVV0_9ACTN Queuine tRNA-ribosyltransferase OS=Gordonia namibiensis NBRC 108229 OX=1208314 GN=tgt P E=3 SV=1
MSSTGTEVADPAYTVGTTLPGTRGRTGVINTPHGAIQTPAFVPVGTKATVKTVLPESVAELGAQAVLANAYHLYLQPGPEIIDQAGGLGAFMNWSGPTYTDSGGFQVMSLGAGFKKVIAMEVSPDDSLIAEGKERLSRVDDDGVTFKSHLDGSAHRFTPEVSMQIQHQLGADIIFAFDELTTLMNTRAYQENSLERTRLWAIRCLAEHNRLSVERAHRPQQALWGVIQGAQYEDLRRKASRDLVALSEADREAGGKGFGGYGIGGALEKHNLGTIVGWVNDELPEDAPKHLLGISEPDDIFTAIENGVDTFDCVSPTRVARNGAIYSLDGRYNITNAKYRNDFRQLDPEIENYTSQYSRAYLHHLFKAKEGLGPTLATLHNVSFIVTLVDRARQAIENGTYIEYRDEFLRRYYGSTRD

SEQ ID NO: 55739 - protein, 416 aa, Gordonia neofelifaecis
  misc_feature (1)..(416): tr|F1YPK7|F1YPK7_9ACTN Queuine tRNA-ribosyltransferase OS=Gordonia neofelifaecis NRRL B-59395 OX=644548 GN=tgt PE=3 SV=1
MMASVTTSHFTPRARLDGTAGRTGTISTPHGEIQTPAFVPVGTKATVKTVLPESVAALGAQAVLANAYHLYLQPGPEIVDQAGGLGSFMNWPGPTYTDSGGFQVMSLGAGFKKVISMDLVGEQDDERIAEGKERLANVDDDGVTFKSHLDGSMHRFTPEVSMGIQHQLGADIIFAFDELTTLMNTRGYQESSLERTRQWAIRCLAEHNRLSTERSHRPQQALWGVVQGAQYEDLRRKATRDLVELSRIDRDNGGKGFGGYGIGGALEKANLGTIVGWVTDELPDDAPRHLLGISEPDDVFTAIENGADTFDCVSPTRVARNGAIYSFDGRYNITNAKYRNDFRPLDEELDNYSTQYTRAYLHHLFKAKEGLASTLATLHNLSFTITLVDRARKAIEDGNYFEYRDEFLRRYYAGTR

SEQ ID NO: 55740 - protein, 430 aa, Gordonia otitidis
  misc_feature (1)..(430): tr|H5TMX3|H5TMX3_9ACTN Queuine tRNA-ribosyltransferase OS=Gordonia otitidis NBRC 100426 OX=1108044 GN=tgt PE=3 SV=1
MTPPDTADTNSTGLHLRPDHSYSVGTRLDGSLGRTGVITTPHGDIRTPAFVPVGTKATVKTVLPEAVEALGAQAVLANAYHLYLQPGPDIVDAAGGLGAFMNWSGPTYTDSGGFQVMSLGAGFKKVISMDVTGEQDDEKIAEGRERLSRVDDDGVTFKSHLDGSSHRFTPELSMQIQHQLGADIIFAFDELTTLMNTRGYQENSLERTRQWAIRCLAEHNRLSVERGHRPQQSLWGVLQGAQYEDLRRKAARDLTELSRRDQDAGGKGFGGFGIGGALEKANLGTIVGWVNSELPEDKPKHLLGISEPDDIFTAIENGADTFDCVSPTRVARNGAIYSLDGRYNITNARYRNDFRSLDPEITNYTSQYSRAYLHHLFKAKEGLAATLATLHNVAFVVQMVDGARRAIESGDYYAYRDEFLGRYYAGNRDN

SEQ ID NO: 55741 - protein, 419 aa, Gordonia paraffinivorans
  misc_feature (1)..(419): tr|M3TTL8|M3TTL8_9ACTN Queuine tRNA-ribosyltransferase OS=Gordonia paraffinivorans NBRC 108238 OX=1223543 GN=t gt PE=3 SV=1
MSSTESFVADRPFTVGTTLPGTRGRTGVISTPHGQIRTPAFIPVGTKATVKTVLPESVADLGAQAVLANAYHLYLQPGPEIIDQAGGLGKFMNWHGPTYTDSGGFQVMSLGAGFKKVIAMEVGNPDDTLTANGRERLSRVDDDGVTFKSHLDGSAHRFTPEVSMRIQHQLGADIIFAFDELTTLMNTRAYQENSLERTRLWAIRCLAEHNRLSAERAHRPQQALWGVVQGAQYEDLRRKASRDLVALSEADRAAGGKGFGGYGIGGALEKHNLGTIVGWVNDELPEDAPKHLLGISEPDDIFTAIENGVDTFDCVSPTRVARNGAIYSLDGRYNITNAKYRNDFRPLDPEIENYTSQYSRAYIHHLFKAKEGLAATLATLHNVSFIVQLVDRARQAIEDGNYVEYRDEFLRRYYASKKD

SEQ ID NO: 55742 - protein, 419 aa, Gordonia paraffinivorans; identical to SEQ ID NO: 55741
  misc_feature (1)..(419): tr|A0A2U1ZEP1|A0A2U1ZEP1_9ACTN Queuine tRNA-ribosyltran sferase OS=Gordonia paraffinivorans OX=175628 GN=tgt PE =3 SV=1

SEQ ID NO: 55743 - protein, 415 aa, Gordonia phthalatica
  misc_feature (1)..(415): tr|A0A0N9N049|A0A0N9N049_9ACTN Queuine tRNA-ribosyltran sferase OS=Gordonia phthalatica OX=1136941 GN=tgt PE=3 SV=1
MAAVTSSLFTPRATLDGTAGRTGTISTPHGEIQTPAFVPVGTKATVKTVLPESVAALGAQAVLANAYHLYLQPGPEIVDEAGGLGRFMNWPGPTYTDSGGFQVMSLGVGFKKVISMEAVGPEDDHKVAEGKERLANVDDDGVTFKSHLDGSKHRFTPEVSMQIQHQLGADIIFAFDELTTLMNTRGYQESSLERTRQWAIRCLAEHNRLSQERAHRPQQALWGVIQGAQYEDLRRKATRDLVELSRIDRENGGKGFGGYGIGGALEKSNLGTIVGWVTDELPDDAPRHLLGISEPDDIFTAIENGADTFDCVSPTRVARNGAIYSFDGRYNITNRKYRNDFRPLDEELDNYSTQYTRAYLHHLFKAKEGLASTLATLHNLSFTVTLVDRARKAIEDGNYFDYRDDFLARYYAGSR

SEQ ID NO: 55744 - protein, 415 aa, Gordonia polyisoprenivorans
  misc_feature (1)..(415): tr|H0RIS5|H0RIS5_9ACTN Queuine tRNA-ribosyltransferase OS=Gordonia polyisoprenivorans NBRC 16320 = JCM 10675 O X=1077976 GN=tgt PE=3 SV=1
MSSHDTFRIGTRLPGTLGRTGVITTPHGEIATPAFVPVGTKATVKTVLPESVAALGAQAVLANAYHLYLQPGPEIIDAAGGLGAFMNWRGPTYTDSGGFQVMSLGAGFKKVISMDVTGEQDDHKIAEGRERLSHVDDDGVTFKSHLDGSFHRFTPEVSMQIQHQLGADIIFAFDELTTLMNTRGYQESSLERTRLWAIRCLAEHNRLSVERSHRPQQALWGVLQGAQYEDLRRKAARDLTELSRIDRENGGKGFGGYGIGGALEKDNLGTIVGWVNTELPENAPKHLLGISEPDDIFTAIENGADTFDCVSPTRVARNGAVYTRDGRVNITNARYRKDFGPIDPEITNYTSQYTRAYLHHLFKAKEGLAATLATLHNVSFVIDMVDGARRAIENGDYEAYRDDFLGRYYAGRAAR

SEQ ID NO: 55745 - protein, 422 aa, Gordonia polyisoprenivorans
  misc_feature (1)..(422): tr|A0A259VQU9|A0A259VQU9_9ACTN Queuine tRNA-ribosyltran sferase OS=Gordonia polyisoprenivorans OX=84595 GN=tgt PE=3 SV=1
MACEDAPVSSHDTFRIGTRLPGTLGRTGVITTPHGEIATPAFVPVGTKATVKTVLPESVAALGAQAVLANAYHLYLQPGPEIIDAAGGLGAFMNWRGPTYTDSGGFQVMSLGAGFKKVISMDVTGEQDDHKIAEGRERLSHVDDDGVTFKSHLDGSFHRFTPEVSMQIQHQLGADIIFAFDELTTLMNTRNYQENSLERTRLWAIRCLAEHNRLSVERSHRPQQALWGVLQGAQYEDLRRKAARDLTELSRIDRENGGKGFGGYGIGGALEKDNLGTIVGWVNTELPENAPKHLLGISEPDDIFTAIENGADTFDCVSPTRVARNGAVYTRDGRVNITNARYRKDFGPIDPEITNYTSQYTRAYLHHLFKAKEGLAATLATLHNVSFVIDMVDGARRAIENGDYEAYRDDFLGRYYAGRAAR

SEQ ID NO: 55746 - protein, 421 aa, Gordonia rhizosphera
  misc_feature (1)..(421): tr|K6X0L0|K6X0L0_9ACTN Queuine tRNA-ribosyltransferase OS=Gordonia rhizosphera NBRC 16068 OX=1108045 GN=tgt PE =3 SV=1
MSSSKTPLTPDHSYTVGTPLPGTMGRTGVIETPHGRIHTPAFVPVGTKATVKTVLPESVAALGAQAVLANAYHLYLQPGPEIIDEAGGLGAFMNWPGPTYTDSGGFQVMSLGAGFKKVISMDVAGEQDDEITADGKERLSAVDDDGVTFKSHLDGSAHRFTPEVSMQIQHQLGADIIFAFDELTTLMNTRTYQENSLERTRLWAIRCLAEHNRLSTERVHRPPQSLWGVIQGAQYEDLRRKAARDLVAMSNRDQAEGGRGFGGYGIGGALTKDDLGTIVGWVNEELPEDTAKHLLGISEPDDIFTAIENGADTFDCVSPTRVARNGAIYSLDGRYNITNARYRKDFRPLDPEIENYTSQYSRAYLHHLFKAKEGLAATLATLHNVSFIVTLVDRARQAIEDGNYVEYRDEFLARYYAGVRA

SEQ ID NO: 55747 - protein, 418 aa, Gordonia rubripertincta
  misc_feature (1)..(418): tr|A0A222TD32|A0A222TD32_GORRU Queuine tRNA-ribosyltran sferase OS=Gordonia rubripertincta OX=36822 GN=tgt PE=3 SV=1
MSSTGTEVADPAYTVGTTLPGTRGRTGVINTPHGAIQTPAFVPVGTKATVKTVLPESVSELGAQAVLANAYHLYLQPGPEIVDQAGGLGAFMNWSGPTYTDSGGFQVMSLGAGFKKVIAMEVSPDDSLIAEGKERLSRVDDDGVTFKSHLDGSAHRFTPEVSMQIQHQLGADIIFAFDELTTLMNTRAYQENSLERTRLWAIRCLAEHNRLSVERAHRPQQALWGVIQGAQYEDLRRKASRDLVALSDADRETGGKGFGGYGIGGALEKHNLGTIVGWVNDELPEDAPKHLLGISEPDDIFTAIENGVDTFDCVSPTRVARNGAIYSLDGRYNVTNAKYRNDFRQLDPEIENYTSQYSRAYLHHLFKAKEGLGPTLATLHNVSFIVTLVDRARQAIENGTYIEYRDEFLRRYYGSTRD

SEQ ID NO: 55748 - protein, 440 aa, Gordonia rubripertincta
  misc_feature (1)..(440): tr|A0A449GSA2|A0A449GSA2_GORRU Queuine tRNA-ribosyltran sferase OS=Gordonia rubripertincta OX=36822 GN=tgt PE=3 SV=1
MPGPARVAGLGWASATCEDAAVSSTESFVADRPFTVGTTLPGTRGRTGVISTPHGQIRTPAFIPVGTKATVKTVLPESVADLGAQAVLANAYHLYLQPGPEIIDQAGGLGKFMNWHGPTYTDSGGFQVMSLGAGFKKVIAMEVGNPDDTLTANGRERLSRVDDDGVTFKSHLDGSAHRFTPEVSMRIQHQLGADIIFAFDELTTLMNTRAYQENSLERTRLWAIRCLAEHNRLSAERAHRPQQALWGVVQGAQYEDLRRKASRDLVALSEADRAAGGKGFGGYGIGGALEKHNLGTIVGWVNDELPEDAPKHLLGISEPDDIFTAIENGVDTFDCVSPTRVARNGAIYSLDGRYNITNAKYRNDFRPLDPEIENYTSQYSRAYIHHLFKAKEGLAATLATLHNVSFIVQLVDRARQAIEDGNYVEYRDEFLRRYYASKKD

SEQ ID NO: 55749 - protein, 421 aa, Gordonia sihwensis
  misc_feature (1)..(421): tr|L7LPI7|L7LPI7_9ACTN Queuine tRNA-ribosyltransferase OS=Gordonia sihwensis NBRC 108236 OX=1223544 GN=tgt PE= 3 SV=1
MMACVTTSHFAPRTRLEGTTGRTGTITTPHGEIQTPAFIPVGTKATVKTVLPESVAALGAQAVLANAYHLYLQPGPEIVDQAGGLGRFMNWPGPTYTDSGGFQVMSLGAGFKKVIAMDLVGEQDDHKIADGKERLANVDDDGVTFKSHLDGSMHRFTPEVSMQIQHRLGADIIFAFDELTTLMNTRGYQERSLERTRQWAIRCLAEHNRLSVERSHRPQQALWGVVQGAQYEDLRRKATRDLVELSRIDRENGGKGFGGYGIGGALEKANLGTIVGWVTDELPDDAPRHLLGISEPDDIFTAIENGADTFDCVSPTRVARNGAIYSFDGRYNITNAKYRNDFRSLDEELDNYSTQYTRAYLHHLFKAKEGLASTLATLHNLSFTITLVDRARRAIDEGDYVEYRDEFLRRYYAGTRQAEAR

SEQ ID NO: 55750 - protein, 422 aa, Gordonia soli
  misc_feature (1)..(422): tr|M0QH64|M0QH64_9ACTN Queuine tRNA-ribosyltransferase OS=Gordonia soli NBRC 108243 OX=1223545 GN=tgt PE=3 SV= 1
MTISSTGLTPDHSFTVGATLPGTRGRTGTISTPHGEIQTPAFVPVGTKATVKTVLPESVAALGAQAVLANAYHLYLQPGPEIIDAAGGLGRFMNWPGPTYTDSGGFQVMSLGAGFKKVIAMEIEKTSPDDSIIAPGKERLALVDDDGVTFKSHLDGSTHRFTPEVSMQIQHQLGADIIFAFDELTTLMNTRAYQETSLERTRLWAIRCLAEHNRLSLERAHRPQQSLWGVIQGAHYEDLRRQASRDLVAASDRDQSEGGRGFGGYGIGGALEKSNLGTIVGWVTDELPDDKPRHLLGISEPDDVFTAIENGADTFDCVSPTRVARNGAIYSLDGRYNVTNARYRDDFRPLDGEVENYTSQYSRAYLHHLFKAKEGLASTLATLHNVAFIVAMVDRAREAIVEGDYEAYRDDFLGRYYGGTRG

SEQ ID NO: 55751 - protein, 419 aa, Gordonia sp.
  misc_feature (1)..(419): tr|A0A290XJQ7|A0A290XJQ7_9ACTN Queuine tRNA-ribosyltran sferase OS=Gordonia sp. 1D OX=1737359 GN=tgt PE=3 SV=1
MSSTGTEVTDPAYTVGTTLPGTRGRTGVIATAHGEIQTPAFIPVGTKATVKTVLPESVAALGAQAVLANAYHLYLQPGPEIIDQAGGLGAFMNWRGPTYTDSGGFQVMSLGAGFKKVIAMEVSNPDDELTANGKERLSRVDDDGVTFKSHLDGSAHRFTPEVSMQIQHQLGADIIFAFDELTTLMNTRAYQESSLERTRLWALRCLVEHNRLSVERAHRPQQSLWGVIQGAQYEDLRRKASRDLVALSEADRDAGGKGFGGYGIGGALEKHNLGTIVGWVNDELPEDAPKHLLGISEPDDIFTAIENGVDTFDCVSPTRVARNGAIYSLDGRYNVTNAKYRNDFRQLDPEIDNYTSQYSRAYLHHLFKAKEGLGPTLATLHNVSFIVTLVDRARQAIENGTYVEYRDEFLRRYYGSMRD

SEQ ID NO: 55752 - protein, 417 aa, Gordonia sp.
  misc_feature (1)..(417): tr|A0A1A0L7K5|A0A1A0L7K5_9ACTN Queuine tRNA-ribosyltran sferase OS=Gordonia sp. 852002-10350_SCH5691597 OX=1834 085 GN=tgt PE=3 SV=1
MHLHPEHSYAVGTRLDGSLGRTGVITTPHGEIHTPAFVPVGTKATVKTVLPEAVAALGAQAVLANAYHLYLQPGPEIVDAAGGLGAFMNWSGPTYTDSGGFQVMSLGTGFKKVISMDVTGEQDDEKIAEGRERLSRVDDDGVTFKSHLDGSSHRFTPELSMQIQHQLGADIIFAFDELTTLMNTRGYQENSLERTRQWAIRCLAEHNRLSVERGHRPQQSLWGVLQGAQYEDLRRKAARDLTELSRRDQDSGGKGFGGFGIGGALEKANLGTIVGWVNSELPEDKPKHLLGISEPDDIFTAIENGADTFDCVSPTRVARNGAIYSLDGRYNITNARYRTDFRSLDPEITNYTSQYSRAYLHHLFKAKEGLGATLATLHNVAFVVQMVDGARRAIESGDYYAYREEFLGRYYAGNRND

SEQ ID NO: 55753 - protein, 432 aa, Gordonia sputi
  misc_feature (1)..(432): tr|H5U5F4|H5U5F4_9ACTN Queuine tRNA-ribosyltransferase OS=Gordonia sputi NBRC 100414 OX=1089453 GN=tgt PE=3 SV =1
MTPPDIDAPDTNPTGLHLHPEHSYAVGTRLDGSLGRTGVITTPHGEIHTPAFVPVGTKATVKTVLPEAVAALGAQAVLANAYHLYLQPGPEIVDAAGGLGAFMNWSGPTYTDSGGFQVMSLGTGFKKVISMDVTGEQDDEKIAEGRERLSRVDDDGVTFKSHLDGSSHRFTPELSMQIQHQLGADIIFAFDELTTLMNTRGYQENSLERTRQWAIRCLAEHNRLSVERGHRPQQSLWGVLQGAQYEDLRRKAARDLTELSRRDQDSGGKGFGGFGIGGALEKANLGTIVGWVNSELPEDKPKHLLGISEPDDIFTAIENGADTFDCVSPTRVARNGAIYSLDGRYNITNARYRTDFRSLDPEITNYTSQYSRAYLHHLFKAKEGLGATLATLHNVAFVVQMVDGARRAIESGDYYAYREEFLGRYYAGNRND

SEQ ID NO: 55754 - protein, 424 aa, Gordonia terrae
  misc_feature (1)..(424): tr|A0A2I1R790|A0A2I1R790_9ACTN Queuine tRNA-ribosyltran sferase OS=Gordonia terrae OX=2055 GN=tgt PE=3 SV=1
MQDVSSTGTELADPTYAIGTTLPGTRGRTGTITTPHGPIHTPAFVPVGTKATVKTVLPESVSALGAQAVLANAYHLYLQPGPEIIDAAGGLGAFMNWRGPTYTDSGGFQVMSLGAGFKKVISMEATGTPDDDLTANGKERLSRVDDDGVTFKSHLDGSTHRFTPEVSMQIQHQLGADIIFAFDELTTLMNTRDYQVNSLERTRLWAIRCLDEHNRLSVERAHRPQQALWGVIQGAQYEDLRRKAARDLVALSEADRGAGGKGFGGYGIGGALEKDNLGTIVGWVNDELPEDSPKHLLGISEPDDIFTAIENGVDTFDCVSPTRVARNGAIYSLDGRYNVTNAKYRSDFRPLDPEVENYTSQYSRAYLHHLFKAKEGLGPTLATLHNVSFIVTLVDRAREAIENGTYTEYRDEFLRRYYGASRDA

SEQ ID NO: 55755 - protein, 424 aa, Gordonia terrae
  misc_feature (1)..(424): tr|H5UG51|H5UG51_9ACTN Queuine tRNA-ribosyltransferase OS=Gordonia terrae NBRC 100016 OX=1089454 GN=tgt PE=3 S V=1
MQDVSSTGTELADPTYAIATTLPGTRGRTGTITTPHGPIHTPAFVPVGTKATVKTVLPESVSALGAQAVLANAYHLYLQPGPEIIDAAGGLGAFMNWRGPTYTDSGGFQVMSLGAGFKKVISMEATGTPDDDLTANGKERLSRVDDDGVTFKSHLDGSTHRFTPEVSMQIQHQLGADIIFAFDELTTLMNTRDYQVNSLERTRLWAIRCLDEHNRLSVERAHRPQQALWGVIQGAQYEDLRRKAARDLVALSEADRGAGGKGFGGYGIGGALEKDNLGTIVGWVNDELPEDSPKHLLGISEPDDIFTAIENGVDTFDCVSPTRVARNGAIYSLDGRYNVTNAKYRSDFRPLDPEVENYTSQYSRAYLHHLFKAKEGLGPTLATLHNVSFIVTLVDRAREAIENGTYTEYRDEFLRRYYGASRDA

SEQ ID NO: 55756 - protein, 419 aa, Gordonia westfalica
  misc_feature (1)..(419): tr|A0A1H2KNK4|A0A1H2KNK4_9ACTN Queuine tRNA-ribosyltran sferase OS=Gordonia westfalica OX=158898 GN=tgt PE=3 SV =1
MSSTGTEVADPAYTVGTTLPGTRGRTGVITTPHGPIQTPAFVPVGTKATVKTVLPESVAALGAQAVLANAYHLYLQPGPEIIDRAGGLGAFMNWPGPTYTDSGGFQVMSLGAGFKKVIAMEVGNPDDELTANGKERLSRVDDDGVTFKSHLDGSAHRFTPEVSMQIQHQLGADIIFAFDELTTLMNTRAYQENSLERTRLWAIRCLAEHNRLSIERAHRPQQSLWGVIQGAQYEDLRRKASRDLVALSEADREAGGKGFGGYGIGGALEKHNLGTIVGWVNDELPEDEPKHLLGISEPDDIFTAIENGVDTFDCVSPTRVARNGAIYSFDGRYNITNAKYRNDFGQLDPEIDNYTSQYSRAYLHHLFKAKEGLGPTLATLHNVSFIVTLVDRARQAIENGTYVEYRDEFLRRYYGSTRD

SEQ ID NO: 55757 - protein, 381 aa, Gordonibacter pamelaeae
  misc_feature (1)..(381): tr|A0A369M413|A0A369M413_9ACTN Queuine tRNA-ribosyltran sferase OS=Gordonibacter pamelaeae OX=471189 GN=tgt PE= 3 SV=1
MALFDCTCEATSGHARALSYETAHGTFQTPMFMPVGTSATVKGVTAGQLHDLNSQVVLANTYHLSLRPGADVVAEAGGVHRFMNYDGPMLTDSGGFQVFSLADTLKLDDDGLTFRSIYDGSKIRWTPESNMAVQEALGADIAMQLDQCTPYPAEHAFVAKAVDLSANWARRCLAAHQRPDQTLFGIVQGGMEMDLRLESIRRLREIEEESLAAGGRRFGGFGIGGYSVGEDHEVMFETLGPVARACPEDRPRYLMGVGNPTTLVRAVREGVDMFDCVLPTRTARMGTAFSSTGRMNMRNAKFTRDFGPLDAACTCPTCQNHSRAYLRHLVKQNEMLGGILLSIHNLHYLIDLMRRAREAVLADAYEEFYQEWMASPAAKDY

SEQ ID NO: 55758 - protein, 381 aa, Gordonibacter sp.
  misc_feature (1)..(381): tr|A0A369LXH4|A0A369LXH4_9ACTN Queuine tRNA-ribosyltran sferase OS=Gordonibacter sp. 28C OX=2078569 GN=tgt PE=3 SV=1
MALFDCACQARSGHARALSYETAHGSFHTPMFMPVGTSASVKGVTTGQLRELDAQVVLANTYHLSLRPGADVVAEAGGVHRFMNYDGPMLTDSGGFQVFSLADTLKLDDEGLTFRSIYDGTKVRWTPESNMAIQEQLGADIAMQLDQCTPYPAERSFVAKAVDLSANWARRCLAAHQRPDQTLFGIVQGGMELDLRLESVRRLREVEDESLAAGGRRFGGFGIGGYSVGEEHDVMFETLGQVARALPEDRPRYLMGVGNPTTLVRAVREGVDMFDCVLPTRTARMGTAFSSTGRMNMRNAKFTRDFGPLDAACTCPTCQNHSRAYIRHLVKQNEMLGGILLSVHNLHYLIDLMRRAREAVLADAYEEFYQAWMASPAAKDY

SEQ ID NO: 55759 - protein, 381 aa, Gordonibacter sp.
  misc_feature (1)..(381): tr|A0A1Y4GMW7|A0A1Y4GMW7_9ACTN Queuine tRNA-ribosyltran sferase OS=Gordonibacter sp. An232A OX=1965593 GN=tgt P E=3 SV=1
MALFDCVCEAESGHARALAYETAHGTFRTPMFMPVGTSATVKGVTAGQLRDLQSQVVLANTYHLSLRPGADVVEAAGGVHRFMNYDGPMLTDSGGFQVFSLADTVKLDADGLTFRSIYDGAKVRWTPEENMRIQEQLGADIAMQLDQCAPYPAERAFVARAVDLSASWARRCLAAHTRPDQTLFGIVQGGMHLDLRLRSVEALRAIEEESLARGGRRFGGFGIGGYSVGEDHEVMFETLGQVARALPKDRPRYLMGVGNPTTLVRAVREGVDMFDCVLPTRTARMGTAFSSTGRMNLRNAKYTRDFGPLDPACTCPTCQNHSRAYLRHLVKQNEMLGGILLSLHNLHYLLDLMRRAREAVLAGAYEDFYEEWMASPAAKDY

SEQ ID NO: 55760 - protein, 381 aa, Gordonibacter urolithinfaciens
  misc_feature (1)..(381): tr|A0A423UJP0|A0A423UJP0_9ACTN Queuine tRNA-ribosyltran sferase OS=Gordonibacter urolithinfaciens OX=1335613 GN =tgt PE=3 SV=1
MALFDCACEATSGHARALSYETAHGTFHTPMFMPVGTSATVKGVTAGQLRDLNSQVVLANTYHLSLRPGADVVAEAGGVHRFMNYDGPMLTDSGGFQVFSLADTLKLDDDGLTFRSIYDGSKIRWTPESNMAIQEQLGADIAMQLDQCTPYPAERAFVAKAVDLSANWARRCLAAHVRPDQTLFGIVQGGMELDLRLESIRRLREIEDESLARGARRFGGFGIGGYSVGEDHEVMFETLGPVARACPEDRPRYLMGVGNPTTLVRAVREGVDMFDCVLPTRTARMGTAFSSTGRMNMRNAKFARDFGPLDAACTCPTCQNHSRAYIRHLVKQSEMLGGILLSIHNLHYLIDLMRRAREAVLAGAYEEFYAAWMASPAAKDY

SEQ ID NO: 55761 - protein, 381 aa, Gordonibacter urolithinfaciens
  misc_feature (1)..(381): tr|A0A1Y4FSL8|A0A1Y4FSL8_9ACTN Queuine tRNA-ribosyltran sferase OS=Gordonibacter urolithinfaciens OX=1335613 GN =tgt PE=3 SV=1
MALFDCACEATSGHARALSYETAHGTFHTPMFMPVGTSATVKGVTAGQLRDLNSQVVLANTYHLSLRPGADVVAEAGGVHRFMNYDGPMLTDSGGFQVFSLADTLKLDDDGLTFRSIYDGSKIRWTPESNMAIQEQLGADIAMQLDQCTPYPAERAFVAKAVDLSANWARRCLAAHVRPDQTLFGIVQGGMELDLRLESIRRLREIEDESLARGARRFGGFGIGGYSVGEDHEVMFETLGPVARACPEDRPRYLMGVGNPTTLVRAVREGVDMFDCVLPTRTARMGTAFSSTGRMNMRNAKFTRDFGPLDAACTCPTCQNHSRAYIRHLVKQNEMLGGILLSIHNLHYLIDLMRRAREAVLADAYEEFYAAWMASPAAKDY

SEQ ID NO: 55762 - protein, 383 aa, Gottschalkia acidurici
  misc_feature (1)..(383): tr|K0AZE3|K0AZE3_GOTA9 Queuine tRNA-ribosyltransferase OS=Gottschalkia acidurici (strain ATCC 7906 / DSM 604 / BCRC 14475 / CIP 104303 / NCIMB 10678 / 9a) OX=1128398 GN=tgt PE=3 SV=1
MTVIKYELIKECSQTKARLGKIHTPHGSFDTPMFMPVGTKATVKAMTPEELKDIGSQIILGNTYHLYLRPGHELIEEAGGLHKFMNWDRPILTDSGGFQVFSLGGLRSIKEQGVEFRSHIDGSKHLITPEKSIEIQNSLGSDIMMAFDECVPYPSDWHYTKASLERTTRWAKRCKDANKNPDRQGIFGIIQGGMYKDLREQSAKEIIDLDFPGYAIGGLSVGEPGDVLLEALDYTMPFMPKDKPRYFMGAGSPDYLIELAIRGVDMADCVLPTRIARNGTALTTRGKVVIRNAKYSRDFTPLDPECDCYTCKNYSKAYIRHLFNVDEILGARLTTIHNLYFLLKLMENVRESIKDDRLLEFRREFYEKYGYPKYMNSLDFKTN

SEQ ID NO: 55763 - protein, 382 aa, Gottschalkia purinilytica
  misc_feature (1)..(382): tr|A0A0L0WCP6|A0A0L0WCP6_GOTPU Queuine tRNA-ribosyltran sferase OS=Gottschalkia purinilytica OX=1503 GN=tgt PE= 3 SV=1
MEPVIKYELIKECSQTKARLGKIYTPHGVIETPIFMPVGTRATVKAMTPEELKDIGSQIILGNTYHLYLRPGHDLIAEAGGLHKFMNWDKPILTDSGGFQVFSLGGLRKITEEGVEFKSHIDGSKHFITPEKSIEIQNALGSDIMMAFDECVPYPKDWHYVKESLERTTRWAKRCKDANKNPDRQAVFGIIQGGMYKDLREESARQIIDLDFPGYAVGGLSVGEPGDLLLEVLDHTMPFLPKDKPRYFMGAGSPDYLIELVLRGIDMADCVLPTRIARNGTALTTRGKVVVRNAKYSRDFTALDNECDCYTCKNYSKAYIRHLFNVDEILGARLTTIHNLHFLLKLMENIREAIKEDRLLEFRREFYDKYGYPNYIDKLKGF

SEQ ID NO: 55764 - protein, 372 aa, Gottschalkiaceae bacterium
  misc_feature (1)..(372): tr|A0A521J4X6|A0A521J4X6_9FIRM Queuine tRNA-ribosyltran sferase OS=Gottschalkiaceae bacterium OX=2527676 GN=tgt PE=3 SV=1
MVFRYELIKEDRDSKARLGKIYTPHGVIETPIFMPVGTRATVKAMTPEELKDLGAQIILGNTYHLYLKPGHELIEEAGGLHKFMNWDRPILTDSGGFQVFSLGDLRKITEEGVEFRSHIDGSKHFISPEKSIQIQNSLGSDIIMAFDECAPYPSDWDYVKKSLERTTRWAKRCKDANANPDTQALFGIIQGGMYRDLREQSAKEIIDLDFPGYAVGGLSVGEPADLMCEMLDYTVPLLPKEKPRYLMGVGSPDYLFEAVIRGIDMADCVLPTRIARNGTVLTSQGKLVIRNATYSRDFTSLDPECDCYTCKNYSRAYIRHLFNVNEILGSRLATIHNLYFLIKLMENIREAIKEDRLLQYREEFYKKYGYIK

SEQ ID NO: 55765 - protein, 380 aa, Gracilibacillus boraciitolerans
  misc_feature (1)..(380): tr|W4VMS1|W4VMS1_9BACI Queuine tRNA-ribosyltransferase OS=Gracilibacillus boraciitolerans JCM 21714 OX=1298598 GN=tgt PE=3 SV=1
MTAIRYEHIKTCKQTGARLGKVHTPHGSFDTPCIYAGWNAGNRKNDEPEELKEMGANIILSNTYHLWLRPGEEIVKEAGGLHPFMNWDGAILTDSGGYQVFSLSDLRKIEEEGVHFRNHLNGEKLFLSPEKAIYIQNALGSDIMMALDECPPFPAEHDYMKKSVERTSRWAERCLNAHRQTDTQGLFGIIQGGGEYEDLRRLSAQDLTSMDFPGYAIGGLSVGESKDIMNRVLEFTTPLLPANKPRYLMGVGSPDSLIDGAIRGIDMFDCVLPTRIARNGTCMTSEGRLVVRNAKFARDFSPIDPNCDCHTCKNYSRAYIRHLVKANETFGFRLTTYHNLYFLLNLMKQVREAIMQDRLGDFKEVFFEQYGFNKPNAKNF

SEQ ID NO: 55766 - protein, 379 aa, Gracilibacillus dipsosauri
  misc_feature (1)..(379): tr|A0A317KYL3|A0A317KYL3_9BACI Queuine tRNA-ribosyltran sferase OS=Gracilibacillus dipsosauri OX=178340 GN=tgt PE=3 SV=1
MSAITYEHIKTCKQTGARLGRVHTPHGSFDTPAFMPVGTLATVKTMSPEELKEMGANIILSNTYHLWLRPGHDIVKEAGGLHSFMNWNGAILTDSGGFQVFSLSDLRKIEEEGVHFRNHLNGEKLFLSPEKAMQIQNALGSDIMMAFDECPPYPAEHDYMKKSVERTSRWAERCLEAHERKDVQGLFGIVQGGEYEDLRRLSARDLTSLDFPGYAIGGLSVGEPKDVMNRVLEFTTPLLPSSKPRYLMGVGSPDSLIDGAIRGIDMFDCVLPTRIARNGTCMTSEGRLVVRNAKYARDFNPIDPNCDCHTCQNYTRAYIRHLVKANETFGFRLTTYHNLYFLLKLMEQVREAIKQDRLGDFREEFFEQYGFNKPNAKNF

SEQ ID NO: 55767 - protein, 379 aa, Gracilibacillus halophilus
  misc_feature (1)..(379): tr|N4WRU3|N4WRU3_9BACI Queuine tRNA-ribosyltransferase OS=Gracilibacillus halophilus YIM-C55.5 OX=1308866 GN=t gt PE=3 SV=1
MAAITYEHIKTCKQTGARLGKVHTPHGSFDTPSFMPVGTLATVKTMSPEELQEMQANIILSNTYHLWLRPGEDIVKEAGGLHQFMNWDGAILTDSGGFQVFSLSDLRDIVEEGVHFRNHISGAKLFLSPEKAMQIQNDLGADIMMAFDECPPYPASYEYMKKSVERTSRWAERCLEAHQRKNDQGLFGIIQGGEYEDLRKLSAQDLTSMDFPGYAIGGLSVGEPKDVMNRVLEFTTPLLPADKPRYLMGVGSPDSLVDGAIRGVDMFDCVLPTRIARNGTCMTSQGRLVVRNAKFARDFSPLDPECDCYTCRNYTRAYIRHLVKNNETFGMRLTTYHNLYFLLELMGQVREAIQQDRLGDFREAFFEQYGFNQPNAKNF

SEQ ID NO: 55768 - protein, 379 aa, Gracilibacillus kekensis
  misc_feature (1)..(379): tr|A0A1M7NYY1|A0A1M7NYY1_9BACI Queuine tRNA-ribosyltran sferase OS=Gracilibacillus kekensis OX=1027249 GN=tgt P E=3 SV=1
MTAIRYEHIKTCKQTGARLGKVHTPHGTFDTPAFMPVGTLATVKTMSPEELKEMGANMILSNTYHLWLRPGEDIVKEAGGLHKFMNWDGAILTDSGGFQVFSLSDLRKIEEEGVHFRNHLSGEKLFLSPEKAMNIQNALGSDIMMAFDECPPYPAEHDYMKKSVERTSRWAERCLEAHDRKDVQGLFGIVQGGEYEDLRRLSAQDLTSMDFPGYAIGGLSVGEPKDVMNRVLEFTTPWLPTDKPRYLMGVGSPDSLIDGAIRGIDMFDCVLPTRIARNGTCMTSEGRLVVRNAKFARDFSPLDPNCDCHVCQNYTRAYIRHLVKANETFGFRLTTYHNLYFLLKLMEQVREAIMQDRLGDFKEAFFEQYGFNKPNAKNF

SEQ ID NO: 55769 - protein, 379 aa, Gracilibacillus orientalis
  misc_feature (1)..(379): tr|A0A1I4MPX8|A0A1I4MPX8_9BACI Queuine tRNA-ribosyltran sferase OS=Gracilibacillus orientalis OX=334253 GN=tgt PE=3 SV=1
MTAIRYEHIKTCKQTGARLGKVHTPHGSFDTPAFMPVGTLATVKTMSPEELKEMGANMILSNTYHLWLRPGEDIVKEAGGLHQFMNWDGAILTDSGGFQVFSLSDLRNIEEEGVHFRNHISGDKLFLSPEKAMRIQNDLGSDIMMAFDECPPYPAEHDYMKKSVERTSRWAERCLEAHERKDVQGLFGIVQGGEYEDLRRLSAQDLTSLDFPGYAIGGLSVGEPKDVMNRVLEFTTPLLPSDKPRYLMGVGSPDSLIDGAIRGVDMFDCVLPTRIARNGTCMTSEGRLVVRNAKFARDFSPLDPNCDCHVCKNYTRAYIRHLVKSSETFGFRLTTYHNLYFLLKLMEQVRDAIKQDRLGDFKEEFFEQYGFNKPNAKNF

SEQ ID NO: 55770 - protein, 381 aa, Gracilibacillus ureilyticus
  misc_feature (1)..(381): tr|A0A1H9RN91|A0A1H9RN91_9BACI Queuine tRNA-ribosyltran sferase OS=Gracilibacillus ureilyticus OX=531814 GN=tgt PE=3 SV=1
MTMTAITYEHIKTCKQTGARLGKVHTPHGSFDTPAFMPVGTLATVKTMSPEELKQMGANMILSNTYHLWLRPGHDIVKEAGGLHKFMNWDGAILTDSGGFQVFSLSDLRKIEEEGVHFRNHLNGEKLFLSPEKAMEIQNALGSDIMMAFDECPPYPAEYEYMKKSVERTSRWAERCLEAHGRKEDQGLFGIVQGGEYEELRKLSASDLTSLDFPGYAIGGLSVGEPKDVMNRVLEFTTPLLPADKPRYLMGVGSPDSLIDGAIRGVDMFDCVLPTRIARNGTCMTSEGRLVVRNAKYARDFTPLDPNCDCHVCKNYTRAYIRHLVKANETFGFRLTTYHNLYFLLKLMEQVREAIMQDRLGDFREEFFEQYGFNKPNAKNF

SEQ ID NO: 55771 - protein, 377 aa, Gracilibacter sp.
  misc_feature (1)..(377): tr|A0A101W5R5|A0A101W5R5_9FIRM Queuine tRNA-ribosyltran sferase OS=Gracilibacter sp. BRH_c7a OX=1734398 GN=tgt PE=3 SV=1
MWKVLAAVYMEILKKDSQTKARLGKVHTPHGIIDTPVFMPVGTQATVKTMSPEELKTIGAKIILSNTYHLFLRPGHELIKKAGGLHKFMNWDGAILTDSGGFQVFSLGDLRKITEEGVEFRSHIDGSKQFLNPEKAIEVQMALGSDIVMAFDECIPYPCTYEYARKSTDLTTRWLERCKKALVTTDKQSLFGIVQGGMFKDLRKKSAQDITQLDLPGYAIGGLSVGEPKDMMYEVLEETVPLLPENKPRYLMGVGSPDALIEGAMRGIDMFDCVLPTRIARNGTALTRYGKVVIRNAEYAMDLSQLDPTCSCYTCTNYSRAYLRHLLKADEILGLRLMTIHNLHFLLNLMEEIRQAIREDRLIQYKKDFFSDYGYEK

SEQ ID NO: 55772 - protein, 375 aa, Gracilimonas mengyeensis
  misc_feature (1)..(375): tr|A0A521CBI5|A0A521CBI5_9BACT Queuine tRNA-ribosyltran sferase OS=Gracilimonas mengyeensis OX=1302730 GN=tgt P E=3 SV=1
MYTLKSTASTTKARLGQLETAHGVIETPIFMPVGTLGTVKGVSQDILKERVKAQIILGNTYHLYLRPGCDIIREAGGLHQFMNWDRPILTDSGGYQVFSLSDNRELDEEGAHFKSHIDGSSHSFTPENVVETQRILGSDIMMLLDECPPYPSSHEYAKNSMELTHRWAKRGRKAFLETEPLYGHKQAQFGIVQGGTYKDLRIESAKFMADQDFEGIAIGGLSVGEPTELLYEFTDLNTDYLPKDKARYLMGVGTPANLLHGVARGVDMFDCVMPTRNARNGSIFTRHGKVNIRNAQWKEHHELLDPDFPSDLCSKYTMAYVHHLIRNNEIFGLVLASIHNLTFYLWLMDEVRRRIADDTFGDWYEGMAEKLDEKL

SEQ ID NO: 55773 - protein, 375 aa, Gracilimonas sp.
  misc_feature (1)..(375): tr|A0A316TSD7|A0A316TSD7_9BACT Queuine tRNA-ribosyltran sferase OS=Gracilimonas sp. 8A47 OX=2079485 GN=tgt PE=3 SV=1
MYTLRKKAAQTKARLGTLQTDHGEIQTPIFMPVGTLGSVKAVSQDDLVNKIKAQIILGNTYHLYLRPGNEIMQAAGGLHGFMGWDKPILTDSGGYQIFSLSDIRDLKEKGATFQSHLDGSKHLFTPENVVDTQRILGSDIMMILDECPPWPAEYDYVKESMGLTHRWAKRGREHFLKTDPIYGHKQHQFGIVQGGTYKDLRKESSEFMASLDFEGLAIGGLSVGEPTDIMYEITDFNTDHLPEDKPRYLMGVGTPANLIQCVALGIDMFDCVMPTRNARNGTIFTRNGRVNVRNAKWKHHHKLLDPDFPSDLCRRYNMSYIHHLIKSDEILGLELTSLHNLTFYLWLMEQIREQIKNDTFQEWYPRMMEQVEQRI

SEQ ID NO: 55774 - protein, 376 aa, Gramella flava
  misc_feature (1)..(376): tr|A0A1L7I1W8|A0A1L7I1W8_9FLAO Queuine tRNA-ribosyltran sferase OS=Gramella flava JLT2011 OX=1229726 GN=tgt PE= 3 SV=1
MKFELKGKDTGSKARAGKITTDHGVIETPIFMPVGTVASVKGVHQTELKEDINPDIILGNTYHLYLRPQTNILKKAGGLHKFMNWDRNILTDSGGYQVYSLSARRKIKEEGVKFKSHIDGSYHTFTPENVMEIQRAIGADIIMAFDECTPYPCDYHYAKRSMHMTHRWLDRCMTHLKKTPELYGYSQTLFPIVQGSTYKDLRMESAEYIANAGAEGNAIGGLSVGEPAEEMYAMTEVVTNILPEDKPRYLMGVGTPINILENIALGVDMFDCVMPTRNGRNGMLFTAHGTINIKNKKWEDDFSPLDEEGTSFVDTMYSKAYVRHLFSVNEMLGRQIASIHNLAFYLWLVREARKHILAGDFTPWKDKMVKQMDKRL

SEQ ID NO: 55775 - protein, 376 aa, Gramella forsetii
  misc_feature (1)..(376): tr|A0LYY4|A0LYY4_GRAFK Queuine tRNA-ribosyltransferase OS=Gramella forsetii (strain KT0803) OX=411154 GN=tgt P E=3 SV=1
MDFELLSTDAGSKARAGKITTDHGVIETPIFMPVGTVASVKGIHQRELKEDINPDIILGNTYHLYLRPQTDILRKAGGLHKFMNWDRNILTDSGGYQVYSLSARRKIKEEGVKFKSHIDGSYHTFTPENVMEIQRTIGADIIMAFDECTPYPCDYNYAKRSMHMTHRWLDRCINHLEKTPEIYDYKQTFFPIVQGSTYKDLRKQSAEYIANAGAEGNAIGGLSVGEPAEEMYAMTEVVTEILPEDKPRYLMGVGTPINILENIALGIDMFDCVMPTRNGRNGMLFTAHGTINIKNKKWEDDFSPIDPEGVSFVDSEYSKAYVRHLFSVNEMLGRQIASIHNLSFYLWLVREARKHILAGDFTPWKDKMVKQMDKRL

SEQ ID NO: 55776 - protein, 376 aa, Gramella gaetbulicola
  misc_feature (1)..(376): tr|A0A2T6AJQ9|A0A2T6AJQ9_9FLAO Queuine tRNA-ribosyltran sferase OS=Gramella gaetbulicola OX=703340 GN=tgt PE=3 SV=1
MKFELLTTDAGSKARAGKITTDHGVIETPIFMPVGTVASVKGVHQSELKEDINPDIILGNTYHLYLRPQTEILKKAGGLHKFMNWDRNILTDSGGYQVYSLSARRKIKEEGVKFKSHIDGSYHTFTPENVMEIQRAIGADIIMAFDECTPYPCDYNYAKRSMHMTHRWLDRCINHLEKTPEIYDYKQTLFPIVQGSTYKDLRRQSAEYIANAGAEGNAIGGLSVGEPAEEMYAMTEVVTEILPEDKPRYLMGVGTPINILENIALGVDMFDCVMPTRNGRNGMLFTSHGTINIKNKKWEADFSPIDPEGVSFVDSMYSKAYVRHLFSVNEMLGRQIASIHNLSFYLWLVREARKHILAGDFPQWKDKMVKQMDKRL

SEQ ID NO: 55777 - protein, 376 aa, Gramella jeungdoensis
  misc_feature (1)..(376): tr|A0A4Y8AU17|A0A4Y8AU17_9FLAO Queuine tRNA-ribosyltran sferase OS=Gramella jeungdoensis OX=708091 GN=tgt PE=3 SV=1
MQFELKSKDAQSKARAGIVTTDHGTIETPIFMPVGTVGTVKGVHQTELKNEINPDIILGNTYHLYLRPQTKILEQAGGLHKFMNWDRNILTDSGGYQVYSLSARRKIKEEGVKFKSHIDGSYHTFTPENVMEIQRSIGADIIMAFDECTPYPCDYNYAKRSMHMTHRWLKRCITHLDKTPFKYDYSQTFFPIVQGSTYKDLRKQSAEFIASVGAEGNAIGGLSVGEPAEEMYEMTEVVTAILPEDKPRYLMGVGTPINILENIALGIDMFDCVMPTRNARNGMLFTAHGTINIKNKKWEDDFSVIDEMGITYVDTLYSKAYLRHLFVAKELLGKQIASIHNLGFYLWLVREARKHILAGDFTEWKNQMVKQMDKRL

SEQ ID NO: 55778 - protein, 376 aa, Gramella salexigens
  misc_feature (1)..(376): tr|A0A1L3J1E9|A0A1L3J1E9_9FLAO Queuine tRNA-ribosyltran sferase OS=Gramella salexigens OX=1913577 GN=tgt PE=3 S V=1
MDFELLTTDSGSKARAGTITTDHGKIETPIFMPVGTVASVKGVHQKELKEDINPDIILGNTYHLYLRPQTEILKKAGGLHKFMNWDRNILTDSGGYQVYSLSARRKIKEEGVKFKSHIDGSYHTFTPENVMEIQRAIGADIIMAFDECTPYPCDYNYAKRSMHMTHRWLDRCINHLEKTPEMYGYQQTLFPIVQGSTYKDLRRQSAEYIANAGAEGNAIGGLSVGEPAEEMYAMTEVVTEILPEDKPRYLMGVGTPINILENIALGVDMFDCVMPTRNGRNGMLFTSHGTINIKNKKWEADFSPIDEEGVSFVDSQYSKAYVRHLFSVNEMLGRQIASIHNLSFYLWLVREARKHILAGDFTEWKNKMVKQMDKRL

SEQ ID NO: 55779 - protein, 376 aa, Gramella sp.
  misc_feature (1)..(376): tr|A0A1H1L1U2|A0A1H1L1U2_9FLAO Queuine tRNA-ribosyltran sferase OS=Gramella sp. MAR_2010_102 OX=1250231 GN=tgt PE=3 SV=1
MKFELLTTDPGSKARAGKITTDHGVIETPIFMPVGTVASVKGVHQKELKEDINPDIILGNTYHLYLRPKTEILKKAGGLHKFMNWDRNILTDSGGYQVYSLSARRKIKEEGVKFKSHIDGSYHTFTPENVMEIQRAIGADIIMAFDECTPYPCDYNYAKRSMHMTHRWLDRCINHLEKTPEIYDYKQTFFPIVQGSTYKDLRKQSAEYIANSGAEGNAIGGLSVGEPAEEMYAMTEVVTEILPEDKPRYLMGVGTPINILENIALGIDMFDCVMPTRNGRNGMLFTAHGTINIKNKKWEADFSPIDPEGESFVDSMYSKAYVRHLFSVNEMLGRQIASIHNLSFYLWLVREARKHILAGDFPQWKDKMVKQMDKRL

SEQ ID NO: 55780 - protein, 376 aa, Gramella sp.
  misc_feature (1)..(376): tr|A0A2R3Z0Y8|A0A2R3Z0Y8_9FLAO Queuine tRNA-ribosyltran sferase OS=Gramella sp. SH35 OX=2126553 GN=tgt PE=3 SV= 1
MKFDLLGTDPGSKARAGKIETDHGTIETPIFMPVGTVASVKGVHQKELKEDINPDIILGNTYHLYLRPQTDILKKAGGLHTFMNWDRNILTDSGGYQVYSLSARRKIKEEGVKFKSHIDGSYHTFTPENVMEIQRAIGADIIMAFDECTPYPCDYRYAQKSMHMTHRWLDRCMAHLEKTPELYGYQQTLFPIVQGSTYKDLRKQSAEYIANAGAEGNAIGGLSVGEPAEEMYEMTEIVTDILPVDKPRYLMGVGTPINILENIALGVDMFDCVMPTRNGRNGMLFTSQGTINIKNKKWEADFSPIDEEGITFVDTQYSKAYVRHLFSVNEMLGRQIASIHNLGFYLWLVREARKHILAGDFVDWKNKMVRQMDKRL

SEQ ID NO: 55781 - protein, 377 aa, Granulibacter bethesdensis
  misc_feature (1)..(377): tr|W6I2Y2|W6I2Y2_9PROT Queuine tRNA-ribosyltransferase OS=Granulibacter bethesdensis OX=364410 GN=tgt PE=3 SV= 1
MLMSLTLSLQAEDGRARAATLHTAHGDVPTPTFMPVGTAATVKAMMMDSVRATGAGIVLGNTYHLMLRPGADRVAALGGLHRFMDWPGPILTDSGGFQVMSLSSLRKLDKDGVTFQSHIDGSRHRLTPESSIGIQHKLDATITMAFDECTKFPATHEEAAASMELSMRWAARCRDAFVPRDGYGLFGIVQGSVYHDLRTQSVTALGDDFHGYAVGGLAVGEGQEAMFATLDHTLPLLPRGKPRYLMGVGTPDDILGAVMRGVDMFDCVMPTRAGRTARAYTSQGVMNMRNARYADDARPIDPACDCPACTRHSRAYLHHLFRAGEMLGPMLLTWHNLNYYQSLMRGLRSAIMEGRLEQHAVTLRAAWAAGDREKQDG

SEQ ID NO: 55782 - protein, 377 aa, Granulibacter bethesdensis
  misc_feature (1)..(377): sp|Q0BVG4|TGT_GRABC Queuine tRNA-ribosyltransferase OS= Granulibacter bethesdensis (strain ATCC BAA-1260 / CGDN IH1) OX=391165 GN=tgt PE=3 SV=1
MLMSLTLSLQAEDGRARAATLHTAHGDVPTPTFMPVGTAATVKAMMMDSVRATGAGIVLGNTYHLMLRPGADRVAALGGLHRFMDWPGPILTDSGGFQVMSLSSLRKLDKDGVTFQSHIDGSRHRLTPESSIGIQHKLDATITMAFDECTKFPATHEEAASSMELSMRWAARCRDAFVPRDGYGLFGIVQGSVYNDLRTQSVTALGDDFHGYAVGGLAVGEGQEAMFATLDHTLPLLPRGKPRYLMGVGTPDDILGAVMRGVDMFDCVMPTRAGRTARAYTSQGVMNMRNARYADDGRPIDPACDCPACTRHSRAYLHHLFRAGEMLGPMLLTWHNLNYYQSLMRGLRSAIMEGRLEQHAVTLRAAWAAGDREKQDG

SEQ ID NO: 55783 - protein, 381 aa, Granulicatella adiacens
  misc_feature (1)..(381): tr|C8NEY3|C8NEY3_9LACT Queuine tRNA-ribosyltransferase OS=Granulicatella adiacens ATCC 49175 OX=638301 GN=tgt PE=3 SV=1
MTEPAVKYRLIKTEKHTGARLGEIITPHGTFPTPMFMPVGTLATVKSMSPEELDEMGANIILSNTYHLWLRPGADIVDEAGKLHNFMNWKKGILTDSGGFQVFSLSDMRRIEEEGVHFRNHLNGSKLFISPEISIDVQNKLGADIIMSFDECPDFHHTHDYVKDSIARTTRWAERGLKAHKSPDSQALFGILQGAGYKDLRIAHAKDMISLDFPGYSIGGLSVGETKQEMNEVLDYLTPLIPSNKPRYLMGVGSPDSLIDGVIRGVDMFDCVLPTRIARNGTCMTSSGRLVVKNAKYERDFRPLDEKCNCYTCRNYTRAYIRHLFKTDETFGLRLTSYHNLYFLLNLMKQVRQAIMDDNLLEFREAFFEEYGFNKENARNF

SEQ ID NO: 55784 - protein, 381 aa, Granulicatella balaenopterae
  misc_feature (1)..(381): tr|A0A1H9MW46|A0A1H9MW46_9LACT Queuine tRNA-ribosyltran sferase OS=Granulicatella balaenopterae OX=137733 GN=tg t PE=3 SV=1
MTEPAIKYRLIKTEKHTGARLGEIITPHGTFPTPMFMPVGTLATVKSMAPEELDEMGANIILSNTYHLWLRPGADIVDEAGKLHNFMNWNKGILTDSGGFQVFSLSDMRQIEEEGVHFRNHLNGSKEFLSPEVSIDVQNKLGADIIMSFDECPDFHQPYEYVKDSIARTTRWAERGLKAHKSPETQGLFGILQGAGYKDLRLDHAKDMISLDFPGYSIGGLSVGETKQEMNEVLDYVTPLIPDNKPRYLMGVGSPDALIDGVIRGVDMFDCVLPTRIARNGTCMTSQGRLVVKNAKYERDFGPIDPKCNCYTCRNYSRAYVRHLFKTNETFGLRLTSYHNLYFLINLMKDVRQAIMDDNLLEFREAFFEEYGLNVANPKNF

SEQ ID NO: 55785 - protein, 381 aa, Granulicatella elegans
  misc_feature (1)..(381): tr|D0BJW5|D0BJW5_9LACT Queuine tRNA-ribosyltransferase OS=Granulicatella elegans ATCC 700633 OX=626369 GN=tgt PE=3 SV=1
MTQSAVTYRLIKTEKHTGARLGEIITPHGTFPTPMFMPVGTLATVKSMSPEELDEMGANIILSNTYHLWLRPGADIVDEAGKLHNFMNWKKGILTDSGGFQVFSLSDMRRIEEEGVHFRNHLNGSKLFLSPEISIDVQNKLGADIIMSFDECPDFHHTHDYVKNSIARTTRWAERGLKAHKSPETQALFGILQGAGYKDLRMDHAKDMISLDFPGYSIGGLSVGETKQEMNEVLDYVTPLIPSHKPRYLMGVGSPDSLIDGVIRGVDMFDCVLPTRIARNGTCMTSAGRLVVKNAKYERDFRPIDEKCNCYTCRNYSRAYIRHLFKADETFGLRLTSYHNLYFLLNLMKQVRQAIMDDNLLEFREAFFEEYGFNKENARNF

SEQ ID NO: 55786 - protein, 381 aa, Granulicatella sp.
  misc_feature (1)..(381): tr|A0A420YR80|A0A420YR80_9LACT Queuine tRNA-ribosyltran sferase OS=Granulicatella sp. OX=2049028 GN=tgt PE=3 SV =1
MTEPAVKYRLIKTEKHTGARLGEIITPHGTFPTPMFMPVGTLATVKSMSPEELDEMGANIILSNTYHLWLRPGADIVDEAGKLHNFMNWKKGILTDSGGFQVFSLSDMRRIEEEGVHFRNHLNGSKLFLSPEISIDVQNKLGADIIMSFDECPDFHHTHDYVKDSIARTTRWAERGLKAHKSPDTQALFGILQGAGYKDLRIAHAKDMISLDFPGYSIGGLSVGETKQEMNEVLDYLTPLIPSNKPRYLMGVGSPDSLIDGVIRGVDMFDCVLPTRIARNGTCMTSSGRLVVKNAKYERDFRPLDEKCNCYTCRNYTRAYIRHLFKTDETFGLRLTSYHNLYFLLNLMKQVRQAIMDDNLLEFREAFFEEYGFNKENARNF

SEQ ID NO: 55787 - protein, 381 aa, Granulicatella sp.
  misc_feature (1)..(381): tr|A0A4Y9IYV0|A0A4Y9IYV0_9LACT Queuine tRNA-ribosyltran sferase OS=Granulicatella sp. WM01 OX=2558277 GN=tgt PE =3 SV=1
MSEPAIKYRLIKKEKHTGARLGEIITPHGTFPTPMFMPVGTLATVKSIAPEELDIMGANIILSNTYHLWLRPGEDIVEEAGGLHRFMNWNKGILTDSGGFQVFSLSDMRKITEEGVHFRNHLNGSKMFLSPEKAINIQNKLGPDIMMSFDECPPFHETHDYVEKSIHRTTRWAERGLKAHQNPDRQGLFGILQGAGYKDLRLQHAKDMVSLDFPGYSIGGLSVGETKQEMNSVLDYLTNVMPEHKPRYLMGVGSPDALIDGVIRGVDMFDCVLPTRIARNGTCMTSQGRLVVKNAQYERDFRPIDEKCNCYTCRSYTRAYVRHLFKADETFGLRLTSYHNLYFLLNLMKQVRQAILDDDLLAFKEAFFEEYGLNVENPKNF

SEQ ID NO: 55788 - protein, 378 aa, Granulicella mallensis
  misc_feature (1)..(378): tr|G8NU59|G8NU59_GRAMM Queuine tRNA-ribosyltransferase OS=Granulicella mallensis (strain ATCC BAA-1857 / DSM 2 3137 / MP5ACTX8) OX=682795 GN=tgt PE=3 SV=1
MSLKFEVANTTEQGGRRGALSLPHGVVQTPVFMPVGTAATVKAVPQDALETLGGRGAEIILANTYHLYLRPGHELIRSLGGVHKFMSWRRPMLTDSGGFQVFSLAKLRKITEDGVEFRSHLDGSKHFFSPEHSMTVQIALGADIMMVFDECVETPASWERTRDSMALTHAWAARSKAYWEAHRHEVPWHEERGGQHQALFGIVQGGMYADLRRESADRLVEMDLPGYAIGGLAVGEPREVTREMIALTLEHLPKDKPRYVMGVGYPDEIEEYARMGVDMMDCVLPTRAGRHGLLFIREDPNDRRSAVVRLNIKKQDNAQDQRPIDEGCKCSVCQRYTRAYLRHLFASGEPLGATLNSIHNLSFYLETMERVRVDLAGA

SEQ ID NO: 55789 - protein, 373 aa, Granulicella pectinivorans
  misc_feature (1)..(373): tr|A0A1I6LED3|A0A1I6LED3_9BACT Queuine tRNA-ribosyltran sferase OS=Granulicella pectinivorans OX=474950 GN=tgt PE=3 SV=1
MDLTFDVLKTSEAGGRRAVLGLPHGDVQTPVFMPVGTVASVKAVPQDVLEVNGANGKGAQIILANTYHLYLRPGHELVRRMGGVHQFMSWRRPMLTDSGGFQVFSLKGLRKISEEGVEFRSHLDGGKHFFSPEHSMGVQIALGADIMMAFDECVETPATWERTRESMGLTHRWAERSKAYFEEHKTEVPWFEARGGRTQSLFGIVQGGMYADLRKESAEKMVEIGFPGYAIGGLAVGEPREVTREMIARTLEHLPKDKPRYVMGVGYPDEIEEYARMGVDMMDCVLPTRAGRHGLLFARVDGRIERLNIKKKEFAEDQGPIDETCACMVCQRYTRAYLRHLYAAQEPLSAVLNSIHNLAFYLDTMERVRGDLA

SEQ ID NO: 55790 - protein, 379 aa, Granulicella rosea
  misc_feature (1)..(379): tr|A0A239DCI6|A0A239DCI6_9BACT Queuine tRNA-ribosyltran sferase OS=Granulicella rosea OX=474952 GN=tgt PE=3 SV= 1
MSLNFQLHNTTAPGGRRATLTLPHGPVETPVFMPVGTAATVKAVPQDVMERIGQNGTGARIILANTYHLYLRPGHELIREMGGVHKFMSWDRPMLTDSGGFQVFSLSKLRKISPEGVEFRSHLDGSKHFFSPEHSMKVQIALGADIMMVFDECVEHPATYERTRESLGLTHAWAARSKAYFDEHKHEVPWHEERGGQHQNLFGIVQGGMYADLRKESAERLVEMDFPGYAIGGLAVGEPREVTREMIARTLEWLPKDKPRYVMGVGYPDEIEEYARMGVDMMDCVLPTRAGRHGLVFTRNEDGAIERLNIKRTENARDPRPIDANCTCMVCARYTRAYLRHLFTSGEALSATLLSIHNLAFYLDTMTRVRADLAASPAV

SEQ ID NO: 55791 - protein, 378 aa, Granulicella sibirica
  misc_feature (1)..(378): tr|A0A4Q0T6Q1|A0A4Q0T6Q1_9BACT Queuine tRNA-ribosyltran sferase OS=Granulicella sibirica OX=2479048 GN=tgt PE=3 SV=1
MSLTFNIQNTTPEGGRRATLNLPHGPVETPVFMPVGTVASVKAVPQDILETNGAQGKGAQIILANTYHLYLRPGHELVRRMGGVHKFMSWNRPMLTDSGGFQVFSLKGLRKITPEGVEFRSHLDGSKHFFSPEHSISVQIALGADIIMAFDECVETPATWERTRESMGLTHAWAARSKDYFEAHKHEVPWHEAKSGATQNLFGIVQGGMYADLRRESAERLVEIGFPGYAIGGLAVGEPREVTREMIARTLEHLPADKPRYVMGVGYPDEIEEYARMGVDMMDCVLPTRAGRHGLLFARNPETGLIERMNIKKKEYAEDQGPIDPACTCQVCARYTRAYLRHLYSAQEPLSAVLNSIHNLAFYLDTMDRVRAACNSGN

SEQ ID NO: 55792 - protein, 370 aa, Granulicella sp.
  misc_feature (1)..(370): tr|A0A3N1JN78|A0A3N1JN78_9BACT Queuine tRNA-ribosyltran sferase OS=Granulicella sp. GAS466 OX=2485170 GN=tgt PE =3 SV=1
MSILFEIQKTAEGGGRRGVLALPHGAVQTPVFMPVGTAASVKAVEQGLLEELGANEKGAQIILANTYHLYLRPGHELVRRMGGVHRFMSWRRPMLTDSGGFQVFSLSKLRKITPDGVEFRSHLDGSKHFFSPEHSMDVQIALGADIAMVFDECVEHPASYERTRASMGLTHAWARRSKDHFESHKHLVPWHEELGGATQSLFGIVQGGMYADLRRESAERLVELDLPGYAIGGLAVGEPREVTREMIALTLEFLPKDKPRYVMGVGYPDEIEEYAKIGVDMMDCVLPTRAGRHGLLFTSKGRINIKKLEYAEDQGPIDAACRCMVCQRYTRAYLRHLFAAGEALAAVLNSVHNLAFYLDTMERVRGELAG

SEQ ID NO: 55793 - protein, 376 aa, Granulicella sp.; identical to SEQ ID NO: 51065
  misc_feature (1)..(376): tr|A0A1D2UFK2|A0A1D2UFK2_9BACT Queuine tRNA-ribosyltran sferase OS=Granulicella sp. SCN 62-9 OX=1660100 GN=tgt PE=3 SV=1

SEQ ID NO: 55794 - protein, 374 aa, Granulicella tundricola
  misc_feature (1)..(374): tr|E8X5L2|E8X5L2_GRATM Queuine tRNA-ribosyltransferase OS=Granulicella tundricola (strain ATCC BAA-1859 / DSM 23138 / MP5ACTX9) OX=1198114 GN=tgt PE=3 SV=1
MSLEFEVSRTAEGGGRRGRLALPHGVVETPVFMPVGTAATVKAVPQDTLEVLGKDGVGAQIILANTYHLYLRPGHELIRRMGGVHKFMSWTRPMLTDSGGFQVFSLSKLRKITPDGVEFRSHLDGSKHFFSPEHSMAVQIALGADVMMVFDECVEHPATYERTRESMGLTHAWAARSKDYFKAHKAEVPWHEELGGKTQSLFGIVQGGMYADLRRESAERLVEMDLPGYAIGGLAVGEPREVTREMIARTLEWLPKDKPRYVMGVGYPDEIEEYARMGVDMMDCVLPTRAGRHGLVFVRVDGVPVRLNIKKLEFAEDKGPIDPTCGCMVCSRYSRGYLRHLFASGEALAGTLLSVHNLAFYLDTMARVRAGLAG

SEQ ID NO: 55795 - protein, 371 aa, Granulosicoccus antarcticus
  misc_feature (1)..(371): tr|A0A2Z2P1P5|A0A2Z2P1P5_9GAMM Queuine tRNA-ribosyltran sferase OS=Granulosicoccus antarcticus IMCC3135 OX=1192 854 GN=tgt PE=3 SV=1
MNFSFDLLGTDGNARRGRLHFDRGTVETPAFMPVGTYGTVKSVTPEEIRSVGAEIILGNTFHLWLRPGTDIIKLHGDLHDFMHWSGPILTDSGGFQVFSLAKLRKIDESGVRFRSPIDGSEVFLSPEESMRIQTDLGSDIVMAFDECTPYPATHDQAATSMELSMRWARRCKDAFAELENPNALFGIVQGGMYEDLRKQSCDALVELDFPGYAVGGLAVGEEKSIRDSVLDTTLPHLPANRPRYLMGVGKPEDIVASVIRGIDMFDCVLPTRNARNDYIYTHKGDLRLRNARFRTDTQPIDSDCSCYTCQNYSRAYLYHLSKCSEILGSRLNTIHNLHYYQQLMQNIRQALDAGQMDQFTREFEIQRATGA

SEQ ID NO: 55796 - protein, 375 aa, Grimontella sp.
  misc_feature (1)..(375): tr|A0A318GDL5|A0A318GDL5_9GAMM Queuine tRNA-ribosyltran sferase OS=Grimontella sp. AG753 OX=2183905 GN=tgt PE=3 SV=1
MKFELDTTDGRARRGRLVFDRGVVETPAFMPVGTYGTVKGMTPEEVEATGAQIILGNTFHLWLRPGQEIMKLHGDLHDFMQWKGPILTDSGGFQVFSLGDIRKITEKGVHFRNPINGEPIFLDPEKSMEIQYDLGSDIVMIFDECTPYPADWDYAKRSMEMSLRWAKRSRDRFDSLENPNALFGIIQGSVYEDLRDISVKGLVEIGFDGYAVGGLAVGEPKADMHRILEHVCPQIPADKPRYLMGVGKPEDLVEGVRRGIDMFDCVMPTRNARNGHLFVTNGVVKIRNAKYKSDTGSLDPECDCYTCRNYSLAYLHHLDRCNEILGARLNTIHNLRYYQRLMAGLRKAIEEGKLESFVTDFYQRQGRDVPPLNVA

SEQ ID NO: 55797 - protein, 375 aa, Grimontia celer
  misc_feature (1)..(375): tr|A0A128ERQ0|A0A128ERQ0_9GAMM Queuine tRNA-ribosyltran sferase OS=Grimontia celer OX=1796497 GN=tgt PE=3 SV=1
MKYELIKKEGRARRGRLVFERGTVETPAFMPVGTYGTVKGMTPEEVADTGAQILLGNTFHLWLRPGQEIMRAHGDLHDFMNWQGPILTDSGGFQVFSLGAMRKITEEGVHFRNPVNGDKIFMDAEKSMEIQYDLGSDIVMIFDECTPYPATHEEAKKSMEMSLRWAQRSRNHFDKMGNKNALFGIVQGSVYEDLRDVSVEGLTNIGFDGYAVGGLAVGEPKEDMHRVLEHTCPKLPEDKPRYLMGVGKPEDLVEGVRRGIDMFDCVMPTRNARNGHLFVTGGVIKIRNAKHKSDTTALDPECDCYTCRNYSKAYLHHLDRCNEILGARLNTIHNLRYYQRLMESLRNAIDEGRLETFVKEFYERRGREVPPLKED

SEQ ID NO: 55798 - protein, 375 aa, Grimontia hollisae
  misc_feature (1)..(375): tr|A0A377HPY7|A0A377HPY7_GRIHO Queuine tRNA-ribosyltran sferase OS=Grimontia hollisae OX=673 GN=tgt PE=3 SV=1
MKFELIKKEGRARRGRLVFERGTVETPAFMPVGTYGTVKGMTPEEVADTGAQILLGNTFHLWLRPGQEVMRAHGDLHDFMNWQGPILTDSGGFQVFSLGKMRKITEEGVHFRNPVNGDKIFMDAEKSMEIQYDLGSDIVMIFDECTPYPATHEEAKKSMEMSLRWAQRSRNHFDKLGNKNALFGIVQGSVYEDLRDISVEGLTKIGFDGYAVGGLAVGEPKEDMHRVLEHTCPKLPEDKPRYLMGVGKPEDLVEGVRRGIDMFDCVMPTRNARNGHLFVTGGVIKIRNAKYKNDTTALDPECDCYTCRNYSKAYLHHLDRCNEILGARLNTIHNLRYYQRLMESLRNAIDEGRLETFVKEFYERRGREVPPLKED

SEQ ID NO: 55799 - protein, 375 aa, Grimontia hollisae
  misc_feature (1)..(375): tr|D0I7R5|D0I7R5_GRIHO Queuine tRNA-ribosyltransferase OS=Grimontia hollisae CIP 101886 OX=675812 GN=tgt PE=3 SV=1
MKFELIKKEGRARRGRLVFERGTVETPAFMPVGTYGTVKGMTPEEVADTGAQILLGNTFHLWLRPGQEVMRAHGDLHDFMNWQGPILTDSGGFQVFSLGKMRKITEEGVHFRNPVNGDKIFMDAEKSMEIQYDLGSDIVMIFDECTPYPATHEEAKKSMEMSLRWAQRSRSHFDKLGNKNALFGIVQGSVYEDLRDISVEGLTKIGFDGYAVGGLAVGEPKEDMHRVLEHTCPKLPEDKPRYLMGVGKPEDLVEGVRRGIDMFDCVMPTRNARNGHLFVTGGVIKIRNAKYKNDTTALDPECDCYTCRNYSKAYLHHLDRCNEILGARLNTIHNLRYYQRLMESLRNAIDEGRLETFVKEFYERRGREVPPLKED

SEQ ID NO: 55800 - protein, 375 aa, Grimontia indica
  misc_feature (1)..(375): tr|R1IZE2|R1IZE2_9GAMM Queuine tRNA-ribosyltransferase OS=Grimontia indica OX=1056512 GN=tgt PE=3 SV=1
MKYELIKKEGRARRGRLVFERGTVETPAFMPVGTYGTVKGMTPEEVADTGAQILLGNTFHLWLRPGQEVMRAHGDLHDFMNWQGPILTDSGGFQVFSLGAMRKITEEGVHFRNPVNGDKIFMDAEKSMEIQYDLGSDIVMIFDECTPYPATHEEAKKSMEMSLRWAQRSRNHFDKMGNKNALFGIVQGSVYEDLRDVSVEGLTNIGFDGYAVGGLAVGEPKEDMHRVLEHTCPKLPEDKPRYLMGVGKPEDLVEGVRRGIDMFDCVMPTRNARNGHLFVTGGVIKIRNAKHKSDTTALDPECDCYTCRNYSKAYLHHLDRCNEILGARLNTIHNLRYYQRLMESLRNAIDEGRLETFVKEFYERRGREVPPLKED

SEQ ID NO: 55801 - protein, 375 aa, Grimontia marina
  misc_feature (1)..(375): tr|A0A128F4N8|A0A128F4N8_9GAMM Queuine tRNA-ribosyltran sferase OS=Grimontia marina OX=646534 GN=tgt PE=3 SV=1
MKYELIKKEGRARRGRLVFERGTVETPAFMPVGTYGTVKGMTPEEVADTGAQILLGNTFHLWLRPGQEIMRAHGDLHDFMNWQGPILTDSGGFQVFSLGAMRKITEEGVHFRNPVNGDKIFMDAEKSMEIQYDLGSDIVMIFDECTPYPATHEEAKKSMEMSLRWAQRSRNHFDKMGNKNALFGIVQGSVYEDLRDVSVEGLTNIGFDGYAVGGLAVGEPKEDMHRVLEHTCPKLPEDKPRYLMGVGKPEDLVEGVRRGIDMFDCVMPTRNARNGHLFVTGGVIKIRNAKHKSDTTALDPECDCYTCCNYSKAYLHHLDRCNEILGARLNTIHNLRYYQRLMESLRNAIDEGRLEAFVKEFYERRGREVPPLKED

SEQ ID NO: 55802 - protein, 375 aa, Grimontia sp.; identical to SEQ ID NO: 55800
  misc_feature (1)..(375): tr|A0A0F6A322|A0A0F6A322_9GAMM Queuine tRNA-ribosyltran sferase OS=Grimontia sp. AD028 OX=1581149 GN=tgt PE=3 S V=1

SEQ ID NO: 55803 - protein, 371 aa, Gulbenkiania indica
  misc_feature (1)..(371): tr|A0A0K6H4L5|A0A0K6H4L5_9NEIS Queuine tRNA-ribosyltran sferase OS=Gulbenkiania indica OX=375574 GN=tgt PE=3 SV =1
MLKFTVHKTSGGARRGTLTLNHGTVETPVFQPVGTYGSVKAMSPLELEDIGAQIILGNTFHLWLRPGLEVIEAFGGLHDFIGWDRPILTDSGGFQVFSLGALNKISEEGVTFQSPVNGDRLFLSPEKSMEIQRTLNSDIVMIFDECTPGQVDHKRAAESMRMSLRWAERSRRAFDDLKNPNALFGIVQGNLYGDLRRESLDGLMDIGFDGIAIGGLSVGEPKPEMYRMLAELKDMLPAEKPHYLMGVGTPEDLVYGVANGVDMFDCVMPTRNARNGWIFTRWGDIKIKNARYKDDKRPLDETCGCYTCRHFSRAYLHHLHRVGEILGARLNTIHNLHYYQDLMRDIRSAIEADRFEDFRLTFAAERARGVN

SEQ ID NO: 55804 - protein, 381 aa, Guyparkeria sp.
  misc_feature (1)..(381): tr|A0A426QPB8|A0A426QPB8_9GAMM Queuine tRNA-ribosyltran sferase OS=Guyparkeria sp. SCN-R1 OX=2341113 GN=tgt PE= 3 SV=1
MKFELHECTRAKGDAERLAGPRRGQIRFARGVIDTPAFMPVGTYGTVKAVTPEELIDLGAQIVLGNTFHLMLRPGTDIIRLHGDLHDFMHWERPILTDSGGFQVFSLADMRKITEEGVRFASPVNGDRVMLTPESSMQVQHELGSDIQMIFDECTPYPATPEVAGASMRLSLRWAARSKTAFESLRPEGSDRALFGIVQGGMHEPLRRESAAGLVELGFDGYAVGGLSVGEPLEERNAVLEFTLPELPADRPRYLMGVGKPEDLVESVARGVDMFDCVMPTRNARNGHLFTRYGDVRLKNARYATDIRPLDEDCDCYTCRHYSRAYLKHLHRAREVLGARLCTIHNLHYYQVLMAEMRSAIEGDDFDGFRARFCSDRDRGV

SEQ ID NO: 55805 - protein, 377 aa, Gynuella sunshinyii
  misc_feature (1)..(377): tr|A0A0C5VMZ1|A0A0C5VMZ1_9GAMM Queuine tRNA-ribosyltran sferase OS=Gynuella sunshinyii YC6258 OX=1445510 GN=tgt PE=3 SV=1
MSRECFMKFEVKATVGKARRATLHFPRGKVETPAFMPVGTYGTVKGMLPKDIEEIGAHIILGNTFHLMLRPGTEVIREHGDLHDFNGWQRPILTDSGGFQVFSLGEMRKITEQGVTFQSPVNGARVELSPEISMQVQRDLGSDIVMIFDECTPYPATEKEARESMEMSLRWAKRSKEAHADNPAALFGIIQGGMYENLRMQSMNGLTEIDFDGYAIGGLSVGEPKEEMFKVLDYLPDRMPADKPRYLMGVGTPEDLVEGVRRGVDMFDCVMPTRNARNGHLFTSEGVVKIRNSKHRHDTSSLDPECDCYTCKNFSRAYLHHLDKCKEMLGAQLNTIHNLRYYQTLMAGLRGAIEEGNLSAFVDQFYQKRGANTPPLA

SEQ ID NO: 55806 - protein, 379 aa, Haematobacter genomosp.
  misc_feature (1)..(379): tr|A0A212A6Y7|A0A212A6Y7_9RHOB Queuine tRNA-ribosyltran sferase OS=Haematobacter genomosp. 1 OX=366618 GN=tgt P E=3 SV=1
MSETFGFTVAATDGKARTGVISTPRGEIRTPAFMPVGTAATVKAMMPESVAATGADILLGNTYHLMLRPTAERIDRLGGLHRFMNWDKPILTDSGGFQVMSLTALRKLNEDGVRFKSHIDGSEHWLTPERSMEIQRLLGSDIVMCFDECPALPATEAEVAKSMRLSMRWAQRSRDAFGDRPGHALFGIMQGGVTQELREESAGALKAIGFDGYAIGGLAVGEGQEAMFGVLDYAPGTLPEDKPRYLMGVGKPDDIVGAVVRGVDMMDCVLPSRSGRTGQAWTRRGQVNIKNARHQDDPRPLDEDCTCPACRNYSRAYLHHVFRAQEIISSMLLTWHNLHYYQELMAGLRAAISEGRLSDFVAAFEAQRAEGDIEPLTLT

SEQ ID NO: 55807 - protein, 379 aa, Haematobacter massiliensis
  misc_feature (1)..(379): tr|A0A086XW18|A0A086XW18_9RHOB Queuine tRNA-ribosyltran sferase OS=Haematobacter massiliensis OX=195105 GN=tgt PE=3 SV=1
MSETFGFRVAATDGKARTGVISTPRGEIRTPAFMPVGTAATVKAMMPESVAATGADILLGNTYHLMLRPTAERIDRLGGLHRFMNWDKPILTDSGGFQVMSLTALRKLNEEGVRFKSHIDGSEHWLTPERSMEIQRLLGSDIVMCFDECPALPATEAEVAKSMRLSMRWAQRSRDAFGDRPGHALFGIMQGGVTQELREESAEALKAIGFDGYAIGGLAVGEGQAAMFGVLDYAPQTLPEDKPRYLMGVGKPDDIVGAVVRGVDMMDCVLPSRSGRTGQAWTRRGQVNIKNARHQDDPRPLDEDCTCPACRNYSRAYLHHVFRAQEIISSMLLTWHNLHYYQELMAGLRGAISEGRLSDFVAAFEAQRSAGDIEPLTLT

SEQ ID NO: 55808 - protein, 379 aa, Haematobacter missouriensis
  misc_feature (1)..(379): tr|A0A212APL4|A0A212APL4_9RHOB Queuine tRNA-ribosyltran sferase OS=Haematobacter missouriensis OX=366616 GN=tgt PE=3 SV=1
MSETFGFTVAATDGKARTGVISTPRGEIRTPAFMPVGTAATVKAMMPESVAATGADILLGNTYHLMLRPTAERIDRLGGLHRFMNWDKPILTDSGGFQVMSLTALRKLNEEGVRFKSHIDGSEHWLTPERSMEIQRLLGSDIVMCFDECPALPATEAEVAKSMHLSMRWAQRSRDAFGDRPGHALFGIMQGGVTQELREESAEALKAIGFDGYAIGGLAVGEGQEAMFGVLDYAPGTLPQDKPRYLMGVGKPDDIVGAVVRGVDMMDCVLPSRSGRTGQAWTRRGQVNIKNARHQDDPRPLDEDCTCPACRNYSRAYLHHVFRAQEIISSMLLTWHNLHYYQELMAGLRAAISAGRLSDFVAAFEAQRAAGDIEPLSLT

SEQ ID NO: 55809 - protein, 381 aa, Haematospirillum jordaniae
  misc_feature (1)..(381): tr|A0A143DD21|A0A143DD21_9PROT Queuine tRNA-ribosyltran sferase OS=Haematospirillum jordaniae OX=1549855 GN=tgt PE=3 SV=1
MTAFSFSVLKTDGAARLGRIETAHGPVDTPTFMPVGTAGTVKGMLPESVASTGAQMILGNTYHLMLRPGADRVQSLGGLHQMMNWPGPILTDSGGFQVMSLAKLRKMTEDGVTFRSHIDGSSWTLTPEYSTDIQYKLDATVTMAFDECTPWPVDKKTAAHSMRLSMRWAVRSRSAFVPREGYGQFGIVQGSVFPDLRAESMARLREIDFEGYAVGGLAVGEGQELMFQTLDSTVPDMPVGKPRYLMGVGKPSDMVGAVARGIDMFDCVMPTRSGRTAQAFTRRGTVNLRNARHQDDPRPLEENCSCPACRQYTRAYLHHLIRAGEMLGPMLLTWHNIQHYQDIMKDLRSAIGQGTLSQYRTQFEASQALGDIEPLTVEKPE

SEQ ID NO: 55810 - protein, 382 aa, Haemophilus aegyptius
  misc_feature (1)..(382): tr|A0A3S5ERQ1|A0A3S5ERQ1_HAEAE Queuine tRNA-ribosyltran sferase OS=Haemophilus aegyptius OX=197575 GN=tgt PE=3 SV=1
MKYELDKTSGNARRGRLVFERPQGIFSVETPAFMPVGTYGTVKGMTPEEVRATGAEILLGNTFHLWLRPGQEIMRKHGDLHDFMQWHRPILTDSGGFQVFSLGKLRKITEEGVKFQNPINGERIFLSPEKSMEIQYDLGSDIVMIFDECTPYPATFDYAKKSMEMSLRWAKRSRDRFDELGNKNALFGIIQGGVFEELRKVSLEGLVNIGFDGYAVGGLAVGEPKEDMHRILEYICPQIPADKPRYLMGVGKPEDLVEGVRRGIDMFDCVMPTRNARNGHLFVTDGIVKIRNAKYRDDTSPLDPHCDCYTCKNYTKAYLYHLDKCGEILGARLNTIHNLRYYQRLMAEIRQAIEDDRFDDFVVEFYARMGKPVPPLQLADKS

SEQ ID NO: 55811 - protein, 381 aa, Haemophilus ducreyi
  misc_feature (1)..(381): tr|A0A448KJN3|A0A448KJN3_HAEDC Queuine tRNA-ribosyltran sferase OS=Haemophilus ducreyi OX=730 GN=tgt PE=3 SV=1
MKYELKSTSGMARRGRLTFSRPQGECYVETPAFMPVGTYGTVKGMTPEEVKATGAQILLGNTFHLWLRPGQEIMKMHGDLHDFMQWHGPILTDSGGFQVFSLGKLRKIKEEGVTFQNPISGEKIFLSPEKSMEIQYDLGSDIVMIFDECTPYPATFEYAKKSMEMSLRWAKRSRIRFDELANPRALFGIIQGSTYEELRRESVKGLINIGFDGYAVGGLAVGEPKEEMHRILEFTTPLLPQDKPRYLMGVGKPEDLVEGVRRGIDMFDCVMPTRNARNGHLFVSDGVVKIRNAKYKNDTTPLDAECDCYTCKNYTKAYLYHLDKCGEILGASLNTIHNLRYYQRLMVQIRQAIEQDCFDEFVVEFYAKIGKEVPPLHLKSE

SEQ ID NO: 55812 - protein, 382 aa, Haemophilus ducreyi
  misc_feature (1)..(382): sp|Q7VLQ4|TGT_HAEDU Queuine tRNA-ribosyltransferase OS= Haemophilus ducreyi (strain 35000HP / ATCC 700724) OX=2 33412 GN=tgt PE=3 SV=1
MMKYELKSTSGMARRGRLTFSRPQGECYVETPAFMPVGTYGTVKGMTPEEVKATGAQILLGNTFHLWLRPGQEIMKMHGDLHDFMQWHGPILTDSGGFQVLSLGKLRKIKEEGVTFQNPISGEKIFLSPEKSMEIQYDLGSDIVMIFDECTPYPATLEYAKKSMEMSLRWAKRSRTRFDELANPRALFGIVQGSTYEELRRESVKGLINIGFDGYAVGGLAVGEPKEEMHRILEFTTPLLPQDKPRYLMGVGKPEDLVEGVRRGIDMFDCVMPTRNARNGHLFVSDGVVKIRNAKYKNDTTPLDAECDCYTCKNYTKAYLYHLDKCGEILGARLNTIHNLRYYQRLMAQIRQAIEQDCFDEFVVEFYAKIGKEVPPLHLKSE

SEQ ID NO: 55813 - protein, 379 aa, [Haemophilus] felis
  misc_feature (1)..(379): tr|A0A1T0AWV1|A0A1T0AWV1_9PAST Queuine tRNA-ribosyltran sferase OS=[Haemophilus] felis OX=123822 GN=tgt PE=3 SV =1
MKYELDKTSGNARRGRLVFERPQGTFTVETPAFMPVGTYGTVKGMTPEEVRATGAEILLGNTFHLWLRPGQEVMRKHGDLHDFMQWHRPILTDSGGFQVFSLGKLRKITEEGVKFQNPINGERIFLSPEKSMEIQYDLGSDIVMIFDECTPYPATFDYAKKSMEMSLRWAKRSRDRFDELGNKNALFGIIQGGIYEELRKISVEGLVNIGFDGYAVGGLAVGEPKEDMHRILEYVCPQIPADKPRYLMGVGKPEDLVEGVRRGIDMFDCVMPTRNARNGHLFVSNGIVKIRNAKYRDDTSTLDPECDCYTCKNYTKAYLYHLDKCNEILGARLNTIHNLRYYQRLMAHIRQAIEEDRFEAFVQEFYAKIGKPVPPMQKA

SEQ ID NO: 55814 - protein, 376 aa, Haemophilus haemoglobinophilus
  misc_feature (1)..(376): tr|A0A1V4AZU9|A0A1V4AZU9_9PAST Queuine tRNA-ribosyltran sferase OS=Haemophilus haemoglobinophilus OX=733 GN=tgt PE=3 SV=1
MKFTLHKTNGVARRGTMTFSRPQGEFSVETPAFMPVGTYGTVKGMTPEEVRATGAEILLGNTFHLWLRPGQEVMRQHGDLHDFMQWHRPILTDSGGFQVFSLGKLRKITEEGVKFQNPINGERIFLSPEKSMEIQYDLGSDIVMIFDECTPYPATFDYAKKSMEMSLRWAKRSRDRFDELGNENALFGIVQGSTFEELRKISVEGLINIGFDGYAVGGLAVGEPKEDMHRILEYVCPQLPADKPRYLMSVGKPEDLVEGVRRGIDMFDCVMPTRNARNGHLFVSNGIVKIRNAKYRNDTTPLDPECDCYTCKNYTKAYLYHLDKCGEILGSRLNTIHNLRYYQRLMAQIRQAIEEDRFDDFVVEFYNKIGKPVPAL

SEQ ID NO: 55815 - protein, 382 aa, Haemophilus haemolyticus
  misc_feature (1)..(382): tr|A0A502JNZ8|A0A502JNZ8_HAEHA Queuine tRNA-ribosyltran sferase OS=Haemophilus haemolyticus OX=726 GN=tgt PE=3 SV=1
MKYELDKTSGNARRGRLVFERPQGTFSVETPAFMPVGTYGTVKGMTPEEVRATGAEILLGNTFHLWLRPGQEVMRKHGDLHDFMQWHRPILTDSGGFQVFSLGKLRKITEEGVKFQNPINGERIFLSPEKSMEIQYDLGSDIVMIFDECTPYPATFDYAKKSMEMSLRWAKRSRDRFDELGNKNALFGIIQGGVFEELRKVSLEGLVNIGFDGYAVGGLAVGEPKEDMHRILEYICSQIPTDKPRYLMGVGKPEDLVEGVRRGIDMFDCVMPTRNARNGHLFVTDGIVKIRNAKYRDDTSPLDPECDCYTCKNYTKAYLYHLDKCGEILGARLNTIHNLRYYQRLMAEIRQAIEEDRFDDFVVEFYARMGKPVPPLQLADKS

SEQ ID NO: 55816 - protein, 382 aa, Haemophilus haemolyticus
  misc_feature (1)..(382): tr|A0A0M3G954|A0A0M3G954_HAEHA Queuine tRNA-ribosyltran sferase OS=Haemophilus haemolyticus OX=726 GN=tgt PE=3 SV=1
MKYELDKTSGNARRGRLVFERPQGTFSVETPAFMPVGTYGTVKGMTPEEVRATGAEILLGNTFHLWLRPGQEVMRKHGDLHDFMQWHRPILTDSGGFQVFSLGKLRKITEEGVKFQNPINGERIFLSPEKSMEIQYDLGSDIVMIFDECTPYPATFDYAKKSMEMSLRWAKRSRDRFDELGNKNALFGIIQGGVFEELRKVSLEGLVNIGFDGYAVGGLAVGEPKEDMHRILEYICPQIPADKPRYLMGVGKPEDLVEGVRRGIDMFDCVMPTRNARNGHLFVTDGIVKIRNAKYRDDTSPLDPECDCYTCKNYTKAYLYHLDKCGEILGARLNTIHNLRYYQRLMAEIRQAIEDDRFDDFVVEFYARMGKPVPPLQLADKS

SEQ ID NO: 55817 - protein, 382 aa, Haemophilus influenzae; identical to SEQ ID NO: 55816
  misc_feature (1)..(382): sp|P44594|TGT_HAEIN Queuine tRNA-ribosyltransferase OS= Haemophilus influenzae (strain ATCC 51907 / DSM 11121 / KW20 / Rd) OX=71421 GN=tgt PE=3 SV=1

SEQ ID NO: 55818 - protein, 382 aa, Haemophilus influenzae
  misc_feature (1)..(382): sp|A5UG47|TGT_HAEIG Queuine tRNA-ribosyltransferase OS= Haemophilus influenzae (strain PittGG) OX=374931 GN=tgt PE=3 SV=1
MKYELDKTSGNARRGRLVFERPQGTFSVETPAFMPVGTYGTVKGMTPEEVRATGAEILLGNTFHLWLRPGQEIMRKHGDLHDFMQWHRPILTDSGGFQVFSLGKLRKITEEGVKFQNPINGERIFLSPEKSMEIQYDLGSDIVMIFDECTPYPATFDYAKKSMEMSLRWAKRSRARFDELGNKNALFGIIQGGVFEELRKVSLEGLVNIGFDGYAVGGLAVGEPKEDMHRILEYICPQIPADKPRYLMGVGKPEDLVEGVRRGIDMFDCVMPTRNARNGHLFVTDGIVKIRNAKYRDDTSPLDPECDCYTCKNYTKAYLYHLDKCGEILGARLNTIHNLRYYQRLMAEIRQAIEDDRFDDFVVEFYARMGKPVPPLQLADKS

SEQ ID NO: 55819 - protein, 382 aa, Haemophilus paracuniculus
  misc_feature (1)..(382): tr|A0A1T0AR50|A0A1T0AR50_9PAST Queuine tRNA-ribosyltran sferase OS=Haemophilus paracuniculus OX=734 GN=tgt PE=3 SV=1
MKYELLTQSGNARRGRLTFSRPKGEYTVETPAFMPVGTYGTVKGMTPEEVAQTGAEILLGNTFHLWLRPGQEIMRQHGDLHDFMQWHGPILTDSGGFQVFSLGKLRKIKEEGVTFQNPISGEKIFLSPEKSMEIQYDLGSDIVMIFDECTPYPATFDYAKQSMEMSLRWAKRSRDRFDELQNPNALFGIIQGGVYEELRKVSVEKLVEIGFDGYAVGGLAVGEPKEDMHRILEYVCPQIPADKPRYLMGVGKPEDLVEGVRRGIDMFDCVMPTRNARNGHLFVSNGIVKIRNAKYRNDLSPLDPECDCYTCKNYTKAYLYHLDKCGEILGARLNTIHNLRYYQRLMAQIREAIEQDRFDQFVIEFYQKIGKEVPPLQSEIND

SEQ ID NO: 55820 - protein, 382 aa, Haemophilus parahaemolyticus
  misc_feature (1)..(382): tr|A0A369ZLE3|A0A369ZLE3_HAEPH Queuine tRNA-ribosyltran sferase OS=Haemophilus parahaemolyticus OX=735 GN=tgt P E=3 SV=1
MQYELKKTNGNARRGRLTFSRPKGEFHVETPAFMPVGTYGTVKGMTPEEVAATGAQILLGNTFHLWLRPGQEIMKMHGDLHDFMQWHGPILTDSGGFQVFSLGKLRKIKEEGVTFQNPINGEKIFLSPEKSMEIQYDLGSDIVMIFDECTPYPATFDYAKKSMEMSLRWAKRSRDRFDELENPRALFGIVQGGTYEELRKISAEGLVNIGFDGYAVGGLAVGEPKEEMHRILEFTTPLLPADKPRYLMGVGKPEDLVEGVRRGIDMFDCVMPTRNARNGHLFVSDGVVKIRNAKYKSDTSPLDPECDCYTCKNYTKAYLYHLDKCGEILGARLNTIHNLRYYQRLMAQIRQAIDEDRFDDFVVEFYAKIGKEVPPMQKEQAE

SEQ ID NO: 55821 - protein, 382 aa, Haemophilus parahaemolyticus
  misc_feature (1)..(382): tr|A0A5C1QQD7|A0A5C1QQD7_HAEPH Queuine tRNA-ribosyltran sferase OS=Haemophilus parahaemolyticus OX=735 GN=tgt P E=3 SV=1
MQYELKKTNGNARRGRLTFSRPKGEFYVETPAFMPVGTYGTVKGMTPEEVAATGAQILLGNTFHLWLRPGQEIMKMHGDLHDFMQWHGPILTDSGGFQVFSLGKLRKIKEEGVTFQNPINGEKIFLSPEKSMEIQYDLGSDIVMIFDECTPYPATFDYAKKSMEMSLRWAKRSRDRFDELENPRALFGIVQGGTYEELRKISAEGLVNIGFDGYAVGGLAVGEPKEEMHRILEFTTPLLPADKPRYLMGVGKPEDLVEGVRRGIDMFDCVMPTRNARNGHLFVSDGVVKIRNAKYKSDTSPLDPECDCYTCKNYTKAYLYHLDKCGEILGARLNTIHNLRYYQRLMAQIRQAIDEDRFDNFVVEFYAKIGKEVPPMQKEQAE

SEQ ID NO: 55822 - protein, 382 aa, Haemophilus parainfluenzae
  misc_feature (1)..(382): tr|A0A1B8T4L4|A0A1B8T4L4_HAEPA Queuine tRNA-ribosyltran sferase OS=Haemophilus parainfluenzae OX=729 GN=tgt PE= 3 SV=1
MKYELDKTSGSARRGRLVFERPQGTFTVETPAFMPVGTYGTVKGMTPEEVRATGAEILLGNTFHLWLRPGQEVMRKHGDLHDFMQWHRPILTDSGGFQVFSLGKLRKITEEGVKFQNPINGERIFLSPEKSMEIQYDLGSDIVMIFDECTPYPATFDYAKKSMEMSLRWAKRSRDRFDELGNKNALFGIIQGGVFEELRKVSLEGLVDIGFDGYAVGGLAVGEPKEDMHRILEYICPQIPADKPRYLMGVGKPEDLVEGVRRGIDMFDCVMPTRNARNGHLFVTDGIVKIRNAKYRDDTSPLDPECDCYTCKNYTKAYLYHLDKCGEILGARLNTIHNLRYYQRLMAEIRQAIEDDRFNDFVVEFYARMGKPVPPLQLADKS

SEQ ID NO: 55823 - protein, 382 aa, Haemophilus parainfluenzae
  misc_feature (1)..(382): tr|F0ES62|F0ES62_HAEPA Queuine tRNA-ribosyltransferase OS=Haemophilus parainfluenzae ATCC 33392 OX=888828 GN=t gt PE=3 SV=1
MKYELDKTSGSARRGRLVFERPQGTFSVETPAFMPVGTYGTVKGMTPEEVRATGAEILLGNTFHLWLRPGQEVMRKHGDLHDFMQWHRPILTDSGGFQVFSLGKLRKITEEGVKFQNPINGERIFLSPEKSMEIQYDLGSDIVMIFDECTPYPATFDYAKKSMEMSLRWAKRSRDRFDELGNKNALFGIIQGGVFEELRKVSLEGLVNIGFDGYAVGGLAVGEPKEDMHRILEYICPQIPADKPRYLMGVGKPEDLVEGVRRGIDMFDCVMPTRNARNGHLFVTDGIVKIRNAKYRDDTSPLDPECDCYTCKNYTKAYLYHLDKCGEILGARLNTIHNLRYYQRLMAEIRQAIEDDRFDDFVVEFYARMGKPVPPLQLADKS

SEQ ID NO: 55824 - protein, 379 aa, Haemophilus paraphrohaemolyticus
  misc_feature (1)..(379): tr|A0A369ZME5|A0A369ZME5_9PAST Queuine tRNA-ribosyltran sferase OS=Haemophilus paraphrohaemolyticus OX=736 GN=t gt PE=3 SV=1
MKYELKKTSGNARRGRLTFARPKGEFHVETPAFMPVGTYGTVKGMTPEEVEETGAQILLGNTFHLWLRPGQEIMKMHGDLHDFMQWHGPILTDSGGFQVFSLGKLRKIKEEGVTFQNPINGEKIFLSPEKSIEIQYDLGSDIVMIFDECTPYPATFDYAKKSMEMSLRWAKRSRDRFDELENPRALFGIVQGGTYEELRKISAEGLVNIGFDGYAVGGLAVGEPKEEMHRILEFTTPLLPADKPRYLMGVGKPEDLVEGVRRGIDMFDCVMPTRNARNGHLFVSDGVVKIRNAKYKSDTSPLDPECDCYTCKNYTKAYLYHLDKCGEILGSRLNTIHNLRYYQRLMAHIRQAIDEDRFDDFVVEFYAKIGKDVPPMQKA

SEQ ID NO: 55825 - protein, 379 aa, Haemophilus paraphrohaemolyticus
  misc_feature (1)..(379): tr|I2NFS9|I2NFS9_9PAST Queuine tRNA-ribosyltransferase OS=Haemophilus paraphrohaemolyticus HK411 OX=1095743 GN =tgt PE=3 SV=1
MQYELKKTNGNARRGRLTFSRPKGEFHVETPAFMPVGTYGTVKGMTPEEVAATGAQILLGNTFHLWLRPGQEIMKMHGDLHDFMQWHGPILTDSGGFQVFSLGKLRKIKEEGVTFQNPINGEKIFLSPEKSMEIQYDLGSDIVMIFDECTPYPATFDYAKKSMEMSLRWAKRSRDRFDELENPRALFGIVQGGTYEELRKISAEGLVNIGFDGYAVGGLAVGEPKEEMHRILEFTTPLLPADKPRYLMGVGKPEDLVEGVRRGIDMFDCVMPTRNARNGHLFVSDGVVKIRNAKYKSDTSPLDPECDCYTCKNYTKAYLYHLDKCGEILGARLNTIHNLRYYQRLMAHIRQAIDEDRFDDFVVEFYAKIGKEVPPMQKA

SEQ ID NO: 55826 - protein, 385 aa, Haemophilus parasuis; identical to SEQ ID NO: 55681
  misc_feature (1)..(385): sp|B8F3W0|TGT_HAEPS Queuine tRNA-ribosyltransferase OS= Haemophilus parasuis serovar 5 (strain SH0165) OX=55772 3 GN=tgt PE=3 SV=1

SEQ ID NO: 55827 - protein, 385 aa, Haemophilus parasuis
  misc_feature (1)..(385): tr|A0A084EZL0|A0A084EZL0_HAEPR Queuine tRNA-ribosyltran sferase OS=Haemophilus parasuis OX=738 GN=tgt PE=3 SV=1
MKYELKKTNGNARRGRLTFSRPKGEYHVETPAFMPVGTYGTVKGMTPEEVAQTGAQILLGNTFHLWLRPGQEIMRQHGDLHDFMQWHGPILTDSGGFQVFSLGKLRKIKEEGVYFQNPISGEKVFLSPEKSMEIQHDLGSDIVMIFDECTPYPATFDYAKQSMEMSLRWAKRSRDRFDELQNPNALFGIIQGGVYEELRKVSVEKLVEIGFDGYAVGGLAVGEPKEDMHRILEYVCPQIPADKPRYLMGVGKPEDLVEGVRRGIDMFDCVMPTRNARNGHLFVTNGIVKIRNAKYRNDISPLDPECDCYTCKNYTKAYLYHLDKCGEILGARLNTIHNLRYYQRLMAEIRQAIDEDRFDDFVVEFYQRIGKEVPPLQLAKEGENA

SEQ ID NO: 55828 - protein, 382 aa, Haemophilus pittmaniae
  misc_feature (1)..(382): tr|F9QBE2|F9QBE2_9PAST Queuine tRNA-ribosyltransferase OS=Haemophilus pittmaniae HK 85 OX=1035188 GN=tgt PE=3 SV=1
MKYELDKTSGSARRGRLVFERPQGTFSVETPAFMPVGTYGTVKGMTPEEVRATGAEILLGNTFHLWLRPGQEVMRKHGDLHDFMQWHRPILTDSGGFQVFSLGKLRKITEEGVKFQNPINGERIFLSPEKSMEIQYDLGSDIVMIFDECTPYPATFDYAKKSMEMSLRWAKRSRDRFDELGNKNALFGIIQGGVFEELRKVSLEGLVNIGFDGYAVGGLAVGEPKEDMHRILEYICPQIPADKPRYLMGVGKPEDLVEGVRRGIDMFDCVMPTRNARNGHLFVTDGIVKIRNAKYRDDTSPLDPECDCYTCKNYTKAYLYHLDKCGEILGARLNTIHNLRYYQRLMAEIRQAIEDDRFDDFVVEFYARIGKPVPPLQLAQES

SEQ ID NO: 55829 - protein, 382 aa, Haemophilus pittmaniae; identical to SEQ ID NO: 55828
  misc_feature (1)..(382): tr|A0A377J119|A0A377J119_9PAST Queuine tRNA-ribosyltran sferase OS=Haemophilus pittmaniae OX=249188 GN=tgt PE=3 SV=1

SEQ ID NO: 55830 - protein, 376 aa, Haemophilus somnus
  misc_feature (1)..(376): sp|Q0I4R8|TGT_HAES1 Queuine tRNA-ribosyltransferase OS= Haemophilus somnus (strain 129Pt) OX=205914 GN=tgt PE=3 SV=1
MKFTLHKTNGMARRGTMTFNRPQGEFTVETPAFMPVGTYGTVKGMTPEEVRVTGAEILLGNTFHLWLRPGQEIMRQHGDLHDFMQWHRPILTDSGGFQVFSLGKLRKITEEGVKFQNPINGERIFLSPEKSMEIQYDLGSDIVMIFDECTPYPATFDYAKKSMEMSLRWAKRSRERFDELGNKNALFGIVQGSTFEDLRKLSIEGLINIGFDGYAVGGLAVGEPKEDMHRILAYVCPQLPADKPRYLMGVGKPEDLVEGVRRGIDMFDCVMPTRNARNGHLFVSNGIVKIRNAKYRNDTTSLDPECDCYTCKHYTKAYLYHLDKCGEILGARLNTIHNLHYYQRLMAQIRQAIEEDRFEDFVVEFYKKIGKSVPTR

SEQ ID NO: 55831 - protein, 382 aa, Haemophilus sp.
  misc_feature (1)..(382): tr|A0A1S1FT34|A0A1S1FT34_9PAST Queuine tRNA-ribosyltran sferase OS=Haemophilus sp. HMSC61B11 OX=1608882 GN=tgt PE=3 SV=1
MKYELDKTSGSARRGRLVFERPQGTFSVETPAFMPVGTYGTVKGMTPEEVRATGAEILLGNTFHLWLRPGQEVMRKHGDLHDFMQWHRPILTDSGGFQVFSLGKLRKITEEGVKFQNPINGERIFLSPEKSMEIQYDLGSDIVMIFDECTPYPATFDYAKKSMEMSLRWAKRSRDRFDELGNKNALFGIIQGGVFEELRKVSLEGLVNIGFDGYAVGGLAVGEPKEDMHRILEYICPQIPADKPRYLMGVGKPEDLVEGVRRGIDMFDCVMPTRNARNGHLFVTDGIVKIRNAKYRDDTSPLDPECDCYTCKNYTKAYLYHLDKCGEILGARLNTIHNLRYYQRLMAEIRQAIEDDRFDDFVVEFYARMGKPVPPLQLADNS

SEQ ID NO: 55832 - protein, 382 aa, Haemophilus sp.
  misc_feature (1)..(382): tr|A0A1F0UD20|A0A1F0UD20_9PAST Queuine tRNA-ribosyltran sferase OS=Haemophilus sp. HMSC073C03 OX=1739452 GN=tgt PE=3 SV=1
MKYELDKTSGNARRGRLVFERPQGTFSVETPAFMPVGTYGTVKGMTPEEVRATGAEILLGNTFHLWLRPGQDVMRKHGDLHDFMQWHRPILTDSGGFQVFSLGKLRKITEDGVKFQNPINGERIFLSPEKSMEIQYDLGSDIVMIFDECTPYPATFDYAKKSMEMSLRWAKRSRDRFDELGNKNALFGIIQGGVFEELRKVSLEGLVNIGFDGYAVGGLAVGEPKEDMHRILEYICPQIPADKPRYLMGVGKPEDLVEGVRRGIDMFDCVMPTRNARNGHLFVTDGIVKIRNAKYRDDTSPLDPECDCYTCKNYTKAYLYHLDKCGEILGARLNTIHNLRYYQRLMAEIRQAIEDDRFDDFVVEFYARMGKPVPPLQLSDKS

SEQ ID NO: 55833 - protein, 379 aa, Haemophilus sputorum
  misc_feature (1)..(379): tr|J5HRU5|J5HRU5_9PAST Queuine tRNA-ribosyltransferase OS=Haemophilus sputorum HK 2154 OX=1078483 GN=tgt PE=3 SV=1
MKYELKKTNGNARRGRLIFSRPKGEYVVETPAFMPVGTYGTVKGMTPEEVAATGAQILLGNTFHLWLRPGQEVMKMHGDLHDFMQWHGPILTDSGGFQVFSLGKLRKIKEEGVTFQNPISGEKIFLSPEKSMEIQYDLGSDIVMIFDECTPYPATFDYAKKSMEMSLRWAKRSRDRFDELENPRALFGIVQGGTFEELRKVSVEGLVNIGFDGYAVGGLAVGEPKEEMHRILEFTTPLLPQDKPRYLMGVGKPEDLVEGVRRGIDMFDCVMPTRNARNGHLFVSDGVVKIRNAKYKNDTSTLDPECDCYTCKNYTKAYLYHLDKCGEILGARLNTIHNLRYYQRLMAQIRQAIEEDRFNDFVVEFYAKIGKEVPPMQKA

SEQ ID NO: 55834 - protein, 379 aa, Haemophilus sputorum
  misc_feature (1)..(379): tr|A0A369YE70|A0A369YE70_9PAST Queuine tRNA-ribosyltran sferase OS=Haemophilus sputorum OX=1078480 GN=tgt PE=3 SV=1
MKYELKKTNGNARRGRLIFSRPKGEYVVETPAFMPVGTYGTVKGMTPEEVAATGAQILLGNTFHLWLRPGQEVMKMHGDLHDFMQWHGPILTDSGGFQVFSLGKLRKIKEEGVTFQNPISGEKIFLSPEKSMEIQYDLGSDIVMIFDECTPYPATFDYAKKSMEMSLRWAKRSRDRFDELENPRALFGIVQGGTFEELRKVSVEGLVNIGFDGYAVGGLAVGEPKEEMHRILEFTTPLLPQDKPRYLMGVGKPEDLVEGVRRGIDMFDCVMPTRNARNGHLFVSDGVVKIRNAKYKNDTSTLDPECDCYTCKNYTKAYLYHLDKCGEILGARLNTIHNLRYYQRLMAQIRQAIEEDRFDDFVVEFYAKIGKEVPPMQKA

SEQ ID NO: 55835 - protein, 375 aa, Hafnia alvei
  misc_feature (1)..(375): tr|A0A2J9HFV7|A0A2J9HFV7_HAFAL Queuine tRNA-ribosyltran sferase OS=Hafnia alvei OX=569 GN=tgt PE=3 SV=1
MKYELDTTDGRARRGRLIFERGVVETPAFMPVGTYGTVKGMTPEEVKETGAQILLGNTFHLWLRPGQEIMKLHGDLHDFMQWKGPILTDSGGFQVFSLGKMRKIKEEGVHFRHPINGSPIFLSPEKSMEIQYDLGSDIVMIFDECTPYPADWDYAKSSMEMSLRWAKRSRQRFDELGNKNSLFGIIQGGVYEDLRDVSLKGLVDIGFDGYAVGGLAVGEPKEDMHRILEHVCPQIPEDKPRYLMGVGKPEDLVEGVRRGIDMFDCVMPTRNARNGHLFVTNGIVKIRNAQYKDDVTTLDAECDCYTCRNYSRAYLHHLDRCNEILGARLNTIHNLRYYQRLMAGLRQAIEDGKLDEFVADFYGRQGKPVPPVGAE

SEQ ID NO: 55836 - protein, 375 aa, Hafnia alvei
  misc_feature (1)..(375): tr|A0A1C6YZR0|A0A1C6YZR0_HAFAL Queuine tRNA-ribosyltran sferase OS=Hafnia alvei OX=569 GN=tgt PE=3 SV=1
MKYELDTTDGRARRGRLIFDRGVVETPAFMPVGTYGTVKGMTPEEVKETGAQILLGNTFHLWLRPGQEIMKLHGDLHDFMQWKGPILTDSGGFQVFSLGKMRKIKEEGVHFRHPINGSPIFLSPEKSMEIQYDLGSDIVMIFDECTPYPADWDYAKSSMEMSLRWAKRSRQRFDELGNKNSLFGIIQGGVYEDLRDVSLKGLVDIGFDGYAVGGLAVGEPKEDMHRILEHVCPQIPEDKPRYLMGVGKPEDLVEGVRRGIDMFDCVMPTRNARNGHLFVTNGIVKIRNAQYKDDVTTLDAECDCYTCRNYSRAYLHHLDRCNEILGARLNTIHNLRYYQRLMAGLRQAIEDGKLDEFVADFYGRQGKPVPPVGAK

SEQ ID NO: 55837 - protein, 375 aa, Hafnia paralvei
  misc_feature (1)..(375): tr|A0A4S1D0R3|A0A4S1D0R3_9GAMM Queuine tRNA-ribosyltran sferase OS=Hafnia paralvei OX=546367 GN=tgt PE=3 SV=1
MKYELDTTDGRARRGRLIFDRGVVETPAFMPVGTYGTVKGMTPEEVKETGAQILLGNTFHLWLRPGQEIMKLHGDLHDFMQWKGPILTDSGGFQVFSLGKMRKIKEEGVHFRHPINGSPIFLSPEKSMEIQYDLGSDIVMIFDECTPYPADWDYAKSSMEMSLRWAKRSRQRFDELGNKNALFGIIQGGVYEDLRDVSLKGLVEIGFDGYAVGGLAVGEPKEDMHRILEHVCPQIPEDKPRYLMGVGKPEDLVEGVRRGIDMFDCVMPTRNARNGHLFVTNGIVKIRNAQYKDDTTTLDAECDCYTCRNYSRAYLHHLDRCNEILGARLNTIHNLRYYQRLMAGLRQAIEDGKLEEFVADFYGRQGKPVPPVGAK

SEQ ID NO: 55838 - protein, 375 aa, Hafnia paralvei
  misc_feature (1)..(375): tr|A0A2A2M795|A0A2A2M795_9GAMM Queuine tRNA-ribosyltran sferase OS=Hafnia paralvei OX=546367 GN=tgt PE=3 SV=1
MKYELDTTDGRARRGRLIFDRGVVETPAFMPVGTYGTVKGMTPEEVKETGAQILLGNTFHLWLRPGQEIMKLHGDLHDFMQWKGPILTDSGGFQVFSLGKMRKIKEEGVHFRHPINGSPIFLSPEKSMEIQYDLGSDIVMIFDECTPYPADWDYAKSSMEMSLRWAKRSRQRFDELGNKNALFGIIQGGVYEDLRDVSLKGLVEIGFDGYAVGGLAVGEPKEDMHRILEHVCPQISEDKPRYLMGVGKPEDLVEGVRRGIDMFDCVMPTRNARNGHLFVTNGIVKIRNAQYKDDTTTLDAECDCYTCRNYSRAYLHHLDRCNEILGARLNTIHNLRYYQRLMAGLRQAIEDGKLEEFVADFYGRQGKPVPPVGAK

SEQ ID NO: 55839 - protein, 375 aa, Hahella chejuensis
  misc_feature (1)..(375): tr|Q2SDV1|Q2SDV1_HAHCH Queuine tRNA-ribosyltransferase OS=Hahella chejuensis (strain KCTC 2396) OX=349521 GN=t gt PE=3 SV=1
MSRTCHMQFEIDNADGKARRGRLKFPRGVVETPAFMPVGTYGTVKSMTPRDIKDIGAHIILGNTFHLMLRPGTEIIRQHGDLHDFMQWDGPILTDSGGFQVFSLGDLRKITEEGVKFKSPIDGSPIFMDPERSMQVQRDLGSDIVMIFDECTPYPATETEAADSMRLSLRWAKRSKLAHGNSPSALFGIVQGGMYPHLREESLAGLTEIGFDGYAIGGLSVGEPKDEMMKVLDYLPPAMPEDKPRYLMGVGKPEDIVEAVLRGVDMFDCVMPTRNARNAHLFTSYGVLKLRNSRYRTDTRPLDENCDCYTCRNFSRSYLHHLDRCGEMLGAQLNTIHNLRYYQNLMSGLRHAIEQSKLCDFVADFYHRQEQGIPA

SEQ ID NO: 55840 - protein, 369 aa, Hahella sp.
  misc_feature (1)..(369): tr|A0A3T0VW84|A0A3T0VW84_9GAMM Queuine tRNA-ribosyltran sferase OS=Hahella sp. KA22 OX=1628392 GN=tgt PE=3 SV=1
MQFEIDNADGKARRGRLKFPRGVVETPAFMPVGTYGTVKSMTPRDIKDIGAHIILGNTFHLMLRPGTEIIRQHGDLHDFMQWDGPILTDSGGFQVFSLGDLRKITEEGVKFKSPIDGSPIFMDPERSMQVQRDLGSDIVMIFDECTPYPATEKEAADSMRLSLRWAKRSKLAHGNSPSALFGIVQGGMYPHLREESLAGLTEIGFDGYAIGGLSVGEPKDEMIKVLDYLPPAMPEDKPRYLMGVGKPEDIVEAVLRGVDMFDCVMPTRNARNAHLFTSFGVLKLRNSRYRADTRPLDENCDCYTCRNFSRSYLHHLDRCGEMLGAQLNTIHNLRYYQNLMSGLRHAIERSKLCDFVADFYHRQEQGIPA

SEQ ID NO: 55841 - protein, 375 aa, Hahella sp.
  misc_feature (1)..(375): tr|A0A261GQM9|A0A261GQM9_9GAMM Queuine tRNA-ribosyltran sferase OS=Hahella sp. CCB-MM4 OX=1926491 GN=tgt PE=3 S V=1
MSRTCFMKFDVSTTDGKARRGRLTFPRGVVETPAFMPVGTYGTVKGMTPRDIKEIGAHIILGNTFHLWLRPGTEIMREHGDLHDFMQWQGPILTDSGGFQVFSLGDIRKITEEGVKFKSPIDGSTIFMDPEKSMEVQRALGSDIVMIFDECTPFPATETEAAQSMRLSLRWAKRSKDAHGDSPSALFGIVQGGMYENLRYESLDGLQKIGFDGYAIGGLSVGEPKEEMIKVLDYLPEKMPADKPRYLMGVGKPEDLVEGVLRGVDMFDCVMPTRNARNGHLFTSHGVVKIRNSRYKNDTRPLDPECDCYTCQTFTRGYLYHLDKCGEMLGAHLNTIHNLRYYQNLMSGLRQAIEEGKLSAFVEQFYQKQEAGIPA

SEQ ID NO: 55842 - protein, 374 aa, Hahellaceae bacterium
  misc_feature (1)..(374): tr|A0A2D8RDW0|A0A2D8RDW0_9GAMM Queuine tRNA-ribosyltran sferase OS=Hahellaceae bacterium OX=2048971 GN=tgt PE=3 SV=1
MKFEVSASCESPRGHTARRGVLSFPRGDIQTPAFMPVGTYGTVKGMLPRDILETGADIILGNTFHLWLRPGTEVVKRFGSLHEFMQWPKPILTDSGGFQVFSLGKLRKITEAGVAFRSPLDGSQVFLDPETSIGIQHDLGADIVMIFDECTPYPATHDEAEQSMQLSLRWAARSRAAHGDNASALFGIVQGGMYADLRAQSLKGLEAIGFDGYAIGGLSVGEPKDEMIGVLDYLPSQLPADKPRYLMGVGKPEDIVEAVCRGVDMFDCVMPTRNARNGHLFTDAGVVKIRNSRYRSDDRPLDPNCDCHTCRHFSRAYLHHLDRCGEILGSQLNTIHNLRHYQRLMDGLRGAIEAGTLSAFVSSFYARLAAGLPD

SEQ ID NO: 55843 - protein, 378 aa, Halalkalibacillus sp.
  misc_feature (1)..(378): tr|A0A2I0QXP5|A0A2I0QXP5_9BACI Queuine tRNA-ribosyltran sferase OS=Halalkalibacillus sp. B3227 OX=2018042 GN=tg t PE=3 SV=1
MAISYEHIKTCKQTGARLGRVHTPHGSFDTPVFMPVGTLATVKTMAPEELKEMGANMILSNTYHLWLRPGEDIIEEAGGLHKFMNWDGSILTDSGGFQVFSLSDMRKIKEEGVHFRNHLNGEKLFLSPEKAMHIQNSLGSDIMMAFDECPPYPASYEYMKSSVERTSRWAERCLEAHQKPDSQGLFGIVQGGEYEELRKQSAKDLVSMDFPGYAIGGLSVGEPKDVMNRVLEFTTPILPSDKARYLMGVGSPDSLIDGAIRGIDMFDCVLPTRIARNGTCMTSNGRLVVRNAKFARDFTPLDENCDCYTCRNYTKAYIRHLIKTNETLGLRLTTYHNLYFLVKLMEDVRQAIREDRLGDFRDEFFERYGFNKPNAKNF

SEQ ID NO: 55844 - protein, 370 aa, Halanaerobium congolense
  misc_feature (1)..(370): tr|A0A1G8NQQ2|A0A1G8NQQ2_9FIRM Queuine tRNA-ribosyltran sferase OS=Halanaerobium congolense OX=54121 GN=tgt PE= 3 SV=1
MFDFELRKENKKSEARLGEITTDHGKIETPIFMPVGTQATVKAMSSRELKEIGSQIILGNTYHLYLRPGDELIAKAGGLHRFMNWDRPILTDSGGFQVFSLANLREIEEEGVYFQSHLDGSKHFISPEKSMQIQQNLGSDIVMAFDECPPYPAEKEYVENSLNRTLRWAERCKKEMESAEGQALFGIIQGGVYPELRQQSVEETTKLDFPGYSIGGLSVGEPKEKMYKMLEHTTPLMPKDKPRYLMGVGTPEDLIEGIYHGIDMFDCVMPTRIARHGQIFTHVGRKTIRNATYKEDFSPLDSECDCHVCQNYSRGYVRHLLKRNEILGVRLTTYHNLYFMLKLSEEIREAINNDNFINFREEFYSKYELK

SEQ ID NO: 55845 - protein, 370 aa, Halanaerobium congolense
  misc_feature (1)..(370): tr|A0A1G6PLC1|A0A1G6PLC1_9FIRM Queuine tRNA-ribosyltran sferase OS=Halanaerobium congolense OX=54121 GN=tgt PE= 3 SV=1
MFDFELRKENKKSEARLGEITTDHGKIETPIFMPVGTQATVKAMSSRELKEIGSQIILGNTYHLYLRPGDELIAKAGGLHRFMNWDRPILTDSGGFQVFSLANLREIEEEGVYFQSHLDGSKHFISPEKSMQIQQNLGSDIVMAFDECPPYPAEKEYVENSLNRTLRWAERCKKEMESAEGQALFGIIQGGVYPELRQQSVEETTKLDFPGYSIGGLSVGEPKEKMYKMLEHTTPLMPKDKPRYLMGVGTPEDLIEGIYHGIDMFDCVMPTRIARHGQIFTHVGRKTIRNATYKEDFSPLDSECDCHVCQNYSRGYVRHLLKRNEILGVRLTTYHNLYFMLKLSEEIREAISNDNFINFREKFYSKYELK

SEQ ID NO: 55846 - protein, 369 aa, Halanaerobium hydrogeniformans
  misc_feature (1)..(369): tr|E4RIK3|E4RIK3_HALHG Queuine tRNA-ribosyltransferase OS=Halanaerobium hydrogeniformans OX=656519 GN=tgt PE=3 SV=1
MFDFELLKESKKTEARLTKITTSHGSIETPIFMPVGTQATVKAMSSRELKEINSQIILANTYHLYLRPGDELIKKAGGLHDFMSWDLPILTDSGGFQVFSLSDMREIKEEGVYFRSHLDGSKHFISPEKSMQIQKNLGSDIVMAFDECPPYPAEKSYVEKSLNRTLRWAERSKKEMENSEQALFGIIQGGVYPELRKKSVKEMTKLNFPGYSIGGVSVGEPKEEIYKILDYTTPIMPKDKPRYLMGVGTPEDLLEGVYYGIDMFDCVMPTRIARHGQVFTAEGRLTVRNATYAEDFNPLDPDCDCYVCQNYSRAYIRHLIKRNEILGVRLTSYHNLYFMLKFSEKIRKAIKEDSFLDFREEFYQKYKLK

SEQ ID NO: 55847 - protein, 370 aa, Halanaerobium kushneri
  misc_feature (1)..(370): tr|A0A1N6V7B5|A0A1N6V7B5_9FIRM Queuine tRNA-ribosyltran sferase OS=Halanaerobium kushneri OX=56779 GN=tgt PE=3 SV=1
MFDFKLFKKNKNSQARLGEITTDHGKIETPIFMPVGTQATVKAMSSRELKEIGSQIILGNTYHLYLRPGDDLIAKAGGLHKFMNWDRPILTDSGGFQVFSLANLREIEEEGVYFQSHLDGSKHFISPEKSMQIQKNLGSDIVMAFDECPPYPAEKEYVEKSLNRTLRWAERCKKEMETARGQALFGIIQGGVYPELRKQSVEETTKFDFPGYSIGGLSVGEPKEEMYKMLDYTTPLMPEDKPRYLMGVGTPEDLIEGIYHGIDMFDCVMPTRIARHGQIFTHQGRKTIRNATYKEDFSPLDSECDCHVCQNYSRGYVRHLLKRNEILGVRLTTYHNLYFMLKFSEEIRQAIKDDRFIDFREEFYDKYELK

SEQ ID NO: 55848 - protein, 370 aa, Halanaerobium praevalens
  misc_feature (1)..(370): tr|E3DQD7|E3DQD7_HALPG Queuine tRNA-ribosyltransferase OS=Halanaerobium praevalens (strain ATCC 33744 / DSM 22 28 / GSL) OX=572479 GN=tgt PE=3 SV=1
MFDFKLIKENKNSKARLGEITTDHGKIETPIFMPVGTQATVKAMSSRELKEIKAQIILGNTYHLFLRPGDELIAKAGGLHQFMNWDRPILTDSGGFQVFSLADLREIEEEGVYFRSHLDGSKQFISPEKSMQIQKNLGSDIVMAFDECPPYPATRDYVENSLNRTLRWAERCKKEMENAKGQALFGIIQGGVYPELRKQSVEETTKLDFPGYSIGGLSVGEPKEEMYKMLDYTTPLMDKNKPRYLMGVGTPEDLIEGIYHGVDMFDCVMPTRIARHGQVFTHTGRKTVRNATYKEDFNPLDAECDCHVCQNYSRAYIRHLLKRNEILGVRLTSYHNLYFLLNFAAEIRDAISNDNFINFREEFYNKYKLK

SEQ ID NO: 55849 - protein, 370 aa, Halanaerobium saccharolyticum
  misc_feature (1)..(370): tr|M5E2R8|M5E2R8_9FIRM Queuine tRNA-ribosyltransferase OS=Halanaerobium saccharolyticum subsp. saccharolyticum DSM 6643 OX=1293054 GN=tgt PE=3 SV=1
MFDFKLFKENKRSKARLGEITTDHGKIQTPIFMPVGTQATVKAMSSRELKEIGSQIILGNTYHLYLRPGDELIAKAGGLHQFMNWDRPILTDSGGFQVFSLADLREIEEEGVYFQSHLDGSKHFISPEKSMQIQKNLGSDIVMAFDECPPYPAEKEYVENSLNRTLRWAERCKKEMEGVENQALFGIIQGGVYPELRKQSVEETTKLDFPGYSIGGLSVGETKDEMYKMLDHTTPLMPKDKPRYLMGVGTPEDLIEGIYHGIDMFDCVMPTRIARHGQIFTHSGRKTIRNATYKQDFTPLDSECDCHVCQNYSRGYVRHLIKRNEILGVRLTTYHNLYFMLKLSEEIREAIRNDKFIDFREEFYDKYELK

SEQ ID NO: 55850 - protein, 370 aa, Halanaerobium saccharolyticum
  misc_feature (1)..(370): tr|A0A2T5RNL2|A0A2T5RNL2_9FIRM Queuine tRNA-ribosyltran sferase OS=Halanaerobium saccharolyticum OX=43595 GN=tg t PE=3 SV=1
MFDFKLFKENKKSQARLGEITTDHGKIETPIFMPVGTQATVKAMSSRELKEIGSQIILGNTYHLYLRPGDELIAKAGGLHQFMNWDRPILTDSGGFQVFSLANLREIEEEGVYFQSHLDGSKHFISPEKSMQIQQNLGSDIVMAFDECPPYPAERKYVENSLNRTLRWAERCKEEMKGAEGQALFGIIQGGVYPELRKQSVEETVKFDFPGYSIGGLSVGEPKEEMYKMLDHTTPLMPKDKPRYLMGVGTPEDLIEGIYHGIDMFDCVMPTRIARHGQIFTHQGRKTIRNATFKEDFSPLDSECDCHVCQNYSRGYVRHLLKRNEILGVRLTTYHNLYFMLKLSEEIRKAIKNDNFINFREEFYNKYELK

SEQ ID NO: 55851 - protein, 370 aa, Halanaerobium salsuginis
  misc_feature (1)..(370): tr|A0A1I4GBZ3|A0A1I4GBZ3_9FIRM Queuine tRNA-ribosyltran sferase OS=Halanaerobium salsuginis OX=29563 GN=tgt PE= 3 SV=1
MFNFKLIKEDKASKARLGEITTNHGKIETPIFMPVGTQATVKAMSSRELEEINAQIILGNTYHLYLRPGDDLIARAGGLHKFMNWQRPILTDSGGFQVFSLAKLREIKEEGVYFRSHLDGSKQFISPEKSMQIQKNLGSDIVMAFDECPPYPASRDYVDKSLQRTLRWAERCQAEMEGIENQALFGIIQGGIYPELRKQSVEEMLKFDFPGYSIGGLSVGEPKEEMYKMLDYTTPLMAKNKPRYLMGVGTPEDLVEGIYHGIDMFDCVMPTRIARHGQIFTAVGRKTIRNAVYAEDFSPLDPECDCHVCQNYSRAYVRHLLKRNEILGVRLTTYHNLYFMLNFAQQIRQALAAGKFIDFRDEFYQNYQLK

SEQ ID NO: 55852 - protein, 358 aa, Halanaerobium sp.
  misc_feature (1)..(358): tr|A0A424Y892|A0A424Y892_9FIRM Queuine tRNA-ribosyltran sferase (Fragment) OS=Halanaerobium sp. MSAO_Bac5 OX=22 93859 GN=D5S01_09475 PE=3 SV=1
NTEARLAEITTSHGKIETPIFMPVGTQATVKAMSSRELKEINSQIILANTYHLYLRPGDELIKKAGGLHDFMSWDRPILTDSGGFQVFSLSDMREIKEEGVYFRSHLDGSKHFISPEKSMQIQKNLGSDIVMAFDECPPYPAEKSYVEKSLNRTLRWAERSKKEMENSEQALFGIIQGGVYPELRKESVKEICKLDFPGYSIGGVSVGEPKEEIYKILDYTTPIMPKNKPRYLMGVGTPEDLLEGVYYGIDMFDCVMPTRIARHGQVFTAEGRLTVRNAVYAEDFNPLDSDCDCHVCQNYTRGYIRHLLKRNEILGVRLTSYHNLYFMLEFSEKIRKAIKEDRFLDFREEFYQKYKLK

SEQ ID NO: 55853 - protein, 370 aa, Halanaerobium sp.
  misc_feature (1)..(370): tr|A0A315R366|A0A315R366_9FIRM Queuine tRNA-ribosyltran sferase OS=Halanaerobium sp. OX=1895664 GN=tgt PE=3 SV= 1
MFDFKLFKENKKSQARLGEITTDHGKIETPIFMPVGTQATVKAMSSRELKEIGSQIILGNTYHLYLRPGDDLIAKAGGLHQFMNWDRPILTDSGGFQVFSLANLREIEEEGVYFQSHLDGSKHFISPEKSMQIQQNLGSDIVMAFDECPPYPAERKYVEKSLNRTLRWAERCKEEMKGAEGQALFGIIQGGVYPELRKQSVEETVKFDFPGYSIGGLSVGEPKEEMYKMLDHTTPLMPKDKPRYLMGVGTPEDLIEGIYHGIDMFDCVMPTRIARHGQIFTHQGRKTIRNATFKEDFSPLDSECDCHVCQNYSRGYVRHLLKRNEILGVRLTTYHNLYFMLKLSEEIRKAIKNDNFINFREEFYNKYELK

SEQ ID NO: 55854 - protein, 377 aa, Halarsenatibacter silvermanii
  misc_feature (1)..(377): tr|A0A1G9JS94|A0A1G9JS94_9FIRM Queuine tRNA-ribosyltran sferase OS=Halarsenatibacter silvermanii OX=321763 GN=t gt PE=3 SV=1
MGFIEMTINFSVESRSSDSPARTGTLELENGMFETPIFMPVGTRATVKSLSPEELKKCGTGILLANTYHLYLRPGADVVAEAGGLHEFMNWSRPILTDSGGFQVFSLSDMNEVTEDGVQFQSHLDGSKHFITPEKSVEIQKKLGADIIMAFDECVSYPADREYVEKSLNRTLRWAERSLKAAEDLQDHQHIFGIVQGGTYPDLRKKSARRTRKLDFPGYAIGGLSVGEENKLMYQMLDVTVPELPSKKPRYLMGVGTPRDLIEGVKRGVDMFDCVLPTRLARHGSLYTSRGRINITNAAFKKDFNPPDKDCSCYVCRNYSSAYLRHLIKRNELYGLRLASYHNLYFFLDLMRKLRYNIRRDTLDDFVESFYSGWAEE

SEQ ID NO: 55855 - protein, 367 aa, Haliangium ochraceum
  misc_feature (1)..(367): tr|D0LJ84|D0LJ84_HALO1 Queuine tRNA-ribosyltransferase OS=Haliangium ochraceum (strain DSM 14365 / JCM 11303 / SMP-2) OX=502025 GN=tgt PE=3 SV=1
MQQTDGFSFEILARAGNARAGVLHTPHGDIPTPVFMPVGTLGTVKAMTARELCTPPLDARIILGNTYHLYLRPGLDVLRAHGGLHGFAGWQRPILTDSGGYQVFSLARLGAIDDEGVTFQSHIDGTRHRLTPELSMEIQGVLGSDIAMVFDQCPPGDADDALHDLAMKRTTAWAERCQRVSRPPGQALFGIVQGGVDVERRQRHLEQLVPLDFDGYAIGGLSVGERKEDMYRVLDAFAHRMPDDKPRYLMGVGTPEDLATGVAAGVDMFDCVMPTRNARNGTLFTSQGKVNIKASKHKSDTGPLDPACPCETCATVSRAYLRHLYLAREILFNRLATLHNLVFYAETMRRLRRSILEGAEVGSRERP

SEQ ID NO: 55856 - protein, 367 aa, Haliea salexigens
  misc_feature (1)..(367): tr|A0A3C1KIQ2|A0A3C1KIQ2_9GAMM Queuine tRNA-ribosyltran sferase OS=Haliea salexigens OX=287487 GN=tgt PE=3 SV=1
MQFEQLGTDGAARRGRLTFPRGTVETPAFMPVGTYGTVKGMLPRDIHAVGAEIILGNTFHLWLRPGTDIIEQHGDLHDFMGWNGPILTDSGGFQVFSLGAMRKISEQGVRFQSPVDGSKVFLDPETSMAIQRKLGSDIVMIFDECTPYPATEAEARASMELSLRWAQRSRAAHGDSAAALFGIVQGGMYESLRAESLAGLEAMGFDGYAIGGLSVGEPKEDMIAVLEALQYSLPAHKPRYLMGVGTPSDLLQGVLRGVDMFDCVMPTRNARNGFIFTSRGVLKLRNARHKTSTLPLDEHCDCYTCQNFSRAYLHHLDKCNEILGSQLNTLHNLRYYQNHMAGIRAAIEQGRLAEFAADFYAGQAEGV

SEQ ID NO: 55857 - protein, 383 aa, Haliea sp.
  misc_feature (1)..(383): tr|A0A519JKQ2|A0A519JKQ2_9GAMM Queuine tRNA-ribosyltran sferase OS=Haliea sp. OX=1932666 GN=tgt PE=3 SV=1
MLNFDVLKTDPAEGSYLGSHARRGTLTLNHGVVQTPIFMPVGTYGTVKGVMPQSLHDMGAQIILGNTFHLWMRPGLDVMQQFGGLHKFESWHKPILTDSGGFQVWSLGEMRKISEEGVKFASPVNGDKLFLTPEISMQIQTILNSDIVMQFDECTPYDTKGHITTEAEARYSMELSRRWAQRCEAEFARLENPNALFGIVQGGMFENLRQESLDALVEMDFPGYAVGGVSVGEPKEEMQRIMAHTPHRLPADKPRYLMGVGTPEDLVEGVASGVDMFDCVMPTRNARNGHMFTRFGDLKIRNSRYKTEDAPVDATCSCYTCRNFSRAYLHHLDRCGEMLGPMLSSIHNLHYYLNLMQEIRDALDAGSFGAFALQFRQDRQRGV

SEQ ID NO: 55858 - protein, 367 aa, Haliea sp.
  misc_feature (1)..(367): tr|A0A2D4TD88|A0A2D4TD88_9GAMM Queuine tRNA-ribosyltran sferase OS=Haliea sp. OX=1932666 GN=tgt PE=3 SV=1
MQFEQLGTDGAARRGRLTFPRGTVETPAFMPVGTYGTVKGMLPRDIHAVGAEIILGNTFHLWLRPGTDIIEQHGDLHDFMGWNGPILTDSGGFQVFSLGAMRKISEQGVRFQSPVDGSKVFLDPETSMAIQRKLGSDIVMIFDECTPYPATEAEARASMELSLRWAQRSRAAHGASAAALFGIVQGGMYESLRAESLAGLEAMGFDGYAIGGLSVGEPKEDMIAVLEALQYSLPAHKPRYLMGVGTPSDLLQGVLRGVDMFDCVMPTRNARNGFIFTSRGVLKLRNARHKTSTLPLDEHCDCYTCQNFSRAYLHHLDKCNEILGSQLNTLHNLRYYQNHMAGIRAAIEQGRLAEFAADFYAGQAEGV

SEQ ID NO: 55859 - protein, 369 aa, Halieaceae bacterium
  misc_feature (1)..(369): tr|A0A2E6YT80|A0A2E6YT80_9GAMM Queuine tRNA-ribosyltran sferase OS=Halieaceae bacterium OX=2026743 GN=tgt PE=3 SV=1
MEFHVSHQDGFARRGQIDFPRGSVQTPAFMPVGTYGTVKGMLPRDIIEIGAEIILGNTFHLWLRPGTDIIREHGDLHDFMGWEGPILTDSGGFQVFSLDELRKVTEEGVAFKSPVNGDRVFLDPETSMQIQRDLGSDIVMIFDECTPYPATESDAERSMELSLRWAERSKRAHGDNSAALFGIIQGGMYPELRTRSLEALQEIGFDGFAVGGLSVGEPKEEMVKVLDHLAGLLPAGKPHYLMGVGTPADLLEGVRRGIDMFDCVMPTRNARNGHLFTSTGVLKLRNARHKSSTEPVDANCDCYTCKHFSRSYLAHLDKCNEILGSQLATIHNLRFYQQHMAGIRAAIEAGQLDEFARDFYARQNECSTG

SEQ ID NO: 55860 - protein, 373 aa, Halieaceae bacterium
  misc_feature (1)..(373): tr|A0A356VMR7|A0A356VMR7_9GAMM Queuine tRNA-ribosyltran sferase OS=Halieaceae bacterium OX=2026743 GN=tgt PE=3 SV=1
MSRECHMQFEQLGTDGAARRGRLTFPRGTVETPAFMPVGTYGTVKGMLPRDIHAVGAEIILGNTFHLWLRPGTDIIEQHGDLHDFMGWNGPILTDSGGFQVFSLGAMRKISEQGVRFQSPVDGSKVFLDPETSMAIQRKLGSDIVMIFDECTPYPATEAEARASMELSLRWAQRSRAAHGDSAAALFGIVQGGMYESLRAESLAGLEAIGFDGYAIGGLSVGEPKEDMIAVLEALQYSLPAHKPRYLMGVGTPSDLLQGVLRGVDMFDCVMPTRNARNGFIFTSRGVLKLRNARHKTSTLPLDEHCDCYTCQNFSRAYLHHLDKCNEILGSQLNTLHNLRYYQNHMAGIRAAIEQGRLAEFAADFYAGQAEGV

SEQ ID NO: 55861 - protein, 373 aa, Halioglobus japonicus
  misc_feature (1)..(373): tr|A0A2N5YGS9|A0A2N5YGS9_9GAMM Queuine tRNA-ribosyltran sferase OS=Halioglobus japonicus OX=930805 GN=tgt PE=3 SV=1
MTRECRMQFERLGDDGNARRGRLTFPRGTIETPAFMPVGTYGTVKGMLPRDIKEIGAEIILGNTFHLWLRPGTDIIEQHGDLHDFMGWDGPILTDSGGFQVFSLGDMRKISEDGVKFQSPVDGSRVFLDPEKSMEIQRKLGSDIVMIFDECTPYPATVDEARDSMELSLRWAKRSKQAHGDSSAALFGIVQGGMYPELRQESLDGLTDIGFDGYAIGGLSVGEPKDEMMHVLEAMQPIMPADKPRYLMGVGTPADLLEGVRRGVDMFDCVMPTRNARNGNLFTSRGQLKLRNARHKTSTLPIDEDCNCYTCQNFSRGYLHHLDKCNEILGSQLNTIHNLHYYQQHMQGIRAAIEDQNLEDFAANYYEAQARGV

SEQ ID NO: 55862 - protein, 373 aa, Halioglobus lutimaris
  misc_feature (1)..(373): tr|A0A2N5X0P1|A0A2N5X0P1_9GAMM Queuine tRNA-ribosyltran sferase OS=Halioglobus lutimaris OX=1737061 GN=tgt PE=3 SV=1
MSRQCHMQFERLGEDGDARRGRLRFPRGTVETPAFMPVGTYGTVKGMLPRDIRGVGAEIILGNTFHLWLRPGTDVIEQHGDLHDFMGWDGPILTDSGGFQVFSLGDMRKISEEGVKFQSPVDGSKVFLDPETSMAIQRSLGADIVMIFDECTPYPATEQEARDSMELSLRWALRSKTAHGDSPSALFGIVQGGMYPHLRADSLAGLDDIGFDGYAIGGLSVGEPKDEMMAVLDVMQPLLPADKPRYLMGVGTPADLLEGVRRGVDMFDCVMPTRNARNGNIFTSRGVLKLRNARHKTSTLPLDEECSCYTCEHFSRAYLHHLDKCNEILGSQLNTIHNLHYYQHHMAGIRAAIANGSLAEFAQHFYTEQARGV

SEQ ID NO: 55863 - protein, 367 aa, Halioglobus sp.
  misc_feature (1)..(367): tr|A0A166HMN4|A0A166HMN4_9GAMM Queuine tRNA-ribosyltran sferase OS=Halioglobus sp. HI00S01 OX=1822214 GN=tgt PE =3 SV=1
MQFERLGDDGNARRGRLTFPRGTIETPAFMPVGTYGTVKGMLPRDIKEIGAEIILGNTFHLWLRPGTDIIEQHGDLHDFMGWDGPILTDSGGFQVFSLGDMRKISEDGVKFQSPVDGSRVFLDPEKSMEIQRKLGSDIVMIFDECTPYPATVDEARDSMELSLRWAKRSKQAHGDSSAALFGIVQGGMYPELRQESLDGLTDIGFDGYAIGGLSVGEPKDEMMHVLEAMQPIIPADKPRYLMGVGTPADLLEGVRRGVDMFDCVMPTRNARNGNLFTSRGQLKLRNARHKTSTLPIDEDCNCYTCQNFSRGYLHHLDKCNEILGSQLNTIHNLHYYQQHMQGIRAAIEDQNLDDFAANYYEAQARGV

SEQ ID NO: 55864 - protein, 373 aa, Halioglobus sp.
  misc_feature (1)..(373): tr|A0A3L7E2Z6|A0A3L7E2Z6_9GAMM Queuine tRNA-ribosyltran sferase OS=Halioglobus sp. U0301 OX=2283635 GN=tgt PE=3 SV=1
MSRHCHMRFERLGSDGNARRGRLHFPRGTVETPAFMPVGTYGTVKGMLPRDIREIGAEIILGNTFHLWLRPGTDIIEQHGDLHDFMHWDGPILTDSGGFQVFSLGDMRKITEEGVKFQSPVDGSPVFLDPEKSMAIQRSLGADIVMIFDECTPYPASEEAARASMELSLRWAARSKAAHGDSPAALFGIVQGGMYEHLRTESLAGLTDIGFDGYAIGGLSVGEPKEEMMAVLEVMQPIMPVDRPRYLMGIGTPADLLEGVRRGVDMFDCVMPTRNARNGNIFTSRGVLKLRNARHKTSTLPLDEECGCYTCQNFSRAYLHHLDKCNEILGSQLNTIHNLYFYQQHMQGIRTAIEQGRLDEFASGFYAAQDRGV

SEQ ID NO: 55865 - protein, 377 aa, Haliscomenobacter hydrossis
  misc_feature (1)..(377): tr|F4L476|F4L476_HALH1 Queuine tRNA-ribosyltransferase OS=Haliscomenobacter hydrossis (strain ATCC 27775 / DSM 1100 / LMG 10767 / O) OX=760192 GN=tgt PE=3 SV=1
MFSFNIDHKDPQSSARAGVIQTAHGEIQTPIFMPVGTAGTVKAVHQHELETEIKAQIILGNTYHLYLRPGIEILQQVGGLHKFNGWNHPILTDSGGYQVYSLGNTRKIKEEGVTFNSHIDGSPHFFSPERAIDIQRIIGADIIMAFDECTPYPCEYGYAKKSMEMTHRWLARCCERFDNTQGLYGYEQTLFPIVQGSTYTDLRIQSAEAIAAFNRPANAIGGLSVGEPAEDMYAMTELVCGVLPADKPRYLMGVGTPVNILESIALGIDMFDCVLPTRNARHGLLYTAEGILNMRNAKWKDDFSPIDANSPCHSSRFYSKAYLRHLIHSSEILGMQIATLQNLSFFLWLVTEARAHIQAGDFRAWKEMMVPKLETRL

SEQ ID NO: 55866 - protein, 376 aa, Haloarcobacter mediterraneus
  misc_feature (1)..(376): tr|A0A4Q1AWP6|A0A4Q1AWP6_9PROT Queuine tRNA-ribosyltran sferase OS=Haloarcobacter mediterraneus OX=2023153 GN=t gt PE=3 SV=1
MEFKIDATSHHKARACTIKTAHSEIKTPVFMPVGTQGTVKALDANDLLSMGAKIILGNTYHLYLRPGSKLIKKFGGLHGFSKFPNSFLTDSGGFQAFSLSDNSKPDENGITFKSHIDGSKHYFTPQSVLDTQYDLGSDIMMILDDLVALPNTKERIKKSIERTTKWAKEAISYHKEQQAKGIGVNQNIFAIIQGGTDKEFRKMSAEQLCALSDYDGFAIGGLSVGEPNQDMYDTVEWTTDFMPLDKPRYLMGVGTPEDLIENIERGVDMFDCVMPTRNARNGTLFTSTGRVNIKKAMYKEDNSPIDEECDCYTCQNFSKAYLNHLYRAGEITYFRLASLHNIRYYLNLMSQAREAILADNWVEFKKEFYEKRSSKK

SEQ ID NO: 55867 - protein, 378 aa, Halobacillus aidingensis
  misc_feature (1)..(378): tr|A0A1H0P1Z0|A0A1H0P1Z0_HALAD Queuine tRNA-ribosyltran sferase OS=Halobacillus aidingensis OX=240303 GN=tgt PE =3 SV=1
MAITYELIKTCKQTGARLGKVHTPHGSFETPMFMPVGTLATVKTMSPEELERMGAQIILSNTYHLWLRPGEDIIEEAGGLHKFMNWNGSILTDSGGFQVFSLSDLRKIEEEGVHFRNHISGEKLFLSPEKAMHIQNSLGPDIMMAFDECPPYPAEHKYMKDSVERTSRWAERCLEAHQRPHDQGLFGIIQGGEYEDLRRQSARDLTSLDFPGYAIGGLSVGEPKDVMNRVLEFTTPLMPDQKPRYLMGVGSPDSLIDGSIRGIDMFDCVLPTRIARNGTLMTSEGRLVVRNAKYARDFRPIDENCDCHTCRNYSRAYIRHLVKANETFGFRLTTYHNLYFLLNLMRQVREAIREDRLGDFREEFFEMYGFNKPNAKNF

SEQ ID NO: 55868 - protein, 378 aa, Halobacillus alkaliphilus
  misc_feature (1)..(378): tr|A0A1I2JF56|A0A1I2JF56_9BACI Queuine tRNA-ribosyltran sferase OS=Halobacillus alkaliphilus OX=396056 GN=tgt P E=3 SV=1
MAITYELIKTCKQTGARLGKVHTPHGSFETPMFMPVGTLATVKTMSPEELEQMGAPIILSNTYHLWLRPGEDIVEEAGGLHSFMNWNGSILTDSGGFQVFSLSDLRQIEEEGVHFRNHISGEKLFLSPEKAMQIQNSLGADIMMAFDECPPYPAEHDYMKKSVERTSRWAERCLEGHQRPHDQGLFGIIQGGEYEDLRRQSARDLTSMDFPGYAIGGLSVGEPKDVMNRVLDFTAPLLPDEKPRYLMGVGSPDSLIDGSMRGIDMFDCVLPTRIARNGTCMTSNGRLVVRNAKFARDFRPIDENCDCHTCRNYSRAYIRHLVKSSETFGFRLTTYHNLYFLLKLMRQVREAIKEDRLGDFREEFFEQYGFNKPNAKNF

SEQ ID NO: 55869 - protein, 378 aa, Halobacillus dabanensis
  misc_feature (1)..(378): tr|A0A1I3P6P0|A0A1I3P6P0_HALDA Queuine tRNA-ribosyltran sferase OS=Halobacillus dabanensis OX=240302 GN=tgt PE= 3 SV=1
MAITYELIKTCKQTGARLGKVHTPHGSFETPMFMPVGTLATVKTMSPEELEQMGAQIILSNTYHLWLRPGEDIIQEAGGLHNFMNWNGSILTDSGGFQVFSLSDLRKIEEEGVHFRNHISGEKLFLSPEKAMHIQNALGPDIMMAFDECPPYPAEHKYMKDSVERTSRWAERCLEAHQRPHDQGLFGIIQGGEYEDLRRQSAQDLTSMDFPGYAIGGLSVGEPKDVMNRVLEFTTPLMPDQKPRYLMGVGSPDSLIDGSIRGVDMFDCVLPTRIARNGTLMTSEGRLVVRNAKFARDFRPIDENCDCHTCRNYSRAYIRHLVKANETFGFRLTTYHNLYFLLNLMRQVREAIREDRLGDFRDEFFEQYGFNKPNAKNF

SEQ ID NO: 55870 - protein, 378 aa, Halobacillus faecis
  misc_feature (1)..(378): tr|A0A511WLF0|A0A511WLF0_9BACI Queuine tRNA-ribosyltran sferase OS=Halobacillus faecis OX=360184 GN=tgt PE=3 SV =1
MAITYELIKTCKQTGARLGKVHTPHGSFETPMFMPVGTLATVKTMSPEELERMGAQIILSNTYHLWLRPGEDIIEEAGGLHKFMNWNGSILTDSGGFQVFSLSDLRKIEEEGVHFRNHISGEKLFLSPEKAMHIQNALGPDIMMAFDECPPYPAEHKYMKDSVERTSRWAERCLEAHKRPHDQGLFGIIQGGEYEDLRRQSARDLTSMDFPGYAIGGLSVGEPKDVMNRVLEFTTPLMPDQKPRYLMGVGSPDSLIDGSIRGIDMFDCVLPTRIARNGTLMTSEGRLVVRNAKFARDFRPIDENCDCHTCRNYSRAYIRHLVKANETFGFRLTTYHNLYFLLNLMRQVREAIREDRLGDFREEFFEMYGFNKPNAKNF

SEQ ID NO: 55871 - protein, 378 aa, Halobacillus halophilus
  misc_feature (1)..(378): tr|I0JPB6|I0JPB6_HALH3 Queuine tRNA-ribosyltransferase OS=Halobacillus halophilus (strain ATCC 35676 / DSM 226 6 / JCM 20832 / NBRC 102448/ NCIMB 2269) OX=866895 GN=t gt PE=3 SV=1
MAITYELIKTCKQTGARLGKVHTPHGSFETPMFMPVGTLATVKTMSPEELEQMGAPIILSNTYHLWLRPGEDIVEEAGGLHSFMNWNGSILTDSGGFQVFSLSDLRQIEEEGVHFRNHISGEKLFLSPEKAMHIQNSLGADIMMAFDECPPYPAEHDYMKKSVERTSRWAERCLEGHQRPHDQGLFGIIQGGEYEDLRRQSARDLTSMDFPGYAIGGLSVGEPKDVMNRVLDFTAPLLPDEKPRYLMGVGSPDSLIDGSMRGIDMFDCVLPTRIARNGTCMTSNGRLVVRNAKFARDFRPIDENCDCHTCRNYSRAYIRHLVKSSETFGFRLTTYHNLYFLLKLMRQVREAIKEDRLGDFREEFFEQYGFNKPNAKNF

SEQ ID NO: 55872 - protein, 378 aa, Halobacillus karajensis
  misc_feature (1)..(378): tr|A0A024P7Y3|A0A024P7Y3_9BACI Queuine tRNA-ribosyltran sferase OS=Halobacillus karajensis OX=195088 GN=tgt PE= 3 SV=1
MAITYELIKTCKQTGARLGKVHTPHGSFETPMFMPVGTLATVKTMSPDELERMGAQIILSNTYHLWLRPGEDIVEEAGGLHEFMNWNGSILTDSGGFQVFSLSDLRKIEEEGVHFRNHISGEKLFLSPEKAMHIQNSLGADIMMAFDECPPYPAEHKYMKDSVERTSRWAERCLEAHQRPHNQGLFGIIQGGEYEDLRRQSAQDLTSMDFPGYAIGGLSVGEPKDVMNRVLEFTTPFLPDQKPRYLMGVGSPDSLIDGSIRGIDMFDCVLPTRIARNGTLMTSEGRLVVRNAKYARDFRPIDENCDCYTCRNYSRAYIRHLVKANETFGFRLTTYHNLYFLLKLMGRVREAIREDRLGDFREEFFEMYGFNKPNAKNF

SEQ ID NO: 55873 - protein, 378 aa, Halobacillus litoralis
  misc_feature (1)..(378): tr|A0A410MHF3|A0A410MHF3_9BACI Queuine tRNA-ribosyltran sferase OS=Halobacillus litoralis OX=45668 GN=tgt PE=3 SV=1
MAVTYELIKTCKQTGARLGKVHTPHGSFETPMFMPVGTLATVKTMSPEELERMGAQIILSNTYHLWLRPGEDIVQEAGGLHDFMNWNGSILTDSGGFQVFSLSDLREIEEKGVHFRNHISGEKLFLSPEKAMHIQNALGADIMMAFDECPPYPAEHKYMKQSVERTSRWAERCLEGHQRPDAQGLFGIIQGGEYEDLRRQSAQDLTSMDFPGYAIGGLSVGEPKDVMNRVLDFTTPLLPTQKPRYLMGVGSPDSLIDGSIRGIDMFDCVLPTRIARNGTLMTSEGRLVVRNAKFARDFRPIDENCDCHTCRNYSRAYIRHLVKANETFGFRLTTYHNLYFLLKLMRQVREAIREDRLGDFREEFFEQYGFNKPNAKNF

SEQ ID NO: 55874 - protein, 378 aa, Halobacillus mangrovi
  misc_feature (1)..(378): tr|A0A1W5ZUK8|A0A1W5ZUK8_9BACI Queuine tRNA-ribosyltran sferase OS=Halobacillus mangrovi OX=402384 GN=tgt PE=3 SV=1
MAITYELIKTCKQTGARLGKVHTPHGSFETPMFMPVGTLATVKTMSPEELERMGAQIILSNTYHLWLRPGEDIVEEAGGLHSFMNWNGSILTDSGGFQVFSLSDLRQIEEEGVHFRNHISGEKLFLSPEKAMQIQNSLGADIMMAFDECPPYPAEHDYMKKSVERTSRWAERCLEGHKRPHDQGLFGIIQGGEYEDLRRQSARDLTSLDFPGYAVGGLSVGEPKDVMNKVLDFTTPLLPTDKPRYLMGVGSPDSLIDGSLRGIDMFDCVLPTRIARNGTCMTSNGRLVVRNAKFARDFRPIDENCDCHTCRNYSRAYIRHLVKANETFGFRLTTYHNLYFLLKLMRQVREAIREDRLGDFREEFFEQYGFNKPNAKNF

SEQ ID NO: 55875 - protein, 378 aa, Halobacillus salinus
  misc_feature (1)..(378): tr|A0A4Z0H2U7|A0A4Z0H2U7_9BACI Queuine tRNA-ribosyltran sferase OS=Halobacillus salinus OX=192814 GN=tgt PE=3 S V=1
MAITYELIHTCKQTGARYGKVHTPHGSFETPMFMPVGTLATVKTMSPDELERMGAPIILSNTYHLWLRPGEDIVKEAGGLHNFMNWDGSILTDSGGFQVFSLSDLRKIEEEGVHFRNHISGEKLFLSPEKAMRIQNDLGADIMMAFDECPPYPAEHKYMKDSVERTSRWAERCLEAHQRPHDQGLFGIIQGGEYEDLRRQSAKDLTSMDFPGYAVGGLSVGEPKDVMNRVLEFTTPLLPSEKPRYLMGVGSPDSLVDGSIRGIDMFDCVLPTRIARNGTCMTSNGRLVVRNAKFARDFRPLDENCDCYTCRNYSRAYIRHLVKANETFGIRLTTYHNLYFLLKLMGQVRDAIREDRLGDFREEFFEQYGFNKPNAKNF

SEQ ID NO: 55876 - protein, 378 aa, Halobacillus sp.
  misc_feature (1)..(378): tr|A0A0B0D4C1|A0A0B0D4C1_9BACI Queuine tRNA-ribosyltran sferase OS=Halobacillus sp. BBL2006 OX=1543706 GN=tgt P E=3 SV=1
MAITYELIKTCKQTGARLGKVHTPHGSFETPMFMPVGTLATVKTMSPEELERMGAQIILSNTYHLWLRPGEDIVEEAGGLHSFMNWNGSILTDSGGFQVFSLSDLRQIEEEGVHFRNHISGEKLFLSPEKAMKIQNSLGADIMMAFDECPPYPAEHEYMKKSVERTSRWAERCLEGHQRPNDQGLFGIIQGGEYEDLRRQSAQDLTSLDFPGYAVGGLSVGEPKDVMNRVLDFTTPLLPKEKPRYLMGVGSPDSLIDGSIRGIDMFDCVLPTRIARNGTCMTSNGRLVVRNAKFARDFRPIDENCDCHTCRNYSRAYIRHLVKANETFGFRLTTYHNLYFLLKLMRQVREAIREDRLGDFREEFFEQYGFNKPNAKNF

SEQ ID NO: 55877 - protein, 378 aa, Halobacillus sp.
  misc_feature (1)..(378): tr|A0A3S3ZLX9|A0A3S3ZLX9_9BACI Queuine tRNA-ribosyltran sferase OS=Halobacillus sp. SKP4-6 OX=2498856 GN=tgt PE =3 SV=1
MAITYELIKTCKQTGARLGKVHTPHGSFDTPMFMPVGTLATVKTMSPEELERMGAPIILSNTYHLWLRPGEDIVKEAGGLHKFMNWNGSILTDSGGFQVFSLSDLRKIEEEGVHFRNHISGEKLFLSPEKAMQIQNDLGADIMMAFDECPPYPAEHEYMKKSVERTSRWAERCLEGHKRPNDQGLFGIVQGGEYEDLRRQSAMDLTSMDFPGYAVGGLSVGEPKDVMNRVLEFTTPLLPSEKPRYLMGVGSPDSLIDGSIRGIDMFDCVLPTRIARNGTCMTSTGRLVIRNAKFARDFRPIDENCDCYTCRNYSRAYIRHLVKANETFGFRLTTYHNLYFLLNLMGQVREAIREDRLGDFRDQFFEQYGFNKPNAKNF

SEQ ID NO: 55878 - protein, 379 aa, Halobacillus trueperi
  misc_feature (1)..(379): tr|A0A3E0JCX0|A0A3E0JCX0_9BACI Queuine tRNA-ribosyltran sferase OS=Halobacillus trueperi OX=156205 GN=tgt PE=3 SV=1
MMAITYELIKTCKQTGARLGKVHTPHGSFETPMFMPVGTLATVKTMSPEELERMGAQIILSNTYHLWLRPGEDIIEEAGGLHKFMNWNGSILTDSGGFQVFSLSDLRKIEEEGVHFRNHISGEKLFLSPEKAMHIQNSLGPDIMMAFDECPPYPAEHKYMKDSVERTSRWAERCLEAHQRPHDQGLFGIIQGGEYEDLRRQSARDLTSMDFPGYAIGGLSVGEPKDVMNRVLEFTTPLMPDQKPRYLMGVGSPDSLIDGSIRGIDMFDCVLPTRIARNGTLMTSEGRLVVRNAKYARDFRPIDENCDCHTCRNYSRAYIRHLVKANETFGFRLTTYHNLYFLLNLMRQVREAIREDRLGDFREEFFEMYGFNKPNAKNF

SEQ ID NO: 55879 - protein, 386 aa, Halobacteriovoraceae bacterium
  misc_feature (1)..(386): tr|A0A2E2EFZ8|A0A2E2EFZ8_9PROT Queuine tRNA-ribosyltran sferase OS=Halobacteriovoraceae bacterium OX=2026745 GN =tgt PE=3 SV=1
MDIREAIKANFKYKVIHKDKNSNARAGVIITPHGEIPTPVFMPVGTHGAIKALQPNQLTDLNIPIILSNTYHLHLTPGSELIKKAGGLHKFMAWDRPILTDSGGFQVFSLQGNSITEEGSKFKGPKGQDILLTPETSIGIQQNLGSDIMMAFDECIPYPAKKPYVQKSIARTHRWLDRCIQSWDNPNQALFGIIQGSTYDEFRDECLEEVVKRDLPGYAIGGVSVGEGPELMRKIVSYTGPKMPEDKPRYVMGVGMPEDLLMIWEHGIDMSDCIIPTKFARGGTLFSNRGKIRITHKNYRRDFFPIEPNLDDYVNKNFSRAYIKHLFDSNEILGQILATAHNIAFYKSLADRARTAILEDRFLEFKEEFLKGYLKDDGNKAKKKKR

SEQ ID NO: 55880 - protein, 370 aa, Halobacteriovoraceae bacterium
  misc_feature (1)..(370): tr|A0A2E2EFJ7|A0A2E2EFJ7_9PROT Queuine tRNA-ribosyltran sferase OS=Halobacteriovoraceae bacterium OX=2026745 GN =tgt PE=3 SV=1
MKTYQLEAVSGNARAATIETEHGEIKTPIFMPVGTRASVKSLWQEDLEELNAQIILGNTYHLYLRPGHELIEKMGGLHKWMTWKKPILTDSGGFQVFSLSDLNKVSEEGVKFQSHIDGSYHMLSPEKSMEIQKALGSDIVMIFDECPKLPATKERLRESMELTLRWAKRCKDYELKPHQSLFSIIQGGLHEDLRQECMERLMELDFPGYALGGLSVGEKNEEMVSFLNSFTPKMPENKPRYLMGVGKPLDILNGIRAGIDMFDCVLPTRNARNGQFLTTHGPLNIKKQRFIADSLPPDIECDCKVCRRYSRSYIRHLYNVGEYLAGQLVSFHNIYFYLKLVEKAREAIFKDKFDEYYKEFYKNYTSQRWK

SEQ ID NO: 55881 - protein, 379 aa, Halobacteriovorax marinus
  misc_feature (1)..(379): tr|A0A1Y5FCS5|A0A1Y5FCS5_9PROT Queuine tRNA-ribosyltran sferase OS=Halobacteriovorax marinus OX=97084 GN=tgt PE =3 SV=1
MSRIQDQVKEHFQFEVTHVDKNSKARAGMIRTPNGDIPTPVFMPVGTHGAVKAQQPQVLEDMDTKVILSNTYHLHLSPGSDLIKKAGGLHKWMSWPRPILTDSGGFQVFSLQKKSIKEEGAEFRDQNGKTVLLSPETSIEIQQNLGSDIMMAFDECIPYPATKEYTKTSIDRTHRWLDRCIETWTNPKQALFGIIQGSTYDEYRKECVDELVKRDLPGYAIGGVSVGEGPELMEKIVKFAAPLMPVDKPRYVMGVGNPEDLLMIWEHGIDMSDCIIPTKFARGGTFFTNRGKIRIKHKNYRRDFFPIEPNCDCYTCKNFTRSYVKHLFDSNEILGAILATTHNIAFYKNLAESAREAILEDRFTEFKKNFLEKYNGNKK

SEQ ID NO: 55882 - protein, 372 aa, Halobacteriovorax marinus
  misc_feature (1)..(372): tr|E1X0T3|E1X0T3_HALMS Queuine tRNA-ribosyltransferase OS=Halobacteriovorax marinus (strain ATCC BAA-682 / DSM 15412 / SJ) OX=862908 GN=tgt PE=3 SV=1
MTTMYKNVAYDGKARAGVVTTAHGEIETPIFMPVGTRASVKCMWQHELEEVGAQIILGNTYHLYLRPGHELIEKVGGGLHGFMNWKKPILTDSGGYQVFSLSSMNKLSEEGVRFQSHIDGSYHMISPEKSMEIQRALGSDIVMNFDECPALPATKERLRESMELTLRWAKRCRDYELKEHQNLFGIIQGGLHFDLRTECMERLTEMNFEGYALGGLSVGEKNEEMVEFCSDFVHTMPKDKPRYLMGVGKPLDILTGIKNGLDMFDCVLPTRNARNGQFLTHHGPLNIKKERFKEDTLPPDPDCSCKVCSNYSRSYIRHLYNTGEYLAGQLISYHNLHFFLDMTKQARAHIIAGTFDEYYKTFYNNYTSNQWT

SEQ ID NO: 55883 - protein, 373 aa, Halobacteriovorax sp.
  misc_feature (1)..(373): tr|A0A2D5YRB9|A0A2D5YRB9_9PROT Queuine tRNA-ribosyltran sferase OS=Halobacteriovorax sp. OX=2020862 GN=tgt PE=3 SV=1
MIKVEAKDNKARACTITTAHGEIQTPIFMPVGTRASVKCMWQDQLEEMGAEIILGNTYHLYLRPGHELIERVGGDLHGFMNWKRPILTDSGGYQVFSLSSINKVTEEGVTFASHIDGSRHLISPEKSMEIQKALGSDIVMVFDECPALPATKERLRESMELTLRWAKRCRDYELRPTQNLFGIIQGGLHHDLRLECMERLNEMGFEGLALGGLSVGEKNEEMVSFLDGFVHLMPEDKPRYLMGVGKPLDILNGIRAGLDMFDCVLPTRNARNGQFLTHDGPLNIKNERFKEDTEAPDPDCECKVCKNYTRSYIRHLFTCGEYLAGNLITYHNLHFMLKMVKDARQNIIAGSFDDFYQSFYKRYSSKKWQGKPK

SEQ ID NO: 55884 - protein, 372 aa, Halobacteriovorax sp.
  misc_feature (1)..(372): tr|A0A2S3QSA7|A0A2S3QSA7_9PROT Queuine tRNA-ribosyltran sferase OS=Halobacteriovorax sp. DA5 OX=2067553 GN=tgt PE=3 SV=1
MIKVEGYSGKARATTITTEHGEIKTPIFMPVGTRASVKCMWQEDLYEMNAQIILGNTYHLYLRPGHELIEKVGGGLHGFMNWDRPILTDSGGFQVFSLSDINKITEEGVTFSSHIDGSKHLISPEKSMEIQKGLGSDIVMAFDECPKLPATKETLRESMELTLRWAKRCIDYKLRDYQKLFGIVQGGLHHDLRTECMQRLEEMDFPGLALGGLSVGEKNEEMVDFLNGFVHTMPDQKPRYLMGVGKPLDILNGIRAGIDMFDCVLPTRNARNGQFLTHDGPLNIKNLRFREDTLPPDPSCDCKVCKTYSRSYIRHLYTTGEFLSGNLITYHNLYFMIKMTQDAREAILADRFDDYYKEFYNRYTSRKWASGQ

SEQ ID NO: 55885 - protein, 371 aa, Halobacteroides halobius
  misc_feature (1)..(371): tr|L0KB56|L0KB56_HALHC Queuine tRNA-ribosyltransferase OS=Halobacteroides halobius (strain ATCC 35273 / DSM 51 50 / MD-1) OX=748449 GN=tgt PE=3 SV=1
MSFEYKLKKNCCDTKARVGELSTPHGKIDTPIFMPVGTKATVKSMSPEELEEIKSQIILSNTYHLYLRPGHELIEEAGGLHEFMNWEHPILTDSGGFQVFSLGDLNEITEKGVTFQSHLDGSKHFISPEKSIEIQMSLGADIIMAFDECAPYPAKRDYVKNSLERTTRWLERCIAAHTRDDQALFGIMQGGMYRDLREESAQQITQFDLPGYAIGGLSVGEPKEEMLEVLDYAPDLLPEDKPRYLMGVGTPFDLFEGVMRGVDMFDCVFPTRIARNGAVFTSHGRITIRNAKFKKDFTPLDHECDCYVCNNYTRGYIRHLIKRNEILGLRLTTYHNLYFLLDMMEKIRQAIKEDRFLEYRAQFYKKYGLEE

SEQ ID NO: 55886 - protein, 369 aa, Halocella sp.
  misc_feature (1)..(369): tr|A0A3Q9B5Z2|A0A3Q9B5Z2_9FIRM Queuine tRNA-ribosyltran sferase OS=Halocella sp. SP3-1 OX=2382161 GN=tgt PE=3 S V=1
MSFSFELLHQEKETAARMGKITTVHGEIETPIFMPVGTQATVKSMTPEELWEIGSQIILANTYHLYLRPGSKLIAEAGGLHEFMHWDGPILTDSGGFQVFSLSDLNEITEEGVYFRSHLDGSKHFISPEISMEIQRDLGSDIVMAFDECPPHPADYDYLAKSLEMTIRWAERCKKEMQDTEQALFGIVQGGVYRDLRKASVEALLDIGFPGYAIGGLSVGEKKEEMLEVLDFTVPVMPEDKPRYLMGVGTPEDLLEGVKRGIDMFDCVLPTRIARHGAVFTSHGRITVRNAEYARDFTPLDHECDCYVCQNYTRGYIRHLIKRNEILGARLTTYHNLYFLINLMEEMRDAIQRDRFMEFYRKFYQKYKI

SEQ ID NO: 55887 - protein, 376 aa, Halocynthiibacter arcticus
  misc_feature (1)..(376): tr|A0A126V4E2|A0A126V4E2_9RHOB Queuine tRNA-ribosyltran sferase OS=Halocynthiibacter arcticus OX=1579316 GN=tgt PE=3 SV=1
MTQKFTFDLQATDGQARTGVISTPRGDIRTPAFMPVGTAATVKAMLPESVAATGADILLGNTYHLMLRPTAERIDRLGGLHKFMNWDKPILTDSGGFQVMSLAGLRKMSEEGVKFSSHIDGSKHMLTPERSMEIQKLLGSDIVMCFDECPALPATDAEVSKSMQMSMRWAQRSRDAFGDRPGHALFGIQQGGVTQDLRAESAEKLREIGFDGYAVGGLAVGEGQEAMFGVLDYAPDMLPTDRPRYLMGVGKPDDIVGAVARGIDMMDCVLPSRSGRTGQLFTRNGVINIKNARHADDPRPLDEACTCPACSNYSRAYLHHVFRSQEMISGMLLTWHNLHYFQELMSDMRAAIAVGAFEAFQKKFHEDRAAGDIEPL

SEQ ID NO: 55888 - protein, 374 aa, Halodesulfovibrio marinisediminis
  misc_feature (1)..(374): tr|A0A1N6FWB2|A0A1N6FWB2_9DELT Queuine tRNA-ribosyltran sferase OS=Halodesulfovibrio marinisediminis DSM 17456 OX=1121457 GN=tgt PE=3 SV=1
MAKIGEFTLHATDGAARTGELQTAHGVVQTPIFMPVGTVGSVKGIAPDDLNNIGAEIILGNTYHLYLRPGDDLVARHGGLQKFNSWNKPILTDSGGFQVFSLSDLRKIKEEGVTFRSHLDGSKHLFTPEKVIQIQRNLNSDIMMVLDECVGFGADKEYTARSLEMTTRWAKRCREEYPRGAGDNLLFAITQGGFFKDLRERSIAQLTSEDFDGFALGGLSVGESKEKMMEILYHSAPLLPKDKPRYLMGVGTPLDIINGINAGIDMFDCVLPTRNARNGTLYTSQGKISIKRKEYAEDDGPLDPNCNCYTCRTFSRAYLRHLFQAKELLSFRLNSIHNLTYFLDTVRGARKAIREGRFAEYKKSYEAIYPNEVV

SEQ ID NO: 55889 - protein, 374 aa, Halodesulfovibrio spirochaetisodalis
  misc_feature (1)..(374): tr|A0A1B7XMZ4|A0A1B7XMZ4_9DELT Queuine tRNA-ribosyltran sferase OS=Halodesulfovibrio spirochaetisodalis OX=1560 234 GN=tgt PE=3 SV=1
MANIGEFTLHATDGAARTGELQTAHGVVQTPIFMPVGTVGSVKGIAPDDLNDMGAEIILGNTYHLYLRPGDELVARRGGLQKFNSWNKPILTDSGGFQVFSLSDLRKIKEEGVTFRSHLDGSKHLFTPEKVIQIQRNLNSDIMMVLDECVGYGADKAYTARSLEMTTRWAKRCREEYPRGAGDNLLFAITQGGFHKDLRERSIAQLTSEDFDGFALGGLSVGESKEKMMEILYHSAPLLPKDKPRYLMGVGTPLDIINGINAGIDMFDCVLPTRNARNGTLYTSLGKISIKRKEYAEDDGPLDPNCNCYTCRNFSRAYLRHLYHAKELLSFRLNSIHNLTYFLDTVRGARKAIHAGTFAEYKKSYEAIYPNEVV

SEQ ID NO: 55890 - protein, 379 aa, Halolactibacillus alkaliphilus
  misc_feature (1)..(379): tr|A0A511WZ19|A0A511WZ19_9BACI Queuine tRNA-ribosyltran sferase OS=Halolactibacillus alkaliphilus OX=442899 GN= tgt PE=3 SV=1
MTAIRYELIKTCKQTGARLGRVHTPHGSFETPVFMPVGTQATVKTMSPEELTDMGAGIILSNTYHLWLRPGEDIIEEAGGLHKFMNWDGSILTDSGGFQVFSLSDLRRIEEEGVHFRNHISGEKLFLSPEKAMHIQNSLGSDIMMAFDECPPYPAEHKYMKNSVERTSRWAERCLEAHKRPHDQGLFGIVQGGEYEDLRKQSAKDLTSLDFPGYAIGGLSVGEPKDVMNRVLEFTTPLLPDEKPRYLMGVGSPDSLIDGAIRGIDMFDCVLPTRIARNGTLMTSEGRLVVRNAKYARDFSPIDPNCDCYTCKNYTRAYVRHLIKTDETFGLRLTSYHNLYFLVKLMEQVRQAIREDRLGDFREEFFEQYGFNKPNAKNF

SEQ ID NO: 55891 - protein, 379 aa, Halolactibacillus halophilus
  misc_feature (1)..(379): tr|A0A1I5KZ27|A0A1I5KZ27_9BACI Queuine tRNA-ribosyltran sferase OS=Halolactibacillus halophilus OX=306540 GN=tg t PE=3 SV=1
MTAVRYELIKTCKQTGARLGRVHTPHGSFETPVFMPVGTLATVKTMSPEELTDIGAGIILSNTYHLWLRPGEDIIEEAGGLHKFMNWDGSILTDSGGFQVFSLSDLRKIEEEGVHFRNHISGEKLFLSPEKAMHIQNSLGSDIMMAFDECPPYPAEHKYMKNSVERTSRWAERCLEAHKRPQDQGLFGIVQGGEYEDLRRQSAKDLTSLDFPGYAIGGLSVGEPKDVMNRVLEFTTPLLPNEKPRYLMGVGSPDSLIDGAIRGVDMFDCVLPTRIARNGTLMTSQGRLVVRNAKYARDFSPIDPNCDCYTCKNYTRAYVRHLIKTDETFGLRLTSYHNLYFLVKLMEQVRQAIREDRLGDFREEFFEQYGFNKPNAKNF

SEQ ID NO: 55892 - protein, 379 aa, Halolactibacillus miurensis
  misc_feature (1)..(379): tr|A0A1I6PKH5|A0A1I6PKH5_9BACI Queuine tRNA-ribosyltran sferase OS=Halolactibacillus miurensis OX=306541 GN=tgt PE=3 SV=1
MTAIRYELIKTCKQTGARLGRVHTPHGSFETPVFMPVGTLATVKTMSPEELTEIGAGIILSNTYHLWLRPGEDIIEEAGGLHKFMNWDGSILTDSGGFQVFSLSDLRKIEEEGVHFRNHISGEKLFLSPEKAMQIQNSLGSDIMMAFDECPPYPAEHKYMKNSVERTSRWAERCLEAHKRPQDQGLFGIVQGGEYEDLRRQSAKDLTSLDFPGYAIGGLSVGEPKDVMNRVLEFTTPLLPNEKPRYLMGVGSPDSLIDGAIRGVDMFDCVLPTRIARNGTLMTSQGRLVVRNAKYARDFSPIDPNCDCYTCKNYTRAYVRHLIKTDETFGLRLTSYHNLYFLVKLMEQVRQAIREDRLGDFREEFFEQYGFNKPNAKNF

SEQ ID NO: 55893 - protein, 375 aa, Halomicronema excentricum
  misc_feature (1)..(375): tr|A0A4Q7E2E2|A0A4Q7E2E2_9CYAN Queuine tRNA-ribosyltran sferase OS=Halomicronema excentricum str. Lakshadweep O X=2294035 GN=tgt PE=3 SV=1
MKPFEYQVEATCQYTAARAGKFQTPHGIVETPRFMPVGTLANVKTVTPDQLQHTGAQMVLANTYHLHLQPGEALVEMAGGVHQFMGWHGPMLTDSGGFQVFSLSDIRTISEAGVQFKSPRDGRIINMTPEESIRIQNALGADVIMAFDECPPYPASREAVAVATDRTYRWLQRCIAAHQRPDQALFGIVQGGVYPDLRAQAAAALKELDLPGYAIGGVSVGEPPELIEKIVRATTPLLPPHKPRYLMGVGTHREMVQAIAAGMDLFDCVIPTRLARHGTAIVQGERWNLKNARFRQDLTPLDETCGCYTCRTFTRAYLCHLIHAHEILAHTLLSIHNITALVSFTQRIREAILSDRFVEEFGHWLSPETALSELA

SEQ ID NO: 55894 - protein, 338 aa, Halomicronema hongdechloris
  misc_feature (1)..(338): tr|A0A1Z3HFR9|A0A1Z3HFR9_9CYAN Queuine tRNA-ribosyltran sferase OS=Halomicronema hongdechloris C2206 OX=1641165 GN=tgt PE=3 SV=1
MPVGTLANIKTVTPAQLKMTGAEMVLANTYHLHLQPGEDIVAEAGGLHRFMAWDGPILTDSGGFQVFSLSQIRTITETGVTFQSPRDGRMIQLTPETSIQIQNRLGADVIMAFDECLPYPSAYEVTAAATHRTHRWLQRCVEANQRPDQALFGIVQGGIYLDLRQQAAAALSEFNLPGYAIGGVSVGEPPDLIAKIVQVTTPLLPADKPRYLMGVGTYREMAQAIAAGIDLFDCVIPTRLARHGSALVAGERWNLKNARFRRDHAALDDACPCYTCRYFSRAYLCHLIHAQELLAFTLLSIHNITELVRFTQRIRESILANTFVADFAAWLRSEPTAQ

SEQ ID NO: 55895 - protein, 378 aa, Halomonadaceae bacterium
  misc_feature (1)..(378): tr|A0A139CBH4|A0A139CBH4_9GAMM Queuine tRNA-ribosyltran sferase OS=Halomonadaceae bacterium T82-2 OX=1783518 GN =tgt PE=3 SV=1
MRNDCFMNFEHLASDGRARRGRLTFPRGTVETPAFMPVGTYGTVKGMTPQSVKEIGAEIILGNTFHLWLRPGMEVIEAHGDLHDFAQWDKPILTDSGGFQVFSLGAMRKITEEGVHFRSPVDGAKVFMGPEESMAVQRSLGSDIVMIFDECTPYPATETEARLSMERSLRWAERSRAAHGSSPSALFGIVQGGMYPELRERSLKGLVDIGFDGLAIGGLSVGEPKEEMIRVLDYLPTWMPADKPRYLMGVGKPEDLVEGVRRGVDMFDCVMPTRNGRNGHLFTAEGTVKIRNAKHRHDTRPLEEGCDCYTCQHFSRSYLHHLDRCGEMLGSMLNTIHNLRYYQRVMAGLRGAIEAGTLADFVAAFYARRGLPVPDAPR

SEQ ID NO: 55896 - protein, 375 aa, Halomonadaceae bacterium
  misc_feature (1)..(375): tr|A0A2E2BM79|A0A2E2BM79_9GAMM Queuine tRNA-ribosyltran sferase OS=Halomonadaceae bacterium OX=2026746 GN=tgt P E=3 SV=1
MTFERLATDGRARRGRLSFPRGTVETPAFMPVGTYGTVKGMTPQSVEEIGAEIILGNTFHLWLRPGTEVIEEHGDLHDFAHWNKPILTDSGGFQVFSLGKTRKITEEGVHFRSPVDGSKVFMGPEESMAVQRSLGSDVVMIFDECTPYPATHDEAKRSMEMSLRWAKRSRDAHGDSPSALFGIIQGGMYADLRKTSLEGLDEIGFDGYAIGGLSVGEPKEEMIKVLDYLPEWMPDDKPRYLMGVGKPEDLVEGVRRGVDMFDCVMPTRNGRNGHLFTFEGTIKIRNARHRHDTSPLEADCDCYTCQNFSRGYLHHLDRCGEMLGAMLNTIHNLRHYQRLMAGLRGAIEAGTLANFVEAYYGRRGLPVPPLEPTPE

SEQ ID NO: 55897 - protein, 378 aa, Halomonas aestuarii
  misc_feature (1)..(378): tr|A0A1J0VEI6|A0A1J0VEI6_9GAMM Queuine tRNA-ribosyltran sferase OS=Halomonas aestuarii OX=1897729 GN=tgt PE=3 S V=1
MRKDSFMTFERLAGDGRARRGRLTFPRGTVETPAFMPVGTYGTVKGMTPQSVKEIGAEIILGNTFHLWLRPGTEVIEEHGDLHDFAQWDKPILTDSGGFQVFSLGAMRKITEQGVHFRSPVDGSKVFMGPEESMAVQRSLGSDVVMIFDECTPYPATHDEAKRSMEMSLRWAKRSRDAHGDSPSALFGIIQGGMYPDLREASLKGLDEIGFDGYAIGGLSVGEPKEEMIKVLDYLPEWMPVDKPRYLMGVGKPEDLVEGVRRGVDMFDCVMPTRNGRNGHLFTAEGTVKIRNARHRHDTRPLEEGCDCYTCQHFSRSYLHHLDRCGEMLGSMLNTIHNLRHYQRLMAGLRGAIEAGTLANFVEGFYTQRGLPVPPAPN

SEQ ID NO: 55898 - protein, 401 aa, Halomonas alkaliantarctica
  misc_feature (1)..(401): tr|A0A4R7YNY1|A0A4R7YNY1_9GAMM Queuine tRNA-ribosyltran sferase OS=Halomonas alkaliantarctica OX=232346 GN=tgt PE=3 SV=1
MLIVDPLALHPSRQTNEINELLYMRNECFMRFERLADDGRARRGRLHFPRGTVETPAFMPVGTYGTVKGMTPDSVKEIGAEIILGNTFHLWLRPGTEVIEAHGDLHDFAQWDKPILTDSGGFQVFSLGETRKITEQGVHFRSPVDGSKVFMGPEESMAVQRSLGSDVVMIFDECTPYPATFDEAEKSMELSLRWAKRSRDAHGDSPSALFGIIQGGMHPELRERSLKGLLEIGFDGLAIGGLSVGEPKEEMIKVLDYLPTWMPDDKPRYLMGVGKPEDLVEGVRRGVDMFDCVMPTRNARNGHLFTSDGTVKIRNAKHRFDTRPLDEECDCHTCQNFSRGYLHHLDRCNEMLGSMLNTIHNLRYYQRVMADLRAAIEAGTLTTFVEGFYARRGLPVPALAT

SEQ ID NO: 55899 - protein, 372 aa, Halomonas alkaliphila
  misc_feature (1)..(372): tr|A0A386WXV1|A0A386WXV1_9GAMM Queuine tRNA-ribosyltran sferase OS=Halomonas alkaliphila OX=272774 GN=tgt PE=3 SV=1
MRFERLADDGRARRGRLHFPRGTVETPAFMPVGTYGTVKGMTPDSVKEIGAEIILGNTFHLWLRPGTDVIEAHGDLHDFAQWDKPILTDSGGFQVFSLGEMRKITEQGVHFRSPVDGSKVFMGPEESMAVQRSLGSDVVMIFDECTPYPATFEEAEKSMELSLRWAKRSRDAHGNSPSALFGIIQGGMHPELRERSLKGLLEIGFDGLAIGGLSVGEPKEEMIKVLDYLPTWMPDDTPRYLMGVGKPEDLVEGVRRGVDMFDCVMPTRNARNGHLFTSEGTVKIRNAKHRFDTQPLDAECDCYTCKNFSRGYLHHLDRCNEMLGSMLNTIHNLRYYQRVMADLRAAIEAGTLTTFVEGFYAQRGLPVPPLAN

SEQ ID NO: 55900 - protein, 372 aa, Halomonas andesensis
  misc_feature (1)..(372): tr|A0A433KJG3|A0A433KJG3_9GAMM Queuine tRNA-ribosyltran sferase OS=Halomonas andesensis OX=447567 GN=tgt PE=3 S V=1
MHFERLADDGRARRGRLHFPRGTVETPTFMPVGTYGTVKGMTPDSVKEIGAEIILGNTFHLWLRPGTDVIEAHGDLHDFAQWDKPILTDSGGFQVFSLGEMRKITEQGVHFRSPVDGSKVFMGPEESMAVQRALGSDVVMIFDECTPYPATFEEAEKSMELSLRWAKRSRDAHGDSPSALFGIIQGGMHPELRERSLKGLLDIGFDGLAIGGLSVGEPKEEMIKVLDYLPTWMPDDTPRYLMGVGKPEDLVEGVRRGVDMFDCVMPTRNARNGHLFTSEGTVKIRNAKHRFDTRPLDEACDCYTCKNFSRGYLHHLDRCNEMLGSMLNTIHNLRYYQRVMADLRAAIEAGTLTTFVEGFYAQRGLPVPPLAN

SEQ ID NO: 55901 - protein, 373 aa, Halomonas anticariensis
  misc_feature (1)..(373): tr|S2LB44|S2LB44_HALAF Queuine tRNA-ribosyltransferase OS=Halomonas anticariensis (strain DSM 16096 / FP35) OX =1121939 GN=tgt PE=3 SV=1
MNFERLASDGRARRGRLHFPRGTVETPAFMPVGTYGTVKGMTPASVEEIGAEIILGNTFHLWLRPGTEVIEAHGDLHDFAQWQKPILTDSGGFQVFSLGEMRKITEEGVHFRSPVDGAKVFMGPEESMAVQRSLGSDIVMIFDECTPYPATLEQAETSMELSLRWAKRSRIAHGDSPSALFGIIQGGMYPALRERSLAGLLEIGFDGLAIGGLSVGEPKEQMIEVLDYLPTWMPEDKPRYLMGVGKPEDLVEGVRRGVDMFDCVMPTRNARNGHLFTFEGTIKIRNAKHRHDTRPLEEDCDCYTCQHFSRGYLHHLDRCGEMLGSMLNTIHNLRHYQRVMAGLRGAIEAGTLANFVERFYTQRGLPVPPAPTA

SEQ ID NO: 55902 - protein, 381 aa, Halomonas aquamarina
  misc_feature (1)..(381): tr|A0A1H8HAN2|A0A1H8HAN2_9GAMM Queuine tRNA-ribosyltran sferase OS=Halomonas aquamarina OX=77097 GN=tgt PE=3 SV =1
MRNECFMRFERLAEDGRARRGRLHFPRGTVETPAFMPVGTYGTVKGMTPESVKEIGAEIILGNTFHLWLRPGTDVIEAHGDLHDFAQWDKPILTDSGGFQVFSLGEMRKITEQGVHFRSPVDGSKVFMGPEESMAVQRSLGSDVVMIFDECTPYPATFEEAEKSMELSLRWAKRSRDAHGDSPSALFGIIQGGMHPELRERSLKGLLEIGFDGLAIGGLSVGEPKEEMIKVLDYLPTWMPDDTPRYLMGVGKPEDLVEGVRRGVDMFDCVMPTRNARNGHLFTSDGTVKIRNAKHRFDTRPLDEECDCHTCQNFSRGYLHHLDRCNEMLGSMLNTIHNLRYYQRVMADLRAAIEAGTLTTFVESFYARRGLPVPPLAESDT

SEQ ID NO: 55903 - protein, 378 aa, Halomonas arcis
  misc_feature (1)..(378): tr|A0A1H0BGI7|A0A1H0BGI7_9GAMM Queuine tRNA-ribosyltran sferase OS=Halomonas arcis OX=416873 GN=tgt PE=3 SV=1
MRNDCFMRFERLADDGRARRGRLHFPRGTVETPAFMPVGTYGTVKGMTPESVKEIGAEIILGNTFHLWLRPGTQVIEAHGDLHDFAQWDKPILTDSGGFQVFSLGETRKITEQGVHFRSPVDGSKVFMGPEESMAVQRSLGSDVVMIFDECTPYPATFEEAEKSMELSLRWAKRSREAHGDSPSALFGIIQGGMHPELRERSLKGLLDIGFDGLAIGGLSVGEPKEEMIKVLDYLPTWMPDDTPRYLMGVGKPEDLVEGVRRGVDMFDCVMPTRNARNGHLFTAEGTVKIRNAVHRFDTQPLEEGCDCHTCQHFSRGYLHHLDRCNEMLGSMLNTIHNLRYYQRVMADLRAAIEAGTLTNFVEGFYARRGLPVPPLAN

SEQ ID NO: 55904 - protein, 378 aa, Halomonas beimenensis
  misc_feature (1)..(378): tr|A0A291P3E5|A0A291P3E5_9GAMM Queuine tRNA-ribosyltran sferase OS=Halomonas beimenensis OX=475662 GN=tgt PE=3 SV=1
MRDECFMTFEHLASDGRARRGRLSFPRGTVETPAFMPVGTYGTVKGMTPQSVKEIGAEIILGNTFHLWLRPGTEVIEGHGDLHDFAQWDKPILTDSGGFQVFSLGEMRKITEEGVHFRSPVDGSRVFMGPEESMAVQRSLGSDIVMIFDECTPYPASLEEARRSMEMSLRWARRSRDAHGDSPSALFGIIQGGMYPELREQSLKGLEAIGFDGYAIGGLSVGEPKEEMLAVLDYLPEWMPADKPRYLMGVGKPEDLVEGVRRGVDMFDCVMPTRNARNGHLFTGEGTIKIRNAKHRHDTRPLDEDCDCYTCQHFSRAYLHHLDRCGEMLGSMLNTIHNLRHYQRLMAGLRGAIEAGTLAHFVDGFYAQRGLPVPPAPN

SEQ ID NO: 55905 - protein, 372 aa, Halomonas boliviensis
  misc_feature (1)..(372): tr|A0A265E3N7|A0A265E3N7_9GAMM Queuine tRNA-ribosyltran sferase OS=Halomonas boliviensis LC1 OX=1072583 GN=tgt PE=3 SV=1
MRFEHLADDGRARRGRLHFPRGTVETPAFMPVGTYGTVKGMTPDSVKEIGAEIILGNTFHLWLRPGTEVIEAHGDLHDFAQWDKPILTDSGGFQVFSLGETRKITEQGVHFRSPVDGSKVFMGPEESMAVQRSLGSDVVMIFDECTPYPATFDEAEKSMELSLRWAKRSRDAHGDSPSALFGIIQGGMHPELRERSLKGLLEIGFDGLAIGGLSVGEPKEEMIKVLDYLPTWMPDDKPRYLMGVGKPEDLVEGVRRGVDMFDCVMPTRNARNGHLFTSEGTVKIRNAKHRFDTRPLDEECDCHTCKSFSRGYLHHLDRCNEMLGSMLNTIHNLRYYQRVMADLRAAIEAGTLTTFVEGFYARRGLPVPPLAN

SEQ ID NO: 55906 - protein, 372 aa, Halomonas campaniensis; identical to SEQ ID NO: 55899
  misc_feature (1)..(372): tr|A0A060BCP0|A0A060BCP0_9GAMM Queuine tRNA-ribosyltran sferase OS=Halomonas campaniensis OX=213554 GN=tgt PE=3 SV=1

SEQ ID NO: 55907 - protein, 379 aa, Halomonas campaniensis
  misc_feature (1)..(379): tr|A0A246RYQ9|A0A246RYQ9_9GAMM Queuine tRNA-ribosyltran sferase OS=Halomonas campaniensis OX=213554 GN=tgt PE=3 SV=1
MRNECFMRFERLADDGRARRGRLHFPRGTVETPAFMPVGTYGTVKGMTPDSVKEIGAEIILGNTFHLWLRPGTEVIEAHGDLHDFAQWDKPILTDSGGFQVFSLGETRKITEQGVHFRSPVDGSKVFMGPEESMAVQRSLGSDVVMIFDECTPYPATFEEAEKSMELSLRWAKRSRDAHGDSPSALFGIIQGGMHPELRERSLKGLLEIGFDGLAIGGLSVGEPKEEMIKVLDYLPTWMPDEKPRYLMGVGKPEDLVEGVRRGVDMFDCVMPTRNARNGHLFTSEGTVKIRNAKHRFDTRPLDEECDCHTCQNFSRGYLHHLDRCNEMLGSMLNTIHNLRYYQRVMADLRAAIEAGTLTTFVEGFYARRGLPVPPLSQP

SEQ ID NO: 55908 - protein, 378 aa, Halomonas caseinilytica
  misc_feature (1)..(378): tr|A0A1M6VH85|A0A1M6VH85_9GAMM Queuine tRNA-ribosyltran sferase OS=Halomonas caseinilytica OX=438744 GN=tgt PE= 3 SV=1
MRNECFMTFERLASDGRARRGRLTFPRGTVETPAFMPVGTYGTVKGMTPQSVQEIGAEIILGNTFHLWLRPGTEVIEAHGDLHDFAQWDKPILTDSGGFQVFSLGEMRKITEQGVHFRSPVDGAKVFMGPEESMAVQRALGSDIVMIFDECTPYPATFDEARRSMEMSLRWAQRSRDAHGASPSALFGIIQGGMYPALREASLKGLGEIGFDGYAIGGLSVGEPKEEMLEVLDYLPEWMPDDKPRYLMGVGKPEDLVEGVRRGVDMFDCVMPTRNARNGHLFTAEGTVKIRNARHRHDTGPLEEGCDCYTCRNFSRAYLHHLDRCGEMLGSMLNTVHNLRHYQRLMAGLRGAIEAGTLAHFVEGFYAQRGLPVPPVPN

SEQ ID NO: 55909 - protein, 378 aa, Halomonas chromatireducens
  misc_feature (1)..(378): tr|A0A109UKR6|A0A109UKR6_9GAMM Queuine tRNA-ribosyltran sferase OS=Halomonas chromatireducens OX=507626 GN=tgt PE=3 SV=1
MRNESFMSFERLASDGRARRGRLTFPRGTVETPAFMPVGTYGTVKGMTPASVEEIGAEIILGNTFHLWLRPGTEVIEGHGDLHDFSQWHKPILTDSGGFQVFSLGKMRKITEEGVQFRSPVDGAKVFMGPEESIAVQRSLGSDVVMIFDECTPYPATEQEAELSMERSLRWAKRSREAHGDSPSALFGIIQGGMYPELRRRSLDGLLEIGFDGLAIGGLSVGEPKEEMIGVLNYLPEWMPEEYPRYLMGVGKPEDLVEGVRRGVDMFDCVMPTRNARNGHLFTAEGTVKIRNAKHRHDTRPLEEGCDCYTCQNFSRGYLHHLDRCGEMLGSMLNTIHNLRHYQRLMAGLRGAIEAGTLADFVEGYYEQRGLPVPPAPN

SEQ ID NO: 55910 - protein, 378 aa, Halomonas cupida
  misc_feature (1)..(378): tr|A0A1M7IMV7|A0A1M7IMV7_9GAMM Queuine tRNA-ribosyltran sferase OS=Halomonas cupida OX=44933 GN=tgt PE=3 SV=1
MRNECFMRFEQLASDGRARRGRITFPRGTIETPTFMPVGTYGTVKGMTPVSVEEIGAEIILGNTFHLWLRPGTEVIEAHGDLHDFAQWQKPILTDSGGFQVFSLGEMRKITEEGVHFRSPVDGSKVFMGPEESMAVQRSLGSDIVMIFDECTPWPATFEEAKRSMEMSLRWAKRSRTAHGDSPSALFGIIQGGMYPELREQSLKGLDEIGFDGYAIGGLSVGEPKEEMIKVLDYLPEWMPADKPRYLMGVGKPEDLVEGVRRGVDMFDCVMPTRNARNGHLFTFEGTVKIRNAKHRHDTRPLEDDCDCYTCQHFSRSYLHHLDRCGEMLGSMLNTIHNLRHYQRVMAGLRGAIEAGTLADFVEGFYAQRGMPVPPAPN

SEQ ID NO: 55911 - protein, 378 aa, Halomonas daqiaonensis
  misc_feature (1)..(378): tr|A0A1H7QZ93|A0A1H7QZ93_9GAMM Queuine tRNA-ribosyltran sferase OS=Halomonas daqiaonensis OX=650850 GN=tgt PE=3 SV=1
MRDESFMTFERLASDGRARRGRLTFPRGTVETPAFMPVGTYGTVKGMTPVSVEEIGAEIILGNTFHLWLRPGTEVIEAHGDLHDFAQWDKPILTDSGGFQVFSLGAMRKITEQGVHFRSPVDGAKVFMGPEESMAVQRSLGSDVVMIFDECTPYPATEREAARSMELSLRWAKRSREAHGDSPSALFGIIQGGMYPEQREASLKGLLEIGFDGLAIGGLSVGEPKHEMNEVLDYLPTWMPDDTPRYLMGVGKPEDLVEGVRRGIDMFDCVMPTRNGRNGHLFTAEGTVKIRNAKHRFDTRPLEAGCDCYTCGHFSRAYLHHLDRCGEMLGSMLNTVHNLRHYQRLMAGLRGAIEAGTLANFVEGFYAQRGLPVPPTPN

SEQ ID NO: 55912 - protein, 378 aa, Halomonas daqingensis
  misc_feature (1)..(378): tr|A0A1H5U451|A0A1H5U451_9GAMM Queuine tRNA-ribosyltran sferase OS=Halomonas daqingensis OX=419596 GN=tgt PE=3 SV=1
MRNECFMSFERLASDGRARRGRLTFPRGTVETPAFMPVGTYGTVKGMTPKSVEEIGAEIILGNTFHLWLRPGTEVIEAHGDLHDFAQWHKPILTDSGGFQVFSLGEMRKITEEGVHFRSPVDGAKVFMGPEESMAVQRSLGSDVVMIFDECTPYPATEKEAEVSMERSLRWARRSRDAHGSSPSALFGIIQGGMYPELRRRSLEGLMEIGFDGLAIGGLSVGEPKEEMIGVLNYLPEWMPEEYPRYLMGVGKPEDLVEGVRRGVDMFDCVMPTRNARNGHLFTAAGTIKIRNAKHRHDTRPLEDDCDCYTCQNFSRSYLHHLDRCGEMLGSMLNTIHNLRYYQRLMAGLRGAIEAGTLADFVAGYYAQRGLPVPDAPD

SEQ ID NO: 55913 - protein, 378 aa, Halomonas desiderata
  misc_feature (1)..(378): tr|A0A243T6Z2|A0A243T6Z2_9GAMM Queuine tRNA-ribosyltran sferase OS=Halomonas desiderata SP1 OX=1191209 GN=tgt P E=3 SV=1
MRNECFMSFERLASDGRARRGRLTFPRGTVETPAFMPVGTYGTVKGMTPKSVEEIGAEIILGNTFHLWLRPGTEVIEAHGDLHDFAQWHKPILTDSGGFQVFSLGEMRKITEEGVHFRSPVDGAKVFMGPEESMAVQRSLGSDVVMIFDECTPYPATEKEAEVSMERSLRWAKRSRDAHGSSPSALFGIIQGGMYPELRRRSLEGLMEIGFDGLAIGGLSVGEPKEEMIGVLNYLPEWMPEEYPRYLMGVGKPEDLVEGVRRGVDMFDCVMPTRNARNGHLFTAAGTIKIRNAKHRHDTRPLEDDCDCYTCQNFSRSYLHHLDRCGEMLGSMLNTIHNLRYYQRLMAGLRGAIEAGTLADFVAGYYAQRGLPVPDAPD

SEQ ID NO: 55914 - protein, 378 aa, Halomonas elongata
  misc_feature (1)..(378): tr|E1V6F6|E1V6F6_HALED Queuine tRNA-ribosyltransferase OS=Halomonas elongata (strain ATCC 33173 / DSM 2581 / N BRC 15536 / NCIMB 2198 / 1H9) OX=768066 GN=tgt PE=3 SV= 1
MRNECFMTFERLATDGRARRGRLTFPRGTVETPAFMPVGTYGTVKGMTPQSVKEIGAEIILGNTFHLWLRPGTEVIEGHGDLHDFAQWDKPILTDSGGFQVFSLGEMRKITEQGVHFRSPVDGAKVFMGPEESMAVQRSLGSDIVMIFDECTPYPASFDEAKRSMEMSLRWAQRSRDAHGDSPSALFGIIQGGMYPALREASLKGLDEIGFDGYAIGGLSVGEPKEKMIGVLDYLPEWMPADKPRYLMGVGKPEDLVEGVRRGVDMFDCVMPTRNARNGHLFTAEGTVKIRNARHRHDTGPLEEGCDCYTCQHFSRAYLHHLDRCGEMLGSMLNTIHNLRHYQRLMAGLRGAIEAGTLANFVEGFYAQRGLPVPPAPN

SEQ ID NO: 55915 - protein, 378 aa, Halomonas elongata
  misc_feature (1)..(378): tr|A0A1B8P6Y2|A0A1B8P6Y2_HALEL Queuine tRNA-ribosyltran sferase OS=Halomonas elongata OX=2746 GN=tgt PE=3 SV=1
MRNECFMTFERLATDGRARRGRLTFPRGTVETPAFMPVGTYGTVKGMTPQSVKEIGAEIILGNTFHLWLRPGTEVIEGHGDLHDFAQWDKPILTDSGGFQVFSLGEMRKITEQGVHFRSPVDGAKVFMGPEESMAVQRSLGSDIVMIFDECTPYPASFDEAKRSMEMSLRWAQRSRDAHGDSPSALFGIIQGGMYPTLREASLKGLDEIGFDGYAIGGLSVGEPKEEMIGVLDYLPEWMPADKPRYLMGVGKPEDLVEGVRRGVDMFDCVMPTRNARNGHLFTAEGTVKIRNARHRHDTGPLEEGCDCYTCQHFSRAYLHHLDRCGEMLGSMLNTVHNLRHYQRLMAGLRGAIEAGTLANFVEGFYAQRGLPVPPAPN

SEQ ID NO: 55916 - protein, 378 aa, Halomonas endophytica
  misc_feature (1)..(378): tr|A0A2N7U1U6|A0A2N7U1U6_9GAMM Queuine tRNA-ribosyltran sferase OS=Halomonas endophytica OX=2033802 GN=tgt PE=3 SV=1
MRKESFMTFERLASDGRARRGRLTFPRGTVETPAFMPVGTYGTVKGMTPASVEEIGAEIILGNTFHLWLRPGTEVIEGHGDLHDFSQWQKPILTDSGGFQVFSLGEMRKITEAGVHFRSPVDGAKVFMGPEESMAVQRSLGSDVVMIFDECTPYPATEKEAELSMERSLRWAQRSRDAHGDSPSALFGIIQGGMYPELRKRSLDGLLEIGFDGLAIGGLSVGEPKEEMLKVLNYLPEWMPEEYPRYLMGVGKPEDLVEGVRRGVDMFDCVMPTRNARNGHLFTFEGTVKIRNARHRHDTRPLEDDCDCYTCQHFSRGYLHHLDRCGEMLGSMLNTIHNLRHYQRLMAGLRGAIEAGTLADFVEGYYAQRGLPVPPVPN

SEQ ID NO: 55917 - protein, 378 aa, Halomonas eurihalina
  misc_feature (1)..(378): tr|A0A5D9CRK9|A0A5D9CRK9_HALER Queuine tRNA-ribosyltran sferase OS=Halomonas eurihalina OX=42566 GN=tgt PE=3 SV =1
MRNECFMTFERLATDGRARRGRLTFPRGTVETPAFMPVGTYGTVKGMTPQSVEEIGADIILGNTFHLWLRPGTEVIEGHGDLHDFAQWDKPILTDSGGFQVFSLGEMRKITEQGVHFRSPVDGAKVFMGPEESMAVQRSLGSDIVMIFDECTPYPASFDEAKRSMEMSLRWAQRSRDAHGDSPSALFGIIQGGMYPALREASLKGLDAIGFDGYAIGGLSVGEPKEEMIEVLDYLPEWMPADKPRYLMGVGKPEDLVEGVRRGVDMFDCVMPTRNARNGHLFTAEGTVKIRNAKHRHDTGPLEEGCDCYTCQHFSRAYLHHLDRCGEMLGSMLNTVHNLRHYQRLMAGLRGAIEAGTLANFVEGFYAQRGLPVPPAPN

SEQ ID NO: 55918 - protein, 378 aa, Halomonas gudaonensis
  misc_feature (1)..(378): tr|A0A1G9A806|A0A1G9A806_9GAMM Queuine tRNA-ribosyltran sferase OS=Halomonas gudaonensis OX=376427 GN=tgt PE=3 SV=1
MRNDCFMTFEHLASDGRARRGRLRFPRGTVETPAFMPVGTYGTVKGMTPAMVEEIGAEIILGNTFHLWLRPGTEVIEAHGDLHDFAQWQGPILTDSGGFQVFSLGDIRKITEQGVHFRSPVDGAKVFMGPEESMAVQRALGSDVVMIFDECTPYPADFETAEASMELSLRWAKRSREAHGDSPSALFGIIQGGMHPELRERSLKGLLDIGFDGLAIGGLSVGEPKEEMMRALDYLPTWMPPEHPRYLMGVGKPEDLVEGVRRGIDMFDCVMPTRNARNGHLFTATGTVKIRNARHRHDTGPLEADCDCYTCRHFSRAYLHHLDRCNEMLGAMLNTIHNLRYYQRLMAGLRGAIEAGTLANFVEGFYAQRGLPVPPAPN

SEQ ID NO: 55919 - protein, 372 aa, Halomonas halmophila
  misc_feature (1)..(372): tr|A0A4Y4F5D9|A0A4Y4F5D9_9GAMM Queuine tRNA-ribosyltran sferase OS=Halomonas halmophila OX=252 GN=tgt PE=3 SV=1
MTFERHASDGRARRGTLTFPRGRVETPAFMPVGTYGTVKGMTPQSVQEIGAEIILGNTFHLWLRPGTEVIEQHGDLHDFAQWDKPILTDSGGFQVFSLGEMRKITEQGVHFRSPVDGAKVFMGPEESMAVQRSLGSDIVMIFDECTPYPATFEEAKRSMEMSLRWAQRSRDAHGDSPSALFGIIQGGMYPELREASLKGLDEIGFDGYAIGGLSVGEPKEEMIEVLDYLPEWMPDDKPRYLMGVGKPEDLVEGVRRGVDMFDCVMPTRNARNGHLFTAEGTVKIRNARHRHDTGPLEAGCDCYTCQNFSRAYLHHLDRCGEMLGSMLNTVHNLRHYQRLMAGLRGAIEAGTLANFVEVFYAQRGLPLPPAPN

SEQ ID NO: 55920 - protein, 372 aa, Halomonas halophila
  misc_feature (1)..(372): tr|A0A510ZFT5|A0A510ZFT5_9GAMM Queuine tRNA-ribosyltran sferase OS=Halomonas halophila OX=29573 GN=tgt PE=3 SV= 1
MNFEHLASDGRARRGRLSFPRGTVETPAFMPVGTYGTVKGMTPESVKEIGAEIILGNTFHLWLRPGTEVIEEHGDLHDFAQWDKPILTDSGGFQVFSLGEMRKITEQGVHFRSPVDGSKVFMGPEESMAVQRSLGSDIVMIFDECTPYPATEDEARKSMEMSLRWAQRSRDAHGDSPSALFGIIQGGMYPELREASLEGLEKIGFDGYAIGGLSVGEPKEEMIKVLDYLPEWMPADKPRYLMGVGKPEDLVEGVRRGVDMFDCVMPTRNARNGHLFTGEGTVKIRNAKHRHDTRPLDEECDCYTCRNFSRAYLHHLDRCGEMLGSMLNTIHNLRHYQRLMAGLRGAIEAGTLANFVEGFYAQRGLPVPPAPN

SEQ ID NO: 55921 - protein, 378 aa, Halomonas heilongjiangensis
  misc_feature (1)..(378): tr|A0A2N7TIA2|A0A2N7TIA2_9GAMM Queuine tRNA-ribosyltran sferase OS=Halomonas heilongjiangensis OX=1387883 GN=tg t PE=3 SV=1
MRNECFMSFERLASDGRARRGRLTFPRGTVETPAFMPVGTYGTVKGMTPASVEEIGAEIILGNTFHLWLRPGMEVIEAHGDLHDFAQWDRPILTDSGGFQVFSLGAMRKITEQGVHFRSPVDGAKVFMGPEESMAVQRSLGSDVVMIFDECTPYPATEQDAALSMERSLRWATRSREAHGDSPSALFGIIQGGMYPSLRERSLAGLLEIGFDGLAIGGLSVGEPKEEMIRVLDYLPTWMPDDKPRYLMGVGKPEDLVEGVRRGVDMFDCVMPTRNARNGHLFTAEGTVKIRNAKHRHDTRPLEEGCDCYTCQHFSRGYLHHLDRCGEMLGSMLNTIHNLRHYQRLMAGLRGAIEAGTLANFVEGFYAQRGLPVPPAPN

SEQ ID NO: 55922 - protein, 378 aa, Halomonas huangheensis
  misc_feature (1)..(378): tr|W1NAC2|W1NAC2_9GAMM Queuine tRNA-ribosyltransferase OS=Halomonas huangheensis OX=1178482 GN=tgt PE=3 SV=1
MRNECFMSFEQLATDGRARRGRISFPRGTIETPTFMPVGTYGTVKGMTPASVEEIGAEIILGNTFHLWLRPGTDVIEAHGDLHDFAQWHKPILTDSGGFQVFSLGEMRKITEEGVHFRSPVDGSKVFMGPEESMAVQRSLGSDIVMIFDECTPWPATFEEAKRSMEMSLRWANRSRIAHGDSPSALFGIIQGGMYPELREQSLKGLDEIGFDGYAIGGLSVGEPKEEMIKVLDYLPEWMPADKPRYLMGVGKPEDLVEGVRRGVDMFDCVMPTRNARNGHLFTFEGTVKIRNAKHRHDTGPLEEGCDCYTCQNFSRGYLHHLDRCGEMLGSMLNTIHNLRHYQRVMAGLRGAIEAGTLADFVEDFYAQRGLPVPPAPN

SEQ ID NO: 55923 - protein, 375 aa, Halomonas hydrothermalis
  misc_feature (1)..(375): tr|A0A291JU36|A0A291JU36_9GAMM Queuine tRNA-ribosyltran sferase OS=Halomonas hydrothermalis OX=115561 GN=tgt PE =3 SV=1
MRFERLAEDGRARRGRLHFPRGTVETPAFMPVGTYGTVKGMTPESVKEIGAEIILGNTFHLWLRPGTDVIEAHGDLHDFAQWDKPILTDSGGFQVFSLGEMRKITEQGVHFRSPVDGSKVFMGPEESMAVQRSLGSDVVMIFDECTPYPATFEEAEKSMELSLRWAKRSRTAHGDSPSALFGIIQGGMYPELRERSLKGLLDIGFDGLAIGGLSVGEPKEEMIKVLDYLPTWMPDDTPRYLMGVGKPEDLVEGVRRGVDMFDCVMPTRNARNGHLFTSDGIVKIRNAKHRFDTRPLDEECDCHTCQNFSRGYLHHLDRCNEMLGSMLNTIHNLRYYQRVMADLRAAIEAGTLTTFVEGFYARRGLPVPPLAGPET

SEQ ID NO: 55924 - protein, 378 aa, Halomonas ilicicola
  misc_feature (1)..(378): tr|A0A1M4T7B2|A0A1M4T7B2_9GAMM Queuine tRNA-ribosyltran sferase OS=Halomonas ilicicola DSM 19980 OX=1121942 GN= tgt PE=3 SV=1
MRNDCFMKFDRLASDGRARRGRLTFPRGTVETPAFMPVGTYGTVKGMTPQSVEEIGAEIILGNTFHLWLRPGTEVIEAHGDLHDFSQWQGPILTDSGGFQVFSLGAMRKITEAGVHFRSPVDGAKVFMGPEESMAVQRSLGSDVVMIFDECTPYPATPDEAQRSMELSLRWAERSRIAHGDSPSALFGIIQGGMYPELRKRSLEGLEAIGFDGLAIGGLSVGEPKAEMIEVLDYLPTWMPEDKPRYLMGVGKPEDLVEGVRRGIDMFDCVMPTRNARNGHLFTAEGTIKIRNARHRHDTRPLEADCDCYTCRHFSRGYLHHLDRCGEMLGAMLNTIHNLRHYQRLMAGLRGAIEAGTLANFVGMFYARRGLPVPDAPH

SEQ ID NO: 55925 - protein, 378 aa, Halomonas korlensis
  misc_feature (1)..(378): tr|A0A1I7I874|A0A1I7I874_9GAMM Queuine tRNA-ribosyltran sferase OS=Halomonas korlensis OX=463301 GN=tgt PE=3 SV =1
MRDESFMTFEHLASDGRARRGRLTFPRGSVETPAFMPVGTYGTVKGMTPAAVEEIGAEIILGNTFHLWLRPGTEVIEAHGDLHDFAQWQKPILTDSGGFQVFSLGETRKITEQGVHFRSPVDGAKVFMGPEESMAVQRALGSDVVMIFDECTPYPATEQEAEVSMERSLRWAKRSREAHGDSSSALFGIIQGGMYPELRRRSLEGLLEIGFDGLAIGGLSVGEPKHEMIATLDYLPDWMPAQYPRYLMGVGKPEDLVEGVRRGIDMFDCVMPTRNARNAHLFTFDGTVKIRNAKHRHDTRPLEAGCDCYTCQHFSRGYLHHLERCGEMLGSMLNTVHNLRHYQRLMAGLRGAIEAGTLANFVEGFYAQRGLPVPPAPN

SEQ ID NO: 55926 - protein, 381 aa, Halomonas meridiana
  misc_feature (1)..(381): tr|A0A0D7UZ22|A0A0D7UZ22_9GAMM Queuine tRNA-ribosyltran sferase OS=Halomonas meridiana OX=29570 GN=tgt PE=3 SV= 1
MRNECFMRFERLAEDGRARRGRLHFPRGTVETPAFMPVGTYGTVKGMTPESVKEIGAEIILGNTFHLWLRPGTDVIEAHGDLHDFAQWDKPILTDSGGFQVFSLGEMRKITEQGVHFRSPVDGSKVFMGPEESMAVQRSLGSDVVMIFDECTPYPATFEEAEKSMELSLRWAKRSRDAHGDSPSALFGIIQGGMHPELRERSLKGLLEIGFDGLAIGGLSVGEPKEEMIKVLDYLPTWMPDDTPRYLMGVGKPEDLVEGVRRGVDMFDCVMPTRNARNGHLFTSEGTVKIRNAKHRFDTRPLDEECDCHTCQNFSRGYLHHLDRCNEMLGSMLNTIHNLRYYQRVMADLRAAIEAGTLTTFVESFYARRGLPVPPLAGAES

SEQ ID NO: 55927 - protein, 381 aa, Halomonas meridiana; identical to SEQ ID NO: 55902
  misc_feature (1)..(381): tr|A0A1N6DAX5|A0A1N6DAX5_9GAMM Queuine tRNA-ribosyltran sferase OS=Halomonas meridiana OX=29570 GN=tgt PE=3 SV= 1

SEQ ID NO: 55928 - protein, 378 aa, Halomonas muralis
  misc_feature (1)..(378): tr|A0A1G9RY95|A0A1G9RY95_9GAMM Queuine tRNA-ribosyltran sferase OS=Halomonas muralis OX=119000 GN=tgt PE=3 SV=1
MRNECFMSFERLANDGRARRGRLSFPRGTVETPAFMPVGTYGTVKGMTPQSVKDIGAEIILGNTFHLWLRPGVEVIEAHGDLHDFAQWDRPILTDSGGFQVFSLGAMRKITEQGVHFRSPVDGAKVFMGPEESMAVQRSLGSDVVMIFDECTPYPATEEEAKHSMERSLRWAERSRIAHGDSPSALFGIIQGGMYPELRERSLKGLLETGFDGLAIGGLSVGEPKEAMIEVLDYLPTWMPDEMPRYLMGVGKPEDLVEGVRRGIDMFDCVMPTRNARNGHLFSAEGTVKIRNAKHRHDTRPIEEGCDCYTCQHFSRGYLHHLDRCGEMLGSMLNTIHNLRHYQRVMSGLRGAIEAGTLANFVETFYARRDMPVPDAPS

SEQ ID NO: 55929 - protein, 372 aa, Halomonas nigrificans
  misc_feature (1)..(372): tr|A0A2A4HRW4|A0A2A4HRW4_9GAMM Queuine tRNA-ribosyltran sferase OS=Halomonas nigrificans OX=2042704 GN=tgt PE=3 SV=1
MRFERLAEDGRARRGRLHFPRGTVETPAFMPVGTYGTVKGMTPDSIKEIGAEIILGNTFHLWLRPGTDVIEAHGDLHDFAQWDKPILTDSGGFQVFSLGEMRKITEQGVHFRSPVDGSKVFMGPEESMAVQRSLGSDVVMIFDECTPYPATFEEAEKSMELSLRWAKRSRDAHGDSPSALFGIIQGGMHPELRERSLKGLLEIGFDGLAIGGLSVGEPKEEMIKVLDYLPTWMPDETPRYLMGVGKPEDLVEGVRRGVDMFDCVMPTRNARNGHLFTSEGTVKIRNAKHRFDTRPLDEECDCYTCKNFSRGYLHHLDRCNEMLGSMLNTIHNLRYYQRVMADLRAAIEAGTLTTFVEGFYAQRGLPVPPLAN

SEQ ID NO: 55930 - protein, 372 aa, Halomonas nitroreducens
  misc_feature (1)..(372): tr|A0A431V1M2|A0A431V1M2_9GAMM Queuine tRNA-ribosyltran sferase OS=Halomonas nitroreducens OX=447425 GN=tgt PE= 3 SV=1
MTFEPLASDGRARRGRLTFPRGTVETPAFMPVGTYGTVKGMTPQAVEEIGAEIILGNTFHLWLRPGTEVIEAHGDLHDFAQWDKPILTDSGGFQVFSLGEMRKITEEGVHFRSPVDGAKVFMGPEESMAVQRSLGSDIVMIFDECTPYPATLEEARRSMEMSLRWARRSRDAHGDSPSALFGIIQGGMYPQLREQSLKGLEAIGFDGYAIGGLSVGEPKAEMIEVLDYLPEWMPADKPRYLMGVGKPEDLVEGVRRGVDMFDCVMPTRNARNGHLFTAEGTVKIRNAKHRHDTAPLEADCDCYTCQHFSRAYLHHLDRCGEMLGSMLNTIHNLRHYQRLMAGLRGAIEAGTLANFVEGFYARRGLPVPPAPN

SEQ ID NO: 55931 - protein, 344 aa, Halomonas olivaria
  misc_feature (1)..(344): tr|A0A3T1DIP0|A0A3T1DIP0_9GAMM Queuine tRNA-ribosyltran sferase OS=Halomonas olivaria OX=390919 GN=tgt PE=3 SV= 1
MRNECFMRFERLADDGRARRGRLHFPRGTVETPAFMPVGTYGTVKGMTPDSVKEIGAEIILGNTFHLWLRPGTEVIEAHGDLHDFAQWDKPILTDSGGFQVFSLGETRKITEQGVHFRSPVDGSKVFMGPEESMAVQRSLGSDVVMIFDECTPYPATFEEAEKSMELSLRWAKRSRDAHGDSPSALFGIIQGGMHPELRERSLKGLLEIGFDGLAIGGLSVGEPKEEMIKVLDYLPTWMPDEKPRYLMGVGKPEDLVEGVRRGVDMFDCVMPTRNARNGHLFTSEGTVKIRNAKHRFDTRPLDEECDCHTCQHFSGAICIIWIAVMKCSARCSIPSTTYATTSV

SEQ ID NO: 55932 - protein, 378 aa, Halomonas pacifica
  misc_feature (1)..(378): tr|A0A510X5V6|A0A510X5V6_9GAMM Queuine tRNA-ribosyltran sferase OS=Halomonas pacifica OX=77098 GN=tgt PE=3 SV=1
MRNDCFMTFEHLASDGRARRGRLTFPRGTVETPAFMPVGTYGTVKGMTPASVKEIGAEIILGNTFHLWLRPGTEVIEAHGDLHDFAQWDKPILTDSGGFQVFSLGEMRKITEEGVHFRSPVDGAKVFMGPEESMAVQRSLGSDVVMIFDECTPYPATEREAELSMERSLRWAKRSRDAHGNSPSALFGIIQGGMYPELRRRSLDGLLEIGFDGLAIGGLSVGEPKEEMIKVLDYLPTWMPDDKPRYLMGVGKPEDLVEGVRRGVDMFDCVMPTRNARNGHLFTFEGTVKIRNAKHRHDTRPLEEDCDCYTCQHFSRAYLHHLDRCGEMLGSMLNTIHNLRHYQRLMAGLRGAIEAGTLANFVERYYARRGLPVPEAPQ

SEQ ID NO: 55933 - protein, 379 aa, Halomonas pantelleriensis
  misc_feature (1)..(379): tr|A0A1G9S966|A0A1G9S966_9GAMM Queuine tRNA-ribosyltran sferase OS=Halomonas pantelleriensis OX=48727 GN=tgt PE =3 SV=1
MRNDCFMSFEQLASDGRARRGRLSFPRGTVETPAFMPVGTYGTVKGMTPQSVEEIGAEIILGNTFHLWLRPGTEVIEGHGDLHDFSQWHKPILTDSGGFQVFSLGEMRKITEQGVHFRSPVDGSKVFMGPEESMAVQRSLGSDVVMIFDECTPYPATKQEAEFSMQRSLRWAQRSRDAHGDSSSALFGIIQGGMYPALREASLKGLLDIGFDGLAIGGLSVGEPKEEMIKVLDYLPTWMPAEKPRYLMGVGKPEDLVEGVRRGVDMFDCVMPTRNARNGHLFTAEGTVKIRNAKHRHDTRPLEADCDCYTCQHFSRGYLHHLDRCGEMLGSMLNTIHNLRHYQRLMAGLRGAIEAGTLANFVEMFYARRGLPVPPAPEQ

SEQ ID NO: 55934 - protein, 378 aa, Halomonas saccharevitans
  misc_feature (1)..(378): tr|A0A1I7AZ25|A0A1I7AZ25_9GAMM Queuine tRNA-ribosyltran sferase OS=Halomonas saccharevitans OX=416872 GN=tgt PE =3 SV=1
MRKESFMTFERLASDGRARRGRLTFPRGTVETPAFMPVGTYGTVKGMTPESVKEIGAEIILGNTFHLWLRPGTEVIEAHGDLHDFAQWDKPILTDSGGFQVFSLGAMRKITEQGVHFRSPVDGAKVFMGPEESMAVQRSLGSDVVMIFDECTPYPATEKEAELSMQRSLRWAKRSREAHGDSPSALFGIIQGGMYPELREASLKGLLEIGFDGLAIGGLSVGEPKEEMIKVLDYLPTWMPEDTPRYLMGVGKPEDLVEGVRRGVDMFDCVMPTRNARNGHLFTAEGTVKIRNAKHRYDTGPLEEGCDCYTCQNFSRSYLHHLDRCGEMLGSMLNTIHNLRHYQRLMAGLRGAIEAGTLANFVEGFYTQRGLPVPPAPN

SEQ ID NO: 55935 - protein, 378 aa, Halomonas shengliensis
  misc_feature (1)..(378): tr|A0A1H0CGK5|A0A1H0CGK5_9GAMM Queuine tRNA-ribosyltran sferase OS=Halomonas shengliensis OX=419597 GN=tgt PE=3 SV=1
MRNDCFMTFERLASDGRARRGRLTFPRGTVETPAFMPVGTYGTVKGMTPASVEEIGAEIILGNTFHLWLRPGMEVIEAHGDLHDFAQWDKPILTDSGGFQVFSLGAMRKITEQGVHFRSPVDGAKVFMGPEESMAVQRSLGSDVVMIFDECTPYPATEKEARLSMERSLRWASRSREAHGASPSALFGIVQGGMYPELRERSLKGLMEIGFDGLAIGGLSVGEPKEEMIKVLDYLPTWMPEDTPRYLMGVGKPEDLVEGVRRGIDMFDCVMPTRNARNGHLFTAEGTVKIRNARHRHDTGPLEAECDCYTCRHFSRAYLHHLDRCGEMLGSMLNTIHNLRHYQRLMAGLRGAIEAGTLANFVEGFYARRGLPVPPAPN

SEQ ID NO: 55936 - protein, 378 aa, Halomonas songnenensis
  misc_feature (1)..(378): tr|A0A2T0V4J3|A0A2T0V4J3_9GAMM Queuine tRNA-ribosyltran sferase OS=Halomonas songnenensis OX=1176243 GN=tgt PE= 3 SV=1
MRNECFMRFERLADDGRARRGRLHFPRGTVETPAFMPVGTYGTVKGMTPASIKEIGAEIILGNTFHLWLRPGVEVIEAHGDLHDFAQWDKPILTDSGGFQVFSLGEMRKITEQGVHFRSPVDGSKVFMGPEESMAVQRSLGSDVVMIFDECTPYPATFEEAEKSMELSLRWAKRSRDAHGDSPSALFGIIQGGMHPELRERSLKGLLEIGFDGLAIGGLSVGEPKEEMIKVLDYLPTWMPDEKPRYLMGVGKPEDLVEGVRRGVDMFDCVMPTRNARNGHLFTADGTVKIRNAKHRHDTSPLEAECDCYTCKNFSRGYLHHLDRCNEMLGSMLNTIHNLRYYQRVMADLRAAIEAGTLTTFVEGFYARRGLPVPPLAE

SEQ ID NO: 55937 - protein, 372 aa, Halomonas sp.
  misc_feature (1)..(372): tr|A0A368U7U8|A0A368U7U8_9GAMM Queuine tRNA-ribosyltran sferase OS=Halomonas sp. TQ8S OX=2282306 GN=tgt PE=3 SV =1
MRFERLADDGRARRGRLHFPRGTVETPAFMPVGTYGTVKGMTPDSVKEIGAEIILGNTFHLWLRPGTEVIEAHGDLHDFAQWDKPILTDSGGFQVFSLGETRKITEQGVHFRSPVDGAKVFMGPEESMSVQRSLGSDVVMIFDECTPYPATFDEAEKSMELSLRWAKRSYDAHGNSPSALFGIIQGGMHPELRERSLKGLLEIGFDGLAIGGLSVGEPKEEMIKVLDYLPDWMPDEMPRYLMGVGKPEDLVEGVRRGIDMFDCVMPTRNARNGHLFTAEGTVKIRNAKHRFDTRPLEEGCDCHTCKHFSRAYLHHLDRCNEMLGSMLNTVHNLRYYQRVMADLRAAIEAGTLTNFVEGFYARRGMPVPPAPN

SEQ ID NO: 55938 - protein, 375 aa, Halomonas sp.
  misc_feature (1)..(375): tr|A0A2D9LI25|A0A2D9LI25_HALSX Queuine tRNA-ribosyltran sferase OS=Halomonas sp. OX=1486246 GN=tgt PE=3 SV=1
MRFERLAEDGRARRGRLHFPRGTVETPAFMPVGTYGTVKGMTPESVKEIGAEIILGNTFHLWLRPGTDVIEAHGDLHDFAQWDKPILTDSGGFQVFSLGEMRKITEQGVHFRSPVDGSKVFMGPEESMAVQRSLGSDVVMIFDECTPYPATFEEAEKSMELSLRWAKRSRDAHGDSPSALFGIIQGGMHPELRERSLKGLLEIGFDGLAIGGLSVGEPKEEMIKVLDYLPTWMPDDTPRYLMGVGKPEDLVEGVRRGVDMFDCVMPTRNARNGHLFTSDGTVKIRNAKHRFDTRPLDEECDCHTCQNFSRGYLHHLDRCNEMLGSMLNTIHNLRYYQRVMADLRAAIEAGTLTTFVESFYARRGLPVPPLAESDT

SEQ ID NO: 55939 - protein, 378 aa, Halomonas subglaciescola
  misc_feature (1)..(378): tr|A0A1M7G0W7|A0A1M7G0W7_9GAMM Queuine tRNA-ribosyltran sferase OS=Halomonas subglaciescola OX=29571 GN=tgt PE= 3 SV=1
MRNECFMRFERLAEDGRARRGRLHFPRGTVETPAFMPVGTYGTVKGMTPDSVEEIGAEIILGNTFHLWLRPGVKVIEAHGDLHDFAQWDKPILTDSGGFQVFSLGKTRKITEEGVHFRSPVDGDKVFMGPEESMAVQRSLGSDVVMIFDECTPYPATFSEAEHSMERSLRWAQRSRDAHGDSPSALFGIIQGGMHEGLRERSLKGLMDIGFDGLAVGGLSVGEPKEDMLKVLDYLPGWMPDDTPRYLMGVGKPEDLVEGVRRGVDMFDCVMPTRNARNGHLFSAGGTVKIRNAKHRFDTRPLEDDCDCHTCQHFSRGYLHHLDRCNEMLGSMLNTIHNLRHYQRLMADLRAAIEAGTLTSFVETFYAKRGLPVPPAPN

SEQ ID NO: 55940 - protein, 378 aa, Halomonas subterranea
  misc_feature (1)..(378): tr|A0A1H9U1H1|A0A1H9U1H1_9GAMM Queuine tRNA-ribosyltran sferase OS=Halomonas subterranea OX=416874 GN=tgt PE=3 SV=1
MRNECFMRFERLAEDGRARRGRLHFPRGTVETPAFMPVGTYGTVKGMTPESVKEIGAEIILGNTFHLWLRPGTEVIEAHGDLHDFAQWDKPILTDSGGFQVFSLGEMRKITEQGVHFRSPVDGSKVFMGPEESMEVQRSLGSDVVMIFDECTPYPATFEEAEKSMELSLRWAKRSRDAHGDSPSALFGIIQGGMHPELRERSLKGLLDIGFDGLAIGGLSVGEPKDEMIKVLDYLPSWMPDDTPRYLMGVGKPEDLVEGVRRGVDMFDCVMPTRNARNGHLFTADGTVKIRNAVHRFDTRPLEEDCDCHTCQHFSRGYLHHLDRCNEMLGSMLNTIHNLRYYQRVMADLRAAIEAGTLTNFVEGFYARRGLPVPPLAN

SEQ ID NO: 55941 - protein, 263 aa, Halomonas sulfidaeris
  misc_feature (1)..(263): tr|A0A455U374|A0A455U374_9GAMM Queuine tRNA-ribosyltran sferase OS=Halomonas sulfidaeris OX=115553 GN=HSBAA_093 90 PE=3 SV=1
MRFERLAEDGRARRGRLHFPRGTVETPAFMPVGTYGTVKGMTPESVKEIGAEIILGNTFHLWLRPGTEVIEAHGDLHDFAQWDKPILTDSGGFQVFSLGETRKITEQGVHFRSPVDGSKVFMGPEESMAVQRSLGSDVVMIFDECTPYPATFDEAEKSMELSLRWAKRSRDAHGDSPSALFGIIQGGMHPALRERSLKGLLEIGFDGLAIGGLSVGEPKEEMIKVLDYLPTWMPDEKPRYLMGVGKPEDLVEGVRRGWICSIA

SEQ ID NO: 55942 - protein, 373 aa, Halomonas sulfidaeris
  misc_feature (1)..(373): tr|A0A365TRI6|A0A365TRI6_9GAMM Queuine tRNA-ribosyltran sferase OS=Halomonas sulfidaeris OX=115553 GN=tgt PE=3 SV=1
MRFERLAEDGRARRGRLHFPRGTVETPAFMPVGTYGTVKGMTPDSVKEIGAEIILGNTFHLWLRPGTEVIEAHGDLHDFAQWDKPILTDSGGFQVFSLGETRKITEQGVHFRSPVDGSKVFMGPEESMAVQRSLGSDVVMIFDECTPYPATFDEAEKSMELSLRWAKRSRDAHGDSPSALFGIIQGGMHPELRERSLKGLLEIGFDGLAIGGLSVGEPKEEMIKVLDYLPTWMPDEKPRYLMGVGKPEDLVEGVRRGVDMFDCVMPTRNARNGHLFTSEGTVKIRNAKHRFDTRPLDEECDCHTCKSFSRGYLHHLDRCNEMLGSMLNTIHNLRYYQRVMADLRAAIEAGTLTTFVEGFYARRGLPVPPLSQP

SEQ ID NO: 55943 - protein, 381 aa, Halomonas taeanensis
  misc_feature (1)..(381): tr|A0A328XUT0|A0A328XUT0_9GAMM Queuine tRNA-ribosyltran sferase OS=Halomonas taeanensis OX=284577 GN=tgt PE=3 S V=1
MRNECFMTFERLATDGRARRGRLSFPRGTVETPAFMPVGTYGTVKGMTPQSVEEIGAEIILGNTFHLWLRPGTEVIEAHGDLHDFAHWNKPILTDSGGFQVFSLGKTRKITEEGVHFRSPVDGSKVFMGPEESMAVQRSLGSDVVMIFDECTPYPATHDEAKRSMEMSLRWAKRSRDAHGDSPSALFGIIQGGMYADLREASLKGLDEIGCDGYAIGGLSVGEPKEEMIKVLDYLPEWMPADKPRYLMGVGKPEDLVEGVRRGVDMFDCVMPTRNGRNGHLFTFEGTIKIRNARHRYDTAPLEADCDCYTCQHFSRAYLHHLDRCSEMLGSMLNTIHNLRHYQRLMAGLRGAIEAGTLANFVEAYYGRRGMPVPLLEPNPE

SEQ ID NO: 55944 - protein, 381 aa, Halomonas taeanensis
  misc_feature (1)..(381): tr|A0A1G7SNG8|A0A1G7SNG8_9GAMM Queuine tRNA-ribosyltran sferase OS=Halomonas taeanensis OX=284577 GN=tgt PE=3 S V=1
MRNECFMTFERLATDGRARRGRLSFPRGTVETPAFMPVGTYGTVKGMTPQSVEEIGAEIILGNTFHLWLRPGTEVIEEHGDLHDFAHWNKPILTDSGGFQVFSLGKTRKITEEGVHFRSPVDGSKVFMGPEESMAVQRSLGSDVVMIFDECTPYPATHDEAKRSMEMSLRWAKRSRDAHGDSPSALFGIIQGGMYADLRKTSLEGLDEIGFDGYAIGGLSVGEPKEEMIKVLDYLPEWMPDDKPRYLMGVGKPEDLVEGVRRGVDMFDCVMPTRNGRNGHLFTFEGTIKIRNARHRHDTSPLEADCDCYTCQNFSRGYLHHLDRCGEMLGAMLNTIHNLRHYQRLMAGLRGAIEAGTLANFVEAYYGRRGLPVPPLEPTPE

SEQ ID NO: 55945 - protein, 403 aa, Halomonas titanicae
  misc_feature (1)..(403): tr|L9UAE1|L9UAE1_9GAMM Queuine tRNA-ribosyltransferase OS=Halomonas titanicae BH1 OX=1204738 GN=tgt PE=3 SV=1
MLLIVDPLALYPSRQTNEINELLYMRNECFMRFERLADDGRARRGRLHFPRGTVETPAFMPVGTYGTVKGMTPDSVKEIGAEIILGNTFHLWLRPGTEVIEAHGDLHDFAQWDKPILTDSGGFQVFSLGETRKITEQGVHFRSPVDGSKVFMGPEESMAVQRSLGSDVVMIFDECTPYPATFDEAEKSMELSLRWAKRSREAHGDSPSALFGIIQGGMHPELRERSLKGLLEIGFDGLAIGGLSVGEPKEEMIKVLDYLPTWMPDEKPRYLMGVGKPEDLVEGVRRGVDMFDCVMPTRNARNGHLFTSEGTVKIRNAKHRFDTRPLDEECDCHTCQHFSRGYLHHLDRCNEMLGSMLNTIHNLRYYQRVMADLRAAIEAGTLTAFVEGFYARRGLSVPPLSQP

SEQ ID NO: 55946 - protein, 373 aa, Halomonas titanicae
  misc_feature (1)..(373): tr|A0A558JCF3|A0A558JCF3_9GAMM Queuine tRNA-ribosyltran sferase OS=Halomonas titanicae OX=664683 GN=tgt PE=3 SV =1
MRFERLADDGRARRGRLHFPRGTVETPAFMPVGTYGTVKGMTPDSVKEIGAEIILGNTFHLWLRPGTEVIEAHGDLHDFAQWDKPILTDSGGFQVFSLGETRKITEQGVHFRSPVDGSKVFMGPEESMAVQRSLGSDVVMIFDECTPYPATFDEAEKSMELSLRWAKRSREAHGDSPSALFGIIQGGMHPELRERSLKGLLEIGFDGLAIGGLSVGEPKEEMIKVLDYLPTWMPDEKPRYLMGVGKPEDLVEGVRRGVDMFDCVMPTRNARNGHLFTSEGTVKIRNAKHRFDTRPLDEECDCHTCQHFSRGYLHHLDRCNEMLGSMLNTIHNLRYYQRVMADLRAAIEAGTLTAFVEGFYARRGLSVPPLSQP

SEQ ID NO: 55947 - protein, 372 aa, Halomonas urumqiensis
  misc_feature (1)..(372): tr|A0A2N7UMY4|A0A2N7UMY4_9GAMM Queuine tRNA-ribosyltran sferase OS=Halomonas urumqiensis OX=1684789 GN=tgt PE=3 SV=1
MTFERLASDGRARRGRLTFPRGSVETPAFMPVGTYGTVKGMTPESVAEIGAEIILGNTFHLWLRPGTEVIEAHGDLHDFAQWEKPILTDSGGFQVFSLGAMRKITEQGVHFRSPVDGAKVFMGPEESMAVQRSLGSDVVMIFDECTPYPATEQEASLSMQRSLRWARRSREAHGDSPSALFGIIQGGMYPELREQSLKGLLEIGFDGLAIGGLSVGEPKEEMIQVLDYLPTWMPDDKPRYLMGVGKPEDLVEGVRRGIDMFDCVMPTRNARNGHLFTALGTVKIRNARHRHDTGPLEDGCDCYTCQHFSRAYLHHLERCGEMLGAMLNTIHNLRYYQRLMAGLRGAIEAGTLANFVEGFYAQRGLPVPPAPN

SEQ ID NO: 55948 - protein, 378 aa, Halomonas ventosae
  misc_feature (1)..(378): tr|A0A4V3DP97|A0A4V3DP97_9GAMM Queuine tRNA-ribosyltran sferase OS=Halomonas ventosae OX=229007 GN=tgt PE=3 SV= 1
MRKDSFMTFERLASDGRARRGRLTFPRGTVETPAFMPVGTYGTVKGMTPASVEEIGAEIILGNTFHLWLRPGTEVIEAHGDLHDFAQWERPILTDSGGFQVFSLGAMRKITEQGVHFRSPVDGAKVFMGPEESMAVQRSLGSDVVMIFDECTPYPATEAEAAFSMERSLRWAQRSREAHGDSPSALFGIIQGGMYPGLRERSLEGLLEIGFDGLAIGGLSVGEPKEEMIRVLDYLPTWMPDDTPRYLMGVGKPEDLVEGVRRGVDMFDCVMPTRNGRNGHLFTAEGTVKIRNAKHRFDTRPLEAGCDCYTCQHFSRAYLHHLDRCGEMLGSMLNTIHNLRHYQRLMAGLRGAIEAGTLANFVEGFYAQRGLPVPPAPN

SEQ ID NO: 55949 - protein, 378 aa, Halomonas ventosae
  misc_feature (1)..(378): tr|A0A4R6HKL8|A0A4R6HKL8_9GAMM Queuine tRNA-ribosyltran sferase OS=Halomonas ventosae OX=229007 GN=tgt PE=3 SV= 1
MRKESFMTFERLASDGRARRGRLTFPRGTVETPAFMPVGTYGTVKGMTPVSVTEIGAEIILGNTFHLWLRPGIQVVEAHGDLHDFAQWDRPILTDSGGFQVFSLGAMRKITEQGVHFRSPVDGAKVFMGPEESMAVQRSLGSDVVMIFDECPPYPATEAEAELSMQRSLRWASRSRDAHGDSPSALFGIIQGGMYPQLREASLKGLLEIGFDGLAIGGLSVGEPKEEMMRVLEYLPSWMPDNTPRYLMGVGKPEDLVESVRRGIDMFDCVMPTRNGRNGHLFAAEGTVKIRNARHRFDTRPLEESCDCYTCRHFSRAYLHHLDRCGEMLGSMLNTIHNLRHYQRLMAGLRGAIEAGTLANFVEGFYAQRGLPVPPAPN

SEQ ID NO: 55950 - protein, 372 aa, Halomonas venusta
  misc_feature (1)..(372): tr|A0A3Q8WGF5|A0A3Q8WGF5_9GAMM Queuine tRNA-ribosyltran sferase OS=Halomonas venusta OX=44935 GN=tgt PE=3 SV=1
MRFERLADDGRARRGRLHFPRGTVETPAFMPVGTYGTVKGMTPDSVKEIGAEIILGNTFHLWLRPGTDVIEAHGDLHDFAQWDKPILTDSGGFQVFSLGEMRKITEQGVHFRSPVDGSKVFMGPEESMAVQRSLGSDVVMIFDECTPYPATFEEAEKSMELSLRWAKRSREAHGDSPSALFGIIQGGMHPELRERSLKGLLEIGFDGLAIGGLSVGEPKEEMIKVLDYLPTWMPDDTPRYLMGVGKPEDLVEGVRRGVDMFDCVMPTRNARNGHLFTSEGTVKIRNAKHRFDTQPLDAECDCYTCKNFSRGYLHHLDRCNEMLGSMLNTIHNLRYYQRVMADLRAAIEAGTLTTFVEGFYAQRGLPVPPLAN

SEQ ID NO: 55951 - protein, 378 aa, Halomonas xianhensis
  misc_feature (1)..(378): tr|A0A1I2YVH8|A0A1I2YVH8_9GAMM Queuine tRNA-ribosyltran sferase OS=Halomonas xianhensis OX=442341 GN=tgt PE=3 S V=1
MRNECFMKFERLASDGRARRGRLTFPRGTVETPAFMPVGTYGTVKGMTPQSVKEIGAEIILGNTFHLWLRPGTEVIEAHGDLHDFAQWDKPILTDSGGFQVFSLGAMRKITEEGVHFRSPVDGAKIFMGPEESMAVQRSLGSDIVMIFDECTPYPATEDEARKSMELSLRWAKRSRIAHGDSPSALFGIIQGGMYPELRKRSLEGLQEIGFDGLAIGGLSVGEPKEEMIKVLDYLPTWMPENKPRYLMGVGKPEDLVEGVRRGVDMFDCVMPTRNARNGHLFTAEGTVKIRNAKHRHDTRPLEAGCDCYTCQHFSRSYLHHLDRCGEMLGSMLNTIHNLRYYQRVMAGLRGAIEAGTLANFVETFYAQRGLPVPDEPR

SEQ ID NO: 55952 - protein, 378 aa, Halomonas xianhensis
  misc_feature (1)..(378): tr|A0A4R8FY20|A0A4R8FY20_9GAMM Queuine tRNA-ribosyltran sferase OS=Halomonas xianhensis OX=442341 GN=tgt PE=3 S V=1
MRNECFMKFERLASDGRARRGRLTFPRGTVETPAFMPVGTYGTVKGMTPQSVKEIGAEIILGNTFHLWLRPGTEVIEAHGDLHDFAQWDKPILTDSGGFQVFSLGAMRKITEEGVHFRSPVDGAKVFMGPEESMAVQRSLGSDIVMIFDECTPYPATEDKARKSMELSLRWAKRSRLAHGDSPSALFGIIQGGMYPELRKRSLEGLQEIGFDGLAIGGLSVGEPKEEMIKVLDYLPTLMPDDKPRYLMGVGKPEDLVEGVRRGVDMFDCVMPTRNARNGHLFTAEGTVKIRNAKHRHDTRPLEEGCDCYTCQHFSRSYLHHLDRCGEMLGSMLNTIHNLRYYQRVMAGLRGAIEAGTLANFVETFYAQRGLPVPDEPR

SEQ ID NO: 55953 - protein, 367 aa, Halopeptonella vilamensis
  misc_feature (1)..(367): tr|A0A4Q8D0Z4|A0A4Q8D0Z4_9GAMM Queuine tRNA-ribosyltran sferase OS=Halopeptonella vilamensis OX=531306 GN=tgt P E=3 SV=1
MQFETLASDGWARRGRLRFPRGVIDTPAFMPVGTYGTVKGMTPEEVEATGAQVLLGNTFHLMLRPGTEIIADHGGLHDFMHWPYPILTDSGGFQVFSLAQGRKLTEAGVAFRSPVDGSRVFLDAERSMEVQRALGSDIVMIFDECTAWPVDWSEAKRSMERSLRWAERSRDAHGDSQAALFGIVQGGMYNDLRSESLAGLEAIGFDGMAIGGLSVGEPPEERLRVLDALAPQLPAAKPHYLMGVGRPEDFVDCVARGIDMFDCVLPTRNARNGYLFTETGTLRLRNARFARDTRPIEPGCDCYTCQHYSRAYLRHLDRCHEMLGARLNTVHNLRYFQRLMTRIRAAIEAQAFDEFARSFHARRADMT

SEQ ID NO: 55954 - protein, 379 aa, Haloplasma contractile
  misc_feature (1)..(379): tr|F7PX10|F7PX10_9BACT Queuine tRNA-ribosyltransferase OS=Haloplasma contractile SSD-17B OX=1033810 GN=tgt PE= 3 SV=1
MSAIRYELIHECKQTGARYGKLHTPHGVIETPIFMPVGTQATVKTLSPEELEDMSAQIILGNTYHLWLQPGDDLIQEAGGLHKFMKWDKPILTDSGGFQVFSLSKLRNIEEEGVHFRHHKSGEKLFLSPEKAISIQNNLGSDIMMSFDECVELPSTFEYTKNSLERTLRWAERGKNAHKNPDTQALFGIVQGGDYEELRRMSALELVKMDFPGYSIGGLSVGEPKEVMYKVLEWTVPFLPKDKPRYLMGVGSPDALLEGSIRGVDMFDCVLPTRIARHGTAMTSEGRVVIKNKVYERDFSPLDHECGCYTCKNYTRAYLRHLHKANEIFGQRLVSYHNLYFLLNLMENVREAIKEDRLLTFKEEFFEKYGLTSGNERGF

SEQ ID NO: 55955 - protein, 341 aa, Halorhodospira halochloris
  misc_feature (1)..(341): tr|A0A110B262|A0A110B262_HALHR Queuine tRNA-ribosyltran sferase OS=Halorhodospira halochloris OX=1052 GN=tgt PE =3 SV=1
MPVGTYGTVKGLTPEEVSGLGAEVILANTFHLWLRPGTEIIRQHGGLHSFMGWSGPILTDSGGFQVYSLGKLRRVSEAGVEFRSPVDGAKVFMGPEESLAVQRELGSDIVMIFDECPAYPAQWDEVKRSMELSLRWAQRSRDAHGESAAALFGIVQGGVYPQLRSASLAGLLDIGFDGYAIGGLSVGEPSAERDAVLEHLEPQLPAKQPRYLMGVGKPEDLVECVRRGIDMFDCVMPTRNARNGFLFTSQGLLRLRNSRYRQDTRAVDPACDCYTCRHFSRAYLSHLQRCNEMLGSRLATLHNLRYYQTLMAGLRAAISEGRLASFVDDFYTAREQKPPRV

SEQ ID NO: 55956 - protein, 382 aa, Halorhodospira halophila
  misc_feature (1)..(382): tr|A1WXQ1|A1WXQ1_HALHL Queuine tRNA-ribosyltransferase OS=Halorhodospira halophila (strain DSM 244 / SL1) OX=3 49124 GN=tgt PE=3 SV=1
MQLDGAVTDTGALRFERMATDGAARRGRLHLPRGTIETPAFMPVGTYGTVKGLTPEELRELGAEIILGNTFHLWLRPGTEVVRLHGDLHDFMNWQGPILTDSGGFQVYSLGELRKVTEEGVHFRSPVDGARVFMGPEESMAVQRELGSDIVMIFDECPPYPAERSTVQRSMELSLRWAARSRQAHGDNPAALFGIVQGGVYPELRRASLQGLMDIGFDGYAIGGLSVGEPREERDAVLEDLEPRLPVDRPRYLMGVGKPEDLVECVRRGVDLFDCVIPTRNARNGFLFTSEGLVRLRNSRYRTDTAPVDPACDCYTCRNYSRAYLKHLERCNEMLGARLATLHNLYYYQQLMAGLRAAIRDGGLVGFVGDFYARRGQTPPTL

SEQ ID NO: 55957 - protein, 373 aa, Halospina denitrificans
  misc_feature (1)..(373): tr|A0A4R7JW24|A0A4R7JW24_9GAMM Queuine tRNA-ribosyltran sferase OS=Halospina denitrificans OX=332522 GN=tgt PE= 3 SV=1
MSTPVQMRFETLVSDGPARRGRLSFPRGDVETPAFMPVGTYGTVKGMTPRDLEAIGAHVILGNTFHLMLRPGTEVIAEHGDLHDFAGWERPILTDSGGFQVFSLGEMTRITEEGVAFRSPVDGAKVQLTPERSMEVQKALGADIVMIFDECTPYPATEEEARASMELSLRWASRSRAAHEGNPAALFGIVQGGMHESLRHASLEGLKAIGFDGYAIGGLSVGEPREEMHRILESLEPRMPPDAPRYLMGVGRPEDIVEAVNRGVDMFDCVMPTRNARNGHLFVHEGIVRIRNARHRHDTGPLDPYCDCYTCRHFSRAYLHHLDRCGEMLGAHLATIHNLYYYQTLMAGLREAIQAGTLSAFTNRFYQLRGDSR

SEQ ID NO: 55958 - protein, 367 aa, Halospina sp.
  misc_feature (1)..(367): tr|A0A5J5FL11|A0A5J5FL11_9GAMM tRNA guanosine(34) trans glycosylase Tgt OS=Halospina sp. K52047b OX=2614160 GN= tgt PE=4 SV=1
MEFEHLASDGTARRGRLTFPRGTVETPAFMPVGTYGTVKGMLPRDLEATGAQIILGNTFHLMLRPGTEVIQAHGDLHDFAGWERPMLTDSGGFQVFSLSEMTKTTEAGVTFKSPINGSPVELTPEKSMQVQRALGSDIVMIFDECTPYPATEEEARRSMNLSLRWAERSREAHGDSPSALFGIVQGGMYESLRRESLEGLKNIGFEGYAIGGLSVGEPRGEMHRILEALEPAMPAGAPRYLMGVGRPEDIVEAVSRGVDMFDCVMPTRNARNGHLFTHEGVVRIRNARHRYDTGPVDPMCDCYTCRHFSRGYLHHLDRCGEMLGAQLASIHNLHYYQALMAGLREAIQAGTLATFIDRFYQLRGVAR

SEQ ID NO: 55959 - protein, 371 aa, Halotalea alkalilenta
  misc_feature (1)..(371): tr|A0A172YIE8|A0A172YIE8_9GAMM Queuine tRNA-ribosyltran sferase OS=Halotalea alkalilenta OX=376489 GN=tgt PE=3 SV=1
MRFERIHSDGRARRGRLHFPRGTVETPAFMPVGTYGTVKGMTPRDVEAIGAEIILGNTFHLWLRPGVEVIEAHGDLHDFAQWQRPILTDSGGFQVFSLGAMRKITEQGVHFRSPVDGAKVFMGPEESMAVQRALGSDIVMIFDECTPYPATYDEAERSMELSLRWAKRSREAHGDSPSALFGIIQGGMYRELRERSLAGLGEIGFDGLAIGGLSVGEPKDEMLKVLDYLPTLMPEDKPRYLMGVGKPEDLVEGVRRGVDMFDCVMPTRNARNGHLFTAEGVVKIRNAAHRHSTEPLEAGCDCYTCGNFTRGYLHHLDRCGEMLGAQLNTIHNLRHYQRLMAGLRSAIEAGKLAAFVDDFYARRGLSTPALE

SEQ ID NO: 55960 - protein, 381 aa, Halothece sp.
  misc_feature (1)..(381): tr|K9YBP9|K9YBP9_HALP7 Queuine tRNA-ribosyltransferase OS=Halothece sp. (strain PCC 7418) OX=65093 GN=tgt PE=3 SV=1
MMCAWMMRMTNISFKFSCQHSCPQTQARAGIFETPHGQVETPRFMPVGTVATVKGLTPAQLESAQAQMILANTYHLHLQPGEAIIERAGGLHSFMGWKQPILTDSGGFQVFSLSDLRKISENGVTFRSPRDGRYIDFTPERAIAVQNALGADVIMAFDECPPYPADYEAVRLATERTERWLERCITAHARPQDQALFGIVQGGVYWDLRTQAAKRLVEFDLPGYAIGGVSVGEPAELIHEIVAVSTPLLPWHKPRYLMGVGTYREMVNAIAHGIDLFDCVIPTRLGRHGTALVQGDRWNLKNARFREDFTSLDPDCPCYCCQSFSRAYLSHLVRSREMLGYLLLSLHNVTELIRFTQRIRTAILEDRFATEFASWLNISDP

SEQ ID NO: 55961 - protein, 373 aa, Halothermothrix orenii
  misc_feature (1)..(373): sp|B8CXG0|TGT_HALOH Queuine tRNA-ribosyltransferase OS= Halothermothrix orenii (strain H 168 / OCM 544 / DSM 95 62) OX=373903 GN=tgt PE=3 SV=1
MSISFNLLHREINTRARLGKLKTPHGDIDTPIFMPVGTQATVKSMTPDELENIKAQIILSNTYHLYLRPGSSLIDEAGGLHNFMNWQKPILTDSGGFQVFSLSDLREIKEEGVYFRSHLDGSRHFISPEKAIQIQMELGADIIMAFDECPPYPSDYDYVARSLERTVRWARRCKKAHEREDQALFGIIQGGVYRDLRKQSVEALIDIGFPGYAIGGLSVGEEKEKMLEVLDFTVPLMPENKPRYLMGVGAPEDLVEGVIRGVDMFDCVLPTRIARHGTVFTSQGRLTVRNAGYERDFTPLDPECDCYVCKNYTRAYIRHLIKRKEILGVRLTTYHNLYFLLSLMEKIRGAIKEDALLEFRDEFLRKYLNKASI

SEQ ID NO: 55962 - protein, 378 aa, Halothiobacillaceae bacterium
  misc_feature (1)..(378): tr|A0A545SJB8|A0A545SJB8_9GAMM Queuine tRNA-ribosyltran sferase OS=Halothiobacillaceae bacterium OX=2268194 GN= tgt PE=3 SV=1
MKFDLHTTRGRARRGRLTFARGTVETPAFMPVGTYGTVKAMTPEELREIGAEIVLGNTFHLWLRPGVEIIRKHGDLHDFMHWSGPILTDSGGFQVFSLAGLRKISEEGVRFQSPVDGSKVHLDPETSMAVQHALGSDIVMIFDECTPYPATEKQARLSMELSLRWAARSKQAHVELQGEDPAALFGIVQGGMYPELREVSARGLMEIGFDGYAIGGLSVGEPEDERIKVLDATTHLLPQDRPRYLMGVGKPEDIVEAVRRGIDMFDCVMPTRNARNGHLFTQWGDLRIRNARHQDDTRPVDAHCGCYTCRNYSRAYLRHLDKCNEILGSRLNSIHNLHYYQFLMREIRQAIADDRFEAWADAFYRKRRAGIDAADAAG

SEQ ID NO: 55963 - protein, 374 aa, Halothiobacillus neapolitanus
  misc_feature (1)..(374): tr|D0KW95|D0KW95_HALNC Queuine tRNA-ribosyltransferase OS=Halothiobacillus neapolitanus (strain ATCC 23641 / c 2) OX=555778 GN=tgt PE=3 SV=1
MQFDLIHTDGTARRGQLQFMRGTIQTPAFMPVGTYGTVKAVDPQEIEALGAEIILSNTFHLMLRPGTDVIRAHGDLHDFMGWNKPILTDSGGFQVFSLAEMRKITEEGARFQSPVDGSPVMLTPERSMQIQHELGSDIVMIFDECTPYPATEVQAAESMRLSLRWAARSRTAFDTLKPDNTDTALFGIVQGGMYPALRRESAIGLLNIGFDGYAIGGLSVGEPLDERNQVLEATTPLLPQDKPRYLMGVGKPEDLVESVARGMDMFDCVMPTRNARNGHLFTRYGDIKLRNARYASDTRPLDETCTCTTCQRFSRAYLKHLDKCKEVLGPRLNTIHNLHYYQTLMQEIRVAIEDNAFEAFRTTFHADRARGIDA

SEQ ID NO: 55964 - protein, 381 aa, Halothiobacillus sp.
  misc_feature (1)..(381): tr|A0A0W1RTA2|A0A0W1RTA2_9GAMM Queuine tRNA-ribosyltran sferase OS=Halothiobacillus sp. XI15 OX=1766620 GN=tgt PE=3 SV=1
MKFQLHDCTLAKPAGERVDGPRRGQVRFERGVIDTPAFMPVGTYGTVKAVTPEELVDLGAQIVLGNTFHLMLRPGTEIIGLHGDLHDFMHWERPILTDSGGFQVFSLADMRKITEEGVRFASPVNGDQVMLSPESSMQVQHELGSDIQMIFDECTPYPATPEVAGASMRLSLRWAKRSKQAFEALKPEGSDRALFGIVQGGMHESLRRESAAGLIDLGFDGYAVGGLSVGEPLEERNAVLEVTLPELPAERPRYLMGVGKPEDLVESVARGVDMFDCVMPTRNARNGHLFTRYGDVRLKNARFATDVRPLDEDCDCYTCRHYSRAYLKHLHKTREVLGARLATIHNLHYYQVLMAEMRAAIEADDFEAFRARFYADRDRGT

SEQ ID NO: 55965 - protein, 374 aa, Halothiobacillus sp.
  misc_feature (1)..(374): tr|A0A191ZI81|A0A191ZI81_9GAMM Queuine tRNA-ribosyltran sferase OS=Halothiobacillus sp. LS2 OX=1860122 GN=tgt P E=3 SV=1
MQFELKGSDGGARRGELRFVRGTIQTPAFMPVGTYGTVKSVDPLEVEALGAEIILGNTFHLMLRPGTDVIRAHGDLHDFMGWQKPILTDSGGFQVFSLADMRKITEEGARFQSPVDGSPVLLTPERSMQIQHELGSDIVMIFDECTPYPATPIEAGESMRLSLRWAQRSRAAFDQLKPDNTDTALFGIVQGGMYPALRQESAAGLQDIGFDGYAIGGLSVGEPMDERNHVLEATTPLLPNDRPRYLMGVGKPEDLVESVARGVDMFDCVMPTRNARNGHLFTRYGDIKLRNARYVRDTRPLDETCTCTTCQRYSRAYLKHLDRCGELLGSRLNTIHNLHYYQTLMREIRASIEAGQFEAFRRQFHADRARGIEA

SEQ ID NO: 55966 - protein, 367 aa, Halovibrio sp.
  misc_feature (1)..(367): tr|A0A2A2F8Z2|A0A2A2F8Z2_9GAMM Queuine tRNA-ribosyltran sferase OS=Halovibrio sp. YL5-2 OX=2032626 GN=tgt PE=3 SV=1
MAFEHLANDGVARRGRLTFPRGTVETPAFMPVGTYGTVKGMLPRDLEATGAEIILGNTFHLMLRPGTEVIEAHGDLHDFAGWQRPMLTDSGGFQVFSLSEMTRTTEAGVTFKSPVNGSPVELTPEKSMQVQRALGSDIVMIFDECTPYPATEEEARRSMNLSLRWAERSREAHGDSPSALFGIVQGGMYESLRRESLEGLKNIGFEGYAIGGLSVGEPREEMHRILEALEPAMPSGAPRYLMGVGRPEDIVEAVSRGVDMFDCVMPTRNARNGHLFTHEGVVRIRNARHRYDTGPVDSMCDCYTCRHFSRGYLHHLDRCGEMLGAQLASIHNLHYYQALMAGLREAIQAGTLATFIDRFYQLRGVAR

SEQ ID NO: 55967 - protein, 381 aa, Halovibrio variabilis
  misc_feature (1)..(381): tr|A0A511UN06|A0A511UN06_9GAMM Queuine tRNA-ribosyltran sferase OS=Halovibrio variabilis OX=31910 GN=tgt PE=3 S V=1
MRNECFMRFERLAEDGRARRGRLHFPRGTVETPAFMPVGTYGTVKGMTPDSVKEIGAEIILGNTFHLWLRPGTEVIEAHGDLHDFAQWDKPILTDSGGFQVFSLGETRKITEQGVHFRSPVDGSKVFMGPEESMAVQRSLGADVVMIFDECTPYPATFEEAEKSMELSLRWAKRSRDAHGESPSALFGIIQGGMHPELRERSLKGLLEIGFDGLAIGGLSVGEPKEEMIKVLDYLPTWMPDDKPRYLMGVGKPEDLVEGVRRGVDMFDCVMPTRNARNGHLFTSEGTVKIRNAKHRYDTRPLEEGCDCHTCQHFSRGYLHHLDRCNEMLGAMLNTIHNLRYYQRVMADLRAAIEAGTLTTFVEGFYARRGLPVPPLALPEN

SEQ ID NO: 55968 - protein, 370 aa, Hamiltonella defensa
  misc_feature (1)..(370): sp|C4K8M3|TGT_HAMD5 Queuine tRNA-ribosyltransferase OS= Hamiltonella defensa subsp. Acyrthosiphon pisum (strain 5AT) OX=572265 GN=tgt PE=3 SV=1
MKYQLQKTDGRARLGKLIFERGLVDTPAFMPVGTYGSVKSMTPDEITETGAQIILGNTFHLWLRPGQDVIKLHGDLHDFMQWQGPILTDSGGFQVFSLNSMRKIEEKGVSFRHPLNGSEIFLSPEKSMEIQLDLGSDIVMVFDECPPYPSDLIYMKSSMEMSLRWANRSREHFNNLNNKNALFGIIQGGLSLELRETSLQGLLQIGFDGYAIGGLAVGEPKEEMYRVLDFLCPRIPDNKPRYLMGVGKPENLVEGVRRGIDMFDCVMPTRNARNGHLFVTHGVIKIRNTRYKTDISPLDPDCDCYTCRHYSRAYLHHLDRCNEILGARLNSIHNVRYYQRLMADLRHAIYEERLECFVEEFYKKIGLSIS

SEQ ID NO: 55969 - protein, 394 aa, Handelsmanbacteria sp.
  misc_feature (1)..(394): tr|A0A1F6CTN1|A0A1F6CTN1_HANXR Queuine tRNA-ribosyltran sferase OS=Handelsmanbacteria sp. (strain RIFCSPLOWO2_1 2_FULL_64_10) OX=1817868 GN=tgt PE=3 SV=1
MTTDHFRFELQARDPDTGARAGILYTPHGEVPTPVFMPVGTQGTVKALCQQDLRSADVRIILGNTYHLYLRPGERLIAEAGGLHRFTGWDRAILTDSGGFQVHSLAALSKITEEGVVFRSHIDGSSHQFTPEKAIEIEHALGADIIMAFDECTAPLCSFDYAKQAGDRTLRWLRRCVERHDGLGRRSASGSAQALFGIVQGSAYPELRAAYADATVRFDLPGYAVGGTGLGERKEDTWTAVEVVTSRLPEDRPRYLMGIGLPEDLIDGVARGIDMFDCVVPTRNARNGTVFTRRGRMNFKSAAWARDFSPIDPDCRCYTCQHYSRAYLRHLYHAGEITGLRLATLHSVHFFMDLMRDMRSAILAGRFAKWRTEFLSTYRSDPSPQPPPPKGEGE

SEQ ID NO: 55970 - protein, 372 aa, Hansschlegelia sp.
  misc_feature (1)..(372): tr|A0A4Q9GM04|A0A4Q9GM04_9RHIZ Queuine tRNA-ribosyltran sferase OS=Hansschlegelia sp. Dub OX=2528245 GN=tgt PE= 3 SV=1
MSGIPFNIAATDGAARTGEIVFPRGEIRTPAFMPVGTAATVKALYADQVRATGADIVLGNVYHLMLRPGAERVAALGGLHKFMGWQRPILTDSGGFQVMSLSALRKLDRDGVTFRSHVDGSTHRLTPERSVEIQRLLGSDVTMQLDECVRLPAPKAEVERAMLLSADWAERSKVAFGDQEGRALFGIVQGGDSADLRKESARRLVDLGFDGYAVGGLAVGEPQETMLAMIEETIPELTSARPRYLMGVGTPDDLLKCVARGVDMFDCVMPTRAGRHGQVFTRFGKMNLKNARHADDPRPLDEESDCPAARDYSRAYLHHLVKTGEILGMMLLSWVNVAYYQSLMAGARRAIAAGAFSDYAAATTAAWEKGEK

SEQ ID NO: 55971 - protein, 376 aa, Hanstruepera neustonica
  misc_feature (1)..(376): tr|A0A2K1DZ10|A0A2K1DZ10_9FLAO Queuine tRNA-ribosyltran sferase OS=Hanstruepera neustonica OX=1445657 GN=tgt PE =3 SV=1
MTFDLKAKDLQSKARAGLITTDHGKIETPIFMPVGTVASVKGVHQRELKNDINPDIILGNTYHLYLRPQTDILEQAGGLHKFMNWDRNILTDSGGYQVYSLSANRKIKEEGVKFKSHIDGSYHVFTPENVMEIQRSIGADIIMAFDECTPYPCDYNYAKRSMHMTHRWLDRCINHLEKTPLKYDYNQAFFPIVQGSTYKDLREQSAEYIANAGAVGNAIGGLSVGEPAEEMYAMTEVVTNILPEDKPRYLMGVGTPINILENIALGIDMFDCVMPTRNARNGMLFTAHGTINIKNKKWEADFSPVDDMGITFVDTDYTKAYLRHLFSVNERLGAQIATIHNLGFYLWLVREARKHILAGDFRDWKNKMVKQMDKRL

SEQ ID NO: 55972 - protein, 334 aa, Hapalosiphon sp.
  misc_feature (1)..(334): tr|A0A0M0SJJ4|A0A0M0SJJ4_9CYAN Queuine tRNA-ribosyltran sferase OS=Hapalosiphon sp. MRB220 OX=1704290 GN=tgt PE =3 SV=1
MPVGTLATVKTLTPAQLKETGAQMVLSNTYHLHLQPGEAIVSGGGGLHKFMGWNGPMLTDSGGFQVFSLSEMRKISEEGVTFRSPHDGQIIKFTPEKSIEIQNTLGADVIMAFDECPPATANRQEVEAATERTYRWLLRCIEAHQRQEDQALFGIVQGGVYLDLRAQAAEALKQLDLPGYAIGGVSVGEEPELIHQVVQATAPLLPYHKPRYLMGVGTYQEMVIAIASGVDLFDCVIPTRWARHGTAMVQGDRWNLKNAKFREDFTPLDETCPCYTCQNFTRAYISHLVRSQEILAYTLLSIHNITELIRFTQKIRAAILNDTFTTEFSKWLKN

SEQ ID NO: 55973 - protein, 364 aa, Hapalosiphonaceae cyanobacterium
  misc_feature (1)..(364): tr|A0A328IIR5|A0A328IIR5_9CYAN Queuine tRNA-ribosyltran sferase OS=Hapalosiphonaceae cyanobacterium JJU2 OX=210 9628 GN=tgt PE=3 SV=1
MAQCSHTKARVGVFHTPHGIVETPRFMPVGTLATVKTLTPAQLKETGAQMVLSNTYHLHLQPGEAIVSGGGGLHKFMGWNGPMLTDSGGFQVFSLSEMRKISEEGVTFRSPHDGQIIKFTPEKSIEIQNTLGADVIMAFDECPPATANRQEVEAATERTYRWLLRCIEAHQRREEQALFGIVQGGVYLDLRAQAAKALQKLDLPGYAIGGVSVGEEPELIHQVVQTTAPLLPYHKPRYLMGVGTYQEMVIAIASGVDLFDCVIPTRWARHGTAMVQGDRWNLKNAKFREDFTPLDETCPCYTCRNFTRAYISHLVRSQEILAYTLLSIHNITELIRFTQKIREAILNDTFTTEFSKWLKKGVME

SEQ ID NO: 55974 - protein, 376 aa, Harryflintia acetispora
  misc_feature (1)..(376): tr|A0A3E2SWZ7|A0A3E2SWZ7_9FIRM Queuine tRNA-ribosyltran sferase OS=Harryflintia acetispora OX=1849041 GN=tgt PE =3 SV=1
MYTLIKQEGRARRGTFTTPHGTIQMPAFMNVGTAAAIKGGVSSLDLKELRCQVELCNTYHLHLRPGDDVVRALGGLHGFMNWEGPILTDSGGFQVFSLSSLRKIREEGVEFRSHLDGKRIFMGPEESMKIQSNLGSTIAMAFDECIENPAEYDYTKRSTERTARWLRRCRQELDRLNALEGTLNPRQMLFGINQGSTYDDLRIEHMKVIREIPCEGYAIGGLAVGESAGEMYHVIEQVEPFMPKDKPRYLMGVGTPANILESVRRGVDLFDCVMPSRNARHGHVFTWEGIRNLNNEKYKLDPLPLDESCQCPCCRSFSRAYLRHLLRAGEMLGMRLLVMHNLYFYNTLLEQIRQALDEGRYEEYCRRWLPVLSTRI

SEQ ID NO: 55975 - protein, 376 aa, Harryflintia acetispora
  misc_feature (1)..(376): tr|A0A4R1Q587|A0A4R1Q587_9FIRM Queuine tRNA-ribosyltran sferase OS=Harryflintia acetispora OX=1849041 GN=tgt PE =3 SV=1
MYTLIKQEGRARRGTFTTPHGTIQMPAFMNVGTAAAIKGGVSSLDLKELRCQVELCNTYHLHLRPGDDVVRALGGLHGFMNWEGPILTDSGGFQVFSLSSLRKIREEGVEFRSHLDGKRIFMGPEESMKIQSNLGSTIAMAFDECIENPAEYDYTKRSTERTARWLRRCRQELDRLNALEGTLNPRQMLFGINQGSTYDDLRIEHMKVIREIPCEGYAIGGLAVGESAGEMYHVIEQVEPFMPKDRPRYLMGVGTPANILESVRRGVDLFDCVMPSRNARHGHVFTWEGIRNLNNEKYKLDPLPLDESCQCPCCRGFSRAYLRHLLRAGEMLGMRLLVMHNLYFYNSLLEQIRRALDEGRYEEYCRRWLPVLSTRI

SEQ ID NO: 55976 - protein, 380 aa, Hartmannibacter diazotrophicus
  misc_feature (1)..(380): tr|A0A2C9D740|A0A2C9D740_9RHIZ Queuine tRNA-ribosyltran sferase OS=Hartmannibacter diazotrophicus OX=1482074 GN =tgt PE=3 SV=1
MTERFSFQIHATDGKARRGTITTPHGKVRTPAFMPVGTQGTVKAMFMDDVRSTGADVILGNTYHLMLRPGAERVARLGGLHAFSRWPHTILTDSGGFQVMSLAQIRKLTEKGVTFQSHIDGSRHEMTPERSIEIQGLLGSDIQMQLDECLRLPATAKEIDRAMRLSLRWAARSREKFVAMGGPEKGQGLYGIVQGGDDAALRAVSAAELASMPFEGYSIGGLAVGEPQDVMLQMLDIVCPLLPAEKPRYLMGVGTPDDIIKSVARGVDQFDCVMPTRAGRHGLAFTRFGKINLKNARHADDPRPLDEESSCPAARDYSRAYLHHLVRSGEALGAMLLTWANVAYYQSLMQGIRDAIEEGRYADFMAETSEAWARGDLQPL

SEQ ID NO: 55977 - protein, 375 aa, Hasllibacter halocynthiae
  misc_feature (1)..(375): tr|A0A2T0X7T5|A0A2T0X7T5_9RHOB Queuine tRNA-ribosyltran sferase OS=Hasllibacter halocynthiae OX=595589 GN=tgt P E=3 SV=1
MALTFDLKATDGAARLGEVGTARGVVRTPAFMPVGTAGTVKGMLPGQVRGTGADIVLGNTYHLMLRPGAERVARLGGLHRFSGWEGPILTDSGGFQVMSLAGLRKITEEGVRFASHVDGTRHFLSPERSMEIQALLGSDIAMCFDECPALPAGRDRIAASMEMSMRWAARSREAFGHPGDRALFGIQQGGLEEDLRRESAERLREIGFEGYAVGGLAVGEGQEAMFGVLDHAPAQLPANRPRYLMGVGKPDDVVGAVKRGIDMMDCVLPTRSGRTGQGWTARGMVNLRNARHRDDPRPLEEGCPCPACAGGYSRAFLHHVVRSKEMIGGMLLTWHNLTYYGRLMAAMRGAIGAGRFADWERGFHARRAEGDLEPV

SEQ ID NO: 55978 - protein, 378 aa, Hathewaya histolytica
  misc_feature (1)..(378): tr|A0A4U9RK60|A0A4U9RK60_HATHI Queuine tRNA-ribosyltran sferase OS=Hathewaya histolytica OX=1498 GN=tgt PE=3 SV =1
MGEYKLLKKVDKIRRGQFKTVHGTIQTPVFMNVGTLAAIKGAVSTMDLKEIDCQVELSNTYHLHLRPGDKVIREMGGLHEFMNWDRPILTDSGGFQVFSLSGNRKIEEEGVYFNSHIDGKKIFMGPEESMQIQSNLGSTIAMAFDECIPNPSTREYVINSVARTTRWLERCKEEMDKLNSLESTVNKHQMLFGINQGGTYDDIRIEHAKTISKMNLDGYAIGGLAVGETHEEMYRIIDSVVPHLPQDKPIYLMGVGIPSNILESVERGVDFFDCVLPARNGRHGHVFTKEGKINLFNAKFELDKRPIDEGCQCPACKHYTRAYIRHLFKAKEMLAMRLCVLHNLYFYNKLMQDIRDAIDGDYFYEFKEQKLREWNGRA

SEQ ID NO: 55979 - protein, 378 aa, Hathewaya proteolytica
  misc_feature (1)..(378): tr|A0A1M6P8P2|A0A1M6P8P2_9CLOT Queuine tRNA-ribosyltran sferase OS=Hathewaya proteolytica DSM 3090 OX=1121331 G N=tgt PE=3 SV=1
MGKYTLLKKSGKVRRGQFETVHGTIQTPVFMNVGTLAAIKGAVSSMDLEEIGCQVELSNTYHLHLRPGDKVVRELGGLHKFMNWKKPILTDSGGFQVFSLASIRTIKEEGVYFNSHIDGRKIFMGPEESMQIQSNLGSTIAMAFDECVSNPSPRDYVEKSVARTTRWLERCKVEMDRLNKLENTVNKQQMLFGINQGGVYEDIRAEHARTIAKMDLDGYAIGGLAVGESHEDMYRIIDAVVPNLPQDKPIYLMGVGTPENILEAVSRGVDFFDCVLPARNGRHGHLFTKDGGINIMNAKFELDTRPIDEGCNCPVCRHYTRAYIRHLFKAKEMLAMRLSVLHNLFFYNKLMEDIRDAIDGDYFEQFKEEKLQQWGCKK

SEQ ID NO: 55980 - protein, 378 aa, Hazenella coriacea
  misc_feature (1)..(378): tr|A0A4R3L9W5|A0A4R3L9W5_9BACL Queuine tRNA-ribosyltran sferase OS=Hazenella coriacea OX=1179467 GN=tgt PE=3 SV =1
MAVRYELIKECKQSGARLGRLHTPHGTIDTPIFMPVGTQATVKTMSPEELKEMHAQIILSNTYHLFLRPGHEVVKEAGGLHSFMNWDRPILTDSGGFQVFSLSQLRNITEEGVSFRSHLSGEKLFIGPEKAMEIQNALGADIIMAFDECPPYPAEREYVQASTERTYRWLKRCIDAHQRPNDQALFGIVQGGMYQDLREESAKKLVELDLPGYSIGGLSVGEPKDIMYEVLGYTTPLLPKHKPRYLMGVGSPDALIQGSILGIDMFDCVLPTRIARNGTTMTSQGRIVIRNAKYARDFTPLDPECDCYTCRNYTRAYLRHLIKADETFGLRLTTYHNLHFLLQLMQQVRQAILEDRLLDFQEEFMVRYYGSTNPVTAF

SEQ ID NO: 55981 - protein, 373 aa, Helcococcus kunzii
  misc_feature (1)..(373): tr|H3NN92|H3NN92_9FIRM Queuine tRNA-ribosyltransferase OS=Helcococcus kunzii ATCC 51366 OX=883114 GN=tgt PE=3 SV=1
MAVKYTLEKKSSECEARAGVISTPHGDIKTPVFMPVGTKATVKTMTPEELKDLGAQIILGNTYHLFLRPGDELIKKAGGLHKFMNWDRPILTDSGGFQVFSLSNINKITEEGVEFKSHIDGSSQFISPEKSISIQQNLGSDIMMAFDECVDPSATKEYVAQSLEMTLRWLDRCVASHTNKNQALFGIVQGGLFKDLRKRSVEETIKRDCQGFAIGGLSVGETKEEMIDILRFTTPLLPEDKPRYNMGVGTPDYLFESVEAGIDMADCVLPTRIARNGAAMTSEGQLNIRNSKFKEDFTPLDHECDCYTCKNYTRAYIRHLVNVNEILGARLITYHNLYFLTHLMDEIRQSIIEDRFLAFKNEFYNKYGYTKEK

SEQ ID NO: 55982 - protein, 373 aa, Helcococcus ovis
  misc_feature (1)..(373): tr|A0A4R9C125|A0A4R9C125_9FIRM Queuine tRNA-ribosyltran sferase OS=Helcococcus ovis OX=72026 GN=tgt PE=3 SV=1
MAIKYELEKKSSQCEARAGVIHTPHGDIKTPVFMPVGTKATVKAMTPEELEDLGAQIILGNTYHLFLRPGDDLVKKAGGLHKFMNWNKPILTDSGGFQVFSLGHINKITEEGVVFQSHIDGSKQMITPEKSIEIQQNLGSDIMMAFDECVYPTATKEYVAQSLEMTLRWLDRCIETHTNKNQALFGIVQGGLFKDLRKKSAEETIKRNCQGFAVGGLSVGETKEEMIDILRFTTPLLPEDKPRYNMGVGTPDYLFESVEAGIDMADCVLPTRIARNGAAMTSHGKVTIKNAKYREDFTPLDPECDCYTCKNYTKAYIRHLVNVNEILGARLLSYHNLYFLTHLMENIRESILEDRFLEYKEEFYKKYGYTKED

SEQ ID NO: 55983 - protein, 371 aa, Helicobacter acinonychis
  misc_feature (1)..(371): sp|Q17YB5|TGT_HELAH Queuine tRNA-ribosyltransferase OS= Helicobacter acinonychis (strain Sheeba) OX=382638 GN=t gt PE=3 SV=1
MDFQLQAVDKHARAGILNLVHSQVETPIFMPVGTQGCIKSLDAIDMQERLSAKLILANTYHMYLRPGEKVIEQLGGLHHFAQFHGSFLTDSGGFQAFSLSDNVKLQEDGIVFKSHLDGSKHFFTPTKVLDIQYSLNSDIMMVLDDLVGLPAPLKRLEESIKRSAKWANISLEYHKENNRPNNNLFAIIQGGTHLKMRSLSVGLTHGGFDGYAIGGLAVGESTNEMLETIAHTAPLLPKDKPRYLMGVGTPENILDAISLGVDMFDCVMPTRNARNATLFTHSGKISIKNAPYKLDNTPIEENCTCYTCKRYSKAYLHHLFRAKELTYARLASLHNLHFYLELVKNARNAILEKRFLSFKKEFLERYTMDRQ

SEQ ID NO: 55984 - protein, 367 aa, Helicobacter ailurogastricus
  misc_feature (1)..(367): tr|A0A0K2X3R3|A0A0K2X3R3_9HELI Queuine tRNA-ribosyltran sferase OS=Helicobacter ailurogastricus OX=1578720 GN=t gt PE=3 SV=1
MDFTLDGVDKKARAGTLKLAHGKVATPIFMPVGTQASVKSLDALDLQDHLKAPIILGNTYHLYLRPGANLIQKLGGLHKFTKFQGNFLTDSGGFQAFSLKHNTKAHTEGIVFKSHIDGSTHLFTPSKVLDIQYALNSDICMVLDDLVGLPAPFMRLKLAVQKTTEWAKISLDHHKGHASRTNHIFAIVQGGIDSNLRRQSALELSALGFDGYAIGGLAVGESAQEMYATVAYTQEFLPKDKPRYLMGVGTPQDILEAIDLGVDMFDCVMPTRNARNGTLFTSLGKLSIKAQAHKESQEALDQNCACYTCKHYSKAYLHHLFKARELLYFRLASLHNLHFYLELVRGAREAILRGEYADYKSRILSVY

SEQ ID NO: 55985 - protein, 367 aa, Helicobacter ailurogastricus
  misc_feature (1)..(367): tr|A0A0K2Y6J3|A0A0K2Y6J3_9HELI Queuine tRNA-ribosyltran sferase OS=Helicobacter ailurogastricus OX=1578720 GN=t gt PE=3 SV=1
MDFTLDGVDKKARAGTLKLAHGKVATPIFMPVGTQASVKSLDALDLQDHLKAPIILGNTYHLYLRPGANLIQKLGGLHKFTKFQGNFLTDSGGFQAFSLKHNTKAHTEGIVFKSHIDGSTHLFTPSKVLDIQYALNSDICMVLDDLVGLPAPFTRLKLAVQKTTEWAKISLDHHKGHASRTNHIFAIVQGGIDSNLRRQSALELSALGFDGYAIGGLAVGESAQEMYATVAYTQEFLPKDKPRYLMGVGTPQDILEAIDLGVDMFDCVMPTRNARNGTLFTSLGKLSIKAQAHKESQEALDQNCACYTCKRYSKAYLHHLFKARELLYFRLASLHNLHFYLELVRGAREAILRGEYADYKSRILSVY

SEQ ID NO: 55986 - protein, 374 aa, Helicobacter anseris
  misc_feature (1)..(374): tr|A0A3D8JAE9|A0A3D8JAE9_9HELI Queuine tRNA-ribosyltran sferase OS=Helicobacter anseris OX=375926 GN=tgt PE=3 S V=1
MIFKVDKIDGNARATTLQTYHSTIHTPIFMPVGTQACVKGLDFYDLTNHLDTKIILANTYHLYLRPSSPCIKSLGGLHHFTKYPNSFLTDSGGFQAFSLSNNTKKDSQGIWFKSHIDGSKHFFTPKKVLDIQYELNSDIMMVLDDLVGLPASKERILQSVKTTTKWAEESLYYHKEQQSQGLGLNNNLFAIIQGGNNKELREQSAKELCALEGFDGYAIGGLAVGESAEEMYACIEYVNAFTPQHKPRYLMGVGTPENIIEAIDRGVDMFDCVMPSRNARNGSLFTSFGKINIKSSRYHLDTLPIDEACKCYTCRNFSRAYLHHLFRANEITYFRLATLHNLYYYLELTKSARMAILNNQWNDFKKDFYTKRQN

SEQ ID NO: 55987 - protein, 375 aa, Helicobacter apodemus
  misc_feature (1)..(375): tr|A0A4U8UG45|A0A4U8UG45_9HELI Queuine tRNA-ribosyltran sferase OS=Helicobacter apodemus OX=135569 GN=tgt PE=3 SV=1
MEFNLQQVCGNARAGMLKLAHGEVLTPIFMPVGTQASVKALDFIDLLALKAPIILANTYHLYLRPNDEVIRQLGGLHNFSKFPKNFLTDSGGFQAFSLSNNVKVSNEGILFKSHIDGSKHFFTPKKVLDIQYNLNSDIMMVLDDLVGLPAPRERILESINKTSLWAEESIQYHNFKKYQAQEEGRAFNNHIFAINQGGVDRELREISAKDLCSMGDFDGYAIGGLAVGESNAMMYETLEFTLPFLPKDKPRYLMGVGTPRDIIEAIARGVDMFDCVMPTRNARNGTLFTSEGKIAIKSTRFKLDTKPLDEECFCYTCTNHTRAYLHHLFRAGEMSYFRLASIHNLAYYLSLVKNAREAIFQGRFEEFYKKVVEIY

SEQ ID NO: 55988 - protein, 375 aa, Helicobacter apodemus
  misc_feature (1)..(375): tr|A0A2U8FEN9|A0A2U8FEN9_9HELI Queuine tRNA-ribosyltran sferase OS=Helicobacter apodemus OX=135569 GN=tgt PE=3 SV=1
MEFNLQQVCGNARAGMLKLAHGEVLTPIFMPVGTQASVKALDFMDLLALKAPIILANTYHLYLRPNDEVIKQLGGLHNFSKFPKNFLTDSGGFQAFSLSNNVKVSNEGILFKSHIDGSKHFFTPKKVLDIQYNLNSDIMMVLDDLVGLPAPRERILESINKTSLWAEESIQYHNFKKYQAQEEGRAFNNHIFAINQGGVDRELREISAKDLGSMGDFDGYAIGGLAVGESNAMMYETLEFTLPFLPKDKPRYLMGVGTPRDIIEAIARGVDMFDCVMPTRNARNGTLFTSEGKIAIKSTRFKLDTKPLDEECFCYTCTNHTRAYLHHLFRAGEMSYFRLASIHNLAYYLSLAKNAREAIFQGRFEEFYKKVVEIY

SEQ ID NO: 55989 - protein, 373 aa, Helicobacter aurati
  misc_feature (1)..(373): tr|A0A3D8J8H1|A0A3D8J8H1_9HELI Queuine tRNA-ribosyltran sferase OS=Helicobacter aurati OX=137778 GN=tgt PE=3 SV =1
MQFIIEATQNKARACRFTLAHGVVETPIFMPVGTQGTLKGIDCVTANTILQTHLILANTYHLYLRPGIEVFLKAGGIHQFARFNGNYLTDSGGFQAFSMGTQAKTEDIGIAFRSHIDGSKHFFTPTKALEIQYAINSDIMMVLDDLAALPANRSRLLDSVTRTTHWAKQSIAYHNSQKNAKEIHNRLFAIMQGGVDYEMRKRSANELCTLDFDGYAIGGLAVGESQTEMYDCLDYALDFLPTNKPRYLMGVGTPQNLLECIERGVDMFDCVMPSRNARNACIFTSEGKIHIKSPSYKTDFSPLDSQCQCYTCKNYTRSYLHHLFRAKELSYHSLATIHNLFFYLQLMRESRKAILNGYWKEYKKNTLEKLSNH

SEQ ID NO: 55990 - protein, 374 aa, Helicobacter bilis
  misc_feature (1)..(374): tr|C3XEW1|C3XEW1_9HELI Queuine tRNA-ribosyltransferase OS=Helicobacter bilis ATCC 43879 OX=613026 GN=tgt PE=3 SV=1
MRFQIQAKVGKARACSFTLTHGKVETPIFMPVGTQGVIKGLNSLDIKNILQTNLILANTYHLYLRPGIETLKKAGGIHNFANFHGNYLTDSGGFQAFSLGENVRHDDCGIAFKSHIDGSKHFFTPEKVLDIEYAINSDIMMILDDLVGLPATKERLLDSVKRTTKWAKQSIQYHNMQKEKHDLKNKIFAIMQGGTDYEMRKRSAAELTELGFDGYAIGGLAVGESSQEMYECLDYACDFLPETKPRYLMGVGTPENLLEGIDRGVDMFDCVMPTRNARNASIFTNQGRLNIKKACYKNDFTPLDSKCHCLTCLNFTRAYLHHLFRANEITYHSLASIHNLHFYITLLKDSRQAIINQTWQEFKKQKLSDFGQVD

SEQ ID NO: 55991 - protein, 374 aa, Helicobacter bilis
  misc_feature (1)..(374): tr|A0A4U8U0G8|A0A4U8U0G8_9HELI Queuine tRNA-ribosyltran sferase OS=Helicobacter bilis OX=37372 GN=tgt PE=3 SV=1
MQFQIQAKVGKARACSFTLAHGKVETPIFMPVGTQGVIKGLNSLDIKNILQTNLILANTYHLYLRPGIETLKKAGGIHNFANFHGNYLTDSGGFQAFSLGENVKHEDCGIAFKSHIDGSRHFFTPEKVLDIEYAINSDIMMILDDLVGLPATKERLLDSVKRTTKWAKQSIQYHNMQKEKHDLKNKIFAIMQGGTDYEMRKRSAEKLTDLGFDGYAIGGLAVGESSQEMYECLDYACDFLPETKPRYLMGVGTPENLLEGIDRGVDMFDCVMPTRNARNASIFTHQGRLNIKKACYKNDFTPLDSKCHCFTCLNFTRAYLHHLFRANEITYHSLASIHNLHFYITLLKDSRQAIINQTWQEFKKQKLSDFGQVD

SEQ ID NO: 55992 - protein, 367 aa, Helicobacter bizzozeronii
  misc_feature (1)..(367): tr|F8KS50|F8KS50_HELBC Queuine tRNA-ribosyltransferase OS=Helicobacter bizzozeronii (strain CIII-1) OX=1002804 GN=tgt PE=3 SV=1
MDFCLEGQEGHARAGTLKLAHGIVPTPIFMPVGTQASVKSLDALDLQTHLKAPIILGNTYHLYLRPGASIIQNLGGLHGFSGFQGNFLTDSGGFQAFSLHTHTKEHPQGIVFKSHIDGSTHLFTPSKVLDTQYALNSDICMVLDDLVGLPAPFERLKLAVQKTTQWAKESLEHHKAHAGATNYIFAIVQGGTNPALRTQSALELSALDFDGYAIGGLAVGESAQEMYAIIEHTTEFLPPHKPRYLMGVGTPQDLLEAIERGVDMFDCVMPTRNARNGTLFTTCGKISIKAQAHKESPEPLDKNCSCYTCQHYSKAYLHHLFKARELSYFRLASLHNLHFYLELVRGAREAILKGEFAGYKARMLKFY

SEQ ID NO: 55993 - protein, 270 aa, Helicobacter bizzozeronii
  misc_feature (1)..(270): tr|H5VB69|H5VB69_HELBI Queuine tRNA-ribosyltransferase OS=Helicobacter bizzozeronii CCUG 35545 OX=1002805 GN=H BZS_109460 PE=3 SV=1
MALQSFKANFLTDSGGFQAFSLHTHTKEHPQGIVFKSHIDGSTHLFTPSKVLDTQYALNSDICMVLDDLVGLPAPFERLKLAVQKTTQWAKESLEHHKAHAGATNYIFAIVQGGTNPALRTQSALELSALDFDGYAIGGLAVGESAQEMYAIISHTTEFLPPHKPRYLMGVGTPQDLLEAIERGVDMFDCVMPTRNARNGTLFTRYGKLSIKAQAHKESPEPLDKNCACYTCQHYSKAYLHHLFKARELLYFRLASLHNLHFLFGISARG

SEQ ID NO: 55994 - protein, 382 aa, Helicobacter brantae
  misc_feature (1)..(382): tr|A0A3D8IWX6|A0A3D8IWX6_9HELI Queuine tRNA-ribosyltran sferase OS=Helicobacter brantae OX=375927 GN=tgt PE=3 S V=1
MRFELQARDNLARAGKLTLSHGEVLTPVFMPVGTQGVIKGLDFIDVEQNLGAKIILGNTYHLYLRVGIEKMRALGGLHKFSGYSGNFLTDSGGFQAFSLGGKRREEGIEFASHIDGSKHFFTPEKVLDIEYALNSDIMMILDDLVGLPASEERIMQSIDRTTLWAKQSLDYHALQKSQGKAQTNNIFAIVQGGTTERFRYKSASELVALRSEVEGVEYEYDGYAIGGLAVGESSEEMYHTLDFTTPLLPSHKPRYLMGVGTPENLIEAIARGVDMFDCVMPTRNARNATIFTHFGKLSIKSPRYALDESPLDSQCDCYTCRNFSRAYIHHLFRSSEITYHRLASIHNLRYYLNLLSSAREAILKGEFMEFRKDFYAKRVGES

SEQ ID NO: 55995 - protein, 377 aa, Helicobacter canadensis
  misc_feature (1)..(377): tr|C5ZVX7|C5ZVX7_9HELI Queuine tRNA-ribosyltransferase OS=Helicobacter canadensis MIT 98-5491 OX=537970 GN=tgt PE=3 SV=1
MEFNLQKIDGKARAGVLKLAHGEIQTPIFMPVGTQACVKALDFNDLLALNAPIILGNTYHLYLRPGSEIVKQLGGLHHFSRFPRNFLTDSGGFQAFSLSDHVKVSDEGILFKSHIDGSKHFFTPQKVLEIQYDLNSDIMMILDDLVGLPASKERILKSINRTSKWANEAITFHNAQKIQAREQGREFTNHIFAINQGGTDREFREISAKDLTSMADFDGYAIGGLAVGEPNELMYETLEFTTPLLPKDKPRYLMGVGTPQDIVEAIARGVDMFDCVMPTRNARNGTIFTHFGKLSIKSPRFKLDTMPLDSKCHCYTCQNFSRAYLHHLFRAGEMTYFRLASIHNLAYYLDLVREAREAILKGEFQDFYQKFYSNLEN

SEQ ID NO: 55996 - protein, 371 aa, Helicobacter canis
  misc_feature (1)..(371): tr|V8CJP4|V8CJP4_9HELI Queuine tRNA-ribosyltransferase OS=Helicobacter canis NCTC 12740 OX=1357399 GN=tgt PE=3 SV=1
MFELLHTDGSARAGRLNLAHSIVPTPVFMPVGTQACVKGLDATDLQEILQAKLILANTYHTYLRPGAEIMKEFGGVHKFSGFNGSFLSDSGGFQAFSLGTNVKKTDEGVWFCSHIDGSKHLFTPESVLDMQYALNSDIMMVLDDLIALPATQQRLAQSVETTTKWAKRSIDYHNAQKSQGKASTNHLFGIVQGGVSEQFRSQSALELRELEFDGYALGGLAVGESAEQMYATIAHTAPLLPESKPRYLMGVGTPENIIESIDRGVDMFDCVMPCRNARNGTLFTHFGKLNIKNTKHKHDQSPLDPLCTCYTCARYSRAYLHHLNKAQELTYHRLATLHNLSYYMTLVRGAREAILQDRWQSFKAEFYAKRA

SEQ ID NO: 55997 - protein, 372 aa, Helicobacter canis
  misc_feature (1)..(372): tr|A0A377J1F1|A0A377J1F1_9HELI Queuine tRNA-ribosyltran sferase OS=Helicobacter canis OX=29419 GN=tgt PE=3 SV=1
MFELLHTNDGARAGKLHLAHSIVPTPVFMPVGTQACVKGLDATDLGEILQAKLILANTYHTYLRPGAAIMREFGGVHNFSGFNASFLSDSGGFQAFSLGANVKKTDSGVWFSSHIDGSKHLFTPESVLDMQYALNSDIMMVLDDLIALPATQERLALSVETTTKWAKRSIAYHKEQKDLGKASTNDLFGIVQGGVSEQFRTQSALELRELDFDGYALGGLAVGESAEEMYATIAHTTPLLPESKPRYLMGVGTPENLIEAIHRGVDMFDCVMPCRNARNGTLFTHFGKLNIKNSCYKNDPAPIDPACACYTCTRYSRAYLHHLNKAQELTYHRLATLHNLSYYLELMRAAREAIMHDKWLAFRAEFYAKRQA

SEQ ID NO: 55998 - protein, 370 aa, Helicobacter cetorum
  misc_feature (1)..(370): tr|I0EN64|I0EN64_HELC0 Queuine tRNA-ribosyltransferase OS=Helicobacter cetorum (strain ATCC BAA-429 / MIT 00-7 128) OX=182217 GN=tgt PE=3 SV=1
MDFQLQKTDYSARAGVLNLKHSSVETPIFMPVGTQGCIKSLDAIDMQEHLQAKLILANTYHMYLRPQADIVKKLGGLHNFTQFQGSFLTDSGGFQAFSLNSNVKLEEDGIIFKSHIDGSKHLFTPTKVLDIQYALNSDIMMVLDDLVGLPAPIKRIEESIKRSARWANTSLEYHKRNNRPNNNLFAIIQGGTNLSMRSMSVELTLRDFDGYAIGGLAVGENTNEMYETIAHTAPLLPKDKPRYLMGVGTPENILEAISLGVDMFDCVMPTRNARNATLFTHFGKISIKNAQYKTDNTPIEENCTCYTCKHYSKAYLHHLFRAKELTYARLASLHNLHFYLELTRNARKAILEERFLDFKTEFLKNYHQLN

SEQ ID NO: 55999 - protein, 369 aa, Helicobacter cetorum
  misc_feature (1)..(369): tr|I0ERB3|I0ERB3_HELCM Queuine tRNA-ribosyltransferase OS=Helicobacter cetorum (strain ATCC BAA-540 / MIT 99-5 656) OX=1163745 GN=tgt PE=3 SV=1
MNYQLQATDNHARAGVLELAHSSVETPIFMPVGTQGCIKSLDANDMQEHLNAKLILANTYHMYLRPGEKIVENLGGLHHFSQFQGSFLTDSGGFQAFSLNSNVKLQEDGIIFKSHIDGSKHYFTPTKVLDIQYALNSDIMMVLDDLVGLPAPLKRIEESIIRSAKWANLSLEYHKEKNRPNNHLFAIIQGGTNLKMRSLSVELTHKDFDGYAIGGLAVGESANEMYETIAHTAPLLPKDKPRYLMGVGTPENILEAISLGVDMFDCVMPTRNARNATLFTHFGKISIKNAQYKTDNTPIEENCSCYTCKRYSKAYLHHLFKAKELTYARLASLHNLHFYLELTKNARKAILEKRFLSFKKEFLENYRSS

SEQ ID NO: 56000 - protein, 383 aa, Helicobacter cholecystus
  misc_feature (1)..(383): tr|A0A3D8IUY3|A0A3D8IUY3_9HELI Queuine tRNA-ribosyltran sferase OS=Helicobacter cholecystus OX=45498 GN=tgt PE= 3 SV=1
MRFEVCNQDYHARALKLTFSHGEVLTPIFMPVGTQGVIKGLDYIDVQSHLNAKIILANTYHLYLRVGIERMKTLGGLHHFSGYSGNFLSDSGGFQAFSLGGKRKEGGIEFASHLDGSKHFFTPSKVLDIQYALNSDIMMILDDLVGLPANERRILQSIERTTQWAKQSLDYHALQKAQGKAQTNHIFAIVQGGVSEQYRTKSATELRELRSEVDGVTYEYDGYAIGGLAVGESSEEMYATLDFTLPLLPTHKPRYLMGVGTPENIIEAISRGVDMFDCVMPTRNARNATIFTSFGKLSIKSSRYALDENPLDSECDCYTCKHFSRAYLHHLFRCNELTYHRLATIHNLKYYLNLTQGAREAIMQNRFNEYKKEFYAKREICKD

SEQ ID NO: 56001 - protein, 380 aa, Helicobacter cinaedi
  misc_feature (1)..(380): tr|A0A377JW49|A0A377JW49_9HELI Queuine tRNA-ribosyltran sferase OS=Helicobacter cinaedi OX=213 GN=tgt PE=3 SV=1
MQVSIEAKDGKARALTLTLAHSIVQTPIFMPVGTQGCVKALDSLDLAQNLNAKIILANTYHMYLRVGIERLKSFGGIHTFANFNGSYLSDSGGFQAFSLNKNVKLNENGVEFKSHIDGSKHFFSPSFVLDIQYALNSDIMMVLDDLVGLPASETRILDSIKRTTEWAKASLEYHEMKKSQGKAQTNNLFAIIQGGTSPKFREISATSLVNLGEFDGFAIGGLAVGESNEEMYSTISHTIPFMPESKPRYLMGVGTPENIIEAIYRGVDMFDCVMPTRNARNATLFTHFGKINIKGASFANDTSPIDEKCSCYTCQNYTRAYLCHLFRSQEITYHRLASLHNLHYYLNLVREAREAILQGAFAAYRQNFYHLREMEVPNEY

SEQ ID NO: 56002 - protein, 380 aa, Helicobacter cinaedi
  misc_feature (1)..(380): tr|A0A2Z5V0X3|A0A2Z5V0X3_9HELI Queuine tRNA-ribosyltran sferase OS=Helicobacter cinaedi OX=213 GN=tgt PE=3 SV=1
MQVNIEAKDGKARALTLTLAHSIVQTPIFMPVGTQGCVKALDSLDLAQNLNAKIILANTYHMYLRVGIERLKAFGGIHTFANFNGSYLSDSGGFQAFSLNQNVKLNENGVEFKSHIDGSKHFFSPSFVLDIQYALNSDIMMVLDDLVGLPASETRILDSIKRTTEWAKASLEYHEMKKSQGKATTNNLFAIIQGGTSPKFREISATSLVNLGEFDGFAIGGLAVGESSEEMYSTISHTIPFMPESKPRYLMGVGTPENIIEAIYRGVDMFDCVMPTRNARNATLFTHFGKINIKGASFANDTSPIDEKCSCYTCQNYTRAYLCHLFRSQEITYHRLASLHNLHYYLNLVREAREAILQGAFAAYRQNFYQLREMEVPNEY

SEQ ID NO: 56003 - protein, 376 aa, Helicobacter equorum
  misc_feature (1)..(376): tr|A0A3D8IU55|A0A3D8IU55_9HELI Queuine tRNA-ribosyltran sferase OS=Helicobacter equorum OX=361872 GN=tgt PE=3 S V=1
MQVCIDATDLQARALTLKLAHGEIQTPIFMPVGTQGCIKALDSYDVSTHLRAPIILANTYHMYLRCGIQKLKTFGGIHKFANFGGNYLSDSGGFQAFSLGSNVKLLENGVEFKSHIDGSKHIFTPQKVLDIQYALNSDIMMVLDDLVGLPAPKERIIESIKRTSLWAKQSLTYHLHQKSLGNAKTNHLFAIVQGGTDIQLRKESALSLTDMQDFDGYAIGGLAVGESAQEMYETIESTIPYLPQNKPRYLMGVGTPQNILESIERGVDMFDCVMPTRNARNATLFTNFGKIHIKNTRFGLDSAPLDPECNCYTCQNYSRAYLHHLYKSGEMSYYRLASIHNLHFYLTLVRESREAILGKNFHTYKAKKLEAMQRGC

SEQ ID NO: 56004 - protein, 367 aa, Helicobacter felis
  misc_feature (1)..(367): tr|E7A917|E7A917_HELFC Queuine tRNA-ribosyltransferase OS=Helicobacter felis (strain ATCC 49179 / NCTC 12436 / CS1) OX=936155 GN=tgt PE=3 SV=1
MDVKLDAQEGHARALSLNLAHGCVQTPIFMPVGTQASVKSLDAQDLQALHAPIILGNTYHLYLRPTPERIAKLGGLHGFSGFKGNFLTDSGGFQAFSLRSNTKEHEEGIVFKSHIDGSSHFFTPAKVLDIQYALNSDICMVLDDLVGLPASYDRLLKAVQKTTAWAQKSLEHHMRYARPNNHIFAIVQGGVNLELRTQSALDLSALDFDGFAIGGLAVGESAQEMYETIVHTTPLLPAHKPRYLMGVGTPQDLLEAIDLGVDMFDCVMPTRNARNGTLFTMQGKISIKNTHHKDSDMPLDSACACHTCTHYSKAYLHHLFKARELSYFRLASLHNLHFYLELVRGAREAILQGHYASYKTCMLERLG

SEQ ID NO: 56005 - protein, 376 aa, Helicobacter fennelliae
  misc_feature (1)..(376): tr|A0A2X3B971|A0A2X3B971_9HELI Queuine tRNA-ribosyltran sferase OS=Helicobacter fennelliae OX=215 GN=tgt_1 PE=3 SV=1
MFFKIDSKDSAARAGTLTLAHSVVQTPVFMPVGTQACVKSIDALDIESILGAQIILANTYHTYLRPGIETLKHFGGVHKFSGFSGSFLSDSGGFQAFSLGQNVKKQDNGIVFSSHIDGSKHLFTPESVLDIQYALNSDIMMVLDDLIALPADSNRLKQSIDTTIKWAKQSISYHNQNKQQGLSLTNNLFGIVQGGVDLTFRKQCAQSLVELEFDGYALGGLAVGEETNAMYDTIAFSAPLLPESKPRYLMGVGTPQNLIEAIDRGIDMFDCVMPTRNARNGTLFTSFGKLNIKNQIHKNDENPIDLQCSCYTCKHFSRGYLHHLCKAREITYFRLATLHNLWYYLELMRNAREAILHQKWNQFKSEFYIKLNKEHT

SEQ ID NO: 56006 - protein, 189 aa, Helicobacter fennelliae
  misc_feature (1)..(189): tr|A0A2X3BRX7|A0A2X3BRX7_9HELI tRNA-guanine transglycos ylase OS=Helicobacter fennelliae OX=215 GN=tgt2_1 PE=4 SV=1
MCKRLYLCLWGLKACVKALDFNDLENLGAKIILANTYHLYLRPNDEVVRTLGGLHGFSRFNGSFLTDSGGFQAFSLGGKPRENGIEFRSHIDGSTHFFTPKKVLDIQYNLNSDIMMILDDLIRLPAEQKRIADSIKRTIAWARESLEYHATRRESHLSNNIFAIIQGGVDLEARKICAFSGYRMQRSGI

SEQ ID NO: 56007 - protein, 377 aa, Helicobacter ganmani
  misc_feature (1)..(377): tr|A0A3D8IC64|A0A3D8IC64_9HELI Queuine tRNA-ribosyltran sferase OS=Helicobacter ganmani OX=60246 GN=tgt PE=3 SV =1
MEFNLQRTDENARAGVLKLAHGEVPTPIFMPVGTQASVKALDFSDLLALNAPIILANTYHLYLRPNDEVIRELGGLHAFSKFPRNFLTDSGGFQAFSLNSNVKLYEDGIVFKSHIDGSSHFFSPQKVLDIQYNLNSDIMMILDDLVGLPASKERIRDSIARTTKWAKSAIDYHNYKKQSAANSGKILTNNIFAIVQGGTDKEFRESSAKNLTSLGDFDGYAIGGLAVGEPNEEMYATLDFTTPLLPKDKPRYLMGVGTPRDIIEGIARGVDMFDCVMPTRNARNGTIFTHFGKLAIKSPRFKLDTQPLDSKCSCYTCQNHSRAYLHHLFRAGEISYFRLASIHNLAFYLDLVREAREAILEGEFARFYKDSIESMSP

SEQ ID NO: 56008 - protein, 367 aa, Helicobacter heilmannii
  misc_feature (1)..(367): tr|A0A0K2Y6T5|A0A0K2Y6T5_HELHE Queuine tRNA-ribosyltran sferase OS=Helicobacter heilmannii OX=35817 GN=tgt PE=3 SV=1
MDFTLNGTDKKARAGALKLAHGVVPTPIFMPVGTQASVKSLDALDLQIHLKAPIILGNTYHLYLRPGADLICKLGGLHGFSQFQGNFLTDSGGFQAFSLKHNTKEHAEGIVFKSHIDGSLHLFTPQKVLDIQYALNSDICMVLDDLVGLPAPFDRLKLAVEKTTKWAQSSLKHHKTHARASNHIFAIVQGGTDFNLRRQSALELGELDFDGYAIGGLAVGESAHEMQETIAHTTEFLTPHRPRYLMGVGTPQDILNAIELGVDMFDCVMPTRNARNGTLFTSLGKLSIKAQAQKASEEPLDPKCGCYTCKHYSKAYLHHLFKARELLYFRLASLHNLYFYLDLVRGAREAILKGAYADYKARMLEFY

SEQ ID NO: 56009 - protein, 367 aa, Helicobacter heilmannii
  misc_feature (1)..(367): tr|A0A0K2XWN5|A0A0K2XWN5_HELHE Queuine tRNA-ribosyltran sferase OS=Helicobacter heilmannii OX=35817 GN=tgt PE=3 SV=1
MDFTLNGTDKKARAGALKLAHGVVPTPIFMPVGTQASVKSLDALDLQIHLKVPIILGNTYHLYLRPGADLICKLGGLHGFSQFQGNFLTDSGGFQAFSLKHNTKEHAEGIVFKSHIDGSLHLFTPQKVLDIQYALNSDICMVLDDLVGLPAPFDRLKLAVEKTTKWAQSSLKHHKTHARASNHIFAIVQGGTDFNLRRQSALELGELDFDGYAIGGLAVGESAHEMQETIAHTTEFLTPHRPRYLMGVGTPQDILNAIELGVDMFDCVMPTRNARNGTLFTSLGKLSIKAQAQKASEEPLDPKCTCYTCKHYSKAYLHHLFKARELLYFRLASLHNLHFYLGLVRGAREAILKGAYVDYKARMLSVY

SEQ ID NO: 56010 - protein, 381 aa, Helicobacter hepaticus
  misc_feature (1)..(381): sp|Q7VHX2|TGT_HELHP Queuine tRNA-ribosyltransferase OS= Helicobacter hepaticus (strain ATCC 51449 / 3B1) OX=235 279 GN=tgt PE=3 SV=1
MQVTLQAQDGGARALSLKLAHSEVQTPVFMPVGTQGCVKALDSRDMSEILNAQIILVNTYHMYLRIGIERLKNFGGIARFAHFDRSYLSDSGGFQAFSLNKNAKVTNEGVAFKSHIDGSKHFFSPEYVLDIQYALNSDIMMVLDDLVGLPSSEERIADSIARTSDWAQKSLIYHQSQKARGLGLNNNLFAIIQGGVNEHFRTLCAKQLVDMGDFDGFAIGGLAVGETSEQMYKTISFTTPLMPVNKPRYLMGVGTPENIIESIALGVDMFDCVMPTRNARNATLFTHFGKINIKAAIFSNDQSPIDELCDCYTCQHFTRAYLCHLFRSQEMTYYRLASLHNLHYYLNLMREAREAILQGTFSAYRSSFYALREMEIPNNEY

SEQ ID NO: 56011 - protein, 380 aa, Helicobacter jaachi
  misc_feature (1)..(380): tr|A0A4U8TCC1|A0A4U8TCC1_9HELI Queuine tRNA-ribosyltran sferase OS=Helicobacter jaachi OX=1677920 GN=tgt PE=3 S V=1
MQVTLKAQDDRARVLELTLPHSTIQTPIFMPVGTQGCVKALDSIDLSHILHTKLILANTYHMYLRVGLKRLKAFGGVHKFANFHGSYLSDSGGFQAFSLGKHVKIIESGIEFKSHIDGSKHFFSPEFVLDIQYALNSDIMMVLDDLVGLPASTERIADSIQRTSAWAQRSLLYHEAQKAQGKGLDNNLFAIIQGGTDRHFRALSCRQLTEMGDFDGFAIGGLAVGEDTQEMYDTINHLTPLMPPHKPRYLMGVGTPENIIESIALGVDMFDCVMPTRNARNATLFTHFGKINIKAASFINDTKPIDEACDCYTCTHYTRAYLCHLFRAQEITYHRLATLHNLHYYLTLAKGAREAILAGNFKDYRAAFYAKRAMEVPDEY

SEQ ID NO: 56012 - protein, 380 aa, Helicobacter japonicus
  misc_feature (1)..(380): tr|A0A4U8TRY4|A0A4U8TRY4_9HELI Queuine tRNA-ribosyltran sferase OS=Helicobacter japonicus OX=425400 GN=tgt PE=3 SV=1
MQVALQAQEGKARALNLSLAKAQVQTPVFMPVGTQGCIKALDSNDVSEILGAKIILANTYHMYLRVGIERLKGFGGIHSFANFNGSYLSDSGGFQAFSLNQNTQICEEGISFKSHIDGSKHFFSPEFVLDIQYALNSDIMMVLDDLVGLPASVERLADSVRRTSDWAQRSINYHQKMKQEGRGLSNHLFAIIQGGTDTHFRTLSANSLTNMGDFDGFAIGGLAVGENIEDMYRCIAHTTELMPIHKPRYLMGVGTPENIIESINLGVDMFDCVMPTRNARNGTLFTHFGKINIKVAQYADDKSPIDTQCECYTCQRFSRAYLRHLFRANEITYHRLASLHNLHYYLHLTKGARAAILAGRFKEYRTRFYDLREMETPNEY

SEQ ID NO: 56013 - protein, 372 aa, Helicobacter macacae
  misc_feature (1)..(372): tr|V8CC86|V8CC86_9HELI Queuine tRNA-ribosyltransferase OS=Helicobacter macacae MIT 99-5501 OX=1357400 GN=tgt P E=3 SV=1
MFSLQASSGSARAGVLSLAHSLVQTPVFMPVGTQACVKSLDALDLQNLGAKIILANTYHTYLRPGAEVFSKFGGVHSFSGFGGSFLSDSGGFQAFSLGGNAKKLENGVEFASHIDGSRHLFTPQSVLDMQLALNSDVMMVLDDLIALPADRDRLAQSVDTTTRWARQSKIYYERKKSEGKAEGNHIFGIVQGGVSQEFRARSASELVELDFHGYALGGLAVGEETQQMYDTIEFSTPLLPRDKPRYLMGVGTPENLIEAISRGVDMFDCVMPTRNARNGTLFTSFGRINIKNQQYRFDEGAIDSECECYACKSVSRAYLHHLFRANELSYHRFASLHNLHYYLELMRGAREAIVADKWREFRAEFYAKREYL

SEQ ID NO: 56014 - protein, 380 aa, Helicobacter magdeburgensis; identical to SEQ ID NO: 56001
  misc_feature (1)..(380): tr|A0A4U8SZX3|A0A4U8SZX3_9HELI Queuine tRNA-ribosyltran sferase OS=Helicobacter magdeburgensis OX=471858 GN=tgt PE=3 SV=1

SEQ ID NO: 56015 - protein, 378 aa, Helicobacter marmotae
  misc_feature (1)..(378): tr|A0A3D8I7G2|A0A3D8I7G2_9HELI Queuine tRNA-ribosyltran sferase OS=Helicobacter marmotae OX=152490 GN=tgt PE=3 SV=1
MRTTLQAQDGKARALSLTLAHGEVQTPIFMPVGTQGCVKALDSIDMSQILGAKIILANTYHMYLRTSLQTLQAFGGIHNFAAFSGNILTDSGGFQAFSLNTNVKRSEDGISFKSHIDGSKHFFSPEFVLDIQYALNSDIMMVLDDLVGLPASDERIADSIRRTSLWAERSFIYHKANQAKGLGLNNHLFAIIQGGVNLHFRTLSCTQLLNMGDFDGFAIGGLAVGEETQAMYECIEHTTALMPRDKPRYLMGVGTPENIIESIALGVDMFDCVMPTRNARNATLFTHFGKINIKSQAFVNDQNPIDTLCDCYTCKHFSRAYLRHLFRANEITYHRLASIHNLHYYLRLTQGAREAILQGEFKAYRQKFYSLREMETPL

SEQ ID NO: 56016 - protein, 378 aa, Helicobacter muridarum
  misc_feature (1)..(378): tr|A0A099U0L0|A0A099U0L0_9HELI Queuine tRNA-ribosyltran sferase OS=Helicobacter muridarum OX=216 GN=tgt PE=3 SV =1
MSIDFTIEAKHGAARASRFVLAHGVVETPIFMPVGTQGILKGIDCVSATNILQTKLILANTYHLYLRPGTDILSKASGIHSFANFNGNYLTDSGGFQAFSLGSNAKSDDTGITFQSHIDGSKHRFTPTKVIDIQYIINSDIMMVLDDLVALPASKSRILDSINRTTKWARQSIEYHNNQKNIREICNKIFAIMQGGIDYEMRKRSANELCELDFDGYAIGGLAVGESNKDMYNCLDYAVAFLPENKPRYLMGVGTPQNLLECIDRGVDMFDCVMPSRNARNACIFTQNGKINIKNAGYKIDFSPLDSECECYTCKHYSKAYLHHLFRAKELSYHSLATIHNLFFYMQLMSNARNAILHGYWDKYKNNMLRKLEGSLWH

SEQ ID NO: 56017 - protein, 376 aa, Helicobacter muridarum
  misc_feature (1)..(376): tr|A0A4U8TKM7|A0A4U8TKM7_9HELI Queuine tRNA-ribosyltran sferase OS=Helicobacter muridarum OX=216 GN=tgt PE=3 SV =1
MDFTIEAKHGAARASRFVLAHGVVETPIFMPVGTQGILKGIDCVSATNILQTKLILANTYHLYLRPGTDILSKASGIHSFANFNGNYLTDSGGFQAFSLGSNAKSDDTGITFQSHIDGSKHRFTPTKVIDIQYIINSDIMMVLDDLVALPASKSRILDSINRTTKWARQSIEYHNNQKNIREICNKIFAIMQGGIDYEMRKRSANELCELDFDGYAIGGLAVGESNKDMYNCLDYAVAFLPENKPRYLMGVGTPQNLLECIDRGVDMFDCVMPSRNARNACIFTQNGKINIKNAGYKIDFSPLDSECECYTCKHYSKAYLHHLFRAKELSYHSLATIHNLFFYMQLMSNARNAILHGYWDKYKNNMLRKLEGSLWH

SEQ ID NO: 56018 - protein, 374 aa, Helicobacter mustelae
  misc_feature (1)..(374): tr|D3UGZ6|D3UGZ6_HELM1 Queuine tRNA-ribosyltransferase OS=Helicobacter mustelae (strain ATCC 43772 / LMG 18044 / NCTC 12198 / 12198) OX=679897 GN=tgt PE=3 SV=1
MHFKIDKIQNHARATTIQTAHSVIQTPIFMPVGTQACVKGLDFFDLTTHLQTRIILANTYHLYLRPGSENIAKLGGLHHFTKYPHSFLTDSGGFQAFSLSGNMKKSDQGIAFRSHIDGSRHFLTPQKVLDIQYQLNSDIIMVLDDLIGLPAEQNSILQSVQTTTKWAKESLEYHKKNQAEGLGLENHLFAIIQGGNSKTMREKSAQELCALEGFDGYAIGGLAVGESAEEMYDCIEYVNAYTPAHKPRYLMGVGTPENIIEAIDRGVDLFDCVMPSRNARNGSLFTSFGKLNIKSSQYKEQDAAIDEECDCYTCKNFSRAYLNHLFRANEITYFRLATIHNLHYYLTLTRGAREAILANEFQHFKREFYAKRRQ

SEQ ID NO: 56019 - protein, 371 aa, Helicobacter pametensis
  misc_feature (1)..(371): tr|A0A3P6LCZ8|A0A3P6LCZ8_9HELI Queuine tRNA-ribosyltran sferase OS=Helicobacter pametensis OX=95149 GN=tgt PE=3 SV=1
MLKFTLHKKDGHARRATIELNHGSIETPVFMPVGTYGSVKAMTPQNLLDIGSQIILGNTYHLWLRPGLEVIEQFGGLHDFIGWNKPILTDSGGFQVFSLSDMRKLTEEGCTFKSPINGDKLFLSPEISMKIQTVLNSDIAMQLDECTPGEATREQAEKSLQMSLRWAERSKKAFEDLNNPNALFGIVQGAMYEDLREQSLRGLEQLNFPGLAIGGLSVGEPKPEMYRMLRAVGLMLPEHKPHYLMGVGTPEDLVYGVANGVDMFDCVMPTRNARNGWLFTRFGDIKIKNAKYKHDTHPLDESCTCYACTHFNRAYLHHLHRAGEILGAQLNTIHNLHFYQTIMAEMRETIEQGKFADWQEQFHENRGRGVD

SEQ ID NO: 56020 - protein, 377 aa, Helicobacter pullorum
  misc_feature (1)..(377): tr|C5EZV3|C5EZV3_9HELI Queuine tRNA-ribosyltransferase OS=Helicobacter pullorum MIT 98-5489 OX=537972 GN=tgt P E=3 SV=1
MEFNLQKNDGNARAGILKLAHGEVQTPIFMPVGTQACVKALDFADLLALDAPIILANTYHLYLRPGAEIIGELGGLHNFSKFPRNFLTDSGGFQAFSLSDNVKVSEDGILFKSHIDGSKHFFTPKKVLDIQYHLNSDIMMILDDLVGLPASKERIKQSINRTTQWAREAISYHNFKKIQAKESGVKLTNNIFAINQGGTDREFREASARDLTSMGDFDGYAIGGLAVGEPNKQMYETLDFTTPLLPRDKPRYLMGVGTPQDIVEAIARGVDMFDCVMPTRNARNGTIFTHFGKLSIKSSRFKLDTNPLDCKCHCYTCQNFSRAYLHHLFRAGEMSYFRLASIHNLAYYLDLVREAREAILQGKFIEFYKRFYSDLEN

SEQ ID NO: 56021 - protein, 377 aa, Helicobacter pullorum
  misc_feature (1)..(377): tr|A0A0N1EA05|A0A0N1EA05_9HELI Queuine tRNA-ribosyltran sferase OS=Helicobacter pullorum OX=35818 GN=tgt PE=3 S V=1
MEFNLQKNDGNARAGILKLAHGEVQTPIFMPVGTQACVKALDFADLLALDAPIILANTYHLYLRPGAEIIGELGGLHNFSKFPRNFLTDSGGFQAFSLSDNVKVSEDGILFKSHIDGSKHFFTPKKVLDIQYHLNSDIMMILDDLVGLPASKERIKQSINRTTQWAKEAISYHNFKKIQAKESGVKLTNNIFAINQGGTDREFREASARDLTSMGDFDGYAIGGLAVGEPNKQMYETLDFTTPLLPRDKPRYLMGVGTPQDIVEAIARGVDMFDCVMPTRNARNGTIFTHFGKLSIKSSRFRLDTNPLDCKCHCYTCQNFSRAYLHHLFRAGEMSYFRLASIHNLAYYLDLVREAREAILQGKFIEFYKRFYSDLEN

SEQ ID NO: 56022 - protein, 371 aa, Helicobacter pylori
  misc_feature (1)..(371): sp|O08314|TGT_HELPY Queuine tRNA-ribosyltransferase OS= Helicobacter pylori (strain ATCC 700392 / 26695) OX=859 62 GN=tgt PE=3 SV=2
MDFQLQATDNNARAGLLNLAHSQVATPVFMPVGTQGCIKSLDATDAQEILGAKLILANTYHMYLRPGEKVVEELGGLHRFAQFYGSFLTDSGGFQAFSLSDNVKLQEDGIVFKSHIDGSKHLFTPAKVLDIQYSLNSDIMMVLDDLVGLPAPLKRLEESIKRSAKWANMSLEYHKEKNRPSNNLFAIIQGGTHLKMRSLSVGLTHEGFDGYAIGGLAVGESADEMLETIAHTAPLLPKDKPRYLMGVGTPENILDAISLGVDMFDCVMPTRNARNATLFTHSGKISIKNAPYKLDNTPIEENCACYACKRYSKAYLHHLFRAKELTYARLASLHNLHFYLELVKNARNAILEKRFLSFKKEFLEKYNSRSH

SEQ ID NO: 56023 - protein, 371 aa, Helicobacter pylori
  misc_feature (1)..(371): tr|J0DBG4|J0DBG4_HELPX Queuine tRNA-ribosyltransferase OS=Helicobacter pylori Hp H-6 OX=992061 GN=tgt PE=3 SV= 1
MDFQLQAIDDNARAGVLNLAHSQVATPVFMPVGTQGCIKSLDATDAQEILGAKLILANTYHMYLRPGEKVVGQLGGLHRFAQFQGSFLTDSGGFQAFSLSDNVKLQEDGIVFKSHIDGSKHLFTPTKVLDIQYSLNSDIMMVLDDLVGLPAPLKRLEESIKRSAKWANLSLEYHKQKNRPSNNLFAIIQGGTHLKMRSLSVGLTHEGFDGYAIGGLAVGESVDEMLETIAHTAPLLPKDKPRYLMGVGTPENILDAIGLGVDMFDCVMPTRNARNATLFTHSGKISIKNAPYKLDNTPIEENCTCYTCKRYSKAYLHHLFRAKELTYARLASLHNLHFYLDLVKNARNAILEKRFLSFKKEFLEKYNSRSH

SEQ ID NO: 56024 - protein, 376 aa, Helicobacter saguini
  misc_feature (1)..(376): tr|A0A347VSR7|A0A347VSR7_9HELI Queuine tRNA-ribosyltran sferase OS=Helicobacter saguini OX=1548018 GN=tgt PE=3 SV=1
MKFTLESIVNKARAGRFKLAHGEVLTPIFMPVGTQGVLKGLDSNDITTHLKTNLILANTYHLYLRPGAEILRKINGIHNFANFKGNYLTDSGGFQAFSLRANAKPNEQGIAFKSHIDGSRHFFTPQSVLDMQYAINSDIMMILDDLVGLPASKDRLLDSIKRTSEWARQSIEYHREQKARHEVGNKIFAIMQGGIDYEMRKRSSEDLVAMDFDGYAIGGLAVGESSEAMYGCLDYACDFLPENKPRYLMGVGTPQNLLECIDRGVDMFDCVMPTRNARNASIFTHFGRLNIKNARFRADFSPLDSKCECFVCRDYTRAFLHHLFRANEITYHRLASIHNLHFYLNLVREARLAIINKTWESYKKKRLEEMDSNENL

SEQ ID NO: 56025 - protein, 377 aa, Helicobacter sp.
  misc_feature (1)..(377): tr|A0A3D6E3Y1|A0A3D6E3Y1_9HELI Queuine tRNA-ribosyltran sferase OS=Helicobacter sp. OX=218 GN=tgt PE=3 SV=1
MNFTLHVTDGRARAATLELAHGSIPTPIFMPVGTQASVKALDHTDLLEHIDAPIILGNTYHLYLRPGDENIAKLGGLHGFTKFPRNFLTDSGGFQAFSLNTNTKHSEEGIIFKSHIDGSKHLFTPEKVLEIEYNLNSDIMMVLDDLVGLPAPRERIKESIERTTRWAERSLLFHQAQKEQGKALTNHLFAIVQGGTDVEFREISSKALVGLGEFDGFAIGGLAVGEPNEEMYATLEYTTPWLPKHKPRYLMGVGTPEDIIEAIDRGVDMFDCVMPTRNARNGTLFTHFGKLSIKSPRYKLDENPIDSECDCYTCKHHSRAYLNHLYRSGEFSYFRLASIHNLRYYLNLVRGAREAILSRTWAEYRRQFYAKRGADEA

SEQ ID NO: 56026 - protein, 376 aa, Helicobacter sp.
  misc_feature (1)..(376): tr|A0A1B8J991|A0A1B8J991_9HELI Queuine tRNA-ribosyltran sferase OS=Helicobacter sp. CLO-3 OX=211 GN=tgt PE=3 SV =1
MFKLSHTDGAARAGTLSLAHSTIQTPVFMPVGTQACVKSLDATDIKEHLGAKIILANTYHTYLRPGVEILQKFGGVHGFSGFDGSFLSDSGGFQAFSLSSNAKKVDEGVFFTSHIDGSKHLFTPESVLDIQYALNSDIMMILDDLIALPASKERLDKSIETTTIWARQSIEYHRAQKAQGKALTNHIFGIVQGGTSNEHRLRSANELVALEFDGYALGGLAVGEETQAMYDTIEFSAPLLPESKPRYLMGVGTPENLIEGVARGIDMFDCVMPSRNARNGTLFTTFGKLNIKNARYKDDENPLDSACGCYTCTRYSRAYLYHLFRAGEIAYFRLATLHNLWYYLTLLRLAREAIIAGRFEAFRREFYHLRMENAKS

SEQ ID NO: 56027 - protein, 366 aa, Helicobacter suis
  misc_feature (1)..(366): tr|A0A510HFM0|A0A510HFM0_9HELI Queuine tRNA-ribosyltran sferase OS=Helicobacter suis OX=104628 GN=tgt PE=3 SV=1
MDFRLDRIDGKARATTLFLSHGMVQTPIFMPVGTQASVKSLDALDLQNLQAPIILANTYHLYLRPGAACIEQLGGLHGFTQFPGNFLTDSGGFQAFSLSSNAKPHDQGIVFKSHIDGSTHLFTPSKVLDIQYALNSDICMVLDDLVGLPAPIDRLKISVQKTTAWALESLKYHKEHAKPNHHIFAIVQGGIDQELRKQSALDLCDLDFDGFAIGGLAVGENAQEMYAAIEYTEAFLPTHKPRYLMGVGTPQDLLEAIERGVDMFDCVMPTRNARNGTLFSSEGKISIKSAQYKQSQDPLDLNCTCYTCKHYSKAYLSHLFRAKELLYFRLASLHNLFFYLQLVRGAREAILEGRYARFKAFWSERL

SEQ ID NO: 56028 - protein, 366 aa, Helicobacter suis; identical to SEQ ID NO: 56027
  misc_feature (1)..(366): tr|E7G552|E7G552_9HELI Queuine tRNA-ribosyltransferase OS=Helicobacter suis HS5 OX=710394 GN=tgt PE=3 SV=1

SEQ ID NO: 56029 - protein, 374 aa, Helicobacter trogontum
  misc_feature (1)..(374): tr|A0A4U8SBE7|A0A4U8SBE7_9HELI Queuine tRNA-ribosyltran sferase OS=Helicobacter trogontum OX=50960 GN=tgt PE=3 SV=1
MQFQIQAKVGKARACSFTLAHGNVVTPIFMPVGTQGVIKGLNSLDVKHVLQTNLILANTYHLYLRPGIETLKKAGGIHNFANFHGNYLTDSGGFQAFSLGENVKHEDCGIAFKSHIDGSKHFFTPEKVLDIEYAINSDIMMILDDLTGLPATKERLLDSVKRTTKWAKQSISYHNMQKEKYDIKNKIFAIMQGGTDYDMRKRSASELIELAFDGYAIGGLAVGESSQEMYECLDYACDFLPDLKPRYLMGVGTPENLLEGIDRGVDMFDCVMPTRNARNATIFTNHGKINIKKTCYKNDFTPLDSQCNCLTCTNYTRAYLHHLFRANEITYHSLASIHNLYFYITLLKDSRQAILDQTWQQFKKQKLDDLAQIN

SEQ ID NO: 56030 - protein, 380 aa, Helicobacter typhlonius
  misc_feature (1)..(380): tr|A0A099UIF3|A0A099UIF3_9HELI Queuine tRNA-ribosyltran sferase OS=Helicobacter typhlonius OX=76936 GN=tgt PE=3 SV=1
MQVELQAQDGKARALNLTLAHAQVQTPVFMPVGTQGCVKALDSLDMKNLLGAKIILANTYHMYLRVGIERLKNFGGIHKFANFGGNYLSDSGGFQAFSLNQNTKISDEGIGFKSHIDGSKHFFSPEFVLDMQYALNSDIMMVLDDLVGLPANDERLADSIRRTSDWAQRSFDYHQAQKARGVGLDNHLFAIIQGGISKHFRTLSARQLTNIGEFDGFAIGGLAVGESAEEMYKCIAHTTELMPCYKPRYLMGVGTPENIIESIALGVDMFDCVMPTRNARNATLFTHFGKINIKAAQYANDENPIDSKCDCYTCKNFSRAYLCHLFRSNEITYHRLASLHNLHYYLSLTKGARETILAGRFKEYRALFYNLREMEIPDEY

SEQ ID NO: 56031 - protein, 376 aa, Helicobacter valdiviensis
  misc_feature (1)..(376): tr|A0A2W6MTY9|A0A2W6MTY9_9HELI Queuine tRNA-ribosyltran sferase OS=Helicobacter valdiviensis OX=1458358 GN=tgt PE=3 SV=1
MEFNLQKIDGEARAGSIKLAHGEVLTPIFMPVGTQASVKALDFKDLLELDCPIVLANTYHLYLRPSDEVVAKLGGLHNFSKFPRNFLTDSGGFQAFSLGGNVKVQEEGIVFKSHIDGSKHFFTPKKVLDIEYNLNSDIMMILDDLVGLPASKERIKESINRTSLWAKEAIEYHTFKKEQFKNEGRELSNNIFAINQGGTDREFREMSARDLTSMGEFDGYAIGGLAVGEPNELMYETLSFTVPLLPKNKPRYLMGVGTPRDIIEAIYRGVDMFDCVMPTRNARNGTIFTHFGKLSIKSSRFKLDDNPLDSKCSCYTCQNFSRAYLHHLFRAGEMSYFRLSSIHNLAFYLKLVRDAREAILKGEFRRLYQEICEIYN

SEQ ID NO: 56032 - protein, 377 aa, Helicobacter winghamensis
  misc_feature (1)..(377): tr|A0A2N3PHH2|A0A2N3PHH2_9HELI Queuine tRNA-ribosyltran sferase OS=Helicobacter winghamensis OX=157268 GN=tgt P E=3 SV=1
MEFNLQKTDNNARAGILKLAHGEVPTPIFMPVGTQASVKALDFNDLLALNAPIILGNTYHLYLRPNDEIIATLGGLHSFTKFPRNFLTDSGGFQAFSLNSNVKHQEDGILFKSHIDGSRHFFSPQKVLDIQYNLNSDIMMILDDLVGLPASKERILESINRTTKWAKDAITYHNFKKQEAIDCGNPLTNNIFAIVQGGTDKEFREASARDLTSLGDFDGYAIGGLAVGEPNAEMYATLDFTTPLLPKDKPRYLMGVGTPQDIVEAIARGVDMFDCVMPTRNARNGTIFTHFGKLAIKSPRYKLDTQPLDPKCHCYTCTNHTRAYLHHLFRAGEMSYFRLSSIHNLAHYLNLVRNAREAILKGEFMQFYKKFYAELES

SEQ ID NO: 56033 - protein, 307 aa, Helicobacteraceae bacterium
  misc_feature (1)..(307): tr|A0A1J5F985|A0A1J5F985_9HELI Queuine tRNA-ribosyltran sferase (Fragment) OS=Helicobacteraceae bacterium CG2_3 0_36_10 OX=1805215 GN=AUK54_02005 PE=3 SV=1
MEFTLEATSKNARAGTIKTAHSTIKTPVFMPVGTVGSVKSLDVNDVLNILGAEIILANTYHMYLRPGDETVAKMGKLHGFTAYPKSFLTDSGGFQAFSLSDISKASEKGIEFRSHIDGSKHFFTPTKVIDIQHNLGSDIMMILDDLVALPATQERIALSIERTTAWAKESIEYFRAKQKEGVGVEQNIFAIIQGGTDKAFRTKSATELCALDYDGFAIGGLSVGELNNEMYDMVEHTVQYMPRDKPRYLMGVGTPEDLIENIEHGIDMFDCVMPTRNARNGTLFTSFGRINIKGAKFKEDALPIDPE

SEQ ID NO: 56034 - protein, 372 aa, Helicobacteraceae bacterium
  misc_feature (1)..(372): tr|A0A1J4TX06|A0A1J4TX06_9HELI Queuine tRNA-ribosyltran sferase OS=Helicobacteraceae bacterium CG1_02_36_14 OX= 1805214 GN=tgt PE=3 SV=1
MEFTLETTSKNARAGTIKTAHSTIQTPVFMPVGTLGSVKSLDMDDVLNLLGADIILANTYHMYLRPGDKTVAKMGKLHGFTTYPKSFLTDSGGFQAFSLSDISKASEKGIEFRSHIDGSKHFFTPTKVIDIQHNLGSDIMMILDDLVALPATQERIALSIERTTAWAKESIEYFRAKQKEGVGVEQNIFAIIQGGTDKAFRTKSATELCALDYDGFAIGGLSVGELNNEMYDTVEHTTQYMPKDKPRYLMGVGTPEDLIENIERGIDMFDCVMPTRNARNGTLFTSFGRINIKGAKFKEDALPIDPECQCLTCKTYTRAYLNHLFRAGEISYFRLATIHNLHYYLNLMREIRVAIVEDRFAEYKTEFYRKRS

SEQ ID NO: 56035 - protein, 374 aa, Heliobacterium modesticaldum
  misc_feature (1)..(374): tr|B0TF77|B0TF77_HELMI Queuine tRNA-ribosyltransferase OS=Heliobacterium modesticaldum (strain ATCC 51547 / Ic e1) OX=498761 GN=tgt PE=3 SV=1
MTAAVRYELIKECTRTSARAGILHTPHGSFETPIFMPVGTQATVKTMTPEEVRELGAGIILSNTYHLYLRPGSDLVREAGGLHKFMNWSHGILTDSGGFQVFSLGPLRKITEEGVRFKSHIDGSEHFFTPEKSIQIQMDLGADIIMAFDECPPYPAEREYAQKSLEMTIRWAKRCRAAHTRKDQALFAITQGGMYADLRKESAARLVELDFPGYGIGGLSVGEPKPLMYEMLDATVPELPKNKARYLMGVGSPDCLWEGVERGVDMFDCVLPTRVARNGLAFTSHGKVVIRNAEHARDFERLDPECSCYTCRHYSRAYLRHLYKAEEILAYRLLTIHNLHMLLNLMRNIRQSILEDRFYEAKKAFFDKYGEERG

SEQ ID NO: 56036 - protein, 373 aa, Heliophilum fasciatum
  misc_feature (1)..(373): tr|A0A4V2SX04|A0A4V2SX04_9FIRM Queuine tRNA-ribosyltran sferase OS=Heliophilum fasciatum OX=35700 GN=tgt PE=3 S V=1
MSVRYELIAQCPETGARAGLLHTPRGTFKTPIFMPVGTQATVKTMTPEELQDLGAEIILSNTYHLYMRPGEALVKEAGGLHRFMNWPRGILTDSGGFQVFSLGPLRKITEEGVSFKSHIDGSQHFFSPEKVMQIQMDLGADIIMAFDECPPHPSTWEYARNSLDVTLRWARRCQQAHHREGQALFGITQGGMYADLRRESAQRFVEMDFPGYGIGGLSVGEPKPLMYEMLDVTVPELPANKPRYLMGVGSPDCLLEGVARGVDMFDCVLPTRVARNGLAMTSTGKVVIRNAQYARDFEPLDPNCSCSTCRNYSRAYLRHLYKAEEILAYRLLTMHNLHMLLQLMRDMRQAIIDGSFVAFKKSFLARYGQESQE

SEQ ID NO: 56037 - protein, 381 aa, Henriciella algicola
  misc_feature (1)..(381): tr|A0A399RGT1|A0A399RGT1_9RHOB Queuine tRNA-ribosyltran sferase OS=Henriciella algicola OX=1608422 GN=tgt PE=3 SV=1
MATFPFEIKAREGKARTGVLKTLRGGIRTPAFMPVGTAATVKALYMDQVEQAGADIILGNTYHLMLRPGAERVKRLGGLHAFSGWRGPMLTDSGGFQVWSLSQLRKMDADGVTFRSHIDGSEHRLTPARSIEIQADLLGADISMQLDECTDFPCTHEEAERSLNLSLDWGARSLEAFGERDTQTLFGIVQGSNFPDLREKSAKGVVAQGFGGIALGGLAVGEGHDQMCATIDMTVPHLPGDKPRYVMGVGKPIDLVESVARGIDMFDCVLPTRAGRHGQAWTWDGPINLKNARFAEDTSPIDEAVPSPASQDYSKAYLHHLIKSGEYLGSMILSWHNTAFFQALMAEIRLAIEENRFEALRAELSRRWASTKSSARMPKDA

SEQ ID NO: 56038 - protein, 381 aa, Henriciella barbarensis
  misc_feature (1)..(381): tr|A0A399QQ86|A0A399QQ86_9RHOB Queuine tRNA-ribosyltran sferase OS=Henriciella barbarensis OX=86342 GN=tgt PE=3 SV=1
MATFPFEIKAREGKARTGVLKTPRGDIRTPAFMPVGTAATVKAMYMDQVEQAGADIILGNTYHLMLRPGAERVERLGGLHAFSGWKGPMLTDSGGFQVWSLSQLRKMDADGVTFRSHIDGSEHRLTPARSIEIQADLLGADISMQLDECTDFPCTHEEAERSLDLSLDWGARSLEAFGDRDAQTLFGIVQGSNFPDLREKSAKGVVSQGFGGIALGGLAVGEGHDQMCATIDMTVPHLPEAKPRYVMGVGKPIDLVESVARGIDMFDCVLPTRAGRHGQAWTWEGPINLKNARFSEDMSPVDEAVPSPASQDYTRAYLHHLIKSGEYLGAMILSWHNTAFFQALMAEIRLSIVENRFEALRAELSHRWAATKSSARAPKSA

SEQ ID NO: 56039 - protein, 378 aa, Henriciella sp.
  misc_feature (1)..(378): tr|A0A399REW1|A0A399REW1_9RHOB Queuine tRNA-ribosyltran sferase OS=Henriciella sp. JN25 OX=2305466 GN=tgt PE=3 SV=1
MATFPFEIKAREGAARTGVLKTARGDIRTPAFMPVGTAGTVKALYMDQVKQAGADIILGNTYHLMLRPGAERVKRLGGLHAFSGWSGPMLTDSGGFQVWSLSQLRKMDKDGVTFRSHIDGSEHRLTPARSIEIQADLLGADISMQLDECTDFPCSHEEALRSLELSLDWGGKSLGAFGQREGQTLFGIIQGSNFEDLRERSAKGVVSQGFGGIALGGLAVGEGHDQMCRTIDMTVPHLPDDKPRYVMGVGKPIDLVESVARGIDMFDCVLPTRAGRHGQAWTWDGPINLKNAQFAEDTSPIDAAVDCPASQDYSRAYLHHLIKAGEYLAPMILSWHNTAFFQALMAEIRLAISENRFEALRAHLSHRWAATKSRPKQD

SEQ ID NO: 56040 - protein, 378 aa, Henriciella sp.
  misc_feature (1)..(378): tr|A0A2E6L5Z9|A0A2E6L5Z9_9RHOB Queuine tRNA-ribosyltran sferase OS=Henriciella sp. OX=1968823 GN=tgt PE=3 SV=1
MATFPFEIKAREGKARTGVLKTPRGDIRTPAFMPVGTAATVKALYMDQVAQAGADIILGNTYHLMLRPGAERVHRLGGLHEFSGWKGPMLTDSGGFQVWSLSQLRKMDKHGVTFRSHIDGSEHRLTPARSIEIQADLLGADISMQLDECTDFPCTHEEAERSLDLSLDWGARSLEAFGARESQTLFGIVQGSNYPDLREKSARGVVSQGFGGIALGGLAVGEGHDQMCDTIDMTVPHLPDEKPRYVMGVGKPIDLVESVARGIDMFDCVLPTRAGRHGQAWTWEGPINLKNARFAEDMSPVDAAVPCPASQDYTKAYLHHLIRAGEYLGAMVLSWHNTAFFQALMAEMRLAIAENRFEALRTELNARWSSTKSAPRSS

SEQ ID NO: 56041 - protein, 375 aa, Hephaestia caeni
  misc_feature (1)..(375): tr|A0A397NJV7|A0A397NJV7_9SPHN Queuine tRNA-ribosyltran sferase OS=Hephaestia caeni OX=645617 GN=tgt PE=3 SV=1
MPRFDFAIHATDGAARTGAITMERGVIRTPAFMPVGTAATVKAMKPADVHAAGADIILGNTYHLMLRPGAERVHRLGGLHDFMGWDRPILTDSGGYQVMSLADLTKRSEDGVAFKSHLDGSRHLLSPERSIEIQRLLGSNIVMAFDELVPTTATREVQAAAMERSMRWAKRSRAAFDSGEDHAAHNAIFGIQQGALDEGLRKASADALTDIGFDGYAVGGLAVGEGQEAMFACLDYAPQQLPADKPRYLMGVGKPDDIVGAVERGIDMFDCVLPTRSGRTGQAFTRGGPINIRNARFGEDTGPLDPTCACPVCAGWSRAYLHHLVRAGEILGAMLMTEHNIWFYEALMADLRAAIADGRLTTFALDFRARYHAGA

SEQ ID NO: 56042 - protein, 376 aa, Herbaspirillum aquaticum
  misc_feature (1)..(376): tr|A0A225SM53|A0A225SM53_9BURK Queuine tRNA-ribosyltran sferase OS=Herbaspirillum aquaticum OX=568783 GN=tgt PE =3 SV=1
MLEFTLLKTDGKARRGRVKLNHGTVETPIFMPVGTYGSVKAMSPLELKEINAQIILGNTFHLWLRPGLEVVSKFGGLHKFIGWDKPILTDSGGFQVFSLGEMRKITEEGVHFASPINGDRLFLSPEISMQIQRVLNSDIVMQFDECTPYEIDGRPATREEAGKSMRMSLRWAKRSKDEFDRGENPNALFGIVQGGMFEGLRDESLAGLEELGFDGFAIGGLSVGEPKEDMMRVLEHVGPRLPADKPHYLMGVGTPEDLVEGVSNGVDMFDCVMPTRNARNGWIFTRYGDVKIKNAKYKNDDRPFDESCDCYACKNFSRAYLHHLHRAGEILGARMNTVHNLHYYLQLMQEMRDAIDAGTFQAFVKKFKEDRARGVD

SEQ ID NO: 56043 - protein, 375 aa, Herbaspirillum hiltneri
  misc_feature (1)..(375): tr|A0A561JJX8|A0A561JJX8_9BURK Queuine tRNA-ribosyltran sferase OS=Herbaspirillum hiltneri OX=341045 GN=tgt PE= 3 SV=1
MLEFTLLKTDGNARRGRVKLNHGVVETPIFMPVGTYGSVKAMSPLELKEIDAHIILGNTFHLWLRPGLEVMAKFGGLHGFMGWDKPILTDSGGFQVFSLGDMRKITEEGVHFASPINGDKLFLSPEVSMQIQRVLNSDIVMQFDECTPYEIDGRPATQVEAAQSMRMSLRWAKRSMDEFKGGENPNALFGIVQGGMFETLRDESLAGLNELGFDGIAIGGLSVGEPKEDMMRVLEHIGPRLPADKPHYLMGVGTPEDLVAGVASGVDMFDCVMPTRNARNGWLFTRFGDIKIKNARYKEDTKPLDETCDCYACKNFSRAYLHHLHRTGEILGARLNTIHNLHYYLQIMKEIRAAIDDGKFTQFVAKFKEDRARGV

SEQ ID NO: 56044 - protein, 376 aa, Herbaspirillum huttiense; identical to SEQ ID NO: 56042
  misc_feature (1)..(376): tr|A0A561K7P9|A0A561K7P9_9BURK Queuine tRNA-ribosyltran sferase OS=Herbaspirillum huttiense OX=863372 GN=tgt PE =3 SV=1

SEQ ID NO: 56045 - protein, 376 aa, Herbaspirillum huttiense
  misc_feature (1)..(376): tr|A0A4P7A522|A0A4P7A522_9BURK Queuine tRNA-ribosyltran sferase OS=Herbaspirillum huttiense OX=863372 GN=tgt PE =3 SV=1
MLEFTLLKTDGKARRGRVKLNHGTVETPIFMPVGTYGSVKAMSPLELKEINAQIILGNTFHLWLRPGLEVVSKFGGLHKFIGWDKPILTDSGGFQVFSLGEMRKITEEGVHFASPINGDRLFLSPEISMQIQRVLNSDIVMQFDECTPYEIDGRPATREEAGKSMRMSLRWAKRSKDEFDRGENPNALFGIVQGGMFEGLRDESLAGLEELGFDGFAIGGLSVGEPKEDMMRVLEHVGPRLPADKPHYLMGVGTPEDLVEGVSNGVDMFDCVMPTRNARNGWIFTRYGDVKIKNAKYKNDDRPFDESCDCYACKNFSRAYLHHLHRAGEILGARMNTVHNLHYYLQLMQEMRDAIDAGTFQDFVRKFKEDRARGVD

SEQ ID NO: 56046 - protein, 375 aa, Herbaspirillum robiniae
  misc_feature (1)..(375): tr|A0A246WMB2|A0A246WMB2_9BURK Queuine tRNA-ribosyltran sferase OS=Herbaspirillum robiniae OX=2014887 GN=tgt PE =3 SV=1
MLEFTLLKTDGKARRGRVKLNHGTVETPIFMPVGTYGSVKAMSPLELNEINAQIILGNTFHLWLRPGLEVVSKFGGLHKFIGWDKPILTDSGGFQVFSLGEMRKITEEGVHFASPINGDRLFLSPEISMQIQRVLNSDIVMQFDECTPYEIDGRPATREEAGKSMRMSLRWAKRSKDEFDQGENPNALFGIVQGGMFEGLRDESLAGLQELDFDGYAIGGLSVGEPKEDMMRVLEHVGPRLPADKPHYLMGVGTPEDLVEGVANGVDMFDCVMPTRNARNGWIFTRYGDVKIKNAKYKDDERPYDETCDCYACKNFSRAYLHHLHRAGEILGARMNTVHNLHYYLKLMEEMRAAIDAGQFQAFVSKFKEDRARGV

SEQ ID NO: 56047 - protein, 376 aa, Herbaspirillum rubrisubalbicans
  misc_feature (1)..(376): tr|A0A0U3BE91|A0A0U3BE91_9BURK Queuine tRNA-ribosyltran sferase OS=Herbaspirillum rubrisubalbicans M1 OX=107877 3 GN=tgt PE=3 SV=1
MLEFTLLKTDGKARRGRVKLNHGSVETPIFMPVGTYGSVKAMSPLELKEINAQIILGNTFHLWLRPGLEVVSKFGGLHKFIGWDKPILTDSGGFQVFSLGEMRKITEEGVHFASPINGDRLFLSPEISMQIQRVLNSDIVMQFDECTPYEIDGRPATREEAGKSMRMSLRWAKRSKDEFDRGENPNALFGIVQGGMFEGLRDESLAGLEQLGFDGFAIGGLSVGEPKEDMMRVLEHVGPRLPANKPHYLMGVGTPEDLVEGVANGVDMFDCVMPTRNARNGWIFTRYGDVKIKNAKYKNDDRPFDESCDCYACKNFSRAYLHHLHRAGEILGARMNTVHNLHYYLQLMQEMRDAIDAGTFQGFVKKFKEDRARGVD

SEQ ID NO: 56048 - protein, 376 aa, Herbaspirillum rubrisubalbicans
  misc_feature (1)..(376): tr|A0A328IUG7|A0A328IUG7_9BURK Queuine tRNA-ribosyltran sferase OS=Herbaspirillum rubrisubalbicans OX=80842 GN= tgt PE=3 SV=1
MLEFTLLKTDGKARRGRVKLNHGSVETPIFMPVGTYGSVKAMSPLELKEINAQIILGNTFHLWLRPGLEVVSKFGGLHKFIGWDKPILTDSGGFQVFSLGEMRKITEEGVHFASPINGDRLFLSPEISMQIQRVLNSDIVMQFDECTPYEIDGRPATREEAGKSMRMSLRWAKRSKDEFDRGENPNALFGIVQGGMFEGLRDESLAGLEQLGFDGFAIGGLSVGEPKEDMMRVLEHVGPRLPANKPHYLMGVGTPEDLVEGVANGVDMFDCVMPTRNARNGWIFTRYGDVKIKNAKYKNDDRPFDESCDCYACKNFSRAYLHHLHRAGEILGARMNTVHNLHYYLQLMQEMRDAIDAGTFQDFVRKFKEDRARGVD

SEQ ID NO: 56049 - protein, 376 aa, Herbaspirillum seropedicae
  misc_feature (1)..(376): tr|D8INS5|D8INS5_HERSS Queuine tRNA-ribosyltransferase OS=Herbaspirillum seropedicae (strain SmR1) OX=757424 G N=tgt PE=3 SV=1
MLEFTLLKTDGKARRGRVKLNHGTVETPIFMPVGTYGSVKAMSPLELKEINAQIILGNTFHLWLRPGLEVVSRFGGLHKFIGWDKPILTDSGGFQVFSLGEMRKITEEGVHFASPINGDRLFLSPEISMQIQRVLNSDIVMQFDECTPYEIDGRPATREEAGKSMRMSLRWAKRSKDEFDRGENPNALFGIVQGGMFEGLRDESLAGLEELGFDGFAIGGLSVGEPKEDMMRVLEHVGPRLPADKPHYLMGVGTPEDLVEGVANGVDMFDCVMPTRNARNGWIFTRYGDVKIKNAKYKNDDRPFDESCDCYACKNFSRAYLHHLHRAGEILGARMNTVHNLHYYLQLMQEMRDAIDAGTFQDFVKKFKEDRARGVD

SEQ ID NO: 56050 - protein, 376 aa, Herbaspirillum seropedicae
  misc_feature (1)..(376): tr|A0A5B8E0T3|A0A5B8E0T3_HERSE Queuine tRNA-ribosyltran sferase OS=Herbaspirillum seropedicae OX=964 GN=tgt PE= 3 SV=1
MLEFTLLKTDGKARRGRVKLNHGTVETPIFMPVGTYGSVKAMSPLELKEINAQIILGNTFHLWLRPGLEVVSRFGGLHKFIGWDKPILTDSGGFQVFSLGEMRKITEEGVHFASPINGDRLFLSPEISMQIQRVLNSDIVMQFDECTPYEIDGRPATREEAGKSMRMSLRWAKRSKDEFDRGENPNALFGIVQGGMFEGLRDESLAGLEELGFDGFAIGGLSVGEPKEDMMRVLEHVGPRLPADKPHYLMGVGTPEDLVEGVANGVDMFDCVMPTRNARNGWIFTRYGDVKIKNAKYKNDDRPFDESCDCYACKNFSRAYLHHLHRAGEILGARMNTVHNLHYYLQLMQEMRDAIDAGAFQDFVKKFKEDRARGVD

SEQ ID NO: 56051 - protein, 375 aa, Herbaspirillum sp.
  misc_feature (1)..(375): tr|J2M2H2|J2M2H2_9BURK Queuine tRNA-ribosyltransferase OS=Herbaspirillum sp. CF444 OX=1144319 GN=tgt PE=3 SV=1
MLEFTLLKTDGNARRGRVKLNHGVVETPIFMPVGTYGSVKAMSPLELKEIDAQIILGNTFHLWLRPGLEVMAKFGGLHGFMGWDKPILTDSGGFQVFSLGDMRKITEEGVHFASPINGDKLFLSPEVSMQIQRVLNSDIVMQFDECTPYEIDGRPATQVEAAQSMRMSLRWAKRSRDEFDKGENPNALFGIVQGGMFETLRDESLAGLNELDFDGIAIGGLSVGEPKEDMMRVLDHIGPRLPADKPHYLMGVGTPEDLVAGVASGVDMFDCVMPTRNARNGWLFTRFGDIKIKNARYKEDTKPLDETCDCYACKNFSRAYLHHLHRTGEILGARLNTIHNLHYYLQIMKEIRAAIDDGQFAQFVARFKEDRARGA

SEQ ID NO: 56052 - protein, 375 aa, Herbaspirillum sp.
  misc_feature (1)..(375): tr|A0A418X3W6|A0A418X3W6_9BURK Queuine tRNA-ribosyltran sferase OS=Herbaspirillum sp. K2R10-39 OX=2320862 GN=tg t PE=3 SV=1
MLNFKLIKTDGKARRGRLTLNHGVVETPIFMPVGTYGSVKAMSPLELHDIDAQIILGNTFHLWLRPGLDVVSKFDGLHRFIGWSKPILTDSGGFQVFSLGAMRKITEEGVKFASPINGDKLFLSPEISMQIQRVLNSDIVMQFDECTPYEINGRPATEAEAATSMRMSLRWGKRSRDEFDKGENPNALFGIVQGGMFEHLRDESLAGLQEIGYDGYAIGGLSVGEPKEDMMRVLEHVGPRLPADKPHYLMGVGTPEDLVAGVANGVDMFDCVMPTRNARNGWLFTRFGDLKIKNARYKDDEKPLDESCECYACRNFSRAYLYHLHRAGEILGARLNTIHNLHYYLQLMREMRAAIDADRFQAFVVQFHADRARGV

SEQ ID NO: 56053 - protein, 377 aa, Herbinix hemicellulosilytica
  misc_feature (1)..(377): tr|A0A428M6T1|A0A428M6T1_HERHM Queuine tRNA-ribosyltran sferase OS=Herbinix hemicellulosilytica OX=1564487 GN=t gt PE=3 SV=1
MYRLIAQDGMAKSGEFVTVHGTIQTPVFMNVGTAAAIKGAVSTADLYEIGTQVQLSNTYHLHVRPGDKVIKQLGGLHSFMVWDRPILTDSGGFQVFSLAGLRKIKEEGVYFNSHIDGRKIFMGPEESIQIQSNLGSTIAMAFDECPPHPASREYMQDSVDRTTRWLVRCKKELQRLNSLEDTINKKQMLFGINQGGTYADIRIEHAKRITELELDGYALGGLAVGESHEEMYYIIEETVPYLPVDKPVYLMGVGTPANILEAVDRGVDFFDCVYPTRNGRHGHAYTNRGKMNLMNAKYEMDSQPIEEGCACPACSRYSRAYIRHLLKAKEMLGMRLLVLHNLYFYNHMMEEIRLAIREGRYKQYKKQKLESLASSEE

SEQ ID NO: 56054 - protein, 377 aa, Herbinix hemicellulosilytica
  misc_feature (1)..(377): tr|A0A0H5SJ76|A0A0H5SJ76_HERHM Queuine tRNA-ribosyltran sferase OS=Herbinix hemicellulosilytica OX=1564487 GN=t gt PE=3 SV=1
MYKVVAQDGRAKSAEFHTVHGTIQTPVFMNVGTAAAIKGAVSTVDLNEIGTQVQLSNTYHLHLRPGDELIKKMGGLHKFMVWDKPILTDSGGFQVFSLAKLRKIEEEGVYFNSHIDGRKIFMGPEESIRIQSNLGSTIAMAFDECPPYPSERSYMINSVDRTTRWLVRCKKELDRLNGLEDTVNKNQMLFGINQGGTYVDIRIDHAKRITEMDLDGYAVGGLAVGESHEEMYYILEETVPYLPVNKPVYLMGVGTPANILEAVDRGVDFFDCVYPSRNGRHGHAYTGFGKINLLNAKFETDDRPIEEGCGCPACRTYSRAYIRHLLKAKEMLGMRLIVLHNLYFYNHLMEEIREAIRNNCYKQYKKSKLENLKRGVE

SEQ ID NO: 56055 - protein, 377 aa, Herbinix luporum
  misc_feature (1)..(377): tr|A0A0K8J3P1|A0A0K8J3P1_9FIRM Queuine tRNA-ribosyltran sferase OS=Herbinix luporum OX=1679721 GN=tgt PE=3 SV=1
MYRLIEQDGRAKSAEFKTVHGTIQTPVFMNVGTLAAIKGAVSTIDLNNIGTQVQLSNTYHLHLRPGDQIVKKMGGLHKFMVWDKPILTDSGGFQVFSLAKLRKIQEEGVYFSSHIDGRKIFMGPEESMQIQSNLASTIAMAFDECPPHPAERSYMIDSVERTTRWLIRCIKEMDRLNSLEDTINKKQMLFGINQGGTYADIRIEHAKRISELNLAGYAIGGLAVGESHEEMYYILEETVPYLPLNKPVYLMGVGTPANILEAVDRGVDFFDCVYPSRNGRHGHAYTGFGKLNLMNAKYQLDDRPIEEGCACPACQHYSRAYIRHLLKAKEMLGMRLLVLHNLYFYNHMMEEIREAIRNKRYKEYKKQKLENFMGGED

SEQ ID NO: 56056 - protein, 375 aa, Herminiimonas arsenicoxydans
  misc_feature (1)..(375): sp|A4G1Z3|TGT_HERAR Queuine tRNA-ribosyltransferase OS= Herminiimonas arsenicoxydans OX=204773 GN=tgt PE=3 SV=1
MLNFKLLNTDGNARRGQLTVNHGVIETPIFMPVGTYGSVKAMSPLELKEIDAQIILGNTFHLWLRPGNDIVAKFGGLHEFMGWDKPILTDSGGFQVFSLGEMRKITEEGVHFSSPINGDKLFLSPEVSMQIQRVLNSDIVMQFDECTPYEIDGRPATADEAAKSMRMSLRWAKRSIDEFNREENPNALFGIVQGGMFEHLRDESLAGLEDINFHGVAIGGLSVGEPKEDMLRVLQHVGPRLPANKPHYLMGVGTPEDLVQGVANGIDMFDCVMPTRNARNGWLFTRFGDIKIKNARYKDDKKPLDASCGCYACRNFSRAYLHHLHRTGEILGARLNTIHNLHYYLDLMREMREAISEGRFQLFVKQFHADRARGA

SEQ ID NO: 56057 - protein, 375 aa, Herminiimonas fonticola
  misc_feature (1)..(375): tr|A0A4R6G5I5|A0A4R6G5I5_9BURK Queuine tRNA-ribosyltran sferase OS=Herminiimonas fonticola OX=303380 GN=tgt PE= 3 SV=1
MLNFKLLNTDGNARRGQLTVNHGVIETPIFMPVGTYGSVKAMSPLELKEIDAQIILGNTFHLWLRPGNDIVAKFGGLHEFMGWDKPILTDSGGFQVFSLGEMRKITEEGVHFSSPINGDKLFLSPEVSMQIQRVLNSDIVMQFDECTPYEIDGRPATADEAAKSMRMSLRWAKRSIDEFNREENPNALFGIVQGGMFEHLRDESLAGLEDINFHGVAIGGLSVGEPKEDMLRVLEHVGPRLPANKPHYLMGVGTPEDLVQGVANGIDMFDCVMPTRNARNGWLFTRFGDIKIKNARYKDDKQPLDESCGCYACRNFSRAYLHHLHRTGEILGARLNTIHNLHYYLDLMREMREAISEGRFQLFVTQFHVDRARGT

SEQ ID NO: 56058 - protein, 375 aa, Herminiimonas sp.
  misc_feature (1)..(375): tr|A0A3N6ZW84|A0A3N6ZW84_9BURK Queuine tRNA-ribosyltran sferase OS=Herminiimonas sp. KBW02 OX=2153363 GN=tgt PE =3 SV=1
MLNFKLLKTDGKARRGQLTLNHGVIETPIFMPVGTYGSVKAMSPLELNEIDAQIILGNTFHLWLRPGNDIIAKFGGLHEFMGWDKPILTDSGGFQVFSLGEMRKITEEGVHFSSPINGDKLFLSPEVSMQIQRVLNSDIVMQFDECTPYEIDGRPATTEEAAKSMRMSLRWAKRSMDEFNREENPNALFGIVQGGMFENLRDESLAGLEELNFHGVAIGGLSVGEPKEDMMRVLEHVGPRLPANKPHYLMGVGTPEDLVAGVANGIDMFDCVMPTRNARNGWLFTRFGDIKIKNARYKDDKKPLDESCSCYACRNFSRAYLHHLHRTGEILGARLNTIHNLHYYLDLMREMREAISEGRFQLFVSQFHADRARGS

SEQ ID NO: 56059 - protein, 392 aa, Herpetosiphon aurantiacus
  misc_feature (1)..(392): sp|A9AW42|TGT_HERA2 Queuine tRNA-ribosyltransferase OS= Herpetosiphon aurantiacus (strain ATCC 23779 / DSM 785 / 114-95) OX=316274 GN=tgt PE=3 SV=1
MNNFTYTLEHSDGEARAGQFSTPHGTIQTPVFMPVGTQATVKTLDPLEVEAIGSQIILSNTYHLYLRPSADLVAEMGGLHRFMQWPKPILTDSGGFQVFSLGPHSKIDEDGVTFKSHIDGSKHRFTPESAIGIQEKLGADIIMAFDECAPQPTTHAYTKAAMERTHRWLLRCIAAKTRADQALFGIVQGGVEADLRRESASFIAQQDVPGIGIGGLSVGEPKEQMYGMLEETTPLLPRNKPRYLMGVGSPEDLLEGVARGVDMFDCVLPTRLGRNGALFIPEGRLNIGNAKYAREDAPIDATCDCSTCQRFSRAYLRHLFRTEEVLGLRLATLHNLRFLIRLMEQAREAILQDRYQSFMDDWLSRFQTIPHAVREASRAARLNSLRTQGDKA

SEQ ID NO: 56060 - protein, 392 aa, Herpetosiphon geysericola
  misc_feature (1)..(392): tr|A0A0P6Y8I2|A0A0P6Y8I2_9CHLR Queuine tRNA-ribosyltran sferase OS=Herpetosiphon geysericola OX=70996 GN=tgt PE =3 SV=1
MNNFTYTLEHSDGEARAGQLSTPHGTIQTPVFMPVGTQATVKTLDPLEVEAIGSQIILSNTYHLYLRPSADLVAEMGGLHRFMQWPKPILTDSGGFQVFSLGPHSKIDEDGVTFKSHIDGSKHRFTPESAIGIQEKLGADIIMAFDECAPQPTTHAYTKAAMERTHRWLLRCIAAKTRDDQALFGIVQGGVEADLRRESARFIAQQDIPGVGIGGLSVGEPKEQMYGMLEETTPLLPRNKPRYLMGVGSPEDLLEGVARGVDMFDCVLPTRLGRNGALFIPEGRLNIGNAKYAREDAPIDATCDCSTCQRFSRAYLRHLFRTEEVLGLRLATLHNLRFLIRLMEQAREAILQDRYQSFMDDWLSRFQTIPHAVREASRAARLNSLRTQGEKA

SEQ ID NO: 56061 - protein, 376 aa, Hespellia stercorisuis
  misc_feature (1)..(376): tr|A0A1M6LX54|A0A1M6LX54_9FIRM Queuine tRNA-ribosyltran sferase OS=Hespellia stercorisuis DSM 15480 OX=1121950 GN=tgt PE=3 SV=1
MYQLIAKDGAAKRGRLHTVHGVIETPVFMNVGTAAAIKGAVSTEDLQQIKTQVELSNTYHLHVRPGDKVIKKLGGLHKFMVWDKPILTDSGGFQVFSLAELRRIKEEGVYFHSHIDGRKIFMGPEESMQIQSNLASTIAMAFDECPSSVADETYMRNSVARTTRWLERCKKEMARLNDQEDTINRQQMLFGINQGGVYADIRVEHAKQIRELDLDGYAVGGLAVGETHAEMYRILDAVVPYLPVEKPTYLMGVGTPANILEGVERGVDFFDCVYPSRNGRHGHVYTNHGKMNLFNAKFELDDNPIEEGCQCPACQKYSRAYIRHLLKAKEMLGMRLCVLHNLYFYNNMMEEIRAAIETGTFQKYKANKLEGMEQGE

SEQ ID NO: 56062 - protein, 373 aa, Hippea maritima
  misc_feature (1)..(373): tr|F2LVE8|F2LVE8_HIPMA Queuine tRNA-ribosyltransferase OS=Hippea maritima (strain ATCC 700847 / DSM 10411 / MH 2) OX=760142 GN=tgt PE=3 SV=1
MSFSFELIAEDKQARAGTIDLGHTKVETPIFMPVGTNASVKAILPCMLKAVGAQIVLSNTYHLYLRPGIETIEKLSGLHRFMGWKRGILTDSGGFQVFSLSDLRNINPEGVYFKSHIDGSNHFFSPEYVVELQYRWGSDIAMVLDECPPYTMDKSYVKKSLDITINWAKRSIRARREHTVNALFGIVQGGVFDDLRKEAAIAMKDLEFDGFAIGGLSVGEPTEDMYRVVPIVNEFLPKNKPRYAMGIGRPENIIELIGMGVDMFDCVMPTRNARNGTLFTRFGVVNIKRQQYRDDDRPIEEGCGCYTCRNFSRGYLRHLHKAKELSFYTLASIHNLYYYINLVKSARKAILNGRFRSFKDEFYALMKEGEADE

SEQ ID NO: 56063 - protein, 376 aa, Histidinibacterium lentulum
  misc_feature (1)..(376): tr|A0A3N2R9V8|A0A3N2R9V8_9RHOB Queuine tRNA-ribosyltran sferase OS=Histidinibacterium lentulum OX=2480588 GN=tg t PE=3 SV=1
MTTRFSFALHATDGAARTGVISTPRGEIRTPAFMPVGTAATVKAMLPESVRATGADILLGNTYHLMLRPTAERIARLGGLHRFMNWDRPILTDSGGFQVMSLAELRKLTEEGVTFRSHIDGARHELSPERSMEIQRLLGSDIVMAFDECPALPAERGRIEESMRLSMRWAQRSRDAFGDRPGHALFGIQQGGLEQDLRAESAEALRGIGFDGYAIGGLAVGEGQAAMFGCLDYAPGQLPQDKPRYLMGVGKPDDIVGAVKRGVDMMDCVLPSRSGRTGQAWTRRGQVNLKNARHADDPRPLDEACSCPACRGYSRAYLHHVFRAGEMISGMLLTWHNLHYYQDLMAGMREAIAGGRFEAWEAGFHAARAEGDIPAV

SEQ ID NO: 56064 - protein, 375 aa, Histidinibacterium sp.
  misc_feature (1)..(375): tr|A0A5J5GL05|A0A5J5GL05_9RHOB tRNA guanosine(34) trans glycosylase Tgt OS=Histidinibacterium sp. 176SS1-4 OX=2 613962 GN=tgt PE=4 SV=1
MTRFSFALHATDGAARTGAITTPRGDIRTPAFMPVGTAATVKAMLPESVRATGADILLGNTYHLMLRPGAERVARLGGLHRFMNWERPILTDSGGFQVMSLAELRKLTEKGVTFRSHIDGSKHELTPERSMEIQRLLGSDIVMAFDECPSLPAEDARVAESMRLSMRWAERSREAFGDRPGHALFGIQQGGVTRELREESAEALKAIGFEGYAIGGLAVGEGQEAMFGVLDYAPGMLPVDRPRYLMGVGKPDDIVGAVKRGVDMMDCVLPSRSGRTGQAWTRRGQVNLKNARHADDPRPLDEECGCPACRGYSRAYLHHVFRAGEMISGMLLTWHNLHYYQDLMAGMREAISAGRFAEWEAGFHALRREGDIEPL

SEQ ID NO: 56065 - protein, 376 aa, Histophilus somni
  misc_feature (1)..(376): tr|A0A1Y0JY99|A0A1Y0JY99_HISSO Queuine tRNA-ribosyltran sferase OS=Histophilus somni OX=731 GN=tgt PE=3 SV=1
MKFTLHKTNGMARRGTMTFNRPQGEFTVETPAFMPVGTYGTVKGMTPEEVRATGAEILLGNTFHLWLRPGQEIMRQHGDLHDFMQWHRPILTDSGGFQVFSLGKLRKITEEGVKFQNPINGERIFLSPEKSMEIQYDLGSDIVMIFDECTPYPATFDYAKKSMEISLRWAKRSRERFDELGNKNALFGIVQGSTFEDLRKLSIEGLINIGFDGYAVGGLAVGEPKEDMHRILAYVCPQLPADKPRYLMGVGKPEDLVEGVRRGIDMFDCVMPTRNARNGHLFVSNGIVKIRNAKYRNDTTSLDPECDCYTCKHYTKAYLYHLDKCGEILGARLNTIHNLHYYQRLMAQIRQAIEEDRFEDFVVEFYKKIGKSVPTR

SEQ ID NO: 56066 - protein, 376 aa, Histophilus somni
  misc_feature (1)..(376): tr|A0A4S2QVD4|A0A4S2QVD4_HISSO Queuine tRNA-ribosyltran sferase OS=Histophilus somni OX=731 GN=tgt PE=3 SV=1
MKFTLHKTNGMARRGTMTFNRPQGEFTVETPAFMPVGTYGTVKGMTPEEVRATGAEILLGNTFHLWLRPGQEIMRQHGDLHDFMQWHRPILTDSGGFQVFSLGKLRKITEEGVKFQNPINGERIFLSPEKSMEIQYDLGSDIVMIFDECTPYPATFDYAKKSMEMSLRWAKRSRERFDELGNKNALFGIVQGSTFEDLRKLSIEGLINIGFDGYAVGGLAVGEPKEDMHRILAYVCPQLPADKPRYLMGVGKPEDLVEGVRRGIDMFDCVMPTRNARNGHLFVSNGIVKIRNAKYRNDTTSLDPECDCYTCKHYTKAYLYHLDKCGEILGARLNTIHNLRYYQRLMAQIRQAIEEDRFEDFVVEFYKKIGKSVPTR

SEQ ID NO: 56067 - protein, 384 aa, Hoeflea halophila
  misc_feature (1)..(384): tr|A0A286IFN1|A0A286IFN1_9RHIZ Queuine tRNA-ribosyltran sferase OS=Hoeflea halophila OX=714899 GN=tgt PE=3 SV=1
MTAESDVTSDTFQFKLLATDGKARRGAISMPRGTIRTPAFMPVGTGGTVKAMYMDQVEDLGADIILGNTYHLMLRPGAERVAKLGGLHEFGRWQKPILTDSGGFQVMSLSALRKINEQGVTFQSHIDGSRHEMSPERSIEIQGLLDSDIQMQLDECVRLPAGETEIERAMEMSLRWADRCKVAFGDQPGKAMFGIVQGGDVPKLRERSAEGLSSLDLKGYAVGGLAVGEPQEVMLDMLDVICPLLPAEKPRYLMGVGTPDDMLKSVGRGIDMFDCVMPTRAGRHGLAFTRHGKINIKNARHAEDHRPLDEESSCPAARAYSRAYLHHLVRSNEILGMMLITWNNLSYYQDLMSGIRAAIAAQRFDDFSAETQERWAKGDIPPLG

SEQ ID NO: 56068 - protein, 377 aa, Hoeflea marina
  misc_feature (1)..(377): tr|A0A317PTF2|A0A317PTF2_9RHIZ Queuine tRNA-ribosyltran sferase OS=Hoeflea marina OX=274592 GN=tgt PE=3 SV=1
MTETFEFKLIATDGQARRGEISMPRGSIRTPAFMPVGTGGTVKAMYMDQVRGTGADIILGNTYHLMLRPGAERMARLGGLHRFAGWNRPILTDSGGFQVMSLSGLRKLTEQGVTFQSHIDGSRHEMSPERSIEIQGLLGSDIQMQLDECVRLPATPTEIERAMEMSLRWAERCRVAFGEQPGKAMFGIVQGGDIPTLRERSAHGLKALDLKGYAVGGLAVGEPQEVMLDMLDVTCPILPSEKPRYLMGVGTPDDLLKSVGRGIDMFDCVMPTRAGRHGLAFTRHGKINLKNARHAEDHRPLDEESSCPAARDYSRAYLHHLVRSNEILGMMLVTWNNLSYYQDLMSGIRASIEAQRFADFSAETQEMWARGDIPPLG

SEQ ID NO: 56069 - protein, 377 aa, Hoeflea olei
  misc_feature (1)..(377): tr|A0A1C1YXV5|A0A1C1YXV5_9RHIZ Queuine tRNA-ribosyltran sferase OS=Hoeflea olei OX=1480615 GN=tgt PE=3 SV=1
MSTQSFEFRLSATDGNARRGTISMPRGEIRTPAFMPVGTGGTVKAMYMDQVRDLGADIILGNTYHLMLRPGAERVARLGGLHHFARWDRPILTDSGGFQVMSLSALRKITEQGVTFQSHIDGSRHEMSPERSIEIQGLLGSDIQMQLDECVRLPASEDEIARAMEMSLRWAERCKTQFGDQPGKAMFGIVQGGDVPRLREQSAKGLADLDLKGYAVGGLAVGEPQQVMLDMLEVTCPLLPAEKPRYLMGVGTPDDILKSVARGIDMFDCVMPTRAGRHGLAFTRHGKINLKNARHAEDHRPLDEESSCPAARDYSRAYLHHLVRSNEILGMMLITWNNLSYYQDLMAGIRGAIEAGDFQAFSAATQAAWEAGDIPPL

SEQ ID NO: 56070 - protein, 377 aa, Hoeflea phototrophica
  misc_feature (1)..(377): tr|A9D9G2|A9D9G2_HOEPD Queuine tRNA-ribosyltransferase OS=Hoeflea phototrophica (strain DSM 17068 / NCIMB 1407 8 / DFL-43) OX=411684 GN=tgt PE=3 SV=1
MTDTFQFKLKATDGKARRGEISMPRGTIRTPAFMPVGTGGTVKAMYMDQVRDLGADIILGNTYHLMLRPGAERVARLGGLHHFARWDGPILTDSGGFQVMSLSALRKITEHGVTFQSHIDGSRHEMSPERSIEIQGLLGSDIQMQLDECVRLPASESEIERAMEMSLRWAERCRVAFGDQPGKAMFGIVQGGDIPKLRERSAGGLTALDLKGYAVGGLAVGEPQEVMLDMLDVTCPALPVEKPRYLMGVGTPDDILKSVGRGIDMFDCVMPTRAGRHGLAFTRHGKINLKNARHAEDHRPLDEESSCPAARDYSRAYLHHLVRSNEILGMMLITWNNLSYYQDLMSGIRGAIEAQTFEAFSAETQERWARGDIPPLG

SEQ ID NO: 56071 - protein, 384 aa, Hoeflea sp.
  misc_feature (1)..(384): tr|A0A2G2DJK0|A0A2G2DJK0_9RHIZ Queuine tRNA-ribosyltran sferase OS=Hoeflea sp. OX=1940281 GN=tgt PE=3 SV=1
MTAEADVTSDTFQFKLLATDGKARRGAISMPRGTIRTPAFMPVGTGGTVKAMYMDQVQDLGADIILGNTYHLMLRPGAERVAKLGGLHEFGRWQKPILTDSGGFQVMSLSALRKINEQGVTFQSHIDGSRHEMSPERSIEIQGLLDSDIQMQLDECVRLPAGETEIERAMDMSLRWAERCKSAFGDQPGKAMFGIVQGGDVPKLRERSAQGLSGLDLKGYAVGGLAVGEPQEVMLDMLDVTCPLLPADKPRYLMGVGTPDDMLKSVGRGIDMFDCVMPTRAGRHGLAFTRHGKINIKNARHAEDHRPLDEQSSCPAARDYSRAYLHHLVRSNEILGMMLITWNNLSYYQDLMSGIRGAIEAQRFEDFSAETQAAWAKGDIPPLG

SEQ ID NO: 56072 - protein, 378 aa, Hoeflea sp.
  misc_feature (1)..(378): tr|A0A0F7PM11|A0A0F7PM11_9RHIZ Queuine tRNA-ribosyltran sferase OS=Hoeflea sp. IMCC20628 OX=1620421 GN=tgt PE=3 SV=1
MTTDTFQFKLKATDGKARRGEITMPRGAIRTPAFMPVGTGGTVKAMYMDQVSDLGADIILGNTYHLMLRPGAERVAKLGGLHEFARWQKPILTDSGGFQVMSLSALRKINEHGVTFQSHIDGSRHEMSPERSIEIQGLLDSDIQMQLDECVRLPASETEIERAMEMSLRWAERCKTAFGDQPGKAMFGIVQGGDIPKLRERSAQGLSGLDLKGYAVGGLAVGEPQEVMLDMLDVTCPLLPSDKPRYLMGVGTPDDMLKSVGRGIDMFDCVMPTRAGRHGLAFTRHGKINIKNARHADDHRPLDEQSSCPAARDYSRAYLHHLVRSNEILGMMLITWNNLSYYQDLTAGIRGSIEAQRFEDFAAETQATWARGDIAPLG

SEQ ID NO: 56073 - protein, 403 aa, Holdemanella biformis
  misc_feature (1)..(403): tr|A0A413UFV9|A0A413UFV9_9FIRM Queuine tRNA-ribosyltran sferase OS=Holdemanella biformis OX=1735 GN=tgt PE=3 SV =1
MEYKNDNKFYFEIEKRIPGHLGRAGIIHTPHGDIKTPAFMCVGTHGEVRFVSMEELKSIHAQAMLSNGYHLRNISPEIAANRGLSAWSKWDGPTLTDSGGFQVMSLGSGCGKVVSMKREDNMKNTEEEKRLAHVTEDGVHFHDPFTGQEDFIGPEESMQIQCRIGADIHMAYDELTSLADTYEYNVESLARTERWAKRSLDEHKKHCDDLGYHQSLYGVIQGGRWEDLRRSTCKKYAQMDFDGYGLGGAFLKETLGDILTWCNEELPENKPRHLLGLSHPDDILIGTENGADTFDCVAPTREARHGRLYTMHGPINLSKYRDSDEIIDEGCDCPTCQSKITLGKLRRLWKSQDRTESAKYFELASIHNLRFIIRLTEQARQAILDGTFKEFKESFLNSYYGNK

SEQ ID NO: 56074 - protein, 403 aa, Holdemanella biformis
  misc_feature (1)..(403): tr|B7C8P8|B7C8P8_9FIRM Queuine tRNA-ribosyltransferase OS=Holdemanella biformis DSM 3989 OX=518637 GN=tgt PE=3 SV=1
MEYKNDNKFYFEIEKRIPGHLGRAGIIHTPHGDIKTPAFMCVGTHGEVRFVSMEELKSIHAQAMLSNGYHLRNISPEIAANGGLSAWSKWDGPTLTDSGGFQVMSLGSGCGKVVSMKREDNMKNTEEEKRLAHVTEDGVHFHDPFTGQEDFIGPEESMQIQCRIGADIHMAYDELTSLADTYEYNVESLARTERWAKRSLDEHKKHCDDLGYHQSLYGVIQGGRWEDLRRSTCKKYAQMDFDGYGLGGAFLKETLGDILTWCNEELPENKPRHLLGLSHPDDILIGTENGADTFDCVAPTREARHGRLYTMHGPINLSKYRDSDEIIDEGCDCPTCQSKITLGELRRLWKSQDRTESAKYFELASIHNLRFIIRLTEQARQAILDGTFKEFKESFLNSYYGNK

SEQ ID NO: 56075 - protein, 347 aa, Holdemania filiformis
  misc_feature (1)..(347): tr|B9YAX1|B9YAX1_9FIRM Queuine tRNA-ribosyltransferase OS=Holdemania filiformis DSM 12042 OX=545696 GN=tgt PE= 3 SV=1
MFMPVGTLATVKFLSPEEIKALGAGVILANTYHLWLRPGEDIVDKAGGVQKFMNYSGPMLTDSGGFQVFSLADRRKIKEEGVTFKSHLDGSTLFLSPEKSIQIQNKIGADIIMSFDECAPYPCSYDYMKNSVERTLRWAKRGKDAHQRPEEQALFGIVQGGEYQDLREMCAKTLAEMDFPGYSIGGTSVGESKETMYKMIDYSVKYLPWEKPRYLMGVGSVDAILEGILRNVDMFDCVLPTRIARHGTLMTSQGRVNIKKQEYEEDFGPLDPECDCYTCKNYSRAYLRHLFRCNEGLGSRLMSIHNLRFLLSLTEQARKAIREDRFGDFKAELFKKYNLNSVDSRGF

SEQ ID NO: 56076 - protein, 379 aa, Holdemania filiformis
  misc_feature (1)..(379): tr|A0A412FGU0|A0A412FGU0_9FIRM Queuine tRNA-ribosyltran sferase OS=Holdemania filiformis OX=61171 GN=tgt PE=3 S V=1
MSAIRFEITHVCKQSGARCGILHTPHGDVETPMFMPVGTLATVKFLSPEEIKALGAGVILANTYHLWLRPGEDIVDKAGGVQKFMNYSGPMLTDSGGFQVFSLADRRKIKEEGVTFKSHLDGSTLFLSPEKSIQIQNKIGADIIMSFDECAPYPCSYDYMKNSVERTLRWAKRGKDAHQRPEEQALFGIVQGGEYQDLREMCAKTLAEMDFPGYSIGGTSVGESKETMYKMIDYSVKYLPWEKPRYLMGVGSVDAILEGILRNVDMFDCVLPTRIARHGTLMTSQGRVNIKKQEYEEDFGPLDPECDCYTCKNYSRAYLRHLFRCNEGLGSRLMSIHNLRFLLSLTEQARKAIREDRFGDFKAELFKKYNLNSVDSRGF

SEQ ID NO: 56077 - protein, 382 aa, Holophagaceae bacterium
  misc_feature (1)..(382): tr|A0A3D6EME3|A0A3D6EME3_9BACT Queuine tRNA-ribosyltran sferase OS=Holophagaceae bacterium OX=2052165 GN=tgt PE =3 SV=1
MPKITSPDFSFIPAPGVPPGAARAGGFHTSHGDVLTPAFMPVGTQGTVKGITPAQLRDIGPQVILGNTYHLGLRPGDALVAQHGGLHRFMGWEGPILTDSGGFQVFSLASLRKMTEDGVTFQSHLDGSPQFLSPERSMEIQRNLGSDICMALDECPPGRMERSKLELSMARTTRWLARSRAVPLQPHQGLFAINQGGTHLDLRRRHLAEAMDLDAKTPFQGFAVGGLSVGEPKDEMNAVLAEFVKELPADRPRYLMGVGTPEDLLFGIEQGVDLFDCVLPSREARHGRILTSRGKLNLKNARHREADLPLDPACTCYTCRTFSRAYLHHLFRCGELLGFTLNTIHNLSYTVGLTRAARQALLENRFPAFAQSARTGWMTEEP

SEQ ID NO: 56078 - protein, 399 aa, Holospora curviuscula
  misc_feature (1)..(399): tr|A0A2S5R7B8|A0A2S5R7B8_9PROT Queuine tRNA-ribosyltran sferase OS=Holospora curviuscula OX=1082868 GN=tgt PE=3 SV=1
MQLPYFVLQKTTPYGRLGTLVTAHGNISTPCFFFCATKATIKGIDAQAMETLRTPVLLANTYHLMLHPGPNVIAQAGGLGAFMGWRGPTYTDSGGYQIFSLGYGCVSQEIKGSPRSERYLRISEKGAEFFSYRDGTKWCLTPELSIHVQQALGADCIFTLDECTPYHISYDQTRVAMERSHRWAQRSLSEFLREDAPYKKSYQGLYGISQGGIYPQLRRTSVEFLNATDFFGHGIGGSLGTTSKEMGEVLDMALEGLCLNRPIHLLGIGKIEDIFDGVMKGIDTFDCVIPTRLGRHGGALIMPHYWKSAQESYHARTSINLLKSCFRNDHRPIDESCLCPTCQRYTRAYLHHLMKSKEITGGACLTLHNVFFMNTMMAAIREGIAADSVAQVRTHWLGR

SEQ ID NO: 56079 - protein, 399 aa, Holospora elegans
  misc_feature (1)..(399): tr|A0A023DXJ9|A0A023DXJ9_9PROT Queuine tRNA-ribosyltran sferase OS=Holospora elegans E1 OX=1427503 GN=tgt PE=3 SV=1
MIFPKFEVKKTTSYGRLGTILTAHGKISTPSFFFCSTKATIKGVDTWIIEKLNTPVLLANTYHLMLHPGADVVADAGGVGSFMGWNGPTYTDSGGYQIFSLGYGCVSQEIKGSPRSKRYLKISEAGAEFLSYRDGSKWCLTPELSIHVQQALGADCIFTLDECTPYHISYEHTRASMEQSHRWAQRSLTAFLKEDSVYKKTHQGLYGISQGGIYPELRRVSVDFLNSMPFFGHGIGGSLGKTSVEMREVLDMALEKLCSDRPIHLLGIGKIEDIFDGIAKGIDTFDCVIPTRLGRHGGALIRPNYWSDAKEDYHSRSSINLLKSCFKNDHRPIDELCSCPTCLRYTRAYLHHLIKSKEITAGSALTIHNIFFMNTMMEEIRRGIDLNIMPEVRSKWLGR

SEQ ID NO: 56080 - protein, 398 aa, Holospora obtusa
  misc_feature (1)..(398): tr|W6TDZ8|W6TDZ8_HOLOB Queuine tRNA-ribosyltransferase OS=Holospora obtusa F1 OX=1399147 GN=P618_200989 PE=3 S V=1
MFPKFTVKKNTPYGRLGTIFTAHGNISTPSFFFCATKATIKGVDVWTMETLNTPVILANTYHLMLQPGAEVIAKSGSVGTFMGWSGPTYTDSGGYQIFSLGYGCVSQEIKGSPRSGRYLKISENGATFLSYRDGSTWCLTPELSIHVQQALGADCIFTLDECTPYHISYEQTRASMEQSHRWAKRSLTAFLKEDAPYKRSYQGLYGISQGGIYPDLRCQSVDFLNSMPFFGHGIGGSLGKTSAQMREVLDMALENLCPERPIHLLGIGKIQDIFDGIAKGIDTFDCVIPTRLGRHGGALIRPHYWSTAHEAYHSRASINLLKACFKNDHRPIDETCTCPTCQRYTRAYLHHLMKSKEISAGSALTIHNVFFMNSMMEAIRDGIALNSMKDVRLQWVGD

SEQ ID NO: 56081 - protein, 399 aa, Holospora undulata; identical to SEQ ID NO: 56079
  misc_feature (1)..(399): tr|A0A061JHP4|A0A061JHP4_9PROT Queuine tRNA-ribosyltran sferase OS=Holospora undulata HU1 OX=1321371 GN=tgt PE= 3 SV=1

SEQ ID NO: 56082 - protein, 401 aa, Holosporales bacterium
  misc_feature (1)..(401): tr|A0A353PN11|A0A353PN11_9PROT Queuine tRNA-ribosyltran sferase OS=Holosporales bacterium OX=2053559 GN=tgt PE= 3 SV=1
MNSSQFNFEITKESPSSKARLGRLTTPHGIVETPAFIFCATKAAIKGATPDDMWREKTQIILSNTYHLMLQPGAELVAKMGGLHKFMGWNGPMLTDSGGFQIFSLGHGSVAEEVKGRRRSSRPKSLLSITEDGATFKSYLDGKTHVLTPEKSIQIQQDLGADLIVVLDECTPFHVDKTYTEKSMHMSHRWAERSLKEFQRGDPDHQALYGIVQGGVYPDLRKISADFVNNLPFFGHAIGGSLGADKAQMAEVIEMAIEPLDPQRPIHLLGIGGISDIFYGVRQGIDTFDCVHPTRLARHGGALVPPFVWETLGESSKGHEHMNLRNSRFREDERPIDESCDCHTCKTLSRAYLHHLLKARELLALKALTSHNVHFMNRLLSNIRKAIAAGSLDEELKKWVA

SEQ ID NO: 56083 - protein, 405 aa, Holosporales bacterium
  misc_feature (1)..(405): tr|A0A355VZ02|A0A355VZ02_9PROT Queuine tRNA-ribosyltran sferase OS=Holosporales bacterium OX=2053559 GN=tgt PE= 3 SV=1
MQSPKISSLDYPGFSFDITFQSQSSRARLGVLNTPHGSVETPAFIFCATKAAIKGLSPHQMKACGTQFILSNTYHLMLSPGSKLIQKMGGIHKFMGWDGPILTDSGGFQVFSLGHGSVASEIKGKRFGGRRKTLLEITEEGAEFKSYLDGKKHMLSPEKSIETQRELGTDFVVVFDECTPFHVEKSYTELSMHRSHRWEERSLAEFAKHHNGTQALYGIVQGGVYEDLRREATDFVNSQPFFAHAVGGSLGADKEQMYDVVSYTMSLLTPERPVHLLGIGGVRDIFEGVQQGIDTFDCVHPTRLARHGGALIRADQDIDTDKEHINLKNTRFKEDPEPIDATCECETCQTYSRSYLHYLLKAKELLAMQAITIHNVAYMNRLLQAVRGAIKSDTLLEERKKWVKG

SEQ ID NO: 56084 - protein, 374 aa, Hormoscilla sp.
  misc_feature (1)..(374): tr|A0A533NGD3|A0A533NGD3_9CYAN Queuine tRNA-ribosyltran sferase OS=Hormoscilla sp. GUM007 OX=2480854 GN=tgt PE= 3 SV=1
MTNQFTFQSQAECSHTQARAGIFTTPHGIVETPRFMPVGTTATVKGVTSAQLLATGAQMVLANTYHLHIQPGEDLIAKAGGLHKFMDWNGPILTDSGGFQVFSLSELRTISEEGVTFRSPRDGRMINLTPERSIQIQNKLGADVIMAFDECPPYPASREAVEAATSRTRRWLERCLQTHKRPDQALFGIIQGGVYPDLRSAAAKSLVELDLPGYAIGGVSVGEPEALISQIVKVTAPLLPPHKPRYLMGIGTYREMAQAIASGVDLFDCVIPTRLARHGAVFVRGERWNIKNARFTEDFAPLDSECPCYTCQHFSRAYLNHLWRSRELLVYTLLSIHNLTELIRFTQRIRDAIIRDSFTREFSHLLTPVPENAV

SEQ ID NO: 56085 - protein, 374 aa, Hormoscilla sp.
  misc_feature (1)..(374): tr|A0A533NTR5|A0A533NTR5_9CYAN Queuine tRNA-ribosyltran sferase OS=Hormoscilla sp. GUM202 OX=2480853 GN=tgt PE= 3 SV=1
MTNQFTFQSQAECSHTQARAGIFTTPHGIVETPRFMPVGTTATVKGVTSAQLLATGAQMVLANTYHLHIQPGEDLIAKAGGLHKFMDWNGPILTDSGGFQVFSLSELRTISEEGVTFRSPRDGRIINLTPERSIQIQNKLGADVIMAFDECPPYPANREVVEAATSRTRRWLERCLQTHKRPDQALFGIIQGGVYPDLRSAAAKSLVELDLPGYAIGGVSVGEPEALIAQIVKVTAPLLPPHKPRYLMGIGTYREMAQAIASGVDLFDCVIPTRLARHGAVFVRGERWNIKNARFTEDFAPLDSECPCYTCQHFSRAYLNHLWRSRELLVYTLLSIHNLTELIRFTQRIRDAIIRDSFTREFSHLLTPVPENAV

SEQ ID NO: 56086 - protein, 409 aa, Hoyosella subflava
  misc_feature (1)..(409): tr|F6EF86|F6EF86_HOYSD Queuine tRNA-ribosyltransferase OS=Hoyosella subflava (strain DSM 45089 / JCM 17490 / N BRC 109087 / DQS3-9A1) OX=443218 GN=tgt PE=3 SV=1
MPDSSQYFTITTPLDGKLGRTGTLRTPHGEIRTPAFIPVGTKATVKAVLPETVRGLGAQAVLANAYHLYLQPGADIVDEAGGLGKFMNWSGPTFTDSGGFQVLSMGAGFKKVLAMEVSQAKPEDIRAHQRERLAHVDDEGVTFKSHIDGSKHRFTPEVSMRIQHQLGADIIFAFDELTTLVDTREYQESSVERTHAWAQRCLDEHEQQTVDRPHRPYQALFGVVQGAQYEDLRRKAARGLTELRSFDGRPFDGYGIGGALEKHQLGTIVQWVNEELPDETPKHMLGISEPDDLFVAIENGADTFDCVSPSRVARNGAIYLPTGRVNMDKARYKRDFNPIDDTCDCYTCANYTRAYLHHLYKSKELLGSTLATIHNERFIVRLVDRIRDSIDGGYFADLRSEVLGTYYGA

SEQ ID NO: 56087 - protein, 373 aa, Humitalea rosea
  misc_feature (1)..(373): tr|A0A2W7ITZ1|A0A2W7ITZ1_9PROT Queuine tRNA-ribosyltran sferase OS=Humitalea rosea OX=990373 GN=tgt PE=3 SV=1
MSALRWTAAGTDGGARAGVLRTAHGTVPTPVFMPVGTAGTVKAMTADSVRATGARMILGNTYHLMLRPGAERVARLGGLHRMADWHGPILTDSGGFQVMSLSGLRKMDADGVTFRSHIDGSAHRLTPERSIEIQHLLGADVTMCFDECTPFPATEAQTATSMRLSMAWAARCRAAFVPRDGYGLFGIVQGGVFNALRAESVAALTEIGFEGYAIGGLAVGEGQAEMYRVLEATVPLLPADRPRYLMGVGTPDDLIGAVARGIDMFDCVLPTRSGRTARAYTSRGVLNMRNARHAEDLSPLDPDCPCPACQKHSRAYIHHLIRADEILGPMLLTWHNIQYYQTLMGRLRAAILDGRFTEEAAAIRAGWQERAIA

SEQ ID NO: 56088 - protein, 376 aa, Hungateiclostridiaceae bacterium; identical to SEQ ID NO: 51238
  misc_feature (1)..(376): tr|A0A1C7GLY8|A0A1C7GLY8_9FIRM Queuine tRNA-ribosyltran sferase OS=Hungateiclostridiaceae bacterium KB18 OX=183 4198 GN=tgt PE=3 SV=1

SEQ ID NO: 56089 - protein, 372 aa, Hungateiclostridium clariflavum
  misc_feature (1)..(372): tr|G8LZ36|G8LZ36_HUNCD Queuine tRNA-ribosyltransferase OS=Hungateiclostridium clariflavum (strain DSM 19732 / NBRC 101661 / EBR45) OX=720554 GN=tgt PE=3 SV=1
MSAVRYELIKKCKQTGARLGRVHTPHGYFDTPAFMPVGTQATVKGMSPDELKAIDAQIILSNTYHLYMRPGHEIVKEAGGLHGFMNWDRPILTDSGGFQVFSLSDLRDIKEEGVTFKSHIDGSKHFFTPEMAIEVQNALGADIIMAFDECIPYPADFNYAKNSLERTTRWAKRCKDAHKNTDRQALFGIVQGGMYKELREQSAYELLELDFPGYAIGGLSVGEPAELMYEMLECTVPLLPEDKPRYLMGVGSPDYLIEGAIRGIDMFDCVLPTRIGRNGTVLTSRGRVIIRDAAYARDYSPLDPECDCYCCRNFTRAYIRHLIKAGEVLGIRLTTWHNLRFLLKLMEDVRKAIMEDRLGDFRNEFFSKFGYK

SEQ ID NO: 56090 - protein, 372 aa, Hungateiclostridium saccincola
  misc_feature (1)..(372): tr|A0A2K9E2Y9|A0A2K9E2Y9_9FIRM Queuine tRNA-ribosyltran sferase OS=Hungateiclostridium saccincola OX=1677857 GN =tgt PE=3 SV=1
MSAIRYELIKKCKQTGARLGRVYTPHGYFDTPAFMPVGTQATVKGMSPDELKSIEAGIILSNTYHLHIRPGEDIIKEAGGLHKFMNWDRPILTDSGGFQVFSLGDFRKIEEEGVTFKSHVDGSKKFLSPESAIKIQNKLGADIIMAFDECIPYPAEFHYVKKSVERTTRWAKRCIKAHENPETQALFGIVQGGMYKELRRQSAYELLELDFPGYAIGGLSVGEPAEEMYEMLECTVPLLPEDKPRYLMGVGSPDYLVEGAIRGIDMFDCVLPTRIGRNGTVLTSRGRMIIRDALYARDQSPIDPDCDCYACKNFTRSYIRHLIKAKEVLGIRLTTWHNLRFLLNLMKNVREAIKEDRLLDFRNEFFKNFGYN

SEQ ID NO: 56091 - protein, 374 aa, Hungateiclostridium sp.
  misc_feature (1)..(374): tr|A0A4V1K2C3|A0A4V1K2C3_9FIRM Queuine tRNA-ribosyltran sferase OS=Hungateiclostridium sp. N2K1 OX=2487273 GN=t gt PE=3 SV=1
MSAIRYELIKKCKQTGARLGRVYTPHGYFDTPAFMPVGTQATVKGMSPDEMKSIEAQIILSNTYHLHMRPGEDIVKEAGGLHGFMNWDRPILTDSGGFQVFSLSDLRDIKEEGVTFKSHIDGSKHFISPEMATKIQNDLGADIIMAFDECIPYPADYDYAKKSLERTTRWAKRCKDAHQNPEKQALFGIVQGGMYKELREQSAYELLELDFPGYAIGGLSVGEPAEEMYSMLDVTVPLLPADKPRYLMGVGSPDYLIEGAIRGVDMFDCVLPTRIGRNGTVMTSRGRMIIRDAVYARDYTPMDPECDCYACRNFTRSYIRHLLKSGEVLGIRLTTWHNLRFLINLMKNVRQAIMEDRLLDFRNEFFNNFGYKKI

SEQ ID NO: 56092 - protein, 330 aa, Hungateiclostridium straminisolvens
  misc_feature (1)..(330): tr|W4V7M1|W4V7M1_9FIRM Queuine tRNA-ribosyltransferase OS=Hungateiclostridium straminisolvens JCM 21531 OX=129 4263 GN=tgt PE=3 SV=1
MSPDEMKEIEAQIILSNTYHLHMRPGEDIVKEAGGLHGFMNWDRPILTDSGGFQVFSLSDLRDIKEEGVTFKSHIDGSKHFISPEMAMKIQNDLGADIIMAFDECIPYPADYDYAKKSLERTTRWAKRCKEAHRNPEKQALFGIVQGGMYKDLRQQSAYELLELDFPGYAIGGLSVGEPAEEMYAMLDVTVPLLPWDKPRYLMGVGSPDYLIEGAIRGIDMFDCVLPTRIGRNGTVMTSRGRMIVRDAVYARDYTPMDPECDCYACRNFTRAYIRHLLKSGEVLGIRLTTWHNLRFLINLMKNVRQAIMEDRLLDFRDEFFNNFGYKKYK

SEQ ID NO: 56093 - protein, 374 aa, Hungateiclostridium thermocellum
  misc_feature (1)..(374): sp|A3DE13|TGT_HUNT2 Queuine tRNA-ribosyltransferase OS= Hungateiclostridium thermocellum (strain ATCC 27405 / D SM 1237 / JCM 9322 / NBRC 103400 / NCIMB 10682 / NRRL B -4536 / VPI 7372) OX=203119 GN=tgt PE=3 SV=1
MSAIRYELIKKCKQSGARLGRVYTPHGCFDTPAFMPVGTQATVKGMSPDEMKEIEAQIILSNTYHLHMRPGEDIVKEAGGLHGFMNWDRPILTDSGGFQVFSLSDLRDIKEEGVTFKSHIDGSKHFISPEMAIKIQNDLGADIIMAFDECIPYPADYDYAKKSLERTTRWAKRCKDAHRNPEKQALFGIVQGGMYKDLRQQSAYELLELDFPGYAIGGLSVGEPAEIMYEMLEVTVPLLPEDKPRYLMGVGSPDYLIEGATRGIDMFDCVLPTRIGRNGTVLTSKGRIIVRDAIYARDYTPIDPECDCYACRNFTRAYIRHLLKSGEVLGIRLTTWHNLRFLINLMKKVRQAIMEDRLLDFRDEFFSKFGYKKI

SEQ ID NO: 56094 - protein, 374 aa, Hungateiclostridium thermocellum
  misc_feature (1)..(374): tr|A0A4S5EYM2|A0A4S5EYM2_HUNTH Queuine tRNA-ribosyltran sferase OS=Hungateiclostridium thermocellum OX=1515 GN= tgt PE=3 SV=1
MSAIRYELIKKCKQSGARLGRVYTPHGCFDTPAFMPVGTQATVKGMSPDEMKEIEAQIILSNTYHLHMRPGEDIVKEAGGLHGFMNWDRPILTDSGGFQVFSLSDLRDIKEEGVTFKSHIDGSKHFISPEMAIKIQNDLGADIIMAFDECIPYPADYDYAKKSLERTTRWAKRCKDAHRNPEKQALFGIVQGGMYKDLRQQSAYELLELDFPGYAIGGLSVGEPAEIMYEMLEVTVPLLPEDKPRYLMGVGSPDYLIEGAIRGIDMFDCVLPTRIGRNGTVLTSKGRIIVRDAIYARDYTPIDPECDCYACRNFTRAYIRHLLKSGEVLGIRLTTWHNLRFLINLMKKVRQAIMEDRLLDFRDEFFSKFGYKKI

SEQ ID NO: 56095 - protein, 380 aa, Hungatella effluvii
  misc_feature (1)..(380): tr|A0A2V3XXU2|A0A2V3XXU2_9CLOT Queuine tRNA-ribosyltran sferase OS=Hungatella effluvii OX=1096246 GN=tgt PE=3 S V=1
MNYKIIAKDGRAKRAEVSTVHGTIQTPVFMNVGTVGAIKGAVSTDDLKEIRTQVELSNTYHLHVRTGDKLIREFGGLHKFMNWDRPILTDSGGFQVFSLTGLRKIKEEGVYFQSHIDGHRIFMGPEESMQIQSNLGSTIAMALDECPPHPATREYMQNSVDRTTRWLERCKVEMARLNSLPETINREQLLFGINQGGTYEDIRIEHAKTISAMDLDGYALGGLAVGESHEEMYRILDETVPYLPEHKPTYLMGVGTPANILEAVDRGVDFFDCVYPSRNGRHGHVYTNQGKRNLFNSKYELDHLPIEEGCGCPACRSYSRAYIRHLLKAKEMLGMRLCVLHNLYFYNTMMEEIRDAIEQHRYAEYKAEKLAGMTAVQAEK

SEQ ID NO: 56096 - protein, 380 aa, Hungatella hathewayi; identical to SEQ ID NO: 53990
  misc_feature (1)..(380): tr|A0A174W1K8|A0A174W1K8_9CLOT Queuine tRNA-ribosyltran sferase OS=Hungatella hathewayi OX=154046 GN=tgt PE=3 S V=1

SEQ ID NO: 56097 - protein, 380 aa, Hungatella hathewayi
  misc_feature (1)..(380): tr|A0A174DA59|A0A174DA59_9CLOT Queuine tRNA-ribosyltran sferase OS=Hungatella hathewayi OX=154046 GN=tgt PE=3 S V=1
MNYKIIAKDGRAKRAEVSTVHGTIQTPVFMNVGTVGAIKGAVSTDDLKEIRTQVELSNTYHLHVRTGDKLIREFGGLHKFMNWDRPILTDSGGFQVFSLTGLRKIKEEGVYFQSHIDGHRIFMGPEESMQIQSNLGSTIAMALDECPPHPATREYMQNSVDRTTRWLERCKVEMARLNSLPETINQEQLLFGINQGGTYEDIRIEHAKTISAMDLDGYALGGLAVGESHEEMYRILDETVPYLPEHKPTYLMGVGTPANILEAVDRGVDFFDCVYPSRNGRHGHVYTNQGKRNLFNSKYELDHLPIEEGCGCPACRSYSRAYIRHLLKAKEMLGMRLCVLHNLYFYNTMMEEIRDAIEQHRYAEYKAEKLAGMTAVQAEK

SEQ ID NO: 56098 - protein, 375 aa, Hwanghaeella grinnelliae
  misc_feature (1)..(375): tr|A0A437QL89|A0A437QL89_9PROT Queuine tRNA-ribosyltran sferase OS=Hwanghaeella grinnelliae OX=2500179 GN=tgt P E=3 SV=1
MSEFGFDLIATDGAARRGRVTTAHGQIDTPAFMPVGTAGTVKAMLPQSVAGTGAQIVLGNTYHLMLRPGAERVQKLGGLHKFMDWPGPILTDSGGFQVMSLAEIRKITEDGVRFRSHIDGSYHTLTPERSIEIQNLLDADITMAFDECTPYPATEKQARDSMELSMRWAKRSKEAFEDRPGYGLFGIVQGSTFENQRLESAQALQDIGFHGYAVGGLAVGEGQQLMFDTLDYTCPALPADKPHYLMGVGKPGDIVGAVARGIDMFDCVLPTRSGRNGQAWTRRGPVNVKNARHAEDPRPLDAECPCPACTQFSRAYLNHLVKAGEILAMMLVTWHNLTYYQQLMADLRSAIEGGTFEAYVAQFNALQAEGDIEPL

SEQ ID NO: 56099 - protein, 375 aa, Hwanghaeicola aestuarii
  misc_feature (1)..(375): tr|A0A2W7NM12|A0A2W7NM12_9RHOB Queuine tRNA-ribosyltran sferase OS=Hwanghaeicola aestuarii OX=568105 GN=tgt PE= 3 SV=1
MQRFAFNLHSRDGAARCGTITTSRGEIRTPAFMPVGTAGTVKAMLPGSVRETGADILLGNTYHLMLRPGAERIAGLGGLHRFMNWDRPILTDSGGFQVMSLADLRKLTETGVTFRSHIDGSKHELTPERSMEIQRLLGSDIVMAFDECPALPAEGSRVAESMRLSMRWAERSKAAFGDRPGHALFGIQQGGVTRELREESAEALRAIGFDGYAVGGLAVGEGQEAMFGVLDYACDMLPDDRPRYLMGVGKPDDIVGAVKRGIDMMDCVLPSRSGRTGQAFTRRGVVNLKNARHADDPRPLDAECTCPACRSYSRAYLHHVFRAGEMISGMLLTWHNLHYFQEIMAGMRKAIAEGAFAEWEADFHATRAAGDIEPA

SEQ ID NO: 56100 - protein, 359 aa, Hyalangium minutum
  misc_feature (1)..(359): tr|A0A085WF86|A0A085WF86_9DELT Queuine tRNA-ribosyltran sferase OS=Hyalangium minutum OX=394096 GN=tgt PE=3 SV= 1
MFMPVATHACFRHLGMEEVKETGARVLLANTYHLMLRPGAEVFRKFGGIHPFMQWDGAVLTDSGGFQIFSLPEDRLITEKGAHFRSFYDNSRQLLSPESSIAMQQAINSDIMMVLDVCIDSRTDEAGTREAMERTHRWALRSLAAKNSKDTGQALFAIVQGGVHPNLRDESAAFLTPHPFDGFAIGGLAVGESKEERETMTARVTASLPTDKPRYLMGVGTPMDLVEAVMRGVDMFDCIIPTKMAQQGYAYTFQGLVRITRMVYQLDDSPLDPACDCYVCKRYTRGYLQHLMRGKHHLGSRMLSIHNVRHFQLLMAKLRAAILQGSYAQVYRELRATISPPKDLRGDVSPDTVTLKDVG

SEQ ID NO: 56101 - protein, 392 aa, Hyalangium minutum
  misc_feature (1)..(392): tr|A0A085WFY2|A0A085WFY2_9DELT Queuine tRNA-ribosyltran sferase OS=Hyalangium minutum OX=394096 GN=tgt PE=3 SV= 1
MGEAQGKGDTRVAPGLVRFELLHEDPGSKARRGRVHTPHGPIETPIFMPVGTVGSVKGVGPDDLLTLDAQIILGNTYHLMLRPGEALVGEMGGLHRFISWNRPMLTDSGGFQVFSLSEKRKITEEGAAFQSHLDGSRHMLTPERSIEIQETLGADIIMAFDECPPAQSERSYMEQSMARTTRWLHRCAKAWSRERSSLFGIVQGGLHEDLRKAHAEQVCSVDLPGYALGGYSVGETPEAMHAGVAYSAPLLPRDKPRYLMGVGTPVDLVTCVEAGVDMFDCVLPTRCARNGLLFTSEGKVVIRNAVYAKDPRPVDPECSCYTCRTFSRAYLRHLFVAQEILAMRLNTLHNLHYFLGLMAQVRRAISEGRYAAFAQAFRERAAAQEAERTRAR

SEQ ID NO: 56102 - protein, 380 aa, Hydrobacter penzbergensis
  misc_feature (1)..(380): tr|A0A1H2RTY6|A0A1H2RTY6_9BACT Queuine tRNA-ribosyltran sferase OS=Hydrobacter penzbergensis OX=1235997 GN=tgt PE=3 SV=1
MAALTFELQASGIAGSEARAGKIRTDHGEIITPIFMPVGTVGSVKAVTKQQLKDDVQAQIILGNTYHLYLRPGTGVLEAAGGLHRFNGWDRPILTDSGGYQVFSLAGNRKIKEEGVWFQSHIDGSRHLFSPESVMDIQRSIGADIMMAFDECPPYPSEYHYAKKSMELTHRWLDRCIQRLAETPDKYGYTQNLFPIVQGSTYKDLRDASCDYIASKNAVGNAIGGLSVGEPEDMMYEFTESCASRLPFNKPRYLMGVGTPWNILECIHRGIDLFDCVMPTRNGRNGMLFTTQGVVNIRNKKWATDFSPIDPGLPNEMSQYYNKAYLRHLFVSEELLGLQLASLQNLSFYLWLVGEARKHILGGDFVSWKNEMVQIVKQRL

SEQ ID NO: 56103 - protein, 379 aa, Hydrocarboniclastica marina
  misc_feature (1)..(379): tr|A0A4P7XGM6|A0A4P7XGM6_9ALTE Queuine tRNA-ribosyltran sferase OS=Hydrocarboniclastica marina OX=2259620 GN=tg t PE=3 SV=1
MTRACFMQFERLASDGKARRGALHFPRGTVQTPAFMPVGTYGTVKGMLPRDIEATGAEIILGNTFHLMLRPGTEVISAHGDLHDFTQWQGPILTDSGGFQVFSLGDLRKITEEGVVFKSPIDGSLVELGPEKAMVVQRALGSDIVMIFDECTPYPATEKQAKASMEMSLRWAARCKAEHGDSPAALFGIIQGGMHENLRRQSLEGLTDIGFDGYAIGGLSVGEPKAEMIAVLDYLPEVMPEDKPRYLMGVGKPEDLVEGVRRGVDMFDCVLPTRNARNGYLFTSKGIVKIRNAVNRHSLDPVDEHCDCYTCSHFSRSYLHHLDRCGEMLGAQLNTIHNLHYYQNLMAGLRRAIEEGTLCDFVNAFYARRELPTPALRGA

SEQ ID NO: 56104 - protein, 414 aa, Hydrocarboniphaga daqingensis
  misc_feature (1)..(414): tr|A0A1M5JTN1|A0A1M5JTN1_9GAMM Queuine tRNA-ribosyltran sferase OS=Hydrocarboniphaga daqingensis OX=490188 GN=t gt PE=3 SV=1
MLQSDWLALARPTRYKPRPRYGALTRRLSNVEFQLLGTSAGARRGRMSFAGRGVVETPAFMPVGTYGSVKAISPEEVRDSGAQILLGNTFHLMLRPGDELMKRLGGLHRFMNWSGPILTDSGGFQVWSLSGLRKITEEGVKFASPVNGDRLFLSPERSIEVQHALGSDIIMQFDECTPHPATERQVRKSMELSARWAQRCKDAHADHPGALFGIVQGGMLPALRLESLQRLTQIDFPGYAIGGLSVGESEDERLQVLDAVGPHLPADRPHYLMGVGTPRDIVQAVGRGVDMFDCVMPTRNARNGHLFTSQGVIKIRNARFRDDDGPLDPNCDCYTCRNFSRAYLHHLDRCNEMLGPRLNTIHNLRYYQSVMTRLRSAIEADRYEAFAADFIASPEGAPSKVARVAVPASSPPEA

SEQ ID NO: 56105 - protein, 371 aa, Hydrocarboniphaga effusa
  misc_feature (1)..(371): tr|I8T4Q8|I8T4Q8_9GAMM Queuine tRNA-ribosyltransferase OS=Hydrocarboniphaga effusa AP103 OX=1172194 GN=tgt PE= 3 SV=1
METPIFMPVGTYGTVKSVSPEELRAVGSQIILGNTFHLMLRPGEQLIRDTFGSLHGFMNWTGPILTDSGGFQVWSLAELRKISEEGVKFASPLNGDRIFLTPERSIEVQHALGSDIIMQFDECTPYPATEKQARSSMELSARWAARCKTAHGDNKNALFGIVQGGMHAHLRLESLQHLAGIGFDGYAVGGLSVGEPEVERLQVLDAVGPQLPADCPHYLMGVGTPRDIVQAVGRGIDMFDCVMPTRNARNGHLFTSQGVIKIRNAAHRTDPAALDPNCDCYTCRNYSRAYLHHLDRCDEMLGPRLNTIHNLHYYLSLMQRIRKAIEDDRFETFAADFLASPEGRPAKSKLSVAVADAANGSTANTGDTGDN

SEQ ID NO: 56106 - protein, 368 aa, Hydrococcus rivularis
  misc_feature (1)..(368): tr|A0A1U7HKI9|A0A1U7HKI9_9CYAN Queuine tRNA-ribosyltran sferase OS=Hydrococcus rivularis NIES-593 OX=1921803 GN =tgt PE=3 SV=1
MGFSFECHASCRQTGARAGVWHTPHGCVETPRFMPVGTLATVKGLTPAQIQTTGAQMILANTYHLHLQPGEAIVEKAGGLHEFMGWQGPILTDSGGFQVFSLSELRQIDESGVTFCSPRDGRIIQLTPERSIQIQNALGADVIMAFDECPPAGAAYEEVVAATERTYRWLERCLNAHQCPQEQALFGIVQGGIYPDLRCAAAESLVKLDLPGYAIGGVSVGEEPELIHKIVRITAPLLPPEKPRYLMGVGTYKEMVVAIASGIDLFDCVIPTRFGRHGAALVRGERLNLKNAQFREDFTPLDPTCPCYTCQNFSRAYLNHLVKSREMLGYILLSLHNISELVRFTQQIREAILRDRFVEEFGGWLDDR

SEQ ID NO: 56107 - protein, 366 aa, Hydrocoleum sp.
  misc_feature (1)..(366): tr|A0A261KP46|A0A261KP46_9CYAN Queuine tRNA-ribosyltran sferase OS=Hydrocoleum sp. CS-953 OX=1671698 GN=tgt PE= 3 SV=1
MSQNFSFHSQAVCSYTKARAGVFSTPHGNIDTPRFMPVGTLANVKTLTPAQLEAAGAQMILANTYHLHLQPGESIVAGAGGLHKFMAWNGPILTDSGGFQVFSLGDIRTISEAGVKFRSPRDGSMIDLTPERSIQIQNELGADVIMAFDECPPYPASREEVELATNRTYRWLQRCMEAHQRQDQALFGIVQGGVYGDLRSRAAKQLVDLDLPGYAIGGVSVGEPGELIDNIVKVTTPLLPEDKPRYLMGVGTHREMVRAIAAGIDLFDCVIPTRLGRHGAALVKGERWNLKNAKFREDFRPLDESCPCYCCQNFSRAYLAHLVRAKEALGFTLLSLHNVTELIRFTQRIRDAILGDRFTTEFASWL

SEQ ID NO: 56108 - protein, 378 aa, Hydrogenibacillus schlegelii
  misc_feature (1)..(378): tr|A0A132N9M9|A0A132N9M9_HYDSH Queuine tRNA-ribosyltran sferase OS=Hydrogenibacillus schlegelii OX=1484 GN=tgt PE=3 SV=1
MAIHFELIYEDPKTGARLGRLSTPHGTIETPAFMPVGTLGTVKAMTPEELEALGAQIVLANTYHLWLRPGEDVVREAGGLHRFMHWSRPILTDSGGFQVFSLKERRRIEEEGVYFASHLDGRPLFLSPEKSIAIQNALGADIIMAFDECPPYPADRAYVEASLERTLRWAERSLRAHRRPKEQSLFGIIQGGTFPDLRRRAAKAVVSLDFPGYAVGGLSVGEPKPVMYAMLEETVPLLPRTKPRYLMGVGSPDALIEGVMRGIDLFDSVLPTRIARNGALMTSGGRLVIRNEAYARDFSPLDPACDCYACRHYTRAYVRHLLKSDEILGLRLTTIHNLAFLLRFMADVRRHIRAGTLLEFRDAFYEAYYGRMPAHRGF

SEQ ID NO: 56109 - protein, 378 aa, Hydrogenibacillus schlegelii
  misc_feature (1)..(378): tr|A0A2T5GBE2|A0A2T5GBE2_HYDSH Queuine tRNA-ribosyltran sferase OS=Hydrogenibacillus schlegelii OX=1484 GN=tgt PE=3 SV=1
MAIHFELIYEDPKTGARLGRLSTPHGTIETPAFMPVGTLGTVKAMTPEELEALGAQIVLANTYHLWLRPGEDVVREAGGLHRFMHWSRPILTDSGGFQVFSLKERRRIEEEGVYFASHLDGRPLFLSPEKSIAIQNALGADIIMAFDECPPYPADRAYVEASLERTLRWAERSLRAHRRPKEQSLFGIIQGGTFLDLRRRAAKAVVSLDFPGYAVGGLSVGEPKPVMYAMLEETVPLLPRTKPRYLMGVGSPDALIEGVMRGIDLFDSVLPTRIARNGALMTSGGRLVIRNEAYARDFSPLDPACDCYACRHYTRAYVRHLLKSDEILGLRLTTIHNLAFLLRFMADVRRHIRAGTLLEFRDAFYEAYYGRMPAHRGF

SEQ ID NO: 56110 - protein, 376 aa, Hydrogenimonas sp.
  misc_feature (1)..(376): tr|A0A3G9GV91|A0A3G9GV91_9PROT Queuine tRNA-ribosyltran sferase OS=Hydrogenimonas sp. OX=2231112 GN=tgt PE=3 SV =1
MIFNIDATDGSARACTLETAHSTIRTPVFMPVGTSAAVKALDTLDMREHLDTQIILANTYHLYLRPGDAVVDAMGKLHGFTGYDRSFLTDSGGFQAFSLSDISRADDSGILFRSHIDGSKHYFTPSKVLDIQYNLGSDIMMILDDLVALPATKERLAVSVDRTTRWAEESINYHRFKQKEGVGTGQNIFAIIQGGTDREFRKISAEALCAMDFDGFAIGGLSVGEANSLMYDTVEYTTPFMPAGKPRYLMGVGTPEDLVENIERGIDMFDCVMPTRNARNGTLFTTFGKVNIKSARYKKDSDPIDPACNCYTCRRYTRAYLCHLYRAKELTYFRLASLHNLHYYLTLVREAREAILRGRFARFKSDFYLKRGAVDS

SEQ ID NO: 56111 - protein, 374 aa, Hydrogenimonas sp.
  misc_feature (1)..(374): tr|A0A432QZ80|A0A432QZ80_9PROT Queuine tRNA-ribosyltran sferase OS=Hydrogenimonas sp. OX=2231112 GN=tgt PE=3 SV =1
MKFKLDAVDGNARACTIQTAHSTIQTPIFMPVGTSAAVKALDTHDMREILDTQIILANTYHLYLRPGDETIAKLGKLHGFTKYDRSFLTDSGGFQAFSLSDISKADEKGIMFRSHIDGSKHYFTPSKVLDIQYNLGSDIMMILDDLVALPATKKRLALSIDRTSRWAEESITYHRLKQSQGIGIDQNIFAIIQGGIDKEFRKISAESLCAMDFDGFAIGGLSVGEENQAMYDTVEYTTRFMPKDKPRYLMGVGTPEDLVENIERGVDMFDCVMPTRNARNGTLFTSFGKLNIKSARFKLDDTPIDPACDCYTCQRYSRAYLNHLYRAKELTYFRLASLHNLHYYLSLVKEAREAILKGQFQAFKREFYAKRESR

SEQ ID NO: 56112 - protein, 372 aa, Hydrogenimonas thermophila
  misc_feature (1)..(372): tr|A0A1I5NA92|A0A1I5NA92_9PROT Queuine tRNA-ribosyltran sferase OS=Hydrogenimonas thermophila OX=223786 GN=tgt PE=3 SV=1
MKFNLDAIDGNARACTIQTAHSTIQTPIFMPVGTSAVVKALDTNDMREILDTQIILANTYHLYLRPGDETVNKLGKLHGFTKYDRSFLTDSGGFQAFSLSDISKADEKGIMFRSHIDGSKHYFTPSKVLDIQYNLGSDIMMILDDLVALPATKERLTLSIDRTTRWAKESITYHREKQSDGIGVNQNIFAIIQGGIDKEFRKISAESLCAMDFDGFAIGGLSVGEENQAMYDTVEFTTPFMPKDKPRYLMGVGTPEDLVENIERGIDMFDCVMPTRNARNGTLFTTFGKINIKSARFKLDDTPIDPACDCYTCKRYSRAYLNHLYRAKELTYFRLASLHNLHYYLNLVKEAREAILKGEFQAFKREFYNRRN

SEQ ID NO: 56113 - protein, 369 aa, Hydrogenispora ethanolica
  misc_feature (1)..(369): tr|A0A4R1RH86|A0A4R1RH86_9FIRM Queuine tRNA-ribosyltran sferase OS=Hydrogenispora ethanolica OX=1082276 GN=tgt PE=3 SV=1
MGFSFTVKHASQENRGRIGLLETFHSRIETPVFMPVGTQGTVKAMTVDDLRAIGFQLILGNTYHLYLRPGLDIVSEAGGLRRFANWPESLLTDSGGFQVFSLAKLNKVTEQGVNFRSHIDGSSHLFTPERVMEIEMGLGADIAMAFDICLPYPSNFQVAKEAMERTHRWAERCLKAHHRPDQVVFGIVQGVTYRELREESARTLASLGFPGYGIGGLSVGEPKPLMYEMLDYTVPLLPEEKPRYLMGVGSPDALWEGVARGIDMFDCVFPTRIARNGTALTSLGRVIVRDARYARDFSPLDPNCQCKTCTEYTRAYLRHLFKAGEILGAHLVTYHNLYFLKQVMEEIKLGLRTGTFEERKAEFFARCAN

SEQ ID NO: 56114 - protein, 376 aa, Hydrogenivirga caldilitoris
  misc_feature (1)..(376): tr|A0A497XV02|A0A497XV02_9AQUI Queuine tRNA-ribosyltran sferase OS=Hydrogenivirga caldilitoris OX=246264 GN=tgt PE=3 SV=1
MFDFKVITRDGKARRGKLKTSHGEIDTPVFMPVGTQGTVKAMTHRLLEEIGAQIILGNTYHLYLRPGLDVITGAGGLHRFISWDKPILTDSGGYQVFSLAQGRFGDRKSKVRVSDEGVEFRDHLAGDLHFFTPERVVQIQEAFGSDIIMPLDECVEYPVDKEYARKALERTLSWLDRSIKAKSREEQSLFGIVQGAFFEDLRVEAAKRTVERELPGYAIGGLSVGEPKEIMYSMTELVCEYLPADKPRYLMGVGKPEDIINAVAAGVDMFDCVVPTRNARTGTLFTSLGIVNIRHEKFKKDFSPLDPNCDCYTCRNFTKAYLRHLFVAEEISSYVLNTIHNLRFYLRLMEDIRTAIEVGKFESYRRDILERVTRKL

SEQ ID NO: 56115 - protein, 376 aa, Hydrogenivirga sp.
  misc_feature (1)..(376): tr|A8UVF4|A8UVF4_9AQUI Queuine tRNA-ribosyltransferase OS=Hydrogenivirga sp. 128-5-R1-1 OX=392423 GN=tgt PE=3 SV=1
MFKFQLLKKDGKARRGRLTTPRGVIDTPVFMPVGTQGTVKAMTHRLLEEIGAQIMLGNTYHLYLRPGTEVISEAGSLHSFISWEKPILTDSGGYQVFSLAQGRFGDRKSKVKVTDEGVEFRDHLAGDLHFFTPERVIQIQEVFGSDIIMPLDECVEYPIDEDYARKALSRTLSWLDRSIRAKRREDQALFGIVQGAFSEKLRLEAVRMTVERELLGYAIGGLSVGEPKEIMYSMAELVCEHLPEDKPRYLMGVGKPEDIINAVAVGVDMFDCVVPTRNARTGTLYTSLGVVNIRHEKYKKDFSPLDPNCDCYTCRNFTKAYLRHLFVAEEISSYVLNTIHNLRFYLKMMEDMREAIEGGRFEDYKRETLENVTKKL

SEQ ID NO: 56116 - protein, 377 aa, Hydrogenoanaerobacterium saccharovorans
  misc_feature (1)..(377): tr|A0A1H7ZM74|A0A1H7ZM74_9FIRM Queuine tRNA-ribosyltran sferase OS=Hydrogenoanaerobacterium saccharovorans OX=4 74960 GN=tgt PE=3 SV=1
MAYKLLKNEGTARRGEFETVHGTVQTPAFMNVGTAAAIKGGISSYDLVDLKCQVELCNTYHLHLRPGDDLIYDMGGLHKFMGWKGPILTDSGGFQVFSLAKLRTIKEEGVYFSSHIDGKKIFMGPEQSMQIQSNLASTIAMAFDECIENPATREYTVSSIARTTRWLVRCKREMQRLNSLESTINRNQLLFGINQGSTFHDLRIQHMIDIAELDLDGYAIGGLAVGDTAEEMYGVIEAIEPYMPKNKIRYLMGVGTPVNIIEAVHRGVDLFDCVMPSRNARHGHLFTWSGIRNLINEKYARDDAPLDEQCDCPCCRNHSRAYLRHLFKANEMLAMRLAVQHNLYFYNTLMEKIRAALDDGTFEQFRAQMVPILGKRI

SEQ ID NO: 56117 - protein, 377 aa, Hydrogenobacter hydrogenophilus
  misc_feature (1)..(377): tr|A0A285P1U7|A0A285P1U7_9AQUI Queuine tRNA-ribosyltran sferase OS=Hydrogenobacter hydrogenophilus OX=35835 GN= tgt PE=3 SV=1
MFRFELICSDGKARRGRLITPHGIIDTPVFMPVGTQGTVKAMIHKLLEDINVQIILGNTYHLYLRPGPEVIKLAGGLHSFTGWHKPILTDSGGFQVFSLSKGRTKDNRSGVRVFEEGVEFKDHLSGSLHFFTPEKVIELQEILGSDFIMPLDECVEYPTTYAYAESALLRTLRWLDRSIKHKRREDQALFGIVQGSTFEDLRILSATATVERDLFGYAIGGLSVGEPKDIMYDITQVVCEYLPWNKPRYLMGVGMPEDIIECVARGIDMFDCVAPTRMARTGTLFTHSGKLNITNEAFKKDFSPIDEECSCYTCSNFTRAYLRHLYKSEEISAYILGTIHNLSFYQKLMQDIRIAIEEGRFESFRRSWMERYSSKLC

SEQ ID NO: 56118 - protein, 373 aa, Hydrogenobacter thermophilus
  misc_feature (1)..(373): tr|D3DIV0|D3DIV0_HYDTT Queuine tRNA-ribosyltransferase OS=Hydrogenobacter thermophilus (strain DSM 6534 / IAM 12695 / TK-6) OX=608538 GN=tgt PE=3 SV=1
MSKAFSFEILASEGNARVGRLITPHGVIETPVFMPVGTQGTVKAMIHRLLEEIGVQVILSNTYHLYLRPGVEVIELAGGLHSFIGWQKPILTDSGGFQVFSLSRRRTKDNRSGVRVLEEGVEFRDHLSGSLHFFTPEKVIDMQEVFGSDFIMPLDECVEYPTTYTYAQASVERTLRWLDRSIKHKKREDQALFGIVQGAFFEDLRRYSAMATVERDLFGYAIGGLSVGEPKEIMYAMVEVVCEYLPWQKPRYLMGVGMPEDLVECVARGIDMFDCVAPTRMARTGTLFTSQGKINITNEIYKKDFSPVDEECNCYTCRNFTKAYLRHLYKADEISAYILGTVHNLSFYHKLMKDIRTAIKEGRFESLRRSWTV

SEQ ID NO: 56119 - protein, 376 aa, Hydrogenobaculum sp.
  misc_feature (1)..(376): tr|M1RRE4|M1RRE4_9AQUI Queuine tRNA-ribosyltransferase OS=Hydrogenobaculum sp. HO OX=547144 GN=tgt PE=3 SV=1
MFKIEKTDGLARAGVLSTSHGDILTPVFMPVGTKGTVKAMTHRLLEELGTQIILGNTYHLYLRPGPELIEKFGGLHKFINWNKPILTDSGGFQVFSLSKKNSSNVKITDDGVYFKDHLQGDKHLFSPERVIEIQEIFGSDIMMPIDECISLPASYEYTKEALYRTIRWLERSKKAKKRKDQMLFGIVQGGEYKDLRKLSARLTVEFDMDGYSIGGLSVGESKDIMYSMTYYVVEELPFDKPHYLMGVGKPEDILEAISLGVDMFDCVIPTRNARTGLLYTSKGELVLRHERYKEDPRPVDEECECYTCKNFSRAYLRHLFMMEEISSYILNTIHNLHFFLNLTKKAREAIIQGRFLDFKNEMLEKFNMKNHSINAN

SEQ ID NO: 56120 - protein, 376 aa, Hydrogenobaculum sp.
  misc_feature (1)..(376): tr|A0A2N7PYG9|A0A2N7PYG9_9AQUI Queuine tRNA-ribosyltran sferase OS=Hydrogenobaculum sp. OX=2053560 GN=tgt PE=3 SV=1
MFKIEKTDGLARAGILSTAHGDILTPVFMPVGTKGTVKAMTHQILEELGTQIILGNTYHLYLRPGPELIEKFGGLHKFINWNKPILTDSGGFQVFSLSKKNSSNVKITDEGVYFKDHLQGDKHLFSPERVIEIQEIFGSDIIMPIDECISLPASYEYTKEALYRTIRWLERSKKAKKRKDQMLFGIVQGGEYKDLRKLSARLTVEFDMDGYSIGGLSVGESKDIMYSMTAYVVEELPFEKPHYLMGVGKPEDILEAISLGVDMFDCVIPTRNARTGLLYTSKGELVLRHERYKEDPRPIDEECECYTCKNFSRAYLRHLFMMEEISSYILNTIHNLHFFLNLTKKARESILQGRFLDFKSEMLEKFNIKNHSINVS

SEQ ID NO: 56121 - protein, 388 aa, Hydrogenophaga crassostreae
  misc_feature (1)..(388): tr|A0A167GMT0|A0A167GMT0_9BURK Queuine tRNA-ribosyltran sferase OS=Hydrogenophaga crassostreae OX=1763535 GN=tg t PE=3 SV=1
MLQFELLKTEGHARRGRLTLNHGVVETPIFMPVGTYGTVKGVMPQSLHDMGAQIILGNTFHLWMRPGQDVMKSFGGLHGFEQWHKPILTDSGGFQVWSLGAMRKITEQGVTFNSPVNGDKLFMSPEVSMQIQTGLNSDIVMQLDECTPYETSGHLTTETEARKSMEMSRRWAVRSKDEFARLENPNALFGIVQGGMFENLRQESLEALVEMDFPGYAVGGVSVGEPKEQMLQIMAHTPHRLPAHKPRYLMGVGTPEDLVQGVADGVDMFDCVMPTRNARNGTLFTRFGDLKLRNARHKTDHQPLDTTCTCYACAGKSGVSWDDGGRDGFSRAYLHHLDRCGEMLGPMLATVHNLHYYLNLMREVREALDAGGFEAFRGQFKSERARGV

SEQ ID NO: 56122 - protein, 390 aa, Hydrogenophaga intermedia
  misc_feature (1)..(390): tr|A0A1L1PTP4|A0A1L1PTP4_HYDIT Queuine tRNA-ribosyltran sferase OS=Hydrogenophaga intermedia OX=65786 GN=tgt PE =3 SV=1
MLKFEVLTTDPTSHARRATLTLNHGVVQTPIFMPVGTYGTVKGVTPASLEAMGAQIILGNTFHLWMRPGQDVMKSFGGLHAFERWNKPILTDSGGFQVWSLGEMRKITEQGVHFASPVNGDKLFMSPEVSMQIQTGLNSDIVMQLDECTPYETKGHITTEAEARQSMEMSLRWAQRSRAEFERLENPNALFGIVQGGMFEHLRQESLDALVAMDFPGYAVGGVSVGEPKDEMRRIMAHTPHRLPAHKPRYLMGVGTPEDLVEGVACGVDMFDCVMPTRNARNGTLFTRFGDLKIRNAKHKTDHRPLDETCTCYACAGSSGVSWADGGREGFSRAYLHHLDRCGEMLSPMLTSIHNLHYYLNLMKEVRAALDAGTFGEFRQRFHAERARGV

SEQ ID NO: 56123 - protein, 388 aa, Hydrogenophaga pseudoflava
  misc_feature (1)..(388): tr|A0A4P6WT76|A0A4P6WT76_HYDPS Queuine tRNA-ribosyltran sferase OS=Hydrogenophaga pseudoflava OX=47421 GN=tgt P E=3 SV=1
MLQFDVLKTEGHARRGRLTLNHGVVETPIFMPVGTYGTVKGVTPASLEGMGAQIILGNTFHLWMRPGQEVMKSFGGLHAFEKWHKPILTDSGGFQVWSLGAMRKITEEGVHFASPVNGDKLFMSPEVSMQIQTGLNSDIVMQLDECTPYETNGHLTTEAEARKSMEMSRRWAVRSKDEFARLENPNALFGIVQGGMFEHLRQESLEALVEMDFPGYAIGGVSVGEPKEQMLQIMAHTPHRLPANKPRYLMGVGTPEDLVEGVACGVDMFDCVMPTRNARNGTLFTRYGDLKIRNARHKADHQPLDATCTCYACAGKSGVSWADGGRDGFSRAYLHHLDRCGEMLGPMLSTIHNLHYYLNLMQEVRASLDAGRFEAFRQQFKSDRARGV

SEQ ID NO: 56124 - protein, 390 aa, Hydrogenophaga sp.
  misc_feature (1)..(390): tr|A0A1B3M323|A0A1B3M323_9BURK Queuine tRNA-ribosyltran sferase OS=Hydrogenophaga sp. RAC07 OX=1842537 GN=tgt P E=3 SV=1
MLQFEVLKTDPTSHARRAQLTLNHGVVQTPIFMPVGTYGTVKGVMPQSLHDMGAQIILGNTFHLWMRPGREVMNSFGGLHGFEQWHKPILTDSGGFQVWSLGAMRKITEEGVTFASPVNGDKLFMSPEVSMDIQTGLNSDIVMQLDECTPYETNGHLTTEAEARKSMEMSLRWARRSQDEFARLENPNALFGIVQGGMFEHLRQESLDALVDMDFPGYAIGGVSVGEPKEQMLQIMAHTPHRLPAHKPRYLMGVGTPEDLVQGVADGVDMFDCVMPTRNARNGTLFTRFGDLKIRNARHKTDHQPLDTTCTCHACAGKSGVSWDQGGRDGFSRAYLHHLDRCGEMLGPMLATIHNLHYYLNLMREVREALDAGTFGAFRAQFKADRARGV

SEQ ID NO: 56125 - protein, 390 aa, Hydrogenophaga sp.
  misc_feature (1)..(390): tr|A0A1Q3QEL6|A0A1Q3QEL6_9BURK Queuine tRNA-ribosyltran sferase OS=Hydrogenophaga sp. 70-12 OX=1895769 GN=tgt P E=3 SV=1
MLTFEVLKTDPNSHARRATLTLNHGVVQTPIFMPVGTYGTVKGVTPASLEAMGAQIILGNTFHLWMRPGQEVMKSFGGLHAFERWNKPILTDSGGFQVWSLGEMRKITEQGVHFASPVNGDKLFMSPEVSVQIQTGLNSDIVMQLDECTPYETKGHITTEAEARQSMEMSRRWAQRSKAEFQRLENPNALFGIVQGGMFEHLRQESLDALVEMDFPGYAIGGVSVGEPKEEMRRIMAHTPHRLPAHKPRYLMGVGTPEDLVEGVACGVDMFDCVMPTRNARNGTLFTRFGDLKIRNARHKADHRPLDETCTCYACAGSGGVSWAEGGREGFSRAYQHHLDRCGEMLGPMLASIHNLHYYLNLMKEVRAALEAGTFGEFRQRFHAERARGV

SEQ ID NO: 56126 - protein, 367 aa, Hydrogenophilaceae bacterium
  misc_feature (1)..(367): tr|A0A1J4Z7E4|A0A1J4Z7E4_9PROT Queuine tRNA-ribosyltran sferase OS=Hydrogenophilaceae bacterium CG1_02_62_390 O X=1805218 GN=tgt PE=3 SV=1
MKFDLLTTDGGARRGRLELAHGRVETPVFMPVGTVGAVKSVTPDEVKALGAQIVLGNTFHLWLRPGLEVIAAFGGLHGFMHWGGPILTDSGGFQVYSLTHLRKITEEGVRFASPLDGARLMLTPEQSMAIQRTLNSDIVMIFDECTPYPADWETAKASMELSLRWAARSKTAHAGNPNALFGIVQGGMFEDLRDNSVQELTRIGFDGYAIGGLSVGEPKADMARILTHTAAQLPTDRPRYLMGVGTPEDIVFAVGQGIDMFDCVMPTRNARHGVLFTRYGNLHIKNARHRTDPGPLDPSCDCYTCRNFSRAYLHHLFRVGESLAGRLNTIHNLHYYQTLMRELRLAIESGGFTDYVATFNNDRQAAC

SEQ ID NO: 56127 - protein, 367 aa, Hydrogenophilales bacterium
  misc_feature (1)..(367): tr|A0A2H0G3C8|A0A2H0G3C8_9PROT Queuine tRNA-ribosyltran sferase OS=Hydrogenophilales bacterium CG18_big_fil_WC_ 8_21_14_2_50_58_12 OX=1974036 GN=tgt PE=3 SV=1
MKFDLLATDGPARRGALTLAHGAVETPAFMPVGTYGAVKAMSPAELKEIGAHIVLGNTFHLWLRPGLEVIEAHGGLHRFMGWDGPILTDSGGFQVFSLGELRKITEEGVKFQSPVNGDRCFLTPEESMRIQKVLNSDIVMIFDECTPHPTDLQQAGDSMRLSLRWAERSRRAHEGNSNALFGIVQGGMHESLRDESLAGLVNIGFDGYAIGGLSVGEPKEDMLRILDHVAPQMPKNKPRYLMGVGTPEDIVDAVSRGVDMFDCVMPTRNARNGWLFTRFGTVKIKNAQYRLDTRPLDEECGCYTCRNFTRAYLHHLHRIGEILGARLNTIHNLHYYQELMQGIRRAIEEGRFADFVQQFRQARAVGS

SEQ ID NO: 56128 - protein, 366 aa, Hydrogenophilales bacterium
  misc_feature (1)..(366): tr|A0A5C7EV61|A0A5C7EV61_9PROT Queuine tRNA-ribosyltran sferase OS=Hydrogenophilales bacterium SM250 OX=2602750 GN=tgt PE=3 SV=1
MRFELIARDGAARRGRLTLAHGTVDTPAFMPVGTYGAVKAMSPAELKGLGTQIVLGNTFHLWLRPGLEVIKAHGGLHRFIGWDGPILTDSGGFQVFSLGKLRSISEEGVAFRSPVNGDRCFLTPEEAMRIQRVLNADVAMVFDECTPYPADEAQTRASMELSLRWAERSKRAFEGSENALFGIVQGGMFEHLREASLKGLMDIGFDGYAIGGLSVGEPKEEMLRILDHTAAQLPPERPRYLMGVGTPADIVDAIARGIDLFDCVLPTRNARNGWAFTRQGVVKLRNSRYRTDTAPLDETCDCYTCHTFTRAYLHHLQRVNEILGARLNTLHNLHYYQCVMREAREAITQGRFAEYAATVKRRGAQS

SEQ ID NO: 56129 - protein, 404 aa, Hydrogenophilus thermoluteolus
  misc_feature (1)..(404): tr|A0A2Z6DVW2|A0A2Z6DVW2_HYDTE Queuine tRNA-ribosyltran sferase OS=Hydrogenophilus thermoluteolus OX=297 GN=tgt PE=3 SV=1
MPLQRVPTLPNAAQPQDLPDAPDATDAPTPPPRAAFTLLARSGAARRGRLRLRRGTVETPAFMPVGTYGTVKAMTPAMLEAIGAQIILGNTFHLWLRPGLEVIQRFQGLHRFIGWNRPILTDSGGFQVFSLGALRKISEEGVRFASPIDGSKRFLTPEGAIEIQTVLDSDIAMVFDECTPYPATFDEAAASMQRSLRWAQRCRTAFDQQGNPNALFGIVQGGMYEPLRDASLAGLLEIGFHGYAIGGLSVGEPKAEMVRILAHTAPQLPENQARYLMGVGTPEDLIVGVQHGIDLFDCVMPTRNARNGHLFTRYGDIKIKQARYRHDTEPLDPTCDCYTCRHFSRAYLHHLFRAGEILGSILNTIHNLRYYQNLMAELRTAIEHDTFAETAARLLRDRQEGNRA

SEQ ID NO: 56130 - protein, 377 aa, Hydrogenothermus sp.
  misc_feature (1)..(377): tr|A0A432RFC3|A0A432RFC3_9AQUI Queuine tRNA-ribosyltran sferase OS=Hydrogenothermus sp. OX=2231113 GN=tgt PE=3 SV=1
MFKFKLIKEDGNARLGKIYTPHGEIHTPVFMPVGTVGTVKAITKHHLLETKPQIILGNTYHLYLRPGVEVLKHFGGLHNFMNWDKPILTDSGGFQVFSLAKGKEKAGKHKAEVVLTDDGVKFRSHIDGSWHYFTPELVIEIQEIIGSDIMMPLDVCPPYPVSKTTALDAVKKTIDWLKRSKNAKKQNHQALFGIIQGSTYKDLRKESALMTVELDMDGYSIGGLSVGEPAEYMYEMTEVVVEYIPRRKPRYLMGVGTPENIIESVDRGVDMFDCVMPTRNARNGTLFTHRGRLNINAGKYKFSDESIDEECDCYTCKNFSRGYIRHLYNAGEITAMILGTIHNLRFYNKMMEDIRKAISEGRFSSFKKEFLEKLKSD
